United States Patent Application Publication US 2011/0183924 A1 - sequence listing, part 157

SEQ ID NO: 408397 - DNA, 4308 bp, Homo sapiens
  misc_feature (2544)..(2544): n is a, c, g, or t
  misc_feature (3165)..(3165): n is a, c, g, or t
  misc_feature (3339)..(3339): n is a, c, g, or t
  misc_feature (3756)..(3756): n is a, c, g, or t
cagacaggatattcactgctgtggcaaggcctgtagagagtttcgaagttaggaggactcaagacggtccctccctggacttttctgaaggggctcaaaagatgacacgcgccagagctggaaggcgtcgccaattggtccaacttttccctcctccctttttgcggatgagaaaaactgaggcccaggtttgggatttccagagcccgggatttcccggcaacgccgacaaccacattcccccggctattctgacccgccccggttccgggacgctccctgggagccgccgccgagggcctgctgggactcccggggaccccgccgtcggggcagcccccacgcccggcgccgcccgccggaacggcgccgctgttgcgcacttgcaggggagccggcgactgagggcgaggcagggagggagcaagcggggctgggagggctgctggcgcgggctcgccgcgctgtgtatggtctatcgcaggcagctgacctttgaggaggaaatcgctgctctccgctccttcctgtagtaacagccgccgctgccgccgccgccaggaaccccggccgggagcgagagccgcggggcgcagagccggcccggctgccggacggtgcggccccaccaggtgaacggccatggcgggctggatccaggcccagcagctgcagggagacgcgctgcgccagatgcaggtgctgtacggccagcacttccccatcgaggtccggcactacttggcccagtggattgagagccagccatgggatgccattgacttggacaatccccaggacagagcccaagccacccagctcctggagggcctggtgcaggagctgcagaagaaggcggagcaccaggtgggggaagatgggtttttactgaagatcaagctggggcactacgccacgcagctccagaaaacatatgaccgctgccccctggagctggtccgctgcatccggcacattctgtacaatgaacagaggctggtccgagaagccaacaattgcagctctccggctgggatcctggttgacgccatgtcccagaagcaccttcagatcaaccagacatttgaggagctgcgactggtcacgcaggacacagagaatgagctgaagaaactgcagcagactcaggagtacttcatcatccagtaccaggagagcctgaggatccaagctcagtttgcccagctggcccagctgagcccccaggagcgtctgagccgggagacggccctccagcagaagcaggtgtctctggaggcctggttgcagcgtgaggcacagacactgcagcagtaccgcgtggagctggccgagaagcaccagaagaccctgcagctgctgcggaagcagcagaccatcatcctggatgacgagctgatccagtggaagcggcggcagcagctggccgggaacggcgggccccccgagggcagcctggacgtgctacagtcctggtgtgagaagttggccgagatcatctggcagaaccggcagcagatccgcagggctgagcacctctgccagcagctgcccatccccggcccagtggaggagatgctggccgaggtcaacgccaccatcacggacattatctcagccctggtgaccagcacattcatcattgagaagcagcctcctcaggtcctgaagacccagaccaagtttgcagccaccgtacgcctgctggtgggcgggaagctgaacgtgcacatgaatcccccccaggtgaaggccaccatcatcagtgagcagcaggccaagtctctgcttaaaaatgagaacacccgcaacgagtgcagtggtgagatcctgaacaactgctgcgtgatggagtaccaccaagccacgggcaccctcagtgcccacttcaggaacatgtcactgaagaggatcaagcgtgctgaccggcggggtgcagagtccgtgacagaggagaagttcacagtcctgtttgagtctcagttcagtgttggcagcaatgagcttgtgttccaggtgaagactctgtccctacctgtggttgtcatcgtccacggcagccaggaccacaatgccacggctactgtgctgtgggacaatgcctttgctgagccgggcagggtgccatttgccgtgcctgacaaagtgctgtggccgcagctgtgtgaggcgctcaacatgaaattcaaggccgaagtgcagagcaaccggggcctgaccaaggagaacctcgtgttcctggcgcagaaactgttcaacaacagcagcagccacctggaggactacagtggcctgtccgtgtcctggtcccagttcaacagggagaacttgccgggctggaactacaccttctggcagtggtttgacggggtgatggaggtgttgaagaagcaccacaagccccactggaatgatggggccatcctaggttttgtgaataagcaacaggcccacgacctgctcatcaacaagcccgacgggaccttcttgttgcgctttagtgactcagaaatcgggggcatcaccatcgcctggaagtttgantccccggaacgcaacctgtggaacctgaaaccattcaccacgcgggatttctccatcaggtccctggctgaccggctgggggacctgagctatctcatctatgtgtttcctgaccgccccaaggatgaggtcttctccaagtactacactcctgtgctggctaaagctgttgatggatatgtgaaaccacagatcaagcaagtggtccctgagtttgtgaatgcatctgcagatgctgggggcagcagcgccacgtacatggaccaggccccctccccagctgtgtgcccccaggctccctataacatgtacccacagaaccctgaccatgtactcgatcaggatggagaattcgacctggatgagaccatggatgtggccaggcacgtggaggaactcttacgccgaccaatggacagtcttgactcccgcctctcgccccctgccggtcttttcacctctgccagaggctccctctcatgaatgtttgaatcccacgcttctctttggaaacaatatgcaatgtgaagcggtcgtgttgtgagtttagtaaggctgtgtacactgacacctttgcaggcatgcatgtgcttgtgtgtgtgtgtgtgtgtgtgtccttgngcatgagctacgcctgcctcccctgtgccagtcctgggatgtggctgcagcagcggtggccggcctcttttcagatcatggcatccaagagtgcgccgagtctgtctctgtcatggtagagaccgagcctctgtcactgcaggcactcaatgcagccagacctattcctcctgngcccctcatctgctcagcagctatttgaatgagatgattcagaaggggaggggagacaggtaacgtctgtaagctgaagtttcactccggagtgagaagctttgccctcctaagagagagagacagagagacagagagagagaaagagagagtgtgtgggtctatgtaaatgcatctgtcctcatgtgttgatgtaaccgattcatctctcagaagggaggctggggttcattttcgagtagtattttatactttagtgaacgtggactccagactctctgtgaaccctatgagagcgcgtctgggcccggccatgtccttagcacaggggggccgccggtttgagtgagggtttctgagctgctctgaattagtccttgcttggctgcttggccttgggcttcattcaagctctangatgctgttgcccacgtttcccgggatatatattctctcccctccgttgggccccagccttctttgcttgcctctctgtttgtaaccttgtcgacaaagaggtagaaaagattgggtctaggatatggtgggtggacaggggccccgggacttggagggttggtcctcttgcctcctggaaaaaacaaaaacaaaaaactgcagtgaaagacaagctgcaaatcagccatgtgctgcgtgcctgtggaatctggagtgaggggtaaaagctgatctggtttgactccgctggaggtggggcctggagcaggccttgcgctgttgcgtaactggctgtgttctggtgaggccttgctcccaaccccacacgctcctccctctgaggcgtgtaggactcgcagtcaggggcagctgaccatggaagattgagagcccaaggtttaaacttcttctctgaagggaggtggggatgagaagaggggtttttttgtactttgtacaaagaccacacatttgtgtaaacagtgttttggaataaaatatttttttcat

SEQ ID NO: 408398 - DNA, 970 bp, Homo sapiens
cagacaggatattcactgctgtggcaaggcctgtagagagtttcgaagttaggaggactcaagacggtccctccctggacttttctgaaggggctcaaaagatgacacgcgccagagctggaaggcgtcgccaattggtccaacttttccctcctccctttttgcggatgagaaaaactgaggcccaggtttgggatttccagagcccgggatttcccggcaacgccgacaaccacattcccccggctattctgacccgccccggttccgggacgctccctgggagccgccgccgagggcctgctgggactcccggggaccccgccgtcggggcagcccccacgcccggcgccgcccgccggaacggcgccgctgttgcgcacttgcaggggagccggcgactgagggcgaggcagggagggagcaagcggggctgggagggctgctggcgcgggctcgccgcgctgtgtatggtctatcgcaggcagctgacctttgaggaggaaatcgctgctctccgctccttcctgtagtaacagccgccgctgccgccgccgccaggaaccccggccgggagcgagagccgcggggcgcagagccggcccggctgccggacggtgcggccccaccaggtgaacggccatggcgggctggatccaggcccagcagctgcagggagacgcgctgcgccagatgcaggtgctgtacggccagcacttccccatcgaggtccggcactacttggcccagtggattgagagccagccatgggatgccattgacttggacaatccccaggacagagcccaagccacccagctcctggagggcctggtgcaggagctgcagaagaaggcggagcaccaggtgggggaagatgggtttttactgaagatcaagctggggcactacgccacgcagctccagaaaacatatgaccgctggcctacagacatgccgtggatcctct

SEQ ID NO: 408399 - DNA, 3803 bp, Homo sapiens
  misc_feature (2039)..(2039): n is a, c, g, or t
  misc_feature (2660)..(2660): n is a, c, g, or t
  misc_feature (2834)..(2834): n is a, c, g, or t
  misc_feature (3251)..(3251): n is a, c, g, or t
ggacgcgtgggtcgacccacgcgtccggtaacagccgccgctgccgccgccgccaggaaccccggccgggagcgagagccgcggggcgcagagccggcccggctgccggacggtgcggccccaccaggtgaacggccatggcgggctggatccaggcccagcagctgcagggagacgcgctgcgccagatgcaggtgctgtacggccagcacttccccatcgaggtccggcactacttggcccagtggattgagagccagccatgggatgccattgacttggacaatccccaggacagagcccaagccacccagctcctggagggcctggtgcaggagctgcagaagaaggcggagcaccaggtgggggaagatgggtttttactgaagatcaagctggggcactacgccacgcagctccagaaaacatatgaccgctgccccctggagctggtccgctgcatccggcacattctgtacaatgaacagaggctggtccgagaagccaacaattgcagctctccggctgggatcctggttgacgccatgtcccagaagcaccttcagatcaaccagacatttgaggagctgcgactggtcacgcaggacacagagaatgagctgaagaaactgcagcagactcaggagtacttcatcatccagtaccaggagagcctgaggatccaagctcagtttgcccagctggcccagctgagcccccaggagcgtctgagccgggagacggccctccagcagaagcaggtgtctctggaggcctggttgcagcgtgaggcacagacactgcagcagtaccgcgtggagctggccgagaagcaccagaagaccctgcagctgctgcggaagcagcagaccatcatcctggatgacgagctgatccagtggaagcggcggcagcagctggccgggaacggcgggccccccgagggcagcctggacgtgctacagtcctggtgtgagaagttggccgagatcatctggcagaaccggcagcagatccgcagggctgagcacctctgccagcagctgcccatccccggcccagtggaggagatgctggccgaggtcaacgccaccatcacggacattatctcagccctggtgaccagcacattcatcattgagaagcagcctcctcaggtcctgaagacccagaccaagtttgcagccaccgtacgcctgctggtgggcgggaagctgaacgtgcacatgaatcccccccaggtgaaggccaccatcatcagtgagcagcaggccaagtctctgcttaaaaatgagaacacccgcaacgagtgcagtggtgagatcctgaacaactgctgcgtgatggagtaccaccaagccacgggcaccctcagtgcccacttcaggaacatgtcactgaagaggatcaagcgtgctgaccggcggggtgcagagtccgtgacagaggagaagttcacagtcctgtttgagtctcagttcagtgttggcagcaatgagcttgtgttccaggtgaagactctgtccctacctgtggttgtcatcgtccacggcagccaggaccacaatgccacggctactgtgctgtgggacaatgcctttgctgagccgggcagggtgccatttgccgtgcctgacaaagtgctgtggccgcagctgtgtgaggcgctcaacatgaaattcaaggccgaagtgcagagcaaccggggcctgaccaaggagaacctcgtgttcctggcgcagaaactgttcaacaacagcagcagccacctggaggactacagtggcctgtccgtgtcctggtcccagttcaacagggagaacttgccgggctggaactacaccttctggcagtggtttgacggggtgatggaggtgttgaagaagcaccacaagccccactggaatgatggggccatcctaggttttgtgaataagcaacaggcccacgacctgctcatcaacaagcccgacgggaccttcttgttgcgctttagtgactcagaaatcgggggcatcaccatcgcctggaagtttgantccccggaacgcaacctgtggaacctgaaaccattcaccacgcgggatttctccatcaggtccctggctgaccggctgggggacctgagctatctcatctatgtgtttcctgaccgccccaaggatgaggtcttctccaagtactacactcctgtgctggctaaagctgttgatggatatgtgaaaccacagatcaagcaagtggtccctgagtttgtgaatgcatctgcagatgctgggggcagcagcgccacgtacatggaccaggccccctccccagctgtgtgcccccaggctccctataacatgtacccacagaaccctgaccatgtactcgatcaggatggagaattcgacctggatgagaccatggatgtggccaggcacgtggaggaactcttacgccgaccaatggacagtcttgactcccgcctctcgccccctgccggtcttttcacctctgccagaggctccctctcatgaatgtttgaatcccacgcttctctttggaaacaatatgcaatgtgaagcggtcgtgttgtgagtttagtaaggctgtgtacactgacacctttgcaggcatgcatgtgcttgtgtgtgtgtgtgtgtgtgtgtccttgngcatgagctacgcctgcctcccctgtgccagtcctgggatgtggctgcagcagcggtggccggcctcttttcagatcatggcatccaagagtgcgccgagtctgtctctgtcatggtagagaccgagcctctgtcactgcaggcactcaatgcagccagacctattcctcctgngcccctcatctgctcagcagctatttgaatgagatgattcagaaggggaggggagacaggtaacgtctgtaagctgaagtttcactccggagtgagaagctttgccctcctaagagagagagacagagagacagagagagagaaagagagagtgtgtgggtctatgtaaatgcatctgtcctcatgtgttgatgtaaccgattcatctctcagaagggaggctggggttcattttcgagtagtattttatactttagtgaacgtggactccagactctctgtgaaccctatgagagcgcgtctgggcccggccatgtccttagcacaggggggccgccggtttgagtgagggtttctgagctgctctgaattagtccttgcttggctgcttggccttgggcttcattcaagctctangatgctgttgcccacgtttcccgggatatatattctctcccctccgttgggccccagccttctttgcttgcctctctgtttgtaaccttgtcgacaaagaggtagaaaagattgggtctaggatatggtgggtggacaggggccccgggacttggagggttggtcctcttgcctcctggaaaaaacaaaaacaaaaaactgcagtgaaagacaagctgcaaatcagccatgtgctgcgtgcctgtggaatctggagtgaggggtaaaagctgatctggtttgactccgctggaggtggggcctggagcaggccttgcgctgttgcgtaactggctgtgttctggtgaggccttgctcccaaccccacacgctcctccctctgaggcgtgtaggactcgcagtcaggggcagctgaccatggaagattgagagcccaaggtttaaacttcttctctgaagggaggtggggatgagaagaggggtttttttgtactttgtacaaagaccacacatttgtgtaaacagtgttttggaataaaatatttttttcat

SEQ ID NO: 408400 - DNA, 2430 bp, Homo sapiens
aaactattactgtgctagtgtacgagtgcccttgtggtggttggttttaaaagtcggccgagggttagtcgtcgccgtctgaggtgttccctggctttgtctcgccgtcgttgccgccccgtccctgccttcgtgccccccgccttggcccctgcccagccgctctccctgtcctcctccccttaaccacccccacggtttctgccgtcggggcccgggggccgggcggatgatgccgtcggagagcggagctgagcgcagggaccgggcggctgctcaggtggggacggctgcggccacggcggtggccacggcagccccggcaggcggcggccccgacccggaggccttatcggccttccccggacggcacctgagtgggctgagctggccacaggtgaagcgactggacgctcttctgagcgagccgattcccattcacgggcgcggcaacttccccacgctgagcgtgcagccccggcagatcgtgcaggtggtccgcagcaccctggaggagcagggactacatgtgcacagtgtgcggctgcatggttcagctgccagccacgtgctgcaccctgagagtggcctgggctacaaggatctggacctggtgttccgggtggacctgcgcagtgaggcatccttccagctgaccaaggcagtggtgctggcctgcctactagacttcctgccggccggtgtgagccgggccaagatcacgccactgacactcaaggaggcatacgtgcagaagctggtgaaagtgtgcacagactcggaccgctggagcctcatctcactgtccaacaagagcggcaagaacgtggagctcaagtttgtggactcggtgagacgccagtttgaattcagcatagactccttccagatcatcctggactccctgttgctctttggccagtgctcgtccactcccatgtctgaggccttccacccaacggtcacaggcgaaagcctgtacggggacttcaccgaggccctggagcacctgcggcaccgtgtcatcgccacgcgcagtcccgaggagatccgaggtggtggcctcctcaagtactgccacctcctggtgcggggcttccggccccggcccagcaccgatgtgcgcgccctgcagcgctacatgtgctcccgcttcttcatcgactttccagacctggtggagcagcggcgcaccctagagcgctacctggaggcccacttcggtggggcagatgcagcccgccgttacgcctgcctggtgacactgcaccgggtggtcaacgagagcaccgtgtgcctcatgaaccacgagcgccgccagacgctggacctcattgccgcactggcgctgcaggcactggctgagcagggcccagctgccactgccgccctggcctggcgccctccaggcactgacggggttgtgccagccactgtcaattactacgtgacccccgtgcaacctctcctggctcacgcctatcccacctggctgccttgtaactgactcagaccctggccagaagggaagggactgggcctcacggggtggggtggggcctccaagagtgtgtggaggacatgaccagaggcgcagaatgtgccaggaggcccagcactgcagggttgggcctttgattgaacagaccagactttcccgagcacgaggcccctgtgggcttaatgccagcctggggctctcagcaggaggaccctttggttattgcatcacacttttggaccagcatgccggtggggtgcaggcgccatttgtcttggaagtcaatttccttcaggagacaaagcaagtttggggtggtagccttaatgcccagcaccttggattgattcccatggtctaagagggtctttttgactaaggccagcctgtggtgatcccagcagctttggagggcctgcagcccacacactgactgatacatggtatgttacagggacttgtcactttggatcaggctgggccactacagggcctgatgggccaacttgggtaatcactgggaggagggaaactgaggcccgaggcagatacctgggtttggggagggctgggtttagcccggttctctgaactacatacccccagctgtgaagccttcctcttgaggggttgaggtgggcagtatacaggagccaagcagcccagggtgggtcgcagcccaggccccttccagggtgccactcctttcccccttgtgttgcaaggagccctcctgcctgggagcttgttctttggaaggtgctgagcctgaatttgccacagtcaagtcaacgttcccaccccactggcttggttacagggctctcacatggggtaggggagccatactcccacccccttgcgtattcccctgggtttgttgatattttgcactcttaacacctgccaataaagacggtctacactga

SEQ ID NO: 408401 - DNA, 406 bp, Homo sapiens
agaaaggaagtgactaacccatatgcaaatggattagagcaggggtccctaacccctgggctgtggacctccacacagtaggaggcaagtggcagcagagcaagcattactgcctgagctccacctgctgtgagatcagcagcagcattagattctcataggagctcgaactcttcattttcatccctaaaccaccctccctaccccccaccccgtcggtggaaaaattgtcttccacgaaactggcctctggtgccaaaaaggttggagaacactggagtagaggaggaatagatggaggccagcttaggaagctattagagtaacctatgcatgactgctgagggtctaagctatattgtaaaagcaaaaggatagaaaatggataaaaagtgatagatatcag

SEQ ID NO: 408402 - DNA, 286 bp, Homo sapiens
cattttcctgggcagcctcggcgagagagagtcgtggaaggtgagttaagcctccggattatactctgccaagcagggactaaaaattcgtatccaacagaattgctaagacagctgaagactgcgattcacgccttcatcccttaaataatgacagctcacaggtattgatcgtgacctaagtaccaggccctgtccagagctttctaaacatgtgaactcccaaagtcagcatcacaaccctgagggcggtgctgcgattattcccgttgtacagaggaggaaa

SEQ ID NO: 408403 - DNA, 299 bp, Homo sapiens
attttctctctactttatgttccatatccttaatatttacttaattacaaaactccaggctctgaaaacataaaatttaaacaagatatagtaccttaaggaggaagacaacatgatcaaattatccactaaatgtcactagtcaataaataataaatatcaaggatctaaggaaaattaagctgtaaattatagcaattaaaaccacggaattaggaatccctaggttccaatcaaaagtgtaatgtgagatgttggccaaatcgtttaacatttctgcttccatattggttgacatt

SEQ ID NO: 408404 - DNA, 1676 bp, Homo sapiens
aaaggcctgggtgttgaatcggcacgaggcacggtccgtctgcagtcggcagcctcgccggcagctcgctcggcccccgcttggcccggcccgcaggtaggagccgccgagggacgcggcgcccggttcccggccccgcctgcgccgcgcgctccccgctcccgccgcccgcttcgagggttctctccccttgccaccatgagcgagtcatttgactgtgcaaaatgcaacgagtccctgtatggacgcaagtacatccagacagacagcggcccctactgtgtgccctgctatgacaatacctttgccaacacctgtgctgagtgccagcagcttatcgggcatgactcgagggagctgttctatgaagaccgccatttccacgagggctgcttccgctgctgccgctgccagcgctcactagccgatgaacccttcacctgccaggacagtgagctgctctgcaatgactgctactgcagtgcgttttcctcgcagtgctccgcttgtggggagactgtcatgcctgggtcccggaagctggaatatggaggccagacatggcatgagcactgcttcctgtgcagtggctgtgaacagccactgggctcccgttcttttgtgcccgacaagggtgctcactactgcgtgccctgctatgagaacaagtttgctcctcgctgcgcccgctgcagcaagacgctgacacagggtggagtgacataccgtgatcagccgtggcatcgagaatgtctggtctgtaccggatgccagacgcccctggcagggcagcagttcacctcccgggatgaagatccctactgtgtggcctgttttggagaactctttgcacctaagtgcagcagctgcaagcgccccatcgtaggactcggtggaggcaagtatgtgtcctttgaagaccgacactggcaccacaactgcttctcctgcgcccgctgctctacctccctggtgggccagggcttcgtaccggatggagaccaagtgctctgccagggctgtagccaggcagggccctaagccagggctcctggacccaggctttcccataccacgggcccaggactgtggctccttttctaaaccacctctgggactcagctccccccgccaaaaaaaatgggtctccttctgggctccaggattgtctccccactccagcatccccaaactggtactccctgacccaggcccccaatcctgggctcttacagagcctccatgagtcaagccccctccccacacctggactccagaattcaccctctcccctgcagtctgggttcccagactgagtcctctccccaaatcagggctctagacccgagccctccaaacctggactctgggacttaggcccccttaaatctagacttctctttataggtttcaggtctcctatgggtgcctgggaagtccttgaaagtggactgttctcaggcttgacctgccccaccccatccccgcggttgaggctgtgggggcagcagatcaggagcccactgataaggggccctagggtacagggtgctgcccagcaggtcgccaccgagtgtcttctcattttatttcagctccattttgcccatagatgggcagaggggtgagattggctcatcccccttccagattctgcaataaagcggtgtgaggaa

SEQ ID NO: 408405 - DNA, 1799 bp, Homo sapiens
  misc_feature (106)..(106): n is a, c, g, or t
gggaggagggggcgggccgatggcggcgaaaggaggtgggtgcggggtctggcccccgcggcgggctggggggccggggtgcggggtccgggcggggcgggcccgngctcacttcctcggggaggggttggggccgcgctcccactcgcccacacggtccgtctgcagtcggcagcctcgccggcagctcgctcggcccccgcttggcccggcccgcaggtaggagccgccgagggacgcggcgcccggttcccggccccgcctgcgccgcgcgctccccgctcccgccgcccgcttcgagggttctctccccttgccaccatgagcgagtcatttgactgtgcaaaatgcaacgagtccctgtatggacgcaagtacatccagacagacagcggcccctactgtgtgccctgctatgacaatacctttgccaacacctgtgctgagtgccagcagcttatcgggcatgactcgagggagctgttctatgaagaccgccatttccacgagggctgcttccgctgctgccgctgccagcgctcactagccgatgaacccttcacctgccaggacagtgagctgctctgcaatgactgctactgcagtgcgttttcctcgcagtgctccgcttgtggggagactgtcatgcctgggtcccggaagctggaatatggaggccagacatggcatgagcactgcttcctgtgcagtggctgtgaacagccactgggctcccgttcttttgtgcccgacaagggtgctcactactgcgtgccctgctatgagaacaagtttgctcctcgctgcgcccgctgcagcaagacgctgacacagggtggagtgacataccgtgatcagccgtggcatcgagaatgtctggtctgtaccggatgccagacgcccctggcagggcagcagttcacctcccgggatgaagatccctactgtgtggcctgttttggagaactctttgcacctaagtgcagcagctgcaagcgccccatcgtaggactcggtggaggcaagtatgtgtcctttgaagaccgacactggcaccacaactgcttctcctgcgcccgctgctctacctccctggtgggccagggcttcgtaccggatggagaccaagtgctctgccagggctgtagccaggcagggccctaagccagggctcctggacccaggctttcccataccacgggcccaggactgtggctccttttctaaaccacctctgggactcagctccccccgccaaaaaaaatgggtctccttctgggctccaggattgtctccccactccagcatccccaaactggtactccctgacccaggcccccaatcctgggctcttacagagcctccatgagtcaagccccctccccacacctggactccagaattcaccctctcccctgcagtctgggttcccagactgagtcctctccccaaatcagggctctagacccgagccctccaaacctggactctgggacttaggcccccttaaatctagacttctctttataggtttcaggtctcctatgggtgcctgggaagtccttgaaagtggactgttctcaggcttgacctgccccaccccatccccgcggttgaggctgtgggggcagcagatcaggagcccactgataaggggccctagggtacagggtgctgcccagcaggtcgccaccgagtgtcttctcattttatttcagctccattttgcccatagatgggcagaggggtgagattggctcatcccccttccagattctgcaataaagcggtgtgaggaa

SEQ ID NO: 408406 - DNA, 2129 bp, Homo sapiens
aaaggcctgggtgttgaatcggcacgaggcacggtccgtctgcagtcggcagcctcgccggcagctcgctcggcccccgcttggcccggcccgcaggtaggagccgccgagggacgcggcgcccggttcccggccccgcctgcgccgcgcgctccccgctcccgccgcccgcttcgagggttctctccccttgccaccatgagcgagtcatttgactgtgcaaaatgcaacgagtccctgtatggacgcaagtacatccagacagacagcggcccctactgtgtgccctgctatgacaatacctttgccaacacctgtgctgagtgccagcagcttatcgggcatgactcgagggagctgttctatgaagaccgccatttccacgagggctgcttccgctgctgccgctgccagcgctcactagccgatgaacccttcacctgccaggacagtgagctgctctgcaatgactgctactgcagtgcgttttcctcgcagtgctccgcttgtggggagactgtcatgcctgggtcccggaagctggaatatggaggccagacatggcatgagcactgcttcctgtgcagtggctgtgaacagccactgggctcccgttcttttgtgcccgacaagggtgctcactactgcgtgccctgctatgagaacaagtttgctcctcgctgcgcccgctgcagcaagacgctgacacagggtggagtgacataccgtgatcagccgtggcatcgagaatgtctggtctgtaccggatgccagacgcccctggcagggcagcagttcacctcccgggatgaagatccctactgtgtggcctgttttggagaactctttgcacctaagtgcagcagctgcaagcgccccatcgtaggactcggtggaggcaagtatgtgtcctttgaagaccgacactggcaccacaactgcttctcctgcgcccgctgctctacctccctggtgggccagggcttcgtaccggatggagaccaagtgctctgccagggctgtagccaggcagggccctaagccagggctcctggacccaggctttcccataccacgggcccaggactgtggctccttttctaaaccacctctgggactcagctccccccgccaaaaaaaatgggtctccttctgggctccaggattgtctccccactccagcatccccaaactggtactccctgacccaggcccccaatcctgggctcttacagagcctccatgagtcaagccccctccccacacctggactccagaattcaccctctcccctgcagtctgggttcccagactgagtcctctccccaaatcagggctctagacccgagccctccaaacctggactctgggacttaggcccccttaaatctagacttctctttataggtttcaggtctcctatgggtgcctgggaagtccttgaaagtggactgttctcaggcttgacctgccccaccccatccccgcggttgaggctgtgggggcagcagatcaggagcccactgataaggggccctagggtacagggtgctgcccagcaggtcgccaccgagtgtcttctcattttatttcagctccattttgcccatagatgggcagaggggtgagattggctcatcccccttccagattctgcaataaagcggtgtgaggaaaaaaaaaaaaaaaaaaaaaaaaaaaaggcaaagagacaaacaaaaccaagagccgatgatagaaacgaacacaagaacaagaccaaaaagaaagaaagacgcgaacacaacaagacaagtcccaccgagcagacgacgacgcacaaactgtacaactcaacacaaggccaacgaacaggaaagacaaggagagcaacaaccgacaagtagggaggaggccaaagcactaaatcagcagagagtaccgcgggcacccaacacaaagaatagacagatgtaggacagagaaggacgagacgaagaagagaagaagaaaggcagcacacgacgcgagagcagccagagagaagaacacaatccaagaagcacaaaaaccgcaacaaagaaaacaaacaaagggagaaagaggaaaaccgacaaagaagtgaggcaagaaacgcgaaagaacaaaaa

SEQ ID NO: 408407 - DNA, 1749 bp, Homo sapiens
  misc_feature (106)..(106): n is a, c, g, or t
gggaggagggggcgggccgatggcggcgaaaggaggtgggtgcggggtctggcccccgcggcgggctggggggccggggtgcggggtccgggcggggcgggcccgngctcacttcctcggggaggggttggggccgcgctcccactcgcccacacggtccgtctgcagtcggcagcctcgccggcagctcgctcggcccccgcttggcccggcccgcaggtaggagccgccgagggacgcggcgcccggttcccggccccgcctgcgccgcgcgctccccgctcccgccgcccgcttcgagggttctctccccttgccaccatgagcgagtcatttgactgtgcaaaatgcaacgagtccctgtatggacgcaagtacatccagacagacagcggcccctactgtgtgccctgctatgacaatacctttgccaacacctgtgctgagtgccagcagcttatcgggcatgactcgagggagctgttctatgaagaccgccatttccacgagggctgcttccgctgctgccctgctctgcaatgactgctactgcagtgcgttttcctcgcagtgctccgcttgtggggagactgtcatgcctgggtcccggaagctggaatatggaggccagacatggcatgagcactgcttcctgtgcagtggctgtgaacagccactgggctcccgttcttttgtgcccgacaagggtgctcactactgcgtgccctgctatgagaacaagtttgctcctcgctgcgcccgctgcagcaagacgctgacacagggtggagtgacataccgtgatcagccgtggcatcgagaatgtctggtctgtaccggatgccagacgcccctggcagggcagcagttcacctcccgggatgaagatccctactgtgtggcctgttttggagaactctttgcacctaagtgcagcagctgcaagcgccccatcgtaggactcggtggaggcaagtatgtgtcctttgaagaccgacactggcaccacaactgcttctcctgcgcccgctgctctacctccctggtgggccagggcttcgtaccggatggagaccaagtgctctgccagggctgtagccaggcagggccctaagccagggctcctggacccaggctttcccataccacgggcccaggactgtggctccttttctaaaccacctctgggactcagctccccccgccaaaaaaaatgggtctccttctgggctccaggattgtctccccactccagcatccccaaactggtactccctgacccaggcccccaatcctgggctcttacagagcctccatgagtcaagccccctccccacacctggactccagaattcaccctctcccctgcagtctgggttcccagactgagtcctctccccaaatcagggctctagacccgagccctccaaacctggactctgggacttaggcccccttaaatctagacttctctttataggtttcaggtctcctatgggtgcctgggaagtccttgaaagtggactgttctcaggcttgacctgccccaccccatccccgcggttgaggctgtgggggcagcagatcaggagcccactgataaggggccctagggtacagggtgctgcccagcaggtcgccaccgagtgtcttctcattttatttcagctccattttgcccatagatgggcagaggggtgagattggctcatcccccttccagattctgcaataaagcggtgtgaggaa

SEQ ID NO: 408408 - DNA, 1629 bp, Homo sapiens
  misc_feature (106)..(106): n is a, c, g, or t
gggaggagggggcgggccgatggcggcgaaaggaggtgggtgcggggtctggcccccgcggcgggctggggggccggggtgcggggtccgggcggggcgggcccgngctcacttcctcggggaggggttggggccgcgctcccactcgcccacacggtccgtctgcagtcggcagcctcgccggcagctcgctcggcccccgcttggcccggcccgcaggtaggagccgccgagggacgcggcgcccggttcccggccccgcctgcgccgcgcgctccccgctcccgccgcccgcttcgagggttctctccccttgccaccatgagcgagtcatttgactgtgcaaaatgcaacgagtccctgtatggacgcaagtacatccagacagacagcggcccctactgtgtgccctgctatgacaatacctttgccaacacctgtgctgagtgccagcagcttatcgggcatgactcgagggagctgttctatgaagaccgccatttccacgagggctgcttccgctgctgccgctgccagcgctcactagccgatgaacccttcacctgccaggacagtgagctgctctgcaatgactgctactgcagtgcgttttcctcgcagtgctccgcttgtggggagactgtcatgcctgacgctgacacagggtggagtgacataccgtgatcagccgtggcatcgagaatgtctggtctgtaccggatgccagacgcccctggcagggcagcagttcacctcccgggatgaagatccctactgtgtggcctgttttggagaactctttgcacctaagtgcagcagctgcaagcgccccatcgtaggactcggtggaggcaagtatgtgtcctttgaagaccgacactggcaccacaactgcttctcctgcgcccgctgctctacctccctggtgggccagggcttcgtaccggatggagaccaagtgctctgccagggctgtagccaggcagggccctaagccagggctcctggacccaggctttcccataccacgggcccaggactgtggctccttttctaaaccacctctgggactcagctccccccgccaaaaaaaatgggtctccttctgggctccaggattgtctccccactccagcatccccaaactggtactccctgacccaggcccccaatcctgggctcttacagagcctccatgagtcaagccccctccccacacctggactccagaattcaccctctcccctgcagtctgggttcccagactgagtcctctccccaaatcagggctctagacccgagccctccaaacctggactctgggacttaggcccccttaaatctagacttctctttataggtttcaggtctcctatgggtgcctgggaagtccttgaaagtggactgttctcaggcttgacctgccccaccccatccccgcggttgaggctgtgggggcagcagatcaggagcccactgataaggggccctagggtacagggtgctgcccagcaggtcgccaccgagtgtcttctcattttatttcagctccattttgcccatagatgggcagaggggtgagattggctcatcccccttccagattctgcaataaagcggtgtgaggaa

SEQ ID NO: 408409 - DNA, 1305 bp, Homo sapiens
  misc_feature (25)..(25): n is a, c, g, or t
ggttacaatcccaaggacaaggacnatggcgggccccctttaccttggttgtttggcccccgtgggcgttaatttgaacccaaaagttaaccccttcgttttgggcccaacacctgtgctgagtgccagcagcttatcgggcatgactcgagggagctgttctatgaagaccgccatttccacgagggctgcttccgctgctgccgctgccagcgctcactagccgatgaacccttcacctgccaggacagtgagctgctctgcaatgactgctactgcagtgcgttttcctcgcagtgctccgcttgtggggagactgtcatgcctgacgctgacacagggtggagtgacataccgtgatcagccgtggcatcgagaatgtctggtctgtaccggatgccagacgcccctggcagggcagcagttcacctcccgggatgaagatccctactgtgtggcctgttttggagaactctttgcacctaagtgcagcagctgcaagcgccccatcgtaggactcggtggaggcaagtatgtgtcctttgaagaccgacactggcaccacaactgcttctcctgcgcccgctgctctacctccctggtgggccagggcttcgtaccggatggagaccaagtgctctgccagggctgtagccaggcagggccctaagccagggctcctggacccaggctttcccataccacgggcccaggactgtggctccttttctaaaccacctctgggactcagctccccccgccaaaaaaaatgggtctccttctgggctccaggattgtctccccactccagcatccccaaactggtactccctgacccaggcccccaatcctgggctcttacagagcctccatgagtcaagccccctccccacacctggactccagaattcaccctctcccctgcagtctgggttcccagactgagtcctctccccaaatcagggctctagacccgagccctccaaacctggactctgggacttaggcccccttaaatctagacttctctttataggtttcaggtctcctatgggtgcctgggaagtccttgaaagtggactgttctcaggcttgacctgccccaccccatccccgcggttgaggctgtgggggcagcagatcaggagcccactgataaggggccctagggtacagggtgctgcccagcaggtcgccaccgagtgtcttctcattttatttcagctccattttgcccatagatgggcagaggggtgagattggctcatcccccttccagattctgcaataaagcggtgtgaggaa

SEQ ID NO: 408410 - DNA, 1285 bp, Homo sapiens
aaaggcctgggtgttgaatcggcacgaggcacggtccgtctgcagtcggcagcctcgccggcagctcgctcggcccccgcttggcccggcccgcaggtaggagccgccgagggacgcggcgcccggttcccggccccgcctgcgccgcgcgctccccgctcccgccgcccgcttcgagggttctctccccttgccaccatgagcgagtcatttgactgtgcaaaatgcaacgagtccctgtatggacgcaagtacatccagacagacagcggcccctactgtgtgccctgctatgacaatacctttgccaacacctgtgctgagtgccagcagcttatcgggcatgactcgagggagctgttctatgaagaccgccatttccacgagggctgcttccgctgctgccgctgccagcgctcactagccgatgaacccttcacctgccaggacagtgagctgctctgcaatgactgctactgcagtgcgttttcctcgcagtgctccgcttgtggggagactgtcatgcctgggtcccggaagctggaatatggaggccagacatggcatgagcactgcttcctgtgcagtggctgtgaacagccactgggctcccgttcttttgtgcccgacaagggtgctcactactgcgtgccctgctatgagaacaagtttgctcctcgctgcgcccgctgcagcaagacgctgacacagggtggagtgacataccgtgatcagccgtggcatcgagaatgtctggtctgtaccggatgccagacgcccctggcagggcagcagttcacctcccgggatgaagatccctactgtgtggcctgttttggagaactctttgcacctaagtgcagcagctgcaagcgccccatcgtaggactcggtggaggcaagtatgtgtcctttgaagaccgacactggcaccacaactgcttctcctgcgcccgctgctctacctccctggtgggccagggcttcgtaccggatggagaccaagtgctctgccagggctgtagccaggcagggccctaagccagggctcctggacccaggctttcccataccacgggcccaggactgtggctccttttctaaaccacctctgggactcagctccccccgccaaaaaaggatccgaattccctcccggtgggttcccaagggggcctcccaaagggtgacacggccaacggagggggggcacaaaaacaaagccacggcggagcgagggggcgggccccccccggggggggacacaacgaaggggggagtaaca

SEQ ID NO: 408411 - DNA, 1326 bp, Homo sapiens
  misc_feature (106)..(106): n is a, c, g, or t
gggaggagggggcgggccgatggcggcgaaaggaggtgggtgcggggtctggcccccgcggcgggctggggggccggggtgcggggtccgggcggggcgggcccgngctcacttcctcggggaggggttggggccgcgctcccactcgcccacacggtccgtctgcagtcggcagcctcgccggcagctcgctcggcccccgcttggcccggcccgcagggttctctccccttgccaccatgagcgagtcatttgactgtgcaaaatgcaacgagtccctgtatggacgcaagtacatccagacagacagcggcccctactgtgtgccctgctatgacaatacctttgccaacacctgtgctgagtgccagcagcttatcgggcatgactcgagggagctgttctatgaagaccgccatttccacgagggctgcttccgctgctgccgctgccagcgctcactagccgatgaacccttcacctgccaggacagtgagctgctctgcaatgactgctactgcagtgcgttttcctcgcagtgctccgcttgtggggagactgtcatgcctgggtcccggaagctggaatatggaggccagacatggcatgagcactgcttcctgtgcagtggctgtgaacagccactgggctcccgttcttttgtgcccgacaagggtgctcactactgcgtgccctgctatgagaacaagtttgctcctcgctgcgcccgctgcagcaagacgctgacacagggtggagtgacataccgtgatcagccgtggcatcgagaatgtctggtctgtaccggatgccagacgcccctggcagggcagcagttcacctcccgggatgaagatccctactgtgtggcctgttttggagaactctttgcacctaagtgcagcagctgcaagcgccccatcgtaggactcggtggaggcaagtatgtgtcctttgaagaccgacactggcaccacaactgcttctcctgcgcccgctgctctacctccctggtgggccagggcttcgtaccggatggagaccaagtgctctgccagggctgtagccaggcagggccctaagccagggctcctggacccaggctttcccataccacgggcccaggactgtggctccttttctaaaccacctctgggactcagctccccccgccaaaaaaggatccgaattccctcccggtgggttcccaagggggcctcccaaagggtgacacggccaacggagggggggcacaaaaacaaagccacggcggagcgagggggcgggccccccccggggggggacacaacgaaggggggagtaaca

SEQ ID NO: 408412 - DNA, 926 bp, Homo sapiens
ccgcttgaaggttgggagagcttgggttctctccccttgccaccatgagcgagtcatttgactgtgcaaaatgcaacgagtccctgtatggacgcaagtacatccagacagacagcggcccctactgtgtgccctgctatgacaatacctttgccaacacctgtgctgagtgccagcagcttatcgggcatgactcgagggagctgttctatgaagaccgccatttccacgagggctgcttccgctgctgccgctgccagcgctcactagccgatgaacccttcacctgccaggacagtgagctgctctgcaatgactgctactgcagtgcgttttcctcgcagtgctccgcttgtggggagactgtcatgcctggtatgtgttcaggggctcatcttgtgtgagaactggcatctgcgtagggtctttgcatgtgtctgtctgatacatggagacttggtctgtgtaaagacctgcatacacagcatgtttctggaaatttagtatatacgggatctgtttgcctggtatactcctgggggctactatgtacaggcagattgacacatgtgatacatacttgggggcttagcatgtgtgaatatctgcatgtttagtacaggtaggaactagaggtgtgctgagactgtcatgcttgttgcattgggtcttaatgtatgcagaagcagataaacagagggcttaacatgtgtggggacctgcatgcctaatagaaatgctgggactcagcacctatggagaatggtgtgccgaggagatgcgagggcttagcatgtaccgaacctgtcatgcccagggcattagaactttgtgtgggcagatacttacttgcctggtacatgtggggtcccatgtgagtgctaaaatcatcacatctgttatatgagggcttagctcttagtgag

SEQ ID NO: 408413 - DNA, 1717 bp, Homo sapiens
  misc_feature (106)..(106): n is a, c, g, or t
gggaggagggggcgggccgatggcggcgaaaggaggtgggtgcggggtctggcccccgcggcgggctggggggccggggtgcggggtccgggcggggcgggcccgngctcacttcctcggggaggggttggggccgcgctcccactcgcccacacggtccgtctgcagtcggcagcctcgccggcagctcgctcggcccccgcttggcccggcccgcagggttctctccccttgccaccatgagcgagtcatttgactgtgcaaaatgcaacgagtccctgtatggacgcaagtacatccagacagacagcggcccctactgtgtgccctgctatgacaatacctttgccaacacctgtgctgagtgccagcagcttatcgggcatgactcgagggagctgttctatgaagaccgccatttccacgagggctgcttccgctgctgccgctgccagcgctcactagccgatgaacccttcacctgccaggacagtgagctgctctgcaatgactgctactgcagtgcgttttcctcgcagtgctccgcttgtggggagactgtcatgcctgggtcccggaagctggaatatggaggccagacatggcatgagcactgcttcctgtgcagtggctgtgaacagccactgggctcccgttcttttgtgcccgacaagggtgctcactactgcgtgccctgctatgagaacaagtttgctcctcgctgcgcccgctgcagcaagacgctgacacagggtggagtgacataccgtgatcagccgtggcatcgagaatgtctggtctgtaccggatgccagacgcccctggcagggcagcagttcacctcccgggatgaagatccctactgtgtggcctgttttggagaactctttgcacctaagtgcagcagctgcaagcgccccatcgtaggactcggtggaggcaagtatgtgtcctttgaagaccgacactggcaccacaactgcttctcctgcgcccgctgctctacctccctggtgggccagggcttcgtaccggatggagaccaagtgctctgccagggctgtagccaggcagggccctaagccagggctcctggacccaggctttcccataccacgggcccaggactgtggctccttttctaaaccacctctgggactcagctccccccgccaaaaaaaatgggtctccttctgggctccaggattgtctccccactccagcatccccaaactggtactccctgacccaggcccccaatcctgggctcttacagagcctccatgagtcaagccccctccccacacctggactccagaattcaccctctcccctgcagtctgggttcccagactgagtcctctccccaaatcagggctctagacccgagccctccaaacctggactctgggacttaggcccccttaaatctagacttctctttataggtttcaggtctcctatgggtgcctgggaagtccttgaaagtggactgttctcaggcttgacctgccccaccccatccccgcggttgaggctgtgggggcagcagatcaggagcccactgataaggggccctagggtacagggtgctgcccagcaggtcgccaccgagtgtcttctcattttatttcagctccattttgcccatagatgggcagaggggtgagattggctcatcccccttccagattctgcaataaagcggtgtgaggaa

SEQ ID NO: 408414 - DNA, 1500 bp, Homo sapiens
aaaggcctgggtgttgaatcggcacgaggcacggtccgtctgcagtcggcagcctcgccggcagctcgctcggcccccgcttggcccggcccgcaggtaggagccgccgagggacgcggcgcccggttcccggccccgcctgcgccgcgcgctccccgctcccgccgcccgcttcgaggagctgttctatgaagaccgccatttccacgagggctgcttccgctgctgccgctgccagcgctcactagccgatgaacccttcacctgccaggacagtgagctgctctgcaatgactgctactgcagtgcgttttcctcgcagtgctccgcttgtggggagactgtcatgcctgggtcccggaagctggaatatggaggccagacatggcatgagcactgcttcctgtgcagtggctgtgaacagccactgggctcccgttcttttgtgcccgacaagggtgctcactactgcgtgccctgctatgagaacaagtttgctcctcgctgcgcccgctgcagcaagacgctgacacagggtggagtgacataccgtgatcagccgtggcatcgagaatgtctggtctgtaccggatgccagacgcccctggcagggcagcagttcacctcccgggatgaagatccctactgtgtggcctgttttggagaactctttgcacctaagtgcagcagctgcaagcgccccatcgtaggactcggtggaggcaagtatgtgtcctttgaagaccgacactggcaccacaactgcttctcctgcgcccgctgctctacctccctggtgggccagggcttcgtaccggatggagaccaagtgctctgccagggctgtagccaggcagggccctaagccagggctcctggacccaggctttcccataccacgggcccaggactgtggctccttttctaaaccacctctgggactcagctccccccgccaaaaaaaatgggtctccttctgggctccaggattgtctccccactccagcatccccaaactggtactccctgacccaggcccccaatcctgggctcttacagagcctccatgagtcaagccccctccccacacctggactccagaattcaccctctcccctgcagtctgggttcccagactgagtcctctccccaaatcagggctctagacccgagccctccaaacctggactctgggacttaggcccccttaaatctagacttctctttataggtttcaggtctcctatgggtgcctgggaagtccttgaaagtggactgttctcaggcttgacctgccccaccccatccccgcggttgaggctgtgggggcagcagatcaggagcccactgataaggggccctagggtacagggtgctgcccagcaggtcgccaccgagtgtcttctcattttatttcagctccattttgcccatagatgggcagaggggtgagattggctcatcccccttccagattctgcaataaagcggtgtgaggaa

SEQ ID NO: 408415 - DNA, 1269 bp, Homo sapiens
catgtgcacggacaccaccctgctcacgctgagagaggagtggagactcctggggaagttacagagggtggccctcaggagcatgggacacaacctctaaatgggacccctgttccccacagggtcccggaagctggaatatggaggccagacatggcatgagcactgcttcctgtgcagtggctgtgaacagccactgggctcccgttcttttgtgcccgacaagggtgctcactactgcgtgccctgctatgagaacaagtttgctcctcgctgcgcccgctgcagcaagacgctgacacagggtggagtgacataccgtgatcagccgtggcatcgagaatgtctggtctgtaccggatgccagacgcccctggcagggcagcagttcacctcccgggatgaagatccctactgtgtggcctgttttggagaactctttgcacctaagtgcagcagctgcaagcgccccatcgtaggactcggtggaggcaagtatgtgtcctttgaagaccgacactggcaccacaactgcttctcctgcgcccgctgctctacctccctggtgggccagggcttcgtaccggatggagaccaagtgctctgccagggctgtagccaggcagggccctaagccagggctcctggacccaggctttcccataccacgggcccaggactgtggctccttttctaaaccacctctgggactcagctccccccgccaaaaaaaatgggtctccttctgggctccaggattgtctccccactccagcatccccaaactggtactccctgacccaggcccccaatcctgggctcttacagagcctccatgagtcaagccccctccccacacctggactccagaattcaccctctcccctgcagtctgggttcccagactgagtcctctccccaaatcagggctctagacccgagccctccaaacctggactctgggacttaggcccccttaaatctagacttctctttataggtttcaggtctcctatgggtgcctgggaagtccttgaaagtggactgttctcaggcttgacctgccccaccccatccccgcggttgaggctgtgggggcagcagatcaggagcccactgataaggggccctagggtacagggtgctgcccagcaggtcgccaccgagtgtcttctcattttatttcagctccattttgcccatagatgggcagaggggtgagattggctcatcccccttccagattctgcaataaagcggtgtgaggaa

SEQ ID NO: 408416 - DNA, 1785 bp, Homo sapiens
aaaggcctgggtgttgaatcggcacgaggcacggtccgtctgcagtcggcagcctcgccggcagctcgctcggcccccgcttggcccggcccgcaggtaggagccgccgagggacgcggcgcccggttcccggccccgcctgcgccgcgcgctccccgctcccgccgcccgcttcgagggttctctccccttgccaccatgagcgagtcatttgactgtgcaaaatgcaacgagtccctgtatggacgcaagtacatccagacagacagcggcccctactgtgtgccctgctatgacaatacctttgccaacacctgtgctgagtgccagcagcttatcgggcatgactcgagggagctgttctatgaagaccgccatttccacgagggctgcttccgctgctgccgctgccagcgctcactagccgatgaacccttcacctgccaggacagtgagctgctctgcaatgactgctactgcagtgcgttttcctcgcagtgctccgcttgtggggagactgtcatgcctgggtcccggaagctggaatatggaggccagacatggcatgagcactgcttcctgtgcagtggctgtgaacagccactgggctcccgttcttttgtgcccgacaagggtgctcactactgcgtgccctgctatgagaacaagtttgctcctcgctgcgcccgctgcagcaagacgctgacacagggtggagtgacataccgtgatcagccgtggcatcgagaatgtctggtctgtaccggatgccagcgctcactagccgatgaacccttcacctgccaggacagtgagctgctctgcaatgactgctactgcagtgcgttttcctcgcagtgctccgcttgtggggagactgtcatgcctgggtcccggaagctggaatatggaggccagacatggcatgagcactgcttcctgttttggagaactctttgcacctaagtgcagcagctgcaagcgccccatcgtaggactcggtggaggcaagtatgtgtcctttgaagaccgacactggcaccacaactgcttctcctgcgcccgctgctctacctccctggtgggccagggcttcgtaccggatggagaccaagtgctctgccagggctgtagccaggcagggccctaagccagggctcctggacccaggctttcccataccacgggcccaggactgtggctccttttctaaaccacctctgggactcagctccccccgccaaaaaaaatgggtctccttctgggctccaggattgtctccccactccagcatccccaaactggtactccctgacccaggcccccaatcctgggctcttacagagcctccatgagtcaagccccctccccacacctggactccagaattcaccctctcccctgcagtctgggttcccagactgagtcctctccccaaatcagggctctagacccgagccctccaaacctggactctgggacttaggcccccttaaatctagacttctctttataggtttcaggtctcctatgggtgcctgggaagtccttgaaagtggactgttctcaggcttgacctgccccaccccatccccgcggttgaggctgtgggggcagcagatcaggagcccactgataaggggccctagggtacagggtgctgcccagcaggtcgccaccgagtgtcttctcattttatttcagctccattttgcccatagatgggcagaggggtgagattggctcatcccccttccagattctgcaataaagcggtgtgaggaa

SEQ ID NO: 408417 - DNA, 1272 bp, Homo sapiens
aaaggcctgggtgttgaatcggcacgaggcacggtccgtctgcagtcggcagcctcgccggcagctcgctcggcccccgcttggcccggcccgcaggtaggagccgccgagggacgcggcgcccggttcccggccccgcctgcgccgcgcgctccccgctcccgccgcccgcttcgagggttctctccccttgccaccatgagcgagtcatttgactgtgcaaaatgcaacgagtccctgtatggacgcaagtacatccagacagacagcggcccctactgtgtgccctgctatgacaatacctttgccaacacctgtgctgagtgccagcagcttatcgggcatgactcgagggagctgttctatgaagaccgccatttccacgagggctgcttccgctgctgccgctgccagcgctcactagccgatgaacccttcacctgccaggacagtgagctgctctgcaatgactgctactgcagtgcgttttcctcgcagtgctccgcttgtggggagactgtcatgcctgggtcccggaagctggaatatggaggccagacatggcatgagcactgcttcctgtgcagtggctgtgaacagccactgggctcccgttcttttgtgcccgacaagggtgctcactactgcgtgccctgctatgagaacaagtttgctcctcgctgcgcccgctgcagcaagacgctgacacagggtggagtgacataccgtgatcagccgtggcatcgagaatgtctggtctgtaccggatgccagacgcccctggcagggcagcagttcacctcccgggatgaagatccctactgtgtggcctgttttggagaactctttgcacctaagtgcagcagctgcaagcgccccatcgtaggactcggtggaggcaagtatgtgtcctttgaagaccgacactggcaccacaactgcttctcctgcgcccgctgctctacctccctggtgggccagggcttcgtaccggatggagaccaagtgctctgccagggctgtagccaggcagggccctaagccagggctcctggacccaggctttcccataccacgggcccaggactgtggctccttttctaaaccacctctgggactcagctccccccgcctagggtacagggtgctgcccagcaggtcgccaccgagtgtcttctcattttatttcagctccattttgcccatagatgggcagaggggtgagattggctcatcccccttccagattctgcaataaagcggtgtgaggaa

SEQ ID NO: 408418 - DNA, 1177 bp, Homo sapiens
agtgcgtcatctagagagcgccggaagcggtccgagaatgaagagtgtgatctaccatgcattgtctcagaaagaggcgaatgactccgatgtccaggtcagttcttggcagggagtccaggagcaacagaggtgatggcaaagatggctcagtagcttctgagcccccagcactgattgagatgtcctttcccacatcatactcctcatttttctggcagacatctaaggctggatcaaagtctgtagttctcattacctgttcccacgtgccagcctccttttctgttgtgccaaagtcaagtttggtaaaatgaggctttccttaaccttttatcatttcccactgtgttggggacaccaggctgtgcccacgtggtgggcagcatcattcaaccttgtcactgtgccctctgcacttctgcagaaggtgtgcaatcacatatcataagtgaaatttacagattatatctgaatgcctcggcctgctttgtcagttttgcaaaagttcctcttgtggctcataatgagagcattaccttgaaagcaagattttgaaagaccagtatacctttattttgcttctccatgaaagatgagccactcaggtatttaagagaatcagatcattgtcctattatagtcacaatgacgagagtgaattaatttttagttagcatctacaggtgcaaagctgaagcagagttcccaccatcatactgtgagctccctcgaaggctatatgtaccctatcttcccatccccattgctctcccacagaaggaaggctgcgttactaatgacagatcagcatcagtctgtcagcctcagtcttagcatttagcacctggctagtgcaaaaagagctcaggaaacagcccagccaggagacaggccctcaggagagagaactgcccaggtctgtggcaggcatgagggcagtggcattgccaccaaatgaggaatccgttattggaactccaacctgagaggtagtgagcttggagggtttctttgtttgtttgtttgtttgtttgtttgtttgagaattgcacacaattacgacagtcatttttcccagaagtcctctctaagagcctgtgctcattcatggtaagttgacgccctgctctcagtgacacccttcagagagagcgagcctggggcctgagatgct

SEQ ID NO: 408419 - DNA, 584 bp, Homo sapiens
  misc_feature (12)..(12): n is a, c, g, or t
ttgagctcggtnccagttcgacggagactctcatcattgtcctattatagtcacaatgacgagagtgaattaatttttagttagcatctacaggtgcaaagctgaagcagagttcccaccatcatactgtgagctccctcgaaggctatatgtaccctatcttcccatccccattgctctcccacagaaggaaggctgcgttactaatgacagatcagcatcagtctgtcagcctcagtcttagcatttagcacctggctagtgcaaaaagagctcaggaaacagcccagccaggagacaggccctcaggagagagaactgcccaggtctgtggcaggcatgagggcagtggcattgccaccaaatgaggaatccgttattggaactccaacctgagaggtagtgagcttggagggtttctttgtttgtttgtttgtttgtttgtttgtttgagaattgcacacaattacgacagtcatttttcccagaagtcctctctaagagcctgtgctcattcatggtaagttgacgccctgctctcagtgacacccttcagagagagcgagcctggggcctgagatgct

SEQ ID NO: 408420 - DNA, 2579 bp, Homo sapiens
agtgcgtcatctagagagcgccggaagcggtccgagaatgaagagtgtgatctaccatgcattgtctcagaaagaggcgaatgactccgatgtccagccttcaggagcacagcgggccgaggccttcgtgagggccttcctgaagcgcagcacgccccgcatgagcccgcaggcccgcgaggaccagctgcagcgcaaggcggtggtcctggagtacttcacccgccacaagcgcaaggagaagaagaagaaagccaaaggcctctctgccaggcaaaggagggagctgcggctctttgacattaaaccagagcagcagagatacagccttttcctccctctccatgaactctggaaacagtacatcagggacctgtgcagtgggctcaagccagacacgcagccacagatgattcaggccaagctcttaaaggcagatcttcacggggctattatttcagtgacaaaatccaaatgcccctcttatgtgggtattacaggaatccttctacaggaaacaaagcacattttcaaaattatcaccaaagaagaccgcctgaaagttatccccaagctaaactgcgtgttcactgtggaaaccgatggctttatttcctacatttacgggagcaaattccagcttcggtcaagtgaacggtctgcgaagaagttcaaagcgaagggaacgattgacctgtgaattctttgccgtctaaggcagttgtttatgacagctgaaaactggacactccctaaatgtccacctttcagtgaagagatagttaagccaattccatttatagaccacctccagccagtgacgctccgagttgaggatgttgaacaacatgggaaggtcgcagcgtactaagtgaagaagtcagaggacagaggaatttctctttctaggagattttcattttgtgtgactcccatggggaggaacagactggcaggaagcacaccggggttaacactggttgacttgaataggattattcgatttttaaaaatacttttccatgttttctgagtgctctatgataaatcagttgcatctgtgataatacaatacatatgtggacataaacagggatcaaataaaggaggtattgctgcagtccagccaggttgaaagggaaggggggtccccaaaggtccattggatggcaggtgtctacagaggcacgcctttgggtggaactctgacccacctaaggtttactttgctatttcaggaaggttgaagaggattgaagggtgagttgctaagtgacttagggtttattcacttcaggaatcatagctggggtggaccccaggagcagagtactgcatgcagctgtgcccatgcatggttgccccagcgtagtgagatgggacctgccgcagcatgcccactcctgagctgccaggctgagccatggaggactgaaaggaggtcgcccggcatcacctcccgaggtgagacctgctgcaaaagccaagccagcagcattgacgccctttgatatcttcgccatttttgctgctgaaagacttggcttttcagtctgaccctggccctctgtgaccatgtgtctgtaaagccagtgggtcaggcccttccatgcagggccagaggaaaagcgggcccagggctgcagtgagagcggggcaggggaccagcctaccagatgggttggaaacatggctcagaaggaccaactaccccttccctttgaggagcaagtctctgccgatcagcaaggcaaggccaggagccctcctggcgaaaggcaggccacaaatctgttctcccccaggagaagtagcagtgccagggctttgcgtttctggtaacttccacccaaaccacaccagagagaaacaccgtagtggagaagggaagtgggagcgctgactgctgtgtgccaggagagtagaaaggcccaggtctgtgccaccacccctccccaaagctcagtgcacccagagtctcacagggaccaacacggtgcctcggtcctgcttccatccatgcaagtgtcctccgctcaccagggtgttctgaggcagctcaagtgctctcccccaagcagcacgcagtcaccgctgccagtgatgaacacacgcacgggctaggcacatggagcccaagcacactgccacctcggacacgggccccggcccagcgactgccttgtggtgtggccgtcctcatctgccacaggaagacagacttcgagggacctcttgcctaaggcctcgctgactcaagggtagaattgagatttggacctaataggctccagaactgtgctttgagctacagggtggctgcaggatgagacggatgcagttcaaagtgcaggatgtgctgcctttattacctgctttcccgctgagcaaatccctgtcttgagtgggaagtggcatctattcccccagccatctgaaaatgctgtgttcataaccaaataggtgctgtagcttcctagccatcccgctcttacccgcccctctgcaatgtaaaaggcgtccactgttgtgtaaatacacagttgctttccagaaaagttgtaggtaccaaaaaccat

SEQ ID NO: 408421 - DNA, 2073 bp, Homo sapiens
agtgcgtcatctagagagcgccggaagcggtccgagaatgaagagtgtgatctaccatgcattgtctcagaaagaggcgaatgactccgatgtccagccttcaggagcacagcgggccgaggccttcgtgagggccttcctgaagcgcagcacgccccgcatgagcccgcaggcccgcgaggaccagctgcagcgcaaggcggtggtcctggagtacttcacccgccacaagcgcaaggagaagaagaagaaagccaaaggcctctctgccaggcaaaggagggagctgcggctctttgacattaaaccagagcagcagagatacagccttttcctccctctccatgaactctggaaacagtacatcagggacctgtgcagtgggctcaagccagacacgcagccacagatgattcaggccaagctcttaaaggcagatcttcacggggctattatttcagtgacaaaatccaaatgcccctcttatgtgggtattacaggaatccttctacaggaaacaaagcacattttcaaaattatcaccaaagaagaccgcctgaaagttatccccaagctaaactgcgtgttcactgtggaaaccgatggctttatttcctacatttacgggagcaaattccagcttcggtcaagtgaacggtctgcgaagaagttcaaagcgaagggaacgattgacctgtgaattctttgccgtctaaggcagttgtttatgacagctgaaaactggacactccctaaatgtccacctttcagtgaagagatagttaagccaattccatttatagaccacctccagccagtgacgctccgagttgaggatgttgaacaacatgggaaggtcgcagcgtactaagtgaagaagtcagaggacagaggaatttctctttctaggagattttcattttgtgtgactcccatggggaggaacagactggcaggaagcacaccggggttaacactggttgacttgaataggattattcgatttttaaaaatacttttccatgttttctgagtgctctatgataaatcagttgcatctgtgataatacaatacatatgtggacataaacagggatcaaataaaggaggtattgctgcagtccagccaggttgaaagggaaggggggtccccaaaggtccattggatggcaggtgtctacagaggcacgcctttgggtggaactctgacccacctaaggtttactttgctatttcaggaaggttgaagaggattgaagggtgagttgctaagtgacttagggtttattcacttcaggaatcatagctggggtggaccccaggagcagagtactgcatgcagctgtgcccatgcatggttgccccagcgtagtgagatgggacctgccgcagcatgcccactcctgagctgccaggctgagccatggaggactgaaaggaggtcgcccggcatcacctcccgaggtgagacctgctgcaaaagccaagccagcagcattgacgccctttgatatcttcgccatttttgctgctgaaagacttggcttttcagtctgaccctggccctctgtgaccatgtgtctgtaaagccagtgggtcaggcccttccatgcagggccagaggaaaagcgggcccagggctgcagtgagagcggggcaggggaccagcgactgccttgtggtgtggccgtcctcatctgccacaggaagacagacttcgagggacctcttgcctaaggcctcgctgactcaagggtagaattgagatttggacctaataggctccagaactgtgctttgagctacagggtggctgcaggatgagacggatgcagttcaaagtgcaggatgtgctgcctttattacctgctttcccgctgagcaaatccctgtcttgagtgggaagtggcatctattcccccagccatctgaaaatgctgtgttcataaccaaataggtgctgtagcttcctagccatcccgctcttacccgcccctctgcaatgtaaaaggcgtccactgttgtgtaaatacacagttgctttccagaaaagttgtaggtaccaaaaaccat

SEQ ID NO: 408422 - DNA, 1626 bp, Homo sapiens
agtgcgtcatctagagagcgccggaagcggtccgagaatgaagagtgtgatctaccatgcattgtctcagaaagaggcgaatgactccgatgtccagccttcaggagcacagcgggccgaggccttcgtgagggccttcctgaagcgcagcacgccccgcatgagcccgcaggcccgcgaggaccagctgcagcgcaaggcggtggtcctggagtacttcacccgccacaagcgcaaggagaagaagaagaaagccaaaggcctctctgccaggcaaaggagggagctgcggctctttgacattaaaccagagcagcagagatacagccttttcctccctctccatgaactctggaaacagtacatcagggacctgtgcagtgggctcaagccagacacgcagccacagatgattcaggccaagctcttaaaggcagatcttcacggggctattatttcagtgacaaaatccaaatgcccctcttatgtgggtattacaggaatccttctacaggaaacaaagcacattttcaaaattatcaccaaagaagaccgcctgaaagttatccccaagctaaactgcgtgttcactgtggaaaccgatggctttatttcctacatttacgggagcaaattccagcttcggtcaagtgaacggtctgcgaagaagttcaaagcgaagggaacgattgacctgtgaattctttgccgtctaaggcagttgtttatgacagctgaaaactggacactccctaaatgtccacctttcagtgaagagatagttaagccaattccatttatagaccacctccagccagtgacgctccgagttgaggatgttgaacaacatgggaaggtcgcagcgtactaagtgaagaagtcagaggacagaggaatttctctttctaggagattttcattttgtgtgactcccatggggaggaacagactggcaggaagcacaccggggttaacactggttgacttgaataggattattcgatttttaaaaatacttttccatgttttctgagtgctctatgataaatcagttgcatctgtgataatacaatacatatgtggacataaacagggatcaaataaaggaggtattgaaaaaaaaaaacaaaaaaaaaaaaaaaacaaaaataacaacataacaaaacacaaaaaaaaaaaaaaaaaagggggggcgccccaaaaatatctcccccgggggggccccattttcggcaccccccatttttcagtcaaagcaagggagcccccacaaaaggagaggccggcataaataagcaagaacagaaggacgagcgcgcagcgcattaaaaacaaaaccctctgctgaagagcaaaaacactaactggattactgggtagatcaacttttgagaagaagacgacccacacacaattagtggagggcggggaataaataatatgtgtgagagcaaacaccctcacctccagcgacgatttaatagaccccccgaaagggggaaaacatacaaacgacctcacggtgagagataattggtgacacacaacacacagcaatattgattcttcgggcgagagacaagtctccccacagaacgttagtttgcgcaaaaatatatcaggggc

SEQ ID NO: 408423 - DNA, 1137 bp, Homo sapiens
agtgcgtcatctagagagcgccggaagcggtccgagaatgaagagtgtgatctaccatgcattgtctcagaaagaggcgaatgactccgatgtccagccttcaggagcacagcgggccgaggccttcgtgagggccttcctgaagcgcagcacgccccgcatgagcccgcaggcccgcgaggaccagctgcagcgcaaggcggtggtcctggagtacttcacccgccacaagcgcaaggagaagaagaagaaagccaaaggcctctctgccaggcaaaggagggagctgcggctctttgacattaaaccagagcagcagagatacagccttttcctccctctccatgaactctggaaacagtacatcagggacctgtgcagtgggctcaagccagacacgcagccacagatgattcaggccaagctcttaaaggcagatcttcacggggctattatttcagtgacaaaatccaaatgcccctcttatgtgggtattacaggaatccttctacaggaaacaaagcacattttcaaaattatcaccaaagaagaccgcctgaaagttatccccaagctaaactgcgtgttcactgtggaaaccgatggctttatttcctacatttacgggagcaaattccagcttcggtcaagtgaacggtctgcgaagaagttcaaagcgaagggaacgattgacctgtgaattctttgccgtctaaggcagttgtttatgacagctgaaaactggacactccctaaatgtccacctttcagtgaagagatagttaagccaattccatttatagaccacctccagccagtgacgctccgagttgaggatgttgaacaacatgggaaggtcgcagcgtactaagtgaagaagtcagaggacagaggaatttctctttctaggagattttcattttgtgtgactcccatggggaggaacagactggcaggaagcacaccggggttaacactggttgacttgaataggattattcgatttttaaaaatacttttccatgttttctgagtgctctatgataaatcagttgcatctgtgataatacaatacatatgtggacataaacagggatcaaataaaggaggtattgtatggggaggttattggcatgc

SEQ ID NO: 408424 - DNA, 2965 bp, Homo sapiens
tttgcttggagatcaacggccaaatagcctcccacgctccagaagacgcttaaagtatgccatgctgttcccggccccactcaggagatcagctgggcctcaggtggagaaggggctgctgcctcccagggtttgcctcccgggtggagcccaggttgggtttgagcttaaggtcctcatttctctaacctaaggctttgtggtaacggattccccacaggatatcaagactggagataatggcccagaagaacgctgttggggtccttgcccctgctccccgcttcttctccccaccacttgcttgcccaccttccagaccagcctgctgcctcacatgaggacctgcgtgacaaccagcaacccctgctttactgggggcttactaggttcaatttcacgtaacagaaaacctcaaaataacagtagcttcaacaagactcacgtttatttctctctcatgaaaagaagtccaggtggacaccgccctgggctggtgtggtcctaccaatgaggaaactgaggttagagaggtgtaggttcttggtctcggttatcagctcaattgctcatcgtcggatttgcacatagttcctaatgatcccaggttgcagttgttggcatcaagtcaagctctgtgctatttggacattgtcatcccaagctcatgttgtctaactttttccctgtttctgactttgctgcagatacagccttttcctccctctccatgaactctggaaacagtacatcagggacctgtgcagtgggctcaagccagacacgcagccacagatgattcaggccaagctcttaaaggcagatcttcacggggctattatttcagtgacaaaatccaaatgcccctcttatgtgggtattacaggaatccttctacaggaaacaaagcacattttcaaaattatcaccaaagaagaccgcctgaaagttatccccaagctaaactgcgtgttcactgtggaaaccgatggctttatttcctacatttacgggagcaaattccagcttcggtcaagtgaacggtctgcgaagaagttcaaagcgaagggaacgattgacctgtgaattctttgccgtctaaggcagttgtttatgacagctgaaaactggacactccctaaatgtccacctttcagtgaagagatagttaagccaattccatttatagaccacctccagccagtgacgctccgagttgaggatgttgaacaacatgggaaggtcgcagcgtactaagtgaagaagtcagaggacagaggaatttctctttctaggagattttcattttgtgtgactcccatggggaggaacagactggcaggaagcacaccggggttaacactggttgacttgaataggattattcgatttttaaaaatacttttccatgttttctgagtgctctatgataaatcagttgcatctgtgataatacaatacatatgtggacataaacagggatcaaataaaggaggtattgctgcagtccagccaggttgaaagggaaggggggtccccaaaggtccattggatggcaggtgtctacagaggcacgcctttgggtggaactctgacccacctaaggtttactttgctatttcaggaaggttgaagaggattgaagggtgagttgctaagtgacttagggtttattcacttcaggaatcatagctggggtggaccccaggagcagagtactgcatgcagctgtgcccatgcatggttgccccagcgtagtgagatgggacctgccgcagcatgcccactcctgagctgccaggctgagccatggaggactgaaaggaggtcgcccggcatcacctcccgaggtgagacctgctgcaaaagccaagccagcagcattgacgccctttgatatcttcgccatttttgctgctgaaagacttggcttttcagtctgaccctggccctctgtgaccatgtgtctgtaaagccagtgggtcaggcccttccatgcagggccagaggaaaagcgggcccagggctgcagtgagagcggggcaggggaccagcctaccagatgggttggaaacatggctcagaaggaccaactaccccttccctttgaggagcaagtctctgccgatcagcaaggcaaggccaggagccctcctggcgaaaggcaggccacaaatctgttctcccccaggagaagtagcagtgccagggctttgcgtttctggtaacttccacccaaaccacaccagagagaaacaccgtagtggagaagggaagtgggagcgctgactgctgtgtgccaggagagtagaaaggcccaggtctgtgccaccacccctccccaaagctcagtgcacccagagtctcacagggaccaacacggtgcctcggtcctgcttccatccatgcaagtgtcctccgctcaccagggtgttctgaggcagctcaagtgctctcccccaagcagcacgcagtcaccgctgccagtgatgaacacacgcacgggctaggcacatggagcccaagcacactgccacctcggacacgggccccggcccagcgactgccttgtggtgtggccgtcctcatctgccacaggaagacagacttcgagggacctcttgcctaaggcctcgctgactcaagggtagaattgagatttggacctaataggctccagaactgtgctttgagctacagggtggctgcaggatgagacggatgcagttcaaagtgcaggatgtgctgcctttattacctgctttcccgctgagcaaatccctgtcttgagtgggaagtggcatctattcccccagccatctgaaaatgctgtgttcataaccaaataggtgctgtagcttcctagccatcccgctcttacccgcccctctgcaatgtaaaaggcgtccactgttgtgtaaatacacagttgctttccagaaaagttgtaggtaccaaaaaccat

SEQ ID NO: 408425 - DNA, 2525 bp, Homo sapiens
agtgcgtcatctagagagcgccggaagcggtccgagaatgaagagtgtgatctaccatgcattgtctcagaaagaggcgaatgactccgatgtccagccttcaggagcacagcgggccgaggccttcgtgagggccttcctgaagcgcagcacgccccgcatgagcccgcaggcccgcgaggaccagctgcagcgcaaggcggtggtcctggagtacttcacccgccacaagcgcaaggagaagaagaagaaagccaaaggcctctctgccaggcaaaggagggagctgcggctctttgacattaaaccagagcagcagagatacagccttttcctccctctccatgaactctggaaacagtacatcagggacctgtgcagtgggctcaagccagacacgcagccacagatgattcaggccaagctcttaaaggcagatcttcacggggctattatttcagtgacaaaatccaaatgcccctcttatgtgggtattacaggaatccttctacaggaaacaaagcacattttcttcactgtggaaaccgatggctttatttcctacatttacgggagcaaattccagcttcggtcaagtgaacggtctgcgaagaagttcaaagcgaagggaacgattgacctgtgaattctttgccgtctaaggcagttgtttatgacagctgaaaactggacactccctaaatgtccacctttcagtgaagagatagttaagccaattccatttatagaccacctccagccagtgacgctccgagttgaggatgttgaacaacatgggaaggtcgcagcgtactaagtgaagaagtcagaggacagaggaatttctctttctaggagattttcattttgtgtgactcccatggggaggaacagactggcaggaagcacaccggggttaacactggttgacttgaataggattattcgatttttaaaaatacttttccatgttttctgagtgctctatgataaatcagttgcatctgtgataatacaatacatatgtggacataaacagggatcaaataaaggaggtattgctgcagtccagccaggttgaaagggaaggggggtccccaaaggtccattggatggcaggtgtctacagaggcacgcctttgggtggaactctgacccacctaaggtttactttgctatttcaggaaggttgaagaggattgaagggtgagttgctaagtgacttagggtttattcacttcaggaatcatagctggggtggaccccaggagcagagtactgcatgcagctgtgcccatgcatggttgccccagcgtagtgagatgggacctgccgcagcatgcccactcctgagctgccaggctgagccatggaggactgaaaggaggtcgcccggcatcacctcccgaggtgagacctgctgcaaaagccaagccagcagcattgacgccctttgatatcttcgccatttttgctgctgaaagacttggcttttcagtctgaccctggccctctgtgaccatgtgtctgtaaagccagtgggtcaggcccttccatgcagggccagaggaaaagcgggcccagggctgcagtgagagcggggcaggggaccagcctaccagatgggttggaaacatggctcagaaggaccaactaccccttccctttgaggagcaagtctctgccgatcagcaaggcaaggccaggagccctcctggcgaaaggcaggccacaaatctgttctcccccaggagaagtagcagtgccagggctttgcgtttctggtaacttccacccaaaccacaccagagagaaacaccgtagtggagaagggaagtgggagcgctgactgctgtgtgccaggagagtagaaaggcccaggtctgtgccaccacccctccccaaagctcagtgcacccagagtctcacagggaccaacacggtgcctcggtcctgcttccatccatgcaagtgtcctccgctcaccagggtgttctgaggcagctcaagtgctctcccccaagcagcacgcagtcaccgctgccagtgatgaacacacgcacgggctaggcacatggagcccaagcacactgccacctcggacacgggccccggcccagcgactgccttgtggtgtggccgtcctcatctgccacaggaagacagacttcgagggacctcttgcctaaggcctcgctgactcaagggtagaattgagatttggacctaataggctccagaactgtgctttgagctacagggtggctgcaggatgagacggatgcagttcaaagtgcaggatgtgctgcctttattacctgctttcccgctgagcaaatccctgtcttgagtgggaagtggcatctattcccccagccatctgaaaatgctgtgttcataaccaaataggtgctgtagcttcctagccatcccgctcttacccgcccctctgcaatgtaaaaggcgtccactgttgtgtaaatacacagttgctttccagaaaagttgtaggtaccaaaaaccat

SEQ ID NO: 408426 - DNA, 1115 bp, Homo sapiens
agtgcgtcatctagagagcgccggaagcggtccgagaatgaagagtgtgatctaccatgcattgtctcagaaagaggcgaatgactccgatgtccagccttcaggagcacagcgggccgaggccttcgtgagggccttcctgaagcgcagcacgccccgcatgagcccgcaggcccgcgaggaccagctgcagcgcaaggcggtggtcctggagtacttcacccgccacaagcgcaaggagaagaagaagaaagccaaaggcctctctgccaggcaaaggagggagctgcggctctttgacattaaaccagagcagcagagatacagccttttcctccctctccatgaactctggaaacagtacatcagggacctgtgcagtgggctcaagccagacacgcagccacagatgattcaggccaagctcttaaaggcagatcttcacggggctattatttcagtgacaaaatccaaatgcccctcttatgtgggtattacaggaatccttctacaggaaacaaagcacattttcaaaattatcaccaaagaagaccgcctgaaagttatccccaagctaaactgcgtgttcactgtggaaaccgatggctttatttcctacatttacgggagcaaattccagcttcggtcaagtgaacggtctgcgaagaagttcaaagcgaagggaacgattgacctgtgaattctttgccgtctaaggcagttgtttatgacagctgaaaactggacactccctaaatgtccacctttcagtgaagagatagttaagccaattccatttatagaccacctccagccagtgacgctccgagttgaggatgttgaacaacatgggaaggtcgcagcgtactaagtgaagaagtcagaggacagaggaatttctctttctaggagattttcattttgtgtgactcccatggggaggaacagactggcaggaagcacaccggggttaacactggttgacttgaataggattattcgatttttaaaaatacttttccatgttttctgagtgctctatgataaatcagttgcatctgtgataatacaatacatatgtggacataaacagggatcaaataaaggaggtattg

SEQ ID NO: 408427 - DNA, 1057 bp, Homo sapiens
agtgcgtcatctagagagcgccggaagcggtccgagaatgaagagtgtgatctaccatgcattgtctcagaaagaggcgaatgactccgatgtccagccttcaggagcacagcgggccgaggccttcgtgagggccttcctgaagcgcagcacgccccgcatgagcccgcaggcccgcgaggaccagctgcagcgcaaggcggtggtcctggagtacttcacccgccacaagcgcaaggagaagaagaagaaagccaaaggcctctctgccaggcaaaggagggagctgcggctctttgacattaaaccagagcagcagagatacagccttttcctccctctccatgaactctggaaacagtacatcagggacctgtgcagtgggctcaagccagacacgcagccacagatgattcaggccaagctcttaaaggcagatcttcacggggctattatttcagtgacaaaatccaaatgcccctcttatgtgggtattacaggaatccttctacaggaaacaaagcacattttcaaaattatcaccaaagaagaccgcctgaaagttatccccaagctaaactgcgtgttcactgtggaaaccgatggctttatttcctacatttacgggagcaaattccagcttcggtcaagtgaacggtctgcgaagaagttcaaagcgaagggaacgattgacctgtgaattctttgccgtctaaggcagttgtttatgacagctgaaaactggacactccctaaatgtccacctttcagtgaagagatagttaagccaattccatttatagaccacctccagccagtgacgctccgagttgaggatgttgaacaacatgggaaggtcgcagcgtactaagtgaagaagtcagaggacagaggaatttctctttctaggagattttcattttgtgtgactcccatggggaggaacagactggcaggaagcacaccggggttaacactggttgacttgaataggattattcgatttttaaaaatacttttccatgttttctgagtgctctatgataaatcagttgca

SEQ ID NO: 408428 - DNA, 2340 bp, Homo sapiens
cccacgcgtccgcggtccgagaatgaagagtgtgatctaccatgcattgtctcagaaagaggcgaatgactccgatgtccagatacagccttttcctccctctccatgaactctggaaacagtacatcagggacctgtgcagtgggctcaagccagacacgcagccacagatgattcaggccaagctcttaaaggcagatcttcacggggctattatttcagtgacaaaatccaaatgcccctcttatgtgggtattacaggaatccttctacaggaaacaaagcacattttcaaaattatcaccaaagaagaccgcctgaaagttatccccaagctaaactgcgtgttcactgtggaaaccgatggctttatttcctacatttacgggagcaaattccagcttcggtcaagtgaacggtctgcgaagaagttcaaagcgaagggaacgattgacctgtgaattctttgccgtctaaggcagttgtttatgacagctgaaaactggacactccctaaatgtccacctttcagtgaagagatagttaagccaattccatttatagaccacctccagccagtgacgctccgagttgaggatgttgaacaacatgggaaggtcgcagcgtactaagtgaagaagtcagaggacagaggaatttctctttctaggagattttcattttgtgtgactcccatggggaggaacagactggcaggaagcacaccggggttaacactggttgacttgaataggattattcgatttttaaaaatacttttccatgttttctgagtgctctatgataaatcagttgcatctgtgataatacaatacatatgtggacataaacagggatcaaataaaggaggtattgctgcagtccagccaggttgaaagggaaggggggtccccaaaggtccattggatggcaggtgtctacagaggcacgcctttgggtggaactctgacccacctaaggtttactttgctatttcaggaaggttgaagaggattgaagggtgagttgctaagtgacttagggtttattcacttcaggaatcatagctggggtggaccccaggagcagagtactgcatgcagctgtgcccatgcatggttgccccagcgtagtgagatgggacctgccgcagcatgcccactcctgagctgccaggctgagccatggaggactgaaaggaggtcgcccggcatcacctcccgaggtgagacctgctgcaaaagccaagccagcagcattgacgccctttgatatcttcgccatttttgctgctgaaagacttggcttttcagtctgaccctggccctctgtgaccatgtgtctgtaaagccagtgggtcaggcccttccatgcagggccagaggaaaagcgggcccagggctgcagtgagagcggggcaggggaccagcctaccagatgggttggaaacatggctcagaaggaccaactaccccttccctttgaggagcaagtctctgccgatcagcaaggcaaggccaggagccctcctggcgaaaggcaggccacaaatctgttctcccccaggagaagtagcagtgccagggctttgcgtttctggtaacttccacccaaaccacaccagagagaaacaccgtagtggagaagggaagtgggagcgctgactgctgtgtgccaggagagtagaaaggcccaggtctgtgccaccacccctccccaaagctcagtgcacccagagtctcacagggaccaacacggtgcctcggtcctgcttccatccatgcaagtgtcctccgctcaccagggtgttctgaggcagctcaagtgctctcccccaagcagcacgcagtcaccgctgccagtgatgaacacacgcacgggctaggcacatggagcccaagcacactgccacctcggacacgggccccggcccagcgactgccttgtggtgtggccgtcctcatctgccacaggaagacagacttcgagggacctcttgcctaaggcctcgctgactcaagggtagaattgagatttggacctaataggctccagaactgtgctttgagctacagggtggctgcaggatgagacggatgcagttcaaagtgcaggatgtgctgcctttattacctgctttcccgctgagcaaatccctgtcttgagtgggaagtggcatctattcccccagccatctgaaaatgctgtgttcataaccaaataggtgctgtagcttcctagccatcccgctcttacccgcccctctgcaatgtaaaaggcgtccactgttgtgtaaatacacagttgctttccagaaaagttgtaggtaccaaaaaccat

SEQ ID NO: 408429 - DNA, 531 bp, Homo sapiens
  misc_feature (22)..(22): n is a, c, g, or t
acgcggaccggcgcgtgaccgntcgagagcgcagaggtcggctgcgagaagacgacagaaggggagacagccctgagatcacctaaaaagctgctaccaagacagccacgaagatcctaccaaaatgaagcgcttcctcttcctcctactcaccatcagcctcctggttatggtacagatacaaactggactctcaggacaaaacgacaccagccaaaccagcagcccctcagcatccagcagcatgagcggaggcattttccttttcttcgtggccaatgccataatccacctcttctgcttcagttgaggtgacacgtctcagccttagccctgtgccccctgaaacagctgccaccatcactcgcaagagaatcccctccatctttgggaggggttgatgccagacatcaccaggttgtagaagttgacaggcagtgccatgggggcaacagccaaaataggggggtaatgatgtaggggccaagcagtgcccagctgggggtcaataaagttacccttgtacttgca

SEQ ID NO: 408430 - DNA, 646 bp, Homo sapiens
  misc_feature (540)..(541): n is a, c, g, or t
  misc_feature (545)..(546): n is a, c, g, or t
  misc_feature (556)..(556): n is a, c, g, or t
  misc_feature (562)..(564): n is a, c, g, or t
  misc_feature (567)..(567): n is a, c, g, or t
  misc_feature (572)..(572): n is a, c, g, or t
  misc_feature (578)..(578): n is a, c, g, or t
  misc_feature (580)..(580): n is a, c, g, or t
  misc_feature (585)..(585): n is a, c, g, or t
  misc_feature (591)..(591): n is a, c, g, or t
  misc_feature (615)..(615): n is a, c, g, or t
cccgcctcctctgcctcctggttcaaaagcagctaaaccaaaagaagcctccagacagcacagccctgagatcacctaaaaagctgctaccaagacagccacgaagatcctaccaaaatgaagcgcttcctcttcctcctactcaccatcagcctcctggttatggtacagatacaaactggactctcaggacaaaacgacaccagccaaaccagcagcccctcagcatccagcagcatgagcggaggcattttccttttcttcgtggccaatgccataatccacctcttctgcttcagttgaggtgacacgtctcagccttagccctgtgccccctgaaacagctgccaccatcactcgcaagagaatcccctccatctttgggaggggttgatgccagacatcaccaggttgtagaagttgacaggcagtgccatgggggcaacagccaaaataggggggtaatgatgtaggggccaagcagtgcccagctgggggtcaataaagttacccttgtacttgcaaaaaaaaaaaaacaannttanncttgcggccnaaattnnngcncactngccaantngcccntatagngaggatatacaataccattgccancggtttaacacgtgcataaatgggaaacccg

SEQ ID NO: 408431 - DNA, 813 bp, Homo sapiens
cagtatatatttcttagtaaatatcacttaagattaaatttttcagaaagaaaattatagcttttttcccaaaatatttttaagatttaatctttttgtagtatgctacagatttaattatattaactcttttttaagacattgaccatgacttaacattttgccttctaacaccttttaaatctatgtactttaatagttaagagaaaataagtttgcagatttttaataatctgtttgtaaaaggctatctctaagcctagtatgtgggtaattttacaggtgtgttttttgataactttaatataaaataaactcattttatttgtggcaaaaaaaaaaaaaaagacagccctgagatcacctaaaaagctgctaccaagacagccacgaagatcctaccaaaatgaagcgcttcctcttcctcctactcaccatcagcctcctggttatggtacagatacaaactggactctcaggacaaaacgacaccagccaaaccagcagcccctcagcatccagcagcatgagcggaggcattttccttttcttcgtggccaatgccataatccacctcttctgcttcagttgaggtgacacgtctcagccttagccctgtgccccctgaaacagctgccaccatcactcgcaagagaatcccctccatctttgggaggggttgatgccagacatcaccaggttgtagaagttgacaggcagtgccatgggggcaacagccaaaataggggggtaatgatgtaggggccaagcagtgcccagctgggggtcaataaagttacccttgtacttgca

SEQ ID NO: 408432 - DNA, 892 bp, Homo sapiens
  misc_feature (22)..(22): n is a, c, g, or t
acgcggaccggcgcgtgaccgntcgagagcgcagaggtcggctgcgagaagacgacagaaggggagacagccctgagatcacctaaaaagctgctaccaagacagccacgaagatcctaccaaaatgaagcgcttcctcttcctcctactcaccatcagcctcctggttatggtacagatacaaactggactctcaggacaaaacgacaccagccaaaccagcagcccctcagcatccagcagcatgagcggaggcattttccttttcttcgtggccaatgccataatccacctcttctgcttcagttgaggtgacacgtctcagccttagccctgtgccccctgaaacagctgccaccatcactcgcaagagaatcccctccatctttgggaggggttgatgccagacatcaccaggttgtagaagttgacaggcagtgccatgggggcaacagccaaaataggggggtaatgatgtaggggccaagcagtgcccagctgggggtcaataaagttacccttgtacttgcaaaaaaaaaaaaaaaacaaaaaaaaaaaaaaaaaaaaaaaaagaaaaaaaaaaaaaaaaaaaaaaaaaaaaaaaaaaggggggcgccccaaaaaaaaacacccccagggggcccccaaactaacaccgcgaaccccatagatgctctgggaacacaaggggggcccccccaatagaggtaacgcgatccaaaattaacaagacgccagaggccaccgaggagacccgaacgaatataaacacgagagcaggcaggcgagaacagggggagaccaacaagcgcgcggcaccgacgtatgaggaacaatgtaggagacaaagagaaaaaccaccaaaataagacgggggggagaagcaaacaag

SEQ ID NO: 408433 - DNA, 524 bp, Homo sapiens
cccgcctcctctgcctcctggttcaaaagcagctaaaccaaaagaagcctccagacagcacagccctgagatcacctaaaaagctgctaccaagacagccacgaagatcctaccaaaatgaagcgcttcctcttcctcctactcaccatcagcctcctggttatggtacagatacaaactggactctcaggacaaaacgacaccagccaaaccagcagcccctcagcatccagcagcatgagcggaggcattttccttttcttcgtggccaatgccataatccacctcttctgcttcagttgaggtgacacgtctcagccttagccctgtgccccctgaaacagctgccaccatcactcgcaagagaatcccctccatctttgggaggggttgatgccagacatcaccaggttgtagaagttgacaggcagtgccatgggggcaacagccaaaataggggggtaatgatgtaggggccaagcagtgcccagctgggggtcaataaagttacccttgtacttgca

SEQ ID NO: 408434 - DNA, 998 bp, Homo sapiens
  misc_feature (22)..(22): n is a, c, g, or t
  misc_feature (573)..(578): n is a, c, g, or t
  misc_feature (582)..(582): n is a, c, g, or t
  misc_feature (584)..(584): n is a, c, g, or t
  misc_feature (586)..(586): n is a, c, g, or t
  misc_feature (589)..(589): n is a, c, g, or t
  misc_feature (591)..(591): n is a, c, g, or t
  misc_feature (628)..(628): n is a, c, g, or t
  misc_feature (639)..(639): n is a, c, g, or t
  misc_feature (646)..(647): n is a, c, g, or t
  misc_feature (649)..(650): n is a, c, g, or t
  misc_feature (662)..(663): n is a, c, g, or t
  misc_feature (665)..(665): n is a, c, g, or t
  misc_feature (667)..(671): n is a, c, g, or t
  misc_feature (673)..(676): n is a, c, g, or t
  misc_feature (679)..(680): n is a, c, g, or t
  misc_feature (707)..(707): n is a, c, g, or t
  misc_feature (714)..(714): n is a, c, g, or t
  misc_feature (723)..(724): n is a, c, g, or t
  misc_feature (740)..(740): n is a, c, g, or t
  misc_feature (763)..(763): n is a, c, g, or t
  misc_feature (768)..(768): n is a, c, g, or t
  misc_feature (786)..(786): n is a, c, g, or t
  misc_feature (804)..(806): n is a, c, g, or t
  misc_feature (808)..(808): n is a, c, g, or t
  misc_feature (812)..(812): n is a, c, g, or t
  misc_feature (814)..(814): n is a, c, g, or t
  misc_feature (816)..(817): n is a, c, g, or t
  misc_feature (819)..(819): n is a, c, g, or t
  misc_feature (826)..(827): n is a, c, g, or t
  misc_feature (829)..(829): n is a, c, g, or t
  misc_feature (839)..(839): n is a, c, g, or t
  misc_feature (855)..(856): n is a, c, g, or t
  misc_feature (862)..(862): n is a, c, g, or t
  misc_feature (869)..(869): n is a, c, g, or t
  misc_feature (871)..(871): n is a, c, g, or t
  misc_feature (874)..(874): n is a, c, g, or t
  misc_feature (877)..(877): n is a, c, g, or t
  misc_feature (883)..(885): n is a, c, g, or t
  misc_feature (889)..(891): n is a, c, g, or t
  misc_feature (893)..(894): n is a, c, g, or t
  misc_feature (896)..(896): n is a, c, g, or t
  misc_feature (920)..(921): n is a, c, g, or t
  misc_feature (925)..(926): n is a, c, g, or t
  misc_feature (931)..(934): n is a, c, g, or t
  misc_feature (937)..(938): n is a, c, g, or t
  misc_feature (986)..(986): n is a, c, g, or t
acgcggaccggcgcgtgaccgntcgagagcgcagaggtcggctgcgagaagacgacagaaggggagacagccctgagatcacctaaaaagctgctaccaagacagccacgaagatcctaccaaaatgaagcgcttcctcttcctcctactcaccatcagcctcctggttatggtacagatacaaactggactctcaggacaaaacgacaccagccaaaccagcagcccctcagcatccagcagcatgagcggaggcattttccttttcttcgtggccaatgccataatccacctcttctgcttcagttgaggtgacacgtctcagccttagccctgtgccccctgaaacagctgccaccatcactcgcaagagaatcccctccatctttgggaggggttgatgccagacatcaccaggttgtagaagttgacaggcagtgccatgggggcaacagccaaaataggggggtaatgatgtaggggccaagcagtgcccagctgggggtcaataaagttacccttgtacttgcaaaaaaaaaaaaaaaacaaaaaaaaaaaaaaagcggaaaaaannnnnntaanananatntnttttttttttttttttttttttttttttttttttttnttttttttttnttttttnntnntttttttttggnngngnnnnntnnnnttnntttttttttttttttttgggggggggnttttttngggggggtnnttttttttttttttgnggggggggggggggggggggggnttttnggggttggggtgtggggntttttttttttttttgtnnntnggtntntnngnggttttnntntttttttttntggttttttttttttnnggggtnggttttntnggntanttggtnnnttgnnntnntnttttttggtttttttttttttttnngggnntttgnnnnttnntgttttttttttttttttttttgtttttttttttttgtgtgttttttngatttttttttt

SEQ ID NO: 408435 - DNA, 854 bp, Homo sapiens
cccgcctcctctgcctcctggttcaaaagcagctaaaccaaaagaagcctccagacagcacagccctgagatcacctaaaaagctgctaccaagacagccacgaagatcctaccaaaatgaagcgcttcctcttcctcctactcaccatcagcctcctggttatggtacagatacaaactggactctcaggacaaaacgacaccagccaaaccagcagcccctcagcatccagcagcatgagcggaggcattttccttttcttcgtggccaatgccataatccacctcttctgcttcagttgaggtgacacgtctcagccttagccctgtgccccctgaaacagctgccaccatcactcgcaagagaatcccctccatctttgggaggggttgatgccagacatcaccaggttgtagaagttgacaggcagtgccatgggggcaacagccaaaataggggggtaatgatgtaggggccaagcagtgcccagctgggggtcaataaagttacccttgtacttgcaaaaaaaaaaagaaaaaaaaaaaaaaaaaaaaaaaaaaaaaaaaaaggggggcgccccaaaaaaaaacacccccagggggcccccaaactaacaccgcgaaccccatagatgctctgggaacacaaggggggcccccccaatagaggtaacgcgatccaaaattaacaagacgccagaggccaccgaggagacccgaacgaatataaacacgagagcaggcaggcgagaacagggggagaccaacaagcgcgcggcaccgacgtatgaggaacaatgtaggagacaaagagaaaaaccaccaaaataagacgggggggagaagcaaacaag

SEQ ID NO: 408436 - DNA, 524 bp, Homo sapiens
attgcaggcagcctgatctcttatcttttttttaagtttagagtctatttaatatccgattaaggaagaaaacaagctacgttctgcatgtttaataacatgccagaataacttgataacatgatttaagccctatttttaacaagataattttcatccattaaaaatggttgtgtattttaaccatggaatactactcagccataaaaaggaatgaaataatggcatttgcagcaaactggatggaattggaggtcattattctaagtgaaggaacttgggaatggaaaaccaaacatcattctcacttataagtggcagccaagctttgaggacacaaaggcataagaatgataatggactctggggacttggggggaaggatgggagtcgggtgaggggtaaaagaatacacattgggtgcagtgtacactgcttgggtgataggcgcaccaaaatctcagaaataaccactaaagaactcacccatgtaaccagacaccacctgttcccccaatactatt

SEQ ID NO: 408437 - DNA, 1045 bp, Homo sapiens
  misc_feature (95)..(96): n is a, c, g, or t
  misc_feature (701)..(701): n is a, c, g, or t
gcactcgccggcgaggctgcacggcgccggtttcattgctaaaatccgacggacttgttgcagaactcgttttttttgtcgggaaagggcttccnngtgtaactttacagcagttatcgtagataagacttgcaaattacagatgtggacggtgagggaacgggaatttcactgaaagcgcctgagaaccagtaagagacctgcaacagctttgtgctccactggcgaatgcttcctcccctaatacacattatgtgtgcttggagacacaaggagtaagatacagcccctcaagggactcgtcatagggagaggacacagctttgggaataaaggggccacaaaggaggagagaggagtttgctgaaacttcccaagctcccattccagcagttcctgaagggtttcccctctcttctaggctggacaatggaggaggcttgaaacagtagctggcaagtggtagaagagatggagcagagaagcaagaagaagcagactcctcactccttcaccagggtggatttgctggtttgaagcagacctgagttgggagaggagagaggcgagaagttttaattggatgaaatatttctttagactggtctatacttttttctttatatctaaaattcactggaagagctatgaaatctgtccaagatttcgttcagttcaggaaaaaccaaaaccaaaaccanaaccaccaggtaatacacatgtgactcagacgccaccaaagaagtatgtgtccaagacctcaagttgaaagctgtggactgcggagggactctctggtgaagttgttgcaagcatgattaattcattggggcagcaatggcagccaagccagtggtggtatcctgtgtccaggagtggtattggtgattcagtttgcagcctctgaggtacaaggataaggaaaatggtgaccagatcagttttgctgcctcagattagacataatttcaagctgtatatctctaatcctcctaataattctatgacctacatgatatcctttaaataaatgacttatcattta

SEQ ID NO: 408438 - DNA, 656 bp, Homo sapiens
  misc_feature (95)..(96): n is a, c, g, or t
gcactcgccggcgaggctgcacggcgccggtttcattgctaaaatccgacggacttgttgcagaactcgttttttttgtcgggaaagggcttccnngtgtaactttacagcagttatcgtagataagacttgcaaattacagatgtggacggtgagggaacgggaatttcactgaaagcgcctgagaaccagtaagagacctgcaacagctttgtgctccactggcgaatgcttcctcccctaatacacattatgtgtgcttggagacacaaggagtaagatacagcccctcaagggactcgtcatagggagaggacacagctttgggaataaaggggccacaaaggaggagagaggagtttgctgaaacttcccaagctcccattccagcagttcctgaaggattcatttctctctgaggatctcatgaggtggcttagcagctagaatctcttccttaacagtgggaagaacaactcctggaaatttaggtcgactttgactggatttaaaagaaagctgtacaattccacttctgtatatacaaccaaaggaaatgagatgtgcatacccatgttcaatgaagcattattcacaatagccaaaatgtggaaccaatccttaaacaaaaggaaaacagaaaatctgctcaaggt

SEQ ID NO: 408439 - DNA, 1027 bp, Homo sapiens
  misc_feature (95)..(96): n is a, c, g, or t
  misc_feature (683)..(683): n is a, c, g, or t
gcactcgccggcgaggctgcacggcgccggtttcattgctaaaatccgacggacttgttgcagaactcgttttttttgtcgggaaagggcttccnngtgtaactttacagcagttatcgtagataagacttgcaaattacagatgtggacggtgagggaacgggaatttcactgaaagcgcctgagaaccagtaagagacctgcaacagctttgtgctccactggcgaatgcttcctcccctaatacacattatgtgtgcttggagacacaaggagtaagatacagcccctcaagggactcgtcatagggagaggacacagctttgggaataaaggggccacaaaggaggagagaggagtttgctgaaacttcccaagctcccattccagcagttcctgaagggctggacaatggaggaggcttgaaacagtagctggcaagtggtagaagagatggagcagagaagcaagaagaagcagactcctcactccttcaccagggtggatttgctggtttgaagcagacctgagttgggagaggagagaggcgagaagttttaattggatgaaatatttctttagactggtctatacttttttctttatatctaaaattcactggaagagctatgaaatctgtccaagatttcgttcagttcaggaaaaaccaaaaccaaaaccanaaccaccaggtaatacacatgtgactcagacgccaccaaagaagtatgtgtccaagacctcaagttgaaagctgtggactgcggagggactctctggtgaagttgttgcaagcatgattaattcattggggcagcaatggcagccaagccagtggtggtatcctgtgtccaggagtggtattggtgattcagtttgcagcctctgaggtacaaggataaggaaaatggtgaccagatcagttttgctgcctcagattagacataatttcaagctgtatatctctaatcctcctaataattctatgacctacatgatatcctttaaataaatgacttatcattta

SEQ ID NO: 408440 - DNA, 732 bp, Homo sapiens
ttaggtaaaactgatgttgccccagggggatagctccctcatcttggatctaggggagcttataacatcttttaaaaggcgaaaattcaagttatctgtggactgtcagaacattttgcataagtcatccccagatgttctacatttcaactccatcaaatattaaattgatgtttatgggctaacctggaaaccgaaaaacagtttgtttcactacaagaataagaaaatatgtccaaattcctgtcagctgacttataaagggacttttagaacacaacccaatgcatgaggtactccttaagccctgacaaccatcttgaagatggaatcatgaatatggccaaattttctacggggctttgaagaaaaggggataaagaacgacaggcctgaggaccagttgagcaaagagaaaaagaaaattcttttctccttctgtgaggtgtgcaacatccagctgaactctgcagcccaggctcaggtgcattccaacggcaaatcccaccgcaaacgagtgaagcagctgagtgatgggcagcccccaccacccgcccaggccagccccagcagcaacagcagcacaggtaaaatacatgagctgtttgtcacctctcgaaatatttgttacacccactgacatacacactggcacacacacatacacacatatgcacaatttgtatatgggtccagagacttcctgtatccccacaatgtgtgaacacttct

SEQ ID NO: 408441 - DNA, 447 bp, Homo sapiens
gtgaggtgtgcaacatccagctgaactctgcagcccaggctcaggtgcattccaacggcaaatcccaccgcaaacgagtgaagcagctgagtgatgggcagcccccaccacccgcccaggccagccccagcagcaacagcagcacaggtaggaggcagggtcccgggttccatgtgctgcggggagagatggtcctggtctggaaaatgaaggatttagaacaagacttaatttttaccttaaaactgggctaccatgataacatgtactctttctcctacaggtaaaatacatgagctgtttgtcacctctcgaaatatttgttacacccactgacatacacactggcacacacacatacacacatatgcacaatttgtatatgggtccagagacttcctgtatccccacaatgtgtgaacacttctgaatgtattttgaaatgtg

SEQ ID NO: 408442 - DNA, 826 bp, Homo sapiens
agttggacagttcaggggccgcgccgggccgagctgtcgcccgcgccacctccaccgccgccgctgctaccgccaccgccaccgcctgggctgcagcagatcgcgggagaacgtctgcgcgaagccccggtgcagccctggcgggaccgcagcaaccaccggagcgtgagcaacagcttcccggctggaggagccactgccccacgcgcccgcggcccgcgcgccgagatgttctacatttcaactccatcaaatattaaattgatgtttatgggctaacctggaaaccgaaaaacagtttgtttcactacaagaataagaaaatatgtccaaattcctgtcagctgacttataaagggacttttagaacacaacccaatgcatgaggtactccttaagccctgacaaccatcttgaagatggaatcatgaatatggccaaattttctacggggctttgaagaaaaggggataaagaacgacaggcctgaggaccagttgagcaaagagaaaaagaaaattcttttctccttctgtgaggtgtgcaacatccagctgaactctgcagcccaggctcaggtgcattccaacggcaaatcccaccgcaaacgagtgaagcagctgagtgatgggcagcccccaccacccgcccaggccagccccagcagcaacagcagcacaggtaaaatacatgagctgtttgtcacctctcgaaatatttgttacacccactgacatacacactggcacacacacatacacacatatgcacaatttgtatatgggtccagagacttcctgtatccccacaatgtgtgaacacttct

SEQ ID NO: 408443 - DNA, 307 bp, Homo sapiens
ccctggcttaatctgctccctatttgctgctatttgtcagctgtttctacctctccagacaactatcatcatcttggccagtcccaattcttcctgcatacattcttggactttctttcatccgagtcaatcatctgttacctctgtgggagtttctaaaggctgccatttccataaattcatgttgggaaaattataaatgtatatttcaaacataaatcaaatttaagttccagaaggcaatacataacccatgagatgaattgtttgataaaagatgaagaaggactgcctagaaggagggggt

SEQ ID NO: 408444 - DNA, 3946 bp, Homo sapiens
accgctccggagcgggaggggaggcttcgcggaacgctctcggcgccaggactcgcgtgcaaagcccaggcccgggcggccagaccaagagggaagaagcacagaattcctcaactcccagtgtgcccatgagtaagagcaaatgctccgtgggactcatgtcttccgtggtggccccggctaaggagcccaatgccgtgggcccgaaggaggtggagctcatccttgtcaaggagcagaacggagtgcagctcaccagctccaccctcaccaacccgcggcagagccccgtggaggcccaggatcgggagacctggggcaagaagatcgactttctcctgtccgtcattggctttgctgtggacctggccaacgtctggcggttcccctacctgtgctacaaaaatggtggcggtgccttcctggtcccctacctgctcttcatggtcattgctgggatgccacttttctacatggagctggccctcggccagttcaacagggaaggggccgctggtgtctggaagatctgccccatactgaaaggtgtgggcttcacggtcatcctcatctcactgtatgtcggcttcttctacaacgtcatcatcgcctgggcgctgcactatctcttctcctccttcaccacggagctcccctggatccactgcaacaactcctggaacagccccaactgctcggatgcccatcctggtgactccagtggagacagctcgggcctcaacgacacttttgggaccacacctgctgccgagtactttgaacgtggcgtgctgcacctccaccagagccatggcatcgacgacctggggcctccgcggtggcagctcacagcctgcctggtgctggtcatcgtgctgctctacttcagcctctggaagggcgtgaagacctcagggaaggtggtatggatcacagccaccatgccatacgtggtcctcactgccctgctcctgcgtggggtcaccctccctggagccatagacggcatcagagcatacctgagcgttgacttctaccggctctgcgaggcgtctgtttggattgacgcggccacccaggtgtgcttctccctgggcgtggggttcggggtgctgatcgccttctccagctacaacaagttcaccaacaactgctacagggacgcgattgtcaccacctccatcaactccctgacgagcttctcctccggcttcgtcgtcttctccttcctggggtacatggcacagaagcacagtgtgcccatcggggacgtggccaaggacgggccagggctgatcttcatcatctacccggaagccatcgccacgctccctctgtcctcagcctgggccgtggtcttcttcatcatgctgctcaccctgggtatcgacagcgccatgggtggtatggagtcagtgatcaccgggctcatcgatgagttccagctgctgcacagacaccgtgagctcttcacgctcttcatcgtcctggcgaccttcctcctgtccctgttctgcgtcaccaacggtggcatctacgtcttcacgctcctggaccattttgcagccggcacgtccatcctctttggagtgctcatcgaagccatcggagtggcctggttctatggtgttgggcagttcagcgacgacatccagcagatgaccgggcagcggcccagcctgtactggcggctgtgctggaagctggtcagcccctgctttctcctgttcgtggtcgtggtcagcattgtgaccttcagacccccccactacggagcctacatcttccccgactgggccaacgcgctgggctgggtcatcgccacatcctccatggccatggtgcccatctatgcggcctacaagttctgcagcctgcctgggtcctttcgagagaaactggcctacgccattgcacccgagaaggaccgtgagctggtggacagaggggaggtgcgccagttcacgctccgccactggctcaaggtgtagagggagcagagacgaagaccccaggaagtcatcctgcaatgggagagacacgaacaaaccaaggaaatctaagtttcgagagaaaggagggcaacttctactcttcaacctctactgaaaacacaaacaacaaagcagaagactcctctcttctgactgtttacacctttccgtgccgggagcgcacctcgccgtgtcttgtgttgctgtaataacgacgtagatctgtgcagcgaggtccaccccgttgttgtccctgcagggcagaaaaacgtctaacttcatgctgtctgtgtgaggctccctccctccctgctccctgctcccggctctgaggctgccccaggggcactgtgttctcaggcggggatcacgatccttgtagacgcacctgctgagaatccccgtgctcacagtagcttcctagaccatttactttgcccatattaaaaagccaagtgtcctgcttggtttagctgtgcagaaggtgaaatggaggaaaccacaaattcatgcaaagtcctttcccgatgcgtggctcccagcagaggccgtaaattgagcgttcagttgacacattgcacacacagtctgttcagaggcattggaggatgggggtcctggtatgtctcaccaggaaattctgtttatgttcttgcagcagagagaaataaaactccttgaaaccagctcaggctactgccactcaggcagcctgtgggtccttgtggtgtagggaacggcctgagaggagcgtgtcctatccccggacgcatgcagggcccccacaggagcgtgtcctatccccggacgcatgcagggcccccacaggagcatgtcctatccctggacgcatgcagggcccccacaggagcgtgtactaccccagaacgcatgcagggcccccacaggagcgtgtactaccccaggacgcatgcagggcccccactggagcgtgtactaccccaggacgcatgcagggcccccacaggagcgtgtcctatccccggaccggacgcatgcagggcccccacaggagcgtgtactaccccaggacgcatgcagggcccccacaggagcgtgtactaccccaggatgcatgcagggcccccacaggagcgtgtactaccccaggacgcatgcagggcccccatgcaggcagcctgcagaccaacactctgcctggccttgagccgtgacctccaggaagggaccccactggaattttatttctctcaggtgcgtgccacatcaataacaacagtttttatgtttgcgaatggctttttaaaatcatatttacctgtgaatcaaaacaaattcaagaatgcagtatccgcgagcctgcttgctgatattgcagtttttgtttacaagaataattagcaatactgagtgaaggatgttggccaaaagctgctttccatggcacactgccctctgccactgacaggaaagtggatgccatagtttgaattcatgcctcaagtcggtgggcctgcctacgtgctgcccgagggcaggggccgtgcagggccagtcatggctgtcccctgcaagtggacgtgggctccagggactggagtgtaatgctcggtgggagccgtcagcctgtgaactgccaggcagctgcagttagcacagaggatggcttccccattgccttctggggagggacacagaggacggcttccccatcgccttctggccgctgcagtcagcacagagagcggcttccccattgccttctggggagggacacagaggacagcttccccatcgccttctggctgctgcagtcagcacagagagcggcttccccatcgccttctggggaggggctccgtgtagcaacccaggtgttgtccgtgtctgttgaccaatctctattcagcatcgtgtgggtccctaagcacaataaaagacatccacaatggaaaaaaaaaaaggaattc

SEQ ID NO: 408445 - DNA, 363 bp, Homo sapiens
atgactggaaaattgcagctgctgcagctcagctggttcctgagacggcgtgtcttgttcttacagggacgcgattgtcaccacctccatcaactccctgacgagcttctcctccggcttcgtcgtcttctccttcctggggtacatggcacagaagcacagtgtgcccatcggggacgtggccaaggacggtgagcccctcctgctgcacctgggcctgctccgtgtagcaccagcgccgagctctcagcaaagcctttttccttgtgaaagaggaaggagacgcatgggccctgagcgacttcagtgagagttgctgcctcactcttgaaggatggtggtacacatcccagtacagacctg

SEQ ID NO: 408446 - DNA, 814 bp, Homo sapiens
agccacaattaaatattttaatataaaaatttgttaataagtttaaaaagttaaaagtgcaaggacaacactttgaggaacggagagtgtggtttctatatggaaaatacctgactaacccaagtatcacatttttgagagaatatatgcatttcttagtaaagaataaccactgaaataacttatttaggttatccttttttgcggggggcgaccataagctttattggctgaaagttctaggagcctggtctgctaggactgggtgttcctggctgatcacccccaggcctaagctcccggtttcgtctggcccttctgtagcatgttgtaggttacaaccaactgatcaaagatgatttttcctggtgcttgctcagaattttgcaacttcttctcttgttcagacaaaggctttgaaaatattctgtaccaagagtacttttttaaaaaattgacctttcatgtgatgaaaaatgaagagaagaaaacgtgttgaagtagacagaaaatgaacacatagaaaacaaaaattaggaataaacaaatgcatttctagatgatggtggataatcatcgaaatcctctaggattaggtattggcttaggatctggttagttagcatattcataaatcagggtttcgcaaacctggttgtaatataagaatttcctagggagctggttaaaaatgtaaaatcttggatcccaccccagggattctgactcagtaggtctggagtgggcccagcaattggtaattttaacagcagttctaaatgcttgtgccgccggtggttcccagaccactctc

SEQ ID NO: 408447 - DNA, 4362 bp, Homo sapiens
ggaaggagcggctcggtgttggggctaggccggtattctaggcccaagcccaggcccaggcctgtgttcccggcccttgctcaaagacaggccggtggccgctgcgacactctaggtacagcggagggcgcagcgggccgttcgctgaggtgtccggacccgccgccgagcgggccgtggagccacagtacgtggcggcgcctcttccttgcccgaagcggaactgctgaaggagcggcagcgcaggccggacgaggtgaaccaggtcatttaaccgccttcaggtgatgaatcatctgtctaataatcagatttgaggtccacagccctttgtggtcctgctacagggtgattttcagtggatgactgactggcgtggcccgaggggtgccgcagtgactgccttcccttgataaggaaacgagctttctgttctttctggacacctcgttacctgtaaaacattccggttataacttctttatccggcttgcatctctgtgcaagaggaaagctttcacatgaaagtgtcccttggtaacggcgaaatgggcgtctctgcccatttgcagccttgtaaggcaggaaccacacgcttttttaccagcaatactcacagttcggtggtattgcaaggctttgatcagcttagaatagaaggattgctttgtgatgtgaccctggtaccaggtgatggagatgaaatcttccctgttcacagagctatgatggcgtctgctagtgattatttcaaagccatgttcacaggtggaatgaaagaacaagatttgatgtgcattaagcttcatggggtgaacaaggttggtctgaagaaaatcattgattttatttatactgcaaaactttctcttaatatggacaatcttcaggacacacttgaagctgctagctttttacaaatattacccgttttggatttctgtaaagtatttcttatatcaggagtctctttggataactgtgttgaggttggacgaattgctaacacctacaatcttatagaagtggataaatatgttaataatttcatcctgaagaactttcctgctttattgagtactggggagtttctaaaactcccttttgaacgacttgcatttgtgctttccagtaatagtcttaagcactgtaccgaacttgaactctttaaggcagcctgtcgctggctaaggttggaagaccctcggatggattatgctgcaaagttaatgaagaatattcgatttccactgatgacaccacaggatctcatcaattacgtgcagacagtagatttcatgagaacagacaatacctgcgtgaatttgcttttggaagctagcaattaccaaatgatgccatatatgcagccagtgatgcagtcagatagaactgccattcgatctgactccactcacttggttacattaggaggagttttgaggcagcagctggttgtcagtaaagaattacggatgtatgatgaaagggcacaagaatggagatctttagccccaatggatgctccccgttaccagcatggtattgctgtcattggaaactttctttatgtagttggtggtcagagtaattatgatacaaaaggaaaaactgctgttgatacagttttcagatttgatcctcggtataataaatggatgcaggttgcatcattaaatgaaaagcgcacattctttcacttgagtgccctcaaaggacatttgtatgcagttggtgggcgcagtgcagctggtgaactggccacagtagaatgttacaacccaagaatgaatgagtggagctatgttgcaaaaatgagtgaaccccactatggtcatgctggaacagtatatggaggcttaatgtatatttcaggaggaattacccatgacactttccaaaatgagctcatgtgttttgacccagatacagataaatggatgcaaaaggctccaatgactacagtcagaggtctgcattgcatgtgtacagttggagataagctctatgtcattggtggcaatcacttcagaggaacaagtgattatgatgatgttctaagctgtgaatactattcaccaacccttgaccagtggaccccaattgccgccatgttaagaggccaaagtgatgttggagttgccgtctttgaaaataaaatctatgttgttggtggatattcttggaataatcgttgtatggtagaaattgtccagaaatatgacccagaaaaagatgagtggcataaagtttttgatcttccagagtcacttggtggcattcgagcctgtacactcacagtttttccacctgaagaaaaccctgggtcaccttctagagaatcacctctttcagcaccttcagatcattcttaggtctaaggtgtaacacctttgcagtacgtcatgggtgatctaatacttccccttcagttgtatcttcttacagtgattggtacagttattagatataaaggtaactgatgttattcgtcttgtatggcttttagtatgtttatcaagtggctaacaaatgcattctgaaaatgtatttaacatagctgttttaacaaatgaaaaaaagacgtagaaaaatgtttagatgtctttttgtgatgttatataaaattgtagatgactgtggtaaatgtgtaattatgtccattatgcttcaaagttgagttttcatctttgactccaaaatgtcagagggaggccgctctaaactaaaaataacgaaaggttgccaagtattaatactagttacctccctcttttcgtagtttttgtcatgtctgtcaacttactcgattgtgtggttgcattcagaatatttgaagtttcttacgtagacagaaataataaaaatattaactaggaaaaaacagtatagcaccaagccagtatttggtatctctctctagagcgagcaagagagggagagaggaggaaaaaatacacataatacaaacatacatgcatgcacacatacatacatatgtatacacacacataatttgaaaactgattggcacttcaacgatgctgaaattgtttttaaattgaagtttctttcttccacaaagcagccgtttctattcaaatggaaattcagtaccagagaataaatgtctatgtagtcatactgaatttagatagataagggctacagcatactaaatcgacaaccaaatttgtcatgtgactaaaccgttacttcagatgaagcttacattactgttttctgcttgtgtattttctgtagagtacttttacacagattggtaaagttcaggtttcagagaactgcttttgtgcagaaaatttaggttcttttttccacctttttggtcagtaaaacttaatgaaaaaagcaaagaaaaaaatattctgaacaaagctatagggttttaagttcagcctcccaacttagtcatcctaacatgattattttgtgatttggggtgcttgccctggtgctgttccagtccatgtgcatcctgagctgtgtgatctgcctcgaggctatgatctgagcaagcaggagataacattttcttctgcatcaagtgaggaaaaatgtgcttttggccatgtctcaaagacaggaccaacttcagattcccaaagaagccagctacagagcctctggaacactatggtcttacaagcagtactaaaatcaaccctcagcctcttcaatgccaaaggtatccctattggttgagaaccacatggtaatttttaatgggacttttatcagcaaatggagttacaggaattctctgtaatgagtgattctgaagaggtactttcctggaataattgtctacctgaagaaaaaaaatttatatatacattgtgtgtgtgtgtaatacacacacacacaaccccctatacctggaagattgtcagcatgtaaatcaggaacaactttctccttattgacaatcccataataaaactcaggaaccaaggcaaaatgaattggcttctaggggtctgaaccttactgcccatacaagtgttgattcattttaatgctgtttatgatttctgcattggcagaaattttcatactttctatgtttttttaattactcagttttttattactaaaaatagcacatttgagtacatttgaaaagtagaaaaattagaaattattaactttattgaataagcaagaagtgcatcctaatcctttgattattaatgaggttgaatatttgtgtgctatcggtagctgtgtttctttgatcagatgttcctgtccttttgcccttctgttatctgttggagttgctttgtttttcgtatcaagttataggatctctttatataataaatgtaatttaacttg

SEQ ID NO: 408448 - DNA, 4697 bp, Homo sapiens
  misc_feature (1723)..(1723): n is a, c, g, or t
tttcataaatcatttgctcctgtcttttgctttaattgtcctatttgctataaatacttttttatactctacttttttattcaatttaatatgatcaagtatgttcgtcttttttgtatgttgacctttcggtgatatttttgttttttttaatttggggtgtgtgtgtgtgtggtggtggtggtggttgttatatagtactgatgtggtattacttgttcttgatactatagctctatagctttgtgattactagttcttgacatgttagggtggcatttactgcttgtctcctgttcaagtagcttttctttctagttaaaatgagaatgagattttccttaaaattaataaacttacctttttatattgagattaatcattcatttttttttgagatggggtctcgctatgctgaccaggctgttcttgaactcctggtctccagtgatcctcctatttcagcctcccaaagggctagaattacaggtgtgagccactgcaactggctatattaagattaatctttattctctatttacagcaagtatttgcccacttgtgttctgtgagcaaagaaatcaagtgtttttcctttgtaacgtagcacaattagtttctttgtcattttaatgctttcttgaataatttttttatcattaggtggcataattatcccagtattttatgttgttattattgatacaactttctaccaaacttttggcataaaatctaatgtatttttcaaattacctaatttttccataaccactttttgaatatcttcatttccttgctgaatttttatgctttaaaaaaaatcataaaatcttatagtcaatcaatttagagtatttttcttcacttccaatgatcttttttcaagttaagttgtctttgatatatacgtgtgtgtgtgtgtgtgtttgtgtatttctgctttgaatgggatttcgttatgttatattctgaactcttggtagaagtaggaaatatgtggttttagcataatggttttctgtctaccgactctcattgattcttcagttttttgggtcaattctcatattttcaccttaactaaccattatctgcatattataaaagccaatttcatattattagtttaatgtgaaacattaaagcatggttcatacttccagcaaaattatagtagtgaccgaggaattgtgtcttatgcgtaattttaataggggtaattctagttttaggattcctttgttacaaggaaatatccttgatcttgttcacgaagttcctcattaattaggagtcttaaaaaattagggttgtgtatcttcattacaaatgatttctgtaccagctgatccaaatttttcttagtaccatccatgggctgaaagaaaggctatttcttcgctgtgtgatcagtgtgtcattaactacccatttcttcatttatttagtcaaatttattgagatgataatttaatttttctcatgtcaaatactgaaaaagagtctgttttttaattgttttcaactgttgggttagaaaggactcttacatattgctgagtgcattgtcaattggtttacagtttagaatgcaatttggcaaaagtagtaaaatgatctttcaagtttcataccttttggacagtaagtatatttctagaattaataagtgacagaaaataggccagaaatagtcatctcagcatgatactattatttncttcctaataggaccacattagaccttccattaaaatacttttaaatggatttttaaagattcttcccaccttaattttgatactttatctgcatcctctagtattcaattgttgagcatatatttgaatggctggatgatgattagaataaaagacttagatattcattaaggatgactgaacacataactgttgaattgtgtacctgagccaaatgcactagtacacagaataggtcgttcctctgtaacagtctcagagcaactgctttccaggggctaatgttattctgccatctactggttaaaattaaaagtctttgtttagctagattacagaaaatatatctcctttatcaaaacaacagtaataacaaaacccagaaatttttatagcacatgtgaaagttcaaagttggcagcttatataaattacataagtgaatattaaaaacttttggtaatttttggggtacggtagatcaaagagaagaattattttttatattacttaaaaatacagatttaaatagctatgacctttattttatttataaattcatatacatttaattttaaaatctgcaacatttcatctggattctaagcattcatacccaatacttgctttttcctttgagtggattccccataccatttttatttttagtttttagcagacagcctcatcacaaagacatgtatagagtaaatcttttccacagcagaaaggacgtaatatgcattatatctggttataagtaaatatgacaacctcataatatttaagaaatttttatattggtttgctcatttgggtatgaggatcaaatcatgactgctatagccacataattttcacccggccagccagacacacatatgcataagcatatacatgtgtttgatgtaaaacagcttttggaccagctgatccagatttttcttagtgccacccatgggctcaaagaaagtctatttcttgactatgtgaacagtaagaatggcatcaactacccatttcctcattctccatgttattgtctcagaacaaaatattctcttacaccaagcattttttccctcaagatggatgtgtataacaacaagtgatctcttaatagtgcctcctgaaggatatcaagagtgcacatatcttttctacatagaactgaaggagcaagattagatttcgtgcaatcttagaacaagatgtgtataaagctgttgacagcaactaagtaacccaaacttcagaagtttcgttgtctagagccccttctccaattgtaagtccaaagagtatgtctagctctttactggtccatcttccaaaagactattacaatacagccttacaatctcttataatggaagtttatcattttttgcctcatttcacccaagtgccagtcaacagagtacatgtttgtatgtggtggggatgggaggcaggtctaacttctactgattcaaacagctttatcttacttagggagtatactttatcacttagaagtcaaaacattcttccagccaggaattagtgatccattaaaacttatttctaattcatgtcaaatcatgaaccaaaacatactcagtataaaaacctaatgtgagtcagtgtaatgtttatttcttcatactaagcagtgtttacttcaattttttattactctctccatctttctccagataagaaaatcacagatttcacaaaacctttcatatatgtatatacacatacttgaagacatcaattaactcaaagattaaggaaaaagagtttttgttttgattttgttttttgttgttgttgttattgtttgttttttgagatagagtttcactcttgtcacccaggctggagtgtagtggtgtgatcctggctcactgcaatctccgcctccccagttcaagcgattctcctgcctcagcctccggagtaactggcattacaggcgcctgccaccacccctggctaatttttgtatttttagtagagacggagtttcaccatgttagccaggctggtctcgaactcctgacctcagatgatccgcctgcctgggcctcccaaaagtgctgggattacaggcgtgagccaccgcccccagccagaaaaacaatttttaattttcaaggctggctctccattaataatctctcccatgccctggactagctatactttatcctgcaaggggaataagttatggattccattggtatgtctactttgttcacttcttgggctgcaatatctacacttcccattcacccttaccacttacttagtagatagtctagccacttgcaacaggttcatggctaccatttgggaatgcctataggagatcaaggagatccattgaaactcagcccccaaatccaaagtcactttccttttgatatctgtagtttcatcatctgtcataaccatgcctacttatcatctgtaaaacaccctttctacattaagggatactcacattatgaattctagttgtggttgttttaaaatatattcacaaattttctcatgctcgtttctttcctccttttgactatgtgttggatttagtgattcccatctaatgaatacaatgaaacaatggtgtttaaattatagactaggtcataaaaaattgtgtacttcctccatgtttatctctcttctatcacttcctctagtacaagccagctgccatgttgtgagcacataccacatagctccatggagatgcccatgtgactgtgatgaagagctaagacttcctgtcagtggccgtgtgagtgacccatgttagaaacagatccgccagcccaaacagaaccttcagacaactgcagccccagctggcatcttgactgcaactcatgagcgattctaagcccaccgaagctgctcttgaattattgattcacaaaaacttttaggtaataaatgtgtgttgttttaaaaaaaaaa

SEQ ID NO: 408449 - DNA, 4672 bp, Homo sapiens
  misc_feature (1723)..(1723): n is a, c, g, or t
tttcataaatcatttgctcctgtcttttgctttaattgtcctatttgctataaatacttttttatactctacttttttattcaatttaatatgatcaagtatgttcgtcttttttgtatgttgacctttcggtgatatttttgttttttttaatttggggtgtgtgtgtgtgtggtggtggtggtggttgttatatagtactgatgtggtattacttgttcttgatactatagctctatagctttgtgattactagttcttgacatgttagggtggcatttactgcttgtctcctgttcaagtagcttttctttctagttaaaatgagaatgagattttccttaaaattaataaacttacctttttatattgagattaatcattcatttttttttgagatggggtctcgctatgctgaccaggctgttcttgaactcctggtctccagtgatcctcctatttcagcctcccaaagggctagaattacaggtgtgagccactgcaactggctatattaagattaatctttattctctatttacagcaagtatttgcccacttgtgttctgtgagcaaagaaatcaagtgtttttcctttgtaacgtagcacaattagtttctttgtcattttaatgctttcttgaataatttttttatcattaggtggcataattatcccagtattttatgttgttattattgatacaactttctaccaaacttttggcataaaatctaatgtatttttcaaattacctaatttttccataaccactttttgaatatcttcatttccttgctgaatttttatgctttaaaaaaaatcataaaatcttatagtcaatcaatttagagtatttttcttcacttccaatgatcttttttcaagttaagttgtctttgatatatacgtgtgtgtgtgtgtgtgtttgtgtatttctgctttgaatgggatttcgttatgttatattctgaactcttggtagaagtaggaaatatgtggttttagcataatggttttctgtctaccgactctcattgattcttcagttttttgggtcaattctcatattttcaccttaactaaccattatctgcatattataaaagccaatttcatattattagtttaatgtgaaacattaaagcatggttcatacttccagcaaaattatagtagtgaccgaggaattgtgtcttatgcgtaattttaataggggtaattctagttttaggattcctttgttacaaggaaatatccttgatcttgttcacgaagttcctcattaattaggagtcttaaaaaattagggttgtgtatcttcattacaaatgatttctgtaccagctgatccaaatttttcttagtaccatccatgggctgaaagaaaggctatttcttcgctgtgtgatcagtgtgtcattaactacccatttcttcatttatttagtcaaatttattgagatgataatttaatttttctcatgtcaaatactgaaaaagagtctgttttttaattgttttcaactgttgggttagaaaggactcttacatattgctgagtgcattgtcaattggtttacagtttagaatgcaatttggcaaaagtagtaaaatgatctttcaagtttcataccttttggacagtaagtatatttctagaattaataagtgacagaaaataggccagaaatagtcatctcagcatgatactattatttncttcctaataggaccacattagaccttccattaaaatacttttaaatggatttttaaagattcttcccaccttaattttgatactttatctgcatcctctagtattcaattgttgagcatatatttgaatggctggatgatgattagaataaaagacttagatattcattaaggatgactgaacacataactgttgaattgtgtacctgagccaaatgcactagtacacagaataggtcgttcctctgtaacagtctcagagcaactgctttccaggggctaatgttattctgccatctactggttaaaattaaaagtctttgtttagctagattacagaaaatatatctcctttatcaaaacaacagtaataacaaaacccagaaatttttatagcacatgtgaaagttcaaagttggcagcttatataaattacataagtgaatattaaaaacttttggtaatttttggggtacggtagatcaaagagaagaattattttttatattacttaaaaatacagatttaaatagctatgacctttattttatttataaattcatatacatttaattttaaaatctgcaacatttcatctggattctaagcattcatacccaatacttgctttttcctttgagtggattccccataccatttttatttttagtttttagcagacagcctcatcacaaagacatgtatagagtaaatcttttccacagcagaaaggacgtaatatgcattatatctggttataagtaaatatgacaacctcataatatttaagaaatttttatattggtttgctcatttgggtatgaggatcaaatcatgactgctatagccacataattttcacccggccagccagacacacatatgcataagcatatacatgtgtttgatgtaaaacagcttttggaccagctgatccagatttttcttagtgccacccatgggctcaaagaaagtctatttcttgactatgtgaacagtaagaatggcatcaactacccatttcctcattctccatgttattgtctcagaacaaaatattctcttacaccaagcattttttccctcaagatggatgtgtataacaacaagtgatctcttaatagtgcctcctgaaggatatcaagagtgcacatatcttttctacatagaactgaaggagcaagattagatttcgtgcaatcttagaacaagatgtgtataaagctgttgacagcaactaagtaacccaaacttcagaagtttcgttgtctagagccccttctccaattgtaagtccaaagagtatgtctagctctttactggtccatcttccaaaagactattacaatacagccttacaatctcttataatggaagtttatcattttttgcctcatttcacccaagtgccagtcaacagagtacatgtttgtatgtggtggggatgggaggcaggtctaacttctactgattcaaacagctttatcttacttagggagtatactttatcacttagaagtcaaaacattcttccagccaggaattagtgatccattaaaacttatttctaattcatgtcaaatcatgaaccaaaacatactcagtataaaaacctaatgtgagtcagtgtaatgtttatttcttcatactaagcagtgtttacttcaattttttattactctctccatctttctccagataagaaaatcacagatttcacaaaacctttcatatatgtatatacacatacttgaagacatcaattaactcaaagattaaggaaaaagagtttttgttttgttgtttgttttttgagatagagtttcactcttgtcacccaggctggagtgtagtggtgtgatcctggctcactgcaatctccgcctccccagttcaagcgattctcctgcctcagcctccggagtaactggcattacaggcgcctgccaccacccctggctaatttttgtatttttagtagagacggagtttcaccatgttagccaggctggtctcgaactcctgacctcagatgatccgcctgcctgggcctcccaaaagtgctgggattacaggcgtgagccaccgcccccagccagaaaaacaatttttaattttcaaggctggctctccattaataatctctcccatgccctggactagctatactttatcctgcaaggggaataagttatggattccattggtatgtctactttgttcacttcttgggctgcaatatctacacttcccattcacccttaccacttacttagtagatagtctagccacttgcaacaggttcatggctaccatttgggaatgcctataggagatcaaggagatccattgaaactcagcccccaaatccaaagtcactttccttttgatatctgtagtttcatcatctgtcataaccatgcctacttatcatctgtaaaacaccctttctacattaagggatactcacattatgaattctagttgtggttgttttaaaatatattcacaaattttctcatgctcgtttctttcctccttttgactatgtgttggatttagtgattcccatctaatgaatacaatgaaacaatggtgtttaaattatagactaggtcataaaaaattgtgtacttcctccatgtttatctctcttctatcacttcctctagtacaagccagctgccatgttgtgagcacataccacatagctccatggagatgcccatgtgactgtgatgaagagctaagacttcctgtcagtggccgtgtgagtgacccatgttagaaacagatccgccagcccaaacagaaccttcagacaactgcagccccagctggcatcttgactgcaactcatgagcgattctaagcccaccgaagctgctcttgaattattgattcacaaaaacttttaggtaataaatgtgtgttgttttaaaaaaaaaa

SEQ ID NO: 408450 - DNA, 407 bp, Homo sapiens
cgattctcccacctcagcctcccgattagctgggattacaggcagtaagctcctacaggacattttaaaactacataaatgtgccatccccagctcaaccgattataaacaactgccgaaagattgtgggtacaagccagctgccatgttgtgagcacataccacatagctccatggagatgcccatgtgactgtgatgaagagctaagacttcctgtcagtggccgtgtgagtgacccatgttagaaacagatccgccagcccaaacagaaccttcagacaactgcagccccagctggcatcttgactgcaactcatgagcgattctaagcccaccgaagctgctcttgaattattgattcacaaaaacttttaggtaataaatgtgtgttgttttaaaaaaaaaa

SEQ ID NO: 408451 - DNA, 4308 bp, Homo sapiens
ggaaggagcggctcggtgttggggctaggccggtattctaggcccaagcccaggcccaggcctgtgttcccggcccttgctcaaagacaggccggtggccgctgcgacactctaggtacagcggagggcgcagcgggccgttcgctgaggtgtccggacccgccgccgagcgggccgtggagccacagtacgtggcggcgcctcttccttgcccgaagcggaactgctgaaggagcggcagcgcaggccggacgaggtgaaccaggtcatttaaccgccttcaggtgatgaatcatctgtctaataatcagatttgaggtccacagccctttgtggtcctgctacagggtgattttcagtggatgactgactggcgtggcccgaggggtgccgcagtgactgccttcccttgataaggaaacgagctttctgttctttctggacacctcgttacctgtaaaacattccggttataacttctttatccggcttgcatctctgtgcaagaggaaagctttcacatgaaagtgtcccttggtaacggcgaaatgggcgtctctgcccatttgcagccttgtaaggcaggaaccacacgcttttttaccagcaatactcacagttcggtggtattgcaaggctttgatcagcttagaatagaaggattgctttgtgatgtgaccctggtaccaggtgatggagatgaaatcttccctgttcacagagctatgatggcgtctgctagtgattatttcaaagccatgttcacaggtggaatgaaagaacaagatttgatgtgcattaagcttcatggggtgaacaaggttggtctgaagaaaatcattgattttatttatactgcaaaactttctcttaatatggacaatcttcaggacacacttgaagctgctagctttttacaaatattacccgttttggatttctgtaaagtatttcttatatcaggagtctctttggataactgtgttgaggttggacgaattgctaacacctacaatcttatagaagtggataaatatgttaataatttcatcctgaagaactttcctgctttattgagtactggggagtttctaaaactcccttttgaacgacttgcatttgtgctttccagtaatagtcttaagcactgtaccgaacttgaactctttaaggcagcctgtcgctggctaaggttggaagaccctcggatggattatgctgcaaagttaatgaagaatattcgatttccactgatgacaccacaggatctcatcaattacgtgcagacagtagatttcatgagaacagacaatacctgcgtgaatttgcttttggaagctagcaattaccaaatgatgccatatatgcagccagtgatgcagtcagatagaactgccattcgatctgactccactcacttggttacattaggaggagttttgaggcagcagctggttgtcagtaaagaattacggatgtatgatgaaagggcacaagaatggagatctttagccccaatggatgctccccgttaccagcatggtattgctgtcattggaaactttctttatgtagttggtggtcagagtaattatgatacaaaaggaaaaactgctgttgatacagttttcagatttgatcctcggtataataaatggatgcaggttgcatcattaaatgaaaagcgcacattctttcacttgagtgccctcaaaggacatttgtatgcagttggtgggcgcagtgcagctggtgaactggccacagtagaatgttacaacccaagaatgaatgagtggagctatgttgcaaaaatgagtgaaccccactatggtcatgctggaacagtatatggaggcttaatgtatatttcaggaggaattacccatgacactttccaaaatgagctcatgtgttttgacccagatacagataaatggatgcaaaaggctccaatgactacagtcagaggtctgcattgcatgtgtacagttggagataagctctatgtcattggtggcaatcacttcagaggaacaagtgattatgatgatgttctaagctgtgaatactattcaccaacccttgaccagtggaccccaattgccgccatgttaagaggccaaagtgatgttggagttgccgtctttgaaaataaaatctatgttgttggtggatattcttggaataatcgttgtatggtagaaattgtccagaaatatgacccagaaaaagatgagtggcataaagtttttgatcttccagagtcacttggtggcattcgagcctgtacactcacagtttttccacctgaagcttaggtctaaggtgtaacacctttgcagtacgtcatgggtgatctaatacttccccttcagttgtatcttcttacagtgattggtacagttattagatataaaggtaactgatgttattcgtcttgtatggcttttagtatgtttatcaagtggctaacaaatgcattctgaaaatgtatttaacatagctgttttaacaaatgaaaaaaagacgtagaaaaatgtttagatgtctttttgtgatgttatataaaattgtagatgactgtggtaaatgtgtaattatgtccattatgcttcaaagttgagttttcatctttgactccaaaatgtcagagggaggccgctctaaactaaaaataacgaaaggttgccaagtattaatactagttacctccctcttttcgtagtttttgtcatgtctgtcaacttactcgattgtgtggttgcattcagaatatttgaagtttcttacgtagacagaaataataaaaatattaactaggaaaaaacagtatagcaccaagccagtatttggtatctctctctagagcgagcaagagagggagagaggaggaaaaaatacacataatacaaacatacatgcatgcacacatacatacatatgtatacacacacataatttgaaaactgattggcacttcaacgatgctgaaattgtttttaaattgaagtttctttcttccacaaagcagccgtttctattcaaatggaaattcagtaccagagaataaatgtctatgtagtcatactgaatttagatagataagggctacagcatactaaatcgacaaccaaatttgtcatgtgactaaaccgttacttcagatgaagcttacattactgttttctgcttgtgtattttctgtagagtacttttacacagattggtaaagttcaggtttcagagaactgcttttgtgcagaaaatttaggttcttttttccacctttttggtcagtaaaacttaatgaaaaaagcaaagaaaaaaatattctgaacaaagctatagggttttaagttcagcctcccaacttagtcatcctaacatgattattttgtgatttggggtgcttgccctggtgctgttccagtccatgtgcatcctgagctgtgtgatctgcctcgaggctatgatctgagcaagcaggagataacattttcttctgcatcaagtgaggaaaaatgtgcttttggccatgtctcaaagacaggaccaacttcagattcccaaagaagccagctacagagcctctggaacactatggtcttacaagcagtactaaaatcaaccctcagcctcttcaatgccaaaggtatccctattggttgagaaccacatggtaatttttaatgggacttttatcagcaaatggagttacaggaattctctgtaatgagtgattctgaagaggtactttcctggaataattgtctacctgaagaaaaaaaatttatatatacattgtgtgtgtgtgtaatacacacacacacaaccccctatacctggaagattgtcagcatgtaaatcaggaacaactttctccttattgacaatcccataataaaactcaggaaccaaggcaaaatgaattggcttctaggggtctgaaccttactgcccatacaagtgttgattcattttaatgctgtttatgatttctgcattggcagaaattttcatactttctatgtttttttaattactcagttttttattactaaaaatagcacatttgagtacatttgaaaagtagaaaaattagaaattattaactttattgaataagcaagaagtgcatcctaatcctttgattattaatgaggttgaatatttgtgtgctatcggtagctgtgtttctttgatcagatgttcctgtccttttgcccttctgttatctgttggagttgctttgtttttcgtatcaagttataggatctctttatataataaatgtaatttaacttg

SEQ ID NO: 408452 - DNA, 2128 bp, Homo sapiens
gtgatctcgaggatccctggacatttccacgagtcacttggtggcattcgagcctgtacactcacagtttttccacctgaagaaaaccctgggtcaccttctagagaatcacctctttcagcaccttcagatcattcttaggtctaaggtgtaacacctttgcagtacgtcatgggtgatctaatacttccccttcagttgtatcttcttacagtgattggtacagttattagatataaaggtaactgatgttattcgtcttgtatggcttttagtatgtttatcaagtggctaacaaatgcattctgaaaatgtatttaacatagctgttttaacaaatgaaaaaaagacgtagaaaaatgtttagatgtctttttgtgatgttatataaaattgtagatgactgtggtaaatgtgtaattatgtccattatgcttcaaagttgagttttcatctttgactccaaaatgtcagagggaggccgctctaaactaaaaataacgaaaggttgccaagtattaatactagttacctccctcttttcgtagtttttgtcatgtctgtcaacttactcgattgtgtggttgcattcagaatatttgaagtttcttacgtagacagaaataataaaaatattaactaggaaaaaacagtatagcaccaagccagtatttggtatctctctctagagcgagcaagagagggagagaggaggaaaaaatacacataatacaaacatacatgcatgcacacatacatacatatgtatacacacacataatttgaaaactgattggcacttcaacgatgctgaaattgtttttaaattgaagtttctttcttccacaaagcagccgtttctattcaaatggaaattcagtaccagagaataaatgtctatgtagtcatactgaatttagatagataagggctacagcatactaaatcgacaaccaaatttgtcatgtgactaaaccgttacttcagatgaagcttacattactgttttctgcttgtgtattttctgtagagtacttttacacagattggtaaagttcaggtttcagagaactgcttttgtgcagaaaatttaggttcttttttccacctttttggtcagtaaaacttaatgaaaaaagcaaagaaaaaaatattctgaacaaagctatagggttttaagttcagcctcccaacttagtcatcctaacatgattattttgtgatttggggtgcttgccctggtgctgttccagtccatgtgcatcctgagctgtgtgatctgcctcgaggctatgatctgagcaagcaggagataacattttcttctgcatcaagtgaggaaaaatgtgcttttggccatgtctcaaagacaggaccaacttcagattcccaaagaagccagctacagagcctctggaacactatggtcttacaagcagtactaaaatcaaccctcagcctcttcaatgccaaaggtatccctattggttgagaaccacatggtaatttttaatgggacttttatcagcaaatggagttacaggaattctctgtaatgagtgattctgaagaggtactttcctggaataattgtctacctgaagaaaaaaaatttatatatacattgtgtgtgtgtgtaatacacacacacacaaccccctatacctggaagattgtcagcatgtaaatcaggaacaactttctccttattgacaatcccataataaaactcaggaaccaaggcaaaatgaattggcttctaggggtctgaaccttactgcccatacaagtgttgattcattttaatgctgtttatgatttctgcattggcagaaattttcatactttctatgtttttttaattactcagttttttattactaaaaatagcacatttgagtacatttgaaaagtagaaaaattagaaattattaactttattgaataagcaagaagtgcatcctaatcctttgattattaatgaggttgaatatttgtgtgctatcggtagctgtgtttctttgatcagatgttcctgtccttttgcccttctgttatctgttggagttgctttgtttttcgtatcaagttataggatctctttatataataaatgtaatttaacttg

SEQ ID NO: 408453 - DNA, 2007 bp, Homo sapiens
tggacatttccacgagtcacagcaatcctaaggggggaaaaaaagttggagaacaaatcactctgatttcaaactatattacaaagccacagtaatcaaaacagcatagtactggcagcaaaacagatacataaatcaacaaacagaatgtaggtgactcgtggaagtggctaacaaatgcattctgaaaatgtatttaacatagctgttttaacaaatgaaaaaaagacgtagaaaaatgtttagatgtctttttgtgatgttatataaaattgtagatgactgtggtaaatgtgtaattatgtccattatgcttcaaagttgagttttcatctttgactccaaaatgtcagagggaggccgctctaaactaaaaataacgaaaggttgccaagtattaatactagttacctccctcttttcgtagtttttgtcatgtctgtcaacttactcgattgtgtggttgcattcagaatatttgaagtttcttacgtagacagaaataataaaaatattaactaggaaaaaacagtatagcaccaagccagtatttggtatctctctctagagcgagcaagagagggagagaggaggaaaaaatacacataatacaaacatacatgcatgcacacatacatacatatgtatacacacacataatttgaaaactgattggcacttcaacgatgctgaaattgtttttaaattgaagtttctttcttccacaaagcagccgtttctattcaaatggaaattcagtaccagagaataaatgtctatgtagtcatactgaatttagatagataagggctacagcatactaaatcgacaaccaaatttgtcatgtgactaaaccgttacttcagatgaagcttacattactgttttctgcttgtgtattttctgtagagtacttttacacagattggtaaagttcaggtttcagagaactgcttttgtgcagaaaatttaggttcttttttccacctttttggtcagtaaaacttaatgaaaaaagcaaagaaaaaaatattctgaacaaagctatagggttttaagttcagcctcccaacttagtcatcctaacatgattattttgtgatttggggtgcttgccctggtgctgttccagtccatgtgcatcctgagctgtgtgatctgcctcgaggctatgatctgagcaagcaggagataacattttcttctgcatcaagtgaggaaaaatgtgcttttggccatgtctcaaagacaggaccaacttcagattcccaaagaagccagctacagagcctctggaacactatggtcttacaagcagtactaaaatcaaccctcagcctcttcaatgccaaaggtatccctattggttgagaaccacatggtaatttttaatgggacttttatcagcaaatggagttacaggaattctctgtaatgagtgattctgaagaggtactttcctggaataattgtctacctgaagaaaaaaaatttatatatacattgtgtgtgtgtgtaatacacacacacacaaccccctatacctggaagattgtcagcatgtaaatcaggaacaactttctccttattgacaatcccataataaaactcaggaaccaaggcaaaatgaattggcttctaggggtctgaaccttactgcccatacaagtgttgattcattttaatgctgtttatgatttctgcattggcagaaattttcatactttctatgtttttttaattactcagttttttattactaaaaatagcacatttgagtacatttgaaaagtagaaaaattagaaattattaactttattgaataagcaagaagtgcatcctaatcctttgattattaatgaggttgaatatttgtgtgctatcggtagctgtgtttctttgatcagatgttcctgtccttttgcccttctgttatctgttggagttgctttgtttttcgtatcaagttataggatctctttatataataaatgtaatttaacttg

SEQ ID NO: 408454 - DNA, 1335 bp, Homo sapiens
cattaagttttactgaccaaaaaggtggaaaaaagaacctaaattttcttccacaaagcagccgtttctattcaaatggaaattcagtaccagagaataaatgtctatgtagtcatactgaatttagatagataagggctacagcatactaaatcgacaaccaaatttgtcatgtgactaaaccgttacttcagatgaagcttacattactgttttctgcttgtgtattttctgtagagtacttttacacagattggtaaagttcaggtttcagagaactgcttttgtgcagaaaatttaggttcttttttccacctttttggtcagtaaaacttaatgaaaaaagcaaagaaaaaaatattctgaacaaagctatagggttttaagttcagcctcccaacttagtcatcctaacatgattattttgtgatttggggtgcttgccctggtgctgttccagtccatgtgcatcctgagctgtgtgatctgcctcgaggctatgatctgagcaagcaggagataacattttcttctgcatcaagtgaggaaaaatgtgcttttggccatgtctcaaagacaggaccaacttcagattcccaaagaagccagctacagagcctctggaacactatggtcttacaagcagtactaaaatcaaccctcagcctcttcaatgccaaaggtatccctattggttgagaaccacatggtaatttttaatgggacttttatcagcaaatggagttacaggaattctctgtaatgagtgattctgaagaggtactttcctggaataattgtctacctgaagaaaaaaaatttatatatacattgtgtgtgtgtgtaatacacacacacacaaccccctatacctggaagattgtcagcatgtaaatcaggaacaactttctccttattgacaatcccataataaaactcaggaaccaaggcaaaatgaattggcttctaggggtctgaaccttactgcccatacaagtgttgattcattttaatgctgtttatgatttctgcattggcagaaattttcatactttctatgtttttttaattactcagttttttattactaaaaatagcacatttgagtacatttgaaaagtagaaaaattagaaattattaactttattgaataagcaagaagtgcatcctaatcctttgattattaatgaggttgaatatttgtgtgctatcggtagctgtgtttctttgatcagatgttcctgtccttttgcccttctgttatctgttggagttgctttgtttttcgtatcaagttataggatctctttatataataaatgtaatttaacttg

SEQ ID NO: 408455 - DNA, 4477 bp, Homo sapiens
ggaaggagcggctcggtgttggggctaggccggtattctaggcccaagcccaggcccaggcctgtgttcccggcccttgctcaaagacaggccggtggccgctgcgacactctaggtacagcggagggcgcagcgggccgttcgctgaggtgtccggacccgccgccgagcgggccgtggagccacagtacgtggcggcgcctcttccttgcccgaagcggaactgctgaaggagcggcagcgcaggccggacgaggtgaaccaggtcatttaaccgccttcaggtgatgaatcatctgtctaataatcagatttgaggtccacagccctttgtggtcctgctacagggtgattttcagtggatgactgactggcgtggcccgaggggtgccgcagtgactgccttcccttgataaggaaacgagctttctgttctttctggacacctcgttacctgtaaaacattccggttataacttctttatccggcttgcatctctgtgcaagaggaaagctttcacatgaaagtgtcccttggtaacggcgaaatgggcgtctctgcccatttgcagccttgtaaggcaggaaccacacgcttttttaccagcaatactcacagttcggtggtattgcaaggctttgatcagcttagaatagaaggattgctttgtgatgtgaccctggtaccaggtgatggagatgaaatcttccctgttcacagagctatgatggcgtctgctagtgattatttcaaagccatgttcacaggtggaatgaaagaacaagatttgatgtgcattaagcttcatggggtgaacaaggttggtctgaagaaaatcattgattttatttatactgcaaaactttctcttaatatggacaatcttcaggacacacttgaagctgctagctttttacaaatattacccgttttggatttctgtaaagtatttcttatatcaggagtctctttggataactgtgttgaggttggacgaattgctaacacctacaatcttatagaagtggataaatatgttaataatttcatcctgaagaactttcctgctttattgagtactggggagtttctaaaactcccttttgaacgacttgcatttgtgctttccagtaatagtcttaagcactgtaccgaacttgaactctttaaggcagcctgtcgctggctaaggttggaagaccctcggatggattatgctgcaaagttaatgaagaatattcgatttccactgatgacaccacaggatctcatcaattacgtgcagacagtagatttcatgagaacagacaatacctgcgtgaatttgcttttggaagctagcaattaccaaatgatgccatatatgcagccagtgatgcagtcagatagaactgccattcgatctgactccactcacttggttacattaggaggagttttgaggcagcagctggttgtcagtaaagaattacggatgtatgatgaaagggcacaagaatggagatctttagccccaatggatgctccccgttaccagcatggtattgctgtcattggaaactttctttatgtagttggtggtcagagtaattatgatacaaaaggaaaaactgctgttgatacagttttcagatttgatcctcggtataataaatggatgcaggttgcatcattaaatgaaaagcgcacattctttcacttgagtgccctcaaaggacatttgtatgcagttggtgggcgcagtgcagctggtgaactggccacagtagaatgttacaacccaagaatgaatgagtggagctatgttgcaaaaatgagtgaaccccactatggtcatgctggaacagtatatggaggcttaatgtatatttcaggaggaattacccatgacactttccaaaatgagctcatgtgttttgacccagatacagataaatggatgcaaaaggctccaatgactacagtcagaggtctgcattgcatgtgtacagttggagataagctctatgtcattggtggcaatcacttcagaggaacaagtgattatgatgatgttctaagctgtgaatactattcaccaacccttgaccagtggaccccaattgccgccatgttaagaggccaaagtgatgttggagttgccgtctttgaaaataaaatctatgttgttggtggatattcttggaataatcgttgtatggtagaaattgtccagaaatatgacccagaaaaagatgagtggcataaagtttttgatcttccagagtcacttggtggcattcgagcctgtacactcacagtttttccacctgaagaaaaccctgggtcaccttctagagaatcacctctttcagcaccttcagatcattcttaggtctaaggtgtaacacctttgcagtacgtcatgggtgatctaatacttccccttcagttgtatcttcttacagtgattggtacagttattagatataaaggtaactgatgttattcgtcttgtatggcttttagtatgtttatcaagtggctaacaaatgcattctgaaaatgtatttaacatagctgttttaacaaatgaaaaaaagacgtagaaaaatgtttagatgtctttttgtgatgttatataaaattgtagatgactgtggtaaatgtgtaattatgtccattatgcttcaaagttgagttttcatctttgactccaaaatgtcagagggaggccgctctaaactaaaaataacgaaaggttgccaagtattaatactagttacctccctcttttcgtagtttttgtcatgtctgtcaacttactcgattgtgtggttgcattcagaatatttgaagtttcttacgtagacagaaataataaaaatattaactaggaaaaaacagtatagcaccaagccagtatttggtatctctctctagagcgagcaagagagggagagaggaggaaaaaatacacataatacaaacatacatgcatgcacacatacatacatatgtatacacacacataatttgaaaactgattggcacttcaacgatgctgaaattgtttttaaattgaagtttctttcttccacaaagcagccgtttctattcaaatggaaattcagtaccagagaataaatgtctatgtagtcatactgaatttagatagataagggctacagcatactaaatcgacaaccaaatttgtcatgtgactaaaccgttacttcagatgaagcttacattactgttttctgcttgtgtattttctgtagagtacttttacacagattggtaaagttcaggtttcagagaactgcttttgtgcagaaaatttaggttcttttttccacctttttggtcagtaaaacttaatgaaaaaagcaaagaaaaaaatattctgaacaaagctatagggttttaagttcagcctcccaacttagtcatcctaacatgattattttgtgatttggggtgcttgccctggtgctgttccagtccatgtgcatcctgagctgtgtgatctgcctcgaggctatgatctgagcaagcaggagataacattttcttctgcatcaagtgaggaaaaatgtgcttttggccatgtctcaaagacaggaccaacttcagattcccaaagaagccagctacagagcctctggaacactatggtcttacaagcagtactaaaatcaaccctcagcctcttcaatgccaaaggtatccctattggttgagaaccacatggtaatttttaatgggacttttatcagcaaatggagttacaggaattctctgtaatgagtgattctgaagaggtactttcctggaataattgtctacctgaagaaaaaaaatttatatatacattgtgtgtgtgtgtaatacacacacacacaaccccctatacctggaagattgtcagcatgtaaatcaggaacaactttctccttattgacaatcccataataaaactcaggaaccaaggcaaaatgaattggcttctaggggtctgaaccttactgcccatacaagtgttgattcattttaatgctgtttatgatttctgcattggcagaaattttcatactttctatgtttttttaattactcagttttttattactaaaaatagcacatttgagtacatttgaaaagtagaaaaattagaaattattaactttattgaataagcaagaagtgcatcctaatcctttgattattaatgaggttgaatatttgtgtgctatcggtagctgtgtttctttgatcagatgttcctgtccttttgcccttctgttatctgttggagttgctttgtttttcgtatcaagttataggatctctttatataataaatgtaatttaacttggcatttgcttggcatttatttcttccctcaatctgttgtagttttacaaaggcaacgctgttcagttaatttttgagatcaaatttgtctttttttttttttgagacagggtctc

SEQ ID NO: 408456 - DNA, 3528 bp, Homo sapiens
taactatgcgcataactattacagcataaactatacagcataaactattacagcataaactattacagcataaactattacagcatactattcccgttttggatttctgtaaagtatttcttatatcaggagtctctttggataactgtgttgaggttggacgaattgctaacacctacaatcttatagaagtggataaatatgttaataatttcatcctgaagaactttcctgctttattgagtactggggagtttctaaaactcccttttgaacgacttgcatttgtgctttccagtaatagtcttaagcactgtaccgaacttgaactctttaaggcagcctgtcgctggctaaggttggaagaccctcggatggattatgctgcaaagttaatgaagaatattcgatttccactgatgacaccacaggatctcatcaattacgtgcagacagtagatttcatgagaacagacaatacctgcgtgaatttgcttttggaagctagcaattaccaaatgatgccatatatgcagccagtgatgcagtcagatagaactgccattcgatctgactccactcacttggttacattaggaggagttttgaggcagcagctggttgtcagtaaagaattacggatgtatgatgaaagggcacaagaatggagatctttagccccaatggatgctccccgttaccagcatggtattgctgtcattggaaactttctttatgtagttggtggtcagagtaattatgatacaaaaggaaaaactgctgttgatacagttttcagatttgatcctcggtataataaatggatgcaggttgcatcattaaatgaaaagcgcacattctttcacttgagtgccctcaaaggacatttgtatgcagttggtgggcgcagtgcagctggtgaactggccacagtagaatgttacaacccaagaatgaatgagtggagctatgttgcaaaaatgagtgaaccccactatggtcatgctggaacagtatatggaggcttaatgtatatttcaggaggaattacccatgacactttccaaaatgagctcatgtgttttgacccagatacagataaatggatgcaaaaggctccaatgactacagtcagaggtctgcattgcatgtgtacagttggagataagctctatgtcattggtggcaatcacttcagaggaacaagtgattatgatgatgttctaagctgtgaatactattcaccaacccttgaccagtggaccccaattgccgccatgttaagaggccaaagtgatgttggagttgccgtctttgaaaataaaatctatgttgttggtggatattcttggaataatcgttgtatggtagaaattgtccagaaatatgacccagaaaaagatgagtggcataaagtttttgatcttccagagtcacttggtggcattcgagcctgtacactcacagtttttccacctgaagaaaaccctgggtcaccttctagagaatcacctctttcagcaccttcagatcattcttaggtctaaggtgtaacacctttgcagtacgtcatgggtgatctaatacttccccttcagttgtatcttcttacagtgattggtacagttattagatataaaggtaactgatgttattcgtcttgtatggcttttagtatgtttatcaagtggctaacaaatgcattctgaaaatgtatttaacatagctgttttaacaaatgaaaaaaagacgtagaaaaatgtttagatgtctttttgtgatgttatataaaattgtagatgactgtggtaaatgtgtaattatgtccattatgcttcaaagttgagttttcatctttgactccaaaatgtcagagggaggccgctctaaactaaaaataacgaaaggttgccaagtattaatactagttacctccctcttttcgtagtttttgtcatgtctgtcaacttactcgattgtgtggttgcattcagaatatttgaagtttcttacgtagacagaaataataaaaatattaactaggaaaaaacagtatagcaccaagccagtatttggtatctctctctagagcgagcaagagagggagagaggaggaaaaaatacacataatacaaacatacatgcatgcacacatacatacatatgtatacacacacataatttgaaaactgattggcacttcaacgatgctgaaattgtttttaaattgaagtttctttcttccacaaagcagccgtttctattcaaatggaaattcagtaccagagaataaatgtctatgtagtcatactgaatttagatagataagggctacagcatactaaatcgacaaccaaatttgtcatgtgactaaaccgttacttcagatgaagcttacattactgttttctgcttgtgtattttctgtagagtacttttacacagattggtaaagttcaggtttcagagaactgcttttgtgcagaaaatttaggttcttttttccacctttttggtcagtaaaacttaatgaaaaaagcaaagaaaaaaatattctgaacaaagctatagggttttaagttcagcctcccaacttagtcatcctaacatgattattttgtgatttggggtgcttgccctggtgctgttccagtccatgtgcatcctgagctgtgtgatctgcctcgaggctatgatctgagcaagcaggagataacattttcttctgcatcaagtgaggaaaaatgtgcttttggccatgtctcaaagacaggaccaacttcagattcccaaagaagccagctacagagcctctggaacactatggtcttacaagcagtactaaaatcaaccctcagcctcttcaatgccaaaggtatccctattggttgagaaccacatggtaatttttaatgggacttttatcagcaaatggagttacaggaattctctgtaatgagtgattctgaagaggtactttcctggaataattgtctacctgaagaaaaaaaatttatatatacattgtgtgtgtgtgtaatacacacacacacaaccccctatacctggaagattgtcagcatgtaaatcaggaacaactttctccttattgacaatcccataataaaactcaggaaccaaggcaaaatgaattggcttctaggggtctgaaccttactgcccatacaagtgttgattcattttaatgctgtttatgatttctgcattggcagaaattttcatactttctatgtttttttaattactcagttttttattactaaaaatagcacatttgagtacatttgaaaagtagaaaaattagaaattattaactttattgaataagcaagaagtgcatcctaatcctttgattattaatgaggttgaatatttgtgtgctatcggtagctgtgtttctttgatcagatgttcctgtccttttgcccttctgttatctgttggagttgctttgtttttcgtatcaagttataggatctctttatataataaatgtaatttaacttg

SEQ ID NO: 408457 - DNA, 2752 bp, Homo sapiens
ggaaggagcggctcggtgttggggctaggccggtattctaggcccaagcccaggcccaggcctgtgttcccggcccttgctcaaagacaggccggtggccgctgcgacactctaggtacagcggagggcgcagcgggccgttcgctgaggtgtccggacccgccgccgagcgggccgtggagccacagtacgtggcggcgcctcttccttgcccgaagcggaactgctgaaggagcggcagcgcaggccggacgaggtgaaccaggtcatttaaccgccttcaggtgatgaatcatctgtctaataatcagatttgaggtccacagccctttgtggtcctgctacagggtgattttcagtggatgactgactggcgtggcccgaggggtgccgcagtgactgccttcccttgataaggaaacgagctttctgttctttctggacacctcgttacctgtaaaacattccggttataacttctttatccggcttgcatctctgtgcaagaggaaagctttcacatgaaagtgtcccttggtaacggcgaaatgggcgtctctgcccatttgcagccttgtaaggcaggaaccacacgcttttttaccagcaatactcacagttcggtggtattgcaaggctttgatcagcttagaatagaaggattgctttgtgatgtgaccctggtaccaggtgatggagatgaaatcttccctgttcacagagctatgatggcgtctgctagtgattatttcaaagccatgttcacaggtggaatgaaagaacaagatttgatgtgcattaagcttcatggggtgaacaaggttggtctgaagaaaatcattgattttatttatactgcaaaactttctcttaatatggacaatcttcaggacacacttgaagctgctagctttttacaaatattacccgttttggatttctgtaaagtatttcttatatcaggagtctctttggataactgtgttgaggttggacgaattgctaacacctacaatcttatagaagtggataaatatgttaataatttcatcctgaagaactttcctgctttattgagtactggggagtttctaaaactcccttttgaacgacttgcatttgtgctttccagtaatagtcttaagcactgtaccgaacttgaactctttaaggcagcctgtcgctggctaaggttggaagaccctcggatggattatgctgcaaagttaatgaagaatattcgatttccactgatgacaccacaggatctcatcaattacgtgcagacagtagatttcatgagaacagacaatacctgcgtgaatttgcttttggaagctagcaattaccaaatgatgccatatatgcagccagtgatgcagtcagatagaactgccattcgatctgactccactcacttggttacattaggaggagttttgaggcagcagctggttgtcagtaaagaattacggatgtatgatgaaagggcacaagaatggagatctttagccccaatggatgctccccgttaccagcatggtattgctgtcattggaaactttctttatgtagttggtggtcagagtaattatgatacaaaaggaaaaactgctgttgatacagttttcagatttgatcctcggtataataaatggatgcaggttgcatcattaaatgaaaagcgcacattctttcacttgagtgccctcaaaggacatttgtatgcagttggtgggcgcagtgcagctggtgaactggccacagtagaatgttacaacccaagaatgaatgagtggagctatgttgcaaaaatgagtgaaccccactatggtcatgctggaacagtatatggaggcttaatgtatatttcaggaggaattacccatgacactttccaaaatgagctcatgtgttttgacccagatacagataaatggatgcaaaaggctccaatgactacagtcagaggtctgcattgcatgtgtacagttggagataagctctatgtcattggtggcaatcacttcagaggaacaagtgattatgatgatgttctaagctgtgaatactattcaccaacccttgaccagtggaccccaattgccgccatgttaagaggccaaagtgatgttggagttgccgtctttgaaaataaaatctatgttgttggtggatattcttggaataatcgttgtatggtagaaattgtccagaaatatgacccagaaaaagatgagtggcataaagtttttgatcttccagagtcacttggtggcattcgagcctgtacactcacagtttttccacctgaagaaaaccctgggtcaccttctagagaatcacctctttcagcaccttcagatcattcttaggtctaaggtgtaacacctttgcagtacgtcatgggtgatctaatacttccccttcagttgtatcttcttacagtgattggtacagttattagatataaagtacaagccagctgccatgttgtgagcacataccacatagctccatggagatgcccatgtgactgtgatgaagagctaagacttcctgtcagtggccgtgtgagtgacccatgttagaaacagatccgccagcccaaacagaaccttcagacaactgcagccccagctggcatcttgactgcaactcatgagcgattctaagcccaccgaagctgctcttgaattattgattcacaaaaacttttaggtaataaatgtgtgttgttttaaaaaaaaaa

SEQ ID NO: 408458 - DNA, 621 bp, Homo sapiens
tgaagtcaccacacagataaagacacttttcattctcagtaaggaactttgggagataattggggcaggcagctaaagaacaggtgtcttttgtctgacatcagcaaactcatggaaaccgatgggcggctcactttgcttagaacccccacagcacgcacacagggctgcttcccagtcacactgctcctgggatgggggtgctgctgttctgcagttagcactgttctttacttcctattactgaactgccagcgttcatttgtgttcagttaggtagattaccaattcttgttcattcagattttcttttgctcactaatgtgtttcatgttcactaacttaccaaatgtgatttattagtgactttttttttgaagatggagtggaggaatccttgcgccttctgcagcattctgctgccgttatggaacagtgcatctatggaagtgcatcagcgggggatggggagaggctagggcagtacacgtgaatggagaggtagccccaccagtatgttttctgaaatacagtcccgcagagggcagtcttgggaaattactgctttcacacactcttcttgaccctatccctccagcacctccctgctatccaaaggtt

SEQ ID NO: 408459 - DNA, 1538 bp, Homo sapiens
cacagaagccctctagccaaggcctcgggcagccctaccaaatgaatatgggcacttgagttttctaggagggctttcctgctgccctgggtctcatccaactggtatccatctaaacattcccacccagggttattcatgctagaggaagaagaatgccctttccagagccagttcttggggaaaagaggaactgttgatatagccagagcccgaaaagaagattactctgcaacagctaaagcctcacgaaagattttacttgtagatcaactttcaaaatgtaggaagtcagaatgggtgacatcatcagaaaaatatgtggagctgatcacaagaagtgaagaacccagagcacgaaagcggttgtgactcctgggcccagggagttgacagcgtctgggtttcagaggagccagcgcctccgagttgtcttgaagtgaggctctgctgtagtcctgttcttctggctctaagatctgaatgttgtgaccactaatttgctctttcctggagagtaaccccagtttggtccacaaggcttgctgcccaatctttgccaacagttgaaccaagactctgaggctgatatgcaatgtcacttacaacattaatcagatactgcatttaagtcacagtgtcttcacctggaatagattccacctcaagaaaccagtttctttgctcatccataagaagcaactcctcatctgatcaagttttataataagattgcagaaattcagtctcatctttaggctccacttctagttcttatgctatttccaccacatctgcagttacttcctccactgaagtcttgaatctctcaaagtcatccatgagggttggaaccaacatcttccaaactcctgatcttgatgtggaagaaatggaggactcagaaccaaggatttccaagtgatttcttccaaagcacaggaatctcactctgttaaagctggtctgttctaactgagatgacagtcatgtccctttccagggacctcaaggacgactttcacagtgacacggtactctccatcttaaatgagcagcgcattcggggcattttatgcgatgtcactatcattgtggaagataccaaatttaaagcccatagcaatgttctggcagcttcaagcctgtattttaaaaatatcttttggagccatacaatctgtatttccagccacgtcctggagctggacgatctcaaagctgaagtgtttactgaaatacttaattatatctacagttccacagtcgttgtcaagagacaggaaacagtcactgatctcgcagctgcaggaaaaaagctgggaatatcgttcttggaagaccttactgatcgcaacttctcaaattccccgggtccctatgtattctgtattactgaaaagggagtggttaaagaagaaaaaaatgaaaaaaggcatgaagaaccagccatcactaatgggccaaggatcacaaatgcattttccatcatcgaaacagaaaatagtaataacatgttttccccgctggacttgagg

SEQ ID NO: 408460 - DNA, 1158 bp, Homo sapiens
tggcactcgcagctgcagcaaatctcaaaataaagaggcaacggcctttctcttcctctccatctccctatagcacaccttttatttcttttcttcttttttttaagcctcacgaaagattttacttgtagatcaactttcaaaatgtaggaagtcagaatgggtgacatcatcagaaaaatatgtggagctgatcacaagaagtgaagaacccagagcacgaaagcggttgtgactcctgggcccagggagttgacagcgtctgggtttcagaggagccagcgcctccgagttgtcttgaagtgaggctctgctgtagtcctgttcttctggctctaagatctgaatgttgtgaccactaatttgctctttcctggagagtaaccccagtttggtccacaaggcttgctgcccaatctttgccaacagttgaaccaagactctgaggctgatatgcaatgtcacttacaacattaatcagatactgcatttaagatcttgatgtggaagaaatggaggactcagaaccaaggatttccaagtgatttcttccaaagcacaggaatctcactctgttaaagctggtctgttctaactgagatgacagtcatgtccctttccagggacctcaaggacgactttcacagtgacacggtactctccatcttaaatgagcagcgcattcggggcattttatgcgatgtcactatcattgtggaagataccaaatttaaagcccatagcaatgttctggcagcttcaagcctgtattttaaaaatatcttttggagccatacaatctgtatttccagccacgtcctggagctggacgatctcaaagctgaagtgtttactgaaatacttaattatatctacagttccacagtcgttgtcaagagacaggaaacagtcactgatctcgcagctgcaggaaaaaagctgggaatatcgttcttggaagaccttactgatcgcaacttctcaaattccccgggtccctatgtattctgtattactgaaaagggagtggttaaagaagaaaaaaatgaaaaaaggcatgaagaaccagccatcactaatgggccaaggatcacaaatgcattttccatcatcgaaacagaaaatagtaataacatgttttccccgctggacttgagg

SEQ ID NO: 408461 - DNA, 682 bp, Homo sapiens
tggcactcgcagctgcagcaaatctcaaaataaagaggcaacggcctttctcttcctctccatctccctatagcacaccttttatttcttttcttcttttttttaagcctcacgaaagattttacttgtagatcaactttcaaaatgtaggaagtcagaatgggtgacatcatcagaaaaatatgtggagctgatcacaagaagtgaagaacccagagcacgaaagcggttgtgactcctgggcccagggagttgacagcgtctgggtttcagaggagccagcgcctccgagttgtcttgaagtgaggctctgctgtagtcctgttcttctggctctaagatctgaatgttgtgaccactaatttgctctttcctggagagtaaccccagtttggtccacaaggcttgctgcccaatctttgccaacagttgaaccaagactctgaggctgatatgcaatgtcacttacaacattaatcagatactgcatttaagtacagacggggtttcaccatgttggccaggatggtctcaatctgttgacctcgcgatccgcccgcctcagcctcccaaagtgctgggattacaggcgtgagccaccgcgcccagcctgaactttccatttctctcccaagtctcctattctacatgctgaggatgccagaggggccccttaccacca

SEQ ID NO: 408462 - DNA, 790 bp, Homo sapiens
agcggaggctgccctgaggggctccagcataagcaggagacatggagactcttgcctccatcatggaggaggttcacaccagaagccagctctgcccttggagactctcttcccccagtgctcccctgaagcttcacactcaccagtctcatgctgcaccctgaccggcaggtccctagcatgagccccataatccctggggactgcattatcacagaccagtaataagaagatgacagtcatgtccctttccagggacctcaaggacgactttcacagtgacacggtactctccatcttaaatgagcagcgcattcggggcattttatgcgatgtcactatcattgtggaagataccaaatttaaagcccatagcaatgttctggcagcttcaagcctgtattttaaaaatatcttttggagccatacaatctgtatttccagccacgtcctggagctggacgatctcaaagctgaagtgtttactgaaatacttaattatatctacagttccacagtcgttgtcaagagacaggaaacagtcactgatctcgcagctgcaggaaaaaagctgggaatatcgttcttggaagaccttactgatcgcaacttctcaaattccccgggtccctatgtattctgtattactgaaaagggagtggttaaagaagaaaaaaatgaaaaaaggcatgaagaaccagccatcactaatgggccaaggatcacaaatgcattttccatcatcgaaacagaaaatagtaataacatgttttccccgctggacttgagg

SEQ ID NO: 408463 - DNA, 1079 bp, Homo sapiens
aggttgtccaagctggcctccctctctgctgagtgcactccagcagcttcccgatgttggcctttagaacagcctgaatttcagttaaaaaataagcttcccctgtcacacgatgccttcttgaatctgatagcttaagtgcagtaaaatctgataaatgtagcttttctgtgcccgtttcaggccacatttagaaggcaacatcaacaggattttccttttcctagacacagctcaactccataaaggacttctgttttgtaatctgttttcgagatctgatgcgtgtgtttctaacaccccgtcacgtgaggaggtctgacgtagtcacccaacatgactttgagaaaatatactgtaaagatgtgtgtgggatggtacagccagctcactgaagcaaaatatcctttgtcggaaaactttccgcagggaataacagacctgcgcagtagatttcactttgatatggcccctgtgctggcccagtatggactgcaggtttgacttttgcaggattccagatgacagtcatgtccctttccagggacctcaaggacgactttcacagtgacacggtactctccatcttaaatgagcagcgcattcggggcattttatgcgatgtcactatcattgtggaagataccaaatttaaagcccatagcaatgttctggcagcttcaagcctgtattttaaaaatatcttttggagccatacaatctgtatttccagccacgtcctggagctggacgatctcaaagctgaagtgtttactgaaatacttaattatatctacagttccacagtcgttgtcaagagacaggaaacagtcactgatctcgcagctgcaggaaaaaagctgggaatatcgttcttggaagaccttactgatcgcaacttctcaaattccccgggtccctatgtattctgtattactgaaaagggagtggttaaagaagaaaaaaatgaaaaaaggcatgaagaaccagccatcactaatgggccaaggatcacaaatgcattttccatcatcgaaacagaaaatagtaataacatgttttccccgctggacttgagg

SEQ ID NO: 408464 - DNA, 277 bp, Homo sapiens
ccttgtaatcacacgtgtaaggttaactggttaatataaattaaaataaaaatagatgtcactgacattattccataatgaacagctttgcaggaaaagaattagatctactctttcctgctactttaattatataaaacatacataaataattgccaacagtgacattattagggaacaacaaacttggaggaatattttgattagtctgaaatactaagcaatgcagctagttcaaagctagtttaaaaatttaaatacctgggtttttttgggt

SEQ ID NO: 408465 - DNA, 433 bp, Homo sapiens
tttaaaacccctgcagtttctctttggtggagaaagattctttgttcatttcgtcactcagtaaatatttagtgagctccatgctttgtgtcatgcacattgctgggtgctggagatacaaaggtgaccaagacagaggtggccctttgcccttctcaggggagaaaggtaggaagcaagtaaatgatcgagatgctgtacattgagtgggtgccatggaaggaactaggggagcatcctggggcaggatggggtacagaggaagggatgactcttccgtagggttgtcaggagagccctctctggggaggtgacattcaagttgggcatttattgttttgatattacgttatcaggttcacacaggtcagactttaatttcatttatgttgggtctatttaggcccatttgctctgttacattgctctcagc

SEQ ID NO: 408466 - DNA, 395 bp, Homo sapiens
acttaatagcttaagtagcttagcctctcttgccttaaacatgcttagaagacttaaattagccaacagttgcgcaaaatcatctggcagcacagtaccctgtagcgtattggttgtttaccctgatctgtggctgatcgtgtggctgactaggatggtgtggctgactgggagctgcggcttgctgccgctgcgcagcatcgtgagagaggatcacctggcgtattgctagctcgggaaaaaatcaaaattcaaaatttgaagtagggtttctactgaacacatatcactttctcatcgttgtaaagttgaaatatcggaagttgaaccctcataagccagggactgtctgtgaattgaaattagcctaaaagacagcagtagtatcatatttc

SEQ ID NO: 408467 - DNA, 543 bp, Homo sapiens
tgaggttcttcttctggctacaaaacctctttctgggtgattcatctccccaaaagttttggtgagcaccttctctgggtctctgattctacctttgaaaaatggctattggtctggataaccatttaggtcctccaactttttttataatttgaaattcctaaaaggtcttaaattattagggtgtctacttgcaggccttcgggcagatgggccaagagctcaggccagacctctgtgtagtagtggacatgaagccttgactagccacgaaaaaatataccacagagagcaaaccctatgaggggcaggcatcttctcatgtcttactcctcagtgcctggagaagtgctggtgcatggtagatgctcaagaaaatgcttactgagtaaacgaacatgtgattgcctctggacaatactgttaaaactaaatacttgccaggtgtggtggctcacacctgtgatagttcttttggaggccgaggtgggaggatagcttgagcccaggagttcaagcaaaatagtgagaccctgtctctac

SEQ ID NO: 408468 - DNA, 396 bp, Homo sapiens
attagataggaaagtatggaaagttttgagattgctacatgattgctcttttaatttgtccaatgtattcctttaaatgttgtgagggatttttttaccagtgaagtagcttttgcatgctaagttgtagtgaactgctgggcagaactaaaacataaatggtttgaggcatgattaatagttgtatatggtggccgggcgtggtggctcatgcctgtaatcccagcactttgggaggccgaggcgggtggctcacgaggtcaggagattgagaccatcctggctaacatggtgaaaccccgtctctactgaaaatacaaaaagtagccgggtgtggtggtgggtgcctgtagtcccagctactcaggaggctgaggcaggagaatggcatgaacc

SEQ ID NO: 408469 - DNA, 365 bp, Homo sapiens
taatgcttattcgattacttcagttgtcttttgtttctccaactagactgatggctttgtcatagcaaggattttgcttattcagtgccaaatcctagttcaatgcttggcacaagaaattgcttgtcttaatttgtctgtgtggctataacaaaatatctgaaatacataatttgtaaagaacagaaatttatttctcacagttctggaggctggcaagtccaagatcagagaggttgcttgtgaaggccactctctgcttccaagatggctcccctcatggtggggaggaatactgtgtcctcacatggcagaaggcagaagggcaagagagccaaatacctttaaaaaaaaaaaggaaaaag

SEQ ID NO: 408470 - DNA, 1101 bp, Homo sapiens
tttcaattgtagtatatgcactgctgaggcaagcacagaatctgcatgtttaataagctctccctccattcgtatgcctattaaagcttgtaaagtaggaaaccctgtgctgcaaaacaaaatctgaactcctaacaaagttctccaacagcttttcaatcttattttatcttactccaacacttgaactctctgcttccaatgcaattcagaaaggaaagtatccttgcattgacaagtagaagaattgagttttttattttattttatttttttattttgagtcaaagtctagctctgtcacccaggctggagtgcagtggcatgatctcggctcactgcaacctctgccccttgggttcaagcgattcccctgcctcagcctccagagtagctgggatgacaggcatgcaccaccagcccagctaatgttttgtgtttttagtagagacgggtttcatcgtgttggtcaggctggtctggaactcctggcttcaggtgatccacccacctttgtctccgaaagtgctgggattacaggtgtgagccacagtgcccggccagaagaatgagttaactacagctgagcacacaaaaaagtaagaatccactaggcagtacttgattaagtgccagatgactagcagaggcaagacatgctctgagttagaaggagtcatcatgatttttgaagttttcaccaagtagagagttaatttggtcttttaaggttggggaggtttctgcagtcaggaatagggggagagtaccagggacatggagtggtttatgcaaagcaaacaaataagaaagcaaaaatgaacagagattagacaactttgctatcaaggggagtagctgcgatctggctggaaaaactgtgaataagaggccaagtatttgttcgggagggcggtgttttctctaacttattcatgataaaattttgatatattgcattccatcacaaaacaaacagaaacgcttttgaagaaggaaaatggctatataattaattgacgtgcattataaaaatcacaaccacccgtatgtgcccatgagaaaaccaatctatcgaagtaaatatgatctgctgtggtc

SEQ ID NO: 408471 - DNA, 652 bp, Homo sapiens
ctcaaactcctccttaaccggccaggtttacattttgatgtgaatctggacttctctccccttcgaagtcttgatcttcccatattcacattatatatactgtccattttgctcaatctgtcttctactcaagtgatttctgcatgtatcttatctccccactaggcagtacttgattaagtgccagatgactagcagaggcaagacatgctctgagttagaaggagtcatcatgatttttgaagttttcaccaagtagagagttaatttggtcttttaaggttggggaggtttctgcagtcaggaatagggggagagtaccagggacatggagtggtttatgcaaagcaaacaaataagaaagcaaaaatgaacagagattagacaactttgctatcaaggggagtagctgcgatctggctggaaaaactgtgaataagaggccaagtatttgttcgggagggcggtgttttctctaacttattcatgataaaattttgatatattgcattccatcacaaaacaaacagaaacgcttttgaagaaggaaaatggctatataattaattgacgtgcattataaaaatcacaaccacccgtatgtgcccatgagaaaaccaatctatcgaagtaaatatgatctgctgtggtc

SEQ ID NO: 408472 - DNA, 3262 bp, Homo sapiens
ggagctttctattggtcctgggtaccgagcatgggcgctgcgtcagtgcgcgctggcgcaaggttggtggaagtcgcgttgtgcagtttcactgttacatgccttgaagtgatgaggaggtttctgttactatatgctacacagcagggacaggcaaaggccatcgcagaagaaatgtgtgagcaagctgtggtacatggattttctgcagatcttcactgtattagtgaatccgataagtatgacctaaaaaccgaaacagctcctcttgttgttgtggtttctaccacgggcaccggagacccacccgacacagcccgcaagtttgttaaggaaatacagaaccaaacactgccggttgatttctttgctcacctgcggtatgggttactgggtctcggtgattcagaatacacctacttttgcaatggggggaagataattgataaacgacttcaagagcttggagcccggcatttctatgacactggacatgcagatgactgtgtaggtttagaacttgtggttgagccgtggattgctggactctggccagccctcagaaagcattttaggtcaagcagaggacaagaggagataagtggcgcactcccggtggcatcacctgcatcctcgaggacagaccttgtgaagtcagagctgctacacattgaatctcaagtcgagcttctgagattcgatgattcaggaagaaaggattctgaggttttgaagcaaaatgcagtgaacagcaaccaatccaatgttgtaattgaagactttgagtcctcacttacccgttcggtacccccactctcacaagcctctctgaatattcctggtttacccccagaatatttacaggtacatctgcaggagtctcttggccaggaggaaagccaagtatctgtgacttcagcagatccagtttttcaagtgccaatttcaaaggcagttcaacttactacgaatgatgccataaaaaccactctgctggtagaattggacatttcaaatacagacttttcctatcagcctggagatgccttcagcgtgatctgccctaacagtgattctgaggtacaaagcctactccaaagactgcagcttgaagataaaagagagcactgcgtccttttgaaaataaaggcagacacaaagaagaaaggagctaccttaccccagcatatacctgcgggatgttctctccagttcatttttacctggtgtcttgaaatccgagcaattcctaaaaaggcatttttgcgagcccttgtggactataccagtgacagtgctgaaaagcgcaggctacaggagctgtgcagtaaacaaggggcagccgattatagccgctttgtacgagatgcctgtgcctgcttgttggatctcctcctcgctttcccttcttgccagccaccactcagtctcctgctcgaacatcttcctaaacttcaacccagaccatattcgtgtgcaagctcaagtttatttcacccaggaaagctccattttgtcttcaacattgtggaatttctgtctactgccacaacagaggttctgcggaagggagtatgtacaggctggctggccttgttggttgcttcagttcttcagccaaacatacatgcatcccatgaagacagcgggaaagccctggctcctaagatatccatctctcctcgaacaacaaattctttccacttaccagatgacccctcaatccccatcataatggtgggtccaggaaccggcatagccccgtttattgggttcctacaacatagagagaaactccaagaacaacacccagatggaaattttggagcaatgtggttgttttttggctgcaggcataaggatagggattatctattcagaaaagagctcagacatttccttaagcatgggatcttaactcatctaaaggtttccttctcaagagatgctcctgttggggaggaggaagccccagcaaagtatgtacaagacaacatccagcttcatggccagcaggtggcgagaatcctcctccaggagaacggccatatttatgtgtgtggagatgcaaagaatatggccaaggatgtacatgatgcccttgtgcaaataataagcaaagaggttggagttgaaaaactagaagcaatgaaaaccctggccactttaaaagaagaaaaacgctaccttcaggatatttggtcataaaaccagaaattaaagaaagaggattaagcttttttgactgaaagtactaaaagtcagctttactagtgccaaacctttaaattttcaaaagaaaattttctttcaacatttcttgaaggacatggagtggagattggatcatttaacaatataacaaaacttcctgatttgattttacgtatcttctatctacgcccttcctgtgcctgtgactctccccaaattgccctgttgccttgagctcttctgagctaaggcagccttcagtccctatcagcgcctcctttacttcccagagaacttcacagagactctgtccttccatgcaaaggcttcctgaaatagggagactgactgagtagctcattcttgtgacttacagtgccaacatttaaaaaagtatgaaaatgatttatttttatatgatgtatacccataaagaatgctcatattaatgtacttaaattacacatgtagagcatatctgttatatgtttatgtaactatcaaatggttatttgttactaaagctatatttctgataaaaaatattttaggataattgcctacagagggatttatttttatgatgctggaaatatgaaatgtattttaaaatttcactctggcatatgatttatctatcaccattactttttttaaagtcacaatttcagaattttgggacatttgcattcaatttacaggtaccagtacgtacatattttaatagaaagatacaacctttttattttcactccttttatttctgctgcttggcacatttttgagttttcccacattatttgtctccatgataccactaagcagtgtgctggacctaaaatactgactttagttagtatccttggatttttagattcccagtgtctaattccctgttataatttgcacaaacaaaacaaaatgttatgataatctttctccactgttctaatatatattgtatttttatttgatagcttgggatttaaaacatctctgttgaaggcttttgatccttttgagaaataaagatctgaaagaaatggca

SEQ ID NO: 408473 - DNA, 3108 bp, Homo sapiens
ggagctttctattggtcctgggtaccgagcatgggcgctgcgtcagtgcgcgctggcgcaaggttggtggaagtcgcgttgtgcagtttcactgttacatgccttgaagtgatgaggaggtttctgttactatatgctacacagcagggacaggcaaaggccatcgcagaagaaatgtgtgagcaagctgtggtacatggattttctgcagatcttcactgtattagtgaatccgataaggtctcggtgattcagaatacacctacttttgcaatggggggaagataattgataaacgacttcaagagcttggagcccggcatttctatgacactggacatgcagatgactgtgtaggtttagaacttgtggttgagccgtggattgctggactctggccagccctcagaaagcattttaggtcaagcagaggacaagaggagataagtggcgcactcccggtggcatcacctgcatcctcgaggacagaccttgtgaagtcagagctgctacacattgaatctcaagtcgagcttctgagattcgatgattcaggaagaaaggattctgaggttttgaagcaaaatgcagtgaacagcaaccaatccaatgttgtaattgaagactttgagtcctcacttacccgttcggtacccccactctcacaagcctctctgaatattcctggtttacccccagaatatttacaggtacatctgcaggagtctcttggccaggaggaaagccaagtatctgtgacttcagcagatccagtttttcaagtgccaatttcaaaggcagttcaacttactacgaatgatgccataaaaaccactctgctggtagaattggacatttcaaatacagacttttcctatcagcctggagatgccttcagcgtgatctgccctaacagtgattctgaggtacaaagcctactccaaagactgcagcttgaagataaaagagagcactgcgtccttttgaaaataaaggcagacacaaagaagaaaggagctaccttaccccagcatatacctgcgggatgttctctccagttcatttttacctggtgtcttgaaatccgagcaattcctaaaaaggcatttttgcgagcccttgtggactataccagtgacagtgctgaaaagcgcaggctacaggagctgtgcagtaaacaaggggcagccgattatagccgctttgtacgagatgcctgtgcctgcttgttggatctcctcctcgctttcccttcttgccagccaccactcagtctcctgctcgaacatcttcctaaacttcaacccagaccatattcgtgtgcaagctcaagtttatttcacccaggaaagctccattttgtcttcaacattgtggaatttctgtctactgccacaacagaggttctgcggaagggagtatgtacaggctggctggccttgttggttgcttcagttcttcagccaaacatacatgcatcccatgaagacagcgggaaagccctggctcctaagatatccatctctcctcgaacaacaaattctttccacttaccagatgacccctcaatccccatcataatggtgggtccaggaaccggcatagccccgtttattgggttcctacaacatagagagaaactccaagaacaacacccagatggaaattttggagcaatgtggttgttttttggctgcaggcataaggatagggattatctattcagaaaagagctcagacatttccttaagcatgggatcttaactcatctaaaggtttccttctcaagagatgctcctgttggggaggaggaagccccagcaaagtatgtacaagacaacatccagcttcatggccagcaggtggcgagaatcctcctccaggagaacggccatatttatgtgtgtggagatgcaaagaatatggccaaggatgtacatgatgcccttgtgcaaataataagcaaagaggttggagttgaaaaactagaagcaatgaaaaccctggccactttaaaagaagaaaaacgctaccttcaggatatttggtcataaaaccagaaattaaagaaagaggattaagcttttttgactgaaagtactaaaagtcagctttactagtgccaaacctttaaattttcaaaagaaaattttctttcaacatttcttgaaggacatggagtggagattggatcatttaacaatataacaaaacttcctgatttgattttacgtatcttctatctacgcccttcctgtgcctgtgactctccccaaattgccctgttgccttgagctcttctgagctaaggcagccttcagtccctatcagcgcctcctttacttcccagagaacttcacagagactctgtccttccatgcaaaggcttcctgaaatagggagactgactgagtagctcattcttgtgacttacagtgccaacatttaaaaaagtatgaaaatgatttatttttatatgatgtatacccataaagaatgctcatattaatgtacttaaattacacatgtagagcatatctgttatatgtttatgtaactatcaaatggttatttgttactaaagctatatttctgataaaaaatattttaggataattgcctacagagggatttatttttatgatgctggaaatatgaaatgtattttaaaatttcactctggcatatgatttatctatcaccattactttttttaaagtcacaatttcagaattttgggacatttgcattcaatttacaggtaccagtacgtacatattttaatagaaagatacaacctttttattttcactccttttatttctgctgcttggcacatttttgagttttcccacattatttgtctccatgataccactaagcagtgtgctggacctaaaatactgactttagttagtatccttggatttttagattcccagtgtctaattccctgttataatttgcacaaacaaaacaaaatgttatgataatctttctccactgttctaatatatattgtatttttatttgatagcttgggatttaaaacatctctgttgaaggcttttgatccttttgagaaataaagatctgaaagaaatggca

SEQ ID NO: 408474 - DNA, 3045 bp, Homo sapiens
ggagctttctattggtcctgggtaccgagcatgggcgctgcgtcagtgcgcgctggcgcaaggttggtggaagtcgcgttgtgcaggttcgtgcccggctggcgcggcgtggtttcactgttacatgccttgaagtgatgaggaggtttctgttactatatgctacacagcagggacaggcaaaggccatcgcagaagaaatgtgtgagcaagctgtggtacatggattttctgcagatcttcactgtattagtgaatccgataaggtctcggtgattcagaatacacctacttttgcaatggggggaagataattgataaacgacttcaagagcttggagcccggcatttctatgacactggacatgcagatgactgtgtaggtttagaacttgtggttgagccgtggattgctggactctggccagccctcagaaagcattttaggtcaagcagaggacaagaggagataagtggcgcactcccggtggcatcacctgcatcctcgaggacagaccttgtgaagtcagagctgctacacattgaatctcaagtcgagcttctgagattcgatgattcaggaagaaaggattctgaggttttgaagcaaaatgcagtgaacagcaaccaatccaatgttgtaattgaagactttgagtcctcacttacccgttcggtacccccactctcacaagcctctctgaatattcctggtttacccccagaatatttacaggtacatctgcaggagtctcttggccaggaggaaagccaagtatctgtgacttcagcagatccagtttttcaagtgccaatttcaaaggcagttcaacttactacgaatgatgccataaaaaccactctgctggtagaattggacatttcaaatacagacttttcctatcagcctggagatgccttcagcgtgatctgccctaacagtgattctgaggtacaaagcctactccaaagactgcagcttgaagataaaagagagcactgcgtccttttgaaaataaaggcagacacaaagaagaaaggcatttttgcgagcccttgtggactataccagtgacagtgctgaaaagcgcaggctacaggagctgtgcagtaaacaaggggcagccgattatagccgctttgtacgagatgcctgtgcctgcttgttggatctcctcctcgctttcccttcttgccagccaccactcagtctcctgctcgaacatcttcctaaacttcaacccagaccatattcgtgtgcaagctcaagtttatttcacccaggaaagctccattttgtcttcaacattgtggaatttctgtctactgccacaacagaggttctgcggaagggagtatgtacaggctggctggccttgttggttgcttcagttcttcagccaaacatacatgcatcccatgaagacagcgggaaagccctggctcctaagatatccatctctcctcgaacaacaaattctttccacttaccagatgacccctcaatccccatcataatggtgggtccaggaaccggcatagccccgtttattgggttcctacaacatagagagaaactccaagaacaacacccagatggaaattttggagcaatgtggttgttttttggctgcaggcataaggatagggattatctattcagaaaagagctcagacatttccttaagcatgggatcttaactcatctaaaggtttccttctcaagagatgctcctgttggggaggaggaagccccagcaaagtatgtacaagacaacatccagcttcatggccagcaggtggcgagaatcctcctccaggagaacggccatatttatgtgtgtggagatgcaaagaatatggccaaggatgtacatgatgcccttgtgcaaataataagcaaagaggttggagttgaaaaactagaagcaatgaaaaccctggccactttaaaagaagaaaaacgctaccttcaggatatttggtcataaaaccagaaattaaagaaagaggattaagcttttttgactgaaagtactaaaagtcagctttactagtgccaaacctttaaattttcaaaagaaaattttctttcaacatttcttgaaggacatggagtggagattggatcatttaacaatataacaaaacttcctgatttgattttacgtatcttctatctacgcccttcctgtgcctgtgactctccccaaattgccctgttgccttgagctcttctgagctaaggcagccttcagtccctatcagcgcctcctttacttcccagagaacttcacagagactctgtccttccatgcaaaggcttcctgaaatagggagactgactgagtagctcattcttgtgacttacagtgccaacatttaaaaaagtatgaaaatgatttatttttatatgatgtatacccataaagaatgctcatattaatgtacttaaattacacatgtagagcatatctgttatatgtttatgtaactatcaaatggttatttgttactaaagctatatttctgataaaaaatattttaggataattgcctacagagggatttatttttatgatgctggaaatatgaaatgtattttaaaatttcactctggcatatgatttatctatcaccattactttttttaaagtcacaatttcagaattttgggacatttgcattcaatttacaggtaccagtacgtacatattttaatagaaagatacaacctttttattttcactccttttatttctgctgcttggcacatttttgagttttcccacattatttgtctccatgataccactaagcagtgtgctggacctaaaatactgactttagttagtatccttggatttttagattcccagtgtctaattccctgttataatttgcacaaacaaaacaaaatgttatgataatctttctccactgttctaatatatattgtatttttatttgatagcttgggatttaaaacatctctgttgaaggcttttgatccttttgagaaataaagatctgaaagaaatggca

SEQ ID NO: 408475 - DNA, 3286 bp, Homo sapiens
ggagctttctattggtcctgggtaccgagcatgggcgctgcgtcagtgcgcgctggcgcaaggttggtggaagtcgcgttgtgcaggttcgtgcccggctggcgcggcgtggtttcactgttacatgccttgaagtgatgaggaggtttctgttactatatgctacacagcagggacaggcaaaggccatcgcagaagaaatgtgtgagcaagctgtggtacatggattttctgcagatcttcactgtattagtgaatccgataaggtctcggtgattcagaatacacctacttttgcaatggggggaagataattgataaacgacttcaagagcttggagcccggcatttctatgacactggacatgcagatgactgtgtaggtttagaacttgtggttgagccgtggattgctggactctggccagccctcagaaagcattttaggtcaagcagaggacaagaggagataagtggcgcactcccggtggcatcacctgcatcctcgaggacagaccttgtgaagtcagagctgctacacattgaatctcaagtcgagcttctgagattcgatgattcaggaagaaaggattctgaggttttgaagcaaaatgcagtgaacagcaaccaatccaatgttgtaattgaagactttgagtcctcacttacccgttcggtacccccactctcacaagcctctctgaatattcctggtttacccccagaatatttacaggtacatctgcaggagtctcttggccaggaggaaagccaagtatctgtgacttcagcagatccagtttttcaagtgccaatttcaaaggcagttcaacttactacgaatgatgccataaaaaccactctgctggtagaattggacatttcaaatacagacttttcctatcagcctggagatgccttcagcgtgatctgccctaacagtgattctgaggtacaaagcctactccaaagactgcagcttgaagataaaagagagcactgcgtccttttgaaaataaaggcagacacaaagaagaaaggagctaccttaccccagcatatacctgcgggatgttctctccagttcatttttacctggtgtcttgaaatccgagcaattcctaaaaaggcatttttgcgagcccttgtggactataccagtgacagtgctgaaaagcgcaggctacaggagctgtgcagtaaacaaggggcagccgattatagccgctttgtacgagatgcctgtgcctgcttgttggatctcctcctcgctttcccttcttgccagccaccactcagtctcctgctcgtgttttttccacttaggacctccccaaaatggtaagaccgtgttgctgaatgaggctgctcttctcaccatcctgtcctcaggctggccctctcaccctcttcagtgaagtcttcgagaaccatcagcaggaataggatgacagaacacaggaacatcttcctaaacttcaacccagaccatattcgtgtgcaagctcaagtttatttcacccaggaaagctccattttgtcttcaacattgtggaatttctgtctactgccacaacagaggttctgcggaagggagtatgtacaggctggctggccttgttggttgcttcagttcttcagccaaacatacatgcatcccatgaagacagcgggaaagccctggctcctaagatatccatctctcctcgaacaacaaattctttccacttaccagatgacccctcaatccccatcataatggtgggtccaggaaccggcatagccccgtttattgggttcctacaacatagagagaaactccaagaacaacacccagatggaaattttggagcaatgtggttgttttttggctgcaggcataaggatagggattatctattcagaaaagagctcagacatttccttaagcatgggatcttaactcatctaaaggtttccttctcaagagatgctcctgttggggaggaggaagccccagcaaagtatgtacaagacaacatccagcttcatggccagcaggtggcgagaatcctcctccaggagaacggccatatttatgtgtgtggagatgcaaagaatatggccaaggatgtacatgatgcccttgtgcaaataataagcaaagaggttggagttgaaaaactagaagcaatgaaaaccctggccactttaaaagaagaaaaacgctaccttcaggatatttggtcataaaaccagaaattaaagaaagaggattaagcttttttgactgaaagtactaaaagtcagctttactagtgccaaacctttaaattttcaaaagaaaattttctttcaacatttcttgaaggacatggagtggagattggatcatttaacaatataacaaaacttcctgatttgattttacgtatcttctatctacgcccttcctgtgcctgtgactctccccaaattgccctgttgccttgagctcttctgagctaaggcagccttcagtccctatcagcgcctcctttacttcccagagaacttcacagagactctgtccttccatgcaaaggcttcctgaaatagggagactgactgagtagctcattcttgtgacttacagtgccaacatttaaaaaagtatgaaaatgatttatttttatatgatgtatacccataaagaatgctcatattaatgtacttaaattacacatgtagagcatatctgttatatgtttatgtaactatcaaatggttatttgttactaaagctatatttctgataaaaaatattttaggataattgcctacagagggatttatttttatgatgctggaaatatgaaatgtattttaaaatttcactctggcatatgatttatctatcaccattactttttttaaagtcacaatttcagaattttgggacatttgcattcaatttacaggtaccagtacgtacatattttaatagaaagatacaacctttttattttcactccttttatttctgctgcttggcacatttttgagttttcccacattatttgtctccatgataccactaagcagtgtgctggacctaaaatactgactttagttagtatccttggatttttagattcccagtgtctaattccctgttataatttgcacaaacaaaacaaaatgttatgataatctttctccactgttctaatatatattgtatttttatttgatagcttgggatttaaaacatctctgttgaaggcttttgatccttttgagaaataaagatctgaaagaaatggca

SEQ ID NO: 408476 - DNA, 2130 bp, Homo sapiens
atgtcatgaacccctttcccgtctttacctgaaaaggagctaccttaccccagcatatacctgcgggatgttctctccagttcatttttacctggtgtcttgaaatccgagcaattcctaaaaaggcatttttgcgagcccttgtggactataccagtgacagtgctgaaaagcgcaggctacaggagctgtgcagtaaacaaggggcagccgattatagccgctttgtacgagatgcctgtgcctgcttgttggatctcctcctcgctttcccttcttgccagccaccactcagtctcctgctcgaacatcttcctaaacttcaacccagaccatattcgtgtgcaagctcaagtttatttcacccaggaaagctccattttgtcttcaacattgtggaatttctgtctactgccacaacagaggttctgcggaagggagtatgtacaggctggctggccttgttggttgcttcagttcttcagccaaacatacatgcatcccatgaagacagcgggaaagccctggctcctaagatatccatctctcctcgaacaacaaattctttccacttaccagatgacccctcaatccccatcataatggtgggtccaggaaccggcatagccccgtttattgggttcctacaacatagagagaaactccaagaacaacacccagatggaaattttggagcaatgtggttgttttttggctgcaggcataaggatagggattatctattcagaaaagagctcagacatttccttaagcatgggatcttaactcatctaaaggtttccttctcaagagatgctcctgttggggaggaggaagccccagcaaagtatgtacaagacaacatccagcttcatggccagcaggtggcgagaatcctcctccaggagaacggccatatttatgtgtgtggagatgcaaagaatatggccaaggatgtacatgatgcccttgtgcaaataataagcaaagaggttggagttgaaaaactagaagcaatgaaaaccctggccactttaaaagaagaaaaacgctaccttcaggatatttggtcataaaaccagaaattaaagaaagaggattaagcttttttgactgaaagtactaaaagtcagctttactagtgccaaacctttaaattttcaaaagaaaattttctttcaacatttcttgaaggacatggagtggagattggatcatttaacaatataacaaaacttcctgatttgattttacgtatcttctatctacgcccttcctgtgcctgtgactctccccaaattgccctgttgccttgagctcttctgagctaaggcagccttcagtccctatcagcgcctcctttacttcccagagaacttcacagagactctgtccttccatgcaaaggcttcctgaaatagggagactgactgagtagctcattcttgtgacttacagtgccaacatttaaaaaagtatgaaaatgatttatttttatatgatgtatacccataaagaatgctcatattaatgtacttaaattacacatgtagagcatatctgttatatgtttatgtaactatcaaatggttatttgttactaaagctatatttctgataaaaaatattttaggataattgcctacagagggatttatttttatgatgctggaaatatgaaatgtattttaaaatttcactctggcatatgatttatctatcaccattactttttttaaagtcacaatttcagaattttgggacatttgcattcaatttacaggtaccagtacgtacatattttaatagaaagatacaacctttttattttcactccttttatttctgctgcttggcacatttttgagttttcccacattatttgtctccatgataccactaagcagtgtgctggacctaaaatactgactttagttagtatccttggatttttagattcccagtgtctaattccctgttataatttgcacaaacaaaacaaaatgttatgataatctttctccactgttctaatatatattgtatttttatttgatagcttgggatttaaaacatctctgttgaaggcttttgatccttttgagaaataaagatctgaaagaaatggca

SEQ ID NO: 408477 - DNA, 3377 bp, Homo sapiens
ggagctttctattggtcctgggtaccgagcatgggcgctgcgtcagtgcgcgctggcgcaaggttggtggaagtcgcgttgtgcaggttcgtgcccggctggcgcggcgtggtttcactgttacatgccttgaagtgatgaggaggtttctgttactatatgctacacagcagggacaggcaaaggccatcgcagaagaaatgtgtgagcaagctgtggtacatggattttctgcagatcttcactgtattagtgaatccgataaggtctcggtgattcagaatacacctacttttgcaatggggggaagataattgataaacgacttcaagagcttggagcccggcatttctatgacactggacatgcagatgactgtgtaggtttagaacttgtggttgagccgtggattgctggactctggccagccctcagaaagcattttaggtcaagcagaggacaagaggagataagtggcgcactcccggtggcatcacctgcatcctcgaggacagaccttgtgaagtcagagctgctacacattgaatctcaagtcgagcttctgagattcgatgattcaggaagaaaggattctgaggttttgaagcaaaatgcagtgaacagcaaccaatccaatgttgtaattgaagactttgagtcctcacttacccgttcggtacccccactctcacaagcctctctgaatattcctggtttacccccagaatatttacaggtacatctgcaggagtctcttggccaggaggaaagccaagtatctgtgacttcagcagatccagtttttcaagtgccaatttcaaaggcagttcaacttactacgaatgatgccataaaaaccactctgctggtagaattggacatttcaaatacagacttttcctatcagcctggagatgccttcagcgtgatctgccctaacagtgattctgaggtacaaagcctactccaaagactgcagcttgaagataaaagagagcactgcgtccttttgaaaataaaggcagacacaaagaagaaaggagctaccttaccccagcatatacctgcgggatgttctctccagttcatttttacctggtgtcttgaaatccgagcaattcctaaaaaggcatttttgcgagcccttgtggactataccagtgacagtgctgaaaagcgcaggctacaggagctgtgcagtaaacaaggggcagccgattatagccgctttgtacgagatgcctgtgcctgcttgttggatctcctcctcgctttcccttcttgccagccaccactcagtctcctgctcgaacatcttcctaaacttcaacccagaccatattcgtgtgcaagctcaagtttatttcacccaggaaagctccattttgtcttcaacattgtggaatttctgtctactgccacaacagaggttctgcggaagggagtatgtacaggctggctggccttgttggttgcttcagttcttcagccaaacatacatgcatcccatgaagacagcgggaaagccctggctcctaagatatccatctctcctcgaacaacaaattctttccacttaccagatgacccctcaatccccatcataatggtgggtccaggaaccggcatagccccgtttattgggttcctacaacatagagagaaactccaagaacaacacccagatggaaattttggagcaatgtggttgttttttggctgcaggcataaggatagggattatctattcagaaaagagctcagacatttccttaagcatgggatcttaactcatctaaaggtttccttctcaagagatgctcctgttggggaggaggaagccccagcaaagtatgtacaagacaacatccagcttcatggccagcaggtggcgagaatcctcctccaggagaacggccatatttatgtgtgtggagatgcaaagaatatggccaaggatgtacatgatgcccttgtgcaaataataagcaaagaggttggagttgaaaaactagaagcaatgaaaaccctggccactttaaaagaagaaaaacgctaccttcaggatatttggtcataaaaccagaaattaaagaaagaggattaagcttttttgactgaaagtactaaaagtcagctttactagtgccaaacctttaaattttcaaaagaaaattttctttcaacatttcttgaaggacatggagtggagattggatcatttaacaatataacaaaacttcctgatttgattttacgtatcttctatctacgcccttcctgtgcctgtgactctccccaaattgccctgttgccttgagctcttctgagctaaggcagccttcagtccctatcagcgcctcctttacttcccagagaacttcacagagactctgtccttccatgcaaaggcttcctgaaatagggagactgactgagtagctcattcttgtgacttacagtgccaacatttaaaaaagtatgaaaatgatttatttttatatgatgtatacccataaagaatgctcatattaatgtacttaaattacacatgtagagcatatctgttatatgtttatgtaactatcaaatggttatttgttactaaagctatatttctgataaaaaatattttaggataattgcctacagagggatttatttttatgatgctggaaatatgaaatgtattttaaaatttcactctggcatatgatttatctatcaccattactttttttaaagtcacaatttcagaattttgggacatttgcattcaatttacaggtaccagtacgtacatattttaatagaaagatacaacctttttattttcactccttttatttctgctgcttggcacatttttgagttttcccacattatttgtctccatgataccactaagcagtgtgctggacctaaaatactgactttagttagtatccttggatttttagattcccagtgtctaattccctgttataatttgcacaaacaaaacaaaatgttatgataatctttctccactgttctaatatatattgtatttttatttgatagcttgggatttaaaacatctctgttgaaggcttttgatccttttgagaaataaagatctgaaagaaatggcaaaaaaaaaaacacacaacataacaaaacaacttttttgggccgccttgggccctctaaaaggttttctaaacacccttgttttggcccgcgggcccagtgtgtgttcgttaaaccttggcaatagcgggggtccccagggagacccgggcctgacatgggtttgttttcccattaaaaccccggggcccggggtttgaccaactccggggttgggctacgggttacacgggcacgggctatag

SEQ ID NO: 408478 - DNA, 1802 bp, Homo sapiens
ggagctttctattggtcctgggtaccgagcatgggcgctgcgtcagtgcgcgctggcgcaaggttggtggaagtcgcgttgtgcaggttcgtgcccggctggcgcggcgtggtttcactgttacatgccttgaagtgatgaggaggtttctgttactatatgctacacagcagggacaggcaaaggccatcgcagaagaaatgtgtgagcaagctgtggtacatggattttctgcagatcttcactgtattagtgaatccgataaggtctcggtgattcagaatacacctacttttgcaatggggggaagataattgataaacgacttcaagagcttggagcccggcatttctatgacactggacatgcagatgactgtgtaggtttagaacttgtggttgagccgtggattgctggactctggccagccctcagaaagcattttaggtcaagcagaggacaagaggagataagtggcgcactcccggtggcatcacctgcatcctcgaggacagaccttgtgaagtcagagctgctacacattgaatctcaagtcgagcttctgagattcgatgattcaggaagaaaggattctgaggttttgaagcaaaatgcagtgaacagcaaccaatccaatgttgtaattgaagactttgagtcctcacttacccgttcggtacccccactctcacaagcctctctgaatattcctggtttacccccagaatatttacaggtacatctgcaggagtctcttggccaggaggaaagccaagtatctgtgacttcagcagatccagtttttcaagtgccaatttcaaaggcagttcaacttactacgaatgatgccataaaaaccactctgctggtagaattggacatttcaaatacagacttttcctatcagcctggagatgccttcagcgtgatctgccctaacagtgattctgaggtacaaagcctactccaaagactgcagcttgaagataaaagagagcactgcgtccttttgaaaataaaggcagacacaaagaagaaaggagctaccttaccccagcatatacctgcgggatgttctctccagttcatttttacctggtgtcttgaaatccgagcaattcctaaaaaggcatttttgcgagcccttgtggactataccagtgacagtgctgaaaagcgcaggctacaggagctgtgcagtaaacaaggggcagccgattatagccgctttgtacgagatgcctgtgcctgcttgttggatctcctcctcgctttcccttcttgccagccaccactcagtctcctgctcgaacatcttcctaaacttcaacccagaccatattcgtgtgcaagctcaagtttatttcacccaggaaagctccattttgtcttcaacattgtggaatttctgtctactgccacaacagaggttctgcggaagggagtatgtacaggctggctggccttgttggttgcttcagttcttcagccaaacatacatgcatcccatgaagacagcgggaaagccctggctcctaaggtaagaaattagtaccttaacctcagcattgttaactcatactctttgtttcattagaaaaaacagtgttgtctcacccacatcattcattactgtcataagaaaatttatgctgttcttgaattttaaaatctctattgcaagagcagaaaactgtttacttccatgtactctttaactagtgtgtgtattttctgaatgtataaagcatgaattttatatagtacggtctttgcttgtcctattcatggaaaagaagacc

SEQ ID NO: 408479 - DNA, 534 bp, Homo sapiens
tctgagcaagtccagatcgagggtccttcaagagcaaaaggggactgtgtcgtaccagtgcaaatcaacatactcatggtactgccaggcagagaaccatcatcccatttcagatgaagagtaacccatttttttgcccagagtgactcttctagtcctcatactccaacagaagagacctcagcattgtccctgagcagtcgatgtcctaggacctctctgtggctctcaggaagggattgaaaatgcttgctaggggtgaagactaagcgctttataggacttcaaagcctttattactttcttgtgcttgtaactttgtcatctcctttcccatagtggtaagtagttatgcctttaacatttgcatttttctttggtgacaccaaaatgtatattgtcctttttactcttgggccagcaagatccttttcgatgcccagtacaattaaaggcacccttctttgcaagtcagggcctgatttctcctcctttttcttagtgttttttccacttaggacctccccaaaatgg

SEQ ID NO: 408480 - DNA, 3288 bp, Homo sapiens
ggagctttctattggtcctgggtaccgagcatgggcgctgcgtcagtgcgcgctggcgcaaggttggtggaagtcgcgttgtgcaggttcgtgcccggctggcgcggcgtggtttcactgttacatgccttgaagtgatgaggaggtttctgttactatatgctacacagcagggacaggcaaaggccatcgcagaagaaatgtgtgagcaagctgtggtacatggattttctgcagatcttcactgtattagtgaatccgataagtatgacctaaaaaccgaaacagctcctcttgttgttgtggtttctaccacgggcaccggagacccacccgacacagcccgcaagtttgttaaggaaatacagaaccaaacactgccggttgatttctttgctcacctgcggtatgggttactgggtctcggtgattcagaatacacctacttttgcaatggggggaagataattgataaacgacttcaagagcttggagcccggcatttctatgacactggacatgcagatgactgtgtaggtttagaacttgtggttgagccgtggattgctggactctggccagccctcagaaagcattttaggtcaagcagaggacaagaggagataagtggcgcactcccggtggcatcacctgcatcctcgaggacagaccttgtgaagtcagagctgctacacattgaatctcaagtcgagcttctgagattcgatgattcaggaagaaaggattctgaggttttgaagcaaaatgcagtgaacagcaaccaatccaatgttgtaattgaagactttgagtcctcacttacccgttcggtacccccactctcacaagcctctctgaatattcctggtttacccccagaatatttacaggtacatctgcaggagtctcttggccaggaggaaagccaagtatctgtgacttcagcagatccagtttttcaagtgccaatttcaaaggcagttcaacttactacgaatgatgccataaaaaccactctgctggtagaattggacatttcaaatacagacttttcctatcagcctggagatgccttcagcgtgatctgccctaacagtgattctgaggtacaaagcctactccaaagactgcagcttgaagataaaagagagcactgcgtccttttgaaaataaaggcagacacaaagaagaaaggagctaccttaccccagcatatacctgcgggatgttctctccagttcatttttacctggtgtcttgaaatccgagcaattcctaaaaaggcatttttgcgagcccttgtggactataccagtgacagtgctgaaaagcgcaggctacaggagctgtgcagtaaacaaggggcagccgattatagccgctttgtacgagatgcctgtgcctgcttgttggatctcctcctcgctttcccttcttgccagccaccactcagtctcctgctcgaacatcttcctaaacttcaacccagaccatattcgtgtgcaagctcaagtttatttcacccaggaaagctccattttgtcttcaacattgtggaatttctgtctactgccacaacagaggttctgcggaagggagtatgtacaggctggctggccttgttggttgcttcagttcttcagccaaacatacatgcatcccatgaagacagcgggaaagccctggctcctaagatatccatctctcctcgaacaacaaattctttccacttaccagatgacccctcaatccccatcataatggtgggtccaggaaccggcatagccccgtttattgggttcctacaacatagagagaaactccaagaacaacacccagatggaaattttggagcaatgtggttgttttttggctgcaggcataaggatagggattatctattcagaaaagagctcagacatttccttaagcatgggatcttaactcatctaaaggtttccttctcaagagatgctcctgttggggaggaggaagccccagcaaagtatgtacaagacaacatccagcttcatggccagcaggtggcgagaatcctcctccaggagaacggccatatttatgtgtgtggagatgcaaagaatatggccaaggatgtacatgatgcccttgtgcaaataataagcaaagaggttggagttgaaaaactagaagcaatgaaaaccctggccactttaaaagaagaaaaacgctaccttcaggatatttggtcataaaaccagaaattaaagaaagaggattaagcttttttgactgaaagtactaaaagtcagctttactagtgccaaacctttaaattttcaaaagaaaattttctttcaacatttcttgaaggacatggagtggagattggatcatttaacaatataacaaaacttcctgatttgattttacgtatcttctatctacgcccttcctgtgcctgtgactctccccaaattgccctgttgccttgagctcttctgagctaaggcagccttcagtccctatcagcgcctcctttacttcccagagaacttcacagagactctgtccttccatgcaaaggcttcctgaaatagggagactgactgagtagctcattcttgtgacttacagtgccaacatttaaaaaagtatgaaaatgatttatttttatatgatgtatacccataaagaatgctcatattaatgtacttaaattacacatgtagagcatatctgttatatgtttatgtaactatcaaatggttatttgttactaaagctatatttctgataaaaaatattttaggataattgcctacagagggatttatttttatgatgctggaaatatgaaatgtattttaaaatttcactctggcatatgatttatctatcaccattactttttttaaagtcacaatttcagaattttgggacatttgcattcaatttacaggtaccagtacgtacatattttaatagaaagatacaacctttttattttcactccttttatttctgctgcttggcacatttttgagttttcccacattatttgtctccatgataccactaagcagtgtgctggacctaaaatactgactttagttagtatccttggatttttagattcccagtgtctaattccctgttataatttgcacaaacaaaacaaaatgttatgataatctttctccactgttctaatatatattgtatttttatttgatagcttgggatttaaaacatctctgttgaaggcttttgatccttttgagaaataaagatctgaaagaaatggca

SEQ ID NO: 408481 - DNA, 3134 bp, Homo sapiens
ggagctttctattggtcctgggtaccgagcatgggcgctgcgtcagtgcgcgctggcgcaaggttggtggaagtcgcgttgtgcaggttcgtgcccggctggcgcggcgtggtttcactgttacatgccttgaagtgatgaggaggtttctgttactatatgctacacagcagggacaggcaaaggccatcgcagaagaaatgtgtgagcaagctgtggtacatggattttctgcagatcttcactgtattagtgaatccgataaggtctcggtgattcagaatacacctacttttgcaatggggggaagataattgataaacgacttcaagagcttggagcccggcatttctatgacactggacatgcagatgactgtgtaggtttagaacttgtggttgagccgtggattgctggactctggccagccctcagaaagcattttaggtcaagcagaggacaagaggagataagtggcgcactcccggtggcatcacctgcatcctcgaggacagaccttgtgaagtcagagctgctacacattgaatctcaagtcgagcttctgagattcgatgattcaggaagaaaggattctgaggttttgaagcaaaatgcagtgaacagcaaccaatccaatgttgtaattgaagactttgagtcctcacttacccgttcggtacccccactctcacaagcctctctgaatattcctggtttacccccagaatatttacaggtacatctgcaggagtctcttggccaggaggaaagccaagtatctgtgacttcagcagatccagtttttcaagtgccaatttcaaaggcagttcaacttactacgaatgatgccataaaaaccactctgctggtagaattggacatttcaaatacagacttttcctatcagcctggagatgccttcagcgtgatctgccctaacagtgattctgaggtacaaagcctactccaaagactgcagcttgaagataaaagagagcactgcgtccttttgaaaataaaggcagacacaaagaagaaaggagctaccttaccccagcatatacctgcgggatgttctctccagttcatttttacctggtgtcttgaaatccgagcaattcctaaaaaggcatttttgcgagcccttgtggactataccagtgacagtgctgaaaagcgcaggctacaggagctgtgcagtaaacaaggggcagccgattatagccgctttgtacgagatgcctgtgcctgcttgttggatctcctcctcgctttcccttcttgccagccaccactcagtctcctgctcgaacatcttcctaaacttcaacccagaccatattcgtgtgcaagctcaagtttatttcacccaggaaagctccattttgtcttcaacattgtggaatttctgtctactgccacaacagaggttctgcggaagggagtatgtacaggctggctggccttgttggttgcttcagttcttcagccaaacatacatgcatcccatgaagacagcgggaaagccctggctcctaagatatccatctctcctcgaacaacaaattctttccacttaccagatgacccctcaatccccatcataatggtgggtccaggaaccggcatagccccgtttattgggttcctacaacatagagagaaactccaagaacaacacccagatggaaattttggagcaatgtggttgttttttggctgcaggcataaggatagggattatctattcagaaaagagctcagacatttccttaagcatgggatcttaactcatctaaaggtttccttctcaagagatgctcctgttggggaggaggaagccccagcaaagtatgtacaagacaacatccagcttcatggccagcaggtggcgagaatcctcctccaggagaacggccatatttatgtgtgtggagatgcaaagaatatggccaaggatgtacatgatgcccttgtgcaaataataagcaaagaggttggagttgaaaaactagaagcaatgaaaaccctggccactttaaaagaagaaaaacgctaccttcaggatatttggtcataaaaccagaaattaaagaaagaggattaagcttttttgactgaaagtactaaaagtcagctttactagtgccaaacctttaaattttcaaaagaaaattttctttcaacatttcttgaaggacatggagtggagattggatcatttaacaatataacaaaacttcctgatttgattttacgtatcttctatctacgcccttcctgtgcctgtgactctccccaaattgccctgttgccttgagctcttctgagctaaggcagccttcagtccctatcagcgcctcctttacttcccagagaacttcacagagactctgtccttccatgcaaaggcttcctgaaatagggagactgactgagtagctcattcttgtgacttacagtgccaacatttaaaaaagtatgaaaatgatttatttttatatgatgtatacccataaagaatgctcatattaatgtacttaaattacacatgtagagcatatctgttatatgtttatgtaactatcaaatggttatttgttactaaagctatatttctgataaaaaatattttaggataattgcctacagagggatttatttttatgatgctggaaatatgaaatgtattttaaaatttcactctggcatatgatttatctatcaccattactttttttaaagtcacaatttcagaattttgggacatttgcattcaatttacaggtaccagtacgtacatattttaatagaaagatacaacctttttattttcactccttttatttctgctgcttggcacatttttgagttttcccacattatttgtctccatgataccactaagcagtgtgctggacctaaaatactgactttagttagtatccttggatttttagattcccagtgtctaattccctgttataatttgcacaaacaaaacaaaatgttatgataatctttctccactgttctaatatatattgtatttttatttgatagcttgggatttaaaacatctctgttgaaggcttttgatccttttgagaaataaagatctgaaagaaatggca

SEQ ID NO: 408482 - DNA, 2721 bp, Homo sapiens
  misc_feature (16)..(16): n is a, c, g, or t
  misc_feature (28)..(28): n is a, c, g, or t
  misc_feature (36)..(36): n is a, c, g, or t
  misc_feature (41)..(41): n is a, c, g, or t
  misc_feature (44)..(44): n is a, c, g, or t
ttgtctcttgaggatncacagcgagcangataccanctggnganggacaagaggagataagtggcgcactcccggtggcatcacctgcatcctcgaggacagaccttgtgaagtcagagctgctacacattgaatctcaagtcgagcttctgagattcgatgattcaggaagaaaggattctgaggttttgaagcaaaatgcagtgaacagcaaccaatccaatgttgtaattgaagactttgagtcctcacttacccgttcggtacccccactctcacaagcctctctgaatattcctggtttacccccagaatatttacaggtacatctgcaggagtctcttggccaggaggaaagccaagtatctgtgacttcagcagatccagtttttcaagtgccaatttcaaaggcagttcaacttactacgaatgatgccataaaaaccactctgctggtagaattggacatttcaaatacagacttttcctatcagcctggagatgccttcagcgtgatctgccctaacagtgattctgaggtacaaagcctactccaaagactgcagcttgaagataaaagagagcactgcgtccttttgaaaataaaggcagacacaaagaagaaaggagctaccttaccccagcatatacctgcgggatgttctctccagttcatttttacctggtgtcttgaaatccgagcaattcctaaaaaggcatttttgcgagcccttgtggactataccagtgacagtgctgaaaagcgcaggctacaggagctgtgcagtaaacaaggggcagccgattatagccgctttgtacgagatgcctgtgcctgcttgttggatctcctcctcgctttcccttcttgccagccaccactcagtctcctgctcgaacatcttcctaaacttcaacccagaccatattcgtgtgcaagctcaagtttatttcacccaggaaagctccattttgtcttcaacattgtggaatttctgtctactgccacaacagaggttctgcggaagggagtatgtacaggctggctggccttgttggttgcttcagttcttcagccaaacatacatgcatcccatgaagacagcgggaaagccctggctcctaagatatccatctctcctcgaacaacaaattctttccacttaccagatgacccctcaatccccatcataatggtgggtccaggaaccggcatagccccgtttattgggttcctacaacatagagagaaactccaagaacaacacccagatggaaattttggagcaatgtggttgttttttggctgcaggcataaggatagggattatctattcagaaaagagctcagacatttccttaagcatgggatcttaactcatctaaaggtttccttctcaagagatgctcctgttggggaggaggaagccccagcaaagtatgtacaagacaacatccagcttcatggccagcaggtggcgagaatcctcctccaggagaacggccatatttatgtgtgtggagatgcaaagaatatggccaaggatgtacatgatgcccttgtgcaaataataagcaaagaggttggagttgaaaaactagaagcaatgaaaaccctggccactttaaaagaagaaaaacgctaccttcaggatatttggtcataaaaccagaaattaaagaaagaggattaagcttttttgactgaaagtactaaaagtcagctttactagtgccaaacctttaaattttcaaaagaaaattttctttcaacatttcttgaaggacatggagtggagattggatcatttaacaatataacaaaacttcctgatttgattttacgtatcttctatctacgcccttcctgtgcctgtgactctccccaaattgccctgttgccttgagctcttctgagctaaggcagccttcagtccctatcagcgcctcctttacttcccagagaacttcacagagactctgtccttccatgcaaaggcttcctgaaatagggagactgactgagtagctcattcttgtgacttacagtgccaacatttaaaaaagtatgaaaatgatttatttttatatgatgtatacccataaagaatgctcatattaatgtacttaaattacacatgtagagcatatctgttatatgtttatgtaactatcaaatggttatttgttactaaagctatatttctgataaaaaatattttaggataattgcctacagagggatttatttttatgatgctggaaatatgaaatgtattttaaaatttcactctggcatatgatttatctatcaccattactttttttaaagtcacaatttcagaattttgggacatttgcattcaatttacaggtaccagtacgtacatattttaatagaaagatacaacctttttattttcactccttttatttctgctgcttggcacatttttgagttttcccacattatttgtctccatgataccactaagcagtgtgctggacctaaaatactgactttagttagtatccttggatttttagattcccagtgtctaattccctgttataatttgcacaaacaaaacaaaatgttatgataatctttctccactgttctaatatatattgtatttttatttgatagcttgggatttaaaacatctctgttgaaggcttttgatccttttgagaaataaagatctgaaagaaatggca

SEQ ID NO: 408483 - DNA, 2197 bp, Homo sapiens
gtggaatttttctaacaggtcaacattaaagcaaatggtaaattaaattccctcctcctgacaatagctcctagtggctttctcattttttcttgggtaattgggtgcatccctaggcagacatttaactgaatattctaatagctctacccacaaattgtgtcacaatttaaggcgggctcctttttgtaggcatttttgcgagcccttgtggactataccagtgacagtgctgaaaagcgcaggctacaggagctgtgcagtaaacaaggggcagccgattatagccgctttgtacgagatgcctgtgcctgcttgttggatctcctcctcgctttcccttcttgccagccaccactcagtctcctgctcgaacatcttcctaaacttcaacccagaccatattcgtgtgcaagctcaagtttatttcacccaggaaagctccattttgtcttcaacattgtggaatttctgtctactgccacaacagaggttctgcggaagggagtatgtacaggctggctggccttgttggttgcttcagttcttcagccaaacatacatgcatcccatgaagacagcgggaaagccctggctcctaagatatccatctctcctcgaacaacaaattctttccacttaccagatgacccctcaatccccatcataatggtgggtccaggaaccggcatagccccgtttattgggttcctacaacatagagagaaactccaagaacaacacccagatggaaattttggagcaatgtggttgttttttggctgcaggcataaggatagggattatctattcagaaaagagctcagacatttccttaagcatgggatcttaactcatctaaaggtttccttctcaagagatgctcctgttggggaggaggaagccccagcaaagtatgtacaagacaacatccagcttcatggccagcaggtggcgagaatcctcctccaggagaacggccatatttatgtgtgtggagatgcaaagaatatggccaaggatgtacatgatgcccttgtgcaaataataagcaaagaggttggagttgaaaaactagaagcaatgaaaaccctggccactttaaaagaagaaaaacgctaccttcaggatatttggtcataaaaccagaaattaaagaaagaggattaagcttttttgactgaaagtactaaaagtcagctttactagtgccaaacctttaaattttcaaaagaaaattttctttcaacatttcttgaaggacatggagtggagattggatcatttaacaatataacaaaacttcctgatttgattttacgtatcttctatctacgcccttcctgtgcctgtgactctccccaaattgccctgttgccttgagctcttctgagctaaggcagccttcagtccctatcagcgcctcctttacttcccagagaacttcacagagactctgtccttccatgcaaaggcttcctgaaatagggagactgactgagtagctcattcttgtgacttacagtgccaacatttaaaaaagtatgaaaatgatttatttttatatgatgtatacccataaagaatgctcatattaatgtacttaaattacacatgtagagcatatctgttatatgtttatgtaactatcaaatggttatttgttactaaagctatatttctgataaaaaatattttaggataattgcctacagagggatttatttttatgatgctggaaatatgaaatgtattttaaaatttcactctggcatatgatttatctatcaccattactttttttaaagtcacaatttcagaattttgggacatttgcattcaatttacaggtaccagtacgtacatattttaatagaaagatacaacctttttattttcactccttttatttctgctgcttggcacatttttgagttttcccacattatttgtctccatgataccactaagcagtgtgctggacctaaaatactgactttagttagtatccttggatttttagattcccagtgtctaattccctgttataatttgcacaaacaaaacaaaatgttatgataatctttctccactgttctaatatatattgtatttttatttgatagcttgggatttaaaacatctctgttgaaggcttttgatccttttgagaaataaagatctgaaagaaatggca

SEQ ID NO: 408484 - DNA, 1844 bp, Homo sapiens
ggagctttctattggtcctgggtaccgagcatgggcgctgcgtcagtgcgcgctggcgcaaggttggtggaagtcgcgttgtgcaggttcgtgcccggctggcgcggcgtggtttcactgttacatgccttgaagtgatgaggaggtttctgttactatatgctacacagcagggacaggcaaaggccatcgcagaagaaatgtgtgagcaagctgtggtacatggattttctgcagatcttcactgtattagtgaatccgataaggtctcggtgattcagaatacacctacttttgcaatggggggaagataattgataaacgacttcaagagcttggagcccggcatttctatgacactggacatgcagatgactgtgtaggtttagaacttgtggttgagccgtggattgctggactctggccagccctcagaaagcattttaggtcaagcagaggacaagaggagataagtggcgcactcccggtggcatcacctgcatcctcgaggacagaccttgtgaagtcagagctgctacacattgaatctcaagtcgagcttctgagattcgatgattcaggaagaaaggattctgaggttttgaagcaaaatgcagtgaacagcaaccaatccaatgttgtaattgaagactttgagtcctcacttacccgttcggtacccccactctcacaagcctctctgaatattcctggtttacccccagaatatttacaggtacatctgcaggagtctcttggccaggaggaaagccaagtatctgtgacttcagcagatccagtttttcaagtgccaatttcaaaggcagttcaacttactacgaatgatgccataaaaaccactctgctggtagaattggacatttcaaatacagacttttcctatcagcctggagatgccttcagcgtgatctgccctaacagtgattctgaggtacaaagcctactccaaagactgcagcttgaagataaaagagagcactgcgtccttttgaaaataaaggcagacacaaagaagaaaggagctaccttaccccagcatatacctgcgggatgttctctccagttcatttttacctggtgtcttgaaatccgagcaattcctaaaaaggcatttttgcgagcccttgtggactataccagtgacagtgctgaaaagcgcaggctacaggagctgtgcagtaaacaaggggcagccgattatagccgctttgtacgagatgcctgtgcctgcttgttggatctcctcctcgctttcccttcttgccagccaccactcagtctcctgctcgtgttttttccacttaggacctccccaaaatggtaagaccgtgttgctgaatgaggctgctcttctcaccatcctgtcctcaggctggccctctcaccctcttcagtgaagtcttcgagaaccatcagcaggaataggatgacagaacacaggaacatcttcctaaacttcaacccagaccatattcgtgtgcaagctcaagtttatttcacccaggaaagctccattttgtcttcaacattgtggaatttctgtctactgccacaacagaggttctgcggaagggagtatgtacaggctggctggccttgttggttgcttcagttcttcagccaaacatacatgcatcccatgaagacagcgggaaagccctggctcctaagattgtggacactttacacttggactcagtgacatctttttatgttttgatacggcactcagcagaatttcgagaccacgtgtgtaggcaacagtttaaagttgtccacaagaatggttgaaataaagcaacatttcaggctttatcatgaag

SEQ ID NO: 408485 - DNA, 1486 bp, Homo sapiens
ggagctttctattggtcctgggtaccgagcatgggcgctgcgtcagtgcgcgctggcgcaaggttggtggaagtcgcgttgtgcaggttcgtgcccggctggcgcggcgtggtttcactgttacatgccttgaagtgatgaggaggtttctgttactatatgctacacagcagggacaggcaaaggccatcgcagaagaaatgtgtgagcaagctgtggtacatggattttctgcagatcttcactgtattagtgaatccgataaggtctcggtgattcagaatacacctacttttgcaatggggggaagataattgataaacgacttcaagagcttggagcccggcatttctatgacactggacatgcagatgactgtgtaggtttagaacttgtggttgagccgtggattgctggactctggccagccctcagaaagcattttaggtcaagcagaggacaagaggagataagtggcgcactcccggtggcatcacctgcatcctcgaggacagaccttgtgaagtcagagctgctacacattgaatctcaagtcgagcttctgagattcgatgattcaggaagaaaggattctgaggttttgaagcaaaatgcagtgaacagcaaccaatccaatgttgtaattgaagactttgagtcctcacttacccgttcggtacccccactctcacaagcctctctgaatattcctggtttacccccagaatatttacaggtacatctgcaggagtctcttggccaggaggaaagccaagtatctgtgacttcagcagatccagtttttcaagtgccaatttcaaaggcagttcaacttactacgaatgatgccataaaaaccactctgctggtagaattggacatttcaaatacagacttttcctatcagcctggagatgccttcagcgtgatctgccctaacagtgattctgaggtacaaagcctactccaaagactgcagcttgaagataaaagagagcactgcgtccttttgaaaataaaggcagacacaaagaagaaaggagctaccttaccccagcatatacctgcgggatgttctctccagttcatttttacctggtgtcttgaaatccgagcaattcctaaaaaggtatttttttctgtcttcttcaggtaactattttaaaatatgcttagctttatttaggattgattaaacaaatttagaatatgccctttgcagtcttaaaaaatgtgatcttgatagcatgtttttaatattagttcccaagggtgtgtgctatcatcgtaactatcatctatgaatctttttatgttgtatttgcatttaaatttttgttttctattgaaatgagggcttaaatagggctttttcttagtctaaatagggctttttctttgtcttacttttactagttattaactacgtagcacattccacagtgatggaggtgactgcagttgaccttgtgttacccagctacac

SEQ ID NO: 408486 - DNA, 498 bp, Homo sapiens
agctcggtacctctatccacactggaacaagagccatggcacagacggctatcaaggcaatgcaccaagcacagaccatggagggttgctcatcacccatggtggtaaaatttgctgatacacagaaggacaaagaacagaagagaatggcccagcagctccagcagcagatgcagcaaatcagcgcagcatctgtgtggggaaaccttgctggtctaaatactcttggaccccagtatttagcagtgagtctttgtggtttgctttctgcagactgtgcaagctcccagctgttccttcttctgctgtccctagccaacaaacacagtggcatttacaacttttggcatatagaaattatatgtaaaaattcaggtagtactatttcttttagtcctgttagtctctttctctctatatatatatgtatctctggacatgcatctctggttatatcttgaggcttttgctgcaactaaagtgaattcctggtttccc

SEQ ID NO: 408487 - DNA, 7913 bp, Homo sapiens
tattgttcggtgttctgctctggcggcagcggcagcggcggcgggacgcggaggctcccccgggattcggcctcagcagcgaggcggcggcggcggctgcggaggcgcaggcagcaactgaggcagcggcaggctcaggtgcagccgctgctcaaagaaaatgaacggcaccctggaccacccagaccaaccagatcttgatgctatcaagatgtttgtgggccaggttccaaggacctggtctgaaaaggacttgcgggaactcttcgaacagtatggtgctgtgtatgaaatcaacgtcctaagggataggagccaaaacccgcctcagagcaaagggtgctgttttgttacattttacacccgtaaagctgcattagaagctcagaatgctcttcacaacatgaaagtcctcccagggatgcatcaccctatacagatgaaacctgctgacagtgagaagaacaatgcagtggaagacaggaagctgtttattggtatgatttccaagaagtgcactgaaaatgacatccgagtcatgttctcttcgtttggacagattgaagaatgccggatattgcggggacctgatggcctgagccgaggttgtgcatttgtgacttttacaacaagagccatggcacagacggctatcaaggcaatgcaccaagcacagaccatggagggttgctcatcacccatggtggtaaaatttgctgatacacagaaggacaaagaacagaagagaatggcccagcagctccagcagcagatgcagcaaatcagcgcagcatctgtgtggggaaaccttgctggtctaaatactcttggaccccagtatttagcactttatttgcagctccttcagcagactgcctcctctgggaacctcaacaccctgagcagcctccacccaatgggagggttgaatgcaatgcagttacagaatttggctgcactagctgctgcagctagtgcagctcagaacacaccaagtggtaccaatgctctcactacatccagcagtcccctcagcgtgctcactagttcagggtcctcacctagctctagcagcagtaattctgtcaaccccatagcctcacttggagccctgcagacattagctggagcaacggctggcctcaatgttggctctttggcaggaatggctgctttaaatggtggcctgggcagcagtggcctttccaatggcaccgggagcaccatggaggccctcactcaggcctactcgggtatccagcaatatgctgctgctgcgctccccactctgtacaaccagaatcttctgacacagcagagtattggtgctgctggaagccagaaggaaggtccagagggagccaacctgttcatctaccacctgccccaggagtttggtgatcaggacctgctgcagatgtttatgccctttgggaatgtcgtgtctgccaaggttttcatagacaagcagacaaacctgagcaagtgttttggttttgtaagttacgacaatcctgtttcggcccaagctgccatccagtccatgaacggctttcagattggcatgaagcggcttaaagtgcagctcaaacgttcgaagaatgacagcaagccctactgagcgtgctcccctctgagactggagtgagagggtcttctggtaagtgggggaggagcacccttaatgattcgaagccctgaggctgtgtgttgacagccctggaccctgatccctgccactctcgcaggcacagcttgccctgaagactcggctactgccttctgtgggagtttcgcttcgtacagaggacaagtttgtgctttggtttccagtgttttactttggagtttaggtgccatatcctgaggttttttttgtttttgtttttgtttctcctttatttaaagtttgctgtgtttgtaaccagtgtgtgttgagaaggaccaacaccaaaccaccctggggaagggggacagggaaacatttaacacagacgatgatcaggatttgccccaaaccaccccaagagagaggactgagtggaacaaaaaagtgacccccagaacctctcttagtgtgagggtgggtagaatgagaactgacacctgggagctgtggggagcagagcggctttggggaagagtggagtgactagacacctaatgccctggcagctggagactcaaactcctgtacagctaccttctgggaaatagtttttgacacctatttttcagattcttgtccggaatttctgctgctcttttcaaaaaagggcattaacaattctctggaaataaagcacctgttagcctgacatatgcaaaaagcagggcggcatcacccattacgagctcccccagccagcagtcagtattggattggccttgcctggctggtggcagtttgggagaaacagccaaagaggttagtttatttcaacaccaaattagaccatggcccatttccaacgggtctctttaaaggcctctatggaatacattgcctggtttccttctttgcagttcaccacagcaaggaatgtcacctccatcccaagccaccattttctcatgaaggcaaatccaagaagggcttgcagttcttgctgaagggggtaccatttgtgggcagagtgatcaataccatctagttgggggaggaggagcttatttcttggtgtacttgaatcagaaggtccctgcaagccagtatgcttcatttgccagtggccagaaattctcccttgcctccttgattgaggtgtcccagatgtagtattcccacaggggtctggcaggcccctcctgtaaccactccagtcacattttctgctcttgaggcagaggtgacatcaggacgtttacagcctccacatgaattgagtgttcatttacctcagtattaccgtgttcatttttgtcctcgtgctacagttagctccctgccgcctcttgcaggtcttacttcagctcttgcctgtgacccacacagcttctgggctctgcctctgctctaagaagtgctgtgggggtagagaaccaggaaggacatgctgttgggaatgtacacctgggcagaggtggccctgttaagatgtgactgtagccacagccagggatgggatccctgggtctctggaatctgaaacctcaacaaataccagtcttgacccctagcagcagagataagaataaaggggttggtttgctattaagtcagatgggggctctctccttgtcatgctgtccctgtgggtaacagacagggattgaccatcttactgttgtacaggtagctggtggtgttggattatcccattgaagctgggacagctgttcctttctcatagtgataacttgggtctgttgtcctctaaggaacgtgaaacatacacttcttaagctgaaccacgtaaacttgaaattctgcgcactgggagaaatgtgtcctgtgtttcaaaggataaaactgttctaaaggcttccagggtcatgatgggattttttaaataaatgcaaaaaataaaaataaaaaagaaaaaagaaaacaaaaaaaaaaaagaaaaaaatgctaggttggggaggcgctgttctgaatcccaaccggctggaaccaagaatgtcgtttctatttttatagaagttttatacagctccggggtggagaatatttattacctaaattatatctctggaaaaggccaggattttgtagaatccagaatgtgattgttatacacacagggtgctgtgtatgattgaaactactgactttctgtggcccgtttgcagcccagctaacctgcccaaggggaaggtgttaatgctgtgaattggcagaggagagagctgtgctccatagggtgctgccggtgctgtgctccctagccttctgttctgtcttcctccttagccagaacgccactcccttcccacatccccttcttctctccgccttcccccatctcaccattatttgtccatggatttgtcctgggctctgggaccttatgaaacccctttcctaatgacataagaggccaaggtgcaatccacccacctttgataccagaccctgagggcttcatacctgctgatgggttttcttttctaaaaggaatgctcgccccagcagggtcctgggctgcttgagcagccagctggtgagaccatgcacttctctgttctctcctccccctgcccagtgagttagcacagcagtagcactgcccttgagcacagttctttccccaggccaaagatggttttgtgaagaagctgctcccctacaagtctcacgtgtgaaagggctcagctcagagtggagactcgctgtcaagtcttaagcaatccttttctgttgtgtgaaggtttcacttacaatgtgttttctgctgtagttttgtttcttacttgggttacatcatgaaattgatttgccttgaatgcagccagaccactgtctcctgggttccccttgagtggccaggcctggatggaagctaagagcttggatttctgggaacaaagggccatccccataagattgagcagaaattctggtcctcttccctgaaaaattttccccaccccagccagcatcttctgcttccccttgggttgtgaccagggagtggggagagaggctgaggctctgctcccctggagaccttctcttaggagttgggtgcttcatggaaaatccaagccttaggttcccttctgtctctggcaattagatgtgttcttggtgtcctccatgtcctttttgacttttccctgtgtccattgttagcatgtgcaaaagttccctgtcattacccaacccctgcccgcccacctcatttcagggctgtacacacagtgagtgttcctgttctctctctctttgtttggatgtattgctctgtgtaactcagtgggtctccctctttctggtttgtttttttttctagattcctgccgtttgttcatcgttgtgcctaaagcatgtcgatgtggcgtcaagtacatcgtccaaatccctgtctcttcagcttctctgatgcttgaactctcacctttgaccttgtgttgacctttgatgctgatgtgtatttttattatgtttgtttctttcttcgtttttttttctttttttctttcctttttttttccttttgtgctgccaaattggttttgctagaacgactgctgaaggggaaatatttaaacttgcatttgaatataaaaaaaatctatttttctagaacttcataagataaccacttgattttgtgattccaattctttgtaattgtcttcagagcagccctactagcacataccgcgtggtgtttgtatttctgtgaacacacagccagtccgtttctaggctttgtttctctgtgtgcttagttttaaagacaactttgaagtaaacaatgaaataaaagatgtcactaaaacctctgaggctcctgagcacattttgctgatacagtctgtggggcttgaggagaccgcatgtattgttctttcttttgtttttcttctgagttctcaactgcggagagcacctgaaccccctttcctttttgaccgcaggctgcactttgggccccagccagccctttttctttttctttttcttttgtggttcttccctggagcgactctggggagtcctggatatcccgcctgccccttcccctcagccccatgcttgttccaacagtctccacagcaaaatgtgatgctttgatttttttgttgttgtttttgtttttgtattgtttttgtgtttttgttttgaattttttcctttcctactaagattatgcccagaaaaaagttttgcatgtttcctgctgtttcttcacaccttcgtatatatcaccttcacctctctgttttctatagtttgtgcaaaaactgatcgatttaaaagggtttcaaagaagctgttttaaattgttgtagggttgattatttttttcaagattgtattgtttaattttgaagtggcaactttctcctctattgcccttagagcgtttgcctgtgcacttagactgtcacttcgtgtggcctccaggtcttaccggggcttccgggaggctggctgctttgctcagagagggtgggaagggggcctggagagacacgagaagcagaggtagagcctagaaggtggcagcaggtgggtaagaggcttatttagcacattaggggcagtgagcacctggaggaaggagggcgctcccaatcacccgtaggaggccatctgcacaccaagcggcaattcacctgctggcgcttttcctaggtgacaagcacaatactacagtcttcacactgtttacagccctgggcaccagccacccggcactggctcttcatcacagctctgctcttgcttagctagtggggtgggggaaagggcagggatttgtttttttaattgggtggagagccaaacagctactgtccctgggtgccaagcaagccagttttttggttccctgagggaaactgaccctcctctcttgtggcaccatccagcctcagggtcttggagacttgagtaagaatgtgagtggagggggagaggtgaggagaggagcacagggtggatctgtggagggaagaggttacagggggaggagctgatgatagatcccacccagacttaagctgctggtgggtgggtgagctgggaagtaggactgtccagggaagggtggagagatgtagctaggggctggggagggggaggtggaagcgctattgagcatcctccacaccaaggttgatgaaggaagggatcccagcagggtttctgctctggggctggcaggttgcctggtattatgcccaaggccgctctgcctgggggaaagggcagccaggcagaggcccagtgtctggtaggctgctgaatttcctggaaggggtgattggatggaaagaggccagaaaccccagcctgagagactgctgtgcaccccacagtctgactgcacagagccgcctctgttggcaggaggcactgaggctccccttcctgtgtattgagaagcagtgtttgccaatatattttgctttcaattccaagaggagctctgggaaaacctgtggataaaaccaaatgccaaatgttggacgttgtttccttttccttttctctctctgattgttttaattgttctgtggtggttttaatggatttgagaccctggagcggcagctgcctttctgatttccagctgctttttgtgaataatttaaaaagaaaaaaaaaaagaaactttacattttggagacaaacctgtgtgagttttttattggtacaaacgttgtatttaacactaggggttttgtacagttttttgccttttctactagaaaacaatgtaaagtgatttcacaatgtgaagagaaaaaaaaattgccactatgaccaaacgcacagtctgttctgcagcaacaacgggattcaatcaactcagtcgtgattcagccgtagaaatgcttttcctttatcttgtttgagcttttcctttctttcctgttttgatttgcaaaagaaaatgtcttttttgtgtgaacttgtgttgtactctgtagaaaattatggattttactttaatggtttaaaaaaaggcaaggagagcccttgtcgcttttcttacctaatcacagagtttgtgtagtgaatttaaaaagaaaaaaaaattgttataagtttggagcaagggagtatgtgtttcaaaggaatctccttcctttttttgtgtgtttttccttttgtcccaatggggaacctaaatctgttttaattgcacagacacatggacaaaaagtcattttgtatctgccaagtgtggtaccttcctttgtttatttgctattaaactgtttgagaagaa

SEQ ID NO: 408488 - DNA, 7825 bp, Homo sapiens
tattgttcggtgttctgctctggcggcagcggcagcggcggcgggacgcggaggctcccccgggattcggcctcagcagcgaggcggcggcggcggctgcggaggcgcaggcagcaactgaggcagcggcaggctcaggtgcagccgctgctcaaagaaaatgaacggcaccctggaccacccagaccaaccagatcttgatgctatcaagatgtttgtgggccaggttccaaggacctggtctgaaaaggacttgcgggaactcttcgaacagtatggtgctgtgtatgaaatcaacgtcctaagggataggagccaaaacccgcctcagagcaaagggtgctgttttgttacattttacacccgtaaagctgcattagaagctcagaatgctcttcacaacatgaaagtcctcccagggatgcatcaccctatacagatgaaacctgctgacagtgagaagaacaatgcagtggaagacaggaagctgtttattggtatgatttccaagaagtgcactgaaaatgacatccgagtcatgttctcttcgtttggacagattgaagaatgccggatattgcggggacctgatggcctgagccgaggttgtgcatttgtgacttttacaacaagagccatggcacagacggctatcaaggcaatgcaccaagcacagaccatggagggttgctcatcacccatggtggtaaaatttgctgatacacagaaggacaaagaacagaagagaatggcccagcagctccagcagcagatgcagcaaatcagcgcagcatctgtgtggggaaaccttgctggtctaaatactcttggaccccagtatttagcactttatttgcagctccttcagcagactgcctcctctgggaacctcaacaccctgagcagcctccacccaatgggagggttgaatgcaatgcagttacagaatttggctgcactagctgctgcagctagtgcagctcagaacacaccaagtggtaccaatgctctcactacatccagcagtcccctcagcgtgctcactagttcagggtcctcacctagctctagcagcagtaattctgtcaaccccatagcctcacttggagccctgcagacattagctggagcaacggctggcctcaatgttggctctttggcaggaatggctgctttaaatggtggcctgggcagcagtggcctttccaatggcaccgggagcaccatggaggccctcactcaggcctactcgggtatccagcaatatgctgctgctgcgctccccactctgtacaaccagaatcttctgacacagcagagtattggtgctgctggaagccagaaggaaggtccagagggagccaacctgttcatctaccacctgccccaggagtttggtgatcaggacctgctgcagatgtttatgccctttgggaatgtcgtgtctgccaaggttttcatagacaagcagacaaacctgagcaagtgttttggttttgtaagttacgacaatcctgtttcggcccaagctgccatccagtccatgaacggctttcagattggcatgaagcggcttaaagtgcagctcaaacgttcgaagaatgacagcaagccctactgagcgtgctcccctctgagactggagtgagagggtcttctggcacagcttgccctgaagactcggctactgccttctgtgggagtttcgcttcgtacagaggacaagtttgtgctttggtttccagtgttttactttggagtttaggtgccatatcctgaggttttttttgtttttgtttttgtttctcctttatttaaagtttgctgtgtttgtaaccagtgtgtgttgagaaggaccaacaccaaaccaccctggggaagggggacagggaaacatttaacacagacgatgatcaggatttgccccaaaccaccccaagagagaggactgagtggaacaaaaaagtgacccccagaacctctcttagtgtgagggtgggtagaatgagaactgacacctgggagctgtggggagcagagcggctttggggaagagtggagtgactagacacctaatgccctggcagctggagactcaaactcctgtacagctaccttctgggaaatagtttttgacacctatttttcagattcttgtccggaatttctgctgctcttttcaaaaaagggcattaacaattctctggaaataaagcacctgttagcctgacatatgcaaaaagcagggcggcatcacccattacgagctcccccagccagcagtcagtattggattggccttgcctggctggtggcagtttgggagaaacagccaaagaggttagtttatttcaacaccaaattagaccatggcccatttccaacgggtctctttaaaggcctctatggaatacattgcctggtttccttctttgcagttcaccacagcaaggaatgtcacctccatcccaagccaccattttctcatgaaggcaaatccaagaagggcttgcagttcttgctgaagggggtaccatttgtgggcagagtgatcaataccatctagttgggggaggaggagcttatttcttggtgtacttgaatcagaaggtccctgcaagccagtatgcttcatttgccagtggccagaaattctcccttgcctccttgattgaggtgtcccagatgtagtattcccacaggggtctggcaggcccctcctgtaaccactccagtcacattttctgctcttgaggcagaggtgacatcaggacgtttacagcctccacatgaattgagtgttcatttacctcagtattaccgtgttcatttttgtcctcgtgctacagttagctccctgccgcctcttgcaggtcttacttcagctcttgcctgtgacccacacagcttctgggctctgcctctgctctaagaagtgctgtgggggtagagaaccaggaaggacatgctgttgggaatgtacacctgggcagaggtggccctgttaagatgtgactgtagccacagccagggatgggatccctgggtctctggaatctgaaacctcaacaaataccagtcttgacccctagcagcagagataagaataaaggggttggtttgctattaagtcagatgggggctctctccttgtcatgctgtccctgtgggtaacagacagggattgaccatcttactgttgtacaggtagctggtggtgttggattatcccattgaagctgggacagctgttcctttctcatagtgataacttgggtctgttgtcctctaaggaacgtgaaacatacacttcttaagctgaaccacgtaaacttgaaattctgcgcactgggagaaatgtgtcctgtgtttcaaaggataaaactgttctaaaggcttccagggtcatgatgggattttttaaataaatgcaaaaaataaaaataaaaaagaaaaaagaaaacaaaaaaaaaaaagaaaaaaatgctaggttggggaggcgctgttctgaatcccaaccggctggaaccaagaatgtcgtttctatttttatagaagttttatacagctccggggtggagaatatttattacctaaattatatctctggaaaaggccaggattttgtagaatccagaatgtgattgttatacacacagggtgctgtgtatgattgaaactactgactttctgtggcccgtttgcagcccagctaacctgcccaaggggaaggtgttaatgctgtgaattggcagaggagagagctgtgctccatagggtgctgccggtgctgtgctccctagccttctgttctgtcttcctccttagccagaacgccactcccttcccacatccccttcttctctccgccttcccccatctcaccattatttgtccatggatttgtcctgggctctgggaccttatgaaacccctttcctaatgacataagaggccaaggtgcaatccacccacctttgataccagaccctgagggcttcatacctgctgatgggttttcttttctaaaaggaatgctcgccccagcagggtcctgggctgcttgagcagccagctggtgagaccatgcacttctctgttctctcctccccctgcccagtgagttagcacagcagtagcactgcccttgagcacagttctttccccaggccaaagatggttttgtgaagaagctgctcccctacaagtctcacgtgtgaaagggctcagctcagagtggagactcgctgtcaagtcttaagcaatccttttctgttgtgtgaaggtttcacttacaatgtgttttctgctgtagttttgtttcttacttgggttacatcatgaaattgatttgccttgaatgcagccagaccactgtctcctgggttccccttgagtggccaggcctggatggaagctaagagcttggatttctgggaacaaagggccatccccataagattgagcagaaattctggtcctcttccctgaaaaattttccccaccccagccagcatcttctgcttccccttgggttgtgaccagggagtggggagagaggctgaggctctgctcccctggagaccttctcttaggagttgggtgcttcatggaaaatccaagccttaggttcccttctgtctctggcaattagatgtgttcttggtgtcctccatgtcctttttgacttttccctgtgtccattgttagcatgtgcaaaagttccctgtcattacccaacccctgcccgcccacctcatttcagggctgtacacacagtgagtgttcctgttctctctctctttgtttggatgtattgctctgtgtaactcagtgggtctccctctttctggtttgtttttttttctagattcctgccgtttgttcatcgttgtgcctaaagcatgtcgatgtggcgtcaagtacatcgtccaaatccctgtctcttcagcttctctgatgcttgaactctcacctttgaccttgtgttgacctttgatgctgatgtgtatttttattatgtttgtttctttcttcgtttttttttctttttttctttcctttttttttccttttgtgctgccaaattggttttgctagaacgactgctgaaggggaaatatttaaacttgcatttgaatataaaaaaaatctatttttctagaacttcataagataaccacttgattttgtgattccaattctttgtaattgtcttcagagcagccctactagcacataccgcgtggtgtttgtatttctgtgaacacacagccagtccgtttctaggctttgtttctctgtgtgcttagttttaaagacaactttgaagtaaacaatgaaataaaagatgtcactaaaacctctgaggctcctgagcacattttgctgatacagtctgtggggcttgaggagaccgcatgtattgttctttcttttgtttttcttctgagttctcaactgcggagagcacctgaaccccctttcctttttgaccgcaggctgcactttgggccccagccagccctttttctttttctttttcttttgtggttcttccctggagcgactctggggagtcctggatatcccgcctgccccttcccctcagccccatgcttgttccaacagtctccacagcaaaatgtgatgctttgatttttttgttgttgtttttgtttttgtattgtttttgtgtttttgttttgaattttttcctttcctactaagattatgcccagaaaaaagttttgcatgtttcctgctgtttcttcacaccttcgtatatatcaccttcacctctctgttttctatagtttgtgcaaaaactgatcgatttaaaagggtttcaaagaagctgttttaaattgttgtagggttgattatttttttcaagattgtattgtttaattttgaagtggcaactttctcctctattgcccttagagcgtttgcctgtgcacttagactgtcacttcgtgtggcctccaggtcttaccggggcttccgggaggctggctgctttgctcagagagggtgggaagggggcctggagagacacgagaagcagaggtagagcctagaaggtggcagcaggtgggtaagaggcttatttagcacattaggggcagtgagcacctggaggaaggagggcgctcccaatcacccgtaggaggccatctgcacaccaagcggcaattcacctgctggcgcttttcctaggtgacaagcacaatactacagtcttcacactgtttacagccctgggcaccagccacccggcactggctcttcatcacagctctgctcttgcttagctagtggggtgggggaaagggcagggatttgtttttttaattgggtggagagccaaacagctactgtccctgggtgccaagcaagccagttttttggttccctgagggaaactgaccctcctctcttgtggcaccatccagcctcagggtcttggagacttgagtaagaatgtgagtggagggggagaggtgaggagaggagcacagggtggatctgtggagggaagaggttacagggggaggagctgatgatagatcccacccagacttaagctgctggtgggtgggtgagctgggaagtaggactgtccagggaagggtggagagatgtagctaggggctggggagggggaggtggaagcgctattgagcatcctccacaccaaggttgatgaaggaagggatcccagcagggtttctgctctggggctggcaggttgcctggtattatgcccaaggccgctctgcctgggggaaagggcagccaggcagaggcccagtgtctggtaggctgctgaatttcctggaaggggtgattggatggaaagaggccagaaaccccagcctgagagactgctgtgcaccccacagtctgactgcacagagccgcctctgttggcaggaggcactgaggctccccttcctgtgtattgagaagcagtgtttgccaatatattttgctttcaattccaagaggagctctgggaaaacctgtggataaaaccaaatgccaaatgttggacgttgtttccttttccttttctctctctgattgttttaattgttctgtggtggttttaatggatttgagaccctggagcggcagctgcctttctgatttccagctgctttttgtgaataatttaaaaagaaaaaaaaaaagaaactttacattttggagacaaacctgtgtgagttttttattggtacaaacgttgtatttaacactaggggttttgtacagttttttgccttttctactagaaaacaatgtaaagtgatttcacaatgtgaagagaaaaaaaaattgccactatgaccaaacgcacagtctgttctgcagcaacaacgggattcaatcaactcagtcgtgattcagccgtagaaatgcttttcctttatcttgtttgagcttttcctttctttcctgttttgatttgcaaaagaaaatgtcttttttgtgtgaacttgtgttgtactctgtagaaaattatggattttactttaatggtttaaaaaaaggcaaggagagcccttgtcgcttttcttacctaatcacagagtttgtgtagtgaatttaaaaagaaaaaaaaattgttataagtttggagcaagggagtatgtgtttcaaaggaatctccttcctttttttgtgtgtttttccttttgtcccaatggggaacctaaatctgttttaattgcacagacacatggacaaaaagtcattttgtatctgccaagtgtggtaccttcctttgtttatttgctattaaactgtttgagaagaa

SEQ ID NO: 408489 - DNA, 7896 bp, Homo sapiens
cacgaggattccagtcccgttatgtttcagcagaaatcaaggtagacgaagtaacctcttgtcctgaattttcatagttgctcattcttaataatggcagcagaagcaacaatgagagcaactacctcctcagctcaaagaaaatgaacggcaccctggaccacccagaccaaccagatcttgatgctatcaagatgtttgtgggccaggttccaaggacctggtctgaaaaggacttgcgggaactcttcgaacagtatggtgctgtgtatgaaatcaacgtcctaagggataggagccaaaacccgcctcagagcaaagggtgctgttttgttacattttacacccgtaaagctgcattagaagctcagaatgctcttcacaacatgaaagtcctcccagggatgcatcaccctatacagatgaaacctgctgacagtgagaagaacaatgcagtggaagacaggaagctgtttattggtatgatttccaagaagtgcactgaaaatgacatccgagtcatgttctcttcgtttggacagattgaagaatgccggatattgcggggacctgatggcctgagccgaggttgtgcatttgtgacttttacaacaagagccatggcacagacggctatcaaggcaatgcaccaagcacagaccatggagggttgctcatcacccatggtggtaaaatttgctgatacacagaaggacaaagaacagaagagaatggcccagcagctccagcagcagatgcagcaaatcagcgcagcatctgtgtggggaaaccttgctggtctaaatactcttggaccccagtatttagcactttatttgcagctccttcagcagactgcctcctctgggaacctcaacaccctgagcagcctccacccaatgggagggttgaatgcaatgcagttacagaatttggctgcactagctgctgcagctagtgcagctcagaacacaccaagtggtaccaatgctctcactacatccagcagtcccctcagcgtgctcactagttcagggtcctcacctagctctagcagcagtaattctgtcaaccccatagcctcacttggagccctgcagacattagctggagcaacggctggcctcaatgttggctctttggcaggaatggctgctttaaatggtggcctgggcagcagtggcctttccaatggcaccgggagcaccatggaggccctcactcaggcctactcgggtatccagcaatatgctgctgctgcgctccccactctgtacaaccagaatcttctgacacagcagagtattggtgctgctggaagccagaaggaaggtccagagggagccaacctgttcatctaccacctgccccaggagtttggtgatcaggacctgctgcagatgtttatgccctttgggaatgtcgtgtctgccaaggttttcatagacaagcagacaaacctgagcaagtgttttggttttgtaagttacgacaatcctgtttcggcccaagctgccatccagtccatgaacggctttcagattggcatgaagcggcttaaagtgcagctcaaacgttcgaagaatgacagcaagccctactgagcgtgctcccctctgagactggagtgagagggtcttctggtaagtgggggaggagcacccttaatgattcgaagccctgaggctgtgtgttgacagccctggaccctgatccctgccactctcgcaggcacagcttgccctgaagactcggctactgccttctgtgggagtttcgcttcgtacagaggacaagtttgtgctttggtttccagtgttttactttggagtttaggtgccatatcctgaggttttttttgtttttgtttttgtttctcctttatttaaagtttgctgtgtttgtaaccagtgtgtgttgagaaggaccaacaccaaaccaccctggggaagggggacagggaaacatttaacacagacgatgatcaggatttgccccaaaccaccccaagagagaggactgagtggaacaaaaaagtgacccccagaacctctcttagtgtgagggtgggtagaatgagaactgacacctgggagctgtggggagcagagcggctttggggaagagtggagtgactagacacctaatgccctggcagctggagactcaaactcctgtacagctaccttctgggaaatagtttttgacacctatttttcagattcttgtccggaatttctgctgctcttttcaaaaaagggcattaacaattctctggaaataaagcacctgttagcctgacatatgcaaaaagcagggcggcatcacccattacgagctcccccagccagcagtcagtattggattggccttgcctggctggtggcagtttgggagaaacagccaaagaggttagtttatttcaacaccaaattagaccatggcccatttccaacgggtctctttaaaggcctctatggaatacattgcctggtttccttctttgcagttcaccacagcaaggaatgtcacctccatcccaagccaccattttctcatgaaggcaaatccaagaagggcttgcagttcttgctgaagggggtaccatttgtgggcagagtgatcaataccatctagttgggggaggaggagcttatttcttggtgtacttgaatcagaaggtccctgcaagccagtatgcttcatttgccagtggccagaaattctcccttgcctccttgattgaggtgtcccagatgtagtattcccacaggggtctggcaggcccctcctgtaaccactccagtcacattttctgctcttgaggcagaggtgacatcaggacgtttacagcctccacatgaattgagtgttcatttacctcagtattaccgtgttcatttttgtcctcgtgctacagttagctccctgccgcctcttgcaggtcttacttcagctcttgcctgtgacccacacagcttctgggctctgcctctgctctaagaagtgctgtgggggtagagaaccaggaaggacatgctgttgggaatgtacacctgggcagaggtggccctgttaagatgtgactgtagccacagccagggatgggatccctgggtctctggaatctgaaacctcaacaaataccagtcttgacccctagcagcagagataagaataaaggggttggtttgctattaagtcagatgggggctctctccttgtcatgctgtccctgtgggtaacagacagggattgaccatcttactgttgtacaggtagctggtggtgttggattatcccattgaagctgggacagctgttcctttctcatagtgataacttgggtctgttgtcctctaaggaacgtgaaacatacacttcttaagctgaaccacgtaaacttgaaattctgcgcactgggagaaatgtgtcctgtgtttcaaaggataaaactgttctaaaggcttccagggtcatgatgggattttttaaataaatgcaaaaaataaaaataaaaaagaaaaaagaaaacaaaaaaaaaaaagaaaaaaatgctaggttggggaggcgctgttctgaatcccaaccggctggaaccaagaatgtcgtttctatttttatagaagttttatacagctccggggtggagaatatttattacctaaattatatctctggaaaaggccaggattttgtagaatccagaatgtgattgttatacacacagggtgctgtgtatgattgaaactactgactttctgtggcccgtttgcagcccagctaacctgcccaaggggaaggtgttaatgctgtgaattggcagaggagagagctgtgctccatagggtgctgccggtgctgtgctccctagccttctgttctgtcttcctccttagccagaacgccactcccttcccacatccccttcttctctccgccttcccccatctcaccattatttgtccatggatttgtcctgggctctgggaccttatgaaacccctttcctaatgacataagaggccaaggtgcaatccacccacctttgataccagaccctgagggcttcatacctgctgatgggttttcttttctaaaaggaatgctcgccccagcagggtcctgggctgcttgagcagccagctggtgagaccatgcacttctctgttctctcctccccctgcccagtgagttagcacagcagtagcactgcccttgagcacagttctttccccaggccaaagatggttttgtgaagaagctgctcccctacaagtctcacgtgtgaaagggctcagctcagagtggagactcgctgtcaagtcttaagcaatccttttctgttgtgtgaaggtttcacttacaatgtgttttctgctgtagttttgtttcttacttgggttacatcatgaaattgatttgccttgaatgcagccagaccactgtctcctgggttccccttgagtggccaggcctggatggaagctaagagcttggatttctgggaacaaagggccatccccataagattgagcagaaattctggtcctcttccctgaaaaattttccccaccccagccagcatcttctgcttccccttgggttgtgaccagggagtggggagagaggctgaggctctgctcccctggagaccttctcttaggagttgggtgcttcatggaaaatccaagccttaggttcccttctgtctctggcaattagatgtgttcttggtgtcctccatgtcctttttgacttttccctgtgtccattgttagcatgtgcaaaagttccctgtcattacccaacccctgcccgcccacctcatttcagggctgtacacacagtgagtgttcctgttctctctctctttgtttggatgtattgctctgtgtaactcagtgggtctccctctttctggtttgtttttttttctagattcctgccgtttgttcatcgttgtgcctaaagcatgtcgatgtggcgtcaagtacatcgtccaaatccctgtctcttcagcttctctgatgcttgaactctcacctttgaccttgtgttgacctttgatgctgatgtgtatttttattatgtttgtttctttcttcgtttttttttctttttttctttcctttttttttccttttgtgctgccaaattggttttgctagaacgactgctgaaggggaaatatttaaacttgcatttgaatataaaaaaaatctatttttctagaacttcataagataaccacttgattttgtgattccaattctttgtaattgtcttcagagcagccctactagcacataccgcgtggtgtttgtatttctgtgaacacacagccagtccgtttctaggctttgtttctctgtgtgcttagttttaaagacaactttgaagtaaacaatgaaataaaagatgtcactaaaacctctgaggctcctgagcacattttgctgatacagtctgtggggcttgaggagaccgcatgtattgttctttcttttgtttttcttctgagttctcaactgcggagagcacctgaaccccctttcctttttgaccgcaggctgcactttgggccccagccagccctttttctttttctttttcttttgtggttcttccctggagcgactctggggagtcctggatatcccgcctgccccttcccctcagccccatgcttgttccaacagtctccacagcaaaatgtgatgctttgatttttttgttgttgtttttgtttttgtattgtttttgtgtttttgttttgaattttttcctttcctactaagattatgcccagaaaaaagttttgcatgtttcctgctgtttcttcacaccttcgtatatatcaccttcacctctctgttttctatagtttgtgcaaaaactgatcgatttaaaagggtttcaaagaagctgttttaaattgttgtagggttgattatttttttcaagattgtattgtttaattttgaagtggcaactttctcctctattgcccttagagcgtttgcctgtgcacttagactgtcacttcgtgtggcctccaggtcttaccggggcttccgggaggctggctgctttgctcagagagggtgggaagggggcctggagagacacgagaagcagaggtagagcctagaaggtggcagcaggtgggtaagaggcttatttagcacattaggggcagtgagcacctggaggaaggagggcgctcccaatcacccgtaggaggccatctgcacaccaagcggcaattcacctgctggcgcttttcctaggtgacaagcacaatactacagtcttcacactgtttacagccctgggcaccagccacccggcactggctcttcatcacagctctgctcttgcttagctagtggggtgggggaaagggcagggatttgtttttttaattgggtggagagccaaacagctactgtccctgggtgccaagcaagccagttttttggttccctgagggaaactgaccctcctctcttgtggcaccatccagcctcagggtcttggagacttgagtaagaatgtgagtggagggggagaggtgaggagaggagcacagggtggatctgtggagggaagaggttacagggggaggagctgatgatagatcccacccagacttaagctgctggtgggtgggtgagctgggaagtaggactgtccagggaagggtggagagatgtagctaggggctggggagggggaggtggaagcgctattgagcatcctccacaccaaggttgatgaaggaagggatcccagcagggtttctgctctggggctggcaggttgcctggtattatgcccaaggccgctctgcctgggggaaagggcagccaggcagaggcccagtgtctggtaggctgctgaatttcctggaaggggtgattggatggaaagaggccagaaaccccagcctgagagactgctgtgcaccccacagtctgactgcacagagccgcctctgttggcaggaggcactgaggctccccttcctgtgtattgagaagcagtgtttgccaatatattttgctttcaattccaagaggagctctgggaaaacctgtggataaaaccaaatgccaaatgttggacgttgtttccttttccttttctctctctgattgttttaattgttctgtggtggttttaatggatttgagaccctggagcggcagctgcctttctgatttccagctgctttttgtgaataatttaaaaagaaaaaaaaaaagaaactttacattttggagacaaacctgtgtgagttttttattggtacaaacgttgtatttaacactaggggttttgtacagttttttgccttttctactagaaaacaatgtaaagtgatttcacaatgtgaagagaaaaaaaaattgccactatgaccaaacgcacagtctgttctgcagcaacaacgggattcaatcaactcagtcgtgattcagccgtagaaatgcttttcctttatcttgtttgagcttttcctttctttcctgttttgatttgcaaaagaaaatgtcttttttgtgtgaacttgtgttgtactctgtagaaaattatggattttactttaatggtttaaaaaaaggcaaggagagcccttgtcgcttttcttacctaatcacagagtttgtgtagtgaatttaaaaagaaaaaaaaattgttataagtttggagcaagggagtatgtgtttcaaaggaatctccttcctttttttgtgtgtttttccttttgtcccaatggggaacctaaatctgttttaattgcacagacacatggacaaaaagtcattttgtatctgccaagtgtggtaccttcctttgtttatttgctattaaactgtttgagaagaa

SEQ ID NO: 408490 - DNA, 8532 bp, Homo sapiens
tattgttcggtgttctgctctggcggcagcggcagcggcggcgggacgcggaggctcccccgggattcggcctcagcagcgaggcggcggcggcggctgcggaggcgcaggcagcaactgaggcagcggcaggctcaggtgcagccgctgctcaaagaaaatgaacggcaccctggaccacccagaccaaccagatcttgatgctatcaagatgtttgtgggccaggttccaaggacctggtctgaaaaggacttgcgggaactcttcgaacagtatggtgctgtgtatgaaatcaacgtcctaagggataggagccaaaacccgcctcagagcaaagggtgctgttttgttacattttacacccgtaaagctgcattagaagctcagaatgctcttcacaacatgaaagtcctcccagggatgcatcaccctatacagatgaaacctgctgacagtgagaagaacaatgcagtggaagacaggaagctgtttattggtatgatttccaagaagtgcactgaaaatgacatccgagtcatgttctcttcgtttggacagattgaagaatgccggatattgcggggacctgatggcctgagccgaggttgtgcatttgtgacttttacaacaagagccatggcacagacggctatcaaggcaatgcaccaagcacagaccatggagggttgctcatcacccatggtggtaaaatttgctgatacacagaaggacaaagaacagaagagaatggcccagcagctccagcagcagatgcagcaaatcagcgcagcatctgtgtggggaaaccttgctggtctaaatactcttggaccccagtatttagcactttatttgcagctccttcagcagactgcctcctctgggaacctcaacaccctgagcagcctccacccaatgggagggttgaatgcaatgcagttacagaatttggctgcactagctgctgcagctagtgcagctcagaacacaccaagtggtaccaatgctctcactacatccagcagtcccctcagcgtgctcactagttcagggtcctcacctagctctagcagcagtaattctgtcaaccccatagcctcacttggagccctgcagacattagctggagcaacggctggcctcaatgttggctctttggcaggaatggctgctttaaatggtggcctgggcagcagtggcctttccaatggcaccgggagcaccatggaggccctcactcaggcctactcgggtatccagcaatatgctgctgctgcgctccccactctgtacaaccagaatcttctgacacagcagagtattggtgctgctggaagccagaaggaaggtccagagggagccaacctgttcatctaccacctgccccaggagtttggtgatcaggacctgctgcagatgtttatgccctttgggaatgtcgtgtctgccaaggttttcatagacaagcagacaaacctgagcaagtgttttggttttgtaagttacgacaatcctgtttcggcccaagctgccatccagtccatgaacggctttcagattggcatgaagcggcttaaagtgcagctcaaacgttcgaagaatgacagcaagccctactgagcgtgctcccctctgagactggagtgagagggtcttctggtaagtgggggaggagcacccttaatgattcgaagccctgaggctgtgtgttgacagccctggaccctgatccctgccactctcgcaggcacagcttgccctgaagactcggctactgccttctgtgggagtttcgcttcgtacagaggacaagtttgtgctttggtttccagtgttttactttggagtttaggtgccatatcctgaggttttttttgtttttgtttttgtttctcctttatttaaagtttgctgtgtttgtaaccagtgtgtgttgagaaggaccaacaccaaaccaccctggggaagggggacagggaaacatttaacacagacgatgatcaggatttgccccaaaccaccccaagagagaggactgagtggaacaaaaaagtgacccccagaacctctcttagtgtgagggtgggtagaatgagaactgacacctgggagctgtggggagcagagcggctttggggaagagtggagtgactagacacctaatgccctggcagctggagactcaaactcctgtacagctaccttctgggaaatagtttttgacacctatttttcagattcttgtccggaatttctgctgctcttttcaaaaaagggcattaacaattctctggaaataaagcacctgttagcctgacatatgcaaaaagcagggcggcatcacccattacgagctcccccagccagcagtcagtattggattggccttgcctggctggtggcagtttgggagaaacagccaaagaggttagtttatttcaacaccaaattagaccatggcccatttccaacgggtctctttaaaggcctctatggaatacattgcctggtttccttctttgcagttcaccacagcaaggaatgtcacctccatcccaagccaccattttctcatgaaggcaaatccaagaagggcttgcagttcttgctgaagggggtaccatttgtgggcagagtgatcaataccatctagttgggggaggaggagcttatttcttggtgtacttgaatcagaaggtccctgcaagccagtatgcttcatttgccagtggccagaaattctcccttgcctccttgattgaggtgtcccagatgtagtattcccacaggggtctggcaggcccctcctgtaaccactccagtcacattttctgctcttgaggcagaggtgacatcaggacgtttacagcctccacatgaattgagtgttcatttacctcagtattaccgtgttcatttttgtcctcgtgctacagttagctccctgccgcctcttgcaggtcttacttcagctcttgcctgtgacccacacagcttctgggctctgcctctgctctaagaagtgctgtgggggtagagaaccaggaaggacatgctgttgggaatgtacacctgggcagaggtggccctgttaagatgtgactgtagccacagccagggatgggatccctgggtctctggaatctgaaacctcaacaaataccagtcttgacccctagcagcagagataagaataaaggggttggtttgctattaagtcagatgggggctctctccttgtcatgctgtccctgtgggtaacagacagggattgaccatcttactgttgtacaggtagctggtggtgttggattatcccattgaagctgggacagctgttcctttctcatagtgataacttgggtctgttgtcctctaaggaacgtgaaacatacacttcttaagctgaaccacgtaaacttgaaattctgcgcactgggagaaatgtgtcctgtgtttcaaaggataaaactgttctaaaggcttccagggtcatgatgggattttttaaataaatgcaaaaaataaaaataaaaaagaaaaaagaaaacaaaaaaaaaaaagaaaaaaatgctaggttggggaggcgctgttctgaatcccaaccggctggaaccaagaatgtcgtttctatttttatagaagttttatacagctccggggtggagaatatttattacctaaattatatctctggaaaaggccaggattttgtagaatccagaatgtgattgttatacacacagggtgctgtgtatgattgaaactactgactttctgtggcccgtttgcagcccagctaacctgcccaaggggaaggtgttaatgctgtgaattggcagaggagagagctgtgctccatagggtgctgccggtgctgtgctccctagccttctgttctgtcttcctccttagccagaacgccactcccttcccacatccccttcttctctccgccttcccccatctcaccattatttgtccatggatttgtcctgggctctgggaccttatgaaacccctttcctaatgacataagaggccaaggtgcaatccacccacctttgataccagaccctgagggcttcatacctgctgatgggttttcttttctaaaaggaatgctcgccccagcagggtcctgggctgcttgagcagccagctggtgagaccatgcacttctctgttctctcctccccctgcccagtgagttagcacagcagtagcactgcccttgagcacagttctttccccaggccaaagatggttttgtgaagaagctgctcccctacaagtctcacgtgtgaaagggctcagctcagagtggagactcgctgtcaagtcttaagcaatccttttctgttgtgtgaaggtttcacttacaatgtgttttctgctgtagttttgtttcttacttgggttacatcatgaaattgatttgccttgaatgcagccagaccactgtctcctgggttccccttgagtggccaggcctggatggaagctaagagcttggatttctgggaacaaagggccatccccataagattgagcagaaattctggtcctcttccctgaaaaattttccccaccccagccagcatcttctgcttccccttgggttgtgaccagggagtggggagagaggctgaggctctgctcccctggagaccttctcttaggagttgggtgcttcatggaaaatccaagccttaggttcccttctgtctctggcaattagatgtgttcttggtgtcctccatgtcctttttgacttttccctgtgtccattgttagcatgtgcaaaagttccctgtcattacccaacccctgcccgcccacctcatttcagggctgtacacacagtgagtgttcctgttctctctctctttgtttggatgtattgctctgtgtaactcagtgggtctccctctttctggtttgtttttttttctagattcctgccgtttgttcatcgttgtgcctaaagcatgtcgatgtggcgtcaagtacatcgtccaaatccctgtctcttcagcttctctgatgcttgaactctcacctttgaccttgtgttgacctttgatgctgatgtgtatttttattatgtttgtttctttcttcgtttttttttctttttttctttcctttttttttccttttgtgctgccaaattggttttgctagaacgactgctgaaggggaaatatttaaacttgcatttgaatataaaaaaaatctatttttctagaacttcataagataaccacttgattttgtgattccaattctttgtaattgtcttcagagcagccctactagcacataccgcgtggtgtttgtatttctgtgaacacacagccagtccgtttctaggctttgtttctctgtgtgcttagttttaaagacaactttgaagtaaacaatgaaataaaagatgtcactaaaacctctgaggctcctgagcacattttgctgatacagtctgtggggcttgaggagaccgcatgtattgttctttcttttgtttttcttctgagttctcaactgcggagagcacctgaaccccctttcctttttgaccgcaggctgcactttgggccccagccagccctttttctttttctttttcttttgtggttcttccctggagcgactctggggagtcctggatatcccgcctgccccttcccctcagccccatgcttgttccaacagtctccacagcaaaatgtgatgctttgatttttttgttgttgtttttgtttttgtattgtttttgtgtttttgttttgaattttttcctttcctactaagattatgcccagaaaaaagttttgcatgtttcctgctgtttcttcacaccttcgtatatatcaccttcacctctctgttttctatagtttgtgcaaaaactgatcgatttaaaagggtttcaaagaagctgttttaaattgttgtagggttgattatttttttcaagattgtattgtttaattttgaagtggcaactttctcctctattgcccttagagcgtttgcctgtgcacttagactgtcacttcgtgtggcctccaggtcttaccggggcttccgggaggctggctgctttgctcagagagggtgggaagggggcctggagagacacgagaagcagaggtagagcctagaaggtggcagcaggtgggtaagaggcttatttagcacattaggggcagtgagcacctggaggaaggagggcgctcccaatcacccgtaggaggccatctgcacaccaagcggcaattcacctgctggcgcttttcctaggtgacaagcacaatactacagtcttcacactgtttacagccctgggcaccagccacccggcactggctcttcatcacagctctgctcttgcttagctagtggggtgggggaaagggcagggatttgtttttttaattgggtggagagccaaacagctactgtccctgggtgccaagcaagccagttttttggttccctgagggaaactgaccctcctctcttgtggcaccatccagcctcagggtcttggagacttgagtaagaatgtgagtggagggggagaggtgaggagaggagcacagggtggatctgtggagggaagaggttacagggggaggagctgatgatagatcccacccagacttaagctgctggtgggtgggtgagctgggaagtaggactgtccagggaagggtggagagatgtagctaggggctggggagggggaggtggaagcgctattgagcatcctccacaccaaggttgatgaaggaagggatcccagcagggtttctgctctggggctggcaggttgcctggtattatgcccaaggccgctctgcctgggggaaagggcagccaggcagaggcccagtgtctggtaggctgctgaatttcctggaaggggtgattggatggaaagaggccagaaaccccagcctgagagactgctgtgcaccccacagtctgactgcacagagccgcctctgttggcaggaggcactgaggctccccttcctgtgtattgagaagcagtgtttgccaatatattttgctttcaattccaagaggagctctgggaaaacctgtggataaaaccaaatgccaaatgttggacgttgtttccttttccttttctctctctgattgttttaattgttctgtggtggttttaatggatttgagaccctggagcggcagctgcctttctgatttccagctgctttttgtgaataatttaaaaagaaaaaaaaaaagaaactttacattttggagacaaacctgtgtgagttttttattggtacaaacgttgtatttaacactaggggttttgtacagttttttgccttttctactagaaaacaatgtaaagtgatttcacaatgtgaagagaaaaaaaaattgccactatgaccaaacgcacagtctgttctgcagcaacaacgggattcaatcaactcagtcgtgattcagccgtagaaatgcttttcctttatcttgtttgagcttttcctttctttcctgttttgatttgcaaaagaaaatgtcttttttgtgtgaacttgtgttgtactctgtagaaaattatggattttactttaatggtttaaaaaaaggcaaggagagcccttgtcgcttttcttacctaatcacagagtttgtgtagtgaatttaaaaagaaaaaaaaattgttataagtttggagcaagggagtatgtgtttcaaaggaatctccttcctttttttgtgtgtttttccttttgtcccaatggggaacctaaatctgttttaattgcacagacacatggacaaaaagtcattttgtatctgccaagtgtggtaccttcctttgtttatttgctattaaactgtttgagaagaaaaaaaaagcaaagtagaaacataaacaatgggaagtaataaacaatgttaaagatagaacctagcaagaaaaaattaatggaactttacgaaatgaataactgaataagcggatgaggctaataaaagactttggatcaaaggtatggtaagagagtgattcagaaggcactgaaagagatggaacagtacggagtggctagagaagaactcaaaggagcctgccatgttgtggaactcacatagagaaatcaacggatgtacagatgacatgtacgtggctgtagtgccaaaaatttcgtggccgggatagagcatggggtaacacactattagaagtcaagccgcttagaaaacactcgcaaagtaacactgggtcaaccaggtactaaacgggctagactaagccgcggatgaagaacacgaaacacgaacgcagtgagcgtatcacaccagatcacgatagcacagaacagagaactgaagcatcaacacaaaatacggcaggaacaaaacacagcggacttcgggacaacaacccactcgggaaaacggcaaaaaataaaagcgaggacacgacaccaagaacaaacacgacaacacaaaacacaagaagaaca

SEQ ID NO: 408491 - DNA, 7956 bp, Homo sapiens
acatactttgaaaataacagctcttttttgttccctcgtgtgtctcttcccaattgtatccctattgtattttctcatagtatgtttcagcagaaatcaaggtagacgaagtaacctcttgtcctgaattttcatagttgctcattcttaataatggcagcagaagcaacaatgagagcaactacctcctcagctcaaagaaaatgaacggcaccctggaccacccagaccaaccagatcttgatgctatcaagatgtttgtgggccaggttccaaggacctggtctgaaaaggacttgcgggaactcttcgaacagtatggtgctgtgtatgaaatcaacgtcctaagggataggagccaaaacccgcctcagagcaaagggtgctgttttgttacattttacacccgtaaagctgcattagaagctcagaatgctcttcacaacatgaaagtcctcccagggatgcatcaccctatacagatgaaacctgctgacagtgagaagaacaatgcagtggaagacaggaagctgtttattggtatgatttccaagaagtgcactgaaaatgacatccgagtcatgttctcttcgtttggacagattgaagaatgccggatattgcggggacctgatggcctgagccgaggttgtgcatttgtgacttttacaacaagagccatggcacagacggctatcaaggcaatgcaccaagcacagaccatggagggttgctcatcacccatggtggtaaaatttgctgatacacagaaggacaaagaacagaagagaatggcccagcagctccagcagcagatgcagcaaatcagcgcagcatctgtgtggggaaaccttgctggtctaaatactcttggaccccagtatttagcactttatttgcagctccttcagcagactgcctcctctgggaacctcaacaccctgagcagcctccacccaatgggagggttgaatgcaatgcagttacagaatttggctgcactagctgctgcagctagtgcagctcagaacacaccaagtggtaccaatgctctcactacatccagcagtcccctcagcgtgctcactagttcagggtcctcacctagctctagcagcagtaattctgtcaaccccatagcctcacttggagccctgcagacattagctggagcaacggctggcctcaatgttggctctttggcaggaatggctgctttaaatggtggcctgggcagcagtggcctttccaatggcaccgggagcaccatggaggccctcactcaggcctactcgggtatccagcaatatgctgctgctgcgctccccactctgtacaaccagaatcttctgacacagcagagtattggtgctgctggaagccagaaggaaggtccagagggagccaacctgttcatctaccacctgccccaggagtttggtgatcaggacctgctgcagatgtttatgccctttgggaatgtcgtgtctgccaaggttttcatagacaagcagacaaacctgagcaagtgttttggttttgtaagttacgacaatcctgtttcggcccaagctgccatccagtccatgaacggctttcagattggcatgaagcggcttaaagtgcagctcaaacgttcgaagaatgacagcaagccctactgagcgtgctcccctctgagactggagtgagagggtcttctggtaagtgggggaggagcacccttaatgattcgaagccctgaggctgtgtgttgacagccctggaccctgatccctgccactctcgcaggcacagcttgccctgaagactcggctactgccttctgtgggagtttcgcttcgtacagaggacaagtttgtgctttggtttccagtgttttactttggagtttaggtgccatatcctgaggttttttttgtttttgtttttgtttctcctttatttaaagtttgctgtgtttgtaaccagtgtgtgttgagaaggaccaacaccaaaccaccctggggaagggggacagggaaacatttaacacagacgatgatcaggatttgccccaaaccaccccaagagagaggactgagtggaacaaaaaagtgacccccagaacctctcttagtgtgagggtgggtagaatgagaactgacacctgggagctgtggggagcagagcggctttggggaagagtggagtgactagacacctaatgccctggcagctggagactcaaactcctgtacagctaccttctgggaaatagtttttgacacctatttttcagattcttgtccggaatttctgctgctcttttcaaaaaagggcattaacaattctctggaaataaagcacctgttagcctgacatatgcaaaaagcagggcggcatcacccattacgagctcccccagccagcagtcagtattggattggccttgcctggctggtggcagtttgggagaaacagccaaagaggttagtttatttcaacaccaaattagaccatggcccatttccaacgggtctctttaaaggcctctatggaatacattgcctggtttccttctttgcagttcaccacagcaaggaatgtcacctccatcccaagccaccattttctcatgaaggcaaatccaagaagggcttgcagttcttgctgaagggggtaccatttgtgggcagagtgatcaataccatctagttgggggaggaggagcttatttcttggtgtacttgaatcagaaggtccctgcaagccagtatgcttcatttgccagtggccagaaattctcccttgcctccttgattgaggtgtcccagatgtagtattcccacaggggtctggcaggcccctcctgtaaccactccagtcacattttctgctcttgaggcagaggtgacatcaggacgtttacagcctccacatgaattgagtgttcatttacctcagtattaccgtgttcatttttgtcctcgtgctacagttagctccctgccgcctcttgcaggtcttacttcagctcttgcctgtgacccacacagcttctgggctctgcctctgctctaagaagtgctgtgggggtagagaaccaggaaggacatgctgttgggaatgtacacctgggcagaggtggccctgttaagatgtgactgtagccacagccagggatgggatccctgggtctctggaatctgaaacctcaacaaataccagtcttgacccctagcagcagagataagaataaaggggttggtttgctattaagtcagatgggggctctctccttgtcatgctgtccctgtgggtaacagacagggattgaccatcttactgttgtacaggtagctggtggtgttggattatcccattgaagctgggacagctgttcctttctcatagtgataacttgggtctgttgtcctctaaggaacgtgaaacatacacttcttaagctgaaccacgtaaacttgaaattctgcgcactgggagaaatgtgtcctgtgtttcaaaggataaaactgttctaaaggcttccagggtcatgatgggattttttaaataaatgcaaaaaataaaaataaaaaagaaaaaagaaaacaaaaaaaaaaaagaaaaaaatgctaggttggggaggcgctgttctgaatcccaaccggctggaaccaagaatgtcgtttctatttttatagaagttttatacagctccggggtggagaatatttattacctaaattatatctctggaaaaggccaggattttgtagaatccagaatgtgattgttatacacacagggtgctgtgtatgattgaaactactgactttctgtggcccgtttgcagcccagctaacctgcccaaggggaaggtgttaatgctgtgaattggcagaggagagagctgtgctccatagggtgctgccggtgctgtgctccctagccttctgttctgtcttcctccttagccagaacgccactcccttcccacatccccttcttctctccgccttcccccatctcaccattatttgtccatggatttgtcctgggctctgggaccttatgaaacccctttcctaatgacataagaggccaaggtgcaatccacccacctttgataccagaccctgagggcttcatacctgctgatgggttttcttttctaaaaggaatgctcgccccagcagggtcctgggctgcttgagcagccagctggtgagaccatgcacttctctgttctctcctccccctgcccagtgagttagcacagcagtagcactgcccttgagcacagttctttccccaggccaaagatggttttgtgaagaagctgctcccctacaagtctcacgtgtgaaagggctcagctcagagtggagactcgctgtcaagtcttaagcaatccttttctgttgtgtgaaggtttcacttacaatgtgttttctgctgtagttttgtttcttacttgggttacatcatgaaattgatttgccttgaatgcagccagaccactgtctcctgggttccccttgagtggccaggcctggatggaagctaagagcttggatttctgggaacaaagggccatccccataagattgagcagaaattctggtcctcttccctgaaaaattttccccaccccagccagcatcttctgcttccccttgggttgtgaccagggagtggggagagaggctgaggctctgctcccctggagaccttctcttaggagttgggtgcttcatggaaaatccaagccttaggttcccttctgtctctggcaattagatgtgttcttggtgtcctccatgtcctttttgacttttccctgtgtccattgttagcatgtgcaaaagttccctgtcattacccaacccctgcccgcccacctcatttcagggctgtacacacagtgagtgttcctgttctctctctctttgtttggatgtattgctctgtgtaactcagtgggtctccctctttctggtttgtttttttttctagattcctgccgtttgttcatcgttgtgcctaaagcatgtcgatgtggcgtcaagtacatcgtccaaatccctgtctcttcagcttctctgatgcttgaactctcacctttgaccttgtgttgacctttgatgctgatgtgtatttttattatgtttgtttctttcttcgtttttttttctttttttctttcctttttttttccttttgtgctgccaaattggttttgctagaacgactgctgaaggggaaatatttaaacttgcatttgaatataaaaaaaatctatttttctagaacttcataagataaccacttgattttgtgattccaattctttgtaattgtcttcagagcagccctactagcacataccgcgtggtgtttgtatttctgtgaacacacagccagtccgtttctaggctttgtttctctgtgtgcttagttttaaagacaactttgaagtaaacaatgaaataaaagatgtcactaaaacctctgaggctcctgagcacattttgctgatacagtctgtggggcttgaggagaccgcatgtattgttctttcttttgtttttcttctgagttctcaactgcggagagcacctgaaccccctttcctttttgaccgcaggctgcactttgggccccagccagccctttttctttttctttttcttttgtggttcttccctggagcgactctggggagtcctggatatcccgcctgccccttcccctcagccccatgcttgttccaacagtctccacagcaaaatgtgatgctttgatttttttgttgttgtttttgtttttgtattgtttttgtgtttttgttttgaattttttcctttcctactaagattatgcccagaaaaaagttttgcatgtttcctgctgtttcttcacaccttcgtatatatcaccttcacctctctgttttctatagtttgtgcaaaaactgatcgatttaaaagggtttcaaagaagctgttttaaattgttgtagggttgattatttttttcaagattgtattgtttaattttgaagtggcaactttctcctctattgcccttagagcgtttgcctgtgcacttagactgtcacttcgtgtggcctccaggtcttaccggggcttccgggaggctggctgctttgctcagagagggtgggaagggggcctggagagacacgagaagcagaggtagagcctagaaggtggcagcaggtgggtaagaggcttatttagcacattaggggcagtgagcacctggaggaaggagggcgctcccaatcacccgtaggaggccatctgcacaccaagcggcaattcacctgctggcgcttttcctaggtgacaagcacaatactacagtcttcacactgtttacagccctgggcaccagccacccggcactggctcttcatcacagctctgctcttgcttagctagtggggtgggggaaagggcagggatttgtttttttaattgggtggagagccaaacagctactgtccctgggtgccaagcaagccagttttttggttccctgagggaaactgaccctcctctcttgtggcaccatccagcctcagggtcttggagacttgagtaagaatgtgagtggagggggagaggtgaggagaggagcacagggtggatctgtggagggaagaggttacagggggaggagctgatgatagatcccacccagacttaagctgctggtgggtgggtgagctgggaagtaggactgtccagggaagggtggagagatgtagctaggggctggggagggggaggtggaagcgctattgagcatcctccacaccaaggttgatgaaggaagggatcccagcagggtttctgctctggggctggcaggttgcctggtattatgcccaaggccgctctgcctgggggaaagggcagccaggcagaggcccagtgtctggtaggctgctgaatttcctggaaggggtgattggatggaaagaggccagaaaccccagcctgagagactgctgtgcaccccacagtctgactgcacagagccgcctctgttggcaggaggcactgaggctccccttcctgtgtattgagaagcagtgtttgccaatatattttgctttcaattccaagaggagctctgggaaaacctgtggataaaaccaaatgccaaatgttggacgttgtttccttttccttttctctctctgattgttttaattgttctgtggtggttttaatggatttgagaccctggagcggcagctgcctttctgatttccagctgctttttgtgaataatttaaaaagaaaaaaaaaaagaaactttacattttggagacaaacctgtgtgagttttttattggtacaaacgttgtatttaacactaggggttttgtacagttttttgccttttctactagaaaacaatgtaaagtgatttcacaatgtgaagagaaaaaaaaattgccactatgaccaaacgcacagtctgttctgcagcaacaacgggattcaatcaactcagtcgtgattcagccgtagaaatgcttttcctttatcttgtttgagcttttcctttctttcctgttttgatttgcaaaagaaaatgtcttttttgtgtgaacttgtgttgtactctgtagaaaattatggattttactttaatggtttaaaaaaaggcaaggagagcccttgtcgcttttcttacctaatcacagagtttgtgtagtgaatttaaaaagaaaaaaaaattgttataagtttggagcaagggagtatgtgtttcaaaggaatctccttcctttttttgtgtgtttttccttttgtcccaatggggaacctaaatctgttttaattgcacagacacatggacaaaaagtcattttgtatctgccaagtgtggtaccttcctttgtttatttgctattaaactgtttgagaagaa

SEQ ID NO: 408492 - DNA, 7846 bp, Homo sapiens
gagagtgaggtgatggctgcgtttaagttggatttccttccagaaatgatggtggatcattgctctttgaattccagtcccgtctcaaagaaaatgaacggcaccctggaccacccagaccaaccagatcttgatgctatcaagatgtttgtgggccaggttccaaggacctggtctgaaaaggacttgcgggaactcttcgaacagtatggtgctgtgtatgaaatcaacgtcctaagggataggagccaaaacccgcctcagagcaaagggtgctgttttgttacattttacacccgtaaagctgcattagaagctcagaatgctcttcacaacatgaaagtcctcccagggatgcatcaccctatacagatgaaacctgctgacagtgagaagaacaatgcagtggaagacaggaagctgtttattggtatgatttccaagaagtgcactgaaaatgacatccgagtcatgttctcttcgtttggacagattgaagaatgccggatattgcggggacctgatggcctgagccgaggttgtgcatttgtgacttttacaacaagagccatggcacagacggctatcaaggcaatgcaccaagcacagaccatggagggttgctcatcacccatggtggtaaaatttgctgatacacagaaggacaaagaacagaagagaatggcccagcagctccagcagcagatgcagcaaatcagcgcagcatctgtgtggggaaaccttgctggtctaaatactcttggaccccagtatttagcactttatttgcagctccttcagcagactgcctcctctgggaacctcaacaccctgagcagcctccacccaatgggagggttgaatgcaatgcagttacagaatttggctgcactagctgctgcagctagtgcagctcagaacacaccaagtggtaccaatgctctcactacatccagcagtcccctcagcgtgctcactagttcagggtcctcacctagctctagcagcagtaattctgtcaaccccatagcctcacttggagccctgcagacattagctggagcaacggctggcctcaatgttggctctttggcaggaatggctgctttaaatggtggcctgggcagcagtggcctttccaatggcaccgggagcaccatggaggccctcactcaggcctactcgggtatccagcaatatgctgctgctgcgctccccactctgtacaaccagaatcttctgacacagcagagtattggtgctgctggaagccagaaggaaggtccagagggagccaacctgttcatctaccacctgccccaggagtttggtgatcaggacctgctgcagatgtttatgccctttgggaatgtcgtgtctgccaaggttttcatagacaagcagacaaacctgagcaagtgttttggttttgtaagttacgacaatcctgtttcggcccaagctgccatccagtccatgaacggctttcagattggcatgaagcggcttaaagtgcagctcaaacgttcgaagaatgacagcaagccctactgagcgtgctcccctctgagactggagtgagagggtcttctggtaagtgggggaggagcacccttaatgattcgaagccctgaggctgtgtgttgacagccctggaccctgatccctgccactctcgcaggcacagcttgccctgaagactcggctactgccttctgtgggagtttcgcttcgtacagaggacaagtttgtgctttggtttccagtgttttactttggagtttaggtgccatatcctgaggttttttttgtttttgtttttgtttctcctttatttaaagtttgctgtgtttgtaaccagtgtgtgttgagaaggaccaacaccaaaccaccctggggaagggggacagggaaacatttaacacagacgatgatcaggatttgccccaaaccaccccaagagagaggactgagtggaacaaaaaagtgacccccagaacctctcttagtgtgagggtgggtagaatgagaactgacacctgggagctgtggggagcagagcggctttggggaagagtggagtgactagacacctaatgccctggcagctggagactcaaactcctgtacagctaccttctgggaaatagtttttgacacctatttttcagattcttgtccggaatttctgctgctcttttcaaaaaagggcattaacaattctctggaaataaagcacctgttagcctgacatatgcaaaaagcagggcggcatcacccattacgagctcccccagccagcagtcagtattggattggccttgcctggctggtggcagtttgggagaaacagccaaagaggttagtttatttcaacaccaaattagaccatggcccatttccaacgggtctctttaaaggcctctatggaatacattgcctggtttccttctttgcagttcaccacagcaaggaatgtcacctccatcccaagccaccattttctcatgaaggcaaatccaagaagggcttgcagttcttgctgaagggggtaccatttgtgggcagagtgatcaataccatctagttgggggaggaggagcttatttcttggtgtacttgaatcagaaggtccctgcaagccagtatgcttcatttgccagtggccagaaattctcccttgcctccttgattgaggtgtcccagatgtagtattcccacaggggtctggcaggcccctcctgtaaccactccagtcacattttctgctcttgaggcagaggtgacatcaggacgtttacagcctccacatgaattgagtgttcatttacctcagtattaccgtgttcatttttgtcctcgtgctacagttagctccctgccgcctcttgcaggtcttacttcagctcttgcctgtgacccacacagcttctgggctctgcctctgctctaagaagtgctgtgggggtagagaaccaggaaggacatgctgttgggaatgtacacctgggcagaggtggccctgttaagatgtgactgtagccacagccagggatgggatccctgggtctctggaatctgaaacctcaacaaataccagtcttgacccctagcagcagagataagaataaaggggttggtttgctattaagtcagatgggggctctctccttgtcatgctgtccctgtgggtaacagacagggattgaccatcttactgttgtacaggtagctggtggtgttggattatcccattgaagctgggacagctgttcctttctcatagtgataacttgggtctgttgtcctctaaggaacgtgaaacatacacttcttaagctgaaccacgtaaacttgaaattctgcgcactgggagaaatgtgtcctgtgtttcaaaggataaaactgttctaaaggcttccagggtcatgatgggattttttaaataaatgcaaaaaataaaaataaaaaagaaaaaagaaaacaaaaaaaaaaaagaaaaaaatgctaggttggggaggcgctgttctgaatcccaaccggctggaaccaagaatgtcgtttctatttttatagaagttttatacagctccggggtggagaatatttattacctaaattatatctctggaaaaggccaggattttgtagaatccagaatgtgattgttatacacacagggtgctgtgtatgattgaaactactgactttctgtggcccgtttgcagcccagctaacctgcccaaggggaaggtgttaatgctgtgaattggcagaggagagagctgtgctccatagggtgctgccggtgctgtgctccctagccttctgttctgtcttcctccttagccagaacgccactcccttcccacatccccttcttctctccgccttcccccatctcaccattatttgtccatggatttgtcctgggctctgggaccttatgaaacccctttcctaatgacataagaggccaaggtgcaatccacccacctttgataccagaccctgagggcttcatacctgctgatgggttttcttttctaaaaggaatgctcgccccagcagggtcctgggctgcttgagcagccagctggtgagaccatgcacttctctgttctctcctccccctgcccagtgagttagcacagcagtagcactgcccttgagcacagttctttccccaggccaaagatggttttgtgaagaagctgctcccctacaagtctcacgtgtgaaagggctcagctcagagtggagactcgctgtcaagtcttaagcaatccttttctgttgtgtgaaggtttcacttacaatgtgttttctgctgtagttttgtttcttacttgggttacatcatgaaattgatttgccttgaatgcagccagaccactgtctcctgggttccccttgagtggccaggcctggatggaagctaagagcttggatttctgggaacaaagggccatccccataagattgagcagaaattctggtcctcttccctgaaaaattttccccaccccagccagcatcttctgcttccccttgggttgtgaccagggagtggggagagaggctgaggctctgctcccctggagaccttctcttaggagttgggtgcttcatggaaaatccaagccttaggttcccttctgtctctggcaattagatgtgttcttggtgtcctccatgtcctttttgacttttccctgtgtccattgttagcatgtgcaaaagttccctgtcattacccaacccctgcccgcccacctcatttcagggctgtacacacagtgagtgttcctgttctctctctctttgtttggatgtattgctctgtgtaactcagtgggtctccctctttctggtttgtttttttttctagattcctgccgtttgttcatcgttgtgcctaaagcatgtcgatgtggcgtcaagtacatcgtccaaatccctgtctcttcagcttctctgatgcttgaactctcacctttgaccttgtgttgacctttgatgctgatgtgtatttttattatgtttgtttctttcttcgtttttttttctttttttctttcctttttttttccttttgtgctgccaaattggttttgctagaacgactgctgaaggggaaatatttaaacttgcatttgaatataaaaaaaatctatttttctagaacttcataagataaccacttgattttgtgattccaattctttgtaattgtcttcagagcagccctactagcacataccgcgtggtgtttgtatttctgtgaacacacagccagtccgtttctaggctttgtttctctgtgtgcttagttttaaagacaactttgaagtaaacaatgaaataaaagatgtcactaaaacctctgaggctcctgagcacattttgctgatacagtctgtggggcttgaggagaccgcatgtattgttctttcttttgtttttcttctgagttctcaactgcggagagcacctgaaccccctttcctttttgaccgcaggctgcactttgggccccagccagccctttttctttttctttttcttttgtggttcttccctggagcgactctggggagtcctggatatcccgcctgccccttcccctcagccccatgcttgttccaacagtctccacagcaaaatgtgatgctttgatttttttgttgttgtttttgtttttgtattgtttttgtgtttttgttttgaattttttcctttcctactaagattatgcccagaaaaaagttttgcatgtttcctgctgtttcttcacaccttcgtatatatcaccttcacctctctgttttctatagtttgtgcaaaaactgatcgatttaaaagggtttcaaagaagctgttttaaattgttgtagggttgattatttttttcaagattgtattgtttaattttgaagtggcaactttctcctctattgcccttagagcgtttgcctgtgcacttagactgtcacttcgtgtggcctccaggtcttaccggggcttccgggaggctggctgctttgctcagagagggtgggaagggggcctggagagacacgagaagcagaggtagagcctagaaggtggcagcaggtgggtaagaggcttatttagcacattaggggcagtgagcacctggaggaaggagggcgctcccaatcacccgtaggaggccatctgcacaccaagcggcaattcacctgctggcgcttttcctaggtgacaagcacaatactacagtcttcacactgtttacagccctgggcaccagccacccggcactggctcttcatcacagctctgctcttgcttagctagtggggtgggggaaagggcagggatttgtttttttaattgggtggagagccaaacagctactgtccctgggtgccaagcaagccagttttttggttccctgagggaaactgaccctcctctcttgtggcaccatccagcctcagggtcttggagacttgagtaagaatgtgagtggagggggagaggtgaggagaggagcacagggtggatctgtggagggaagaggttacagggggaggagctgatgatagatcccacccagacttaagctgctggtgggtgggtgagctgggaagtaggactgtccagggaagggtggagagatgtagctaggggctggggagggggaggtggaagcgctattgagcatcctccacaccaaggttgatgaaggaagggatcccagcagggtttctgctctggggctggcaggttgcctggtattatgcccaaggccgctctgcctgggggaaagggcagccaggcagaggcccagtgtctggtaggctgctgaatttcctggaaggggtgattggatggaaagaggccagaaaccccagcctgagagactgctgtgcaccccacagtctgactgcacagagccgcctctgttggcaggaggcactgaggctccccttcctgtgtattgagaagcagtgtttgccaatatattttgctttcaattccaagaggagctctgggaaaacctgtggataaaaccaaatgccaaatgttggacgttgtttccttttccttttctctctctgattgttttaattgttctgtggtggttttaatggatttgagaccctggagcggcagctgcctttctgatttccagctgctttttgtgaataatttaaaaagaaaaaaaaaaagaaactttacattttggagacaaacctgtgtgagttttttattggtacaaacgttgtatttaacactaggggttttgtacagttttttgccttttctactagaaaacaatgtaaagtgatttcacaatgtgaagagaaaaaaaaattgccactatgaccaaacgcacagtctgttctgcagcaacaacgggattcaatcaactcagtcgtgattcagccgtagaaatgcttttcctttatcttgtttgagcttttcctttctttcctgttttgatttgcaaaagaaaatgtcttttttgtgtgaacttgtgttgtactctgtagaaaattatggattttactttaatggtttaaaaaaaggcaaggagagcccttgtcgcttttcttacctaatcacagagtttgtgtagtgaatttaaaaagaaaaaaaaattgttataagtttggagcaagggagtatgtgtttcaaaggaatctccttcctttttttgtgtgtttttccttttgtcccaatggggaacctaaatctgttttaattgcacagacacatggacaaaaagtcattttgtatctgccaagtgtggtaccttcctttgtttatttgctattaaactgtttgagaagaa

SEQ ID NO: 408493 - DNA, 8011 bp, Homo sapiens
tattgttcggtgttctgctctggcggcagcggcagcggcggcgggacgcggaggctcccccgggattcggcctcagcagcgaggcggcggcggcggctgcggaggcgcaggcagcaactgaggcagcggcaggctcaggtgcagccgctgctcaaagaaaatgaacggcaccctggaccacccagaccaaccagatcttgatgctatcaagatgtttgtgggccaggttccaaggacctggtctgaaaaggacttgcgggaactcttcgaacagtatggtgctgtgtatgaaatcaacgtcctaagggataggagccaaaacccgcctcagagcaaagggtgctgttttgttacattttacacccgtaaagctgcattagaagctcagaatgctcttcacaacatgaaagtcctcccagggatgcatcaccctatacagatgaaacctgctgacagtgagaagaacaatgcagtggaagacaggaagctgtttattggtatgatttccaagaagtgcactgaaaatgacatccgagtcatgttctcttcgtttggacagattgaagaatgccggatattgcggggacctgatggcctgagccgaggttgtgcatttgtgacttttacaacaagagccatggcacagacggctatcaaggcaatgcaccaagcacagaccatggagggttgctcatcacccatggtggtaaaatttgctgatacacagaaggacaaagaacagaagagaatggcccagcagctccagcagcagatgcagcaaatcagcgcagcatctgtgtggggaaaccttgctggtctaaatactcttggaccccagtatttagcactttatttgcagctccttcagcagactgcctcctctgggaacctcaacaccctgagcagcctccacccaatgggagggttgaatgcaatgcagttacagaatttggctgcactagctgctgcagctagtgcagctcagaacacaccaagtggtaccaatgctctcactacatccagcagtcccctcagcgtgctcactagttcagggtcctcacctagctctagcagcagtaattctgtcaaccccatagcctcacttggagccctgcagacattagctggagcaacggctggcctcaatgttggctctttggcaggaatggctgctttaaatggtggcctgggcagcagtggcctttccaatggcaccgggagcaccatggaggccctcactcaggcctactcgggtatccagcaatatgctgctgctgcgctccccactctgtacaaccagaatcttctgacacagcagagtattggtgctgctggaagccagaaggaaggtccagagggagccaacctgttcatctaccacctgccccaggagtttggtgatcaggacctgctgcagatgtttatgccctttgggaatgtcgtgtctgccaaggttttcatagacaagcagacaaacctgagcaagtgttttggttttgtaagttacgacaatcctgtttcggcccaagctgccatccagtccatgaacggctttcagattggcatgaagcggcttaaagtgcagctcaaacgttcgaagaatgacagcaagccctactgagcgtgctcccctctgagactggagtgagagggtcttctggtaagtgggggaggagcacccttaatgattcgaagccctgaggctgtgtgttgacagccctggaccctgatccctgccactctcgcaggcacagcttgccctgaagactcggctactgccttctgtgggagtttcgcttcgtacagaggacaagtttgtgctttggtttccagtgttttactttggagtttaggtgccatatcctgaggttttttttgtttttgtttttgtttctcctttatttaaagtttgctgtgtttgtaaccagtgtgtgttgagaaggaccaacaccaaaccaccctggggaagggggacagggaaacatttaacacagacgatgatcaggatttgccccaaaccaccccaagagagaggactgagtggaacaaaaaagtgacccccagaacctctcttagtgtgagggtgggtagaatgagaactgacacctgggagctgtggggagcagagcggctttggggaagagtggagtgactagacacctaatgccctggcagctggagactcaaactcctgtacagctaccttctgggaaatagtttttgacacctatttttcagattcttgtccggaatttctgctgctcttttcaaaaaagggcattaacaattctctggaaataaagcacctgttagcctgacatatgcaaaaagcagggcggcatcacccattacgagctcccccagccagcagtcagtattggattggccttgcctggctggtggcagtttgggagaaacagccaaagaggttagtttatttcaacaccaaattagaccatggcccatttccaacgggtctctttaaaggcctctatggaatacattgcctggtttccttctttgcagttcaccacagcaaggaatgtcacctccatcccaagccaccattttctcatgaaggcaaatccaagaagggcttgcagttcttgctgaagggggtaccatttgtgggcagagtgatcaataccatctagttgggggaggaggagcttatttcttggtgtacttgaatcagaaggtccctgcaagccagtatgcttcatttgccagtggccagaaattctcccttgcctccttgattgaggtgtcccagatgtagtattcccacaggggtctggcaggcccctcctgtaaccactccagtcacattttctgctcttgaggcagaggtgacatcaggacgtttacagcctccacatgaattgagtgttcatttacctcagtattaccgtgttcatttttgtcctcgtgctacagttagctccctgccgcctcttgcaggtcttacttcagctcttgcctgtgacccacacagcttctgggctctgcctctgctctaagaagtgctgtgggggtagagaaccaggaaggacatgctgttgggaatgtacacctgggcagaggtggccctgttaagatgtgactgtagccacagccagggatgggatccctgggtctctggaatctgaaacctcaacaaataccagtcttgacccctagcagcagagataagaataaaggggttggtttgctattaagtcagatgggggctctctccttgtcatgctgtccctgtgggtaacagacagggattgaccatcttactgttgtacaggtagctggtggtgttggattatcccattgaagctgggacagctgttcctttctcatagtgataacttgggtctgttgtcctctaaggaacgtgaaacatacacttcttaagctgaaccacgtaaacttgaaattctgcgcactgggagaaatgtgtcctgtgtttcaaaggataaaactgttctaaaggcttccagggtcatgatgggattttttaaataaatgcaaaaaataaaaataaaaaagaaaaaagaaaacaaaaaaaaaaaagaaaaaaatgctaggttggggaggcgctgttctgaatcccaaccggctggaaccaagaatgtcgtttctatttttatagaagttttatacagctccggggtggagaatatttattacctaaattatatctctggaaaaggccaggattttgtagaatccagaatgtgattgttatacacacagggtgctgtgtatgattgaaactactgactttctgtggcccgtttgcagcccagctaacctgcccaaggggaaggtgttaatgctgtgaattggcagaggagagagctgtgctccatagggtgctgccggtgctgtgctccctagccttctgttctgtcttcctccttagccagaacgccactcccttcccacatccccttcttctctccgccttcccccatctcaccattatttgtccatggatttgtcctgggctctgggaccttatgaaacccctttcctaatgacataagaggccaaggtgcaatccacccacctttgataccagaccctgagggcttcatacctgctgatgggttttcttttctaaaaggaatgctcgccccagcagggtcctgggctgcttgagcagccagctggtgagaccatgcacttctctgttctctcctccccctgcccagtgagttagcacagcagtagcactgcccttgagcacagttctttccccaggccaaagatggttttgtgaagaagctgctcccctacaagtctcacgtgtgaaagggctcagctcagagtggagactcgctgtcaagtcttaagcaatccttttctgttgtgtgaaggtttcacttacaatgtgttttctgctgtagttttgtttcttacttgggttacatcatgaaattgatttgccttgaatgcagccagaccactgtctcctgggttccccttgagtggccaggcctggatggaagctaagagcttggatttctgggaacaaagggccatccccataagattgagcagaaattctggtcctcttccctgaaaaattttccccaccccagccagcatcttctgcttccccttgggttgtgaccagggagtggggagagaggctgaggctctgctcccctggagaccttctcttaggagttgggtgcttcatggaaaatccaagccttaggttcccttctgtctctggcaattagatgtgttcttggtgtcctccatgtcctttttgacttttccctgtgtccattgttagcatgtgcaaaagttccctgtcattacccaacccctgcccgcccacctcatttcagggctgtacacacagtgagtgttcctgttctctctctctttgtttggatgtattgctctgtgtaactcagtgggtctccctctttctggtttgtttttttttctagattcctgccgtttgttcatcgttgtgcctaaagcatgtcgatgtggcgtcaagtacatcgtccaaatccctgtctcttcagcttctctgatgcttgaactctcacctttgaccttgtgttgacctttgatgctgatgtgtatttttattatgtttgtttctttcttcgtttttttttctttttttctttcctttttttttccttttgtgctgccaaattggttttgctagaacgactgctgaaggggaaatatttaaacttgcatttgaatataaaaaaaatctatttttctagaacttcataagataaccacttgattttgtgattccaattctttgtaattgtcttcagagcagccctactagcacataccgcgtggtgtttgtatttctgtgaacacacagccagtccgtttctaggctttgtttctctgtgtgcttagttttaaagacaactttgaagtaaacaatgaaataaaagatgtcactaaaacctctgaggctcctgagcacattttgctgatacagtctgtggggcttgaggagaccgcatgtattgttctttcttttgtttttcttctgagttctcaactgcggagagcacctgaaccccctttcctttttgaccgcaggctgcactttgggccccagccagccctttttctttttctttttcttttgtggttcttccctggagcgactctggggagtcctggatatcccgcctgccccttcccctcagccccatgcttgttccaacagtctccacagcaaaatgtgatgctttgatttttttgttgttgtttttgtttttgtattgtttttgtgtttttgttttgaattttttcctttcctactaagattatgcccagaaaaaagttttgcatgtttcctgctgtttcttcacaccttcgtatatatcaccttcacctctctgttttctatagtttgtgcaaaaactgatcgatttaaaagggtttcaaagaagctgttttaaattgttgtagggttgattatttttttcaagattgtattgtttaattttgaagtggcaactttctcctctattgcccttagagcgtttgcctgtgcacttagactgtcacttcgtgtggcctccaggtcttaccggggcttccgggaggctggctgctttgctcagagagggtgggaagggggcctggagagacacgagaagcagaggtagagcctagaaggtggcagcaggtgggtaagaggcttatttagcacattaggggcagtgagcacctggaggaaggagggcgctcccaatcacccgtaggaggccatctgcacaccaagcggcaattcacctgctggcgcttttcctaggtgacaagcacaatactacagtcttcacactgtttacagccctgggcaccagccacccggcactggctcttcatcacagctctgctcttgcttagctagtggggtgggggaaagggcagggatttgtttttttaattgggtggagagccaaacagctactgtccctgggtgccaagcaagccagttttttggttccctgagggaaactgaccctcctctcttgtggcaccatccagcctcagggtcttggagacttgagtaagaatgtgagtggagggggagaggtgaggagaggagcacagggtggatctgtggagggaagaggttacagggggaggagctgatgatagatcccacccagacttaagctgctggtgggtgggtgagctgggaagtaggactgtccagggaagggtggagagatgtagctaggggctggggagggggaggtggaagcgctattgagcatcctccacaccaaggttgatgaaggaagggatcccagcagggtttctgctctggggctggcaggttgcctggtattatgcccaaggccgctctgcctgggggaaagggcagccaggcagaggcccagtgtctggtaggctgctgaatttcctggaaggggtgattggatggaaagaggccagaaaccccagcctgagagactgctgtgcaccccacagtctgactgcacagagccgcctctgttggcaggaggcactgaggctccccttcctgtgtattgagaagcagtgtttgccaatatattttgctttcaattccaagaggagctctgggaaaacctgtggataaaaccaaatgccaaatgttggacgttgtttccttttccttttctctctctgattgttttaattgttctgtggtggttttaatggatttgagaccctggagcggcagctgcctttctgatttccagctgctttttgtgaataatttaaaaagaaaaaaaaaaagaaactttacattttggagacaaacctgtgtgagttttttattggtacaaacgttgtatttaacactaggggttttgtacagttttttgccttttctactagaaaacaatgtaaagtgatttcacaatgtgaagagaaaaaaaaattgccactatgaccaaacgcacagtctgttctgcagcaacaacgggattcaatcaactcagtcgtgattcagccgtagaaatgcttttcctttatcttgtttgagcttttcctttctttcctgttttgatttgcaaaagaaaatgtcttttttgtgtgaacttgtgttgtactctgtagaaaattatggattttactttaatggtttaaaaaaaggcaaggagagcccttgtcgcttttcttacctaatcacagagtttgtgtagtgaatttaaaaagaaaaaaaaattgttataagtttggagcaagggagtatgtgtttcaaaggaatctccttcctttttttgtgtgtttttccttttgtcccaatggggaacctaaatctgttttaattgcacagacacatggacaaaaagtcattttgtatctgccaagtgtggtaccttcctttgtttatttgctattaaactgtttgagaagaatctaaaactaggaacagcatctcaaggcagaagaatttttcttagtacagaacaaatggagtttcttatgtcttcttcttagcatagacacagtaacg

SEQ ID NO: 408494 - DNA, 8041 bp, Homo sapiens
tattgttcggtgttctgctctggcggcagcggcagcggcggcgggacgcggaggctcccccgggattcggcctcagcagcgaggcggcggcggcggctgcggaggcgcaggcagcaactgaggcagcggcaggctcaggtgcagccgctgctcaaagaaaatgaacggcaccctggaccacccagaccaaccagatcttgatgctatcaagatgtttgtgggccaggttccaaggacctggtctgaaaaggacttgcgggaactcttcgaacagtatggtgctgtgtatgaaatcaacgtcctaagggataggagccaaaacccgcctcagagcaaagggtgctgttttgttacattttacacccgtaaagctgcattagaagctcagaatgctcttcacaacatgaaagtcctcccagggatgcatcaccctatacagatgaaacctgctgacagtgagaagaacaatgcagtggaagacaggaagctgtttattggtatgatttccaagaagtgcactgaaaatgacatccgagtcatgttctcttcgtttggacagattgaagaatgccggatattgcggggacctgatggcctgagccgaggttgtgcatttgtgacttttacaacaagagccatggcacagacggctatcaaggcaatgcaccaagcacagaccatggagggttgctcatcacccatggtggtaaaatttgctgatacacagaaggacaaagaacagaagagaatggcccagcagctccagcagcagatgcagcaaatcagcgcagcatctgtgtggggaaaccttgctggtctaaatactcttggaccccagtatttagcactttatttgcagctccttcagcagactgcctcctctgggaacctcaacaccctgagcagcctccacccaatgggagggttgaatgcaatgcagttacagaatttggctgcactagctgctgcagctagtgcagctcagaacacaccaagtggtaccaatgctctcactacatccagcagtcccctcagcgtgctcactagttcagggtcctcacctagctctagcagcagtaattctgtcaaccccatagcctcacttggagccctgcagacattagctggagcaacggctggcctcaatgttggctctttggcaggaatggctgctttaaatggtggcctgggcagcagtggcctttccaatggcaccgggagcaccatggaggccctcactcaggcctactcgggtatccagcaatatgctgctgctgcgctccccactctgtacaaccagaatcttctgacacagcagagtattggtgctgctggaagccagaaggaaggtccagagggagccaacctgttcatctaccacctgccccaggagtttggtgatcaggacctgctgcagatgtttatgccctttgggaatgtcgtgtctgccaaggttttcatagacaagcagacaaacctgagcaagtgttttggttttgtaagttacgacaatcctgtttcggcccaagctgccatccagtccatgaacggctttcagattggcatgaagcggcttaaagtgcagctcaaacgttcgaagaatgacagcaagccctactgagcgtgctcccctctgagactggagtgagagggtcttctggtaagtgggggaggagcacccttaatgattcgaagccctgaggctgtgtgttgacagccctggaccctgatccctgccactctcgcaggcacagcttgccctgaagactcggctactgccttctgtgggagtttcgcttcgtacagaggacaagtttgtgctttggtttccagtgttttactttggagtttaggtgccatatcctgaggttttttttgtttttgtttttgtttctcctttatttaaagtttgctgtgtttgtaaccagtgtgtgttgagaaggaccaacaccaaaccaccctggggaagggggacagggaaacatttaacacagacgatgatcaggatttgccccaaaccaccccaagagagaggactgagtggaacaaaaaagtgacccccagaacctctcttagtgtgagggtgggtagaatgagaactgacacctgggagctgtggggagcagagcggctttggggaagagtggagtgactagacacctaatgccctggcagctggagactcaaactcctgtacagctaccttctgggaaatagtttttgacacctatttttcagattcttgtccggaatttctgctgctcttttcaaaaaagggcattaacaattctctggaaataaagcacctgttagcctgacatatgcaaaaagcagggcggcatcacccattacgagctcccccagccagcagtcagtattggattggccttgcctggctggtggcagtttgggagaaacagccaaagaggttagtttatttcaacaccaaattagaccatggcccatttccaacgggtctctttaaaggcctctatggaatacattgcctggtttccttctttgcagttcaccacagcaaggaatgtcacctccatcccaagccaccattttctcatgaaggcaaatccaagaagggcttgcagttcttgctgaagggggtaccatttgtgggcagagtgatcaataccatctagttgggggaggaggagcttatttcttggtgtacttgaatcagaaggtccctgcaagccagtatgcttcatttgccagtggccagaaattctcccttgcctccttgattgaggtgtcccagatgtagtattcccacaggggtctggcaggcccctcctgtaaccactccagtcacattttctgctcttgaggcagaggtgacatcaggacgtttacagcctccacatgaattgagtgttcatttacctcagtattaccgtgttcatttttgtcctcgtgctacagttagctccctgccgcctcttgcaggtcttacttcagctcttgcctgtgacccacacagcttctgggctctgcctctgctctaagaagtgctgtgggggtagagaaccaggaaggacatgctgttgggaatgtacacctgggcagaggtggccctgttaagatgtgactgtagccacagccagggatgggatccctgggtctctggaatctgaaacctcaacaaataccagtcttgacccctagcagcagagataagaataaaggggttggtttgctattaagtcagatgggggctctctccttgtcatgctgtccctgtgggtaacagacagggattgaccatcttactgttgtacaggtagctggtggtgttggattatcccattgaagctgggacagctgttcctttctcatagtgataacttgggtctgttgtcctctaaggaacgtgaaacatacacttcttaagctgaaccacgtaaacttgaaattctgcgcactgggagaaatgtgtcctgtgtttcaaaggataaaactgttctaaaggcttccagggtcatgatgggattttttaaataaatgcaaaaaataaaaataaaaaagaaaaaagaaaacaaaaaaaaaaaagaaaaaaatgctaggttggggaggcgctgttctgaatcccaaccggctggaaccaagaatgtcgtttctatttttatagaagttttatacagctccggggtggagaatatttattacctaaattatatctctggaaaaggccaggattttgtagaatccagaatgtgattgttatacacacagggtgctgtgtatgattgaaactactgactttctgtggcccgtttgcagcccagctaacctgcccaaggggaaggtgttaatgctgtgaattggcagaggagagagctgtgctccatagggtgctgccggtgctgtgctccctagccttctgttctgtcttcctccttagccagaacgccactcccttcccacatccccttcttctctccgccttcccccatctcaccattatttgtccatggatttgtcctgggctctgggaccttatgaaacccctttcctaatgacataagaggccaaggtgcaatccacccacctttgataccagaccctgagggcttcatacctgctgatgggttttcttttctaaaaggaatgctcgccccagcagggtcctgggctgcttgagcagccagctggtgagaccatgcacttctctgttctctcctccccctgcccagtgagttagcacagcagtagcactgcccttgagcacagttctttccccaggccaaagatggttttgtgaagaagctgctcccctacaagtctcacgtgtgaaagggctcagctcagagtggagactcgctgtcaagtcttaagcaatccttttctgttgtgtgaaggtttcacttacaatgtgttttctgctgtagttttgtttcttacttgggttacatcatgaaattgatttgccttgaatgcagccagaccactgtctcctgggttccccttgagtggccaggcctggatggaagctaagagcttggatttctgggaacaaagggccatccccataagattgagcagaaattctggtcctcttccctgaaaaattttccccaccccagccagcatcttctgcttccccttgggttgtgaccagggagtggggagagaggctgaggctctgctcccctggagaccttctcttaggagttgggtgcttcatggaaaatccaagccttaggttcccttctgtctctggcaattagatgtgttcttggtgtcctccatgtcctttttgacttttccctgtgtccattgttagcatgtgcaaaagttccctgtcattacccaacccctgcccgcccacctcatttcagggctgtacacacagtgagtgttcctgttctctctctctttgtttggatgtattgctctgtgtaactcagtgggtctccctctttctggtttgtttttttttctagattcctgccgtttgttcatcgttgtgcctaaagcatgtcgatgtggcgtcaagtacatcgtccaaatccctgtctcttcagcttctctgatgcttgaactctcacctttgaccttgtgttgacctttgatgctgatgtgtatttttattatgtttgtttctttcttcgtttttttttctttttttctttcctttttttttccttttgtgctgccaaattggttttgctagaacgactgctgaaggggaaatatttaaacttgcatttgaatataaaaaaaatctatttttctagaacttcataagataaccacttgattttgtgattccaattctttgtaattgtcttcagagcagccctactagcacataccgcgtggtgtttgtatttctgtgaacacacagccagtccgtttctaggctttgtttctctgtgtgcttagttttaaagacaactttgaagtaaacaatgaaataaaagatgtcactaaaacctctgaggctcctgagcacattttgctgatacagtctgtggggcttgaggagaccgcatgtattgttctttcttttgtttttcttctgagttctcaactgcggagagcacctgaaccccctttcctttttgaccgcaggctgcactttgggccccagccagccctttttctttttctttttcttttgtggttcttccctggagcgactctggggagtcctggatatcccgcctgccccttcccctcagccccatgcttgttccaacagtctccacagcaaaatgtgatgctttgatttttttgttgttgtttttgtttttgtattgtttttgtgtttttgttttgaattttttcctttcctactaagattatgcccagaaaaaagttttgcatgtttcctgctgtttcttcacaccttcgtatatatcaccttcacctctctgttttctatagtttgtgcaaaaactgatcgatttaaaagggtttcaaagaagctgttttaaattgttgtagggttgattatttttttcaagattgtattgtttaattttgaagtggcaactttctcctctattgcccttagagcgtttgcctgtgcacttagactgtcacttcgtgtggcctccaggtcttaccggggcttccgggaggctggctgctttgctcagagagggtgggaagggggcctggagagacacgagaagcagaggtagagcctagaaggtggcagcaggtgggtaagaggcttatttagcacattaggggcagtgagcacctggaggaaggagggcgctcccaatcacccgtaggaggccatctgcacaccaagcggcaattcacctgctggcgcttttcctaggtgacaagcacaatactacagtcttcacactgtttacagccctgggcaccagccacccggcactggctcttcatcacagctctgctcttgcttagctagtggggtgggggaaagggcagggatttgtttttttaattgggtggagagccaaacagctactgtccctgggtgccaagcaagccagttttttggttccctgagggaaactgaccctcctctcttgtggcaccatccagcctcagggtcttggagacttgagtaagaatgtgagtggagggggagaggtgaggagaggagcacagggtggatctgtggagggaagaggttacagggggaggagctgatgatagatcccacccagacttaagctgctggtgggtgggtgagctgggaagtaggactgtccagggaagggtggagagatgtagctaggggctggggagggggaggtggaagcgctattgagcatcctccacaccaaggttgatgaaggaagggatcccagcagggtttctgctctggggctggcaggttgcctggtattatgcccaaggccgctctgcctgggggaaagggcagccaggcagaggcccagtgtctggtaggctgctgaatttcctggaaggggtgattggatggaaagaggccagaaaccccagcctgagagactgctgtgcaccccacagtctgactgcacagagccgcctctgttggcaggaggcactgaggctccccttcctgtgtattgagaagcagtgtttgccaatatattttgctttcaattccaagaggagctctgggaaaacctgtggataaaaccaaatgccaaatgttggacgttgtttccttttccttttctctctctgattgttttaattgttctgtggtggttttaatggatttgagaccctggagcggcagctgcctttctgatttccagctgctttttgtgaataatttaaaaagaaaaaaaaaaagaaactttacattttggagacaaacctgtgtgagttttttattggtacaaacgttgtatttaacactaggggttttgtacagttttttgccttttctactagaaaacaatgtaaagtgatttcacaatgtgaagagaaaaaaaaattgccactatgaccaaacgcacagtctgttctgcagcaacaacgggattcaatcaactcagtcgtgattcagccgtagaaatgcttttcctttatcttgtttgagcttttcctttctttcctgttttgatttgcaaaagaaaatgtcttttttgtgtgaacttgtgttgtactctgtagaaaattatggattttactttaatggtttaaaaaaaggcaaggagagcccttgtcgcttttcttacctaatcacagagtttgtgtagtgaatttaaaaagaaaaaaaaattgttataagtttggagcaagggagtatgtgtttcaaaggaatctccttcctttttttgtgtgtttttccttttgtcccaatggggaacctaaatctgttttaattgcacagacacatggacaaaaagtcattttgtatctgccaagtgtggtaccttcctttgtttatttgctattaaactgtttgagaagaatctcaaactaggtggagacattttccatatcgtcttggcaattaacatcttgactactggttacttatgcatatttctgcagcccgcgtgaatttctcccccagcaaatggatttttttttctaccac

SEQ ID NO: 408495 - DNA, 8008 bp, Homo sapiens
  misc_feature (7973)..(7973): n is a, c, g, or t
tattgttcggtgttctgctctggcggcagcggcagcggcggcgggacgcggaggctcccccgggattcggcctcagcagcgaggcggcggcggcggctgcggaggcgcaggcagcaactgaggcagcggcaggctcaggtgcagccgctgctcaaagaaaatgaacggcaccctggaccacccagaccaaccagatcttgatgctatcaagatgtttgtgggccaggttccaaggacctggtctgaaaaggacttgcgggaactcttcgaacagtatggtgctgtgtatgaaatcaacgtcctaagggataggagccaaaacccgcctcagagcaaagggtgctgttttgttacattttacacccgtaaagctgcattagaagctcagaatgctcttcacaacatgaaagtcctcccagggatgcatcaccctatacagatgaaacctgctgacagtgagaagaacaatgcagtggaagacaggaagctgtttattggtatgatttccaagaagtgcactgaaaatgacatccgagtcatgttctcttcgtttggacagattgaagaatgccggatattgcggggacctgatggcctgagccgaggttgtgcatttgtgacttttacaacaagagccatggcacagacggctatcaaggcaatgcaccaagcacagaccatggagggttgctcatcacccatggtggtaaaatttgctgatacacagaaggacaaagaacagaagagaatggcccagcagctccagcagcagatgcagcaaatcagcgcagcatctgtgtggggaaaccttgctggtctaaatactcttggaccccagtatttagcactttatttgcagctccttcagcagactgcctcctctgggaacctcaacaccctgagcagcctccacccaatgggagggttgaatgcaatgcagttacagaatttggctgcactagctgctgcagctagtgcagctcagaacacaccaagtggtaccaatgctctcactacatccagcagtcccctcagcgtgctcactagttcagggtcctcacctagctctagcagcagtaattctgtcaaccccatagcctcacttggagccctgcagacattagctggagcaacggctggcctcaatgttggctctttggcaggaatggctgctttaaatggtggcctgggcagcagtggcctttccaatggcaccgggagcaccatggaggccctcactcaggcctactcgggtatccagcaatatgctgctgctgcgctccccactctgtacaaccagaatcttctgacacagcagagtattggtgctgctggaagccagaaggaaggtccagagggagccaacctgttcatctaccacctgccccaggagtttggtgatcaggacctgctgcagatgtttatgccctttgggaatgtcgtgtctgccaaggttttcatagacaagcagacaaacctgagcaagtgttttggttttgtaagttacgacaatcctgtttcggcccaagctgccatccagtccatgaacggctttcagattggcatgaagcggcttaaagtgcagctcaaacgttcgaagaatgacagcaagccctactgagcgtgctcccctctgagactggagtgagagggtcttctggtaagtgggggaggagcacccttaatgattcgaagccctgaggctgtgtgttgacagccctggaccctgatccctgccactctcgcaggcacagcttgccctgaagactcggctactgccttctgtgggagtttcgcttcgtacagaggacaagtttgtgctttggtttccagtgttttactttggagtttaggtgccatatcctgaggttttttttgtttttgtttttgtttctcctttatttaaagtttgctgtgtttgtaaccagtgtgtgttgagaaggaccaacaccaaaccaccctggggaagggggacagggaaacatttaacacagacgatgatcaggatttgccccaaaccaccccaagagagaggactgagtggaacaaaaaagtgacccccagaacctctcttagtgtgagggtgggtagaatgagaactgacacctgggagctgtggggagcagagcggctttggggaagagtggagtgactagacacctaatgccctggcagctggagactcaaactcctgtacagctaccttctgggaaatagtttttgacacctatttttcagattcttgtccggaatttctgctgctcttttcaaaaaagggcattaacaattctctggaaataaagcacctgttagcctgacatatgcaaaaagcagggcggcatcacccattacgagctcccccagccagcagtcagtattggattggccttgcctggctggtggcagtttgggagaaacagccaaagaggttagtttatttcaacaccaaattagaccatggcccatttccaacgggtctctttaaaggcctctatggaatacattgcctggtttccttctttgcagttcaccacagcaaggaatgtcacctccatcccaagccaccattttctcatgaaggcaaatccaagaagggcttgcagttcttgctgaagggggtaccatttgtgggcagagtgatcaataccatctagttgggggaggaggagcttatttcttggtgtacttgaatcagaaggtccctgcaagccagtatgcttcatttgccagtggccagaaattctcccttgcctccttgattgaggtgtcccagatgtagtattcccacaggggtctggcaggcccctcctgtaaccactccagtcacattttctgctcttgaggcagaggtgacatcaggacgtttacagcctccacatgaattgagtgttcatttacctcagtattaccgtgttcatttttgtcctcgtgctacagttagctccctgccgcctcttgcaggtcttacttcagctcttgcctgtgacccacacagcttctgggctctgcctctgctctaagaagtgctgtgggggtagagaaccaggaaggacatgctgttgggaatgtacacctgggcagaggtggccctgttaagatgtgactgtagccacagccagggatgggatccctgggtctctggaatctgaaacctcaacaaataccagtcttgacccctagcagcagagataagaataaaggggttggtttgctattaagtcagatgggggctctctccttgtcatgctgtccctgtgggtaacagacagggattgaccatcttactgttgtacaggtagctggtggtgttggattatcccattgaagctgggacagctgttcctttctcatagtgataacttgggtctgttgtcctctaaggaacgtgaaacatacacttcttaagctgaaccacgtaaacttgaaattctgcgcactgggagaaatgtgtcctgtgtttcaaaggataaaactgttctaaaggcttccagggtcatgatgggattttttaaataaatgcaaaaaataaaaataaaaaagaaaaaagaaaacaaaaaaaaaaaagaaaaaaatgctaggttggggaggcgctgttctgaatcccaaccggctggaaccaagaatgtcgtttctatttttatagaagttttatacagctccggggtggagaatatttattacctaaattatatctctggaaaaggccaggattttgtagaatccagaatgtgattgttatacacacagggtgctgtgtatgattgaaactactgactttctgtggcccgtttgcagcccagctaacctgcccaaggggaaggtgttaatgctgtgaattggcagaggagagagctgtgctccatagggtgctgccggtgctgtgctccctagccttctgttctgtcttcctccttagccagaacgccactcccttcccacatccccttcttctctccgccttcccccatctcaccattatttgtccatggatttgtcctgggctctgggaccttatgaaacccctttcctaatgacataagaggccaaggtgcaatccacccacctttgataccagaccctgagggcttcatacctgctgatgggttttcttttctaaaaggaatgctcgccccagcagggtcctgggctgcttgagcagccagctggtgagaccatgcacttctctgttctctcctccccctgcccagtgagttagcacagcagtagcactgcccttgagcacagttctttccccaggccaaagatggttttgtgaagaagctgctcccctacaagtctcacgtgtgaaagggctcagctcagagtggagactcgctgtcaagtcttaagcaatccttttctgttgtgtgaaggtttcacttacaatgtgttttctgctgtagttttgtttcttacttgggttacatcatgaaattgatttgccttgaatgcagccagaccactgtctcctgggttccccttgagtggccaggcctggatggaagctaagagcttggatttctgggaacaaagggccatccccataagattgagcagaaattctggtcctcttccctgaaaaattttccccaccccagccagcatcttctgcttccccttgggttgtgaccagggagtggggagagaggctgaggctctgctcccctggagaccttctcttaggagttgggtgcttcatggaaaatccaagccttaggttcccttctgtctctggcaattagatgtgttcttggtgtcctccatgtcctttttgacttttccctgtgtccattgttagcatgtgcaaaagttccctgtcattacccaacccctgcccgcccacctcatttcagggctgtacacacagtgagtgttcctgttctctctctctttgtttggatgtattgctctgtgtaactcagtgggtctccctctttctggtttgtttttttttctagattcctgccgtttgttcatcgttgtgcctaaagcatgtcgatgtggcgtcaagtacatcgtccaaatccctgtctcttcagcttctctgatgcttgaactctcacctttgaccttgtgttgacctttgatgctgatgtgtatttttattatgtttgtttctttcttcgtttttttttctttttttctttcctttttttttccttttgtgctgccaaattggttttgctagaacgactgctgaaggggaaatatttaaacttgcatttgaatataaaaaaaatctatttttctagaacttcataagataaccacttgattttgtgattccaattctttgtaattgtcttcagagcagccctactagcacataccgcgtggtgtttgtatttctgtgaacacacagccagtccgtttctaggctttgtttctctgtgtgcttagttttaaagacaactttgaagtaaacaatgaaataaaagatgtcactaaaacctctgaggctcctgagcacattttgctgatacagtctgtggggcttgaggagaccgcatgtattgttctttcttttgtttttcttctgagttctcaactgcggagagcacctgaaccccctttcctttttgaccgcaggctgcactttgggccccagccagccctttttctttttctttttcttttgtggttcttccctggagcgactctggggagtcctggatatcccgcctgccccttcccctcagccccatgcttgttccaacagtctccacagcaaaatgtgatgctttgatttttttgttgttgtttttgtttttgtattgtttttgtgtttttgttttgaattttttcctttcctactaagattatgcccagaaaaaagttttgcatgtttcctgctgtttcttcacaccttcgtatatatcaccttcacctctctgttttctatagtttgtgcaaaaactgatcgatttaaaagggtttcaaagaagctgttttaaattgttgtagggttgattatttttttcaagattgtattgtttaattttgaagtggcaactttctcctctattgcccttagagcgtttgcctgtgcacttagactgtcacttcgtgtggcctccaggtcttaccggggcttccgggaggctggctgctttgctcagagagggtgggaagggggcctggagagacacgagaagcagaggtagagcctagaaggtggcagcaggtgggtaagaggcttatttagcacattaggggcagtgagcacctggaggaaggagggcgctcccaatcacccgtaggaggccatctgcacaccaagcggcaattcacctgctggcgcttttcctaggtgacaagcacaatactacagtcttcacactgtttacagccctgggcaccagccacccggcactggctcttcatcacagctctgctcttgcttagctagtggggtgggggaaagggcagggatttgtttttttaattgggtggagagccaaacagctactgtccctgggtgccaagcaagccagttttttggttccctgagggaaactgaccctcctctcttgtggcaccatccagcctcagggtcttggagacttgagtaagaatgtgagtggagggggagaggtgaggagaggagcacagggtggatctgtggagggaagaggttacagggggaggagctgatgatagatcccacccagacttaagctgctggtgggtgggtgagctgggaagtaggactgtccagggaagggtggagagatgtagctaggggctggggagggggaggtggaagcgctattgagcatcctccacaccaaggttgatgaaggaagggatcccagcagggtttctgctctggggctggcaggttgcctggtattatgcccaaggccgctctgcctgggggaaagggcagccaggcagaggcccagtgtctggtaggctgctgaatttcctggaaggggtgattggatggaaagaggccagaaaccccagcctgagagactgctgtgcaccccacagtctgactgcacagagccgcctctgttggcaggaggcactgaggctccccttcctgtgtattgagaagcagtgtttgccaatatattttgctttcaattccaagaggagctctgggaaaacctgtggataaaaccaaatgccaaatgttggacgttgtttccttttccttttctctctctgattgttttaattgttctgtggtggttttaatggatttgagaccctggagcggcagctgcctttctgatttccagctgctttttgtgaataatttaaaaagaaaaaaaaaaagaaactttacattttggagacaaacctgtgtgagttttttattggtacaaacgttgtatttaacactaggggttttgtacagttttttgccttttctactagaaaacaatgtaaagtgatttcacaatgtgaagagaaaaaaaaattgccactatgaccaaacgcacagtctgttctgcagcaacaacgggattcaatcaactcagtcgtgattcagccgtagaaatgcttttcctttatcttgtttgagcttttcctttctttcctgttttgatttgcaaaagaaaatgtcttttttgtgtgaacttgtgttgtactctgtagaaaattatggattttactttaatggtttaaaaaaaggcaaggagagcccttgtcgcttttcttacctaatcacagagtttgtgtagtgaatttaaaaagaaaaaaaaattgttataagtttggagcaagggagtatgtgtttcaaaggaatctccttcctttttttgtgtgtttttccttttgtcccaatggggaacctaaatctgttttaattgcacagacacatggacaaaaagtcattttgtatctgccaagtgtggtaccttcctttgtttatttgctattaaactgtttgagaagaatctaaaactaggcattgctgcctgggggttctggttctatgtgctattgaaacttctaanactaggggtaccggctcgattcgatctgtcccggt

SEQ ID NO: 408496 - DNA, 7969 bp, Homo sapiens
  misc_feature (7934)..(7934): n is a, c, g, or t
tattgttcggtgttctgctctggcggcagcggcagcggcggcgggacgcggaggctcccccgggattcggcctcagcagcgaggcggcggcggcggctgcggaggcgcaggcagcaactgaggcagcggcaggctcaggtgcagccgctgctcaaagaaaatgaacggcaccctggaccacccagaccaaccagatcttgatgctatcaagatgtttgtgggccaggttccaaggacctggtctgaaaaggacttgcgggaactcttcgaacagtatggtgctgtgtatgaaatcaacgtcctaagggataggagccaaaacccgcctcagagcaaagggtgctgttttgttacattttacacccgtaaagctgcattagaagctcagaatgctcttcacaacatgaaagtcctcccagggatgcatcaccctatacagatgaaacctgctgacagtgagaagaacaatgcagtggaagacaggaagctgtttattggtatgatttccaagaagtgcactgaaaatgacatccgagtcatgttctcttcgtttggacagattgaagaatgccggatattgcggggacctgatggcctgagccgaggttgtgcatttgtgacttttacaacaagagccatggcacagacggctatcaaggcaatgcaccaagcacagaccatggagggttgctcatcacccatggtggtaaaatttgctgatacacagaaggacaaagaacagaagagaatggcccagcagctccagcagcagatgcagcaaatcagcgcagcatctgtgtggggaaaccttgctggtctaaatactcttggaccccagtatttagcactttatttgcagctccttcagcagactgcctcctctgggaacctcaacaccctgagcagcctccacccaatgggagggttgaatgcaatgcagttacagaatttggctgcactagctgctgcagctagtgcagctcagaacacaccaagtggtaccaatgctctcactacatccagcagtcccctcagcgtgctcactagttcagggtcctcacctagctctagcagcagtaattctgtcaaccccatagcctcacttggagccctgcagacattagctggagcaacggctggcctcaatgttggctctttggcaggaatggctgctttaaatggtggcctgggcagcagtggcctttccaatggcaccgggagcaccatggaggccctcactcaggcctactcgggtatccagcaatatgctgctgctgcgctccccactctgtacaaccagaatcttctgacacagcagagtattggtgctgctggaagccagaaggaaggtccagagggagccaacctgttcatctaccacctgccccaggagtttggtgatcaggacctgctgcagatgtttatgccctttgggaatgtcgtgtctgccaaggttttcatagacaagcagacaaacctgagcaagtgttttggttttgtaagttacgacaatcctgtttcggcccaagctgccatccagtccatgaacggctttcagattggcatgaagcggcttaaagtgcagctcaaacgttcgaagaatgacagcaagccctactgagcgtgctcccctctgagactggagtgagagggtcttctggtaagtgggggaggagcacccttaatgattcgaagccctgaggctgtgtgttgacagccctggaccctgatccctgccactctcgcaggcacagcttgccctgaagactcggctactgccttctgtgggagtttcgcttcgtacagaggacaagtttgtgctttggtttccagtgttttactttggagtttaggtgccatatcctgaggttttttttgtttttgtttttgtttctcctttatttaaagtttgctgtgtttgtaaccagtgtgtgttgagaaggaccaacaccaaaccaccctggggaagggggacagggaaacatttaacacagacgatgatcaggatttgccccaaaccaccccaagagagaggactgagtggaacaaaaaagtgacccccagaacctctcttagtgtgagggtgggtagaatgagaactgacacctgggagctgtggggagcagagcggctttggggaagagtggagtgactagacacctaatgccctggcagctggagactcaaactcctgtacagctaccttctgggaaatagtttttgacacctatttttcagattcttgtccggaatttctgctgctcttttcaaaaaagggcattaacaattctctggaaataaagcacctgttagcctgacatatgcaaaaagcagggcggcatcacccattacgagctcccccagccagcagtcagtattggattggccttgcctggctggtggcagtttgggagaaacagccaaagaggttagtttatttcaacaccaaattagaccatggcccatttccaacgggtctctttaaaggcctctatggaatacattgcctggtttccttctttgcagttcaccacagcaaggaatgtcacctccatcccaagccaccattttctcatgaaggcaaatccaagaagggcttgcagttcttgctgaagggggtaccatttgtgggcagagtgatcaataccatctagttgggggaggaggagcttatttcttggtgtacttgaatcagaaggtccctgcaagccagtatgcttcatttgccagtggccagaaattctcccttgcctccttgattgaggtgtcccagatgtagtattcccacaggggtctggcaggcccctcctgtaaccactccagtcacattttctgctcttgaggcagaggtgacatcaggacgtttacagcctccacatgaattgagtgttcatttacctcagtattaccgtgttcatttttgtcctcgtgctacagttagctccctgccgcctcttgcaggtcttacttcagctcttgcctgtgacccacacagcttctgggctctgcctctgctctaagaagtgctgtgggggtagagaaccaggaaggacatgctgttgggaatgtacacctgggcagaggtggccctgttaagatgtgactgtagccacagccagggatgggatccctgggtctctggaatctgaaacctcaacaaataccagtcttgacccctagcagcagagataagaataaaggggttggtttgctattaagtcagatgggggctctctccttgtcatgctgtccctgtgggtaacagacagggattgaccatcttactgttgtacaggtagctggtggtgttggattatcccattgaagctgggacagctgttcctttctcatagtgataacttgggtctgttgtcctctaaggaacgtgaaacatacacttcttaagctgaaccacgtaaacttgaaattctgcgcactgggagaaatgtgtcctgtgtttcaaaggataaaactgttctaaaggcttccagggtcatgatgggattttttaaataaatgcaaaaaataaaaataaaaaagaaaaaagaaaacaaaaaaaaaaaagaaaaaaatgctaggttggggaggcgctgttctgaatcccaaccggctggaaccaagaatgtcgtttctatttttatagaagttttatacagctccggggtggagaatatttattacctaaattatatctctggaaaaggccaggattttgtagaatccagaatgtgattgttatacacacagggtgctgtgtatgattgaaactactgactttctgtggcccgtttgcagcccagctaacctgcccaaggggaaggtgttaatgctgtgaattggcagaggagagagctgtgctccatagggtgctgccggtgctgtgctccctagccttctgttctgtcttcctccttagccagaacgccactcccttcccacatccccttcttctctccgccttcccccatctcaccattatttgtccatggatttgtcctgggctctgggaccttatgaaacccctttcctaatgacataagaggccaaggtgcaatccacccacctttgataccagaccctgagggcttcatacctgctgatgggttttcttttctaaaaggaatgctcgccccagcagggtcctgggctgcttgagcagccagctggtgagaccatgcacttctctgttctctcctccccctgcccagtgagttagcacagcagtagcactgcccttgagcacagttctttccccaggccaaagatggttttgtgaagaagctgctcccctacaagtctcacgtgtgaaagggctcagctcagagtggagactcgctgtcaagtcttaagcaatccttttctgttgtgtgaaggtttcacttacaatgtgttttctgctgtagttttgtttcttacttgggttacatcatgaaattgatttgccttgaatgcagccagaccactgtctcctgggttccccttgagtggccaggcctggatggaagctaagagcttggatttctgggaacaaagggccatccccataagattgagcagaaattctggtcctcttccctgaaaaattttccccaccccagccagcatcttctgcttccccttgggttgtgaccagggagtggggagagaggctgaggctctgctcccctggagaccttctcttaggagttgggtgcttcatggaaaatccaagccttaggttcccttctgtctctggcaattagatgtgttcttggtgtcctccatgtcctttttgacttttccctgtgtccattgttagcatgtgcaaaagttccctgtcattacccaacccctgcccgcccacctcatttcagggctgtacacacagtgagtgttcctgttctctctctctttgtttggatgtattgctctgtgtaactcagtgggtctccctctttctggtttgtttttttttctagattcctgccgtttgttcatcgttgtgcctaaagcatgtcgatgtggcgtcaagtacatcgtccaaatccctgtctcttcagcttctctgatgcttgaactctcacctttgaccttgtgttgacctttgatgctgatgtgtatttttattatgtttgtttctttcttcgtttttttttctttttttctttcctttttttttccttttgtgctgccaaattggttttgctagaacgactgctgaaggggaaatatttaaacttgcatttgaatataaaaaaaatctatttttctagaacttcataagataaccacttgattttgtgattccaattctttgtaattgtcttcagagcagccctactagcacataccgcgtggtgtttgtatttctgtgaacacacagccagtccgtttctaggctttgtttctctgtgtgcttagttttaaagacaactttgaagtaaacaatgaaataaaagatgtcactaaaacctctgaggctcctgagcacattttgctgatacagtctgtggggcttgaggagaccgcatgtattgttctttcttttgtttttcttctgagttctcaactgcggagagcacctgaaccccctttcctttttgaccgcaggctgcactttgggccccagccagccctttttctttttctttttcttttgtggttcttccctggagcgactctggggagtcctggatatcccgcctgccccttcccctcagccccatgcttgttccaacagtctccacagcaaaatgtgatgctttgatttttttgttgttgtttttgtttttgtattgtttttgtgtttttgttttgaattttttcctttcctactaagattatgcccagaaaaaagttttgcatgtttcctgctgtttcttcacaccttcgtatatatcaccttcacctctctgttttctatagtttgtgcaaaaactgatcgatttaaaagggtttcaaagaagctgttttaaattgttgtagggttgattatttttttcaagattgtattgtttaattttgaagtggcaactttctcctctattgcccttagagcgtttgcctgtgcacttagactgtcacttcgtgtggcctccaggtcttaccggggcttccgggaggctggctgctttgctcagagagggtgggaagggggcctggagagacacgagaagcagaggtagagcctagaaggtggcagcaggtgggtaagaggcttatttagcacattaggggcagtgagcacctggaggaaggagggcgctcccaatcacccgtaggaggccatctgcacaccaagcggcaattcacctgctggcgcttttcctaggtgacaagcacaatactacagtcttcacactgtttacagccctgggcaccagccacccggcactggctcttcatcacagctctgctcttgcttagctagtggggtgggggaaagggcagggatttgtttttttaattgggtggagagccaaacagctactgtccctgggtgccaagcaagccagttttttggttccctgagggaaactgaccctcctctcttgtggcaccatccagcctcagggtcttggagacttgagtaagaatgtgagtggagggggagaggtgaggagaggagcacagggtggatctgtggagggaagaggttacagggggaggagctgatgatagatcccacccagacttaagctgctggtgggtgggtgagctgggaagtaggactgtccagggaagggtggagagatgtagctaggggctggggagggggaggtggaagcgctattgagcatcctccacaccaaggttgatgaaggaagggatcccagcagggtttctgctctggggctggcaggttgcctggtattatgcccaaggccgctctgcctgggggaaagggcagccaggcagaggcccagtgtctggtaggctgctgaatttcctggaaggggtgattggatggaaagaggccagaaaccccagcctgagagactgctgtgcaccccacagtctgactgcacagagccgcctctgttggcaggaggcactgaggctccccttcctgtgtattgagaagcagtgtttgccaatatattttgctttcaattccaagaggagctctgggaaaacctgtggataaaaccaaatgccaaatgttggacgttgtttccttttccttttctctctctgattgttttaattgttctgtggtggttttaatggatttgagaccctggagcggcagctgcctttctgatttccagctgctttttgtgaataatttaaaaagaaaaaaaaaaagaaactttacattttggagacaaacctgtgtgagttttttattggtacaaacgttgtatttaacactaggggttttgtacagttttttgccttttctactagaaaacaatgtaaagtgatttcacaatgtgaagagaaaaaaaaattgccactatgaccaaacgcacagtctgttctgcagcaacaacgggattcaatcaactcagtcgtgattcagccgtagaaatgcttttcctttatcttgtttgagcttttcctttctttcctgttttgatttgcaaaagaaaatgtcttttttgtgtgaacttgtgttgtactctgtagaaaattatggattttactttaatggtttaaaaaaaggcaaggagagcccttgtcgcttttcttacctaatcacagagtttgtgtagtgaatttaaaaagaaaaaaaaattgttataagtttggagcaagggagtatgtgtttcaaaggaatctccttcctttttttgtgtgtttttccttttgtcccaatggggaacctaaatctgttttaattgcacagacacatggacaaaaagtcattttgtatctgccaagtgtggtaccttcctttgtttatttgctattaaactgtttgagaagaatgtgctattgaaacttctaanactaggggtaccggctcgattcgatctgtcccggt

SEQ ID NO: 408497 - DNA, 7823 bp, Homo sapiens
tattgttcggtgttctgctctggcggcagcggcagcggcggcgggacgcggaggctcccccgggattcggcctcagcagcgaggcggcggcggcggctgcggaggcgcaggcagcaactgaggcagcggcaggctcaggtgcagccgctgctcaaagaaaatgaacggcaccctggaccacccagaccaaccagatcttgatgctatcaagatgtttgtgggccaggttccaaggacctggtctgaaaaggacttgcgggaactcttcgaacagtatggtgctgtgtatgaaatcaacgtcctaagggataggagccaaaacccgcctcagagcaaagggtgctgttttgttacattttacacccgtaaagctgcattagaagctcagaatgctcttcacaacatgaaagtcctcccagggatgcatcaccctatacagatgaaacctgctgacagtgagaagaacaatgcagtggaagacaggaagctgtttattggtatgatttccaagaagtgcactgaaaatgacatccgagtcatgttctcttcgtttggacagattgaagaatgccggatattgcggggacctgatggcctgagccgaggttgtgcatttgtgacttttacaacaagagccatggcacagacggctatcaaggcaatgcaccaagcacagaccatggagggttgctcatcacccatggtggtaaaatttgctgatacacagaaggacaaagaacagaagagaatggcccagcagctccagcagcagatgcagcaaatcagcgcagcatctgtgtggggaaaccttgctggtctaaatactcttggaccccagtatttagcactttatttgcagctccttcagcagactgcctcctctgggaacctcaacaccctgagcagcctccacccaatgggagggttgaatgcaatgcagttacagaatttggctgcactagctgctgcagctagtgcagctcagaacacaccaagtggtaccaatgctctcactacatccagcagtcccctcagcgtgctcactagttcagggtcctcacctagctctagcagcagtaattctgtcaaccccatagcctcacttggagccctgcagacattagctggagcaacggctggcctcaatgttggctctttggcaggaatggctgctttaaatggtggcctgggcagcagtggcctttccaatggcaccgggagcaccatggaggccctcactcaggcctactcgggtatccagcaatatgctgctgctgcgctccccactctgtacaaccagaatcttctgacacagcagagtattggtgctgctggaagccagaaggaaggtccagagggagccaacctgttcatctaccacctgccccaggagtttggtgatcaggacctgctgcagatgtttatgccctttgggaatgtcgtgtctgccaaggttttcatagacaagcagacaaacctgagcaagtgttttggttttgtaagttacgacaatcctgtttcggcccaagctgccatccagtccatgaacggctttcagattggcatgaagcggcttaaagtgcagctcaaacgttcgaagaatgacagcaagccctactgagcgtgctcccctctgagactggagtgagagggtcttctggtaagtgggggaggagcacccttaatgattcgaagccctgaggctgtgtgttgacagccctggaccctgatccctgccactctcgcaggcacagcttgccctgaagactcggctactgccttctgtgggagtttcgcttcgtacagaggacaagtttgtgctttggtttccagtgttttactttggagtttaggtgccatatcctgaggttttttttgtttttgtttttgtttctcctttatttaaagtttgctgtgtttgtaaccagtgtgtgttgagaaggaccaacaccaaaccaccctggggaagggggacagggaaacatttaacacagacgatgatcaggatttgccccaaaccaccccaagagagaggactgagtggaacaaaaaagtgacccccagaacctctcttagtgtgagggtgggtagaatgagaactgacacctgggagctgtggggagcagagcggctttggggaagagtggagtgactagacacctaatgccctggcagctggagactcaaactcctgtacagctaccttctgggaaatagtttttgacacctatttttcagattcttgtccggaatttctgctgctcttttcaaaaaagggcattaacaattctctggaaataaagcacctgttagcctgacatatgcaaaaagcagggcggcatcacccattacgagctcccccagccagcagtcagtattggattggccttgcctggctggtggcagtttgggagaaacagccaaagaggttagtttatttcaacaccaaattagaccatggcccatttccaacgggtctctttaaaggcctctatggaatacattgcctggtttccttctttgcagttcaccacagcaaggaatgtcacctccatcccaagccaccattttctcatgaaggcaaatccaagaagggcttgcagttcttgctgaagggggtaccatttgtgggcagagtgatcaataccatctagttgggggaggaggagcttatttcttggtgtacttgaatcagaaggtccctgcaagccagtatgcttcatttgccagtggccagaaattctcccttgcctccttgattgaggtgtcccagatgtagtattcccacaggggtctggcaggcccctcctgtaaccactccagtcacattttctgctcttgaggcagaggtgacatcaggacgtttacagcctccacatgaattgagtgttcatttacctcagtattaccgtgttcatttttgtcctcgtgctacagttagctccctgccgcctcttgcaggtcttacttcagctcttgcctgtgacccacacagcttctgggctctgcctctgctctaagaagtgctgtgggggtagagaaccaggaaggacatgctgttgggaatgtacacctgggcagaggtggccctgttaagatgtgactgtagccacagccagggatgggatccctgggtctctggaatctgaaacctcaacaaataccagtcttgacccctagcagcagagataagaataaaggggttggtttgctattaagtcagatgggggctctctccttgtcatgctgtccctgtgggtaacagacagggattgaccatcttactgttgtacaggtagctggtggtgttggattatcccattgaagctgggacagctgttcctttctcatagtgataacttgggtctgttgtcctctaaggaacgtgaaacatacacttcttaagctgaaccacgtaaacttgaaattctgcgcactgggagaaatgtgtcctgtgtttcaaaggataaaactgttctaaaggcttccagggtcatgatgggattttttaaataaatgcaaaaaataaaaataaaaaagaaaaaagaaaacaaaaaaaaaaaagaaaaaaatgctaggttggggaggcgctgttctgaatcccaaccggctggaaccaagaatgtcgtttctatttttatagaagttttatacagctccggggtggagaatatttattacctaaattatatctctggaaaaggccaggattttgtagaatccagaatgtgattgttatacacacagggtgctgtgtatgattgaaactactgactttctgtggcccgtttgcagcccagctaacctgcccaaggggaaggtgttaatgctgtgaattggcagaggagagagctgtgctccatagggtgctgccggtgctgtgctccctagccttctgttctgtcttcctccttagccagaacgccactcccttcccacatccccttcttctctccgccttcccccatctcaccattatttgtccatggatttgtcctgggctctgggaccttatgaaacccctttcctaatgacataagaggccaaggtgcaatccacccacctttgataccagaccctgagggcttcatacctgctgatgggttttcttttctaaaaggaatgctcgccccagcagggtcctgggctgcttgagcagccagctggtgagaccatgcacttctctgttctctcctccccctgcccagtgagttagcacagcagtagcactgcccttgagcacagttctttccccaggccaaagatggttttgtgaagaagctgctcccctacaagtctcacgtgtgaaagggctcagctcagagtggagactcgctgtcaagtcttaagcaatccttttctgttgtgtgaaggtttcacttacaatgtgttttctgctgtagttttgtttcttacttgggttacatcatgaaattgatttgccttgaatgcagccagaccactgtctcctgggttccccttgagtggccaggcctggatggaagctaagagcttggatttctgggaacaaagggccatccccataagattgagcagaaattctggtcctcttccctgaaaaattttccccaccccagccagcatcttctgcttccccttgggttgtgaccagggagtggggagagaggctgaggctctgctcccctggagaccttctcttaggagttgggtgcttcatggaaaatccaagccttaggttcccttctgtctctggcaattagatgtgttcttggtgtcctccatgtcctttttgacttttccctgtgtccattgttagcatgtgcaaaagttccctgtcattacccaacccctgcccgcccacctcatttcagggctgtacacacagtgagtgttcctgttctctctctctttgtttggatgtattgctctgtgtaactcagtgggtctccctctttctggtttgtttttttttctagattcctgccgtttgttcatcgttgtgcctaaagcatgtcgatgtggcgtcaagtacatcgtccaaatccctgtctcttcagcttctctgatgcttgaactctcacctttgaccttgtgttgacctttgatgctgatgtgtatttttattatgtttgtttctttcttcgtttttttttctttttttctttcctttttttttccttttgtgctgccaaattggttttgctagaacgactgctgaaggggaaatatttaaacttgcatttgaatataaaaaaaatctatttttctagaacttcataagataaccacttgattttgtgattccaattctttgtaattgtcttcagagcagccctactagcacataccgcgtggtgtttgtatttctgtgaacacacagccagtccgtttctaggctttgtttctctgtgtgcttagttttaaagacaactttgaagtaaacaatgaaataaaagatgtcactaaaacctctgaggctcctgagcacattttgctgatacagtctgtggggcttgaggagaccgcatgtattgttctttcttttgtttttcttctgagttctcaactgcggagagcacctgaaccccctttcctttttgaccgcaggctgcactttgggccccagccagccctttttctttttctttttcttttgtggttcttccctggagcgactctggggagtcctggatatcccgcctgccccttcccctcagccccatgcttgttccaacagtctccacagcaaaatgtgatgctttgatttttttgttgttgtttttgtttttgtattgtttttgtgtttttgttttgaattttttcctttcctactaagattatgcccagaaaaaagttttgcatgtttcctgctgtttcttcacaccttcgtatatatcaccttcacctctctgttttctatagtttgtgcaaaaactgatcgatttaaaagggtttcaaagaagctgttttaaattgttgtagggttgattatttttttcaagattgtattgtttaattttgaagtggcaactttctcctctattgcccttagagcgtttgcctgtgcacttagactgtcacttcgtgtggcctccaggtcttaccggggcttccgggaggctggctgctttgctcagagagggtgggaagggggcctggagagacacgagaagcagaggtagagcctagaaggtggcagcaggtgggtaagaggcttatttagcacattaggggcagtgagcacctggaggaaggagggcgctcccaatcacccgtaggaggccatctgcacaccaagcggcaattcacctgctggcgcttttcctaggtgacaagcacaatactacagtcttcacactgtttacagccctgggcaccagccacccggcactggctcttcatcacagctctgctcttgcttagctagtggggtgggggaaagggcagggatttgtttttttaattgggtggagagccaaacagctactgtccctgggtgccaagcaagccagttttttggttccctgagggaaactgaccctcctctcttgtggcaccatccagcctcagggtcttggagacttgagtaagaatgtgagtggagggggagaggtgaggagaggagcacagggtggatctgtggagggaagaggttacagggggaggagctgatgatagatcccacccagacttaagctgctggtgggtgggtgagctgggaagtaggactgtccagggaagggtggagagatgtagctaggggctggggagggggaggtggaagcgctattgagcatcctccacaccaaggttgatgaaggaagggatcccagcagggtttctgctctggggctggcaggttgcctggtattatgcccaaggccgctctgcctgggggaaagggcagccaggcagaggcccagtgtctggtaggctgctgaatttcctggaaggggtgattggatggaaagaggccagaaaccccagcctgagagactgctgtgcaccccacagtctgactgcacagagccgcctctgttggcaggaggcactgaggctccccttcctgtgtattgagaagcagtgtttgccaatatattttgctttcaattccaagaggagctctgggaaaacctgtggataaaaccaaatgccaaatgttggacgttgtttccttttccttttctctctctgattgttttaattgttctgtggtggttttaatggatttgagaccctggagcggcagctgcctttctgatttccagctgctttttgtgaataatttaaaaagaaaaaaaaaaagaaactttacattttggagacaaacctgtgtgagttttttattggtacaaacgttgtatttaacactaggggttttgtacagttttttgccttttctactagaaaacaatgtaaagtgatttcacaatgtgaagagaaaaaaaaattgccactatgaccaaacgcacagtctgttctgcagcaacaacgggattcaatcaactcagtcgtgattcagccgtagaaatgcttttcctttatcttgtttgagcttttcctttctttcctgttttgatttgcaaaagaaaatgtcttttttgtgtgaacttgtgttgtactctgtagaaaattatggattttactttaatggtttaaaaaaaggcaaggagagcccttgtcgcttttcttacctaatcacagagtttgtgtagtgaatttaaaaagaaaaaaaaattgttataagtttggagcaagggagtatgtgtttcaaaggaatctccttcctttttttgtgtgtttttccttttgtcccaatggtagacagactggccgagctc

SEQ ID NO: 408498 - DNA, 7741 bp, Homo sapiens
ggccggtatgagtcactgccagcccgcaatgtgagtgtgagaataaatcacgtggcgggggctgggggggaggtgcgaaggtttttctgacctcccacacaggcagccccagaagcagagggaatccccaggatgtaccattggacctggatgaataaatagactgtccatcttggaggagatgcaggggcaacagttcttacaggactggcacagaatgctcttcacaacatgaaagtcctcccagggatgcatcaccctatacagatgaaacctgctgacagtgagaagaacaatgcagtggaagacaggaagctgtttattggtatgatttccaagaagtgcactgaaaatgacatccgagtcatgttctcttcgtttggacagattgaagaatgccggatattgcggggacctgatggcctgagccgaggttgtgcatttgtgacttttacaacaagagccatggcacagacggctatcaaggcaatgcaccaagcacagaccatggagggttgctcatcacccatggtggtaaaatttgctgatacacagaaggacaaagaacagaagagaatggcccagcagctccagcagcagatgcagcaaatcagcgcagcatctgtgtggggaaaccttgctggtctaaatactcttggaccccagtatttagcactttatttgcagctccttcagcagactgcctcctctgggaacctcaacaccctgagcagcctccacccaatgggagggttgaatgcaatgcagttacagaatttggctgcactagctgctgcagctagtgcagctcagaacacaccaagtggtaccaatgctctcactacatccagcagtcccctcagcgtgctcactagttcagggtcctcacctagctctagcagcagtaattctgtcaaccccatagcctcacttggagccctgcagacattagctggagcaacggctggcctcaatgttggctctttggcaggaatggctgctttaaatggtggcctgggcagcagtggcctttccaatggcaccgggagcaccatggaggccctcactcaggcctactcgggtatccagcaatatgctgctgctgcgctccccactctgtacaaccagaatcttctgacacagcagagtattggtgctgctggaagccagaaggaaggtccagagggagccaacctgttcatctaccacctgccccaggagtttggtgatcaggacctgctgcagatgtttatgccctttgggaatgtcgtgtctgccaaggttttcatagacaagcagacaaacctgagcaagtgttttggttttgtaagttacgacaatcctgtttcggcccaagctgccatccagtccatgaacggctttcagattggcatgaagcggcttaaagtgcagctcaaacgttcgaagaatgacagcaagccctactgagcgtgctcccctctgagactggagtgagagggtcttctggtaagtgggggaggagcacccttaatgattcgaagccctgaggctgtgtgttgacagccctggaccctgatccctgccactctcgcaggcacagcttgccctgaagactcggctactgccttctgtgggagtttcgcttcgtacagaggacaagtttgtgctttggtttccagtgttttactttggagtttaggtgccatatcctgaggttttttttgtttttgtttttgtttctcctttatttaaagtttgctgtgtttgtaaccagtgtgtgttgagaaggaccaacaccaaaccaccctggggaagggggacagggaaacatttaacacagacgatgatcaggatttgccccaaaccaccccaagagagaggactgagtggaacaaaaaagtgacccccagaacctctcttagtgtgagggtgggtagaatgagaactgacacctgggagctgtggggagcagagcggctttggggaagagtggagtgactagacacctaatgccctggcagctggagactcaaactcctgtacagctaccttctgggaaatagtttttgacacctatttttcagattcttgtccggaatttctgctgctcttttcaaaaaagggcattaacaattctctggaaataaagcacctgttagcctgacatatgcaaaaagcagggcggcatcacccattacgagctcccccagccagcagtcagtattggattggccttgcctggctggtggcagtttgggagaaacagccaaagaggttagtttatttcaacaccaaattagaccatggcccatttccaacgggtctctttaaaggcctctatggaatacattgcctggtttccttctttgcagttcaccacagcaaggaatgtcacctccatcccaagccaccattttctcatgaaggcaaatccaagaagggcttgcagttcttgctgaagggggtaccatttgtgggcagagtgatcaataccatctagttgggggaggaggagcttatttcttggtgtacttgaatcagaaggtccctgcaagccagtatgcttcatttgccagtggccagaaattctcccttgcctccttgattgaggtgtcccagatgtagtattcccacaggggtctggcaggcccctcctgtaaccactccagtcacattttctgctcttgaggcagaggtgacatcaggacgtttacagcctccacatgaattgagtgttcatttacctcagtattaccgtgttcatttttgtcctcgtgctacagttagctccctgccgcctcttgcaggtcttacttcagctcttgcctgtgacccacacagcttctgggctctgcctctgctctaagaagtgctgtgggggtagagaaccaggaaggacatgctgttgggaatgtacacctgggcagaggtggccctgttaagatgtgactgtagccacagccagggatgggatccctgggtctctggaatctgaaacctcaacaaataccagtcttgacccctagcagcagagataagaataaaggggttggtttgctattaagtcagatgggggctctctccttgtcatgctgtccctgtgggtaacagacagggattgaccatcttactgttgtacaggtagctggtggtgttggattatcccattgaagctgggacagctgttcctttctcatagtgataacttgggtctgttgtcctctaaggaacgtgaaacatacacttcttaagctgaaccacgtaaacttgaaattctgcgcactgggagaaatgtgtcctgtgtttcaaaggataaaactgttctaaaggcttccagggtcatgatgggattttttaaataaatgcaaaaaataaaaataaaaaagaaaaaagaaaacaaaaaaaaaaaagaaaaaaatgctaggttggggaggcgctgttctgaatcccaaccggctggaaccaagaatgtcgtttctatttttatagaagttttatacagctccggggtggagaatatttattacctaaattatatctctggaaaaggccaggattttgtagaatccagaatgtgattgttatacacacagggtgctgtgtatgattgaaactactgactttctgtggcccgtttgcagcccagctaacctgcccaaggggaaggtgttaatgctgtgaattggcagaggagagagctgtgctccatagggtgctgccggtgctgtgctccctagccttctgttctgtcttcctccttagccagaacgccactcccttcccacatccccttcttctctccgccttcccccatctcaccattatttgtccatggatttgtcctgggctctgggaccttatgaaacccctttcctaatgacataagaggccaaggtgcaatccacccacctttgataccagaccctgagggcttcatacctgctgatgggttttcttttctaaaaggaatgctcgccccagcagggtcctgggctgcttgagcagccagctggtgagaccatgcacttctctgttctctcctccccctgcccagtgagttagcacagcagtagcactgcccttgagcacagttctttccccaggccaaagatggttttgtgaagaagctgctcccctacaagtctcacgtgtgaaagggctcagctcagagtggagactcgctgtcaagtcttaagcaatccttttctgttgtgtgaaggtttcacttacaatgtgttttctgctgtagttttgtttcttacttgggttacatcatgaaattgatttgccttgaatgcagccagaccactgtctcctgggttccccttgagtggccaggcctggatggaagctaagagcttggatttctgggaacaaagggccatccccataagattgagcagaaattctggtcctcttccctgaaaaattttccccaccccagccagcatcttctgcttccccttgggttgtgaccagggagtggggagagaggctgaggctctgctcccctggagaccttctcttaggagttgggtgcttcatggaaaatccaagccttaggttcccttctgtctctggcaattagatgtgttcttggtgtcctccatgtcctttttgacttttccctgtgtccattgttagcatgtgcaaaagttccctgtcattacccaacccctgcccgcccacctcatttcagggctgtacacacagtgagtgttcctgttctctctctctttgtttggatgtattgctctgtgtaactcagtgggtctccctctttctggtttgtttttttttctagattcctgccgtttgttcatcgttgtgcctaaagcatgtcgatgtggcgtcaagtacatcgtccaaatccctgtctcttcagcttctctgatgcttgaactctcacctttgaccttgtgttgacctttgatgctgatgtgtatttttattatgtttgtttctttcttcgtttttttttctttttttctttcctttttttttccttttgtgctgccaaattggttttgctagaacgactgctgaaggggaaatatttaaacttgcatttgaatataaaaaaaatctatttttctagaacttcataagataaccacttgattttgtgattccaattctttgtaattgtcttcagagcagccctactagcacataccgcgtggtgtttgtatttctgtgaacacacagccagtccgtttctaggctttgtttctctgtgtgcttagttttaaagacaactttgaagtaaacaatgaaataaaagatgtcactaaaacctctgaggctcctgagcacattttgctgatacagtctgtggggcttgaggagaccgcatgtattgttctttcttttgtttttcttctgagttctcaactgcggagagcacctgaaccccctttcctttttgaccgcaggctgcactttgggccccagccagccctttttctttttctttttcttttgtggttcttccctggagcgactctggggagtcctggatatcccgcctgccccttcccctcagccccatgcttgttccaacagtctccacagcaaaatgtgatgctttgatttttttgttgttgtttttgtttttgtattgtttttgtgtttttgttttgaattttttcctttcctactaagattatgcccagaaaaaagttttgcatgtttcctgctgtttcttcacaccttcgtatatatcaccttcacctctctgttttctatagtttgtgcaaaaactgatcgatttaaaagggtttcaaagaagctgttttaaattgttgtagggttgattatttttttcaagattgtattgtttaattttgaagtggcaactttctcctctattgcccttagagcgtttgcctgtgcacttagactgtcacttcgtgtggcctccaggtcttaccggggcttccgggaggctggctgctttgctcagagagggtgggaagggggcctggagagacacgagaagcagaggtagagcctagaaggtggcagcaggtgggtaagaggcttatttagcacattaggggcagtgagcacctggaggaaggagggcgctcccaatcacccgtaggaggccatctgcacaccaagcggcaattcacctgctggcgcttttcctaggtgacaagcacaatactacagtcttcacactgtttacagccctgggcaccagccacccggcactggctcttcatcacagctctgctcttgcttagctagtggggtgggggaaagggcagggatttgtttttttaattgggtggagagccaaacagctactgtccctgggtgccaagcaagccagttttttggttccctgagggaaactgaccctcctctcttgtggcaccatccagcctcagggtcttggagacttgagtaagaatgtgagtggagggggagaggtgaggagaggagcacagggtggatctgtggagggaagaggttacagggggaggagctgatgatagatcccacccagacttaagctgctggtgggtgggtgagctgggaagtaggactgtccagggaagggtggagagatgtagctaggggctggggagggggaggtggaagcgctattgagcatcctccacaccaaggttgatgaaggaagggatcccagcagggtttctgctctggggctggcaggttgcctggtattatgcccaaggccgctctgcctgggggaaagggcagccaggcagaggcccagtgtctggtaggctgctgaatttcctggaaggggtgattggatggaaagaggccagaaaccccagcctgagagactgctgtgcaccccacagtctgactgcacagagccgcctctgttggcaggaggcactgaggctccccttcctgtgtattgagaagcagtgtttgccaatatattttgctttcaattccaagaggagctctgggaaaacctgtggataaaaccaaatgccaaatgttggacgttgtttccttttccttttctctctctgattgttttaattgttctgtggtggttttaatggatttgagaccctggagcggcagctgcctttctgatttccagctgctttttgtgaataatttaaaaagaaaaaaaaaaagaaactttacattttggagacaaacctgtgtgagttttttattggtacaaacgttgtatttaacactaggggttttgtacagttttttgccttttctactagaaaacaatgtaaagtgatttcacaatgtgaagagaaaaaaaaattgccactatgaccaaacgcacagtctgttctgcagcaacaacgggattcaatcaactcagtcgtgattcagccgtagaaatgcttttcctttatcttgtttgagcttttcctttctttcctgttttgatttgcaaaagaaaatgtcttttttgtgtgaacttgtgttgtactctgtagaaaattatggattttactttaatggtttaaaaaaaggcaaggagagcccttgtcgcttttcttacctaatcacagagtttgtgtagtgaatttaaaaagaaaaaaaaattgttataagtttggagcaagggagtatgtgtttcaaaggaatctccttcctttttttgtgtgtttttccttttgtcccaatggggaacctaaatctgttttaattgcacagacacatggacaaaaagtcattttgtatctgccaagtgtggtaccttcctttgtttatttgctattaaactgtttgagaagaa

SEQ ID NO: 408499 - DNA, 7040 bp, Homo sapiens
atatgaagcacccttatctgctggctaatctcttgctttggatgttgtagggttgaatgcaatgcagttacagaatttggctgcactagctgctgcagctagtgcagctcagaacacaccaagtggtaccaatgctctcactacatccagcagtcccctcagcgtgctcactagttcagggtcctcacctagctctagcagcagtaattctgtcaaccccatagcctcacttggagccctgcagacattagctggagcaacggctggcctcaatgttggctctttggcaggaatggctgctttaaatggtggcctgggcagcagtggcctttccaatggcaccgggagcaccatggaggccctcactcaggcctactcgggtatccagcaatatgctgctgctgcgctccccactctgtacaaccagaatcttctgacacagcagagtattggtgctgctggaagccagaaggaaggtccagagggagccaacctgttcatctaccacctgccccaggagtttggtgatcaggacctgctgcagatgtttatgccctttgggaatgtcgtgtctgccaaggttttcatagacaagcagacaaacctgagcaagtgttttggttttgtaagttacgacaatcctgtttcggcccaagctgccatccagtccatgaacggctttcagattggcatgaagcggcttaaagtgcagctcaaacgttcgaagaatgacagcaagccctactgagcgtgctcccctctgagactggagtgagagggtcttctggtaagtgggggaggagcacccttaatgattcgaagccctgaggctgtgtgttgacagccctggaccctgatccctgccactctcgcaggcacagcttgccctgaagactcggctactgccttctgtgggagtttcgcttcgtacagaggacaagtttgtgctttggtttccagtgttttactttggagtttaggtgccatatcctgaggttttttttgtttttgtttttgtttctcctttatttaaagtttgctgtgtttgtaaccagtgtgtgttgagaaggaccaacaccaaaccaccctggggaagggggacagggaaacatttaacacagacgatgatcaggatttgccccaaaccaccccaagagagaggactgagtggaacaaaaaagtgacccccagaacctctcttagtgtgagggtgggtagaatgagaactgacacctgggagctgtggggagcagagcggctttggggaagagtggagtgactagacacctaatgccctggcagctggagactcaaactcctgtacagctaccttctgggaaatagtttttgacacctatttttcagattcttgtccggaatttctgctgctcttttcaaaaaagggcattaacaattctctggaaataaagcacctgttagcctgacatatgcaaaaagcagggcggcatcacccattacgagctcccccagccagcagtcagtattggattggccttgcctggctggtggcagtttgggagaaacagccaaagaggttagtttatttcaacaccaaattagaccatggcccatttccaacgggtctctttaaaggcctctatggaatacattgcctggtttccttctttgcagttcaccacagcaaggaatgtcacctccatcccaagccaccattttctcatgaaggcaaatccaagaagggcttgcagttcttgctgaagggggtaccatttgtgggcagagtgatcaataccatctagttgggggaggaggagcttatttcttggtgtacttgaatcagaaggtccctgcaagccagtatgcttcatttgccagtggccagaaattctcccttgcctccttgattgaggtgtcccagatgtagtattcccacaggggtctggcaggcccctcctgtaaccactccagtcacattttctgctcttgaggcagaggtgacatcaggacgtttacagcctccacatgaattgagtgttcatttacctcagtattaccgtgttcatttttgtcctcgtgctacagttagctccctgccgcctcttgcaggtcttacttcagctcttgcctgtgacccacacagcttctgggctctgcctctgctctaagaagtgctgtgggggtagagaaccaggaaggacatgctgttgggaatgtacacctgggcagaggtggccctgttaagatgtgactgtagccacagccagggatgggatccctgggtctctggaatctgaaacctcaacaaataccagtcttgacccctagcagcagagataagaataaaggggttggtttgctattaagtcagatgggggctctctccttgtcatgctgtccctgtgggtaacagacagggattgaccatcttactgttgtacaggtagctggtggtgttggattatcccattgaagctgggacagctgttcctttctcatagtgataacttgggtctgttgtcctctaaggaacgtgaaacatacacttcttaagctgaaccacgtaaacttgaaattctgcgcactgggagaaatgtgtcctgtgtttcaaaggataaaactgttctaaaggcttccagggtcatgatgggattttttaaataaatgcaaaaaataaaaataaaaaagaaaaaagaaaacaaaaaaaaaaaagaaaaaaatgctaggttggggaggcgctgttctgaatcccaaccggctggaaccaagaatgtcgtttctatttttatagaagttttatacagctccggggtggagaatatttattacctaaattatatctctggaaaaggccaggattttgtagaatccagaatgtgattgttatacacacagggtgctgtgtatgattgaaactactgactttctgtggcccgtttgcagcccagctaacctgcccaaggggaaggtgttaatgctgtgaattggcagaggagagagctgtgctccatagggtgctgccggtgctgtgctccctagccttctgttctgtcttcctccttagccagaacgccactcccttcccacatccccttcttctctccgccttcccccatctcaccattatttgtccatggatttgtcctgggctctgggaccttatgaaacccctttcctaatgacataagaggccaaggtgcaatccacccacctttgataccagaccctgagggcttcatacctgctgatgggttttcttttctaaaaggaatgctcgccccagcagggtcctgggctgcttgagcagccagctggtgagaccatgcacttctctgttctctcctccccctgcccagtgagttagcacagcagtagcactgcccttgagcacagttctttccccaggccaaagatggttttgtgaagaagctgctcccctacaagtctcacgtgtgaaagggctcagctcagagtggagactcgctgtcaagtcttaagcaatccttttctgttgtgtgaaggtttcacttacaatgtgttttctgctgtagttttgtttcttacttgggttacatcatgaaattgatttgccttgaatgcagccagaccactgtctcctgggttccccttgagtggccaggcctggatggaagctaagagcttggatttctgggaacaaagggccatccccataagattgagcagaaattctggtcctcttccctgaaaaattttccccaccccagccagcatcttctgcttccccttgggttgtgaccagggagtggggagagaggctgaggctctgctcccctggagaccttctcttaggagttgggtgcttcatggaaaatccaagccttaggttcccttctgtctctggcaattagatgtgttcttggtgtcctccatgtcctttttgacttttccctgtgtccattgttagcatgtgcaaaagttccctgtcattacccaacccctgcccgcccacctcatttcagggctgtacacacagtgagtgttcctgttctctctctctttgtttggatgtattgctctgtgtaactcagtgggtctccctctttctggtttgtttttttttctagattcctgccgtttgttcatcgttgtgcctaaagcatgtcgatgtggcgtcaagtacatcgtccaaatccctgtctcttcagcttctctgatgcttgaactctcacctttgaccttgtgttgacctttgatgctgatgtgtatttttattatgtttgtttctttcttcgtttttttttctttttttctttcctttttttttccttttgtgctgccaaattggttttgctagaacgactgctgaaggggaaatatttaaacttgcatttgaatataaaaaaaatctatttttctagaacttcataagataaccacttgattttgtgattccaattctttgtaattgtcttcagagcagccctactagcacataccgcgtggtgtttgtatttctgtgaacacacagccagtccgtttctaggctttgtttctctgtgtgcttagttttaaagacaactttgaagtaaacaatgaaataaaagatgtcactaaaacctctgaggctcctgagcacattttgctgatacagtctgtggggcttgaggagaccgcatgtattgttctttcttttgtttttcttctgagttctcaactgcggagagcacctgaaccccctttcctttttgaccgcaggctgcactttgggccccagccagccctttttctttttctttttcttttgtggttcttccctggagcgactctggggagtcctggatatcccgcctgccccttcccctcagccccatgcttgttccaacagtctccacagcaaaatgtgatgctttgatttttttgttgttgtttttgtttttgtattgtttttgtgtttttgttttgaattttttcctttcctactaagattatgcccagaaaaaagttttgcatgtttcctgctgtttcttcacaccttcgtatatatcaccttcacctctctgttttctatagtttgtgcaaaaactgatcgatttaaaagggtttcaaagaagctgttttaaattgttgtagggttgattatttttttcaagattgtattgtttaattttgaagtggcaactttctcctctattgcccttagagcgtttgcctgtgcacttagactgtcacttcgtgtggcctccaggtcttaccggggcttccgggaggctggctgctttgctcagagagggtgggaagggggcctggagagacacgagaagcagaggtagagcctagaaggtggcagcaggtgggtaagaggcttatttagcacattaggggcagtgagcacctggaggaaggagggcgctcccaatcacccgtaggaggccatctgcacaccaagcggcaattcacctgctggcgcttttcctaggtgacaagcacaatactacagtcttcacactgtttacagccctgggcaccagccacccggcactggctcttcatcacagctctgctcttgcttagctagtggggtgggggaaagggcagggatttgtttttttaattgggtggagagccaaacagctactgtccctgggtgccaagcaagccagttttttggttccctgagggaaactgaccctcctctcttgtggcaccatccagcctcagggtcttggagacttgagtaagaatgtgagtggagggggagaggtgaggagaggagcacagggtggatctgtggagggaagaggttacagggggaggagctgatgatagatcccacccagacttaagctgctggtgggtgggtgagctgggaagtaggactgtccagggaagggtggagagatgtagctaggggctggggagggggaggtggaagcgctattgagcatcctccacaccaaggttgatgaaggaagggatcccagcagggtttctgctctggggctggcaggttgcctggtattatgcccaaggccgctctgcctgggggaaagggcagccaggcagaggcccagtgtctggtaggctgctgaatttcctggaaggggtgattggatggaaagaggccagaaaccccagcctgagagactgctgtgcaccccacagtctgactgcacagagccgcctctgttggcaggaggcactgaggctccccttcctgtgtattgagaagcagtgtttgccaatatattttgctttcaattccaagaggagctctgggaaaacctgtggataaaaccaaatgccaaatgttggacgttgtttccttttccttttctctctctgattgttttaattgttctgtggtggttttaatggatttgagaccctggagcggcagctgcctttctgatttccagctgctttttgtgaataatttaaaaagaaaaaaaaaaagaaactttacattttggagacaaacctgtgtgagttttttattggtacaaacgttgtatttaacactaggggttttgtacagttttttgccttttctactagaaaacaatgtaaagtgatttcacaatgtgaagagaaaaaaaaattgccactatgaccaaacgcacagtctgttctgcagcaacaacgggattcaatcaactcagtcgtgattcagccgtagaaatgcttttcctttatcttgtttgagcttttcctttctttcctgttttgatttgcaaaagaaaatgtcttttttgtgtgaacttgtgttgtactctgtagaaaattatggattttactttaatggtttaaaaaaaggcaaggagagcccttgtcgcttttcttacctaatcacagagtttgtgtagtgaatttaaaaagaaaaaaaaattgttataagtttggagcaagggagtatgtgtttcaaaggaatctccttcctttttttgtgtgtttttccttttgtcccaatggggaacctaaatctgttttaattgcacagacacatggacaaaaagtcattttgtatctgccaagtgtggtaccttcctttgtttatttgctattaaactgtttgagaagaa

SEQ ID NO: 408500 - DNA, 7765 bp, Homo sapiens
tattgttcggtgttctgctctggcggcagcggcagcggcggcgggacgcggaggctcccccgggattcggcctcagcagcgaggcggcggcggcggctgcggaggcgcaggcagcaactgaggcagcggcaggctcaggtgcagccgctgctcaaagaaaatgaacggcaccctggaccacccagaccaaccagatcttgatgctatcaagatgtttgtgggccaggttccaaggacctggtctgaaaaggacttgcgggaactcttcgaacagtatggtgctgtgtatgaaatcaacgtcctaagggataggagccaaaacccgcctcagagcaaagggtgctgttttgttacattttacacccgtaaagctgcattagaagctcagaatgctcttcacaacatgaaagtcctcccagggatgcatcaccctatacagatgaaacctgctgacagtgagaagaacaatgcagtggaagacaggaagctgtttattggtatgatttccaagaagtgcactgaaaatgacatccgagtcatgttctcttcgtttggacagattgaagaatgccggatattgcggggacctgatggcctgagccgaggttgtgcatttgtgacttttacaacaagagccatggcacagacggctatcaaggcaatgcaccaagcacagaccatggagggttgctcatcacccatggtggtaaaatttgctgatacacagaaggacaaagaacagaagagaatggcccagcagctccagcagcagatgcagcaaatcagcgcagcatctgtgtggggaaaccttgctggtctaaatactcttggaccccagtatttagcactttatttgcagctccttcagcagactgcctcctctgggaacctcaacaccctgagcagcctccacccaatgggagggttgaatgcaatgcagttacagaatttggctgcactagctgctgcagctagtgcagctcagaacacaccaagtggtaccaatgctctcactacatccagcagtcccctcagcgtgctcactagttcagggtcctcacctagctctagcagcagtaattctgtcaaccccatagcctcacttggagccctgcagacattagctggagcaacggctggcctcaatgttggctctttggcaggaatggctgctttaaatggtggcctgggcagcagtggcctttccaatggcaccgggagcaccatggaggccctcactcaggcctactcgggtatccagcaatatgctgctgctgcgctccccactctgtacaaccagaatcttctgacacagcagagtattggtgctgctggaagccagaaggaaggtccagagggagccaacctgttcatctaccacctgccccaggagtttggtgatcaggacctgctgcagatgtttatgccctttgggaatgtcgtgtctgccaaggttttcatagacaagcagacaaacctgagcaagtgttttggttttgtaagttacgacaatcctgtttcggcccaagctgccatccagtccatgaacggctttcagattggcatgaagcggcttaaagtgcagctcaaacgttcgaagaatgacagcaagccctactgagcgtgctcccctctgagactggagtgagagggtcttctggtaagtgggggaggagcacccttaatgattcgaagccctgaggctgtgtgttgacagccctggaccctgatccctgccactctcgcaggcacagcttgccctgaagactcggctactgccttctgtgggagtttcgcttcgtacagaggacaagtttgtgctttggtttccagtgttttactttggagtttaggtgccatatcctgaggttttttttgtttttgtttttgtttctcctttatttaaagtttgctgtgtttgtaaccagtgtgtgttgagaaggaccaacaccaaaccaccctggggaagggggacagggaaacatttaacacagacgatgatcaggatttgccccaaaccaccccaagagagaggactgagtggaacaaaaaagtgacccccagaacctctcttagtgtgagggtgggtagaatgagaactgacacctgggagctgtggggagcagagcggctttggggaagagtggagtgactagacacctaatgccctggcagctggagactcaaactcctgtacagctaccttctgggaaatagtttttgacacctatttttcagattcttgtccggaatttctgctgctcttttcaaaaaagggcattaacaattctctggaaataaagcacctgttagcctgacatatgcaaaaagcagggcggcatcacccattacgagctcccccagccagcagtcagtattggattggccttgcctggctggtggcagtttgggagaaacagccaaagaggttagtttatttcaacaccaaattagaccatggcccatttccaacgggtctctttaaaggcctctatggaatacattgcctggtttccttctttgcagttcaccacagcaaggaatgtcacctccatcccaagccaccattttctcatgaaggcaaatccaagaagggcttgcagttcttgctgaagggggtaccatttgtgggcagagtgatcaataccatctagttgggggaggaggagcttatttcttggtgtacttgaatcagaaggtccctgcaagccagtatgcttcatttgccagtggccagaaattctcccttgcctccttgattgaggtgtcccagatgtagtattcccacaggggtctggcaggcccctcctgtaaccactccagtcacattttctgctcttgaggcagaggtgacatcaggacgtttacagcctccacatgaattgagtgttcatttacctcagtattaccgtgttcatttttgtcctcgtgctacagttagctcctaagatgtgactgtagccacagccagggatgggatccctgggtctctggaatctgaaacctcaacaaataccagtcttgacccctagcagcagagataagaataaaggggttggtttgctattaagtcagatgggggctctctccttgtcatgctgtccctgtgggtaacagacagggattgaccatcttactgttgtacaggtagctggtggtgttggattatcccattgaagctgggacagctgttcctttctcatagtgataacttgggtctgttgtcctctaaggaacgtgaaacatacacttcttaagctgaaccacgtaaacttgaaattctgcgcactgggagaaatgtgtcctgtgtttcaaaggataaaactgttctaaaggcttccagggtcatgatgggattttttaaataaatgcaaaaaataaaaataaaaaagaaaaaagaaaacaaaaaaaaaaaagaaaaaaatgctaggttggggaggcgctgttctgaatcccaaccggctggaaccaagaatgtcgtttctatttttatagaagttttatacagctccggggtggagaatatttattacctaaattatatctctggaaaaggccaggattttgtagaatccagaatgtgattgttatacacacagggtgctgtgtatgattgaaactactgactttctgtggcccgtttgcagcccagctaacctgcccaaggggaaggtgttaatgctgtgaattggcagaggagagagctgtgctccatagggtgctgccggtgctgtgctccctagccttctgttctgtcttcctccttagccagaacgccactcccttcccacatccccttcttctctccgccttcccccatctcaccattatttgtccatggatttgtcctgggctctgggaccttatgaaacccctttcctaatgacataagaggccaaggtgcaatccacccacctttgataccagaccctgagggcttcatacctgctgatgggttttcttttctaaaaggaatgctcgccccagcagggtcctgggctgcttgagcagccagctggtgagaccatgcacttctctgttctctcctccccctgcccagtgagttagcacagcagtagcactgcccttgagcacagttctttccccaggccaaagatggttttgtgaagaagctgctcccctacaagtctcacgtgtgaaagggctcagctcagagtggagactcgctgtcaagtcttaagcaatccttttctgttgtgtgaaggtttcacttacaatgtgttttctgctgtagttttgtttcttacttgggttacatcatgaaattgatttgccttgaatgcagccagaccactgtctcctgggttccccttgagtggccaggcctggatggaagctaagagcttggatttctgggaacaaagggccatccccataagattgagcagaaattctggtcctcttccctgaaaaattttccccaccccagccagcatcttctgcttccccttgggttgtgaccagggagtggggagagaggctgaggctctgctcccctggagaccttctcttaggagttgggtgcttcatggaaaatccaagccttaggttcccttctgtctctggcaattagatgtgttcttggtgtcctccatgtcctttttgacttttccctgtgtccattgttagcatgtgcaaaagttccctgtcattacccaacccctgcccgcccacctcatttcagggctgtacacacagtgagtgttcctgttctctctctctttgtttggatgtattgctctgtgtaactcagtgggtctccctctttctggtttgtttttttttctagattcctgccgtttgttcatcgttgtgcctaaagcatgtcgatgtggcgtcaagtacatcgtccaaatccctgtctcttcagcttctctgatgcttgaactctcacctttgaccttgtgttgacctttgatgctgatgtgtatttttattatgtttgtttctttcttcgtttttttttctttttttctttcctttttttttccttttgtgctgccaaattggttttgctagaacgactgctgaaggggaaatatttaaacttgcatttgaatataaaaaaaatctatttttctagaacttcataagataaccacttgattttgtgattccaattctttgtaattgtcttcagagcagccctactagcacataccgcgtggtgtttgtatttctgtgaacacacagccagtccgtttctaggctttgtttctctgtgtgcttagttttaaagacaactttgaagtaaacaatgaaataaaagatgtcactaaaacctctgaggctcctgagcacattttgctgatacagtctgtggggcttgaggagaccgcatgtattgttctttcttttgtttttcttctgagttctcaactgcggagagcacctgaaccccctttcctttttgaccgcaggctgcactttgggccccagccagccctttttctttttctttttcttttgtggttcttccctggagcgactctggggagtcctggatatcccgcctgccccttcccctcagccccatgcttgttccaacagtctccacagcaaaatgtgatgctttgatttttttgttgttgtttttgtttttgtattgtttttgtgtttttgttttgaattttttcctttcctactaagattatgcccagaaaaaagttttgcatgtttcctgctgtttcttcacaccttcgtatatatcaccttcacctctctgttttctatagtttgtgcaaaaactgatcgatttaaaagggtttcaaagaagctgttttaaattgttgtagggttgattatttttttcaagattgtattgtttaattttgaagtggcaactttctcctctattgcccttagagcgtttgcctgtgcacttagactgtcacttcgtgtggcctccaggtcttaccggggcttccgggaggctggctgctttgctcagagagggtgggaagggggcctggagagacacgagaagcagaggtagagcctagaaggtggcagcaggtgggtaagaggcttatttagcacattaggggcagtgagcacctggaggaaggagggcgctcccaatcacccgtaggaggccatctgcacaccaagcggcaattcacctgctggcgcttttcctaggtgacaagcacaatactacagtcttcacactgtttacagccctgggcaccagccacccggcactggctcttcatcacagctctgctcttgcttagctagtggggtgggggaaagggcagggatttgtttttttaattgggtggagagccaaacagctactgtccctgggtgccaagcaagccagttttttggttccctgagggaaactgaccctcctctcttgtggcaccatccagcctcagggtcttggagacttgagtaagaatgtgagtggagggggagaggtgaggagaggagcacagggtggatctgtggagggaagaggttacagggggaggagctgatgatagatcccacccagacttaagctgctggtgggtgggtgagctgggaagtaggactgtccagggaagggtggagagatgtagctaggggctggggagggggaggtggaagcgctattgagcatcctccacaccaaggttgatgaaggaagggatcccagcagggtttctgctctggggctggcaggttgcctggtattatgcccaaggccgctctgcctgggggaaagggcagccaggcagaggcccagtgtctggtaggctgctgaatttcctggaaggggtgattggatggaaagaggccagaaaccccagcctgagagactgctgtgcaccccacagtctgactgcacagagccgcctctgttggcaggaggcactgaggctccccttcctgtgtattgagaagcagtgtttgccaatatattttgctttcaattccaagaggagctctgggaaaacctgtggataaaaccaaatgccaaatgttggacgttgtttccttttccttttctctctctgattgttttaattgttctgtggtggttttaatggatttgagaccctggagcggcagctgcctttctgatttccagctgctttttgtgaataatttaaaaagaaaaaaaaaaagaaactttacattttggagacaaacctgtgtgagttttttattggtacaaacgttgtatttaacactaggggttttgtacagttttttgccttttctactagaaaacaatgtaaagtgatttcacaatgtgaagagaaaaaaaaattgccactatgaccaaacgcacagtctgttctgcagcaacaacgggattcaatcaactcagtcgtgattcagccgtagaaatgcttttcctttatcttgtttgagcttttcctttctttcctgttttgatttgcaaaagaaaatgtcttttttgtgtgaacttgtgttgtactctgtagaaaattatggattttactttaatggtttaaaaaaaggcaaggagagcccttgtcgcttttcttacctaatcacagagtttgtgtagtgaatttaaaaagaaaaaaaaattgttataagtttggagcaagggagtatgtgtttcaaaggaatctccttcctttttttgtgtgtttttccttttgtcccaatggggaacctaaatctgttttaattgcacagacacatggacaaaaagtcattttgtatctgccaagtgtggtaccttcctttgtttatttgctattaaactgtttgagaagaa

SEQ ID NO: 408501 - DNA, 7295 bp, Homo sapiens
tattgttcggtgttctgctctggcggcagcggcagcggcggcgggacgcggaggctcccccgggattcggcctcagcagcgaggcggcggcggcggctgcggaggcgcaggcagcaactgaggcagcggcaggctcaggtgcagccgctgctcaaagaaaatgaacggcaccctggaccacccagaccaaccagatcttgatgctatcaagatgtttgtgggccaggttccaaggacctggtctgaaaaggacttgcgggaactcttcgaacagtatggtgctgtgtatgaaatcaacgtcctaagggataggagccaaaacccgcctcagagcaaagggtgctgttttgttacattttacacccgtaaagctgcattagaagctcagaatgctcttcacaacatgaaagtcctcccagggatgcatcaccctatacagatgaaacctgctgacagtgagaagaacaatgcagtggaagacaggaagctgtttattggtatgatttccaagaagtgcactgaaaatgacatccgagtcatgttctcttcgtttggacagattgaagaatgccggatattgcggggacctgatggcctgagccgaggttgtgcatttgtgacttttacaacaagagccatggcacagacggctatcaaggcaatgcaccaagcacagaccatggagggttgctcatcacccatggtggtaaaatttgctgatacacagaaggacaaagaacagaagagaatggcccagcagctccagcagcagatgcagcaaatcagcgcagcatctgtgtggggaaaccttgctggtctaaatactcttggaccccagtatttagcactttatttgcagctccttcagcagactgcctcctctgggaacctcaacaccctgagcagcctccacccaatgggagggttgaatgcaatgcagttacagaatttggctgcactagctgctgcagctagtgcagctcagaacacaccaagtggtaccaatgctctcactacatccagcagtcccctcagcgtgctcactagttcagggtcctcacctagctctagcagcagtaattctgtcaaccccatagcctcacttggagccctgcagacattagctggagcaacggctggcctcaatgttggctctttggcaggaatggctgctttaaatggtggcctgggcagcagtggcctttccaatggcaccgggagcaccatggaggccctcactcaggcctactcgggtatccagcaatatgctgctgctgcgctccccactctgtacaaccagaatcttctgacacagcagagtattggtgctgctggaagccagaaggaaggtccagagggagccaacctgttcatctaccacctgccccaggagtttggtgatcaggacctgctgcagatgtttatgccctttgggaatgtcgtgtctgccaaggttttcatagacaagcagacaaacctgagcaagtgttttggttttgtaagttacgacaatcctgtttcggcccaagctgccatccagtccatgaacggctttcagattggcatgaagcggcttaaagtgcagctcaaacgttcgaagaatgacagcaagccctactgagcgtgctcccctctgagactggagtgagagggtcttctggtaagtgggggaggagcacccttaatgattcgaagccctgaggctgtgtgttgacagccctggaccctgatccctgccactctcgcaggcacagcttgccctgaagactcggctactgccttctgtgggagtttcgcttcgtacagaggacaagtttgtgctttggtttccagtgttttactttggagtttaggtgccatatcctgaggttttttttgtttttgtttttgtttctcctttatttaaagtttgctgtgtttgtaaccagtgtgtgttgagaaggaccaacaccaaaccaccctggggaagggggacagggaaacatttaacacagacgatgatcaggatttgccccaaaccaccccaagagagaggactgagtggaacaaaaaagtgacccccagaacctctcttagtgtgagggtgggtagaatgagaactgacacctgggagctgtggggagcagagcggctttggggaagagtggagtgactagacacctaatgccctggcagctggagactcaaactcctgtacagctaccttctgggaaatagtttttgacacctatttttcagattcttgtccggaatttctgctgctcttttcaaaaaagggcattaacaattctctggaaataaagcacctgttagcctgacatatgcaaaaagcagggcggcatcacccattacgagctcccccagccagcagtcagtattggattggccttgcctggctggtggcagtttgggagaaacagccaaagaggttagtttatttcaacaccaaattagaccatggcccatttccaacgggtctctttaaaggcctctatggaatacattgcctggtttccttctttgcagttcaccacagcaaggaatgtcacctccatcccaagccaccattttctcatgaaggcaaatccaagaagggcttgcagttcttgctgaagggggtaccatttgtgggcagagtgatcaataccatctagttgggggaggaggagcttatttcttggtgtacttgaatcagaaggtccctgcaagccagtatgcttcatttgccagtggccagaaattctcccttgcctccttgattgaggtgtcccagatgtagtattcccacaggggtctggcaggcccctcctgtaaccactccagtcacattttctgctcttgaggcagaggtgacatcaggacgtttacagcctccacatgaattgagtgttcatttacctcagtattaccgtgttcatttttgtcctcgtgctacagttagctccctgccgcctcttgcaggtcttacttcagctcttgcctgtgacccacacagcttctgggctctgcctctgctctaagaagtgctgtgggggtagagaaccaggaaggacatgctgttgggaatgtacacctgggcagaggtggccctgttaagatgtgactgtagccacagccagggatgggatccctgggtctctggaatctgaaacctcaacaaataccagtcttgacccctagcagcagagataagaataaaggggttggtttgctattaagtcagatgggggctctctccttgtcatgctgtccctgtgggtaacagacagggattgaccatcttactgttgtacaggtagctggtggtgttggattatcccattgaagctgggacagctgttcctttctcatagtgataacttgggtctgttgtcctctaaggaacgtgaaacatacacttcttaagctgaaccacgtaaacttgaaattctgcgcactgggagaaatgtgtcctgtgtttcaaaggataaaactgttctaaaggcttccagggtcatgatgggattttttaaataaatgcaaaaaataaaaataaaaaagaaaaaagaaaacaaaaaaaaaaaagaaaaaaatgctaggttggggaggcgctgttctgaatcccaaccggctggaaccaagaatgtcgtttctatttttatagaagttttatacagctccggggtggagaatatttattacctaaattatatctctggaaaaggccaggattttgtagaatccagaatgtgattgttatacacacagggtgctgtgtatgattgaaactactgactttctgtggcccgtttgcagcccagctaacctgcccaaggggaaggtgttaatgctgtgaattggcagaggagagagctgtgctccatagggtgctgccggtgctgtgctccctagccttctgttctgtcttcctccttagccagaacgccactcccttcccacatccccttcttctctccgccttcccccatctcaccattatttgtccatggatttgtcctgggctctgggaccttatgaaacccctttcctaatgacataagaggccaaggtgcaatccacccacctttgataccagaccctgagggcttcatacctgctgatgggttttcttttctaaaaggaatgctcgccccagcagggtcctgggctgcttgagcagccagctggtgagaccatgcacttctctgttctctcctccccctgcccagtgagttagcacagcagtagcactgcccttgagcacagttctttccccaggccaaagatggttttgtgaagaagctgctcccctacaagtctcacgtgtgaaagggctcagctcagagtggagactcgctgtcaagtcttaagcaatccttttctgttgtgtgaaggtttcacttacaatgtgttttctgctgtagttttgtttcttacttgggttacatcatgaaattgatttgccttgaatgcagccagaccactgtctcctgggttccccttgagtggccaggcctggatggaagctaagagcttggatttctgggaacaaagggccatccccataagattgagcagaaattctggtcctcttccctgaaaaattttccccaccccagccagcatcttctgcttccccttgggttgtgaccagggagtggggagagaggctgaggctctgctcccctggagaccttctcttaggagttgggtgcttcatggaaaatccaagccttaggttcccttctgtctctggcaattagatgtgttcttggtgtcctccatgtcctttttgacttttccctgtgtccattgttagcatgtgcaaaagttccctgtcattacccaacccctgcccgcccacctcatttcagggctgtacacacagtgagtgttcctgttctctctctctttgtttggatgtattgctctgtgtaactcagtgggtctccctctttctggtttgtttttttttctagattcctgccgtttgttcatcgttgtgcctaaagcatgtcgatgtggcgtcaagtacatcgtccaaatccctgtctcttcagcttctctgatgcttgaactctcacctttgaccttgtgttgacctttgatgctgatgtgtatttttattatgtttgtttctttcttcgtttttttttctttttttctttcctttttttttccttttgtgctgccaaattggttttgctagaacgactgctgaaggggaaatatttaaacttgcatttgaatataaaaaaaatctatttttctagaacttcataagataaccacttgattttgtgattccaattctttgtaattgtcttcagagcagccctactagcacataccgcgtggtgtttgtatttctgtgaacacacagccagtccgtttctaggctttgtttctctgtgtgcttagttttaaagacaactttgaagtaaacaatgaaataaaagatgtcactaaaacctctgaggctcctgagcacattttgctgatacagtctgtggggcttgaggagaccgcatgtattgttctttcttttgtttttcttctgagttctcaactgcggagagcacctgaaccccctttcctttttgaccgcaggctgcactttgggccccagccagccctttttctttttctttttcttttgtggttcttccctggagcgactctggggagtcctggatatcccgcctgccccttcccctcagccccatgcttgttccaacagtctccacagcaaaatgtgatgctttgatttttttgttgttgtttttgtttttgtattgtttttgtgtttttgttttgaattttttcctttcctactaagattatgcccagaaaaaagttttgcatgtttcctgctgtttcttcacaccttcgtatatatcaccttcacctctctgttttctatagtttgtgcaaaaactgatcgatttaaaagggtttcaaagaagctgttttaaattgttgtagggttgattatttttttcaagattgtattgtttaattttgaagtggcaactttctcctctattgcccttagagcgtttgcctgtgcacttagactgtcacttcgtgtggcctccaggtcttaccggggcttccgggaggctggctgctttgctcagagagggtgggaagggggcctggagagacacgagaagcagaggtagagcctagaaggtggcagcaggtgggtaagaggcttatttagcacattaggggcagtgagcacctggaggaaggagggcgctcccaatcacccgtaggaggccatctgcacaccaagcggcaattcacctgctggcgcttttcctaggtgacaagcacaatactacagtcttcacactgtttacagccctgggcaccagccacccggcactggctcttcatcacagctctgctcttgcttagctagtggggtgggggaaagggcagggatttgtttttttaattgggtggagagccaaacagctactgtccctgggtgccaagcaagccagttttttggttccctgagggaaactgaccctcctctcttgtggcaccatccagcctcagggtcttggagacttgagtaagaatgtgagtggagggggagaggtgaggagaggagcacagggtggatctgtggagggaagaggttacagggggaggagctgatgatagatcccacccagacttaagctgctggtgggtgggtgagctgggaagtaggactgtccagggaagggtggagagatgtagctaggggctggggagggggaggtggaagcgctattgagcatcctccacaccaaggttgatgaaggaagggatcccagcagggtttctgctctggggctggcaggttgcctggtattatgcccaaggccgctctgcctgggggaaagggcagccaggcagaggcccagtgtctggtaggctgctgaatttcctggaaggggtgattggatggaaagaggccagaaaccccagcctgagagactgctgtgcaccccacagtctgactgcacagagccgcctctgttggcaggaggcactgaggctccccttcctgtgtattgagaagcagtgtttgccaatatattttgctttcaattccaagaggagctctgggaaaacctgtggataaaaccaaatgccaaatgttggacgttgtttccttttccttttctctctctgattgttttaattgttctgtggtggttttaatggatttgagaccctggagcggcagctgcctttctgatttccagctgctttttgtgaataatttaaactcgtgccgaatcctgcagccc

SEQ ID NO: 408502 - DNA, 7299 bp, Homo sapiens
tattgttcggtgttctgctctggcggcagcggcagcggcggcgggacgcggaggctcccccgggattcggcctcagcagcgaggcggcggcggcggctgcggaggcgcaggcagcaactgaggcagcggcaggctcaggtgcagccgctgctcaaagaaaatgaacggcaccctggaccacccagaccaaccagatcttgatgctatcaagatgtttgtgggccaggttccaaggacctggtctgaaaaggacttgcgggaactcttcgaacagtatggtgctgtgtatgaaatcaacgtcctaagggataggagccaaaacccgcctcagagcaaagggtgctgttttgttacattttacacccgtaaagctgcattagaagctcagaatgctcttcacaacatgaaagtcctcccagggatgcatcaccctatacagatgaaacctgctgacagtgagaagaacaatgcagtggaagacaggaagctgtttattggtatgatttccaagaagtgcactgaaaatgacatccgagtcatgttctcttcgtttggacagattgaagaatgccggatattgcggggacctgatggcctgagccgaggttgtgcatttgtgacttttacaacaagagccatggcacagacggctatcaaggcaatgcaccaagcacagaccatggagggttgctcatcacccatggtggtaaaatttgctgatacacagaaggacaaagaacagaagagaatggcccagcagctccagcagcagatgcagcaaatcagcgcagcatctgtgtggggaaaccttgctggtctaaatactcttggaccccagtatttagcactttatttgcagctccttcagcagactgcctcctctgggaacctcaacaccctgagcagcctccacccaatgggagggttgaatgcaatgcagttacagaatttggctgcactagctgctgcagctagtgcagctcagaacacaccaagtggtaccaatgctctcactacatccagcagtcccctcagcgtgctcactagttcagggtcctcacctagctctagcagcagtaattctgtcaaccccatagcctcacttggagccctgcagacattagctggagcaacggctggcctcaatgttggctctttggcaggaatggctgctttaaatggtggcctgggcagcagtggcctttccaatggcaccgggagcaccatggaggccctcactcaggcctactcgggtatccagcaatatgctgctgctgcgctccccactctgtacaaccagaatcttctgacacagcagagtattggtgctgctggaagccagaaggaaggtccagagggagccaacctgttcatctaccacctgccccaggagtttggtgatcaggacctgctgcagatgtttatgccctttgggaatgtcgtgtctgccaaggttttcatagacaagcagacaaacctgagcaagtgttttggttttgtaagttacgacaatcctgtttcggcccaagctgccatccagtccatgaacggctttcagattggcatgaagcggcttaaagtgcagctcaaacgttcgaagaatgacagcaagccctactgagcgtgctcccctctgagactggagtgagagggtcttctggtaagtgggggaggagcacccttaatgattcgaagccctgaggctgtgtgttgacagccctggaccctgatccctgccactctcgcaggcacagcttgccctgaagactcggctactgccttctgtgggagtttcgcttcgtacagaggacaagtttgtgctttggtttccagtgttttactttggagtttaggtgccatatcctgaggttttttttgtttttgtttttgtttctcctttatttaaagtttgctgtgtttgtaaccagtgtgtgttgagaaggaccaacaccaaaccaccctggggaagggggacagggaaacatttaacacagacgatgatcaggatttgccccaaaccaccccaagagagaggactgagtggaacaaaaaagtgacccccagaacctctcttagtgtgagggtgggtagaatgagaactgacacctgggagctgtggggagcagagcggctttggggaagagtggagtgactagacacctaatgccctggcagctggagactcaaactcctgtacagctaccttctgggaaatagtttttgacacctatttttcagattcttgtccggaatttctgctgctcttttcaaaaaagggcattaacaattctctggaaataaagcacctgttagcctgacatatgcaaaaagcagggcggcatcacccattacgagctcccccagccagcagtcagtattggattggccttgcctggctggtggcagtttgggagaaacagccaaagaggttagtttatttcaacaccaaattagaccatggcccatttccaacgggtctctttaaaggcctctatggaatacattgcctggtttccttctttgcagttcaccacagcaaggaatgtcacctccatcccaagccaccattttctcatgaaggcaaatccaagaagggcttgcagttcttgctgaagggggtaccatttgtgggcagagtgatcaataccatctagttgggggaggaggagcttatttcttggtgtacttgaatcagaaggtccctgcaagccagtatgcttcatttgccagtggccagaaattctcccttgcctccttgattgaggtgtcccagatgtagtattcccacaggggtctggcaggcccctcctgtaaccactccagtcacattttctgctcttgaggcagaggtgacatcaggacgtttacagcctccacatgaattgagtgttcatttacctcagtattaccgtgttcatttttgtcctcgtgctacagttagctccctgccgcctcttgcaggtcttacttcagctcttgcctgtgacccacacagcttctgggctctgcctctgctctaagaagtgctgtgggggtagagaaccaggaaggacatgctgttgggaatgtacacctgggcagaggtggccctgttaagatgtgactgtagccacagccagggatgggatccctgggtctctggaatctgaaacctcaacaaataccagtcttgacccctagcagcagagataagaataaaggggttggtttgctattaagtcagatgggggctctctccttgtcatgctgtccctgtgggtaacagacagggattgaccatcttactgttgtacaggtagctggtggtgttggattatcccattgaagctgggacagctgttcctttctcatagtgataacttgggtctgttgtcctctaaggaacgtgaaacatacacttcttaagctgaaccacgtaaacttgaaattctgcgcactgggagaaatgtgtcctgtgtttcaaaggataaaactgttctaaaggcttccagggtcatgatgggattttttaaataaatgcaaaaaataaaaataaaaaagaaaaaagaaaacaaaaaaaaaaaagaaaaaaatgctaggttggggaggcgctgttctgaatcccaaccggctggaaccaagaatgtcgtttctatttttatagaagttttatacagctccggggtggagaatatttattacctaaattatatctctggaaaaggccaggattttgtagaatccagaatgtgattgttatacacacagggtgctgtgtatgattgaaactactgactttctgtggcccgtttgcagcccagctaacctgcccaaggggaaggtgttaatgctgtgaattggcagaggagagagctgtgctccatagggtgctgccggtgctgtgctccctagccttctgttctgtcttcctccttagccagaacgccactcccttcccacatccccttcttctctccgccttcccccatctcaccattatttgtccatggatttgtcctgggctctgggaccttatgaaacccctttcctaatgacataagaggccaaggtgcaatccacccacctttgataccagaccctgagggcttcatacctgctgatgggttttcttttctaaaaggaatgctcgccccagcagggtcctgggctgcttgagcagccagctggtgagaccatgcacttctctgttctctcctccccctgcccagtgagttagcacagcagtagcactgcccttgagcacagttctttccccaggccaaagatggttttgtgaagaagctgctcccctacaagtctcacgtgtgaaagggctcagctcagagtggagactcgctgtcaagtcttaagcaatccttttctgttgtgtgaaggtttcacttacaatgtgttttctgctgtagttttgtttcttacttgggttacatcatgaaattgatttgccttgaatgcagccagaccactgtctcctgggttccccttgagtggccaggcctggatggaagctaagagcttggatttctgggaacaaagggccatccccataagattgagcagaaattctggtcctcttccctgaaaaattttccccaccccagccagcatcttctgcttccccttgggttgtgaccagggagtggggagagaggctgaggctctgctcccctggagaccttctcttaggagttgggtgcttcatggaaaatccaagccttaggttcccttctgtctctggcaattagatgtgttcttggtgtcctccatgtcctttttgacttttccctgtgtccattgttagcatgtgcaaaagttccctgtcattacccaacccctgcccgcccacctcatttcagggctgtacacacagtgagtgttcctgttctctctctctttgtttggatgtattgctctgtgtaactcagtgggtctccctctttctggtttgtttttttttctagattcctgccgtttgttcatcgttgtgcctaaagcatgtcgatgtggcgtcaagtacatcgtccaaatccctgtctcttcagcttctctgatgcttgaactctcacctttgaccttgtgttgacctttgatgctgatgtgtatttttattatgtttgtttctttcttcgtttttttttctttttttctttcctttttttttccttttgtgctgccaaattggttttgctagaacgactgctgaaggggaaatatttaaacttgcatttgaatataaaaaaaatctatttttctagaacttcataagataaccacttgattttgtgattccaattctttgtaattgtcttcagagcagccctactagcacataccgcgtggtgtttgtatttctgtgaacacacagccagtccgtttctaggctttgtttctctgtgtgcttagttttaaagacaactttgaagtaaacaatgaaataaaagatgtcactaaaacctctgaggctcctgagcacattttgctgatacagtctgtggggcttgaggagaccgcatgtattgttctttcttttgtttttcttctgagttctcaactgcggagagcacctgaaccccctttcctttttgaccgcaggctgcactttgggccccagccagccctttttctttttctttttcttttgtggttcttccctggagcgactctggggagtcctggatatcccgcctgccccttcccctcagccccatgcttgttccaacagtctccacagcaaaatgtgatgctttgatttttttgttgttgtttttgtttttgtattgtttttgtgtttttgttttgaattttttcctttcctactaagattatgcccagaaaaaagttttgcatgtttcctgctgtttcttcacaccttcgtatatatcaccttcacctctctgttttctatagtttgtgcaaaaactgatcgatttaaaagggtttcaaagaagctgttttaaattgttgtagggttgattatttttttcaagattgtattgtttaattttgaagtggcaactttctcctctattgcccttagagcgtttgcctgtgcacttagactgtcacttcgtgtggcctccaggtcttaccggggcttccgggaggctggctgctttgctcagagagggtgggaagggggcctggagagacacgagaagcagaggtagagcctagaaggtggcagcaggtgggtaagaggcttatttagcacattaggggcagtgagcacctggaggaaggagggcgctcccaatcacccgtaggaggccatctgcacaccaagcggcaattcacctgctggcgcttttcctaggtgacaagcacaatactacagtcttcacactgtttacagccctgggcaccagccacccggcactggctcttcatcacagctctgctcttgcttagctagtggggtgggggaaagggcagggatttgtttttttaattgggtggagagccaaacagctactgtccctgggtgccaagcaagccagttttttggttccctgagggaaactgaccctcctctcttgtggcaccatccagcctcagggtcttggagacttgagtaagaatgtgagtggagggggagaggtgaggagaggagcacagggtggatctgtggagggaagaggttacagggggaggagctgatgatagatcccacccagacttaagctgctggtgggtgggtgagctgggaagtaggactgtccagggaagggtggagagatgtagctaggggctggggagggggaggtggaagcgctattgagcatcctccacaccaaggttgatgaaggaagggatcccagcagggtttctgctctggggctggcaggttgcctggtattatgcccaaggccgctctgcctgggggaaagggcagccaggcagaggcccagtgtctggtaggctgctgaatttcctggaaggggtgattggatggaaagaggccagaaaccccagcctgagagactgctgtgcaccccacagtctgactgcacagagccgcctctgttggcaggaggcactgaggctccccttcctgtgtattgagaagcagtgtttgccaatatattttgctttcaattccaagaggagctctgggaaaacctgtggataaaaccaaatgccaaatgttggacgttgtttccttttccttttctctctctgattgttttaattgttctgtggtggttttaatggatttgagaccctggagcggcagctgcctttctgatttccagctgctttttgtgaataatttaaattcttactcgagactagttcgctctc

SEQ ID NO: 408503 - DNA, 6613 bp, Homo sapiens
acttccggatctttgcgaatcgtggtgctgctgcaagccagttaggaaggtccagagggagccaacctgttcatctaccacctgccccaggagtttggtgatcaggacctgctgcagatgtttatgccctttgggaatgtcgtgtctgccaaggttttcatagacaagcagacaaacctgagcaagtgttttggttttgtaagttacgacaatcctgtttcggcccaagctgccatccagtccatgaacggctttcagattggcatgaagcggcttaaagtgcagctcaaacgttcgaagaatgacagcaagccctactgagcgtgctcccctctgagactggagtgagagggtcttctggtaagtgggggaggagcacccttaatgattcgaagccctgaggctgtgtgttgacagccctggaccctgatccctgccactctcgcaggcacagcttgccctgaagactcggctactgccttctgtgggagtttcgcttcgtacagaggacaagtttgtgctttggtttccagtgttttactttggagtttaggtgccatatcctgaggttttttttgtttttgtttttgtttctcctttatttaaagtttgctgtgtttgtaaccagtgtgtgttgagaaggaccaacaccaaaccaccctggggaagggggacagggaaacatttaacacagacgatgatcaggatttgccccaaaccaccccaagagagaggactgagtggaacaaaaaagtgacccccagaacctctcttagtgtgagggtgggtagaatgagaactgacacctgggagctgtggggagcagagcggctttggggaagagtggagtgactagacacctaatgccctggcagctggagactcaaactcctgtacagctaccttctgggaaatagtttttgacacctatttttcagattcttgtccggaatttctgctgctcttttcaaaaaagggcattaacaattctctggaaataaagcacctgttagcctgacatatgcaaaaagcagggcggcatcacccattacgagctcccccagccagcagtcagtattggattggccttgcctggctggtggcagtttgggagaaacagccaaagaggttagtttatttcaacaccaaattagaccatggcccatttccaacgggtctctttaaaggcctctatggaatacattgcctggtttccttctttgcagttcaccacagcaaggaatgtcacctccatcccaagccaccattttctcatgaaggcaaatccaagaagggcttgcagttcttgctgaagggggtaccatttgtgggcagagtgatcaataccatctagttgggggaggaggagcttatttcttggtgtacttgaatcagaaggtccctgcaagccagtatgcttcatttgccagtggccagaaattctcccttgcctccttgattgaggtgtcccagatgtagtattcccacaggggtctggcaggcccctcctgtaaccactccagtcacattttctgctcttgaggcagaggtgacatcaggacgtttacagcctccacatgaattgagtgttcatttacctcagtattaccgtgttcatttttgtcctcgtgctacagttagctccctgccgcctcttgcaggtcttacttcagctcttgcctgtgacccacacagcttctgggctctgcctctgctctaagaagtgctgtgggggtagagaaccaggaaggacatgctgttgggaatgtacacctgggcagaggtggccctgttaagatgtgactgtagccacagccagggatgggatccctgggtctctggaatctgaaacctcaacaaataccagtcttgacccctagcagcagagataagaataaaggggttggtttgctattaagtcagatgggggctctctccttgtcatgctgtccctgtgggtaacagacagggattgaccatcttactgttgtacaggtagctggtggtgttggattatcccattgaagctgggacagctgttcctttctcatagtgataacttgggtctgttgtcctctaaggaacgtgaaacatacacttcttaagctgaaccacgtaaacttgaaattctgcgcactgggagaaatgtgtcctgtgtttcaaaggataaaactgttctaaaggcttccagggtcatgatgggattttttaaataaatgcaaaaaataaaaataaaaaagaaaaaagaaaacaaaaaaaaaaaagaaaaaaatgctaggttggggaggcgctgttctgaatcccaaccggctggaaccaagaatgtcgtttctatttttatagaagttttatacagctccggggtggagaatatttattacctaaattatatctctggaaaaggccaggattttgtagaatccagaatgtgattgttatacacacagggtgctgtgtatgattgaaactactgactttctgtggcccgtttgcagcccagctaacctgcccaaggggaaggtgttaatgctgtgaattggcagaggagagagctgtgctccatagggtgctgccggtgctgtgctccctagccttctgttctgtcttcctccttagccagaacgccactcccttcccacatccccttcttctctccgccttcccccatctcaccattatttgtccatggatttgtcctgggctctgggaccttatgaaacccctttcctaatgacataagaggccaaggtgcaatccacccacctttgataccagaccctgagggcttcatacctgctgatgggttttcttttctaaaaggaatgctcgccccagcagggtcctgggctgcttgagcagccagctggtgagaccatgcacttctctgttctctcctccccctgcccagtgagttagcacagcagtagcactgcccttgagcacagttctttccccaggccaaagatggttttgtgaagaagctgctcccctacaagtctcacgtgtgaaagggctcagctcagagtggagactcgctgtcaagtcttaagcaatccttttctgttgtgtgaaggtttcacttacaatgtgttttctgctgtagttttgtttcttacttgggttacatcatgaaattgatttgccttgaatgcagccagaccactgtctcctgggttccccttgagtggccaggcctggatggaagctaagagcttggatttctgggaacaaagggccatccccataagattgagcagaaattctggtcctcttccctgaaaaattttccccaccccagccagcatcttctgcttccccttgggttgtgaccagggagtggggagagaggctgaggctctgctcccctggagaccttctcttaggagttgggtgcttcatggaaaatccaagccttaggttcccttctgtctctggcaattagatgtgttcttggtgtcctccatgtcctttttgacttttccctgtgtccattgttagcatgtgcaaaagttccctgtcattacccaacccctgcccgcccacctcatttcagggctgtacacacagtgagtgttcctgttctctctctctttgtttggatgtattgctctgtgtaactcagtgggtctccctctttctggtttgtttttttttctagattcctgccgtttgttcatcgttgtgcctaaagcatgtcgatgtggcgtcaagtacatcgtccaaatccctgtctcttcagcttctctgatgcttgaactctcacctttgaccttgtgttgacctttgatgctgatgtgtatttttattatgtttgtttctttcttcgtttttttttctttttttctttcctttttttttccttttgtgctgccaaattggttttgctagaacgactgctgaaggggaaatatttaaacttgcatttgaatataaaaaaaatctatttttctagaacttcataagataaccacttgattttgtgattccaattctttgtaattgtcttcagagcagccctactagcacataccgcgtggtgtttgtatttctgtgaacacacagccagtccgtttctaggctttgtttctctgtgtgcttagttttaaagacaactttgaagtaaacaatgaaataaaagatgtcactaaaacctctgaggctcctgagcacattttgctgatacagtctgtggggcttgaggagaccgcatgtattgttctttcttttgtttttcttctgagttctcaactgcggagagcacctgaaccccctttcctttttgaccgcaggctgcactttgggccccagccagccctttttctttttctttttcttttgtggttcttccctggagcgactctggggagtcctggatatcccgcctgccccttcccctcagccccatgcttgttccaacagtctccacagcaaaatgtgatgctttgatttttttgttgttgtttttgtttttgtattgtttttgtgtttttgttttgaattttttcctttcctactaagattatgcccagaaaaaagttttgcatgtttcctgctgtttcttcacaccttcgtatatatcaccttcacctctctgttttctatagtttgtgcaaaaactgatcgatttaaaagggtttcaaagaagctgttttaaattgttgtagggttgattatttttttcaagattgtattgtttaattttgaagtggcaactttctcctctattgcccttagagcgtttgcctgtgcacttagactgtcacttcgtgtggcctccaggtcttaccggggcttccgggaggctggctgctttgctcagagagggtgggaagggggcctggagagacacgagaagcagaggtagagcctagaaggtggcagcaggtgggtaagaggcttatttagcacattaggggcagtgagcacctggaggaaggagggcgctcccaatcacccgtaggaggccatctgcacaccaagcggcaattcacctgctggcgcttttcctaggtgacaagcacaatactacagtcttcacactgtttacagccctgggcaccagccacccggcactggctcttcatcacagctctgctcttgcttagctagtggggtgggggaaagggcagggatttgtttttttaattgggtggagagccaaacagctactgtccctgggtgccaagcaagccagttttttggttccctgagggaaactgaccctcctctcttgtggcaccatccagcctcagggtcttggagacttgagtaagaatgtgagtggagggggagaggtgaggagaggagcacagggtggatctgtggagggaagaggttacagggggaggagctgatgatagatcccacccagacttaagctgctggtgggtgggtgagctgggaagtaggactgtccagggaagggtggagagatgtagctaggggctggggagggggaggtggaagcgctattgagcatcctccacaccaaggttgatgaaggaagggatcccagcagggtttctgctctggggctggcaggttgcctggtattatgcccaaggccgctctgcctgggggaaagggcagccaggcagaggcccagtgtctggtaggctgctgaatttcctggaaggggtgattggatggaaagaggccagaaaccccagcctgagagactgctgtgcaccccacagtctgactgcacagagccgcctctgttggcaggaggcactgaggctccccttcctgtgtattgagaagcagtgtttgccaatatattttgctttcaattccaagaggagctctgggaaaacctgtggataaaaccaaatgccaaatgttggacgttgtttccttttccttttctctctctgattgttttaattgttctgtggtggttttaatggatttgagaccctggagcggcagctgcctttctgatttccagctgctttttgtgaataatttaaaaagaaaaaaaaaaagaaactttacattttggagacaaacctgtgtgagttttttattggtacaaacgttgtatttaacactaggggttttgtacagttttttgccttttctactagaaaacaatgtaaagtgatttcacaatgtgaagagaaaaaaaaattgccactatgaccaaacgcacagtctgttctgcagcaacaacgggattcaatcaactcagtcgtgattcagccgtagaaatgcttttcctttatcttgtttgagcttttcctttctttcctgttttgatttgcaaaagaaaatgtcttttttgtgtgaacttgtgttgtactctgtagaaaattatggattttactttaatggtttaaaaaaaggcaaggagagcccttgtcgcttttcttacctaatcacagagtttgtgtagtgaatttaaaaagaaaaaaaaattgttataagtttggagcaagggagtatgtgtttcaaaggaatctccttcctttttttgtgtgtttttccttttgtcccaatggggaacctaaatctgttttaattgcacagacacatggacaaaaagtcattttgtatctgccaagtgtggtaccttcctttgtttatttgctattaaactgtttgagaagaa

SEQ ID NO: 408504 - DNA, 6278 bp, Homo sapiens
tattgttcggtgttctgctctggcggcagcggcagcggcggcgggacgcggaggctcccccgggattcggcctcagcagcgaggcggcggcggcggctgcggaggcgcaggcagcaactgaggcagcggcaggctcaggtgcagccgctgctcaaagaaaatgaacggcaccctggaccacccagaccaaccagatcttgatgctatcaagatgtttgtgggccaggttccaaggacctggtctgaaaaggacttgcgggaactcttcgaacagtatggtgctgtgtatgaaatcaacgtcctaagggataggagccaaaacccgcctcagagcaaagggtgctgttttgttacattttacacccgtaaagctgcattagaagctcagaatgctcttcacaacatgaaagtcctcccagggatgcatcaccctatacagatgaaacctgctgacagtgagaagaacaatgcagtggaagacaggaagctgtttattggtatgatttccaagaagtgcactgaaaatgacatccgagtcatgttctcttcgtttggacagattgaagaatgccggatattgcggggacctgatggcctgagccgaggttgtgcatttgtgacttttacaacaagagccatggcacagacggctatcaaggcaatgcaccaagcacagaccatggagggttgctcatcacccatggtggtaaaatttgctgatacacagaaggacaaagaacagaagagaatggcccagcagctccagcagcagatgcagcaaatcagcgcagcatctgtgtggggaaaccttgctggtctaaatactcttggaccccagtatttagcactttatttgcagctccttcagcagactgcctcctctgggaacctcaacaccctgagcagcctccacccaatgggagggttgaatgcaatgcagttacagaatttggctgcactagctgctgcagctagtgcagctcagaacacaccaagtggtaccaatgctctcactacatccagcagtcccctcagcgtgctcactagttcagggtcctcacctagctctagcagcagtaattctgtcaaccccatagcctcacttggagccctgcagacattagctggagcaacggctggcctcaatgttggctctttggcaggaatggctgctttaaatggtggcctgggcagcagtggcctttccaatggcaccgggagcaccatggaggccctcactcaggcctactcgggtatccagcaatatgctgctgctgcgctccccactctgtacaaccagaatcttctgacacagcagagtattggtgctgctggaagccagaaggaaggtccagagggagccaacctgttcatctaccacctgccccaggagtttggtgatcaggacctgctgcagatgtttatgccctttgggaatgtcgtgtctgccaaggttttcatagacaagcagacaaacctgagcaagtgttttggttttgtaagttacgacaatcctgtttcggcccaagctgccatccagtccatgaacggctttcagattggcatgaagcggcttaaagtgcagctcaaacgttcgaagaatgacagcaagccctactgagcgtgctcccctctgagactggagtgagagggtcttctggtagctggtggtgttggattatcccattgaagctgggacagctgttcctttctcatagtgataacttgggtctgttgtcctctaaggaacgtgaaacatacacttcttaagctgaaccacgtaaacttgaaattctgcgcactgggagaaatgtgtcctgtgtttcaaaggataaaactgttctaaaggcttccagggtcatgatgggattttttaaataaatgcaaaaaataaaaataaaaaagaaaaaagaaaacaaaaaaaaaaaagaaaaaaatgctaggttggggaggcgctgttctgaatcccaaccggctggaaccaagaatgtcgtttctatttttatagaagttttatacagctccggggtggagaatatttattacctaaattatatctctggaaaaggccaggattttgtagaatccagaatgtgattgttatacacacagggtgctgtgtatgattgaaactactgactttctgtggcccgtttgcagcccagctaacctgcccaaggggaaggtgttaatgctgtgaattggcagaggagagagctgtgctccatagggtgctgccggtgctgtgctccctagccttctgttctgtcttcctccttagccagaacgccactcccttcccacatccccttcttctctccgccttcccccatctcaccattatttgtccatggatttgtcctgggctctgggaccttatgaaacccctttcctaatgacataagaggccaaggtgcaatccacccacctttgataccagaccctgagggcttcatacctgctgatgggttttcttttctaaaaggaatgctcgccccagcagggtcctgggctgcttgagcagccagctggtgagaccatgcacttctctgttctctcctccccctgcccagtgagttagcacagcagtagcactgcccttgagcacagttctttccccaggccaaagatggttttgtgaagaagctgctcccctacaagtctcacgtgtgaaagggctcagctcagagtggagactcgctgtcaagtcttaagcaatccttttctgttgtgtgaaggtttcacttacaatgtgttttctgctgtagttttgtttcttacttgggttacatcatgaaattgatttgccttgaatgcagccagaccactgtctcctgggttccccttgagtggccaggcctggatggaagctaagagcttggatttctgggaacaaagggccatccccataagattgagcagaaattctggtcctcttccctgaaaaattttccccaccccagccagcatcttctgcttccccttgggttgtgaccagggagtggggagagaggctgaggctctgctcccctggagaccttctcttaggagttgggtgcttcatggaaaatccaagccttaggttcccttctgtctctggcaattagatgtgttcttggtgtcctccatgtcctttttgacttttccctgtgtccattgttagcatgtgcaaaagttccctgtcattacccaacccctgcccgcccacctcatttcagggctgtacacacagtgagtgttcctgttctctctctctttgtttggatgtattgctctgtgtaactcagtgggtctccctctttctggtttgtttttttttctagattcctgccgtttgttcatcgttgtgcctaaagcatgtcgatgtggcgtcaagtacatcgtccaaatccctgtctcttcagcttctctgatgcttgaactctcacctttgaccttgtgttgacctttgatgctgatgtgtatttttattatgtttgtttctttcttcgtttttttttctttttttctttcctttttttttccttttgtgctgccaaattggttttgctagaacgactgctgaaggggaaatatttaaacttgcatttgaatataaaaaaaatctatttttctagaacttcataagataaccacttgattttgtgattccaattctttgtaattgtcttcagagcagccctactagcacataccgcgtggtgtttgtatttctgtgaacacacagccagtccgtttctaggctttgtttctctgtgtgcttagttttaaagacaactttgaagtaaacaatgaaataaaagatgtcactaaaacctctgaggctcctgagcacattttgctgatacagtctgtggggcttgaggagaccgcatgtattgttctttcttttgtttttcttctgagttctcaactgcggagagcacctgaaccccctttcctttttgaccgcaggctgcactttgggccccagccagccctttttctttttctttttcttttgtggttcttccctggagcgactctggggagtcctggatatcccgcctgccccttcccctcagccccatgcttgttccaacagtctccacagcaaaatgtgatgctttgatttttttgttgttgtttttgtttttgtattgtttttgtgtttttgttttgaattttttcctttcctactaagattatgcccagaaaaaagttttgcatgtttcctgctgtttcttcacaccttcgtatatatcaccttcacctctctgttttctatagtttgtgcaaaaactgatcgatttaaaagggtttcaaagaagctgttttaaattgttgtagggttgattatttttttcaagattgtattgtttaattttgaagtggcaactttctcctctattgcccttagagcgtttgcctgtgcacttagactgtcacttcgtgtggcctccaggtcttaccggggcttccgggaggctggctgctttgctcagagagggtgggaagggggcctggagagacacgagaagcagaggtagagcctagaaggtggcagcaggtgggtaagaggcttatttagcacattaggggcagtgagcacctggaggaaggagggcgctcccaatcacccgtaggaggccatctgcacaccaagcggcaattcacctgctggcgcttttcctaggtgacaagcacaatactacagtcttcacactgtttacagccctgggcaccagccacccggcactggctcttcatcacagctctgctcttgcttagctagtggggtgggggaaagggcagggatttgtttttttaattgggtggagagccaaacagctactgtccctgggtgccaagcaagccagttttttggttccctgagggaaactgaccctcctctcttgtggcaccatccagcctcagggtcttggagacttgagtaagaatgtgagtggagggggagaggtgaggagaggagcacagggtggatctgtggagggaagaggttacagggggaggagctgatgatagatcccacccagacttaagctgctggtgggtgggtgagctgggaagtaggactgtccagggaagggtggagagatgtagctaggggctggggagggggaggtggaagcgctattgagcatcctccacaccaaggttgatgaaggaagggatcccagcagggtttctgctctggggctggcaggttgcctggtattatgcccaaggccgctctgcctgggggaaagggcagccaggcagaggcccagtgtctggtaggctgctgaatttcctggaaggggtgattggatggaaagaggccagaaaccccagcctgagagactgctgtgcaccccacagtctgactgcacagagccgcctctgttggcaggaggcactgaggctccccttcctgtgtattgagaagcagtgtttgccaatatattttgctttcaattccaagaggagctctgggaaaacctgtggataaaaccaaatgccaaatgttggacgttgtttccttttccttttctctctctgattgttttaattgttctgtggtggttttaatggatttgagaccctggagcggcagctgcctttctgatttccagctgctttttgtgaataatttaaaaagaaaaaaaaaaagaaactttacattttggagacaaacctgtgtgagttttttattggtacaaacgttgtatttaacactaggggttttgtacagttttttgccttttctactagaaaacaatgtaaagtgatttcacaatgtgaagagaaaaaaaaattgccactatgaccaaacgcacagtctgttctgcagcaacaacgggattcaatcaactcagtcgtgattcagccgtagaaatgcttttcctttatcttgtttgagcttttcctttctttcctgttttgatttgcaaaagaaaatgtcttttttgtgtgaacttgtgttgtactctgtagaaaattatggattttactttaatggtttaaaaaaaggcaaggagagcccttgtcgcttttcttacctaatcacagagtttgtgtagtgaatttaaaaagaaaaaaaaattgttataagtttggagcaagggagtatgtgtttcaaaggaatctccttcctttttttgtgtgtttttccttttgtcccaatggggaacctaaatctgttttaattgcacagacacatggacaaaaagtcattttgtatctgccaagtgtggtaccttcctttgtttatttgctattaaactgtttgagaagaa

SEQ ID NO: 408505 - DNA, 7275 bp, Homo sapiens
tattgttcggtgttctgctctggcggcagcggcagcggcggcgggacgcggaggctcccccgggattcggcctcagcagcgaggcggcggcggcggctgcggaggcgcaggcagcaactgaggcagcggcaggctcaggtgcagccgctgctcaaagaaaatgaacggcaccctggaccacccagaccaaccagatcttgatgctatcaagatgtttgtgggccaggttccaaggacctggtctgaaaaggacttgcgggaactcttcgaacagtatggtgctgtgtatgaaatcaacgtcctaagggataggagccaaaacccgcctcagagcaaagggtgctgttttgttacattttacacccgtaaagctgcattagaagctcagaatgctcttcacaacatgaaagtcctcccagggatgcatcaccctatacagatgaaacctgctgacagtgagaagaacaatgcagtggaagacaggaagctgtttattggtatgatttccaagaagtgcactgaaaatgacatccgagtcatgttctcttcgtttggacagattgaagaatgccggatattgcggggacctgatggcctgagccgaggttgtgcatttgtgacttttacaacaagagccatggcacagacggctatcaaggcaatgcaccaagcacagaccatggagggttgctcatcacccatggtggtaaaatttgctgatacacagaaggacaaagaacagaagagaatggcccagcagctccagcagcagatgcagcaaatcagcgcagcatctgtgtggggaaaccttgctggtctaaatactcttggaccccagtatttagcactttatttgcagctccttcagcagactgcctcctctgggaacctcaacaccctgagcagcctccacccaatgggagggttgaatgcaatgcagttacagaatttggctgcactagctgctgcagctagtgcagctcagaacacaccaagtggtaccaatgctctcactacatccagcagtcccctcagcgtgctcactagttcagggtcctcacctagctctagcagcagtaattctgtcaaccccatagcctcacttggagccctgcagacattagctggagcaacggctggcctcaatgttggctctttggcaggaatggctgctttaaatggtggcctgggcagcagtggcctttccaatggcaccgggagcaccatggaggccctcactcaggcctactcgggtatccagcaatatgctgctgctgcgctccccactctgtacaaccagaatcttctgacacagcagagtattggtgctgctggaagccagaaggaaggtccagagggagccaacctgttcatctaccacctgccccaggagtttggtgatcaggacctgctgcagatgtttatgccctttgggaatgtcgtgtctgccaaggttttcatagacaagcagacaaacctgagcaagtgttttggttttgtaagttacgacaatcctgtttcggcccaagctgccatccagtccatgaacggctttcagattggcatgaagcggcttaaagtgcagctcaaacgttcgaagaatgacagcaagccctactgagcgtgctcccctctgagactggagtgagagggtcttctggtaagtgggggaggagcacccttaatgattcgaagccctgaggctgtgtgttgacagccctggaccctgatccctgccactctcgcaggcacagcttgccctgaagactcggctactgccttctgtgggagtttcgcttcgtacagaggacaagtttgtgctttggtttccagtgttttactttggagtttaggtgccatatcctgaggttttttttgtttttgtttttgtttctcctttatttaaagtttgctgtgtttgtaaccagtgtgtgttgagaaggaccaacaccaaaccaccctggggaagggggacagggaaacatttaacacagacgatgatcaggatttgccccaaaccaccccaagagagaggactgagtggaacaaaaaagtgacccccagaacctctcttagtgtgagggtgggtagaatgagaactgacacctgggagctgtggggagcagagcggctttggggaagagtggagtgactagacacctaatgccctggcagctggagactcaaactcctgtacagctaccttctgggaaatagtttttgacacctatttttcagattcttgtccggaatttctgctgctcttttcaaaaaagggcattaacaattctctggaaataaagcacctgttagcctgacatatgcaaaaagcagggcggcatcacccattacgagctcccccagccagcagtcagtattggattggccttgcctggctggtggcagtttgggagaaacagccaaagaggttagtttatttcaacaccaaattagaccatggcccatttccaacgggtctctttaaaggcctctatggaatacattgcctggtttccttctttgcagttcaccacagcaaggaatgtcacctccatcccaagccaccattttctcatgaaggcaaatccaagaagggcttgcagttcttgctgaagggggtaccatttgtgggcagagtgatcaataccatctagttgggggaggaggagcttatttcttggtgtacttgaatcagaaggtccctgcaagccagtatgcttcatttgccagtggccagaaattctcccttgcctccttgattgaggtgtcccagatgtagtattcccacaggggtctggcaggcccctcctgtaaccactccagtcacattttctgctcttgaggcagaggtgacatcaggacgtttacagcctccacatgaattgagtgttcatttacctcagtattaccgtgttcatttttgtcctcgtgctacagttagctccctgccgcctcttgcaggtcttacttcagctcttgcctgtgacccacacagcttctgggctctgcctctgctctaagaagtgctgtgggggtagagaaccaggaaggacatgctgttgggaatgtacacctgggcagaggtggccctgttaagatgtgactgtagccacagccagggatgggatccctgggtctctggaatctgaaacctcaacaaataccagtcttgacccctagcagcagagataagaataaaggggttggtttgctattaagtcagatgggggctctctccttgtcatgctgtccctgtgggtaacagacagggattgaccatcttactgttgtacaggtagctggtggtgttggattatcccattgaagctgggacagctgttcctttctcatagtgataacttgggtctgttgtcctctaaggaacgtgaaacatacacttcttaagctgaaccacgtaaacttgaaattctgcgcactgggagaaatgtgtcctgtgtttcaaaggataaaactgttctaaaggcttccagggtcatgatgggattttttaaataaatgcaaaaaataaaaataaaaaagaaaaaagaaaacaaaaaaaaaaaagaaaaaaatgctaggttggggaggcgctgttctgaatcccaaccggctggaaccaagaatgtcgtttctatttttatagaagttttatacagctccggggtggagaatatttattacctaaattatatctctggaaaaggccaggattttgtagaatccagaatgtgattgttatacacacagggtgctgtgtatgattgaaactactgactttctgtggcccgtttgcagcccagctaacctgcccaaggggaaggtgttaatgctgtgaattggcagaggagagagctgtgctccatagggtgctgccggtgctgtgctccctagccttctgttctgtcttcctccttagccagaacgccactcccttcccacatccccttcttctctccgccttcccccatctcaccattatttgtccatggatttgtcctgggctctgggaccttatgaaacccctttcctaatgacataagaggccaaggtgcaatccacccacctttgataccagaccctgagggcttcatacctgctgatgggttttcttttctaaaaggaatgctcgccccagcagggtcctgggctgcttgagcagccagctggtgagaccatgcacttctctgttctctcctccccctgcccagtgagttagcacagcagtagcactgcccttgagcacagttctttccccaggccaaagatggttttgtgaagaagctgctcccctacaagtctcacgtgtgaaagggctcagctcagagtggagactcgctgtcaagtcttaagcaatccttttctgttgtgtgaaggtttcacttacaatgtgttttctgctgtagttttgtttcttacttgggttacatcatgaaattgatttgccttgaatgcagccagaccactgtctcctgggttccccttgagtggccaggcctggatggaagctaagagcttggatttctgggaacaaagggccatccccataagattgagcagaaattctggtcctcttccctgaaaaattttccccaccccagccagcatcttctgcttccccttgggttgtgaccagggagtggggagagaggctgaggctctgctcccctggagaccttctcttaggagttgggtgcttcatggaaaatccaagccttaggttcccttctgtctctggcaattagatgtgttcttggtgtcctccatgtcctttttgacttttccctgtgtccattgttagcatgtgcaaaagttccctgtcattacccaacccctgcccgcccacctcatttcagggctgtacacacagtgagtgttcctgttctctctctctttgtttggatgtattgctctgtgtaactcagtgggtctccctctttctggtttgtttttttttctagattcctgccgtttgttcatcgttgtgcctaaagcatgtcgatgtggcgtcaagtacatcgtccaaatccctgtctcttcagcttctctgatgcttgaactctcacctttgaccttgtgttgacctttgatgctgatgtgtatttttattatgtttgtttctttcttcgtttttttttctttttttctttcctttttttttccttttgtgctgccaaattggttttgctagaacgactgctgaaggggaaatatttaaacttgcatttgaatataaaaaaaatctatttttctagaacttcataagataaccacttgattttgtgattccaattctttgtaattgtcttcagagcagccctactagcacataccgcgtggtgtttgtatttctgtgaacacacagccagtccgtttctaggctttgtttctctgtgtgcttagttttaaagacaactttgaagtaaacaatgaaataaaagatgtcactaaaacctctgaggctcctgagcacattttgctgatacagtctgtggggcttgaggagaccgcatgtattgttctttcttttgtttttcttctgagttctcaactgcggagagcacctgaaccccctttcctttttgaccgcaggctgcactttgggccccagccagccctttttctttttctttttcttttgtggttcttccctggagcgactctggggagtcctggatatcccgcctgccccttcccctcagccccatgcttgttccaacagtctccacagcaaaatgtgatgctttgatttttttgttgttgtttttgtttttgtattgtttttgtgtttttgttttgaattttttcctttcctactaagattatgcccagaaaaaagttttgcatgtttcctgctgtttcttcacaccttcgtatatatcaccttcacctctctgttttctatagtttgtgcaaaaactgatcgatttaaaagggtttcaaagaagctgttttaaattgttgtagggttgattatttttttcaagattgtattgtttaattttgaagtggcaactttctcctctattgcccttagagcgtttgcctgtgcacttagactgtcacttcgtgtggcctccaggtcttaccggggcttccgggaggctggctgctttgctcagagagggtgggaagggggcctggagagacacgagaagcagaggtagagcctagaaggtggcagcaggtgggtaagaggcttatttagcacattaggggcagtgagcacctggaggaaggagggcgctcccaatcacccgtaggaggccatctgcacaccaagcggcaattcacctgctggcgcttttcctaggtgacaagcacaatactacagtcttcacactgtttacagccctgggcaccagccacccggcactggctcttcatcacagctctgctcttgcttagctagtggggtgggggaaagggcagggatttgtttttttaattgggtggagagccaaacagctactgtccctgggtgccaagcaagccagttttttggttccctgagggaaactgaccctcctctcttgtggcaccatccagcctcagggtcttggagacttgagtaagaatgtgagtggagggggagaggtgaggagaggagcacagggtggatctgtggagggaagaggttacagggggaggagctgatgatagatcccacccagacttaagctgctggtgggtgggtgagctgggaagtaggactgtccagggaagggtggagagatgtagctaggggctggggagggggaggtggaagcgctattgagcatcctccacaccaaggttgatgaaggaagggatcccagcagggtttctgctctggggctggcaggttgcctggtattatgcccaaggccgctctgcctgggggaaagggcagccaggcagaggcccagtgtctggtaggctgctgaatttcctggaaggggtgattggatggaaagaggccagaaaccccagcctgagagactgctgtgcaccccacagtctgactgcacagagccgcctctgttggcaggaggcactgaggctccccttcctgtgtattgagaagcagtgtttgccaatatattttgctttcaattccaagaggagctctgggaaaacctgtggataaaaccaaatgccaaatgttggacgttgtttccttttccttttctctccactcccgggagtggagagagaaaggtggagagatgtagctaggggctggggagggggaggtggaagcgctattgagcatcctccacatcacccatctccact

SEQ ID NO: 408506 - DNA, 6661 bp, Homo sapiens
tattgttcggtgttctgctctggcggcagcggcagcggcggcgggacgcggaggctcccccgggattcggcctcagcagcgaggcggcggcggcggctgcggaggcgcaggcagcaactgaggcagcggcaggctcaggtgcagccgctgctcaaagaaaatgaacggcaccctggaccacccagaccaaccagatcttgatgctatcaagatgtttgtgggccaggttccaaggacctggtctgaaaaggacttgcgggaactcttcgaacagtatggtgctgtgtatgaaatcaacgtcctaagggataggagccaaaacccgcctcagagcaaagggtgctgttttgttacattttacacccgtaaagctgcattagaagctcagaatgctcttcacaacatgaaagtcctcccagggatgcatcaccctatacagatgaaacctgctgacagtgagaagaacaatgcagtggaagacaggaagctgtttattggtatgatttccaagaagtgcactgaaaatgacatccgagtcatgttctcttcgtttggacagattgaagaatgccggatattgcggggacctgatggcctgagccgaggttgtgcatttgtgacttttacaacaagagccatggcacagacggctatcaaggcaatgcaccaagcacagaccatggagggttgctcatcacccatggtggtaaaatttgctgatacacagaaggacaaagaacagaagagaatggcccagcagctccagcagcagatgcagcaaatcagcgcagcatctgtgtggggaaaccttgctggtctaaatactcttggaccccagtatttagcactttatttgcagctccttcagcagactgcctcctctgggaacctcaacaccctgagcagcctccacccaatgggagggttgaatgcaatgcagttacagaatttggctgcactagctgctgcagctagtgcagctcagaacacaccaagtggtaccaatgctctcactacatccagcagtcccctcagcgtgctcactagttcagggtcctcacctagctctagcagcagtaattctgtcaaccccatagcctcacttggagccctgcagacattagctggagcaacggctggcctcaatgttggctctttggcaggaatggctgctttaaatggtggcctgggcagcagtggcctttccaatggcaccgggagcaccatggaggccctcactcaggcctactcgggtatccagcaatatgctgctgctgcgctccccactctgtacaaccagaatcttctgacacagcagagtattggtgctgctggaagccagaaggaaggtccagagggagccaacctgttcatctaccacctgccccaggagtttggtgatcaggacctgctgcagatgtttatgccctttgggaatgtcgtgtctgccaaggttttcatagacaagcagacaaacctgagcaagtgttttggttttgtaagttacgacaatcctgtttcggcccaagctgccatccagtccatgaacggctttcagattggcatgaagcggcttaaagtgcagctcaaacgttcgaagaatgacagcaagccctactgagcgtgctcccctctgagactggagtgagagggtcttctggtaagtgggggaggagcacccttaatgattcgaagccctgaggctgtgtgttgacagccctggaccctgatccctgccactctcgcaggcacagcttgccctgaagactcggctactgccttctgtgggagtttcgcttcgtacagaggacaagtttgtgctttggtttccagtgttttactttggagtttaggtgccatatcctgaggttttttttgtttttgtttttgtttctcctttatttaaagtttgctgtgtttgtaaccagtgtgtgttgagaaggaccaacaccaaaccaccctggggaagggggacagggaaacatttaacacagacgatgatcaggatttgccccaaaccaccccaagagagaggactgagtggaacaaaaaagtgacccccagaacctctcttagtgtgagggtgggtagaatgagaactgacacctgggagctgtggggagcagagcggctttggggaagagtggagtgactagacacctaatgccctggcagctggagactcaaactcctgtacagctaccttctgggaaatagtttttgacacctatttttcagattcttgtccggaatttctgctgctcttttcaaaaaagggcattaacaattctctggaaataaagcacctgttagcctgacatatgcaaaaagcagggcggcatcacccattacgagctcccccagccagcagtcagtattggattggccttgcctggctggtggcagtttgggagaaacagccaaagaggttagtttatttcaacaccaaattagaccatggcccatttccaacgggtctctttaaaggcctctatggaatacattgcctggtttccttctttgcagttcaccacagcaaggaatgtcacctccatcccaagccaccattttctcatgaaggcaaatccaagaagggcttgcagttcttgctgaagggggtaccatttgtgggcagagtgatcaataccatctagttgggggaggaggagcttatttcttggtgtacttgaatcagaaggtccctgcaagccagtatgcttcatttgccagtggccagaaattctcccttgcctccttgattgaggtgtcccagatgtagtattcccacaggggtctggcaggcccctcctgtaaccactccagtcacattttctgctcttgaggcagaggtgacatcaggacgtttacagcctccacatgaattgagtgttcatttacctcagtattaccgtgttcatttttgtcctcgtgctacagttagctccctgccgcctcttgcaggtcttacttcagctcttgcctgtgacccacacagcttctgggctctgcctctgctctaagaagtgctgtgggggtagagaaccaggaaggacatgctgttgggaatgtacacctgggcagaggtggccctgttaagatgtgactgtagccacagccagggatgggatccctgggtctctggaatctgaaacctcaacaaataccagtcttgacccctagcagcagagataagaataaaggggttggtttgctattaagtcagatgggggctctctccttgtcatgctgtccctgtgggtaacagacagggattgaccatcttactgttgtacaggtagctggtggtgttggattatcccattgaagctgggacagctgttcctttctcatagtgataacttgggtctgttgtcctctaaggaacgtgaaacatacacttcttaagctgaaccacgtaaacttgaaattctgcgcactgggagaaatgtgtcctgtgtttcaaaggataaaactgttctaaaggcttccagggtcatgatgggattttttaaataaatgcaaaaaataaaaataaaaaagaaaaaagaaaacaaaaaaaaaaaagaaaaaaatgctaggttggggaggcgctgttctgaatcccaaccggctggaaccaagaatgtcgtttctatttttatagaagttttatacagctccggggtggagaatatttattacctaaattatatctctggaaaaggccaggattttgtagaatccagaatgtgattgttatacacacagggtgctgtgtatgattgaaactactgactttctgtggcccgtttgcagcccagctaacctgcccaaggggaaggtgttaatgctgtgaattggcagaggagagagctgtgctccatagggtgctgccggtgctgtgctccctagccttctgttctgtcttcctccttagccagaacgccactcccttcccacatccccttcttctctccgccttcccccatctcaccattatttgtccatggatttgtcctgggctctgggaccttatgaaacccctttcctaatgacataagaggccaaggtgcaatccacccacctttgataccagaccctgagggcttcatacctgctgatgggttttcttttctaaaaggaatgctcgccccagcagggtcctgggctgcttgagcagccagctggtgagaccatgcacttctctgttctctcctccccctgcccagtgagttagcacagcagtagcactgcccttgagcacagttctttccccaggccaaagatggttttgtgaagaagctgctcccctacaagtctcacgtgtgaaagggctcagctcagagtggagactcgctgtcaagtcttaagcaatccttttctgttgtgtgaaggtttcacttacaatgtgttttctgctgtagttttgtttcttacttgggttacatcatgaaattgatttgccttgaatgcagccagaccactgtctcctgggttccccttgagtggccaggcctggatggaagctaagagcttggatttctgggaacaaagggccatccccataagattgagcagaaattctggtcctcttccctgaaaaattttccccaccccagccagcatcttctgcttccccttgggttgtgaccagggagtggggagagaggctgaggctctgctcccctggagaccttctcttaggagttgggtgcttcatggaaaatccaagccttaggttcccttctgtctctggcaattagatgtgttcttggtgtcctccatgtcctttttgacttttccctgtgtccattgttagcatgtgcaaaagttccctgtcattacccaacccctgcccgcccacctcatttcagggctgtacacacagtgagtgttcctgttctctctctctttgtttggatgtattgctctgtgtaactcagtgggtctccctctttctggtttgtttttttttctagattcctgccgtttgttcatcgttgtgcctaaagcatgtcgatgtggcgtcaagtacatcgtccaaatccctgtctcttcagcttctctgatgcttgaactctcacctttgaccttgtgttgacctttgatgctgatgtgtatttttattatgtttgtttctttcttcgtttttttttctttttttctttcctttttttttccttttgtgctgccaaattggttttgctagaacgactgctgaaggggaaatatttaaacttgcatttgaatataaaaaaaatctatttttctagaacttcataagataaccacttgattttgtgattccaattctttgtaattgtcttcagagcagccctactagcacataccgcgtggtgtttgtatttctgtgaacacacagccagtccgtttctaggctttgtttctctgtgtgcttagttttaaagacaactttgaagtaaacaatgaaataaaagatgtcactaaaacctctgaggctcctgagcacattttgctgatacagtctgtggggcttgaggagaccgcatgtattgttctttcttttgtttttcttctgagttctcaactgcggagagcacctgaaccccctttcctttttgaccgcaggttgcctggtattatgcccaaggccgctctgcctgggggaaagggcagccaggcagaggcccagtgtctggtaggctgctgaatttcctggaaggggtgattggatggaaagaggccagaaaccccagcctgagagactgctgtgcaccccacagtctgactgcacagagccgcctctgttggcaggaggcactgaggctccccttcctgtgtattgagaagcagtgtttgccaatatattttgctttcaattccaagaggagctctgggaaaacctgtggataaaaccaaatgccaaatgttggacgttgtttccttttccttttctctctctgattgttttaattgttctgtggtggttttaatggatttgagaccctggagcggcagctgcctttctgatttccagctgctttttgtgaataatttaaaaagaaaaaaaaaaagaaactttacattttggagacaaacctgtgtgagttttttattggtacaaacgttgtatttaacactaggggttttgtacagttttttgccttttctactagaaaacaatgtaaagtgatttcacaatgtgaagagaaaaaaaaattgccactatgaccaaacgcacagtctgttctgcagcaacaacgggattcaatcaactcagtcgtgattcagccgtagaaatgcttttcctttatcttgtttgagcttttcctttctttcctgttttgatttgcaaaagaaaatgtcttttttgtgtgaacttgtgttgtactctgtagaaaattatggattttactttaatggtttaaaaaaaggcaaggagagcccttgtcgcttttcttacctaatcacagagtttgtgtagtgaatttaaaaagaaaaaaaaattgttataagtttggagcaagggagtatgtgtttcaaaggaatctccttcctttttttgtgtgtttttccttttgtcccaatggggaacctaaatctgttttaattgcacagacacatggacaaaaagtcattttgtatctgccaagtgtggtaccttcctttgtttatttgctattaaactgtttgagaagaa

SEQ ID NO: 408507 - DNA, 6848 bp, Homo sapiens
tattgttcggtgttctgctctggcggcagcggcagcggcggcgggacgcggaggctcccccgggattcggcctcagcagcgaggcggcggcggcggctgcggaggcgcaggcagcaactgaggcagcggcaggctcaggtgcagccgctgctcaaagaaaatgaacggcaccctggaccacccagaccaaccagatcttgatgctatcaagatgtttgtgggccaggttccaaggacctggtctgaaaaggacttgcgggaactcttcgaacagtatggtgctgtgtatgaaatcaacgtcctaagggataggagccaaaacccgcctcagagcaaagggtgctgttttgttacattttacacccgtaaagctgcattagaagctcagaatgctcttcacaacatgaaagtcctcccagggatgcatcaccctatacagatgaaacctgctgacagtgagaagaacaatgcagtggaagacaggaagctgtttattggtatgatttccaagaagtgcactgaaaatgacatccgagtcatgttctcttcgtttggacagattgaagaatgccggatattgcggggacctgatggcctgagccgaggttgtgcatttgtgacttttacaacaagagccatggcacagacggctatcaaggcaatgcaccaagcacagaccatggagggttgctcatcacccatggtggtaaaatttgctgatacacagaaggacaaagaacagaagagaatggcccagcagctccagcagcagatgcagcaaatcagcgcagcatctgtgtggggaaaccttgctggtctaaatactcttggaccccagtatttagcactttatttgcagctccttcagcagactgcctcctctgggaacctcaacaccctgagcagcctccacccaatgggagggttgaatgcaatgcagttacagaatttggctgcactagctgctgcagctagtgcagctcagaacacaccaagtggtaccaatgctctcactacatccagcagtcccctcagcgtgctcactagttcagggtcctcacctagctctagcagcagtaattctgtcaaccccatagcctcacttggagccctgcagacattagctggagcaacggctggcctcaatgttggctctttggcaggaatggctgctttaaatggtggcctgggcagcagtggcctttccaatggcaccgggagcaccatggaggccctcactcaggcctactcgggtatccagcaatatgctgctgctgcgctccccactctgtacaaccagaatcttctgacacagcagagtattggtgctgctggaagccagaaggaaggtccagagggagccaacctgttcatctaccacctgccccaggagtttggtgatcaggacctgctgcagatgtttatgccctttgggaatgtcgtgtctgccaaggttttcatagacaagcagacaaacctgagcaagtgttttggttttgtaagttacgacaatcctgtttcggcccaagctgccatccagtccatgaacggctttcagattggcatgaagcggcttaaagtgcagctcaaacgttcgaagaatgacagcaagccctactgagcgtgctcccctctgagactggagtgagagggtcttctggtaagtgggggaggagcacccttaatgattcgaagccctgaggctgtgtgttgacagccctggaccctgatccctgccactctcgcaggcacagcttgccctgaagactcggctactgccttctgtgggagtttcgcttcgtacagaggacaagtttgtgctttggtttccagtgttttactttggagtttaggtgccatatcctgaggttttttttgtttttgtttttgtttctcctttatttaaagtttgctgtgtttgtaaccagtgtgtgttgagaaggaccaacaccaaaccaccctggggaagggggacagggaaacatttaacacagacgatgatcaggatttgccccaaaccaccccaagagagaggactgagtggaacaaaaaagtgacccccagaacctctcttagtgtgagggtgggtagaatgagaactgacacctgggagctgtggggagcagagcggctttggggaagagtggagtgactagacacctaatgccctggcagctggagactcaaactcctgtacagctaccttctgggaaatagtttttgacacctatttttcagattcttgtccggaatttctgctgctcttttcaaaaaagggcattaacaattctctggaaataaagcacctgttagcctgacatatgcaaaaagcagggcggcatcacccattacgagctcccccagccagcagtcagtattggattggccttgcctggctggtggcagtttgggagaaacagccaaagaggttagtttatttcaacaccaaattagaccatggcccatttccaacgggtctctttaaaggcctctatggaatacattgcctggtttccttctttgcagttcaccacagcaaggaatgtcacctccatcccaagccaccattttctcatgaaggcaaatccaagaagggcttgcagttcttgctgaagggggtaccatttgtgggcagagtgatcaataccatctagttgggggaggaggagcttatttcttggtgtacttgaatcagaaggtccctgcaagccagtatgcttcatttgccagtggccagaaattctcccttgcctccttgattgaggtgtcccagatgtagtattcccacaggggtctggcaggcccctcctgtaaccactccagtcacattttctgctcttgaggcagaggtgacatcaggacgtttacagcctccacatgaattgagtgttcatttacctcagtattaccgtgttcatttttgtcctcgtgctacagttagctccctgccgcctcttgcaggtcttacttcagctcttgcctgtgacccacacagcttctgggctctgcctctgctctaagaagtgctgtgggggtagagaaccaggaaggacatgctgttgggaatgtacacctgggcagaggtggccctgttaagatgtgactgtagccacagccagggatgggatccctgggtctctggaatctgaaacctcaacaaataccagtcttgacccctagcagcagagataagaataaaggggttggtttgctattaagtcagatgggggctctctccttgtcatgctgtccctgtgggtaacagacagggattgaccatcttactgttgtacaggtagctggtggtgttggattatcccattgaagctgggacagctgttcctttctcatagtgataacttgggtctgttgtcctctaaggaacgtgaaacatacacttcttaagctgaaccacgtaaacttgaaattctgcgcactgggagaaatgtgtcctgtgtttcaaaggataaaactgttctaaaggcttccagggtcatgatgggattttttaaataaatgcaaaaaataaaaataaaaaagaaaaaagaaaacaaaaaaaaaaaagaaaaaaatgctaggttggggaggcgctgttctgaatcccaaccggctggaaccaagaatgtcgtttctatttttatagaagttttatacagctccggggtggagaatatttattacctaaattatatctctggaaaaggccaggattttgtagaatccagaatgtgattgttatacacacagggtgctgtgtatgattgaaactactgactttctgtggcccgtttgcagcccagctaacctgcccaaggggaaggtgttaatgctgtgaattggcagaggagagagctgtgctccatagggtgctgccggtgctgtgctccctagccttctgttctgtcttcctccttagccagaacgccactcccttcccacatccccttcttctctccgccttcccccatctcaccattatttgtccatggatttgtcctgggctctgggaccttatgaaacccctttcctaatgacataagaggccaaggtgcaatccacccacctttgataccagaccctgagggcttcatacctgctgatgggttttcttttctaaaaggaatgctcgccccagcagggtcctgggctgcttgagcagccagctggtgagaccatgcacttctctgttctctcctccccctgcccagtgagttagcacagcagtagcactgcccttgagcacagttctttccccaggccaaagatggttttgtgaagaagctgctcccctacaagtctcacgtgtgaaagggctcagctcagagtggagactcgctgtcaagtcttaagcaatccttttctgttgtgtgaaggtttcacttacaatgtgttttctgctgtagttttgtttcttacttgggttacatcatgaaattgatttgccttgaatgcagccagaccactgtctcctgggttccccttgagtggccaggcctggatggaagctaagagcttggatttctgggaacaaagggccatccccataagattgagcagaaattctggtcctcttccctgaaaaattttccccaccccagccagcatcttctgcttccccttgggttgtgaccagggagtggggagagaggctgaggctctgctcccctggagaccttctcttaggagttgggtgcttcatggaaaatccaagccttaggttcccttctgtctctggcaattagatgtgttcttggtgtcctccatgtcctttttgacttttccctgtgtccattgttagcatgtgcaaaagttccctgtcattacccaacccctgcccgcccacctcatttcagggctgtacacacagtgagtgttcctgttctctctctctttgtttggatgtattgctctgtgtaactcagtgggtctccctctttctggtttgtttttttttctagattcctgccgtttgttcatcgttgtgcctaaagcatgtcgatgtggcgtcaagtacatcgtccaaatccctgtctcttcagcttctctgatgcttgaactctcacctttgaccttgtgttgacctttgatgctgatgtgtatttttattatgtttgtttctttcttcgtttttttttctttttttctttcctttttttttccttttgtgctgccaaattggttttgctagaacgactgctgaaggggaaatatttaaacttgcatttgaatataaaaaaaatctatttttctagaacttcataagataaccacttgattttgtgattccaattctttgtaattgtcttcagagcagccctactagcacataccgcgtggtgtttgtatttctgtgaacacacagccagtccgtttctaggctttgtttctctgtgtgcttagttttaaagacaactttgaagtaaacaatgaaataaaagatgtcactaaaacctctgaggctcctgagcacattttgctgatacagtctgtggggcttgaggagaccgcatgtattgttctttcttttgtttttcttctgagttctcaactgcggagagcacctgaaccccctttcctttttgaccgcaggctgcactttgggccccagccagccctttttctttttctttttcttttgtggttcttccctggagcgactctggggagtcctggatatcccgcctgccccttcccctcagccccatgcttgttccaacagtctccacagcaaaatgtgatgctttgatttttttgttgttgtttttgtttttgtattgtttttgtgtttttgttttgaattttttcctttcctactaagattatgcccagaaaaaagttttgcatgtttcctgctgtttcttcacaccttcgtatatatcaccttcacctctctgttttctatagtttgtgcaaaaactgatcgatttaaaagggtttcaaagaagctgttttaaattgttgtagggttgattatttttttcaagattgtattgtttaattttgaagtggcaactttctcctctattgcccttagagcgtttgcctgtgcacttagactgtcacttcgtgtggcctccaggtcttaccggggcttccgggaggctggctgctttgctcagagagggtgggaagggggcctggagagacacgagaagcagaggtagagcctagaaggtggcagcaggtgggtaagaggcttatttagcacattaggggcagtgagcacctggaggaaggagggcgctcccaatcacccgtaggaggccatctgcacaccaagcggcaattcacctgctggcgcttttcctaggtgacaagcacaatactacagtcttcacactgtttacagccctgggcaccagccacccggcactggctcttcatcacagctctgctcttgcttagctagtggggtgggggaaagggcagggatttgtttttttaattgggtggagagccaaacagctactgtccctgggtgccaagcaagccagttttttggttccctgagggaaactgaccctcctctcttgtggcaccatccagcctcagggtcttggagacttgagtaagaatgtgagtggagggggagaggtgaggagaggagcacagggtggatctgtggagggaagaggttacagggggaggagctgcagaaaggatcgaacgatacctcagggggtggttttaggactagctgtataacatgacggaaaagagatccctggagaaactaaattaggggatgtggaccccttatgatagtttatcagagcaatctaagaaatcatgtaggcctctaagaaagcatcaagaatcaatgcaatttgattaatggacttaaaata

SEQ ID NO: 408508 - DNA, 4323 bp, Homo sapiens
  misc_feature (14)..(14): n is a, c, g, or t
tcgatcgagctcgnaccgggagtggagagagaatgtcgtttctatttttatagaagttttatacagctccggggtggagaatatttattacctaaattatatctctggaaaaggccaggattttgtagaatccagaatgtgattgttatacacacagggtgctgtgtatgattgaaactactgactttctgtggcccgtttgcagcccagctaacctgcccaaggggaaggtgttaatgctgtgaattggcagaggagagagctgtgctccatagggtgctgccggtgctgtgctccctagccttctgttctgtcttcctccttagccagaacgccactcccttcccacatccccttcttctctccgccttcccccatctcaccattatttgtccatggatttgtcctgggctctgggaccttatgaaacccctttcctaatgacataagaggccaaggtgcaatccacccacctttgataccagaccctgagggcttcatacctgctgatgggttttcttttctaaaaggaatgctcgccccagcagggtcctgggctgcttgagcagccagctggtgagaccatgcacttctctgttctctcctccccctgcccagtgagttagcacagcagtagcactgcccttgagcacagttctttccccaggccaaagatggttttgtgaagaagctgctcccctacaagtctcacgtgtgaaagggctcagctcagagtggagactcgctgtcaagtcttaagcaatccttttctgttgtgtgaaggtttcacttacaatgtgttttctgctgtagttttgtttcttacttgggttacatcatgaaattgatttgccttgaatgcagccagaccactgtctcctgggttccccttgagtggccaggcctggatggaagctaagagcttggatttctgggaacaaagggccatccccataagattgagcagaaattctggtcctcttccctgaaaaattttccccaccccagccagcatcttctgcttccccttgggttgtgaccagggagtggggagagaggctgaggctctgctcccctggagaccttctcttaggagttgggtgcttcatggaaaatccaagccttaggttcccttctgtctctggcaattagatgtgttcttggtgtcctccatgtcctttttgacttttccctgtgtccattgttagcatgtgcaaaagttccctgtcattacccaacccctgcccgcccacctcatttcagggctgtacacacagtgagtgttcctgttctctctctctttgtttggatgtattgctctgtgtaactcagtgggtctccctctttctggtttgtttttttttctagattcctgccgtttgttcatcgttgtgcctaaagcatgtcgatgtggcgtcaagtacatcgtccaaatccctgtctcttcagcttctctgatgcttgaactctcacctttgaccttgtgttgacctttgatgctgatgtgtatttttattatgtttgtttctttcttcgtttttttttctttttttctttcctttttttttccttttgtgctgccaaattggttttgctagaacgactgctgaaggggaaatatttaaacttgcatttgaatataaaaaaaatctatttttctagaacttcataagataaccacttgattttgtgattccaattctttgtaattgtcttcagagcagccctactagcacataccgcgtggtgtttgtatttctgtgaacacacagccagtccgtttctaggctttgtttctctgtgtgcttagttttaaagacaactttgaagtaaacaatgaaataaaagatgtcactaaaacctctgaggctcctgagcacattttgctgatacagtctgtggggcttgaggagaccgcatgtattgttctttcttttgtttttcttctgagttctcaactgcggagagcacctgaaccccctttcctttttgaccgcaggctgcactttgggccccagccagccctttttctttttctttttcttttgtggttcttccctggagcgactctggggagtcctggatatcccgcctgccccttcccctcagccccatgcttgttccaacagtctccacagcaaaatgtgatgctttgatttttttgttgttgtttttgtttttgtattgtttttgtgtttttgttttgaattttttcctttcctactaagattatgcccagaaaaaagttttgcatgtttcctgctgtttcttcacaccttcgtatatatcaccttcacctctctgttttctatagtttgtgcaaaaactgatcgatttaaaagggtttcaaagaagctgttttaaattgttgtagggttgattatttttttcaagattgtattgtttaattttgaagtggcaactttctcctctattgcccttagagcgtttgcctgtgcacttagactgtcacttcgtgtggcctccaggtcttaccggggcttccgggaggctggctgctttgctcagagagggtgggaagggggcctggagagacacgagaagcagaggtagagcctagaaggtggcagcaggtgggtaagaggcttatttagcacattaggggcagtgagcacctggaggaaggagggcgctcccaatcacccgtaggaggccatctgcacaccaagcggcaattcacctgctggcgcttttcctaggtgacaagcacaatactacagtcttcacactgtttacagccctgggcaccagccacccggcactggctcttcatcacagctctgctcttgcttagctagtggggtgggggaaagggcagggatttgtttttttaattgggtggagagccaaacagctactgtccctgggtgccaagcaagccagttttttggttccctgagggaaactgaccctcctctcttgtggcaccatccagcctcagggtcttggagacttgagtaagaatgtgagtggagggggagaggtgaggagaggagcacagggtggatctgtggagggaagaggttacagggggaggagctgatgatagatcccacccagacttaagctgctggtgggtgggtgagctgggaagtaggactgtccagggaagggtggagagatgtagctaggggctggggagggggaggtggaagcgctattgagcatcctccacaccaaggttgatgaaggaagggatcccagcagggtttctgctctggggctggcaggttgcctggtattatgcccaaggccgctctgcctgggggaaagggcagccaggcagaggcccagtgtctggtaggctgctgaatttcctggaaggggtgattggatggaaagaggccagaaaccccagcctgagagactgctgtgcaccccacagtctgactgcacagagccgcctctgttggcaggaggcactgaggctccccttcctgtgtattgagaagcagtgtttgccaatatattttgctttcaattccaagaggagctctgggaaaacctgtggataaaaccaaatgccaaatgttggacgttgtttccttttccttttctctctctgattgttttaattgttctgtggtggttttaatggatttgagaccctggagcggcagctgcctttctgatttccagctgctttttgtgaataatttaaaaagaaaaaaaaaaagaaactttacattttggagacaaacctgtgtgagttttttattggtacaaacgttgtatttaacactaggggttttgtacagttttttgccttttctactagaaaacaatgtaaagtgatttcacaatgtgaagagaaaaaaaaattgccactatgaccaaacgcacagtctgttctgcagcaacaacgggattcaatcaactcagtcgtgattcagccgtagaaatgcttttcctttatcttgtttgagcttttcctttctttcctgttttgatttgcaaaagaaaatgtcttttttgtgtgaacttgtgttgtactctgtagaaaattatggattttactttaatggtttaaaaaaaggcaaggagagcccttgtcgcttttcttacctaatcacagagtttgtgtagtgaatttaaaaagaaaaaaaaattgttataagtttggagcaagggagtatgtgtttcaaaggaatctccttcctttttttgtgtgtttttccttttgtcccaatggggaacctaaatctgttttaattgcacagacacatggacaaaaagtcattttgtatctgccaagtgtggtaccttcctttgtttatttgctattaaactgtttgagaagaa

SEQ ID NO: 408509 - DNA, 4221 bp, Homo sapiens
ggacgcgtgggtcgaccacgcgtacgggaccgcaatgtgattgttatacacacagggtgctgtgtatgattgaaactactgactttctgtggcccgtttgcagcccagctaacctgcccaaggggaaggtgttaatgctgtgaattggcagaggagagagctgtgctccatagggtgctgccggtgctgtgctccctagccttctgttctgtcttcctccttagccagaacgccactcccttcccacatccccttcttctctccgccttcccccatctcaccattatttgtccatggatttgtcctgggctctgggaccttatgaaacccctttcctaatgacataagaggccaaggtgcaatccacccacctttgataccagaccctgagggcttcatacctgctgatgggttttcttttctaaaaggaatgctcgccccagcagggtcctgggctgcttgagcagccagctggtgagaccatgcacttctctgttctctcctccccctgcccagtgagttagcacagcagtagcactgcccttgagcacagttctttccccaggccaaagatggttttgtgaagaagctgctcccctacaagtctcacgtgtgaaagggctcagctcagagtggagactcgctgtcaagtcttaagcaatccttttctgttgtgtgaaggtttcacttacaatgtgttttctgctgtagttttgtttcttacttgggttacatcatgaaattgatttgccttgaatgcagccagaccactgtctcctgggttccccttgagtggccaggcctggatggaagctaagagcttggatttctgggaacaaagggccatccccataagattgagcagaaattctggtcctcttccctgaaaaattttccccaccccagccagcatcttctgcttccccttgggttgtgaccagggagtggggagagaggctgaggctctgctcccctggagaccttctcttaggagttgggtgcttcatggaaaatccaagccttaggttcccttctgtctctggcaattagatgtgttcttggtgtcctccatgtcctttttgacttttccctgtgtccattgttagcatgtgcaaaagttccctgtcattacccaacccctgcccgcccacctcatttcagggctgtacacacagtgagtgttcctgttctctctctctttgtttggatgtattgctctgtgtaactcagtgggtctccctctttctggtttgtttttttttctagattcctgccgtttgttcatcgttgtgcctaaagcatgtcgatgtggcgtcaagtacatcgtccaaatccctgtctcttcagcttctctgatgcttgaactctcacctttgaccttgtgttgacctttgatgctgatgtgtatttttattatgtttgtttctttcttcgtttttttttctttttttctttcctttttttttccttttgtgctgccaaattggttttgctagaacgactgctgaaggggaaatatttaaacttgcatttgaatataaaaaaaatctatttttctagaacttcataagataaccacttgattttgtgattccaattctttgtaattgtcttcagagcagccctactagcacataccgcgtggtgtttgtatttctgtgaacacacagccagtccgtttctaggctttgtttctctgtgtgcttagttttaaagacaactttgaagtaaacaatgaaataaaagatgtcactaaaacctctgaggctcctgagcacattttgctgatacagtctgtggggcttgaggagaccgcatgtattgttctttcttttgtttttcttctgagttctcaactgcggagagcacctgaaccccctttcctttttgaccgcaggctgcactttgggccccagccagccctttttctttttctttttcttttgtggttcttccctggagcgactctggggagtcctggatatcccgcctgccccttcccctcagccccatgcttgttccaacagtctccacagcaaaatgtgatgctttgatttttttgttgttgtttttgtttttgtattgtttttgtgtttttgttttgaattttttcctttcctactaagattatgcccagaaaaaagttttgcatgtttcctgctgtttcttcacaccttcgtatatatcaccttcacctctctgttttctatagtttgtgcaaaaactgatcgatttaaaagggtttcaaagaagctgttttaaattgttgtagggttgattatttttttcaagattgtattgtttaattttgaagtggcaactttctcctctattgcccttagagcgtttgcctgtgcacttagactgtcacttcgtgtggcctccaggtcttaccggggcttccgggaggctggctgctttgctcagagagggtgggaagggggcctggagagacacgagaagcagaggtagagcctagaaggtggcagcaggtgggtaagaggcttatttagcacattaggggcagtgagcacctggaggaaggagggcgctcccaatcacccgtaggaggccatctgcacaccaagcggcaattcacctgctggcgcttttcctaggtgacaagcacaatactacagtcttcacactgtttacagccctgggcaccagccacccggcactggctcttcatcacagctctgctcttgcttagctagtggggtgggggaaagggcagggatttgtttttttaattgggtggagagccaaacagctactgtccctgggtgccaagcaagccagttttttggttccctgagggaaactgaccctcctctcttgtggcaccatccagcctcagggtcttggagacttgagtaagaatgtgagtggagggggagaggtgaggagaggagcacagggtggatctgtggagggaagaggttacagggggaggagctgatgatagatcccacccagacttaagctgctggtgggtgggtgagctgggaagtaggactgtccagggaagggtggagagatgtagctaggggctggggagggggaggtggaagcgctattgagcatcctccacaccaaggttgatgaaggaagggatcccagcagggtttctgctctggggctggcaggttgcctggtattatgcccaaggccgctctgcctgggggaaagggcagccaggcagaggcccagtgtctggtaggctgctgaatttcctggaaggggtgattggatggaaagaggccagaaaccccagcctgagagactgctgtgcaccccacagtctgactgcacagagccgcctctgttggcaggaggcactgaggctccccttcctgtgtattgagaagcagtgtttgccaatatattttgctttcaattccaagaggagctctgggaaaacctgtggataaaaccaaatgccaaatgttggacgttgtttccttttccttttctctctctgattgttttaattgttctgtggtggttttaatggatttgagaccctggagcggcagctgcctttctgatttccagctgctttttgtgaataatttaaaaagaaaaaaaaaaagaaactttacattttggagacaaacctgtgtgagttttttattggtacaaacgttgtatttaacactaggggttttgtacagttttttgccttttctactagaaaacaatgtaaagtgatttcacaatgtgaagagaaaaaaaaattgccactatgaccaaacgcacagtctgttctgcagcaacaacgggattcaatcaactcagtcgtgattcagccgtagaaatgcttttcctttatcttgtttgagcttttcctttctttcctgttttgatttgcaaaagaaaatgtcttttttgtgtgaacttgtgttgtactctgtagaaaattatggattttactttaatggtttaaaaaaaggcaaggagagcccttgtcgcttttcttacctaatcacagagtttgtgtagtgaatttaaaaagaaaaaaaaattgttataagtttggagcaagggagtatgtgtttcaaaggaatctccttcctttttttgtgtgtttttccttttgtcccaatggggaacctaaatctgttttaattgcacagacacatggacaaaaagtcattttgtatctgccaagtgtggtaccttcctttgtttatttgctattaaactgtttgagaagaa

SEQ ID NO: 408510 - DNA, 4789 bp, Homo sapiens
tattgttcggtgttctgctctggcggcagcggcagcggcggcgggacgcggaggctcccccgggattcggcctcagcagcgaggcggcggcggcggctgcggaggcgcaggcagcaactgaggcagcggcaggctcaggtgcagccgctgctcaaagaaaatgaacggcaccctggaccacccagaccaaccagatcttgatgctatcaagatgtttgtgggccaggttccaaggacctggtctgaaaaggacttgcgggaactcttcgaacagtatggtgctgtgtatgaaatcaacgtcctaagggataggagccaaaacccgcctcagagcaaagggtgctgttttgttacattttacacccgtaaagctgcattagaagctcagaatgctcttcacaacatgaaagtcctcccagggatgcatcaccctatacagatgaaacctgctgacagtgagaagaacaatgcagtggaagacaggaagctgtttattggtatgatttccaagaagtgcactgaaaatgacatccgagtcatgttctcttcgtttggacagattgaagaatgccggatattgcggggacctgatggcctgagccgaggttgtgcatttgtgacttttacaacaagagccatggcacagacggctatcaaggcaatgcaccaagcacagaccatggagggttgctcatcacccatggtggtaaaatttgctgatacacagaaggacaaagaacagaagagaatggcccagcagctccagcagcagatgcagcaaatcagcgcagcatctgtgtggggaaaccttgctggtctaaatactcttggaccccagtatttagcactttatttgcagctccttcagcagactgcctcctctgggaacctcaacaccctgagcagcctccacccaatgggagggttgaatgcaatgcagttacagaatttggctgcactagctgctgcagctagtgcagctcagaacacaccaagtggtaccaatgctctcactacatccagcagtcccctcagcgtgctcactagttcagggtcctcacctagctctagcagcagtaattctgtcaaccccatagcctcacttggagccctgcagacattagctggagcaacggctggcctcaatgttggctctttggcaggaatggctgctttaaatggtggcctgggcagcagtggcctttccaatggcaccgggagcaccatggaggccctcactcaggcctactcgggtatccagcaatatgctgctgctgcgctccccactctgtacaaccagaatcttctgacacagcagagtattggtgctgctggaagccagaaggaaggtccagagggagccaacctgttcatctaccacctgccccaggagtttggtgatcaggacctgctgcagatgtttatgccctttgggaatgtcgtgtctgccaaggttttcatagacaagcagacaaacctgagcaagtgttttggttttgtaagttacgacaatcctgtttcggcccaagctgccatccagtccatgaacggctttcagattggcatgaagcggcttaaagtgcagctcaaacgttcgaagaatgacagcaagccctactgagcgtgctcccctctgagactggagtgagagggtcttctggtaagtgggggaggagcacccttaatgattcgaagccctgaggctgtgtgttgacagccctggaccctgatccctgccactctcgcaggcacagcttgccctgaagactcggctactgccttctgtgggagtttcgcttcgtacagaggacaagtttgtgctttggtttccagtgttttactttggagtttaggtgccatatcctgaggttttttttgtttttgtttttgtttctcctttatttaaagtttgctgtgtttgtaaccagtgtgtgttgagaaggaccaacaccaaaccaccctggggaagggggacagggaaacatttaacacagacgatgatcaggatttgccccaaaccaccccaagagagaggactgagtggaacaaaaaagtgacccccagaacctctcttagtgtgagggtgggtagaatgagaactgacacctgggagctgtggggagcagagcggctttggggaagagtggagtgactagacacctaatgccctggcagctggagactcaaactcctgtacagctaccttctgggaaatagtttttgacacctatttttcagattcttgtccggaatttctgctgctcttttcaaaaaagggcattaacaattctctggaaataaagcacctgttagcctgacatatgcaaaaagcagggcggcatcacccattacgagctcccccagccagcagtcagtattggattggccttgcctggctggtggcagtttgggagaaacagccaaagaggttagtttatttcaacaccaaattagaccatggcccatttccaacgggtctctttaaaggcctctatggaatacattgcctggtttccttctttgcagttcaccacagcaaggaatgtcacctccatcccaagccaccattttctcatgaaggcaaatccaagaagggcttgcagttcttgctgaagggggtaccatttgtgggcagagtgatcaataccatctagttgggggaggaggagcttatttcttggtgtacttgaatcagaaggtccctgcaagccagtatgcttcatttgccagtggccagaaattctcccttgcctccttgattgaggtgtcccagatgtagtattcccacaggggtctggcaggcccctcctgtaaccactccagtcacattttctgctcttgaggcagaggtgacatcaggacgtttacagcctccacatgaattgagtgttcatttacctcagtattaccgtgttcatttttgtcctcgtgctacagttagctccctgccgcctcttgcaggtcttacttcagctcttgcctgtgacccacacagcttctgggctctgcctctgctctaagaagtgctgtgggggtagagaaccaggaaggacatgctgttgggaatgtacacctgggcagaggtggccctgttaagatgtgactgtagccacagccagggatgggatccctgggtctctggaatctgaaacctcaacaaataccagtcttgacccctagcagcagagataagaataaaggggttggtttgctattaagtcagatgggggctctctccttgtcatgctgtccctgtgggtaacagacagggattgaccatcttactgttgtacaggtagctggtggtgttggattatcccattgaagctgggacagctgttcctttctcatagtgataacttgggtctgttgtcctctaaggaacgtgaaacatacacttcttaagctgaaccacgtaaacttgaaattctgcgcactgggagaaatgtgtcctgtgtttcaaaggataaaactgttctaaaggcttccagggtcatgatgggattttttaaataaatgcaaaaaataaaaataaaaaagaaaaaagaaaacaaaaaaaaaaaagaaaaaaatgctaggttggggaggcgctgttctgaatcccaaccggctggaaccaagaatgtcgtttctatttttatagaagttttatacagctccggggtggagaatatttattacctaaattatatctctggaaaaggccaggattttgtagaatccagaatgtgattgttatacacacagggtgctgtgtatgattgaaactactgactttctgtggcccgtttgcagcccagctaacctgcccaaggggaaggtgttaatgctgtgaattggcagaggagagagctgtgctccatagggtgctgccggtgctgtgctccctagccttctgttctgtcttcctccttagccagaacgccactcccttcccacatccccttcttctctccgccttcccccatctcaccattatttgtccatggatttgtcctgggctctgggaccttatgaaacccctttcctaatgacataagaggccaaggtgcaatccacccacctttgataccagaccctgagggcttcatacctgctgatgggttttcttttctaaaaggaatgctcgccccagcagggtcctgggctgcttgagcagccagctggtgagaccatgcacttctctgttctctcctccccctgcccagtgagttagcacagcagtagcactgcccttgagcacagttctttccccaggccaaagatggttttgtgaagaagctgctcccctacaagtctcacgtgtgaaagggctcagctcagagtggagactcgctgtcaagtcttaagcaatccttttctgttgtgtgaaggtttcacttacaatgtgttttctgctgtagttttgtttcttacttgggttacatcatgaaattgatttgccttgaatgcagccagaccactgtctcctgggttccccttgagtggccaggcctggatggaagctaagagcttggatttctgggaacaaagggccatccccataagattgagcagaaattctggtcctcttccctgaaaaattttccccaccccagccagcatcttctgcttccccttgggttgtgaccagggagtggggagagaggctgaggctctgctcccctggagaccttctcttaggagttgggtgcttcatggaaaatccaagccttaggttcccttctgtctctggcaattagatgtgttcttggtgtccagactgagtggcaagtgattgttccccgct

SEQ ID NO: 408511 - DNA, 3896 bp, Homo sapiens
taatcagctcgccctgtaacatctatggcaagtgcaatccacccacctttgataccagaccctgagggcttcatacctgctgatgggttttcttttctaaaaggaatgctcgccccagcagggtcctgggctgcttgagcagccagctggtgagaccatgcacttctctgttctctcctccccctgcccagtgagttagcacagcagtagcactgcccttgagcacagttctttccccaggccaaagatggttttgtgaagaagctgctcccctacaagtctcacgtgtgaaagggctcagctcagagtggagactcgctgtcaagtcttaagcaatccttttctgttgtgtgaaggtttcacttacaatgtgttttctgctgtagttttgtttcttacttgggttacatcatgaaattgatttgccttgaatgcagccagaccactgtctcctgggttccccttgagtggccaggcctggatggaagctaagagcttggatttctgggaacaaagggccatccccataagattgagcagaaattctggtcctcttccctgaaaaattttccccaccccagccagcatcttctgcttccccttgggttgtgaccagggagtggggagagaggctgaggctctgctcccctggagaccttctcttaggagttgggtgcttcatggaaaatccaagccttaggttcccttctgtctctggcaattagatgtgttcttggtgtcctccatgtcctttttgacttttccctgtgtccattgttagcatgtgcaaaagttccctgtcattacccaacccctgcccgcccacctcatttcagggctgtacacacagtgagtgttcctgttctctctctctttgtttggatgtattgctctgtgtaactcagtgggtctccctctttctggtttgtttttttttctagattcctgccgtttgttcatcgttgtgcctaaagcatgtcgatgtggcgtcaagtacatcgtccaaatccctgtctcttcagcttctctgatgcttgaactctcacctttgaccttgtgttgacctttgatgctgatgtgtatttttattatgtttgtttctttcttcgtttttttttctttttttctttcctttttttttccttttgtgctgccaaattggttttgctagaacgactgctgaaggggaaatatttaaacttgcatttgaatataaaaaaaatctatttttctagaacttcataagataaccacttgattttgtgattccaattctttgtaattgtcttcagagcagccctactagcacataccgcgtggtgtttgtatttctgtgaacacacagccagtccgtttctaggctttgtttctctgtgtgcttagttttaaagacaactttgaagtaaacaatgaaataaaagatgtcactaaaacctctgaggctcctgagcacattttgctgatacagtctgtggggcttgaggagaccgcatgtattgttctttcttttgtttttcttctgagttctcaactgcggagagcacctgaaccccctttcctttttgaccgcaggctgcactttgggccccagccagccctttttctttttctttttcttttgtggttcttccctggagcgactctggggagtcctggatatcccgcctgccccttcccctcagccccatgcttgttccaacagtctccacagcaaaatgtgatgctttgatttttttgttgttgtttttgtttttgtattgtttttgtgtttttgttttgaattttttcctttcctactaagattatgcccagaaaaaagttttgcatgtttcctgctgtttcttcacaccttcgtatatatcaccttcacctctctgttttctatagtttgtgcaaaaactgatcgatttaaaagggtttcaaagaagctgttttaaattgttgtagggttgattatttttttcaagattgtattgtttaattttgaagtggcaactttctcctctattgcccttagagcgtttgcctgtgcacttagactgtcacttcgtgtggcctccaggtcttaccggggcttccgggaggctggctgctttgctcagagagggtgggaagggggcctggagagacacgagaagcagaggtagagcctagaaggtggcagcaggtgggtaagaggcttatttagcacattaggggcagtgagcacctggaggaaggagggcgctcccaatcacccgtaggaggccatctgcacaccaagcggcaattcacctgctggcgcttttcctaggtgacaagcacaatactacagtcttcacactgtttacagccctgggcaccagccacccggcactggctcttcatcacagctctgctcttgcttagctagtggggtgggggaaagggcagggatttgtttttttaattgggtggagagccaaacagctactgtccctgggtgccaagcaagccagttttttggttccctgagggaaactgaccctcctctcttgtggcaccatccagcctcagggtcttggagacttgagtaagaatgtgagtggagggggagaggtgaggagaggagcacagggtggatctgtggagggaagaggttacagggggaggagctgatgatagatcccacccagacttaagctgctggtgggtgggtgagctgggaagtaggactgtccagggaagggtggagagatgtagctaggggctggggagggggaggtggaagcgctattgagcatcctccacaccaaggttgatgaaggaagggatcccagcagggtttctgctctggggctggcaggttgcctggtattatgcccaaggccgctctgcctgggggaaagggcagccaggcagaggcccagtgtctggtaggctgctgaatttcctggaaggggtgattggatggaaagaggccagaaaccccagcctgagagactgctgtgcaccccacagtctgactgcacagagccgcctctgttggcaggaggcactgaggctccccttcctgtgtattgagaagcagtgtttgccaatatattttgctttcaattccaagaggagctctgggaaaacctgtggataaaaccaaatgccaaatgttggacgttgtttccttttccttttctctctctgattgttttaattgttctgtggtggttttaatggatttgagaccctggagcggcagctgcctttctgatttccagctgctttttgtgaataatttaaaaagaaaaaaaaaaagaaactttacattttggagacaaacctgtgtgagttttttattggtacaaacgttgtatttaacactaggggttttgtacagttttttgccttttctactagaaaacaatgtaaagtgatttcacaatgtgaagagaaaaaaaaattgccactatgaccaaacgcacagtctgttctgcagcaacaacgggattcaatcaactcagtcgtgattcagccgtagaaatgcttttcctttatcttgtttgagcttttcctttctttcctgttttgatttgcaaaagaaaatgtcttttttgtgtgaacttgtgttgtactctgtagaaaattatggattttactttaatggtttaaaaaaaggcaaggagagcccttgtcgcttttcttacctaatcacagagtttgtgtagtgaatttaaaaagaaaaaaaaattgttataagtttggagcaagggagtatgtgtttcaaaggaatctccttcctttttttgtgtgtttttccttttgtcccaatggggaacctaaatctgttttaattgcacagacacatggacaaaaagtcattttgtatctgccaagtgtggtaccttcctttgtttatttgctattaaactgtttgagaagaa

SEQ ID NO: 408512 - DNA, 3296 bp, Homo sapiens
agacggtcagatctgagcctggattcgatgtacgatagactctagagcagtctcgacgatcccagaatttagcgtgaatcagcgagtctgcctgtagattttatgctcctttgacaaacttcgtgactggaaaacctctgcgcacgagtataatacactaaacaggtgtacgggacgagttcgtgatgtgaaacctgtaatatcgctatgtgccttccgctcctactgatggctttcagattggcatgaagcggcttaaagtgcagctcaaacgttcgaagaatgacagcaagccctactgagcgtgctcccctctgagactggagtgagagggtcttctgattcctgccgtttgttcatcgttgtgcctaaagcatgtcgatgtggcgtcaagtacatcgtccaaatccctgtctcttcagcttctctgatgcttgaactctcacctttgaccttgtgttgacctttgatgctgatgtgtatttttattatgtttgtttctttcttcgtttttttttctttttttctttcctttttttttccttttgtgctgccaaattggttttgctagaacgactgctgaaggggaaatatttaaacttgcatttgaatataaaaaaaatctatttttctagaacttcataagataaccacttgattttgtgattccaattctttgtaattgtcttcagagcagccctactagcacataccgcgtggtgtttgtatttctgtgaacacacagccagtccgtttctaggctttgtttctctgtgtgcttagttttaaagacaactttgaagtaaacaatgaaataaaagatgtcactaaaacctctgaggctcctgagcacattttgctgatacagtctgtggggcttgaggagaccgcatgtattgttctttcttttgtttttcttctgagttctcaactgcggagagcacctgaaccccctttcctttttgaccgcaggctgcactttgggccccagccagccctttttctttttctttttcttttgtggttcttccctggagcgactctggggagtcctggatatcccgcctgccccttcccctcagccccatgcttgttccaacagtctccacagcaaaatgtgatgctttgatttttttgttgttgtttttgtttttgtattgtttttgtgtttttgttttgaattttttcctttcctactaagattatgcccagaaaaaagttttgcatgtttcctgctgtttcttcacaccttcgtatatatcaccttcacctctctgttttctatagtttgtgcaaaaactgatcgatttaaaagggtttcaaagaagctgttttaaattgttgtagggttgattatttttttcaagattgtattgtttaattttgaagtggcaactttctcctctattgcccttagagcgtttgcctgtgcacttagactgtcacttcgtgtggcctccaggtcttaccggggcttccgggaggctggctgctttgctcagagagggtgggaagggggcctggagagacacgagaagcagaggtagagcctagaaggtggcagcaggtgggtaagaggcttatttagcacattaggggcagtgagcacctggaggaaggagggcgctcccaatcacccgtaggaggccatctgcacaccaagcggcaattcacctgctggcgcttttcctaggtgacaagcacaatactacagtcttcacactgtttacagccctgggcaccagccacccggcactggctcttcatcacagctctgctcttgcttagctagtggggtgggggaaagggcagggatttgtttttttaattgggtggagagccaaacagctactgtccctgggtgccaagcaagccagttttttggttccctgagggaaactgaccctcctctcttgtggcaccatccagcctcagggtcttggagacttgagtaagaatgtgagtggagggggagaggtgaggagaggagcacagggtggatctgtggagggaagaggttacagggggaggagctgatgatagatcccacccagacttaagctgctggtgggtgggtgagctgggaagtaggactgtccagggaagggtggagagatgtagctaggggctggggagggggaggtggaagcgctattgagcatcctccacaccaaggttgatgaaggaagggatcccagcagggtttctgctctggggctggcaggttgcctggtattatgcccaaggccgctctgcctgggggaaagggcagccaggcagaggcccagtgtctggtaggctgctgaatttcctggaaggggtgattggatggaaagaggccagaaaccccagcctgagagactgctgtgcaccccacagtctgactgcacagagccgcctctgttggcaggaggcactgaggctccccttcctgtgtattgagaagcagtgtttgccaatatattttgctttcaattccaagaggagctctgggaaaacctgtggataaaaccaaatgccaaatgttggacgttgtttccttttccttttctctctctgattgttttaattgttctgtggtggttttaatggatttgagaccctggagcggcagctgcctttctgatttccagctgctttttgtgaataatttaaaaagaaaaaaaaaaagaaactttacattttggagacaaacctgtgtgagttttttattggtacaaacgttgtatttaacactaggggttttgtacagttttttgccttttctactagaaaacaatgtaaagtgatttcacaatgtgaagagaaaaaaaaattgccactatgaccaaacgcacagtctgttctgcagcaacaacgggattcaatcaactcagtcgtgattcagccgtagaaatgcttttcctttatcttgtttgagcttttcctttctttcctgttttgatttgcaaaagaaaatgtcttttttgtgtgaacttgtgttgtactctgtagaaaattatggattttactttaatggtttaaaaaaaggcaaggagagcccttgtcgcttttcttacctaatcacagagtttgtgtagtgaatttaaaaagaaaaaaaaattgttataagtttggagcaagggagtatgtgtttcaaaggaatctccttcctttttttgtgtgtttttccttttgtcccaatggggaacctaaatctgttttaattgcacagacacatggacaaaaagtcattttgtatctgccaagtgtggtaccttcctttgtttatttgctattaaactgtttgagaagaa

SEQ ID NO: 408513 - DNA, 3170 bp, Homo sapiens
gccgtttgcaaccagtactgccaaggggaaggtgtaatgctgtgtccattgttagcatgtgcaaaagttccctgtcattacccaacccctgcccgcccacctcatttcagggctgtacacacagtgagtgttcctgttctctctctctttgtttggatgtattgctctgtgtaactcagtgggtctccctctttctggtttgtttttttttctagattcctgccgtttgttcatcgttgtgcctaaagcatgtcgatgtggcgtcaagtacatcgtccaaatccctgtctcttcagcttctctgatgcttgaactctcacctttgaccttgtgttgacctttgatgctgatgtgtatttttattatgtttgtttctttcttcgtttttttttctttttttctttcctttttttttccttttgtgctgccaaattggttttgctagaacgactgctgaaggggaaatatttaaacttgcatttgaatataaaaaaaatctatttttctagaacttcataagataaccacttgattttgtgattccaattctttgtaattgtcttcagagcagccctactagcacataccgcgtggtgtttgtatttctgtgaacacacagccagtccgtttctaggctttgtttctctgtgtgcttagttttaaagacaactttgaagtaaacaatgaaataaaagatgtcactaaaacctctgaggctcctgagcacattttgctgatacagtctgtggggcttgaggagaccgcatgtattgttctttcttttgtttttcttctgagttctcaactgcggagagcacctgaaccccctttcctttttgaccgcaggctgcactttgggccccagccagccctttttctttttctttttcttttgtggttcttccctggagcgactctggggagtcctggatatcccgcctgccccttcccctcagccccatgcttgttccaacagtctccacagcaaaatgtgatgctttgatttttttgttgttgtttttgtttttgtattgtttttgtgtttttgttttgaattttttcctttcctactaagattatgcccagaaaaaagttttgcatgtttcctgctgtttcttcacaccttcgtatatatcaccttcacctctctgttttctatagtttgtgcaaaaactgatcgatttaaaagggtttcaaagaagctgttttaaattgttgtagggttgattatttttttcaagattgtattgtttaattttgaagtggcaactttctcctctattgcccttagagcgtttgcctgtgcacttagactgtcacttcgtgtggcctccaggtcttaccggggcttccgggaggctggctgctttgctcagagagggtgggaagggggcctggagagacacgagaagcagaggtagagcctagaaggtggcagcaggtgggtaagaggcttatttagcacattaggggcagtgagcacctggaggaaggagggcgctcccaatcacccgtaggaggccatctgcacaccaagcggcaattcacctgctggcgcttttcctaggtgacaagcacaatactacagtcttcacactgtttacagccctgggcaccagccacccggcactggctcttcatcacagctctgctcttgcttagctagtggggtgggggaaagggcagggatttgtttttttaattgggtggagagccaaacagctactgtccctgggtgccaagcaagccagttttttggttccctgagggaaactgaccctcctctcttgtggcaccatccagcctcagggtcttggagacttgagtaagaatgtgagtggagggggagaggtgaggagaggagcacagggtggatctgtggagggaagaggttacagggggaggagctgatgatagatcccacccagacttaagctgctggtgggtgggtgagctgggaagtaggactgtccagggaagggtggagagatgtagctaggggctggggagggggaggtggaagcgctattgagcatcctccacaccaaggttgatgaaggaagggatcccagcagggtttctgctctggggctggcaggttgcctggtattatgcccaaggccgctctgcctgggggaaagggcagccaggcagaggcccagtgtctggtaggctgctgaatttcctggaaggggtgattggatggaaagaggccagaaaccccagcctgagagactgctgtgcaccccacagtctgactgcacagagccgcctctgttggcaggaggcactgaggctccccttcctgtgtattgagaagcagtgtttgccaatatattttgctttcaattccaagaggagctctgggaaaacctgtggataaaaccaaatgccaaatgttggacgttgtttccttttccttttctctctctgattgttttaattgttctgtggtggttttaatggatttgagaccctggagcggcagctgcctttctgatttccagctgctttttgtgaataatttaaaaagaaaaaaaaaaagaaactttacattttggagacaaacctgtgtgagttttttattggtacaaacgttgtatttaacactaggggttttgtacagttttttgccttttctactagaaaacaatgtaaagtgatttcacaatgtgaagagaaaaaaaaattgccactatgaccaaacgcacagtctgttctgcagcaacaacgggattcaatcaactcagtcgtgattcagccgtagaaatgcttttcctttatcttgtttgagcttttcctttctttcctgttttgatttgcaaaagaaaatgtcttttttgtgtgaacttgtgttgtactctgtagaaaattatggattttactttaatggtttaaaaaaaggcaaggagagcccttgtcgcttttcttacctaatcacagagtttgtgtagtgaatttaaaaagaaaaaaaaattgttataagtttggagcaagggagtatgtgtttcaaaggaatctccttcctttttttgtgtgtttttccttttgtcccaatggggaacctaaatctgttttaattgcacagacacatggacaaaaagtcattttgtatctgccaagtgtggtaccttcctttgtttatttgctattaaactgtttgagaagaa

SEQ ID NO: 408514 - DNA, 3270 bp, Homo sapiens
cacgaggattccagtcccgttatgtttcagcagaaatcaaggtagacgaagtaacctcttgtcctgaattttcatagttgctcattcttaataatggcagcagaagcaacaatgagagcaactacctcctcagctcaaagaaaatgaacggcaccctggaccacccagaccaaccagatcttgatgctatcaagatgtttgtgggccaggttccaaggacctggtctgaaaaggacttgcgggaactcttcgaacagtatggtgctgtgtatgaaatcaacgtcctaagggataggagccaaaacccgcctcagagcaaagggtgctgttttgttacattttacacccgtaaagctgcattagaagctcagaatgctcttcacaacatgaaagtcctcccagggatgcatcaccctatacagatgaaacctgctgacagtgagaagaacaatgcagtggaagacaggaagctgtttattggtatgatttccaagaagtgcactgaaaatgacatccgagtcatgttctcttcgtttggacagattgaagaatgccggatattgcggggacctgatggcctgagccgaggttgtgcatttgtgacttttacaacaagagccatggcacagacggctatcaaggcaatgcaccaagcacagaccatggagcagccctactagcacataccgcgtggtgtttgtatttctgtgaacacacagccagtccgtttctaggctttgtttctctgtgtgcttagttttaaagacaactttgaagtaaacaatgaaataaaagatgtcactaaaacctctgaggctcctgagcacattttgctgatacagtctgtggggcttgaggagaccgcatgtattgttctttcttttgtttttcttctgagttctcaactgcggagagcacctgaaccccctttcctttttgaccgcaggctgcactttgggccccagccagccctttttctttttctttttcttttgtggttcttccctggagcgactctggggagtcctggatatcccgcctgccccttcccctcagccccatgcttgttccaacagtctccacagcaaaatgtgatgctttgatttttttgttgttgtttttgtttttgtattgtttttgtgtttttgttttgaattttttcctttcctactaagattatgcccagaaaaaagttttgcatgtttcctgctgtttcttcacaccttcgtatatatcaccttcacctctctgttttctatagtttgtgcaaaaactgatcgatttaaaagggtttcaaagaagctgttttaaattgttgtagggttgattatttttttcaagattgtattgtttaattttgaagtggcaactttctcctctattgcccttagagcgtttgcctgtgcacttagactgtcacttcgtgtggcctccaggtcttaccggggcttccgggaggctggctgctttgctcagagagggtgggaagggggcctggagagacacgagaagcagaggtagagcctagaaggtggcagcaggtgggtaagaggcttatttagcacattaggggcagtgagcacctggaggaaggagggcgctcccaatcacccgtaggaggccatctgcacaccaagcggcaattcacctgctggcgcttttcctaggtgacaagcacaatactacagtcttcacactgtttacagccctgggcaccagccacccggcactggctcttcatcacagctctgctcttgcttagctagtggggtgggggaaagggcagggatttgtttttttaattgggtggagagccaaacagctactgtccctgggtgccaagcaagccagttttttggttccctgagggaaactgaccctcctctcttgtggcaccatccagcctcagggtcttggagacttgagtaagaatgtgagtggagggggagaggtgaggagaggagcacagggtggatctgtggagggaagaggttacagggggaggagctgatgatagatcccacccagacttaagctgctggtgggtgggtgagctgggaagtaggactgtccagggaagggtggagagatgtagctaggggctggggagggggaggtggaagcgctattgagcatcctccacaccaaggttgatgaaggaagggatcccagcagggtttctgctctggggctggcaggttgcctggtattatgcccaaggccgctctgcctgggggaaagggcagccaggcagaggcccagtgtctggtaggctgctgaatttcctggaaggggtgattggatggaaagaggccagaaaccccagcctgagagactgctgtgcaccccacagtctgactgcacagagccgcctctgttggcaggaggcactgaggctccccttcctgtgtattgagaagcagtgtttgccaatatattttgctttcaattccaagaggagctctgggaaaacctgtggataaaaccaaatgccaaatgttggacgttgtttccttttccttttctctctctgattgttttaattgttctgtggtggttttaatggatttgagaccctggagcggcagctgcctttctgatttccagctgctttttgtgaataatttaaaaagaaaaaaaaaaagaaactttacattttggagacaaacctgtgtgagttttttattggtacaaacgttgtatttaacactaggggttttgtacagttttttgccttttctactagaaaacaatgtaaagtgatttcacaatgtgaagagaaaaaaaaattgccactatgaccaaacgcacagtctgttctgcagcaacaacgggattcaatcaactcagtcgtgattcagccgtagaaatgcttttcctttatcttgtttgagcttttcctttctttcctgttttgatttgcaaaagaaaatgtcttttttgtgtgaacttgtgttgtactctgtagaaaattatggattttactttaatggtttaaaaaaaggcaaggagagcccttgtcgcttttcttacctaatcacagagtttgtgtagtgaatttaaaaagaaaaaaaaattgttataagtttggagcaagggagtatgtgtttcaaaggaatctccttcctttttttgtgtgtttttccttttgtcccaatggggaacctaaatctgttttaattgcacagacacatggacaaaaagtcattttgtatctgccaagtgtggtaccttcctttgtttatttgctattaaactgtttgagaagaa

SEQ ID NO: 408515 - DNA, 2109 bp, Homo sapiens
tgatacgatcgagccggtaccgaatctcgaaattttgcatgtttcctgctgtttcttcacaccttcgtatatatcaccttcacctctctgttttctatagtttgtgcaaaaactgatcgatttaaaagggtttcaaagaagctgttttaaattgttgtagggttgattatttttttcaagattgtattgtttaattttgaagtggcaactttctcctctattgcccttagagcgtttgcctgtgcacttagactgtcacttcgtgtggcctccaggtcttaccggggcttccgggaggctggctgctttgctcagagagggtgggaagggggcctggagagacacgagaagcagaggtagagcctagaaggtggcagcaggtgggtaagaggcttatttagcacattaggggcagtgagcacctggaggaaggagggcgctcccaatcacccgtaggaggccatctgcacaccaagcggcaattcacctgctggcgcttttcctaggtgacaagcacaatactacagtcttcacactgtttacagccctgggcaccagccacccggcactggctcttcatcacagctctgctcttgcttagctagtggggtgggggaaagggcagggatttgtttttttaattgggtggagagccaaacagctactgtccctgggtgccaagcaagccagttttttggttccctgagggaaactgaccctcctctcttgtggcaccatccagcctcagggtcttggagacttgagtaagaatgtgagtggagggggagaggtgaggagaggagcacagggtggatctgtggagggaagaggttacagggggaggagctgatgatagatcccacccagacttaagctgctggtgggtgggtgagctgggaagtaggactgtccagggaagggtggagagatgtagctaggggctggggagggggaggtggaagcgctattgagcatcctccacaccaaggttgatgaaggaagggatcccagcagggtttctgctctggggctggcaggttgcctggtattatgcccaaggccgctctgcctgggggaaagggcagccaggcagaggcccagtgtctggtaggctgctgaatttcctggaaggggtgattggatggaaagaggccagaaaccccagcctgagagactgctgtgcaccccacagtctgactgcacagagccgcctctgttggcaggaggcactgaggctccccttcctgtgtattgagaagcagtgtttgccaatatattttgctttcaattccaagaggagctctgggaaaacctgtggataaaaccaaatgccaaatgttggacgttgtttccttttccttttctctctctgattgttttaattgttctgtggtggttttaatggatttgagaccctggagcggcagctgcctttctgatttccagctgctttttgtgaataatttaaaaagaaaaaaaaaaagaaactttacattttggagacaaacctgtgtgagttttttattggtacaaacgttgtatttaacactaggggttttgtacagttttttgccttttctactagaaaacaatgtaaagtgatttcacaatgtgaagagaaaaaaaaattgccactatgaccaaacgcacagtctgttctgcagcaacaacgggattcaatcaactcagtcgtgattcagccgtagaaatgcttttcctttatcttgtttgagcttttcctttctttcctgttttgatttgcaaaagaaaatgtcttttttgtgtgaacttgtgttgtactctgtagaaaattatggattttactttaatggtttaaaaaaaggcaaggagagcccttgtcgcttttcttacctaatcacagagtttgtgtagtgaatttaaaaagaaaaaaaaattgttataagtttggagcaagggagtatgtgtttcaaaggaatctccttcctttttttgtgtgtttttccttttgtcccaatggggaacctaaatctgttttaattgcacagacacatggacaaaaagtcattttgtatctgccaagtgtggtaccttcctttgtttatttgctattaaactgtttgagaagaa

SEQ ID NO: 408516 - DNA, 2078 bp, Homo sapiens
ccggccattcaaacgcgattctcatgctgacttacctaactgccaccttcacctctctgttttctatagtttgtgcaaaaactgatcgatttaaaagggtttcaaagaagctgttttaaattgttgtagggttgattatttttttcaagattgtattgtttaattttgaagtggcaactttctcctctattgcccttagagcgtttgcctgtgcacttagactgtcacttcgtgtggcctccaggtcttaccggggcttccgggaggctggctgctttgctcagagagggtgggaagggggcctggagagacacgagaagcagaggtagagcctagaaggtggcagcaggtgggtaagaggcttatttagcacattaggggcagtgagcacctggaggaaggagggcgctcccaatcacccgtaggaggccatctgcacaccaagcggcaattcacctgctggcgcttttcctaggtgacaagcacaatactacagtcttcacactgtttacagccctgggcaccagccacccggcactggctcttcatcacagctctgctcttgcttagctagtggggtgggggaaagggcagggatttgtttttttaattgggtggagagccaaacagctactgtccctgggtgccaagcaagccagttttttggttccctgagggaaactgaccctcctctcttgtggcaccatccagcctcagggtcttggagacttgagtaagaatgtgagtggagggggagaggtgaggagaggagcacagggtggatctgtggagggaagaggttacagggggaggagctgatgatagatcccacccagacttaagctgctggtgggtgggtgagctgggaagtaggactgtccagggaagggtggagagatgtagctaggggctggggagggggaggtggaagcgctattgagcatcctccacaccaaggttgatgaaggaagggatcccagcagggtttctgctctggggctggcaggttgcctggtattatgcccaaggccgctctgcctgggggaaagggcagccaggcagaggcccagtgtctggtaggctgctgaatttcctggaaggggtgattggatggaaagaggccagaaaccccagcctgagagactgctgtgcaccccacagtctgactgcacagagccgcctctgttggcaggaggcactgaggctccccttcctgtgtattgagaagcagtgtttgccaatatattttgctttcaattccaagaggagctctgggaaaacctgtggataaaaccaaatgccaaatgttggacgttgtttccttttccttttctctctctgattgttttaattgttctgtggtggttttaatggatttgagaccctggagcggcagctgcctttctgatttccagctgctttttgtgaataatttaaaaagaaaaaaaaaaagaaactttacattttggagacaaacctgtgtgagttttttattggtacaaacgttgtatttaacactaggggttttgtacagttttttgccttttctactagaaaacaatgtaaagtgatttcacaatgtgaagagaaaaaaaaattgccactatgaccaaacgcacagtctgttctgcagcaacaacgggattcaatcaactcagtcgtgattcagccgtagaaatgcttttcctttatcttgtttgagcttttcctttctttcctgttttgatttgcaaaagaaaatgtcttttttgtgtgaacttgtgttgtactctgtagaaaattatggattttactttaatggtttaaaaaaaggcaaggagagcccttgtcgcttttcttacctaatcacagagtttgtgtagtgaatttaaaaagaaaaaaaaattgttataagtttggagcaagggagtatgtgtttcaaaggaatctccttcctttttttgtgtgtttttccttttgtcccaatggggaacctaaatctgttttaattgcacagacacatggacaaaaagtcattttgtatctgccaagtgtggtaccttcctttgtttatttgctattaaactgtttgagaagaa

SEQ ID NO: 408517 - DNA, 2003 bp, Homo sapiens
aacgctaggtagaggcggtggcggattaaagggttcaagagcgtttaatgtgtaggttgattatttttttcaagattgtattgtttaattttgaagtggcaactttctcctctattgcccttagagcgtttgcctgtgcacttagactgtcacttcgtgtggcctccaggtcttaccggggcttccgggaggctggctgctttgctcagagagggtgggaagggggcctggagagacacgagaagcagaggtagagcctagaaggtggcagcaggtgggtaagaggcttatttagcacattaggggcagtgagcacctggaggaaggagggcgctcccaatcacccgtaggaggccatctgcacaccaagcggcaattcacctgctggcgcttttcctaggtgacaagcacaatactacagtcttcacactgtttacagccctgggcaccagccacccggcactggctcttcatcacagctctgctcttgcttagctagtggggtgggggaaagggcagggatttgtttttttaattgggtggagagccaaacagctactgtccctgggtgccaagcaagccagttttttggttccctgagggaaactgaccctcctctcttgtggcaccatccagcctcagggtcttggagacttgagtaagaatgtgagtggagggggagaggtgaggagaggagcacagggtggatctgtggagggaagaggttacagggggaggagctgatgatagatcccacccagacttaagctgctggtgggtgggtgagctgggaagtaggactgtccagggaagggtggagagatgtagctaggggctggggagggggaggtggaagcgctattgagcatcctccacaccaaggttgatgaaggaagggatcccagcagggtttctgctctggggctggcaggttgcctggtattatgcccaaggccgctctgcctgggggaaagggcagccaggcagaggcccagtgtctggtaggctgctgaatttcctggaaggggtgattggatggaaagaggccagaaaccccagcctgagagactgctgtgcaccccacagtctgactgcacagagccgcctctgttggcaggaggcactgaggctccccttcctgtgtattgagaagcagtgtttgccaatatattttgctttcaattccaagaggagctctgggaaaacctgtggataaaaccaaatgccaaatgttggacgttgtttccttttccttttctctctctgattgttttaattgttctgtggtggttttaatggatttgagaccctggagcggcagctgcctttctgatttccagctgctttttgtgaataatttaaaaagaaaaaaaaaaagaaactttacattttggagacaaacctgtgtgagttttttattggtacaaacgttgtatttaacactaggggttttgtacagttttttgccttttctactagaaaacaatgtaaagtgatttcacaatgtgaagagaaaaaaaaattgccactatgaccaaacgcacagtctgttctgcagcaacaacgggattcaatcaactcagtcgtgattcagccgtagaaatgcttttcctttatcttgtttgagcttttcctttctttcctgttttgatttgcaaaagaaaatgtcttttttgtgtgaacttgtgttgtactctgtagaaaattatggattttactttaatggtttaaaaaaaggcaaggagagcccttgtcgcttttcttacctaatcacagagtttgtgtagtgaatttaaaaagaaaaaaaaattgttataagtttggagcaagggagtatgtgtttcaaaggaatctccttcctttttttgtgtgtttttccttttgtcccaatggggaacctaaatctgttttaattgcacagacacatggacaaaaagtcattttgtatctgccaagtgtggtaccttcctttgtttatttgctattaaactgtttgagaagaa

SEQ ID NO: 408518 - DNA, 1425 bp, Homo sapiens
ctagaggacccctcggtctaccttgttttcagacctcctctcttgtggcaccatccagcctcagggtcttggagacttgagtaagaatgtgagtggagggggagaggtgaggagaggagcacagggtggatctgtggagggaagaggttacagggggaggagctgatgatagatcccacccagacttaagctgctggtgggtgggtgagctgggaagtaggactgtccagggaagggtggagagatgtagctaggggctggggagggggaggtggaagcgctattgagcatcctccacaccaaggttgatgaaggaagggatcccagcagggtttctgctctggggctggcaggttgcctggtattatgcccaaggccgctctgcctgggggaaagggcagccaggcagaggcccagtgtctggtaggctgctgaatttcctggaaggggtgattggatggaaagaggccagaaaccccagcctgagagactgctgtgcaccccacagtctgactgcacagagccgcctctgttggcaggaggcactgaggctccccttcctgtgtattgagaagcagtgtttgccaatatattttgctttcaattccaagaggagctctgggaaaacctgtggataaaaccaaatgccaaatgttggacgttgtttccttttccttttctctctctgattgttttaattgttctgtggtggttttaatggatttgagaccctggagcggcagctgcctttctgatttccagctgctttttgtgaataatttaaaaagaaaaaaaaaaagaaactttacattttggagacaaacctgtgtgagttttttattggtacaaacgttgtatttaacactaggggttttgtacagttttttgccttttctactagaaaacaatgtaaagtgatttcacaatgtgaagagaaaaaaaaattgccactatgaccaaacgcacagtctgttctgcagcaacaacgggattcaatcaactcagtcgtgattcagccgtagaaatgcttttcctttatcttgtttgagcttttcctttctttcctgttttgatttgcaaaagaaaatgtcttttttgtgtgaacttgtgttgtactctgtagaaaattatggattttactttaatggtttaaaaaaaggcaaggagagcccttgtcgcttttcttacctaatcacagagtttgtgtagtgaatttaaaaagaaaaaaaaattgttataagtttggagcaagggagtatgtgtttcaaaggaatctccttcctttttttgtgtgtttttccttttgtcccaatggggaacctaaatctgttttaattgcacagacacatggacaaaaagtcattttgtatctgccaagtgtggtaccttcctttgtttatttgctattaaactgtttgagaagaa

SEQ ID NO: 408519 - DNA, 1201 bp, Homo sapiens
tcagtcggtccgcgtaatccgtacagctaggggctggggagggggaggtggaagcgctattgagcatcctccacaccaaggttgatgaaggaagggatcccagcagggtttctgctctggggctggcaggttgcctggtattatgcccaaggccgctctgcctgggggaaagggcagccaggcagaggcccagtgtctggtaggctgctgaatttcctggaaggggtgattggatggaaagaggccagaaaccccagcctgagagactgctgtgcaccccacagtctgactgcacagagccgcctctgttggcaggaggcactgaggctccccttcctgtgtattgagaagcagtgtttgccaatatattttgctttcaattccaagaggagctctgggaaaacctgtggataaaaccaaatgccaaatgttggacgttgtttccttttccttttctctctctgattgttttaattgttctgtggtggttttaatggatttgagaccctggagcggcagctgcctttctgatttccagctgctttttgtgaataatttaaaaagaaaaaaaaaaagaaactttacattttggagacaaacctgtgtgagttttttattggtacaaacgttgtatttaacactaggggttttgtacagttttttgccttttctactagaaaacaatgtaaagtgatttcacaatgtgaagagaaaaaaaaattgccactatgaccaaacgcacagtctgttctgcagcaacaacgggattcaatcaactcagtcgtgattcagccgtagaaatgcttttcctttatcttgtttgagcttttcctttctttcctgttttgatttgcaaaagaaaatgtcttttttgtgtgaacttgtgttgtactctgtagaaaattatggattttactttaatggtttaaaaaaaggcaaggagagcccttgtcgcttttcttacctaatcacagagtttgtgtagtgaatttaaaaagaaaaaaaaattgttataagtttggagcaagggagtatgtgtttcaaaggaatctccttcctttttttgtgtgtttttccttttgtcccaatggggaacctaaatctgttttaattgcacagacacatggacaaaaagtcattttgtatctgccaagtgtggtaccttcctttgtttatttgctattaaactgtttgagaagaa

SEQ ID NO: 408520 - DNA, 1262 bp, Homo sapiens
cactcagtttacacaaactatagaaaacagagaggtgaaggtgatatatacgaaggtgtgaagaaacagcaggaaacatgcaaaacttttttctgggcatatcttagcaggaaaggaaaaaattcaaaacaaaaacacaaaaacaatacaaaaacaaaaacaacaacaaaaaaatcaaagcatcacattttgctgtggagactgttggaacaagcatggggcctgggggaaagggcagccaggcagaggcccagtgtctggtaggctgctgaatttcctggaaggggtgattggatggaaagaggccagaaaccccagcctgagagactgctgtgcaccccacagtctgactgcacagagccgcctctgttggcaggaggcactgaggctccccttcctgtgtattgagaagcagtgtttgccaatatattttgctttcaattccaagaggagctctgggaaaacctgtggataaaaccaaatgccaaatgttggacgttgtttccttttccttttctctctctgattgttttaattgttctgtggtggttttaatggatttgagaccctggagcggcagctgcctttctgatttccagctgctttttgtgaataatttaaaaagaaaaaaaaaaagaaactttacattttggagacaaacctgtgtgagttttttattggtacaaacgttgtatttaacactaggggttttgtacagttttttgccttttctactagaaaacaatgtaaagtgatttcacaatgtgaagagaaaaaaaaattgccactatgaccaaacgcacagtctgttctgcagcaacaacgggattcaatcaactcagtcgtgattcagccgtagaaatgcttttcctttatcttgtttgagcttttcctttctttcctgttttgatttgcaaaagaaaatgtcttttttgtgtgaacttgtgttgtactctgtagaaaattatggattttactttaatggtttaaaaaaaggcaaggagagcccttgtcgcttttcttacctaatcacagagtttgtgtagtgaatttaaaaagaaaaaaaaattgttataagtttggagcaagggagtatgtgtttcaaaggaatctccttcctttttttgtgtgtttttccttttgtcccaatggggaacctaaatctgttttaattgcacagacacatggacaaaaagtcattttgtatctgccaagtgtggtaccttcctttgtttatttgctattaaactgtttgagaagaa

SEQ ID NO: 408521 - DNA, 1259 bp, Homo sapiens
ggacgcgtgggtcgccaaaatgggaaaggaaaagactcatatcaacattgtcgtcattggacacgtagattcgggcaagtccaccactactggccatctgatctataaatgcggtggcatcgacaaaagaaccattgaaaaatttgagaaggaggctgctgagatgggaaagggctccttcaagtatgcctgggtcttggataaactgaaagctgagcgtgaacgtggtatcaccattgatatctccttgtggaaatttgagaccagcaagtactatgtgactatcattgatgccccaggacacagagactttatcaaaaacatgattacagggacatctcaggctgactgtgctgtcctgattgttgctgctggtgtaggtgaatttgaagctggtatctccaagaatgggcagacccgagagcatgcccttctggcttacacactgggtgtgaaacaactaattgtcggtgttaacaaaatggattccactgagccaccctacagccagaagagatatgaggaaattgtaactgtctgtggtggttttaatggatttgagaccctggagcggcagctgcctttctgatttccagctgctttttgtgaataatttaaaaagaaaaaaaaaaagaaactttacattttggagacaaacctgtgtgagttttttattggtacaaacgttgtatttaacactaggggttttgtacagttttttgccttttctactagaaaacaatgtaaagtgatttcacaatgtgaagagaaaaaaaaattgccactatgaccaaacgcacagtctgttctgcagcaacaacgggattcaatcaactcagtcgtgattcagccgtagaaatgcttttcctttatcttgtttgagcttttcctttctttcctgttttgatttgcaaaagaaaatgtcttttttgtgtgaacttgtgttgtactctgtagaaaattatggattttactttaatggtttaaaaaaaggcaaggagagcccttgtcgcttttcttacctaatcacagagtttgtgtagtgaatttaaaaagaaaaaaaaattgttataagtttggagcaagggagtatgtgtttcaaaggaatctccttcctttttttgtgtgtttttccttttgtcccaatggggaacctaaatctgttttaattgcacagacacatggacaaaaagtcattttgtatctgccaagtgtggtaccttcctttgtttatttgctattaaactgtttgagaagaa

SEQ ID NO: 408522 - DNA, 530 bp, Homo sapiens
ttcgagttcggtacccaatcagtttacacaatgtgaagagaaaaaaaaattgccactatgaccaaacgcacagtctgttctgcagcaacaacgggattcaatcaactcagtcgtgattcagccgtagaaatgcttttcctttatcttgtttgagcttttcctttctttcctgttttgatttgcaaaagaaaatgtcttttttgtgtgaacttgtgttgtactctgtagaaaattatggattttactttaatggtttaaaaaaaggcaaggagagcccttgtcgcttttcttacctaatcacagagtttgtgtagtgaatttaaaaagaaaaaaaaattgttataagtttggagcaagggagtatgtgtttcaaaggaatctccttcctttttttgtgtgtttttccttttgtcccaatggggaacctaaatctgttttaattgcacagacacatggacaaaaagtcattttgtatctgccaagtgtggtaccttcctttgtttatttgctattaaactgtttgagaagaa

SEQ ID NO: 408523 - DNA, 695 bp, Homo sapiens
cacgaggattccagtcccgttatgtttcagcagaaatcaaggtagacgaagtaacctcttgtcctgaattttcatagttgctcattcttaataatggcagcagaagcaacaatgagagcaactacctcctcagctcaaagaaaatgaacggcaccctggaccacccagaccaaccagatcttgatgctatcaagatgtttgtgggccaggttccaaggacctggtctgaaaaggacttgcgggaactcttcgaacagtatggtgctgtgtatgaaatcaacgtcctaagggataggagccaaaacccgcctcagagcaaagggtgctgttttgttacattttacacccgtaaagctgcattagaagctcagaatgctcttcacaacatgaaagtcctcccagggatgcatcaccctatacagatgaaacctgctgacagtgagaagaacaatgcagtggaagacaggaagctgtttattggtatgatttccaagaagtgcactgaaaatgacatccgagtcatgttctcttcgtttggacagattgaagaatgccggatattgcggggacctgatggcctgagccgaggttgtgcatttcgacatttactaacaagagcatggacagacggcataaggcatgcacatagcagaccgggatctgtagagtcacctgagatgcaagtgactgtttat

SEQ ID NO: 408524 - DNA, 271 bp, Homo sapiens
aaggtaatggggagcacaacacccgcgtatggcatttcttaatgtccccattagcaaggcctggtgaatgtcctgaaatctagccagtcagatagtttcttctcagggagaaactaagagggagataaaggggagaactttggagttttccctcttctagatgtcccaagtagacttgtctttggcatcagtttagtctttctagtatattaatccttctcttcctccaaccaaggaatggctgctttaaatggtggcctgggcagcagtg

SEQ ID NO: 408525 - DNA, 410 bp, Homo sapiens
tgagaggggaaaagaaaggagaaagagaagagagtgttcaagaattttgaacaaatacatactttgaaaataacagctcttttttgttccctcgtgtgtctcttcccaattgtatccctattgtattttctcatagtatgtttcagcagaaatcaaggtagacgaagtaacctcttgtcctgaattttcatagttgctcattcttaataatggcagcagaagcaacaatgagagcaactacctcctcaggtattactattactgcttctgctgccagtagtagaaacataaaaagagagggggtaggtttcatccctttcccctaaaacacttgccactttctgatcttcctcctcttcacattcttgcaggccctgatttgcctttcttctatcctgttcccaggtcag

SEQ ID NO: 408526 - DNA, 4615 bp, Homo sapiens
tattgttcggtgttctgctctggcggcagcggcagcggcggcgggacgcggaggctcccccgggattcggcctcagcagcgaggcggcggcggcggctgcggaggcgcaggcagcaactgaggcagcggcaggctcaggtgcagccgctgctcaaagaaaatgaacggcaccctggaccacccagaccaaccagatcttgatgctatcaagatgtttgtgggccaggttccaaggacctggtctgaaaaggacttgcgggaactcttcgaacagtatggtgctgtgtatgaaatcaacgtcctaagggataggagccaaaacccgcctcagagcaaagggtgctgttttgttacattttacacccgtaaagctgcattagaagctcagaatgctcttcacaacatgaaagtcctcccagggatgcatcaccctatacagatgaaacctgctgacagtgagaagaacaatgcagtggaagacaggaagctgtttattggtatgatttccaagaagtgcactgaaaatgacatccgagtcatgttctcttcgtttggacagattgaagaatgccggatattgcggggacctgatggcctgagccgaggttgtgcatttgtgacttttacaacaagagccatggcacagacggctatcaaggcaatgcaccaagcacagaccatggagggttgctcatcacccatggtggtaaaatttgctgatacacagaaggacaaagaacagaagagaatggcccagcagctccagcagcagatgcagcaaatcagcgcagcatctgtgtggggaaaccttgctggtctaaatactcttggaccccagtatttagcactttatttgcagctccttcagcagactgcctcctctgggaacctcaacaccctgagcagcctccacccaatgggagggttgaatgcaatgcagttacagaatttggctgcactagctgctgcagctagtgcagctcagaacacaccaagtggtaccaatgctctcactacatccagcagtcccctcagcgtgctcactagttcagggtcctcacctagctctagcagcagtaattctgtcaaccccatagcctcacttggagccctgcagacattagctggagcaacggctggcctcaatgttggctctttggcaggaatggctgctttaaatggtggcctgggcagcagtggcctttccaatggcaccgggagcaccatggaggccctcactcaggcctactcgggtatccagcaatatgctgctgctgcgctccccactctgtacaaccagaatcttctgacacagcagagtattggtgctgctggaagccagaaggaaggtccagagggagccaacctgttcatctaccacctgccccaggagtttggtgatcaggacctgctgcagatgtttatgccctttgggaatgtcgtgtctgccaaggttttcatagacaagcagacaaacctgagcaagtgttttggttttgtaagttacgacaatcctgtttcggcccaagctgccatccagtccatgaacggctttcagattggcatgaagcggcttaaagtgcagctcaaacgttcgaagaatgacagcaagccctactgagcgtgctcccctctgagactggagtgagagggtcttctgattcctgccgtttgttcatcgttgtgcctaaagcatgtcgatgtggcgtcaagtacatcgtccaaatccctgtctcttcagcttctctgatgcttgaactctcacctttgaccttgtgttgacctttgatgctgatgtgtatttttattatgtttgtttctttcttcgtttttttttctttttttctttcctttttttttccttttgtgctgccaaattggttttgctagaacgactgctgaaggggaaatatttaaacttgcatttgaatataaaaaaaatctatttttctagaacttcataagataaccacttgattttgtgattccaattctttgtaattgtcttcagagcagccctactagcacataccgcgtggtgtttgtatttctgtgaacacacagccagtccgtttctaggctttgtttctctgtgtgcttagttttaaagacaactttgaagtaaacaatgaaataaaagatgtcactaaaacctctgaggctcctgagcacattttgctgatacagtctgtggggcttgaggagaccgcatgtattgttctttcttttgtttttcttctgagttctcaactgcggagagcacctgaaccccctttcctttttgaccgcaggctgcactttgggccccagccagccctttttctttttctttttcttttgtggttcttccctggagcgactctggggagtcctggatatcccgcctgccccttcccctcagccccatgcttgttccaacagtctccacagcaaaatgtgatgctttgatttttttgttgttgtttttgtttttgtattgtttttgtgtttttgttttgaattttttcctttcctactaagattatgcccagaaaaaagttttgcatgtttcctgctgtttcttcacaccttcgtatatatcaccttcacctctctgttttctatagtttgtgcaaaaactgatcgatttaaaagggtttcaaagaagctgttttaaattgttgtagggttgattatttttttcaagattgtattgtttaattttgaagtggcaactttctcctctattgcccttagagcgtttgcctgtgcacttagactgtcacttcgtgtggcctccaggtcttaccggggcttccgggaggctggctgctttgctcagagagggtgggaagggggcctggagagacacgagaagcagaggtagagcctagaaggtggcagcaggtgggtaagaggcttatttagcacattaggggcagtgagcacctggaggaaggagggcgctcccaatcacccgtaggaggccatctgcacaccaagcggcaattcacctgctggcgcttttcctaggtgacaagcacaatactacagtcttcacactgtttacagccctgggcaccagccacccggcactggctcttcatcacagctctgctcttgcttagctagtggggtgggggaaagggcagggatttgtttttttaattgggtggagagccaaacagctactgtccctgggtgccaagcaagccagttttttggttccctgagggaaactgaccctcctctcttgtggcaccatccagcctcagggtcttggagacttgagtaagaatgtgagtggagggggagaggtgaggagaggagcacagggtggatctgtggagggaagaggttacagggggaggagctgatgatagatcccacccagacttaagctgctggtgggtgggtgagctgggaagtaggactgtccagggaagggtggagagatgtagctaggggctggggagggggaggtggaagcgctattgagcatcctccacaccaaggttgatgaaggaagggatcccagcagggtttctgctctggggctggcaggttgcctggtattatgcccaaggccgctctgcctgggggaaagggcagccaggcagaggcccagtgtctggtaggctgctgaatttcctggaaggggtgattggatggaaagaggccagaaaccccagcctgagagactgctgtgcaccccacagtctgactgcacagagccgcctctgttggcaggaggcactgaggctccccttcctgtgtattgagaagcagtgtttgccaatatattttgctttcaattccaagaggagctctgggaaaacctgtggataaaaccaaatgccaaatgttggacgttgtttccttttccttttctctctctgattgttttaattgttctgtggtggttttaatggatttgagaccctggagcggcagctgcctttctgatttccagctgctttttgtgaataatttaaaaagaaaaaaaaaaagaaactttacattttggagacaaacctgtgtgagttttttattggtacaaacgttgtatttaacactaggggttttgtacagttttttgccttttctactagaaaacaatgtaaagtgatttcacaatgtgaagagaaaaaaaaattgccactatgaccaaacgcacagtctgttctgcagcaacaacgggattcaatcaactcagtcgtgattcagccgtagaaatgcttttcctttatcttgtttgagcttttcctttctttcctgttttgatttgcaaaagaaaatgtcttttttgtgtgaacttgtgttgtactctgtagaaaattatggattttactttaatggtttaaaaaaaggcaaggagagcccttgtcgcttttcttacctaatcacagagtttgtgtagtgaatttaaaaagaaaaaaaaattgttataagtttggagcaagggagtatgtgtttcaaaggaatctccttcctttttttgtgtgtttttccttttgtcccaatggggaacctaaatctgttttaattgcacagacacatggacaaaaagtcattttgtatctgccaagtgtggtaccttcctttgtttatttgctattaaactgtttgagaagaa

SEQ ID NO: 408527 - DNA, 5083 bp, Homo sapiens
acttccggatctttgcgaatcgtggtgctgctgcaagccagttaggaaggtccagagggagccaacctgttcatctaccacctgccccaggagtttggtgatcaggacctgctgcagatgtttatgccctttgggaatgtcgtgtctgccaaggttttcatagacaagcagacaaacctgagcaagtgttttggttttgtaagttacgacaatcctgtttcggcccaagctgccatccagtccatgaacggctttcagattggcatgaagcggcttaaagtgcagctcaaacgttcgaagaatgacagcaagccctactgagcgtgctcccctctgagactggagtgagagggtcttctggcacagcttgccctgaagactcggctactgccttctgtgggagtttcgcttcgtacagaggacaagtttgtgctttggtttccagtgttttactttggagtttaggtagctggtggtgttggattatcccattgaagctgggacagctgttcctttctcatagtgataacttgggtctgttgtcctctaaggaacgtgaaacatacacttcttaagctgaaccacgtaaacttgaaattctgcgcactgggagaaatgtgtcctgtgtttcaaaggataaaactgttctaaaggcttccagggtcatgatgggattttttaaataaatgcaaaaaataaaaataaaaaagaaaaaagaaaacaaaaaaaaaaaagaaaaaaatgctaggttggggaggcgctgttctgaatcccaaccggctggaaccaagaatgtcgtttctatttttatagaagttttatacagctccggggtggagaatatttattacctaaattatatctctggaaaaggccaggattttgtagaatccagaatgtgattgttatacacacagggtgctgtgtatgattgaaactactgactttctgtggcccgtttgcagcccagctaacctgcccaaggggaaggtgttaatgctgtgaattggcagaggagagagctgtgctccatagggtgctgccggtgctgtgctccctagccttctgttctgtcttcctccttagccagaacgccactcccttcccacatccccttcttctctccgccttcccccatctcaccattatttgtccatggatttgtcctgggctctgggaccttatgaaacccctttcctaatgacataagaggccaaggtgcaatccacccacctttgataccagaccctgagggcttcatacctgctgatgggttttcttttctaaaaggaatgctcgccccagcagggtcctgggctgcttgagcagccagctggtgagaccatgcacttctctgttctctcctccccctgcccagtgagttagcacagcagtagcactgcccttgagcacagttctttccccaggccaaagatggttttgtgaagaagctgctcccctacaagtctcacgtgtgaaagggctcagctcagagtggagactcgctgtcaagtcttaagcaatccttttctgttgtgtgaaggtttcacttacaatgtgttttctgctgtagttttgtttcttacttgggttacatcatgaaattgatttgccttgaatgcagccagaccactgtctcctgggttccccttgagtggccaggcctggatggaagctaagagcttggatttctgggaacaaagggccatccccataagattgagcagaaattctggtcctcttccctgaaaaattttccccaccccagccagcatcttctgcttccccttgggttgtgaccagggagtggggagagaggctgaggctctgctcccctggagaccttctcttaggagttgggtgcttcatggaaaatccaagccttaggttcccttctgtctctggcaattagatgtgttcttggtgtcctccatgtcctttttgacttttccctgtgtccattgttagcatgtgcaaaagttccctgtcattacccaacccctgcccgcccacctcatttcagggctgtacacacagtgagtgttcctgttctctctctctttgtttggatgtattgctctgtgtaactcagtgggtctccctctttctggtttgtttttttttctagattcctgccgtttgttcatcgttgtgcctaaagcatgtcgatgtggcgtcaagtacatcgtccaaatccctgtctcttcagcttctctgatgcttgaactctcacctttgaccttgtgttgacctttgatgctgatgtgtatttttattatgtttgtttctttcttcgtttttttttctttttttctttcctttttttttccttttgtgctgccaaattggttttgctagaacgactgctgaaggggaaatatttaaacttgcatttgaatataaaaaaaatctatttttctagaacttcataagataaccacttgattttgtgattccaattctttgtaattgtcttcagagcagccctactagcacataccgcgtggtgtttgtatttctgtgaacacacagccagtccgtttctaggctttgtttctctgtgtgcttagttttaaagacaactttgaagtaaacaatgaaataaaagatgtcactaaaacctctgaggctcctgagcacattttgctgatacagtctgtggggcttgaggagaccgcatgtattgttctttcttttgtttttcttctgagttctcaactgcggagagcacctgaaccccctttcctttttgaccgcaggctgcactttgggccccagccagccctttttctttttctttttcttttgtggttcttccctggagcgactctggggagtcctggatatcccgcctgccccttcccctcagccccatgcttgttccaacagtctccacagcaaaatgtgatgctttgatttttttgttgttgtttttgtttttgtattgtttttgtgtttttgttttgaattttttcctttcctactaagattatgcccagaaaaaagttttgcatgtttcctgctgtttcttcacaccttcgtatatatcaccttcacctctctgttttctatagtttgtgcaaaaactgatcgatttaaaagggtttcaaagaagctgttttaaattgttgtagggttgattatttttttcaagattgtattgtttaattttgaagtggcaactttctcctctattgcccttagagcgtttgcctgtgcacttagactgtcacttcgtgtggcctccaggtcttaccggggcttccgggaggctggctgctttgctcagagagggtgggaagggggcctggagagacacgagaagcagaggtagagcctagaaggtggcagcaggtgggtaagaggcttatttagcacattaggggcagtgagcacctggaggaaggagggcgctcccaatcacccgtaggaggccatctgcacaccaagcggcaattcacctgctggcgcttttcctaggtgacaagcacaatactacagtcttcacactgtttacagccctgggcaccagccacccggcactggctcttcatcacagctctgctcttgcttagctagtggggtgggggaaagggcagggatttgtttttttaattgggtggagagccaaacagctactgtccctgggtgccaagcaagccagttttttggttccctgagggaaactgaccctcctctcttgtggcaccatccagcctcagggtcttggagacttgagtaagaatgtgagtggagggggagaggtgaggagaggagcacagggtggatctgtggagggaagaggttacagggggaggagctgatgatagatcccacccagacttaagctgctggtgggtgggtgagctgggaagtaggactgtccagggaagggtggagagatgtagctaggggctggggagggggaggtggaagcgctattgagcatcctccacaccaaggttgatgaaggaagggatcccagcagggtttctgctctggggctggcaggttgcctggtattatgcccaaggccgctctgcctgggggaaagggcagccaggcagaggcccagtgtctggtaggctgctgaatttcctggaaggggtgattggatggaaagaggccagaaaccccagcctgagagactgctgtgcaccccacagtctgactgcacagagccgcctctgttggcaggaggcactgaggctccccttcctgtgtattgagaagcagtgtttgccaatatattttgctttcaattccaagaggagctctgggaaaacctgtggataaaaccaaatgccaaatgttggacgttgtttccttttccttttctctctctgattgttttaattgttctgtggtggttttaatggatttgagaccctggagcggcagctgcctttctgatttccagctgctttttgtgaataatttaaaaagaaaaaaaaaaagaaactttacattttggagacaaacctgtgtgagttttttattggtacaaacgttgtatttaacactaggggttttgtacagttttttgccttttctactagaaaacaatgtaaagtgatttcacaatgtgaagagaaaaaaaaattgccactatgaccaaacgcacagtctgttctgcagcaacaacgggattcaatcaactcagtcgtgattcagccgtagaaatgcttttcctttatcttgtttgagcttttcctttctttcctgttttgatttgcaaaagaaaatgtcttttttgtgtgaacttgtgttgtactctgtagaaaattatggattttactttaatggtttaaaaaaaggcaaggagagcccttgtcgcttttcttacctaatcacagagtttgtgtagtgaatttaaaaagaaaaaaaaattgttataagtttggagcaagggagtatgtgtttcaaaggaatctccttcctttttttgtgtgtttttccttttgtcccaatggggaacctaaatctgttttaattgcacagacacatggacaaaaagtcattttgtatctgccaagtgtggtaccttcctttgtttatttgctattaaactgtttgagaagaa

SEQ ID NO: 408528 - DNA, 4209 bp, Homo sapiens
tattgttcggtgttctgctctggcggcagcggcagcggcggcgggacgcggaggctcccccgggattcggcctcagcagcgaggcggcggcggcggctgcggaggcgcaggcagcaactgaggcagcggcaggctcaggtgcagccgctgctcaaagaaaatgaacggcaccctggaccacccagaccaaccagatcttgatgctatcaagatgtttgtgggccaggttccaaggacctggtctgaaaaggacttgcgggaactcttcgaacagtatggtgctgtgtatgaaatcaacgtcctaagggataggagccaaaacccgcctcagagcaaagggtgctgttttgttacattttacacccgtaaagctgcattagaagctcagaatgctcttcacaacatgaaagtcctcccagggatgcatcaccctatacagatgaaacctgctgacagtgagaagaacaatgcagtggaagacaggaagctgtttattggtatgatttccaagaagtgcactgaaaatgacatccgagtcatgttctcttcgtttggacagattgaagaatgccggatattgcggggacctgatggcctgagccgaggttgtgcatttgtgacttttacaacaagagccatggcacagacggctatcaaggcaatgcaccaagcacagaccatggagggttgctcatcacccatggtggtaaaatttgctgatacacagaaggacaaagaacagaagagaatggcccagcagctccagcagcagatgcagcaaatcagcgcagcatctgtgtggggaaaccttgctggtctaaatactcttggaccccagtatttagcactttatttgcagctccttcagcagactgcctcctctgggaacctcaacaccctgagcagcctccacccaatgggagggttgaatgcaatgcagttacagaatttggctgcactagctgctgcagctagtgcagctcagaacacaccaagtggtaccaatgctctcactacatccagcagtcccctcagcgtgctcactagttcagggtcctcacctagctctagcagcagtaattctgtcaaccccatagcctcacttggagccctgcagacattagctggagcaacggctggcctcaatgttggctctttggcaggaatggctgctttaaatggtggcctgggcagcagtggcctttccaatggcaccgggagcaccatggaggccctcactcaggcctactcgggtatccagcaatatgctgctgctgcgctccccactctgtacaaccagaatcttctgacacagcagagtattggtgctgctggaagccagaaggaaggtccagagggagccaacctgttcatctaccacctgccccaggagtttggtgatcaggacctgctgcagatgtttatgccctttgggaatgtcgtgtctgccaaggttttcatagacaagcagacaaacctgagcaagtgttttggttttgtaagttacgacaatcctgtttcggcccaagctgccatccagtccatgaacggctttcagattggcatgaagcggcttaaagtgcagctcaaacgttcgaagaatgacagcaagccctactgagcgtgctcccctctgagactggagtgagagggtcttctggtaagtgggggaggagcacccttaatgattcgaagccctgaggctgtgtgttgacagccctggaccctgatccctgccactctcgcaggcacagcttgccctgaagactcggctactgccttctgtgggagtttcgcttcgtacagaggacaagtttgtgctttggtttccagtgttttactttggagtttaggtgccatatcctgaggttttttttgtttttgtttttgtttctcctttatttaaagtttgctgtgtttgtaaccagtgtgtgttgagaaggaccaacaccaaaccaccctggggaagggggacagggaaacatttaacacagacgatgatcaggatttgccccaaaccaccccaagagagaggactgagtggaacaaaaaagtgacccccagaacctctcttagtgtgagggtgggtagaatgagaactgacacctgggagctgtggggagcagagcggctttggggaagagtggagtgactagacacctaatgccctggcagctggagactcaaactcctgtacagctaccttctgggaaatagtttttgacacctatttttcagattcttgtccggaatttctgctgctcttttcaaaaaagggcattaacaattctctggaaataaagcacctgttagcctgacatatgcaaaaagcagggcggcatcacccattacgagctcccccagccagcagtcagtattggattggccttgcctggctggtggcagtttgggagaaacagccaaagaggttagtttatttcaacaccaaattagaccatggcccatttccaacgggtctctttaaaggcctctatggaatacattgcctggtttccttctttgcagttcaccacagcaaggaatgtcacctccatcccaagccaccattttctcatgaaggcaaatccaagaagggcttgcagttcttgctgaagggggtaccatttgtgggcagagtgatcaataccatctagttgggggaggaggagcttatttcttggtgtacttgaatcagaaggtccctgcaagccagtatgcttcatttgccagtggccagaaattctcccttgcctccttgattgaggtgtcccagatgtagtattcccacaggggtctggcaggcccctcctgtaaccactccagtcacattttctgctcttgaggcagaggtgacatcaggacgtttacagcctccacatgaattgagtgttcatttacctcagtattaccgtgttcatttttgtcctcgtgctacagttagctccctgccgcctcttgcaggtcttacttcagctcttgcctgtgacccacacagcttctgggctctgcctctgctctaagaagtgctgtgggggtagagaaccaggaaggacatgctgttgggaatgtacacctgggcagaggtggccctgttaagatgtgactgtagccacagccagggatgggatccctgggtctctggaatctgaaacctcaacaaataccagtcttgacccctagcagcagagataagaataaaggggttggtttgctattaagtcagatgggggctctctccttgtcatgctgtccctgtgggtaacagacagggattgaccatcttactgttgtacaggtagctggtggtgttggattatcccattgaagctgggacagctgttcctttctcatagtgataacttgggtctgttgtcctctaaggaacgtgaaacatacacttcttaagctgaaccacgtaaacttgaaattctgcgcactgggagaaatgtgtcctgtgtttcaaaggataaaactgttctaaaggcttccagggtcatgatgggattttttaaataaatgcaaaaaataaaaataaaaaagaaaaaagaaaacaaaaaaaaaaaagaaaaaaatgctaggttggggaggcgctgttctgaatcccaaccggctggaaccaagaatgtcgtttctatttttatagaagttttatacagctccggggtggagaatatttattacctaaattatatctctggaaaaggccaggattttgtagaatccagaatgtgattgttatacacacagggtgctgtgtatgattgaaactactgactttctgtggcccgtttgcagcccagctaacctgcccaaggggaaggtgttaatgctgtgaattggcagaggagagagctgtgctccatagggtgctgccggtgctgtgctccctagccttctgttctgtcttcctccttagccagaacgccactcccttcccacatccccttcttctctccgccttcccccatctcaccattatttgtccatggatttgtcctgggctctgggaccttatgaaacccctttcctaatgacataagaggccaaggtgcaatccacccacctttgataccagaccctgagggcttcatacctgctgatgggttttcttttctaaaaggaatgctcgccccagcagggtcctgggctgcttgagcagccagctggtgagaccatgcacttctctgtctagggggatctctagatacc

SEQ ID NO: 408529 - DNA, 2965 bp, Homo sapiens
tattgttcggtgttctgctctggcggcagcggcagcggcggcgggacgcggaggctcccccgggattcggcctcagcagcgaggcggcggcggcggctgcggaggcgcaggcagcaactgaggcagcggcaggctcaggtgcagccgctgctcaaagaaaatgaacggcaccctggaccacccagaccaaccagatcttgatgctatcaagatgtttgtgggccaggttccaaggacctggtctgaaaaggacttgcgggaactcttcgaacagtatggtgctgtgtatgaaatcaacgtcctaagggataggagccaaaacccgcctcagagcaaagggtgctgttttgttacattttacacccgtaaagctgcattagaagctcagaatgctcttcacaacatgaaagtcctcccagggatgcatcaccctatacagatgaaacctgctgacagtgagaagaacaatgcagtggaagacaggaagctgtttattggtatgatttccaagaagtgcactgaaaatgacatccgagtcatgttctcttcgtttggacagattgaagaatgccggatattgcggggacctgatggcctgagccgaggttgtgcatttgtgacttttacaacaagagccatggcacagacggctatcaaggcaatgcaccaagcacagaccatggagggttgctcatcacccatggtggtaaaatttgctgatacacagaaggacaaagaacagaagagaatggcccagcagctccagcagcagatgcagcaaatcagcgcagcatctgtgtggggaaaccttgctggtctaaatactcttggaccccagtatttagcactttatttgcagctccttcagcagactgcctcctctgggaacctcaacaccctgagcagcctccacccaatgggagggttgaatgcaatgcagttacagaatttggctgcactagctgctgcagctagtgcagctcagaacacaccaagtggtaccaatgctctcactacatccagcagtcccctcagcgtgctcactagttcagggtcctcacctagctctagcagcagtaattctgtcaaccccatagcctcacttggagccctgcagacattagctggagcaacggctggcctcaatgttggctctttggcaggaatggctgctttaaatggtggcctgggcagcagtggcctttccaatggcaccgggagcaccatggaggccctcactcaggcctactcgggtatccagcaatatgctgctgctgcgctccccactctgtacaaccagaatcttctgacacagcagagtattggtgctgctggaagccagaaggaaggtccagagggagccaacctgttcatctaccacctgccccaggagtttggtgatcaggacctgctgcagatgtttatgccctttgggaatgtcgtgtctgccaaggttttcatagacaagcagacaaacctgagcaagtgttttggttttgtaagttacgacaatcctgtttcggcccaagctgccatccagtccatgaacggctttcagattggcatgaagcggcttaaagtgcagctcaaacgttcgaagaatgacagcaagccctactgagcgtgctcccctctgagactggagtgagagggtcttctggtaagtgggggaggagcacccttaatgattcgaagccctgaggctgtgtgttgacagccctggaccctgatccctgccactctcgcaggcacagcttgccctgaagactcggctactgccttctgtgggagtttcgcttcgtacagaggacaagtttgtgctttggtttccagtgttttactttggagtttaggtgccatatcctgaggttttttttgtttttgtttttgtttctcctttatttaaagtttgctgtgtttgtaaccagtgtgtgttgagaaggaccaacaccaaaccaccctggggaagggggacagggaaacatttaacacagacgatgatcaggatttgccccaaaccaccccaagagagaggactgagtggaacaaaaaagtgacccccagaacctctcttagtgtgagggtgggtagaatgagaactgacacctgggagctgtggggagcagagcggctttggggaagagtggagtgactagacacctaatgccctggcagctggagactcaaactcctgtacagctaccttctgggaaatagtttttgacacctatttttcagattcttgtccggaatttctgctgctcttttcaaaaaagggcattaacaattctctggaaataaagcacctgttagcctgacatatgcaaaaagcagggcggcatcacccattacgagctcccccagccagcagtcagtattggattggccttgcctggctggtggcagtttgggagaaacagccaaagaggttagtttatttcaacaccaaattagaccatggcccatttccaacgggtctctttaaaggcctctatggaatacattgcctggtttccttctttgcagttcaccacagcaaggaatgtcacctccatcccaagccaccattttctcatgaaggcaaatccaagaagggcttgcagttcttgctgaagggggtaccatttgtgggcagagtgatcaataccatctagttgggggaggaggagcttatttcttggtgtacttgaatcagaaggtccctgcaagccagtatcgcttttcttacctaatcacagagtttgtgtagtgaatttaaaaagaaaaaaaaattgttataagtttggagcaagggagtatgtgtttcaaaggaatctccttcctttttttgtgtgtttttccttttgtcccaatggggaacctaaatctgttttaattgcacagacacatggacaaaaagtcattttgtatctgccaagtgtggtaccttcctttgtttatttgctattaaactgtttgagaagaa

SEQ ID NO: 408530 - DNA, 1100 bp, Homo sapiens
tattgttcggtgttctgctctggcggcagcggcagcggcggcgggacgcggaggctcccccgggattcggcctcagcagcgaggcggcggcggcggctgcggaggcgcaggcagcaactgaggcagcggcaggctcaggtgcagccgctgctcaaagaaaatgaacggcaccctggaccacccagaccaaccagatcttgatgctatcaagatgtttgtgggccaggttccaaggacctggtctgaaaaggacttgcgggaactcttcgaacagtatggtgctgtgtatgaaatcaacgtcctaagggataggagccaaaacccgcctcagagcaaagggtgctgttttgttacattttacacccgtaaagctgcattagaagctcagaatgctcttcacaacatgaaagtcctcccagggatgcatcaccctatacagatgaaacctgctgacagtgagaagaacaatgcagtggaagacaggaagctgtttattggtatgatttccaagaagtgcactgaaaatgacatccgagtcatgttctcttcgtttggacagattgaagaatgccggatattgcggggacctgatggcctgagccgaggttgtgcatttgtgacttttacaacaagagccatggcacagacggctatcaaggcaatgcaccaagcacagaccatggagggttgctcatcacccatggtggtaaaatttgctgatacacagaaggacaaagaacagaagagaatggcccagcagctccagcagcagatgcagcaaatcagcgcagcatctgtgtggggaaaccttgctggtctaaatactcttggaccccagtatttagcagtgagtctttgtggtttgctttctgcagactgtgcaagctcccagctgttccttcttctgctgtccctagccaacaaacacagtggcatttacaacttttggcatatagaaattatatgtaaaaattcaggtagtactatttcttttagtcctgttagtctctttctctctatatatatatgtatctctggacatgcatctctggttatatcttgaggcttttgctgcaactaaagtgaattcctggtttccc

SEQ ID NO: 408531 - DNA, 706 bp, Homo sapiens
tcgtgccgaattcggcagagtcatggttatactcatgacagtcgggctgtgaagtttttgtttgagattctcagtagttttgataatgagcagcagaggttatttctccagtttgtgactggtagcccaagattgcctgttggaggattccggagtttgaatccacctttgacaattgtccgaaagacgtttgaatcaacagaaaacccagatgacttcttgccctctgtaatgacttgtgtgaactatcttaagttgccggactattcaagcattgagataatgcgtgaaaaactgttgatagcagcaagagaagggcagcagtcgttccatctttcctgatcatagcaagaaatgcagtgtctgcctgttacagcaaaagaaacaaatcatgatttcttttctaatgttatcacctgagtcaaggaaacatgttacgccttcttgttgtaggaaaaacggcttgcagattataaagagacatttggttgatattcattaatggccccatggacttaaagtgatcaggccctaaaacgttgttgtgatgaggtttctttagcaagttcttgtttaaattatcatttatttgatgagtgaagtttttaacatgctttgctgtgtgaaatttaaaaaagggatgtttttccaggctggaacaataaatgtggctgtgcagtttttaaaaaaaaagaaattcttcaat

SEQ ID NO: 408532 - DNA, 631 bp, Homo sapiens
gtaccatggggaaaactgcttattttgttaaaaaaatttttttccctttgttgttttacgtttttgttcatagtcttctttattccacgctcctcttccccttctcccagtgctgacttgggacaaaacagttcagcctttgtctcgacgcagataaaagcacctgtaagcaatgctgtccagtcattttatgtgctgatttctcaaatctgcaataatccatcaggttaatgtttttacctgaaaataaagaaagtttgcttcacctttttgtttatagttttgtgctgtatgcataactttcaattgtatagatgtatttcaatgcaaggaaatccacatatctccatgattcgggtcatggctgattttgctattcaaacaatttataatagcaacttgaagaaactaaaatgtgaagagaaaatgggaggagattccttcctaaggtccaaaactaggcctgtggcataaatttgaaggaattttccataattcatctccttgaaaataagagatgagctagtttttttttttaattgaactttgagaaatcaatttttttgactgttctgtaagttttaattaattgacacaaaagcccttttccctatcccaccacccaaaagaa

SEQ ID NO: 408533 - DNA, 704 bp, Homo sapiens
ggtcgatctctagcaggatccccaattccagaccaaagagagtctacagtatgcattagaaaccttgactatgaatggctgctcagttgaagatctaggactggatttcactctgccagggtttcccaatatcgaactgaagaaaggagggaaggatataccagtcactatccacaatttagaggagtatctaagagtatgtaactgtgtctttggggggtaggccagttgtgaagacggaggactttgcctgattgtaccttgcttctggctgcacacgctatggcttgagaccttccacatccccaggaccactgcatgaaggctgctttacaaggcactagcttctctttgctcttgagtgcacatatcagatatttcctgtcttatataaccttgaattatttctcctcaggcttgaatgctatctaattacaccacgttttcttagtttaaaaaacaagtgaaaagagacattatttgtgttctcactaaattgcatttttgcatttccatcaaggcagctagcttgacagaatttactccaggcaccgtgcagtgcacacttttatgtttggtgacacctttcaaattactaacttatgggcgaggtgcagtggctcacgcctgtaatcctcccagcactttgtgaggcagaagcaggaggattacttgaggccagtagttcaagaccagcctgggca

SEQ ID NO: 408534 - DNA, 309 bp, Homo sapiens
tcagaacctataaaacccaatgaaaacagtatgatttttattagttcccaaaagtgaaaaccaaaccaaacaggccagacataatgtgtttaagtgctcctcctaaccctcatctttcccctccaccccaagcctctagttctgttgcaggggctgttggcatgaccacctctggggagagtgaatcagatgattccgagatgggacgtttgcaaggtaaaaacagttattgagcctataagaaaccattaccatgagctacctgttaataccattctttattgaaattaatttagttaaattcatttg

SEQ ID NO: 408535 - DNA, 7698 bp, Homo sapiens
gtgctgcggctcagctgataattgaaggaacccggagccgccgccgccgcgccgctggggggggtggggggagctagtggaagttactgccgcgccaccgagtccggaccggagactttggggcctaactagtgaatggtagtgtctagaaagggtatgtcccttcaagagagaggtgccaatgtccaaccggcctaataacaatccaggggggtcactgcgacgttcacagaggaacactgccggggcccaaccacaagacgactcaataggaggaagaagctgcagttcatcatctgctgtgatagttccacaaccagaggatccagacagagccaatacttcagaaagacaaaaaacggggcaggtgcctaagaaagacaattctcgaggagtgaagcgcagtgctagtccagactacaacaggaccaattctcctagctctgcaaaaaaaccaaaagcacttcagcatactgaatctccctcagaaacaaataagccacatagtaagtcaaagaagagacatttagaccaggagcaacaactgaaatctgcacaatcaccatcaacaagcaaggctcataccaggaagagtggggccactggcggttcacggagtcagaaaagaaaaaggacagagagttcttgtgtaaagagtggctccgggtctgaatcaactggtgcagaagagagatctgcgaaacctaccaagctggcttcaaaatcagccacctcagccaaagctgggtgtagcaccatcactgattcttcttctgctgcctctacttcctcctcgtcttctgctgtagcctcggcctcctccactgtaccaccaggtgccagagtgaaacaaggaaaagatcagaacaaggccaggcgttcccgttcagcgtccagtcccagccccagaagaagtagcagggaaaaggaacagagtaaaactggtggctcttcaaaatttgattgggctgctcgtttcagccctaaagttagccttcctaaaacaaaactgtctcttccagggtcttctaagtcagagacatcaaaacctggaccttctggattacaggccaaattagcaagtttaagaaaatctacgaagaaacgcagtgagtctccacctgctgagctccccagtttgaggcggagcacacgccaaaagaccacgggctcctgtgctagtaccagtcggcgaggctctggcctgggcaaaagaggagcagctgaagctcgtcgacaggagaaaatggcagaccctgaaagcaaccaggaggcagtaaattcttcagctgctcggacagatgaagctccccaaggagctgcaggggctgttggcatgaccacctctggggagagtgaatcagatgattccgagatgggacgtttgcaagctttgttagaggcaaggggtcttccccctcacctatttggtcctcttggtcctcggatgtcacagcttttccatagaacaattggaagtggagctagttctaaggcccagcagctactacaaggattgcaagccagtgatgaaagtcaacagcttcaggcagttattgagatgtgtcagttactggtcatgggaaatgaggagacactgggagggtttcctgtcaagagtgttgttccagctttgattacgttacttcagatggagcacaattttgatattatgaaccatgcttgtcgagccttaacatacatgatggaagcacttcctcgatcttctgctgttgtagtagatgctattcctgtctttttagaaaagctgcaagttattcagtgtattgatgtggcagagcaggccttgactgccttggagatgttgtcacggagacatagtaaagccattctacaggcgggtggtttggcagactgcttgctgtacctagaattcttcagcataaatgcccaaagaaatgcattagcaattgcagctaattgctgccagagtatcacgccagatgaatttcattttgtggcagattcactcccattgctaacccaaaggctaacacatcaggataaaaagtcagtagaaagcacttgcctttgttttgcacgcctagtggacaacttccagcatgaggagaatttactccagcaggttgcttccaaagatctgcttacaaatgttcaacagctgttggtagtgactccacccattttaagttctgggatgtttataatggtggttcgcatgttttctctgatgtgttccaactgtccaactttagctgttcaacttatgaaacaaaacattgcagaaacgcttcactttctcctgtgtggtgcctccaatggaagttgtcaggaacagattgatcttgttccacgaagccctcaagagttgtatgaactgacatctctgatttgtgaacttatgccatgtttaccaaaagaaggcatttttgcagttgataccatgttgaagaagggaaatgcacagaacacagatggtgcgatatggcagtggcgtgatgatcggggcctctggcatccatataacaggattgacagccggatcattgagcaaatcaatgaggacacgggaacagcacgtgccattcagagaaaacctaacccgttagccaatagtaacactagtggatattcagagtcaaagaaggatgatgctcgagcacagcttatgaaagaggatccggaactggctaagtcttttattaagacattatttggtgttctttatgaagtgtatagttcctcagcaggacctgcggtcagacataagtgccttagagcaattcttaggataatttattttgcggatgctgaacttctgaaggatgttctgaaaaatcatgctgtttcaagtcacattgcttccatgctgtcaagccaagacctgaagatagtagtgggagcacttcagatggcagaaattttaatgcagaagttacctgatatttttagtgtttacttcagaagagaaggtgtaatgcatcaagtaaaacacttagcagaatcagagtctttgttgacaagtccaccaaaggcatgtacgaatggatcgggatccatgggatccacaacttcagtcagcagtgggacagccacagctgccactcatgctgcagctgacttgggatcacccagcttgcagcacagcagggatgattctttagatctcagccctcaaggtcgattaagtgatgttctaaagagaaaacgactgccaaaacgagggccaagaaggccaaagtactcacctccaagagatgatgacaaagtagacaatcaagctaaaagccccaccactactcagtcacctaaatcttctttcctggcaagcttgaatccaaaaacatggggaaggttaagtacacagtccaacagcaacaacattgagccagcacggactgcgggaggtagtggccttgccagggctgcctcaaaggataccatctccaataatagagaaaaaattaaaggttggattaaggagcaggcacataaatttgtagaacgttatttcagttctgagaatatggatggaagcaaccctgcattgaatgtccttcagagactttgtgctgcaaccgaacaactcaacctccaggtggatggtggagctgagtgccttgtagaaatccgtagcatagtctcagagtcagatgtttcatcatttgaaatccaacatagtggatttgtgaagcagctgttgctttatttgacatctaaaagtgaaaaggatgctgtgagcagagagatcagattaaagcgatttcttcatgtatttttttcttctccacttcctggagaagagcccattggaagagtggaaccagtgggtaatgcacctttgttggcattagttcacaagatgaacaactgcctcagccagatggaacaatttccagtcaaagtacatgatttccctagtggaaatgggacaggaggcagcttttctctcaacagaggatcacaggctttaaaatttttcaacacacatcaattaaaatgccagttacaaaggcatccagactgtgcaaatgtgaagcagtggaagggtggacctgtcaagattgaccctctggctttggtacaagccatcgagagataccttgtagttagagggtatggaagagtaagagaagatgatgaagacagcgatgacgatggatcagatgaggaaatagatgagtctctggctgctcagttcctaaattcaggaaatgtaagacacaggctgcagttttatattggagaacatttgctgccgtataacatgactgtgtatcaggcagtacggcagtttagtatacaggctgaagatgaaagagaatccacagatgatgagagcaatcctctaggcagagctggtatttggacaaagactcatacaatatggtataaacctgtgagagaggatgaagaaagtaataaagattgtgttggtggtaaaagaggaagagcccaaacagctccaacgaaaacttcccctagaaatgcaaaaaagcatgatgagttatggcacgatggagtgtgcccatcagtatcaaatcctttagaagtttacctcattcccacaccacctgaaaatataacatttgaagacccgtcattagatgtgatccttcttttaagagttttacatgctatcagtcgatactggtattacttgtatgataatgcaatgtgcaaggaaattattccaactagtgaatttattaacagtaagttaacagcaaaagcaaataggcaacttcaagatcctttagtaatcatgacaggaaacatcccaacatggcttactgagctaggaaaaacctgcccatttttctttccttttgatacccggcaaatgcttttttatgtaactgcatttgatcgggaccgagcaatgcaaagattacttgataccaacccagaaatcaaccagtctgattctcaagatagcagagttgcacctagattggatagaaaaaaacgtactgtgaaccgagaggagctgctgaaacaggcggagtctgtgatgcaggacctcggcagctcacgggccatgttagaaatccagtatgaaaatgaggttggtacaggtcttgggcctacactggagttttatgcgcttgtatctcaggaactacagagagctgacttgggtctttggagaggtgaagaagtaactcttagcaatccaaaagggagccaagaagggaccaagtatattcaaaacctccagggcctgtttgcgcttccctttggtaggacagcaaagccagctcatatcgcaaaggttaagatgaagtttcgcttcttaggaaaattaatggccaaggctatcatggatttcagattggtggaccttccccttggcttacccttttataaatggatgctacggcaagaaacttcactgacatcacacgatttgtttgacatcgacccagttgtagccagatcagtttatcacctagaagacattgtcagacagaagaaaagacttgaacaagataaatcccagaccaaagagagtctacagtatgcattagaaaccttgactatgaatggctgctcagttgaagatctaggactggatttcactctgccagggtttcccaatatcgaactgaagaaaggagggaaggatataccagtcactatccacaatttagaggagtatctaagactggttatattctgggcactaaatgaaggcgtttctaggcaatttgattcgttcagagatggatttgaatcagtcttcccactcagtcatcttcagtacttctacccggaggaactggatcagctcctttgtggcagtaaagcagacacttgggatgcaaagacactgatggaatgctgtaggcctgatcatggttatactcatgacagtcgggctgtgaagtttttgtttgagattctcagtagttttgataatgagcagcagaggttatttctccagtttgtgactggtagcccaagattgcctgttggaggattccggagtttgaatccacctttgacaattgtccgaaagacgtttgaatcaacagaaaacccagatgacttcttgccctctgtaatgacttgtgtgaactatcttaagttgccggactattcaagcattgagataatgcgtgaaaaactgttgatagcagcaagagaagggcagcagtcgttccatctttcctgatcatagcaagaaatgcagtgtctgcctgttacagcaaaagaaacaaatcatgatttcttttctaatgttatcacctgagtcaaggaaacatgttacgccttcttgttgtaggaaaaacggcttgcagattataaagagacatttggttgatattcattaatggccccatggacttaaagtgatcaggccctaaaacgttgttgtgatgaggtttctttagcaagttcttgtttaaattatcatttatttgatgagtgaagtttttaacatgctttgctgtgtgaaatttaaaaaagggatgtttttccaggctggaacaataaatgtggctgtgcagtttaattctgggctgtgtgtatccatctagctaagtctgcagttttctttcctccaaagacaactcttgtacataagtacagaaatttaagctcacatgtatttgacaaatatagtttagtagactagctctatgtgcttttcactttcctctgattttctctccctgattcattattatctgtgcagctcacagttttttttttgtatacaactcacagttctcaaattttcgttacccatgggcttctgttgtcccatgttctctccagttaagatctaatttaaaattcattggattgaaatttattgaatataattcagcttttgtaactaggtagacttttcttatagtttagttttaatatagtttagggtattactggctttttcccaggtgacacactaaggactgtttacatggcaattccagcagcaacagcctctggaatgagacaaggaaagctcatttgtttcttttatgaaggttaagaagtctacagcttgggctggccggtatttattattctgtggccagaggattttaaattaatgtaaattttttaaacaaaataagcagttttccttccctgttggagtaaaaaaatttttttccctttgttgttttacgtttttgttcatagtcttctttattccacgctcctcttccccttctcccagtgctgacttgggacaaaacagttcagcctttgtctcgacgcagataaaagcacctgtaagcaatgctgtccagtcattttatgtgctgatttctcaaatctgcaataatccatcaggttaatgtttttacctgaaaataaagaaagtttgcttcacctttttgtttatagttttgtgctgtatgcataactttcaattgtatagatgtatttcaatgcaaggaaatccacatatctccatgattcgggtcatggctgattttgctattcaaacaatttataatagcaacttgaagaaactaaaatgtgaagagaaaatgggaggagattccttcctaaggtccaaaactaggcctgtggcataaatttgaaggaattttccataattcatctccttgaaaataagagatgagctagtttttttttttaattgaactttgagaaatcaatttttttgactgttctgtaagttttaattaattgacacaaaagcccttttccctatcccaccacccaaaagaa

SEQ ID NO: 408536 - DNA, 7785 bp, Homo sapiens
gcggccgcggccggagggaccggggcctggcgggaggtaggggtcgctgggtccctcctccggcttcccgcaatgaggagggcccttcacagaaccgggtgaatggtagtgtctagaaagggtatgtcccttcaagagagaggtgccaatgtccaaccggcctaataacaatccaggggggtcactgcgacgttcacagaggaacactgccggggcccaaccacaagacgactcaataggaggaaggtcacatttagggcaggcaaaacataagggatatagccctcctgagagtagaaaatctaattctaaggcacccaaagtgcagtctaatactacttctgaactgtcaaggggacacctttctaaaagaagctgcagttcatcatctgctgtgatagttccacaaccagaggatccagacagagccaatacttcagaaagacaaaaaacggggcaggtgcctaagaaagacaattctcgaggagtgaagcgcagtgctagtccagactacaacaggaccaattctcctagctctgcaaaaaaaccaaaagcacttcagcatactgaatctccctcagaaacaaataagccacatagtaagtcaaagaagagacatttagaccaggagcaacaactgaaatctgcacaatcaccatcaacaagcaaggctcataccaggaagagtggggccactggcggttcacggagtcagaaaagaaaaaggacagagagttcttgtgtaaagagtggctccgggtctgaatcaactggtgcagaagagagatctgcgaaacctaccaagctggcttcaaaatcagccacctcagccaaagctgggtgtagcaccatcactgattcttcttctgctgcctctacttcctcctcgtcttctgctgtagcctcggcctcctccactgtaccaccaggtgccagagtgaaacaaggaaaagatcagaacaaggccaggcgttcccgttcagcgtccagtcccagccccagaagaagtagcagggaaaaggaacagaggtcttctaagtcagagacatcaaaacctggaccttctggattacaggccaaattagcaagtttaagaaaatctacgaagaaacgcagtgagtctccacctgctgagctccccagtttgaggcggagcacacgccaaaagaccacgggctcctgtgctagtaccagtcggcgaggctctggcctgggcaaaagaggagcagctgaagctcgtcgacaggagaaaatggcagaccctgaaagcaaccaggaggcagtaaattcttcagctgctcggacagatgaagctccccaaggagctgcaggggctgttggcatgaccacctctggggagagtgaatcagatgattccgagatgggacgtttgcaagctttgttagaggcaaggggtcttccccctcacctatttggtcctcttggtcctcggatgtcacagcttttccatagaacaattggaagtggagctagttctaaggcccagcagctactacaaggattgcaagccagtgatgaaagtcaacagcttcaggcagttattgagatgtgtcagttactggtcatgggaaatgaggagacactgggagggtttcctgtcaagagtgttgttccagctttgattacgttacttcagatggagcacaattttgatattatgaaccatgcttgtcgagccttaacatacatgatggaagcacttcctcgatcttctgctgttgtagtagatgctattcctgtctttttagaaaagctgcaagttattcagtgtattgatgtggcagagcaggccttgactgccttggagatgttgtcacggagacatagtaaagccattctacaggcgggtggtttggcagactgcttgctgtacctagaattcttcagcataaatgcccaaagaaatgcattagcaattgcagctaattgctgccagagtatcacgccagatgaatttcattttgtggcagattcactcccattgctaacccaaaggctaacacatcaggataaaaagtcagtagaaagcacttgcctttgttttgcacgcctagtggacaacttccagcatgaggagaatttactccagcaggttgcttccaaagatctgcttacaaatgttcaacagctgttggtagtgactccacccattttaagttctgggatgtttataatggtggttcgcatgttttctctgatgtgttccaactgtccaactttagctgttcaacttatgaaacaaaacattgcagaaacgcttcactttctcctgtgtggtgcctccaatggaagttgtcaggaacagattgatcttgttccacgaagccctcaagagttgtatgaactgacatctctgatttgtgaacttatgccatgtttaccaaaagaaggcatttttgcagttgataccatgttgaagaagggaaatgcacagaacacagatggtgcgatatggcagtggcgtgatgatcggggcctctggcatccatataacaggattgacagccggatcattgaggcagcccatcaggtcggtgaggatgagataagcttgtccactctgggacgagtttatactattgattttaattctatgcagcaaatcaatgaggacacgggaacagcacgtgccattcagagaaaacctaacccgttagccaatagtaacactagtggatattcagagtcaaagaaggatgatgctcgagcacagcttatgaaagaggatccggaactggctaagtcttttattaagacattatttggtgttctttatgaagtgtatagttcctcagcaggacctgcggtcagacataagtgccttagagcaattcttaggataatttattttgcggatgctgaacttctgaaggatgttctgaaaaatcatgctgtttcaagtcacattgcttccatgctgtcaagccaagacctgaagatagtagtgggagcacttcagatggcagaaattttaatgcagaagttacctgatatttttagtgtttacttcagaagagaaggtgtaatgcatcaagtaaaacacttagcagaatcagagtctttgttgacaagtccaccaaaggcatgtacgaatggatcgggatccatgggatccacaacttcagtcagcagtgggacagccacagctgccactcatgctgcagctgacttgggatcacccagcttgcagcacagcagggatgattctttagatctcagccctcaaggtcgattaagtgatgttctaaagagaaaacgactgccaaaacgagggccaagaaggccaaagtactcacctccaagagatgatgacaaagtagacaatcaagctaaaagccccaccactactcagtcacctaaatcttctttcctggcaagcttgaatccaaaaacatggggaaggttaagtacacagtccaacagcaacaacattgagccagcacggactgcgggaggtagtggccttgccagggctgcctcaaaggataccatctccaataatagagaaaaaattaaaggttggattaaggagcaggcacataaatttgtagaacgttatttcagttctgagaatatggatggaagcaaccctgcattgaatgtccttcagagactttgtgctgcaaccgaacaactcaacctccaggtggatggtggagctgagtgccttgtagaaatccgtagcatagtctcagagtcagatgtttcatcatttgaaatccaacatagtggatttgtgaagcagctgttgctttatttgacatctaaaagtgaaaaggatgctgtgagcagagagatcagattaaagcgatttcttcatgtatttttttcttctccacttcctggagaagagcccattggaagagtggaaccagtgggtaatgcacctttgttggcattagttcacaagatgaacaactgcctcagccagatggaacaatttccagtcaaagtacatgatttccctagtggaaatgggacaggaggcagcttttctctcaacagaggatcacaggctttaaaatttttcaacacacatcaattaaaatgccagttacaaaggcatccagactgtgcaaatgtgaagcagtggaagggtggacctgtcaagattgaccctctggctttggtacaagccatcgagagataccttgtagttagagggtatggaagagtaagagaagatgatgaagacagcgatgacgatggatcagatgaggaaatagatgagtctctggctgctcagttcctaaattcaggaaatgtaagacacaggctgcagttttatattggagaacatttgctgccgtataacatgactgtgtatcaggcagtacggcagtttagtatacaggctgaagatgaaagagaatccacagatgatgagagcaatcctctaggcagagctggtatttggacaaagactcatacaatatggtataaacctgtgagagaggatgaagaaagtaataaagattgtgttggtggtaaaagaggaagagcccaaacagctccaacgaaaacttcccctagaaatgcaaaaaagcatgatgagttatggcacgatggagtgtgcccatcagtatcaaatcctttagaagtttacctcattcccacaccacctgaaaatataacatttgaagacccgtcattagatgtgatccttcttttaagagttttacatgctatcagtcgatactggtattacttgtatgataatgcaatgtgcaaggaaattattccaactagtgaatttattaacagtaagttaacagcaaaagcaaataggcaacttcaagatcctttagtaatcatgacaggaaacatcccaacatggcttactgagctaggaaaaacctgcccatttttctttccttttgatacccggcaaatgcttttttatgtaactgcatttgatcgggaccgagcaatgcaaagattacttgataccaacccagaaatcaaccagtctgattctcaagatagcagagttgcacctagattggatagaaaaaaacgtactgtgaaccgagaggagctgctgaaacaggcggagtctgtgatgcaggacctcggcagctcacgggccatgttagaaatccagtatgaaaatgaggttggtacaggtcttgggcctacactggagttttatgcgcttgtatctcaggaactacagagagctgacttgggtctttggagaggtgaagaagtaactcttagcaatccaaaagggagccaagaagggaccaagtatattcaaaacctccagggcctgtttgcgcttccctttggtaggacagcaaagccagctcatatcgcaaaggttaagatgaagtttcgcttcttaggaaaattaatggccaaggctatcatggatttcagattggtggaccttccccttggcttacccttttataaatggatgctacggcaagaaacttcactgacatcacacgatttgtttgacatcgacccagttgtagccagatcagtttatcacctagaagacattgtcagacagaagaaaagacttgaacaagataaatcccagaccaaagagagtctacagtatgcattagaaaccttgactatgaatggctgctcagttgaagatctaggactggatttcactctgccagggtttcccaatatcgaactgaagaaaggagggaaggatataccagtcactatccacaatttagaggagtatctaagactggttatattctgggcactaaatgaaggcgtttctaggcaatttgattcgttcagagatggatttgaatcagtcttcccactcagtcatcttcagtacttctacccggaggaactggatcagctcctttgtggcagtaaagcagacacttgggatgcaaagacactgatggaatgctgtaggcctgatcatggttatactcatgacagtcgggctgtgaagtttttgtttgagattctcagtagttttgataatgagcagcagaggttatttctccagtttgtgactggtagcccaagattgcctgttggaggattccggagtttgaatccacctttgacaattgtccgaaagacgtttgaatcaacagaaaacccagatgacttcttgccctctgtaatgacttgtgtgaactatcttaagttgccggactattcaagcattgagataatgcgtgaaaaactgttgatagcagcaagagaagggcagcagtcgttccatctttcctgatcatagcaagaaatgcagtgtctgcctgttacagcaaaagaaacaaatcatgatttcttttctaatgttatcacctgagtcaaggaaacatgttacgccttcttgttgtaggaaaaacggcttgcagattataaagagacatttggttgatattcattaatggccccatggacttaaagtgatcaggccctaaaacgttgttgtgatgaggtttctttagcaagttcttgtttaaattatcatttatttgatgagtgaagtttttaacatgctttgctgtgtgaaatttaaaaaagggatgtttttccaggctggaacaataaatgtggctgtgcagtttaattctgggctgtgtgtatccatctagctaagtctgcagttttctttcctccaaagacaactcttgtacataagtacagaaatttaagctcacatgtatttgacaaatatagtttagtagactagctctatgtgcttttcactttcctctgattttctctccctgattcattattatctgtgcagctcacagttttttttttgtatacaactcacagttctcaaattttcgttacccatgggcttctgttgtcccatgttctctccagttaagatctaatttaaaattcattggattgaaatttattgaatataattcagcttttgtaactaggtagacttttcttatagtttagttttaatatagtttagggtattactggctttttcccaggtgacacactaaggactgtttacatggcaattccagcagcaacagcctctggaatgagacaaggaaagctcatttgtttcttttatgaaggttaagaagtctacagcttgggctggccggtatttattattctgtggccagaggattttaaattaatgtaaattttttaaacaaaataagcagttttccttccctgttggagtaaaaaaatttttttccctttgttgttttacgtttttgttcatagtcttctttattccacgctcctcttccccttctcccagtgctgacttgggacaaaacagttcagcctttgtctcgacgcagataaaagcacctgtaagcaatgctgtccagtcattttatgtgctgatttctcaaatctgcaataatccatcaggttaatgtttttacctgaaaataaagaaagtttgcttcacctttttgtttatagttttgtgctgtatgcataactttcaattgtatagatgtatttcaatgcaaggaaatccacatatctccatgattcgggtcatggctgattttgctattcaaacaatttataatagcaacttgaagaaactaaaatgtgaagagaaaatgggaggagattccttcctaaggtccaaaactaggcctgtggcataaatttgaaggaattttccataattcatctccttgaaaataagagatgagctagtttttttttttaattgaactttgagaaatcaatttttttgactgttctgtaagttttaattaattgacacaaaagcccttttccctatcccaccacccaaaagaa

SEQ ID NO: 408537 - DNA, 6261 bp, Homo sapiens
tggcctagcaggggagtggagaagactgtcagtgtcctgtgagttctgcttgcccgctgcccacacagagctgccttatcaagcgggaaatcacaatttgtattcacacaaagccagctggtgcatcagaaggcagggtctgaaaatatatctcatgaaccatgcttgtcgagccttaacatacatgatggaagcacttcctcgatcttctgctgttgtagtagatgctattcctgtctttttagaaaagctgcaagttattcagtgtattgatgtggcagagcaggccttgactgccttggagatgttgtcacggagacatagtaaagccattctacaggcgggtggtttggcagactgcttgctgtacctagaattcttcagcataaatgcccaaagaaatgcattagcaattgcagctaattgctgccagagtatcacgccagatgaatttcattttgtggcagattcactcccattgctaacccaaaggctaacacatcaggataaaaagtcagtagaaagcacttgcctttgttttgcacgcctagtggacaacttccagcatgaggagaatttactccagcaggttgcttccaaagatctgcttacaaatgttcaacagctgttggtagtgactccacccattttaagttctgggatgtttataatggtggttcgcatgttttctctgatgtgttccaactgtccaactttagctgttcaacttatgaaacaaaacattgcagaaacgcttcactttctcctgtgtggtgcctccaatggaagttgtcaggaacagattgatcttgttccacgaagccctcaagagttgtatgaactgacatctctgatttgtgaacttatgccatgtttaccaaaagaaggcatttttgcagttgataccatgttgaagaagggaaatgcacagaacacagatggtgcgatatggcagtggcgtgatgatcggggcctctggcatccatataacaggattgacagccggatcattgaggcagcccatcaggtcggtgaggatgagataagcttgtccactctgggacgagtttatactattgattttaattctatgcagcaaatcaatgaggacacgggaacagcacgtgccattcagagaaaacctaacccgttagccaatagtaacactagtggatattcagagtcaaagaaggatgatgctcgagcacagcttatgaaagaggatccggaactggctaagtcttttattaagacattatttggtgttctttatgaagtgtatagttcctcagcaggacctgcggtcagacataagtgccttagagcaattcttaggataatttattttgcggatgctgaacttctgaaggatgttctgaaaaatcatgctgtttcaagtcacattgcttccatgctgtcaagccaagacctgaagatagtagtgggagcacttcagatggcagaaattttaatgcagaagttacctgatatttttagtgtttacttcagaagagaaggtgtaatgcatcaagtaaaacacttagcagaatcagagtctttgttgacaagtccaccaaaggcatgtacgaatggatcgggatccatgggatccacaacttcagtcagcagtgggacagccacagctgccactcatgctgcagctgacttgggatcacccagcttgcagcacagcagggatgattctttagatctcagccctcaaggtcgattaagtgatgttctaaagagaaaacgactgccaaaacgagggccaagaaggccaaagtactcacctccaagagatgatgacaaagtagacaatcaagctaaaagccccaccactactcagtcacctaaatcttctttcctggcaagcttgaatccaaaaacatggggaaggttaagtacacagtccaacagcaacaacattgagccagcacggactgcgggaggtagtggccttgccagggctgcctcaaaggataccatctccaataatagagaaaaaattaaaggttggattaaggagcaggcacataaatttgtagaacgttatttcagttctgagaatatggatggaagcaaccctgcattgaatgtccttcagagactttgtgctgcaaccgaacaactcaacctccaggtggatggtggagctgagtgccttgtagaaatccgtagcatagtctcagagtcagatgtttcatcatttgaaatccaacatagtggatttgtgaagcagctgttgctttatttgacatctaaaagtgaaaaggatgctgtgagcagagagatcagattaaagcgatttcttcatgtatttttttcttctccacttcctggagaagagcccattggaagagtggaaccagtgggtaatgcacctttgttggcattagttcacaagatgaacaactgcctcagccagatggaacaatttccagtcaaagtacatgatttccctagtggaaatgggacaggaggcagcttttctctcaacagaggatcacaggctttaaaatttttcaacacacatcaattaaaatgccagttacaaaggcatccagactgtgcaaatgtgaagcagtggaagggtggacctgtcaagattgaccctctggctttggtacaagccatcgagagataccttgtagttagagggtatggaagagtaagagaagatgatgaagacagcgatgacgatggatcagatgaggaaatagatgagtctctggctgctcagttcctaaattcaggaaatgtaagacacaggctgcagttttatattggagaacatttgctgccgtataacatgactgtgtatcaggcagtacggcagtttagtatacaggctgaagatgaaagagaatccacagatgatgagagcaatcctctaggcagagctggtatttggacaaagactcatacaatatggtataaacctgtgagagaggatgaagaaagtaataaagattgtgttggtggtaaaagaggaagagcccaaacagctccaacgaaaacttcccctagaaatgcaaaaaagcatgatgagttatggcacgatggagtgtgcccatcagtatcaaatcctttagaagtttacctcattcccacaccacctgaaaatataacatttgaagacccgtcattagatgtgatccttcttttaagagttttacatgctatcagtcgatactggtattacttgtatgataatgcaatgtgcaaggaaattattccaactagtgaatttattaacagtaagttaacagcaaaagcaaataggcaacttcaagatcctttagtaatcatgacaggaaacatcccaacatggcttactgagctaggaaaaacctgcccatttttctttccttttgatacccggcaaatgcttttttatgtaactgcatttgatcgggaccgagcaatgcaaagattacttgataccaacccagaaatcaaccagtctgattctcaagatagcagagttgcacctagattggatagaaaaaaacgtactgtgaaccgagaggagctgctgaaacaggcggagtctgtgatgcaggacctcggcagctcacgggccatgttagaaatccagtatgaaaatgaggttggtacaggtcttgggcctacactggagttttatgcgcttgtatctcaggaactacagagagctgacttgggtctttggagaggtgaagaagtaactcttagcaatccaaaagggagccaagaagggaccaagtatattcaaaacctccagggcctgtttgcgcttccctttggtaggacagcaaagccagctcatatcgcaaaggttaagatgaagtttcgcttcttaggaaaattaatggccaaggctatcatggatttcagattggtggaccttccccttggcttacccttttataaatggatgctacggcaagaaacttcactgacatcacacgatttgtttgacatcgacccagttgtagccagatcagtttatcacctagaagacattgtcagacagaagaaaagacttgaacaagataaatcccagaccaaagagagtctacagtatgcattagaaaccttgactatgaatggctgctcagttgaagatctaggactggatttcactctgccagggtttcccaatatcgaactgaagaaaggagggaaggatataccagtcactatccacaatttagaggagtatctaagactggttatattctgggcactaaatgaaggcgtttctaggcaatttgattcgttcagagatggatttgaatcagtcttcccactcagtcatcttcagtacttctacccggaggaactggatcagctcctttgtggcagtaaagcagacacttgggatgcaaagacactgatggaatgctgtaggcctgatcatggttatactcatgacagtcgggctgtgaagtttttgtttgagattctcagtagttttgataatgagcagcagaggttatttctccagtttgtgactggtagcccaagattgcctgttggaggattccggagtttgaatccacctttgacaattgtccgaaagacgtttgaatcaacagaaaacccagatgacttcttgccctctgtaatgacttgtgtgaactatcttaagttgccggactattcaagcattgagataatgcgtgaaaaactgttgatagcagcaagagaagggcagcagtcgttccatctttcctgatcatagcaagaaatgcagtgtctgcctgttacagcaaaagaaacaaatcatgatttcttttctaatgttatcacctgagtcaaggaaacatgttacgccttcttgttgtaggaaaaacggcttgcagattataaagagacatttggttgatattcattaatggccccatggacttaaagtgatcaggccctaaaacgttgttgtgatgaggtttctttagcaagttcttgtttaaattatcatttatttgatgagtgaagtttttaacatgctttgctgtgtgaaatttaaaaaagggatgtttttccaggctggaacaataaatgtggctgtgcagtttaattctgggctgtgtgtatccatctagctaagtctgcagttttctttcctccaaagacaactcttgtacataagtacagaaatttaagctcacatgtatttgacaaatatagtttagtagactagctctatgtgcttttcactttcctctgattttctctccctgattcattattatctgtgcagctcacagttttttttttgtatacaactcacagttctcaaattttcgttacccatgggcttctgttgtcccatgttctctccagttaagatctaatttaaaattcattggattgaaatttattgaatataattcagcttttgtaactaggtagacttttcttatagtttagttttaatatagtttagggtattactggctttttcccaggtgacacactaaggactgtttacatggcaattccagcagcaacagcctctggaatgagacaaggaaagctcatttgtttcttttatgaaggttaagaagtctacagcttgggctggccggtatttattattctgtggccagaggattttaaattaatgtaaattttttaaacaaaataagcagttttccttccctgttggagtaaaaaaatttttttccctttgttgttttacgtttttgttcatagtcttctttattccacgctcctcttccccttctcccagtgctgacttgggacaaaacagttcagcctttgtctcgacgcagataaaagcacctgtaagcaatgctgtccagtcattttatgtgctgatttctcaaatctgcaataatccatcaggttaatgtttttacctgaaaataaagaaagtttgcttcacctttttgtttatagttttgtgctgtatgcataactttcaattgtatagatgtatttcaatgcaaggaaatccacatatctccatgattcgggtcatggctgattttgctattcaaacaatttataatagcaacttgaagaaactaaaatgtgaagagaaaatgggaggagattccttcctaaggtccaaaactaggcctgtggcataaatttgaaggaattttccataattcatctccttgaaaataagagatgagctagtttttttttttaattgaactttgagaaatcaatttttttgactgttctgtaagttttaattaattgacacaaaagcccttttccctatcccaccacccaaaagaa

SEQ ID NO: 408538 - DNA, 7136 bp, Homo sapiens
gtgctgcggctcagctgataattgaaggaacccggagccgccgccgccgcgccgctggggggggtggggggagctagtggaagttactgccgcgccaccgagtccggaccggagactttggggcctaactagtgaatggtagtgtctagaaagggtatgtcccttcaagagagaggtgccaatgtccaaccggcctaataacaatccaggggggtcactgcgacgttcacagaggaacactgccggggcccaaccacaagacgactcaataggaggaagaagctgcagttcatcatctgctgtgatagttccacaaccagaggatccagacagagccaatacttcagaaagacaaaaaacggggcaggtgcctaagaaagacaattctcgaggagtgaagcgcagtgctagtccagactacaacaggaccaattctcctagctctgcaaaaaaaccaaaagcacttcagcatactgaatctccctcagaaacaaataagccacatagtaagtcaaagaagagacatttagaccaggagcaacaactgaaatctgcacaatcaccatcaacaagcaaggctcataccaggaagagtggggccactggcggttcacggagtcagaaaagaaaaaggacagagagttcttgtgtaaagagtggctccgggtctgaatcaactggtgcagaagagagatctgcgaaacctaccaagctggcttcaaaatcagccacctcagccaaagctgggtgtagcaccatcactgattcttcttctgctgcctctacttcctcctcgtcttctgctgtagcctcggcctcctccactgtaccaccaggtgccagagtgaaacaaggaaaagatcagaacaaggccaggcgttcccgttcagcgtccagtcccagccccagaagaagtagcagggaaaaggaacagaggtcttctaagtcagagacatcaaaacctggaccttctggattacaggccaaattagcaagtttaagaaaatctacgaagaaacgcagtgagtctccacctgctgagctccccagtttgaggcggagcacacgccaaaagaccacgggctcctgtgctagtaccagtcggcgaggctctggcctgggcaaaagaggagcagctgaagctcgtcgacaggagaaaatggcagaccctgaaagcaaccaggaggcagtaaattcttcagctgctcggacagatgaagctccccaaggagctgcaggggctgttggcatgaccacctctggggagagtgaatcagatgattccgagatgggacgtttgcaagctttgttagaggcaaggggtcttccccctcacctatttggtcctcttggtcctcggatgtcacagcttttccatagaacaattggaagtggagctagttctaaggcccagcagctactacaaggattgcaagccagtgatgaaagtcaacagcttcaggcagttattgagatgtgtcagttactggtcatgggaaatgaggagacactgggagggtttcctgtcaagagtgttgttccagctttgattacgttacttcagatggagcacaattttgatattatgaaccatgcttgtcgagccttaacatacatgatggaagcacttcctcgatcttctgctgttgtagtagatgctattcctgtctttttagaaaagctgcaagttattcagtgtattgatgtggcagagcaggccttgactgccttggagatgttgtcacggagacatagtaaagccattctacaggcgggtggtttggcagactgcttgctgtacctagaattcttcagcataaatgcccaaagaaatgcattagcaattgcagctaattgctgccagagtatcacgccagatgaatttcattttgtggcagattcactcccattgctaacccaaaggctaacacatcaggataaaaagtcagtagaaagcacttgcctttgttttgcacgcctagtggacaacttccagcatgaggagaatttactccagcaggttgcttccaaagatctgcttacaaatgttcaacagctgttggtagtgactccacccattttaagttctgggatgtttataatggtggttcgcatgttttctctgatgtgttccaactgtccaactttagctgttcaacttatgaaacaaaacattgcagaaacgcttcactttctcctgtgtggtgcctccaatggaagttgtcaggaacagattgatcttgttccacgaagccctcaagagttgtatgaactgacatctctgatttgtgaacttatgccatgtttaccaaaagaaggcatttttgcagttgataccatgttgaagaagggaaatgcacagaacacagatggtgcgatatggcagtggcgtgatgatcggggcctctggcatccatataacaggattgacagccggatcattgaggcagcccatcaggtcggtgaggatgagataagcttgtccactctgggacgagtttatactattgattttaattctatgcagcaaatcaatgaggacacgggaacagcacgtgccattcagagaaaacctaacccgttagccaatagtaacactagtggatattcagagtcaaagaaggatgatgctcgagcacagcttatgaaagaggatccggaactggctaagtcttttattaagacattatttggtgttctttatgaagtgtatagttcctcagcaggacctgcggtcagacataagtgccttagagcaattcttaggataatttattttgcggatgctgaacttctgaaggatgttctgaaaaatcatgctgtttcaagtcacattgcttccatgctgtcaagccaagacctgaagatagtagtgggagcacttcagatggcagaaattttaatgcagaagttacctgatatttttagtgtttacttcagaagagaaggtgtaatgcatcaagtaaaacacttagcagaatcagagtctttgttgacaagtccaccaaaggcatgtacgaatggatcgggatccatgggatccacaacttcagtcagcagtgggacagccacagctgccactcatgctgcagctgacttgggatcacccagcttgcagcacagcagggatgattctttagatctcagccctcaaggtcgattaagtgatgttctaaagagaaaacgactgccaaaacgagggccaagaagcttcctggagaagagcccattggaagagtggaaccagtgggtaatgcacctttgttggcattagttcacaagatgaacaactgcctcagccagatggaacaatttccagtcaaagtacatgatttccctagtggaaatgggacaggaggcagcttttctctcaacagaggatcacaggctttaaaatttttcaacacacatcaattaaaatgccagttacaaaggcatccagactgtgcaaatgtgaagcagtggaagggtggacctgtcaagattgaccctctggctttggtacaagccatcgagagataccttgtagttagagggtatggaagagtaagagaagatgatgaagacagcgatgacgatggatcagatgaggaaatagatgagtctctggctgctcagttcctaaattcaggaaatgtaagacacaggctgcagttttatattggagaacatttgctgccgtataacatgactgtgtatcaggcagtacggcagtttagtatacaggctgaagatgaaagagaatccacagatgatgagagcaatcctctaggcagagctggtatttggacaaagactcatacaatatggtataaacctgtgagagaggatgaagaaagtaataaagattgtgttggtggtaaaagaggaagagcccaaacagctccaacgaaaacttcccctagaaatgcaaaaaagcatgatgagttatggcacgatggagtgtgcccatcagtatcaaatcctttagaagtttacctcattcccacaccacctgaaaatataacatttgaagacccgtcattagatgtgatccttcttttaagagttttacatgctatcagtcgatactggtattacttgtatgataatgcaatgtgcaaggaaattattccaactagtgaatttattaacagtaagttaacagcaaaagcaaataggcaacttcaagatcctttagtaatcatgacaggaaacatcccaacatggcttactgagctaggaaaaacctgcccatttttctttccttttgatacccggcaaatgcttttttatgtaactgcatttgatcgggaccgagcaatgcaaagattacttgataccaacccagaaatcaaccagtctgattctcaagatagcagagttgcacctagattggatagaaaaaaacgtactgtgaaccgagaggagctgctgaaacaggcggagtctgtgatgcaggacctcggcagctcacgggccatgttagaaatccagtatgaaaatgaggttggtacaggtcttgggcctacactggagttttatgcgcttgtatctcaggaactacagagagctgacttgggtctttggagaggtgaagaagtaactcttagcaatccaaaagggagccaagaagggaccaagtatattcaaaacctccagggcctgtttgcgcttccctttggtaggacagcaaagccagctcatatcgcaaaggttaagatgaagtttcgcttcttaggaaaattaatggccaaggctatcatggatttcagattggtggaccttccccttggcttacccttttataaatggatgctacggcaagaaacttcactgacatcacacgatttgtttgacatcgacccagttgtagccagatcagtttatcacctagaagacattgtcagacagaagaaaagacttgaacaagataaatcccagaccaaagagagtctacagtatgcattagaaaccttgactatgaatggctgctcagttgaagatctaggactggatttcactctgccagggtttcccaatatcgaactgaagaaaggagggaaggatataccagtcactatccacaatttagaggagtatctaagactggttatattctgggcactaaatgaaggcgtttctaggcaatttgattcgttcagagatggatttgaatcagtcttcccactcagtcatcttcagtacttctacccggaggaactggatcagctcctttgtggcagtaaagcagacacttgggatgcaaagacactgatggaatgctgtaggcctgatcatggttatactcatgacagtcgggctgtgaagtttttgtttgagattctcagtagttttgataatgagcagcagaggttatttctccagtttgtgactggtagcccaagattgcctgttggaggattccggagtttgaatccacctttgacaattgtccgaaagacgtttgaatcaacagaaaacccagatgacttcttgccctctgtaatgacttgtgtgaactatcttaagttgccggactattcaagcattgagataatgcgtgaaaaactgttgatagcagcaagagaagggcagcagtcgttccatctttcctgatcatagcaagaaatgcagtgtctgcctgttacagcaaaagaaacaaatcatgatttcttttctaatgttatcacctgagtcaaggaaacatgttacgccttcttgttgtaggaaaaacggcttgcagattataaagagacatttggttgatattcattaatggccccatggacttaaagtgatcaggccctaaaacgttgttgtgatgaggtttctttagcaagttcttgtttaaattatcatttatttgatgagtgaagtttttaacatgctttgctgtgtgaaatttaaaaaagggatgtttttccaggctggaacaataaatgtggctgtgcagtttaattctgggctgtgtgtatccatctagctaagtctgcagttttctttcctccaaagacaactcttgtacataagtacagaaatttaagctcacatgtatttgacaaatatagtttagtagactagctctatgtgcttttcactttcctctgattttctctccctgattcattattatctgtgcagctcacagttttttttttgtatacaactcacagttctcaaattttcgttacccatgggcttctgttgtcccatgttctctccagttaagatctaatttaaaattcattggattgaaatttattgaatataattcagcttttgtaactaggtagacttttcttatagtttagttttaatatagtttagggtattactggctttttcccaggtgacacactaaggactgtttacatggcaattccagcagcaacagcctctggaatgagacaaggaaagctcatttgtttcttttatgaaggttaagaagtctacagcttgggctggccggtatttattattctgtggccagaggattttaaattaatgtaaattttttaaacaaaataagcagttttccttccctgttggagtaaaaaaatttttttccctttgttgttttacgtttttgttcatagtcttctttattccacgctcctcttccccttctcccagtgctgacttgggacaaaacagttcagcctttgtctcgacgcagataaaagcacctgtaagcaatgctgtccagtcattttatgtgctgatttctcaaatctgcaataatccatcaggttaatgtttttacctgaaaataaagaaagtttgcttcacctttttgtttatagttttgtgctgtatgcataactttcaattgtatagatgtatttcaatgcaaggaaatccacatatctccatgattcgggtcatggctgattttgctattcaaacaatttataatagcaacttgaagaaactaaaatgtgaagagaaaatgggaggagattccttcctaaggtccaaaactaggcctgtggcataaatttgaaggaattttccataattcatctccttgaaaataagagatgagctagtttttttttttaattgaactttgagaaatcaatttttttgactgttctgtaagttttaattaattgacacaaaagcccttttccctatcccaccacccaaaagaa

SEQ ID NO: 408539 - DNA, 3260 bp, Homo sapiens
atttgaagacccgtcattagatgttatattttcaggtggtgtgggaatgaggtaaacttctaaaggatttgatactgatgggcacactccatcgtgccataactcattcccacaccacctgaaaatataacatttgaagacccgtcattagatgtgatccttcttttaagagttttacatgctatcagtcgatactggtattacttgtatgataatgcaatgtgcaaggaaattattccaactagtgaatttattaacagtaagttaacagcaaaagcaaataggcaacttcaagatcctttagtaatcatgacaggaaacatcccaacatggcttactgagctaggaaaaacctgcccatttttctttccttttgatacccggcaaatgcttttttatgtaactgcatttgatcgggaccgagcaatgcaaagattacttgataccaacccagaaatcaaccagtctgattctcaagatagcagagttgcacctagattggatagaaaaaaacgtactgtgaaccgagaggagctgctgaaacaggcggagtctgtgatgcaggacctcggcagctcacgggccatgttagaaatccagtatgaaaatgaggttggtacaggtcttgggcctacactggagttttatgcgcttgtatctcaggaactacagagagctgacttgggtctttggagaggtgaagaagtaactcttagcaatccaaaagggagccaagaagggaccaagtatattcaaaacctccagggcctgtttgcgcttccctttggtaggacagcaaagccagctcatatcgcaaaggttaagatgaagtttcgcttcttaggaaaattaatggccaaggctatcatggatttcagattggtggaccttccccttggcttacccttttataaatggatgctacggcaagaaacttcactgacatcacacgatttgtttgacatcgacccagttgtagccagatcagtttatcacctagaagacattgtcagacagaagaaaagacttgaacaagataaatcccagaccaaagagagtctacagtatgcattagaaaccttgactatgaatggctgctcagttgaagatctaggactggatttcactctgccagggtttcccaatatcgaactgaagaaaggagggaaggatataccagtcactatccacaatttagaggagtatctaagactggttatattctgggcactaaatgaaggcgtttctaggcaatttgattcgttcagagatggatttgaatcagtcttcccactcagtcatcttcagtacttctacccggaggaactggatcagctcctttgtggcagtaaagcagacacttgggatgcaaagacactgatggaatgctgtaggcctgatcatggttatactcatgacagtcgggctgtgaagtttttgtttgagattctcagtagttttgataatgagcagcagaggttatttctccagtttgtgactggtagcccaagattgcctgttggaggattccggagtttgaatccacctttgacaattgtccgaaagacgtttgaatcaacagaaaacccagatgacttcttgccctctgtaatgacttgtgtgaactatcttaagttgccggactattcaagcattgagataatgcgtgaaaaactgttgatagcagcaagagaagggcagcagtcgttccatctttcctgatcatagcaagaaatgcagtgtctgcctgttacagcaaaagaaacaaatcatgatttcttttctaatgttatcacctgagtcaaggaaacatgttacgccttcttgttgtaggaaaaacggcttgcagattataaagagacatttggttgatattcattaatggccccatggacttaaagtgatcaggccctaaaacgttgttgtgatgaggtttctttagcaagttcttgtttaaattatcatttatttgatgagtgaagtttttaacatgctttgctgtgtgaaatttaaaaaagggatgtttttccaggctggaacaataaatgtggctgtgcagtttaattctgggctgtgtgtatccatctagctaagtctgcagttttctttcctccaaagacaactcttgtacataagtacagaaatttaagctcacatgtatttgacaaatatagtttagtagactagctctatgtgcttttcactttcctctgattttctctccctgattcattattatctgtgcagctcacagttttttttttgtatacaactcacagttctcaaattttcgttacccatgggcttctgttgtcccatgttctctccagttaagatctaatttaaaattcattggattgaaatttattgaatataattcagcttttgtaactaggtagacttttcttatagtttagttttaatatagtttagggtattactggctttttcccaggtgacacactaaggactgtttacatggcaattccagcagcaacagcctctggaatgagacaaggaaagctcatttgtttcttttatgaaggttaagaagtctacagcttgggctggccggtatttattattctgtggccagaggattttaaattaatgtaaattttttaaacaaaataagcagttttccttccctgttggagtaaaaaaatttttttccctttgttgttttacgtttttgttcatagtcttctttattccacgctcctcttccccttctcccagtgctgacttgggacaaaacagttcagcctttgtctcgacgcagataaaagcacctgtaagcaatgctgtccagtcattttatgtgctgatttctcaaatctgcaataatccatcaggttaatgtttttacctgaaaataaagaaagtttgcttcacctttttgtttatagttttgtgctgtatgcataactttcaattgtatagatgtatttcaatgcaaggaaatccacatatctccatgattcgggtcatggctgattttgctattcaaacaatttataatagcaacttgaagaaactaaaatgtgaagagaaaatgggaggagattccttcctaaggtccaaaactaggcctgtggcataaatttgaaggaattttccataattcatctccttgaaaataagagatgagctagtttttttttttaattgaactttgagaaatcaatttttttgactgttctgtaagttttaattaattgacacaaaagcccttttccctatcccaccacccaaaagaa

SEQ ID NO: 408540 - DNA, 3158 bp, Homo sapiens
gatacaagtaatacccagtatcgactgatagcatgtgatccttcttttaagagttttacatgctatcagtcgatacaagtaataccagtatcgactgatagcatgtatgataatgcaatgtgcaaggaaattattccaactagtgaatttattaacagtaagttaacagcaaaagcaaataggcaacttcaagatcctttagtaatcatgacaggaaacatcccaacatggcttactgagctaggaaaaacctgcccatttttctttccttttgatacccggcaaatgcttttttatgtaactgcatttgatcgggaccgagcaatgcaaagattacttgataccaacccagaaatcaaccagtctgattctcaagatagcagagttgcacctagattggatagaaaaaaacgtactgtgaaccgagaggagctgctgaaacaggcggagtctgtgatgcaggacctcggcagctcacgggccatgttagaaatccagtatgaaaatgaggttggtacaggtcttgggcctacactggagttttatgcgcttgtatctcaggaactacagagagctgacttgggtctttggagaggtgaagaagtaactcttagcaatccaaaagggagccaagaagggaccaagtatattcaaaacctccagggcctgtttgcgcttccctttggtaggacagcaaagccagctcatatcgcaaaggttaagatgaagtttcgcttcttaggaaaattaatggccaaggctatcatggatttcagattggtggaccttccccttggcttacccttttataaatggatgctacggcaagaaacttcactgacatcacacgatttgtttgacatcgacccagttgtagccagatcagtttatcacctagaagacattgtcagacagaagaaaagacttgaacaagataaatcccagaccaaagagagtctacagtatgcattagaaaccttgactatgaatggctgctcagttgaagatctaggactggatttcactctgccagggtttcccaatatcgaactgaagaaaggagggaaggatataccagtcactatccacaatttagaggagtatctaagactggttatattctgggcactaaatgaaggcgtttctaggcaatttgattcgttcagagatggatttgaatcagtcttcccactcagtcatcttcagtacttctacccggaggaactggatcagctcctttgtggcagtaaagcagacacttgggatgcaaagacactgatggaatgctgtaggcctgatcatggttatactcatgacagtcgggctgtgaagtttttgtttgagattctcagtagttttgataatgagcagcagaggttatttctccagtttgtgactggtagcccaagattgcctgttggaggattccggagtttgaatccacctttgacaattgtccgaaagacgtttgaatcaacagaaaacccagatgacttcttgccctctgtaatgacttgtgtgaactatcttaagttgccggactattcaagcattgagataatgcgtgaaaaactgttgatagcagcaagagaagggcagcagtcgttccatctttcctgatcatagcaagaaatgcagtgtctgcctgttacagcaaaagaaacaaatcatgatttcttttctaatgttatcacctgagtcaaggaaacatgttacgccttcttgttgtaggaaaaacggcttgcagattataaagagacatttggttgatattcattaatggccccatggacttaaagtgatcaggccctaaaacgttgttgtgatgaggtttctttagcaagttcttgtttaaattatcatttatttgatgagtgaagtttttaacatgctttgctgtgtgaaatttaaaaaagggatgtttttccaggctggaacaataaatgtggctgtgcagtttaattctgggctgtgtgtatccatctagctaagtctgcagttttctttcctccaaagacaactcttgtacataagtacagaaatttaagctcacatgtatttgacaaatatagtttagtagactagctctatgtgcttttcactttcctctgattttctctccctgattcattattatctgtgcagctcacagttttttttttgtatacaactcacagttctcaaattttcgttacccatgggcttctgttgtcccatgttctctccagttaagatctaatttaaaattcattggattgaaatttattgaatataattcagcttttgtaactaggtagacttttcttatagtttagttttaatatagtttagggtattactggctttttcccaggtgacacactaaggactgtttacatggcaattccagcagcaacagcctctggaatgagacaaggaaagctcatttgtttcttttatgaaggttaagaagtctacagcttgggctggccggtatttattattctgtggccagaggattttaaattaatgtaaattttttaaacaaaataagcagttttccttccctgttggagtaaaaaaatttttttccctttgttgttttacgtttttgttcatagtcttctttattccacgctcctcttccccttctcccagtgctgacttgggacaaaacagttcagcctttgtctcgacgcagataaaagcacctgtaagcaatgctgtccagtcattttatgtgctgatttctcaaatctgcaataatccatcaggttaatgtttttacctgaaaataaagaaagtttgcttcacctttttgtttatagttttgtgctgtatgcataactttcaattgtatagatgtatttcaatgcaaggaaatccacatatctccatgattcgggtcatggctgattttgctattcaaacaatttataatagcaacttgaagaaactaaaatgtgaagagaaaatgggaggagattccttcctaaggtccaaaactaggcctgtggcataaatttgaaggaattttccataattcatctccttgaaaataagagatgagctagtttttttttttaattgaactttgagaaatcaatttttttgactgttctgtaagttttaattaattgacacaaaagcccttttccctatcccaccacccaaaagaa

SEQ ID NO: 408541 - DNA, 7636 bp, Homo sapiens
gtgctgcggctcagctgataattgaaggaacccggagccgccgccgccgcgccgctggggggggtggggggagctagtggaagttactgccgcgccaccgagtccggaccggagactttggggcctaactagtgaatggtagtgtctagaaagggtatgtcccttcaagagagaggtgccaatgtccaaccggcctaataacaatccaggggggtcactgcgacgttcacagaggaacactgccggggcccaaccacaagacgactcaataggaggaagaagctgcagttcatcatctgctgtgatagttccacaaccagaggatccagacagagccaatacttcagaaagacaaaaaacggggcaggtgcctaagaaagacaattctcgaggagtgaagcgcagtgctagtccagactacaacaggaccaattctcctagctctgcaaaaaaaccaaaagcacttcagcatactgaatctccctcagaaacaaataagccacatagtaagtcaaagaagagacatttagaccaggagcaacaactgaaatctgcacaatcaccatcaacaagcaaggctcataccaggaagagtggggccactggcggttcacggagtcagaaaagaaaaaggacagagagttcttgtgtaaagagtggctccgggtctgaatcaactggtgcagaagagagatctgcgaaacctaccaagctggcttcaaaatcagccacctcagccaaagctgggtgtagcaccatcactgattcttcttctgctgcctctacttcctcctcgtcttctgctgtagcctcggcctcctccactgtaccaccaggtgccagagtgaaacaaggaaaagatcagaacaaggccaggcgttcccgttcagcgtccagtcccagccccagaagaagtagcagggaaaaggaacagaggtcttctaagtcagagacatcaaaacctggaccttctggattacaggccaaattagcaagtttaagaaaatctacgaagaaacgcagtgagtctccacctgctgagctccccagtttgaggcggagcacacgccaaaagaccacgggctcctgtgctagtaccagtcggcgaggctctggcctgggcaaaagaggagcagctgaagctcgtcgacaggagaaaatggcagaccctgaaagcaaccaggaggcagtaaattcttcagctgctcggacagatgaagctccccaaggagctgcaggggctgttggcatgaccacctctggggagagtgaatcagatgattccgagatgggacgtttgcaagctttgttagaggcaaggggtcttccccctcacctatttggtcctcttggtcctcggatgtcacagcttttccatagaacaattggaagtggagctagttctaaggcccagcagctactacaaggattgcaagccagtgatgaaagtcaacagcttcaggcagttattgagatgtgtcagttactggtcatgggaaatgaggagacactgggagggtttcctgtcaagagtgttgttccagctttgattacgttacttcagatggagcacaattttgatattatgaaccatgcttgtcgagccttaacatacatgatggaagcacttcctcgatcttctgctgttgtagtagatgctattcctgtctttttagaaaagctgcaagttattcagtgtattgatgtggcagagcaggccttgactgccttggagatgttgtcacggagacatagtaaagccattctacaggcgggtggtttggcagactgcttgctgtacctagaattcttcagcataaatgcccaaagaaatgcattagcaattgcagctaattgctgccagagtatcacgccagatgaatttcattttgtggcagattcactcccattgctaacccaaaggctaacacatcaggataaaaagtcagtagaaagcacttgcctttgttttgcacgcctagtggacaacttccagcatgaggagaatttactccagcaggttgcttccaaagatctgcttacaaatgttcaacagctgttggtagtgactccacccattttaagttctgggatgtttataatggtggttcgcatgttttctctgatgtgttccaactgtccaactttagctgttcaacttatgaaacaaaacattgcagaaacgcttcactttctcctgtgtggtgcctccaatggaagttgtcaggaacagattgatcttgttccacgaagccctcaagagttgtatgaactgacatctctgatttgtgaacttatgccatgtttaccaaaagaaggcatttttgcagttgataccatgttgaagaagggaaatgcacagaacacagatggtgcgatatggcagtggcgtgatgatcggggcctctggcatccatataacaggattgacagccggatcattgaggcagcccatcaggtcggtgaggatgagataagcttgtccactctgggacgagtttatactattgattttaattctatgcagcaaatcaatgaggacacgggaacagcacgtgccattcagagaaaacctaacccgttagccaatagtaacactagtggatattcagagtcaaagaaggatgatgctcgagcacagcttatgaaagaggatccggaactggctaagtcttttattaagacattatttggtgttctttatgaagtgtatagttcctcagcaggacctgcggtcagacataagtgccttagagcaattcttaggataatttattttgcggatgctgaacttctgaaggatgttctgaaaaatcatgctgtttcaagtcacattgcttccatgctgtcaagccaagacctgaagatagtagtgggagcacttcagatggcagaaattttaatgcagaagttacctgatatttttagtgtttacttcagaagagaaggtgtaatgcatcaagtaaaacacttagcagaatcagagtctttgttgacaagtccaccaaaggcatgtacgaatggatcgggatccatgggatccacaacttcagtcagcagtgggacagccacagctgccactcatgctgcagctgacttgggatcacccagcttgcagcacagcagggatgattctttagatctcagccctcaaggtcgattaagtgatgttctaaagagaaaacgactgccaaaacgagggccaagaaggccaaagtactcacctccaagagatgatgacaaagtagacaatcaagctaaaagccccaccactactcagtcacctaaatcttctttcctggcaagcttgaatccaaaaacatggggaaggttaagtacacagtccaacagcaacaacattgagccagcacggactgcgggaggtagtggccttgccagggctgcctcaaaggataccatctccaataatagagaaaaaattaaaggttggattaaggagcaggcacataaatttgtagaacgttatttcagttctgagaatatggatggaagcaaccctgcattgaatgtccttcagagactttgtgctgcaaccgaacaactcaacctccaggtggatggtggagctgagtgccttgtagaaatccgtagcatagtctcagagtcagatgtttcatcatttgaaatccaacatagtggatttgtgaagcagctgttgctttatttgacatctaaaagtgaaaaggatgctgtgagcagagagatcagattaaagcgatttcttcatgtatttttttcttctccacttcctggagaagagcccattggaagagtggaaccagtgggtaatgcacctttgttggcattagttcacaagatgaacaactgcctcagccagatggaacaatttccagtcaaagtacatgatttccctagtggaaatgggacaggaggcagcttttctctcaacagaggatcacaggctttaaaatttttcaacacacatcaattaaaatgccagttacaaaggcatccagactgtgcaaatgtgaagcagtggaagggtggacctgtcaagattgaccctctggctttggtacaagccatcgagagataccttgtagttagagggtatggaagagtaagagaagatgatgaagacagcgatgacgatggatcagatgaggaaatagatgagtctctggctgctcagttcctaaattcaggaaatgtaagacacaggctgcagttttatattggagaacatttgctgccgtataacatgactgtgtatcaggcagtacggcagtttagtatacaggctgaagatgaaagagaatccacagatgatgagagcaatcctctaggcagagctggtatttggacaaagactcatacaatatggtataaacctgtgagagaggatgaagaaagtaataaagattgtgttggtggtaaaagaggaagagcccaaacagctccaacgaaaacttcccctagaaatgcaaaaaagcatgatgagttatggcacgatggagtgtgcccatcagtatcaaatcctttagaagtttacctcattcccacaccacctgaaaatataacatttgaagacccgtcattagatgtgatccttcttttaagagttttacatgctatcagtcgatactggtattacttgtatgataatgcaatgtgcaaggaaattattccaactagtgaatttattaacagtaagttaacagcaaaagcaaataggcaacttcaagatcctttagtaatcatgacaggaaacatcccaacatggcttactgagctaggaaaaacctgcccatttttctttccttttgatacccggcaaatgcttttttatgtaactgcatttgatcgggaccgagcaatgcaaagattacttgataccaacccagaaatcaaccagtctgattctcaagatagcagagttgcacctagattggatagaaaaaaacgtactgtgaaccgagaggagctgctgaaacaggcggagtctgtgatgcaggacctcggcagctcacgggccatgttagaaatccagtatgaaaatgaggttggtacaggtcttgggcctacactggagttttatgcgcttgtatctcaggaactacagagagctgacttgggtctttggagaggtgaagaagtaactcttagcaatccaaaagggagccaagaagggaccaagtatattcaaaacctccagggcctgtttgcgcttccctttggtaggacagcaaagccagctcatatcgcaaaggttaagatgaagtttcgcttcttaggaaaattaatggccaaggctatcatggatttcagattggtggaccttccccttggcttacccttttataaatggatgctacggcaagaaacttcactgacatcacacgatttgtttgacatcgacccagttgtagccagatcagtttatcacctagaagacattgtcagacagaagaaaagacttgaacaagataaatcccagaccaaagagagtctacagtatgcattagaaaccttgactatgaatggctgctcagttgaagatctaggactggatttcactctgccagggtttcccaatatcgaactgaagaaaggagggaaggatataccagtcactatccacaatttagaggagtatctaagactggttatattctgggcactaaatgaaggcgtttctaggcaatttgattcgttcagagatggatttgaatcagtcttcccactcagtcatcttcagtacttctacccggaggaactggatcagctcctttgtggcagtaaagcagacacttgggatgcaaagacactgatggaatgctgtaggcctgatcatggttatactcatgacagtcgggctgtgaagtttttgtttgagattctcagtagttttgataatgagcagcagaggttatttctccagtttgtgactggtagcccaagattgcctgttggaggattccggagtttgaatccacctttgacaattgtccgaaagacgtttgaatcaacagaaaacccagatgacttcttgccctctgtaatgacttgtgtgaactatcttaagttgccggactattcaagcattgagataatgcgtgaaaaactgttgatagcagcaagagaagggcagcagtcgttccatctttcctgatcatagcaagaaatgcagtgtctgcctgttacagcaaaagaaacaaatcatgatttcttttctaatgttatcacctgagtcaaggaaacatgttacgccttcttgttgtaggaaaaacggcttgcagattataaagagacatttggttgatattcattaatggccccatggacttaaagtgatcaggccatttgatgagtgaagtttttaacatgctttgctgtgtgaaatttaaaaaagggatgtttttccaggctggaacaataaatgtggctgtgcagtttaattctgggctgtgtgtatccatctagctaagtctgcagttttctttcctccaaagacaactcttgtacataagtacagaaatttaagctcacatgtatttgacaaatatagtttagtagactagctctatgtgcttttcactttcctctgattttctctccctgattcattattatctgtgcagctcacagttttttttttgtatacaactcacagttctcaaattttcgttacccatgggcttctgttgtcccatgttctctccagttaagatctaatttaaaattcattggattgaaatttattgaatataattcagcttttgtaactaggtagacttttcttatagtttagttttaatatagtttagggtattactggctttttcccaggtgacacactaaggactgtttacatggcaattccagcagcaacagcctctggaatgagacaaggaaagctcatttgtttcttttatgaaggttaagaagtctacagcttgggctggccggtatttattattctgtggccagaggattttaaattaatgtaaattttttaaacaaaataagcagttttccttccctgttggagtaaaaaaatttttttccctttgttgttttacgtttttgttcatagtcttctttattccacgctcctcttccccttctcccagtgctgacttgggacaaaacagttcagcctttgtctcgacgcagataaaagcacctgtaagcaatgctgtccagtcattttatgtgctgatttctcaaatctgcaataatccatcaggttaatgtttttacctgaaaataaagaaagtttgcttcacctttttgtttatagttttgtgctgtatgcataactttcaattgtatagatgtatttcaatgcaaggaaatccacatatctccatgattcgggtcatggctgattttgctattcaaacaatttataatagcaacttgaagaaactaaaatgtgaagagaaaatgggaggagattccttcctaaggtccaaaactaggcctgtggcataaatttgaaggaattttccataattcatctccttgaaaataagagatgagctagtttttttttttaattgaactttgagaaatcaatttttttgactgttctgtaagttttaattaattgacacaaaagcccttttccctatcccaccacccaaaagaa

SEQ ID NO: 408542 - DNA, 2243 bp, Homo sapiens
ggtaggggccccacattagatgttgacctgatgttttactcatgtagttttctagcagattattttaaagtcttaataacttgtttgttctttataaagtgatccagaagggtgtttcactgtactttgccacatattaaatagtaaagagatttgaaatcttgtcacagttttttgaaaactttctttttgcagctggttatattctgggcactaaatgaaggcgtttctaggcaatttgattcgttcagagatggatttgaatcagtcttcccactcagtcatcttcagtacttctacccggaggaactggatcagctcctttgtggcagtaaagcagacacttgggatgcaaagacactgatggaatgctgtaggcctgatcatggttatactcatgacagtcgggctgtgaagtttttgtttgagattctcagtagttttgataatgagcagcagaggttatttctccagtttgtgactggtagcccaagattgcctgttggaggattccggagtttgaatccacctttgacaattgtccgaaagacgtttgaatcaacagaaaacccagatgacttcttgccctctgtaatgacttgtgtgaactatcttaagttgccggactattcaagcattgagataatgcgtgaaaaactgttgatagcagcaagagaagggcagcagtcgttccatctttcctgatcatagcaagaaatgcagtgtctgcctgttacagcaaaagaaacaaatcatgatttcttttctaatgttatcacctgagtcaaggaaacatgttacgccttcttgttgtaggaaaaacggcttgcagattataaagagacatttggttgatattcattaatggccccatggacttaaagtgatcaggccctaaaacgttgttgtgatgaggtttctttagcaagttcttgtttaaattatcatttatttgatgagtgaagtttttaacatgctttgctgtgtgaaatttaaaaaagggatgtttttccaggctggaacaataaatgtggctgtgcagtttaattctgggctgtgtgtatccatctagctaagtctgcagttttctttcctccaaagacaactcttgtacataagtacagaaatttaagctcacatgtatttgacaaatatagtttagtagactagctctatgtgcttttcactttcctctgattttctctccctgattcattattatctgtgcagctcacagttttttttttgtatacaactcacagttctcaaattttcgttacccatgggcttctgttgtcccatgttctctccagttaagatctaatttaaaattcattggattgaaatttattgaatataattcagcttttgtaactaggtagacttttcttatagtttagttttaatatagtttagggtattactggctttttcccaggtgacacactaaggactgtttacatggcaattccagcagcaacagcctctggaatgagacaaggaaagctcatttgtttcttttatgaaggttaagaagtctacagcttgggctggccggtatttattattctgtggccagaggattttaaattaatgtaaattttttaaacaaaataagcagttttccttccctgttggagtaaaaaaatttttttccctttgttgttttacgtttttgttcatagtcttctttattccacgctcctcttccccttctcccagtgctgacttgggacaaaacagttcagcctttgtctcgacgcagataaaagcacctgtaagcaatgctgtccagtcattttatgtgctgatttctcaaatctgcaataatccatcaggttaatgtttttacctgaaaataaagaaagtttgcttcacctttttgtttatagttttgtgctgtatgcataactttcaattgtatagatgtatttcaatgcaaggaaatccacatatctccatgattcgggtcatggctgattttgctattcaaacaatttataatagcaacttgaagaaactaaaatgtgaagagaaaatgggaggagattccttcctaaggtccaaaactaggcctgtggcataaatttgaaggaattttccataattcatctccttgaaaataagagatgagctagtttttttttttaattgaactttgagaaatcaatttttttgactgttctgtaagttttaattaattgacacaaaagcccttttccctatcccaccacccaaaagaa

SEQ ID NO: 408543 - DNA, 1964 bp, Homo sapiens
caagtgtctgctttacatccacaaaggagctgatccagttcctccgggtagaagtactgaagatgactgagtgggaagacactgatggaatgctgtaggcctgatcatggttatactcatgacagtcgggctgtgaagtttttgtttgagattctcagtagttttgataatgagcagcagaggttatttctccagtttgtgactggtagcccaagattgcctgttggaggattccggagtttgaatccacctttgacaattgtccgaaagacgtttgaatcaacagaaaacccagatgacttcttgccctctgtaatgacttgtgtgaactatcttaagttgccggactattcaagcattgagataatgcgtgaaaaactgttgatagcagcaagagaagggcagcagtcgttccatctttcctgatcatagcaagaaatgcagtgtctgcctgttacagcaaaagaaacaaatcatgatttcttttctaatgttatcacctgagtcaaggaaacatgttacgccttcttgttgtaggaaaaacggcttgcagattataaagagacatttggttgatattcattaatggccccatggacttaaagtgatcaggccctaaaacgttgttgtgatgaggtttctttagcaagttcttgtttaaattatcatttatttgatgagtgaagtttttaacatgctttgctgtgtgaaatttaaaaaagggatgtttttccaggctggaacaataaatgtggctgtgcagtttaattctgggctgtgtgtatccatctagctaagtctgcagttttctttcctccaaagacaactcttgtacataagtacagaaatttaagctcacatgtatttgacaaatatagtttagtagactagctctatgtgcttttcactttcctctgattttctctccctgattcattattatctgtgcagctcacagttttttttttgtatacaactcacagttctcaaattttcgttacccatgggcttctgttgtcccatgttctctccagttaagatctaatttaaaattcattggattgaaatttattgaatataattcagcttttgtaactaggtagacttttcttatagtttagttttaatatagtttagggtattactggctttttcccaggtgacacactaaggactgtttacatggcaattccagcagcaacagcctctggaatgagacaaggaaagctcatttgtttcttttatgaaggttaagaagtctacagcttgggctggccggtatttattattctgtggccagaggattttaaattaatgtaaattttttaaacaaaataagcagttttccttccctgttggagtaaaaaaatttttttccctttgttgttttacgtttttgttcatagtcttctttattccacgctcctcttccccttctcccagtgctgacttgggacaaaacagttcagcctttgtctcgacgcagataaaagcacctgtaagcaatgctgtccagtcattttatgtgctgatttctcaaatctgcaataatccatcaggttaatgtttttacctgaaaataaagaaagtttgcttcacctttttgtttatagttttgtgctgtatgcataactttcaattgtatagatgtatttcaatgcaaggaaatccacatatctccatgattcgggtcatggctgattttgctattcaaacaatttataatagcaacttgaagaaactaaaatgtgaagagaaaatgggaggagattccttcctaaggtccaaaactaggcctgtggcataaatttgaaggaattttccataattcatctccttgaaaataagagatgagctagtttttttttttaattgaactttgagaaatcaatttttttgactgttctgtaagttttaattaattgacacaaaagcccttttccctatcccaccacccaaaagaa

SEQ ID NO: 408544 - DNA, 1880 bp, Homo sapiens
tcgtgccgaattcggcagagtcatggttatactcatgacagtcgggctgtgaagtttttgtttgagattctcagtagttttgataatgagcagcagaggttatttctccagtttgtgactggtagcccaagattgcctgttggaggattccggagtttgaatccacctttgacaattgtccgaaagacgtttgaatcaacagaaaacccagatgacttcttgccctctgtaatgacttgtgtgaactatcttaagttgccggactattcaagcattgagataatgcgtgaaaaactgttgatagcagcaagagaagggcagcagtcgttccatctttcctgatcatagcaagaaatgcagtgtctgcctgttacagcaaaagaaacaaatcatgatttcttttctaatgttatcacctgagtcaaggaaacatgttacgccttcttgttgtaggaaaaacggcttgcagattataaagagacatttggttgatattcattaatggccccatggacttaaagtgatcaggccctaaaacgttgttgtgatgaggtttctttagcaagttcttgtttaaattatcatttatttgatgagtgaagtttttaacatgctttgctgtgtgaaatttaaaaaagggatgtttttccaggctggaacaataaatgtggctgtgcagtttaattctgggctgtgtgtatccatctagctaagtctgcagttttctttcctccaaagacaactcttgtacataagtacagaaatttaagctcacatgtatttgacaaatatagtttagtagactagctctatgtgcttttcactttcctctgattttctctccctgattcattattatctgtgcagctcacagttttttttttgtatacaactcacagttctcaaattttcgttacccatgggcttctgttgtcccatgttctctccagttaagatctaatttaaaattcattggattgaaatttattgaatataattcagcttttgtaactaggtagacttttcttatagtttagttttaatatagtttagggtattactggctttttcccaggtgacacactaaggactgtttacatggcaattccagcagcaacagcctctggaatgagacaaggaaagctcatttgtttcttttatgaaggttaagaagtctacagcttgggctggccggtatttattattctgtggccagaggattttaaattaatgtaaattttttaaacaaaataagcagttttccttccctgttggagtaaaaaaatttttttccctttgttgttttacgtttttgttcatagtcttctttattccacgctcctcttccccttctcccagtgctgacttgggacaaaacagttcagcctttgtctcgacgcagataaaagcacctgtaagcaatgctgtccagtcattttatgtgctgatttctcaaatctgcaataatccatcaggttaatgtttttacctgaaaataaagaaagtttgcttcacctttttgtttatagttttgtgctgtatgcataactttcaattgtatagatgtatttcaatgcaaggaaatccacatatctccatgattcgggtcatggctgattttgctattcaaacaatttataatagcaacttgaagaaactaaaatgtgaagagaaaatgggaggagattccttcctaaggtccaaaactaggcctgtggcataaatttgaaggaattttccataattcatctccttgaaaataagagatgagctagtttttttttttaattgaactttgagaaatcaatttttttgactgttctgtaagttttaattaattgacacaaaagcccttttccctatcccaccacccaaaagaa

SEQ ID NO: 408545 - DNA, 5255 bp, Homo sapiens
gtgctgcggctcagctgataattgaaggaacccggagccgccgccgccgcgccgctggggggggtggggggagctagtggaagttactgccgcgccaccgagtccggaccggagactttggggcctaactagtgaatggtagtgtctagaaagggtatgtcccttcaagagagaggtgccaatgtccaaccggcctaataacaatccaggggggtcactgcgacgttcacagaggaacactgccggggcccaaccacaagacgactcaataggaggaagaagctgcagttcatcatctgctgtgatagttccacaaccagaggatccagacagagccaatacttcagaaagacaaaaaacggggcaggtgcctaagaaagacaattctcgaggagtgaagcgcagtgctagtccagactacaacaggaccaattctcctagctctgcaaaaaaaccaaaagcacttcagcatactgaatctccctcagaaacaaataagccacatagtaagtcaaagaagagacatttagaccaggagcaacaactgaaatctgcacaatcaccatcaacaagcaaggctcataccaggaagagtggggccactggcggttcacggagtcagaaaagaaaaaggacagagagttcttgtgtaaagagtggctccgggtctgaatcaactggtgcagaagagagatctgcgaaacctaccaagctggcttcaaaatcagccacctcagccaaagctgggtgtagcaccatcactgattcttcttctgctgcctctacttcctcctcgtcttctgctgtagcctcggcctcctccactgtaccaccaggtgccagagtgaaacaaggaaaagatcagaacaaggccaggcgttcccgttcagcgtccagtcccagccccagaagaagtagcagggaaaaggaacagaggtcttctaagtcagagacatcaaaacctggaccttctggattacaggccaaattagcaagtttaagaaaatctacgaagaaacgcagtgagtctccacctgctgagctccccagtttgaggcggagcacacgccaaaagaccacgggctcctgtgctagtaccagtcggcgaggctctggcctgggcaaaagaggagcagctgaagctcgtcgacaggagaaaatggcagaccctgaaagcaaccaggaggcagtaaattcttcagctgctcggacagatgaagctccccaaggagctgcaggggctgttggcatgaccacctctggggagagtgaatcagatgattccgagatgggacgtttgcaagctttgttagaggcaaggggtcttccccctcacctatttggtcctcttggtcctcggatgtcacagcttttccatagaacaattggaagtggagctagttctaaggcccagcagctactacaaggattgcaagccagtgatgaaagtcaacagcttcaggcagttattgagatgtgtcagttactggtcatgggaaatgaggagacactgggagggtttcctgtcaagagtgttgttccagctttgattacgttacttcagatggagcacaattttgatattatgaaccatgcttgtcgagccttaacatacatgatggaagcacttcctcgatcttctgctgttgtagtagatgctattcctgtctttttagaaaagctgcaagttattcagtgtattgatgtggcagagcaggccttgactgccttggagatgttgtcacggagacatagtaaagccattctacaggcgggtggtttggcagactgcttgctgtacctagaattcttcagcataaatgcccaaagaaatgcattagcaattgcagctaattgctgccagagtatcacgccagatgaatttcattttgtggcagattcactcccattgctaacccaaaggctaacacatcaggataaaaagtcagtagaaagcacttgcctttgttttgcacgcctagtggacaacttccagcatgaggagaatttactccagcaggttgcttccaaagatctgcttacaaatgttcaacagctgttggtagtgactccacccattttaagttctgggatgtttataatggtggttcgcatgttttctctgatgtgttccaactgtccaactttagctgttcaacttatgaaacaaaacattgcagaaacgcttcactttctcctgtgtggtgcctccaatggaagttgtcaggaacagattgatcttgttccacgaagccctcaagagttgtatgaactgacatctctgatttgtgaacttatgccatgtttaccaaaagaaggcatttttgcagttgataccatgttgaagaagggaaatgcacagaacacagatggtgcgatatggcagtggcgtgatgatcggggcctctggcatccatataacaggattgacagccggatcattgaggcagcccatcaggtcggtgaggatgagataagcttgtccactctgggacgagtttatactattgattttaattctatgcagcaaatcaatgaggacacgggaacagcacgtgccattcagagaaaacctaacccgttagccaatagtaacactagtggatattcagagtcaaagaaggatgatgctcgagcacagcttatgaaagaggatccggaactggctaagtcttttattaagacattatttggtgttctttatgaagtgtatagttcctcagcaggacctgcggtcagacataagtgccttagagcaattcttaggataatttattttgcggatgctgaacttctgaaggatgttctgaaaaatcatgctgtttcaagtcacattgcttccatgctgtcaagccaagacctgaagatagtagtgggagcacttcagatggcagaaattttaatgcagaagttacctgatatttttagtgtttacttcagaagagaaggtgtaatgcatcaagtaaaacacttagcagaatcagagtctttgttgacaagtccaccaaaggcatgtacgaatggatcgggatccatgggatccacaacttcagtcagcagtgggacagccacagctgccactcatgctgcagctgacttgggatcacccagcttgcagcacagcagggatgattctttagatctcagccctcaaggtcgattaagtgatgttctaaagagaaaacgactgccaaaacgagggccaagaaggccaaagtactcacctccaagagatgatgacaaagtagacaatcaagctaaaagccccaccactactcagtcacctaaatcttctttcctggcaagcttgaatccaaaaacatggggaaggttaagtacacagtccaacagcaacaacattgagccagcacggactgcgggaggtagtggccttgccagggctgcctcaaaggataccatctccaataatagagaaaaaattaaaggttggattaaggagcaggcacataaatttgtagaacgttatttcagttctgagaatatggatggaagcaaccctgcattgaatgtccttcagagactttgtgctgcaaccgaacaactcaacctccaggtggatggtggagctgagtgccttgtagaaatccgtagcatagtctcagagtcagatgtttcatcatttgaaatccaacatagtggatttgtgaagcagctgttgctttatttgacatctaaaagtgaaaaggatgctgtgagcagagagatcagattaaagcgatttcttcatgtatttttttcttctccacttcctggagaagagcccattggaagagtggaaccagtgggtaatgcacctttgttggcattagttcacaagatgaacaactgcctcagccagatggaacaatttccagtcaaagtacatgatttccctagtggaaatgggacaggaggcagcttttctctcaacagaggatcacaggctttaaaatttttcaacacacatcaattaaaatgccagttacaaaggcatccagactgtgcaaatgtgaagcagtggaagggtggacctgtcaagattgaccctctggctttggtacaagccatcgagagataccttgtagttagagggtatggaagagtaagagaagatgatgaagacagcgatgacgatggatcagatgaggaaatagatgagtctctggctgctcagttcctaaattcaggaaatgtaagacacaggctgcagttttatattggagaacatttgctgccgtataacatgactgtgtatcaggcagtacggcagtttagtatacaggctgaagatgaaagagaatccacagatgatgagagcaatcctctaggcagagctggtatttggacaaagactcatacaatatggtataaacctgtgagagaggatgaagaaagtaataaagattgtgttggtggtaaaagaggaagagcccaaacagctccaacgaaaacttcccctagaaatgcaaaaaagcatgatgagttatggcacgatggagtgtgcccatcagtatcaaatcctttagaagtttacctcattcccacaccacctgaaaatataacatttgaagacccgtcattagatgtgatccttcttttaagagttttacatgctatcagtcgatactggtattacttgtatgataatgcaatgtgcaaggaaattattccaactagtgaatttattaacagtaagttaacagcaaaagcaaataggcaacttcaagatcctttagtaatcatgacaggaaacatcccaacatggcttactgagctaggaaaaacctgcccatttttctttccttttgatacccggcaaatgcttttttatgtaactgcatttgatcgggaccgagcaatgcaaagattacttgataccaacccagaaatcaaccagtctgattctcaagatagcagagttgcacctagattggatagaaaaaaacgtactgtgaaccgagaggagctgctgaaacaggcggagtctgtgatgcaggacctcggcagctcacgggccatgttagaaatccagtatgaaaatgaggttggtacaggtcttgggcctacactggagttttatgcgcttgtatctcaggaactacagagagctgacttgggtctttggagaggtgaagaagtaactcttagcaatccaaaagggagccaagaagggaccaagtatattcaaaacctccagggcctgtttgcgcttccctttggtaggagctttgcctgggatactctaggcacctcag

SEQ ID NO: 408546 - DNA, 4443 bp, Homo sapiens
gtgctgcggctcagctgataattgaaggaacccggagccgccgccgccgcgccgctggggggggtggggggagctagtggaagttactgccgcgccaccgagtccggaccggagactttggggcctaactagtgaatggtagtgtctagaaagggtatgtcccttcaagagagaggtgccaatgtccaaccggcctaataacaatccaggggggtcactgcgacgttcacagaggaacactgccggggcccaaccacaagacgactcaataggaggaagaagctgcagttcatcatctgctgtgatagttccacaaccagaggatccagacagagccaatacttcagaaagacaaaaaacggggcaggtgcctaagaaagacaattctcgaggagtgaagcgcagtgctagtccagactacaacaggaccaattctcctagctctgcaaaaaaaccaaaagcacttcagcatactgaatctccctcagaaacaaataagccacatagtaagtcaaagaagagacatttagaccaggagcaacaactgaaatctgcacaatcaccatcaacaagcaaggctcataccaggaagagtggggccactggcggttcacggagtcagaaaagaaaaaggacagagagttcttgtgtaaagagtggctccgggtctgaatcaactggtgcagaagagagatctgcgaaacctaccaagctggcttcaaaatcagccacctcagccaaagctgggtgtagcaccatcactgattcttcttctgctgcctctacttcctcctcgtcttctgctgtagcctcggcctcctccactgtaccaccaggtgccagagtgaaacaaggaaaagatcagaacaaggccaggcgttcccgttcagcgtccagtcccagccccagaagaagtagcagggaaaaggaacagaggtcttctaagtcagagacatcaaaacctggaccttctggattacaggccaaattagcaagtttaagaaaatctacgaagaaacgcagtgagtctccacctgctgagctccccagtttgaggcggagcacacgccaaaagaccacgggctcctgtgctagtaccagtcggcgaggctctggcctgggcaaaagaggagcagctgaagctcgtcgacaggagaaaatggcagaccctgaaagcaaccaggaggcagtaaattcttcagctgctcggacagatgaagctccccaaggagctgcaggggctgttggcatgaccacctctggggagagtgaatcagatgattccgagatgggacgtttgcaagctttgttagaggcaaggggtcttccccctcacctatttggtcctcttggtcctcggatgtcacagcttttccatagaacaattggaagtggagctagttctaaggcccagcagctactacaaggattgcaagccagtgatgaaagtcaacagcttcaggcagttattgagatgtgtcagttactggtcatgggaaatgaggagacactgggagggtttcctgtcaagagtgttgttccagctttgattacgttacttcagatggagcacaattttgatattatgaaccatgcttgtcgagccttaacatacatgatggaagcacttcctcgatcttctgctgttgtagtagatgctattcctgtctttttagaaaagctgcaagttattcagtgtattgatgtggcagagcaggccttgactgccttggagatgttgtcacggagacatagtaaagccattctacaggcgggtggtttggcagactgcttgctgtacctagaattcttcagcataaatgcccaaagaaatgcattagcaattgcagctaattgctgccagagtatcacgccagatgaatttcattttgtggcagattcactcccattgctaacccaaaggctaacacatcaggataaaaagtcagtagaaagcacttgcctttgttttgcacgcctagtggacaacttccagcatgaggagaatttactccagcaggttgcttccaaagatctgcttacaaatgttcaacagctgttggtagtgactccacccattttaagttctgggatgtttataatggtggttcgcatgttttctctgatgtgttccaactgtccaactttagctgttcaacttatgaaacaaaacattgcagaaacgcttcactttctcctgtgtggtgcctccaatggaagttgtcaggaacagattgatcttgttccacgaagccctcaagagttgtatgaactgacatctctgatttgtgaacttatgccatgtttaccaaaagaaggcatttttgcagttgataccatgttgaagaagggaaatgcacagaacacagatggtgcgatatggcagtggcgtgatgatcggggcctctggcatccatataacaggattgacagccggatcattgaggcagcccatcaggtcggtgaggatgagataagcttgtccactctgggacgagtttatactattgattttaattctatgcagcaaatcaatgaggacacgggaacagcacgtgccattcagagaaaacctaacccgttagccaatagtaacactagtggatattcagagtcaaagaaggatgatgctcgagcacagcttatgaaagaggatccggaactggctaagtcttttattaagacattatttggtgttctttatgaagtgtatagttcctcagcaggacctgcggtcagacataagtgccttagagcaattcttaggataatttattttgcggatgctgaacttctgaaggatgttctgaaaaatcatgctgtttcaagtcacattgcttccatgctgtcaagccaagacctgaagatagtagtgggagcacttcagatggcagaaattttaatgcagaagttacctgatatttttagtgtttacttcagaagagaaggtgtaatgcatcaagtaaaacacttagcagaatcagagtctttgttgacaagtccaccaaaggcatgtacgaatggatcgggatccatgggatccacaacttcagtcagcagtgggacagccacagctgccactcatgctgcagctgacttgggatcacccagcttgcagcacagcagggatgattctttagatctcagccctcaaggtcgattaagtgatgttctaaagagaaaacgactgccaaaacgagggccaagaaggccaaagtactcacctccaagagatgatgacaaagtagacaatcaagctaaaagccccaccactactcagtcacctaaatcttctttcctggcaagcttgaatccaaaaacatggggaaggttaagtacacagtccaacagcaacaacattgagccagcacggactgcgggaggtagtggccttgccagggctgcctcaaaggataccatctccaataatagagaaaaaattaaaggttggattaaggagcaggcacataaatttgtagaacgttatttcagttctgagaatatggatggaagcaaccctgcattgaatgtccttcagagactttgtgctgcaaccgaacaactcaacctccaggtggatggtggagctgagtgccttgtagaaatccgtagcatagtctcagagtcagatgtttcatcatttgaaatccaacatagtggatttgtgaagcagctgttgctttatttgacatctaaaagtgaaaaggatgctgtgagcagagagatcagattaaagcgatttcttcatgtatttttttcttctccacttcctggagaagagcccattggaagagtggaaccagtgggtaatgcacctttgttggcattagttcacaagatgaacaactgcctcagccagatggaacaatttccagtcaaagtacatgatttccctagtggaaatgggacaggaggcagcttttctctcaacagaggatcacaggctttaaaatttttcaacacacatcaattaaaatgccagttacaaaggcatccagactgtgcaaatgtgaagcagtggaagggtggacctgtcaagattgaccctctggctttggtacaagccatcgagagataccttgtagttagagggtatggaagagtaagagaagatgatgaagacagcgatgacgatggatcagatgaggaaatagatgagtctctggctgctcagttcctaaattcaggaaatgtaagacacaggctgcagttttatattggagaacatttgctgccgtataacatgactgtgtatcaggcagtacggcagtttagtatacaggctgaagatgaaagagaatccacagatgatgagagcaatcctctaggcagagctggtatttggacaaagactcatacaatatggcaagtctgaaaattctttcttttgttttttcataaactttgaaactgttcttgtgttttagaattcacattaactta

SEQ ID NO: 408547 - DNA, 2484 bp, Homo sapiens
gtgctgcggctcagctgataattgaaggaacccggagccgccgccgccgcgccgctggggggggtggggggagctagtggaagttactgccgcgccaccgagtccggaccggagactttggggcctaactagtgaatggtagtgtctagaaagggtatgtcccttcaagagagaggtgccaatgtccaaccggcctaataacaatccaggggggtcactgcgacgttcacagaggaacactgccggggcccaaccacaagacgactcaataggaggaagaagctgcagttcatcatctgctgtgatagttccacaaccagaggatccagacagagccaatacttcagaaagacaaaaaacggggcaggtgcctaagaaagacaattctcgaggagtgaagcgcagtgctagtccagactacaacaggaccaattctcctagctctgcaaaaaaaccaaaagcacttcagcatactgaatctccctcagaaacaaataagccacatagtaagtcaaagaagagacatttagaccaggagcaacaactgaaatctgcacaatcaccatcaacaagcaaggctcataccaggaagagtggggccactggcggttcacggagtcagaaaagaaaaaggacagagagttcttgtgtaaagagtggctccgggtctgaatcaactggtgcagaagagagatctgcgaaacctaccaagctggcttcaaaatcagccacctcagccaaagctgggtgtagcaccatcactgattcttcttctgctgcctctacttcctcctcgtcttctgctgtagcctcggcctcctccactgtaccaccaggtgccagagtgaaacaaggaaaagatcagaacaaggccaggcgttcccgttcagcgtccagtcccagccccagaagaagtagcagggaaaaggaacagaggtcttctaagtcagagacatcaaaacctggaccttctggattacaggccaaattagcaagtttaagaaaatctacgaagaaacgcagtgagtctccacctgctgagctccccagtttgaggcggagcacacgccaaaagaccacgggctcctgtgctagtaccagtcggcgaggctctggcctgggcaaaagaggagcagctgaagctcgtcgacaggagaaaatggcagaccctgaaagcaaccaggaggcagtaaattcttcagctgctcggacagatgaagctccccaaggagctgcaggggctgttggcatgaccacctctggggagagtgaatcagatgattccgagatgggacgtttgcaagctttgttagaggcaaggggtcttccccctcacctatttggtcctcttggtcctcggatgtcacagcttttccatagaacaattggaagtggagctagttctaaggcccagcagctactacaaggattgcaagccagtgatgaaagtcaacagcttcaggcagttattgagatgtgtcagttactggtcatgggaaatgaggagacactgggagggtttcctgtcaagagtgttgttccagctttgattacgttacttcagatggagcacaattttgatattatgaaccatgcttgtcgagccttaacatacatgatggaagcacttcctcgatcttctgctgttgtagtagatgctattcctgtctttttagaaaagctgcaagttattcagtgtattgatgtggcagagcaggccttgactgccttggagatgttgtcacggagacatagtaaagccattctacaggcgggtggtttggcagactgcttgctgtacctagaattcttcagcataaatgcccaaagaaatgcattagcaattgcagctaattgctgccagagtatcacgccagatgaatttcattttgtggcagattcactcccattgctaacccaaaggctaacacatcaggataaaaagtcagtagaaagcacttgcctttgttttgcacgcctagtggacaacttccagcatgaggagaatttactccagcaggttgcttccaaagatctgcttacaaatgttcaacagctgttggtagtgactccacccattttaagttctgggatgtttataatggtggttcgcatgttttctctgatgtgttccaactgtccaactttagctgttcaacttatgaaacaaaacattgcagaaacgcttcactttctcctgtgtggtgcctccaatggaagttgtcaggaacagattgatcttgttccacgaagccctcaagagttgtatgaactgacatctctgatttgtgaacttatgccatgtttaccaaaagaaggcatttttgcagttgataccatgttgaagaagggaaatgcacagaacacagatggtgcgatatggcagtggcgtgatgatcggggcctctggcatccatataacaggattgacagccggatcattgaggtagtagtttcatcgtaccgtttaaatgtgtctatttt

SEQ ID NO: 408548 - DNA, 630 bp, Homo sapiens
  misc_feature (630)..(630): n is a, c, g, or t
gcggccgcggccggagggaccggggcctggcgggaggtaggggtcgctgggtccctcctccggcttcccgcaatgaggagggcccttcacagaaccgggtgaatggtagtgtctagaaagggtatgtcccttcaagagagaggtgccaatgtccaaccggcctaataacaatccaggggggtcactgcgacgttcacagaggaacactgccggggcccaaccacaagacgactcaataggaggaaggtcacatttagggcaggcaaaacataagggatatagccctcctgagagtagaaaatctaattctaaggcacccaaagtgcagtctaatactacttctgaactgtcaaggggacacctttctaaaagaagctgcagttcatcatctgctgtgatagttccacaaccagaggatccagacagagccaatacttcagaaagacaaaaaacggggcaggtgcctaagaaagacaattctcgaggagtgaagcgcagtgctagtccagactacaacaggaccaattctcctagctctgcaaaaaaaccaaaagcacttcagcatactgaatctcccaaaagaaggcagaaaagaaggagcgcgagagaataaagcgagatcggccgaan

SEQ ID NO: 408549 - DNA, 346 bp, Homo sapiens
gtaagtaaaaatgttccttccctgaaatccctcaataattagccaactgctattgttacttgtaacctattgatgtaagtattaagaagtttttcatcaactttaacccatttttaaaaataaggctgtgtacaatcacaccttaaatacagctttcattgctgaattatccagattttgtagcgagattgattctgtttgaacaaaataagaataaagaatctcaaacaattacattgataattatggcacctgatggcatgttttgcatagatttgaatcttgagtttgtcataatgatgtatttgtcaaggtgagaggataaaatattaaacagtttgctagc

SEQ ID NO: 408550 - DNA, 7692 bp, Homo sapiens
gtgctgcggctcagctgataattgaaggaacccggagccgccgccgccgcgccgctggggggggtggggggagctagtggaagttactgccgcgccaccgagtccggaccggagactttggggcctaactagtgaatggtagtgtctagaaagggtatgtcccttcaagagagaggtgccaatgtccaaccggcctaataacaatccaggggggtcactgcgacgttcacagaggaacactgccggggcccaaccacaagacgactcaataggaggaagaagctgcagttcatcatctgctgtgatagttccacaaccagaggatccagacagagccaatacttcagaaagacaaaaaacggggcaggtgcctaagaaagacaattctcgaggagtgaagcgcagtgctagtccagactacaacaggaccaattctcctagctctgcaaaaaaaccaaaagcacttcagcatactgaatctccctcagaaacaaataagccacatagtaagtcaaagaagagacatttagaccaggagcaacaactgaaatctgcacaatcaccatcaacaagcaaggctcataccaggaagagtggggccactggcggttcacggagtcagaaaagaaaaaggacagagagttcttgtgtaaagagtggctccgggtctgaatcaactggtgcagaagagagatctgcgaaacctaccaagctggcttcaaaatcagccacctcagccaaagctgggtgtagcaccatcactgattcttcttctgctgcctctacttcctcctcgtcttctgctgtagcctcggcctcctccactgtaccaccaggtgccagagtgaaacaaggaaaagatcagaacaaggccaggcgttcccgttcagcgtccagtcccagccccagaagaagtagcagggaaaaggaacagaggtcttctaagtcagagacatcaaaacctggaccttctggattacaggccaaattagcaagtttaagaaaatctacgaagaaacgcagtgagtctccacctgctgagctccccagtttgaggcggagcacacgccaaaagaccacgggctcctgtgctagtaccagtcggcgaggctctggcctgggcaaaagaggagcagctgaagctcgtcgacaggagaaaatggcagaccctgaaagcaaccaggaggcagtaaattcttcagctgctcggacagatgaagctccccaaggagctgcaggggctgttggcatgaccacctctggggagagtgaatcagatgattccgagatgggacgtttgcaagctttgttagaggcaaggggtcttccccctcacctatttggtcctcttggtcctcggatgtcacagcttttccatagaacaattggaagtggagctagttctaaggcccagcagctactacaaggattgcaagccagtgatgaaagtcaacagcttcaggcagttattgagatgtgtcagttactggtcatgggaaatgaggagacactgggagggtttcctgtcaagagtgttgttccagctttgattacgttacttcagatggagcacaattttgatattatgaaccatgcttgtcgagccttaacatacatgatggaagcacttcctcgatcttctgctgttgtagtagatgctattcctgtctttttagaaaagctgcaagttattcagtgtattgatgtggcagagcaggccttgactgccttggagatgttgtcacggagacatagtaaagccattctacaggcgggtggtttggcagactgcttgctgtacctagaattcttcagcataaatgcccaaagaaatgcattagcaattgcagctaattgctgccagagtatcacgccagatgaatttcattttgtggcagattcactcccattgctaacccaaaggctaacacatcaggataaaaagtcagtagaaagcacttgcctttgttttgcacgcctagtggacaacttccagcatgaggagaatttactccagcaggttgcttccaaagatctgcttacaaatgttcaacagctgttggtagtgactccacccattttaagttctgggatgtttataatggtggttcgcatgttttctctgatgtgttccaactgtccaactttagctgttcaacttatgaaacaaaacattgcagaaacgcttcactttctcctgtgtggtgcctccaatggaagttgtcaggaacagattgatcttgttccacgaagccctcaagagttgtatgaactgacatctctgatttgtgaacttatgccatgtttaccaaaagaaggcatttttgcagttgataccatgttgaagaagggaaatgcacagaacacagatggtgcgatatggcagtggcgtgatgatcggggcctctggcatccatataacaggattgacagccggatcattgaggcagcccatcaggtcggtgaggatgagataagcttgtccactctgggacgagtttatactattgattttaattctatgcagcaaatcaatgaggacacgggaacagcacgtgccattcagagaaaacctaacccgttagccaatagtaacactagtggatattcagagtcaaagaaggatgatgctcgagcacagcttatgaaagaggatccggaactggctaagtcttttattaagacattatttggtgttctttatgaagtgtatagttcctcagcaggacctgcggtcagacataagtgccttagagcaattcttaggataatttattttgcggatgctgaacttctgaaggatgttctgaaaaatcatgctgtttcaagtcacattgcttccatgctgtcaagccaagacctgaagatagtagtgggagcacttcagatggcagaaattttaatgcagaagttacctgatatttttagtgtttacttcagaagagaaggtgtaatgcatcaagtaaaacacttagcagaatcagagtctttgttgacaagtccaccaaaggcatgtacgaatggatcgggatccatgggatccacaacttcagtcagcagtgggacagccacagctgccactcatgctgcagctgacttgggatcacccagcttgcagcacagcagggatgattctttagatctcagccctcaaggtcgattaagtgatgttctaaagagaaaacgactgccaaaacgagggccaagaaggccaaagtactcacctccaagagatgatgacaaagtagacaatcaagctaaaagccccaccactactcagtcacctaaatcttctttcctggcaagcttgaatccaaaaacatggggaaggttaagtacacagtccaacagcaacaacattgagccagcacggactgcgggaggtagtggccttgccagggctgcctcaaaggataccatctccaataatagagaaaaaattaaaggttggattaaggagcaggcacataaatttgtagaacgttatttcagttctgagaatatggatggaagcaaccctgcattgaatgtccttcagagactttgtgctgcaaccgaacaactcaacctccaggtggatggtggagctgagtgccttgtagaaatccgtagcatagtctcagagtcagatgtttcatcatttgaaatccaacatagtggatttgtgaagcagctgttgctttatttgacatctaaaagtgaaaaggatgctgtgagcagagagatcagattaaagcgatttcttcatgtatttttttcttctccacttcctggagaagagcccattggaagagtggaaccagtgggtaatgcacctttgttggcattagttcacaagatgaacaactgcctcagccagatggaacaatttccagtcaaagtacatgatttccctagtggaaatgggacaggaggcagcttttctctcaacagaggatcacaggctttaaaatttttcaacacacatcaattaaaatgccagttacaaaggcatccagactgtgcaaatgtgaagcagtggaagggtggacctgtcaagattgaccctctggctttggtacaagccatcgagagataccttgtagttagagggtatggaagagtaagagaagatgatgaagacagcgatgacgatggatcagatgaggaaatagatgagtctctggctgctcagttcctaaattcaggaaatgtaagacacaggctgcagttttatattggagaacatttgctgccgtataacatgactgtgtatcaggcagtacggcagtttagtatacaggctgaagatgaaagagaatccacagatgatgagagcaatcctctaggcagagctggtatttggacaaagactcatacaatatggtataaacctgtgagagaggatgaagaaagtaataaagattgtgttggtggtaaaagaggaagagcccaaacagctccaacgaaaacttcccctagaaatgcaaaaaagcatgatgagttatggcacgatggagtgtgcccatcagtatcaaatcctttagaagtttacctcattcccacaccacctgaaaatataacatttgaagacccgtcattagatgtgatccttcttttaagagttttacatgctatcagtcgatactggtattacttgtatgataatgcaatgtgcaaggaaattattccaactagtgaatttattaacagtaagttaacagcaaaagcaaataggcaacttcaagatcctttagtaatcatgacaggaaacatcccaacatggcttactgagctaggaaaaacctgcccatttttctttccttttgatacccggcaaatgcttttttatgtaactgcatttgatcgggaccgagcaatgcaaagattacttgataccaacccagaaatcaaccagtctgattctcaagatagcagagttgcacctagattggatagaaaaaaacgtactgtgaaccgagaggagctgctgaaacaggcggagtctgtgatgcaggacctcggcagctcacgggccatgttagaaatccagtatgaaaatgaggttggtacaggtcttgggcctacactggagttttatgcgcttgtatctcaggaactacagagagctgacttgggtctttggagaggtgaagaagtaactcttagcaatccaaaagggagccaagaagggaccaagtatattcaaaacctccagggcctgtttgcgcttccctttggtaggacagcaaagccagctcatatcgcaaaggttaagatgaagtttcgcttcttaggaaaattaatggccaaggctatcatggatttcagattggtggaccttccccttggcttacccttttataaatggatgctacggcaagaaacttcactgacatcacacgatttgtttgacatcgacccagttgtagccagatcagtttatcacctagaagacattgtcagacagaagaaaagacttgaacaagataaatcccagaccaaagagagtctacagtatgcattagaaaccttgactatgaatggctgctcagttgaagatctaggactggatttcactctgccagggtttcccaatatcgaactgaagaaaggagggaaggatataccagtcactatccacaatttagaggagtatctaagactggttatattctgggcactaaatgaaggcgtttctaggcaatttgattcgttcagagatggatttgaatcagtcttcccactcagtcatcttcagtacttctacccggaggaactggatcagctcctttgtggcagtaaagcagacacttgggatgcaaagacactgatggaatgctgtaggcctgatcatggttatactcatgacagtcgggctgtgaagtttttgtttgagattctcagtagttttgataatgagcagcagaggttatttctccagtttgtgactggtagcccaagattgcctgttggaggattccggagtttgaatccacctttgacaattgtccgaaagacgtttgaatcaacagaaaacccagatgacttcttgccctctgtaatgacttgtgtgaactatcttaagttgccggactattcaagcattgagataatgcgtgaaaaactgttgatagcagcaagagaagggcagcagtcgttccatctttcctgatcatagcaagaaatgcagtgtctgcctgttacagcaaaagaaacaaatcatgatttcttttctaatgttatcacctgagtcaaggaaacatgttacgccttcttgttgtaggaaaaacggcttgcagattataaagagacatttggttgatattcattaatggccccatggacttaaagtgatcaggccctaaaacgttgttgtgatgaggtttctttagcaagttcttgtttaaattatcatttatttgatgagtgaagtttttaacatgctttgctgtgtgaaatttaaaaaagggatgtttttccaggctggaacaataaatgtggctgtgcagtttaattctgggctgtgtgtatccatctagctaagtctgcagttttctttcctccaaagacaactcttgtacataagtacagaaatttaagctcacatgtatttgacaaatatagtttagtagactagctctatgtgcttttcactttcctctgattttctctccctgattcattattatctgtgcagctcacagttttttttttgtatacaactcacagttctcaaattttcgttacccatgggcttctgttgtcccatgttctctccagttaagatctaatttaaaattcattggattgaaatttattgaatataattcagcttttgtaactaggtagacttttcttatagtttagttttaatatagtttagggtattactggctttttcccaggtgacacactaaggactgtttacatggcaattccagcagcaacagcctctggaatgagacaaggaaagctcatttgtttcttttatgaaggttaagaagtctacagcttgggctggccggtatttattattctgtggccagaggattttaaattaatgtaaattttttaaacaaaataagcagttttccttccctgttggagtaaaaaaatttttttccctttgttgttttacgtttttgttcatagtcttctttattccacgctcctcttccccttctcccagtgctgacttgggacaaaacagttcagcctttgtctcgacgcagataaaagcacctgtaagcaatgctgtccagtcattttatgtgctgatttctcaaatctgcaataatccatcaggttaatgtttttacctgaaaataaagaaagtttgcttcacctttttgtttatagttttgtgctgtatgcataactttcaattgtatagatgtatttcaatgcaaggaaatccacatatctccatgattcgggtcatggctgattttgctattcaaacaatttataatagcaacttgaagaaactaaaatgtgaagagaaaatgggaggagattccttcctaaggtccaaaactaggcctgtggcataaatttgaaggaattttccataattcatctccttgaaaataagagatgagctagtttttttttttaattgaactttgagaaatcaatttttttgactgttctgtaagttttaattaattgacacaaaagcccttttccctatcccaccacccaaaagaa

SEQ ID NO: 408551 - DNA, 7659 bp, Homo sapiens
gcggccgcggccggagggaccggggcctggcgggaggtaggggtcgctgggtccctcctccggcttcccgcaatgaggagggcccttcacagaaccgggtgaatggtagtgtctagaaagggtatgtcccttcaagagagaggtgccaatgtccaaccggcctaataacaatccaggggggtcactgcgacgttcacagaggaacactgccggggcccaaccacaagacgactcaataggaggaagaagctgcagttcatcatctgctgtgatagttccacaaccagaggatccagacagagccaatacttcagaaagacaaaaaacggggcaggtgcctaagaaagacaattctcgaggagtgaagcgcagtgctagtccagactacaacaggaccaattctcctagctctgcaaaaaaaccaaaagcacttcagcatactgaatctccctcagaaacaaataagccacatagtaagtcaaagaagagacatttagaccaggagcaacaactgaaatctgcacaatcaccatcaacaagcaaggctcataccaggaagagtggggccactggcggttcacggagtcagaaaagaaaaaggacagagagttcttgtgtaaagagtggctccgggtctgaatcaactggtgcagaagagagatctgcgaaacctaccaagctggcttcaaaatcagccacctcagccaaagctgggtgtagcaccatcactgattcttcttctgctgcctctacttcctcctcgtcttctgctgtagcctcggcctcctccactgtaccaccaggtgccagagtgaaacaaggaaaagatcagaacaaggccaggcgttcccgttcagcgtccagtcccagccccagaagaagtagcagggaaaaggaacagaggtcttctaagtcagagacatcaaaacctggaccttctggattacaggccaaattagcaagtttaagaaaatctacgaagaaacgcagtgagtctccacctgctgagctccccagtttgaggcggagcacacgccaaaagaccacgggctcctgtgctagtaccagtcggcgaggctctggcctgggcaaaagaggagcagctgaagctcgtcgacaggagaaaatggcagaccctgaaagcaaccaggaggcagtaaattcttcagctgctcggacagatgaagctccccaaggagctgcaggggctgttggcatgaccacctctggggagagtgaatcagatgattccgagatgggacgtttgcaagctttgttagaggcaaggggtcttccccctcacctatttggtcctcttggtcctcggatgtcacagcttttccatagaacaattggaagtggagctagttctaaggcccagcagctactacaaggattgcaagccagtgatgaaagtcaacagcttcaggcagttattgagatgtgtcagttactggtcatgggaaatgaggagacactgggagggtttcctgtcaagagtgttgttccagctttgattacgttacttcagatggagcacaattttgatattatgaaccatgcttgtcgagccttaacatacatgatggaagcacttcctcgatcttctgctgttgtagtagatgctattcctgtctttttagaaaagctgcaagttattcagtgtattgatgtggcagagcaggccttgactgccttggagatgttgtcacggagacatagtaaagccattctacaggcgggtggtttggcagactgcttgctgtacctagaattcttcagcataaatgcccaaagaaatgcattagcaattgcagctaattgctgccagagtatcacgccagatgaatttcattttgtggcagattcactcccattgctaacccaaaggctaacacatcaggataaaaagtcagtagaaagcacttgcctttgttttgcacgcctagtggacaacttccagcatgaggagaatttactccagcaggttgcttccaaagatctgcttacaaatgttcaacagctgttggtagtgactccacccattttaagttctgggatgtttataatggtggttcgcatgttttctctgatgtgttccaactgtccaactttagctgttcaacttatgaaacaaaacattgcagaaacgcttcactttctcctgtgtggtgcctccaatggaagttgtcaggaacagattgatcttgttccacgaagccctcaagagttgtatgaactgacatctctgatttgtgaacttatgccatgtttaccaaaagaaggcatttttgcagttgataccatgttgaagaagggaaatgcacagaacacagatggtgcgatatggcagtggcgtgatgatcggggcctctggcatccatataacaggattgacagccggatcattgaggcagcccatcaggtcggtgaggatgagataagcttgtccactctgggacgagtttatactattgattttaattctatgcagcaaatcaatgaggacacgggaacagcacgtgccattcagagaaaacctaacccgttagccaatagtaacactagtggatattcagagtcaaagaaggatgatgctcgagcacagcttatgaaagaggatccggaactggctaagtcttttattaagacattatttggtgttctttatgaagtgtatagttcctcagcaggacctgcggtcagacataagtgccttagagcaattcttaggataatttattttgcggatgctgaacttctgaaggatgttctgaaaaatcatgctgtttcaagtcacattgcttccatgctgtcaagccaagacctgaagatagtagtgggagcacttcagatggcagaaattttaatgcagaagttacctgatatttttagtgtttacttcagaagagaaggtgtaatgcatcaagtaaaacacttagcagaatcagagtctttgttgacaagtccaccaaaggcatgtacgaatggatcgggatccatgggatccacaacttcagtcagcagtgggacagccacagctgccactcatgctgcagctgacttgggatcacccagcttgcagcacagcagggatgattctttagatctcagccctcaaggtcgattaagtgatgttctaaagagaaaacgactgccaaaacgagggccaagaaggccaaagtactcacctccaagagatgatgacaaagtagacaatcaagctaaaagccccaccactactcagtcacctaaatcttctttcctggcaagcttgaatccaaaaacatggggaaggttaagtacacagtccaacagcaacaacattgagccagcacggactgcgggaggtagtggccttgccagggctgcctcaaaggataccatctccaataatagagaaaaaattaaaggttggattaaggagcaggcacataaatttgtagaacgttatttcagttctgagaatatggatggaagcaaccctgcattgaatgtccttcagagactttgtgctgcaaccgaacaactcaacctccaggtggatggtggagctgagtgccttgtagaaatccgtagcatagtctcagagtcagatgtttcatcatttgaaatccaacatagtggatttgtgaagcagctgttgctttatttgacatctaaaagtgaaaaggatgctgtgagcagagagatcagattaaagcgatttcttcatgtatttttttcttctccacttcctggagaagagcccattggaagagtggaaccagtgggtaatgcacctttgttggcattagttcacaagatgaacaactgcctcagccagatggaacaatttccagtcaaagtacatgatttccctagtggaaatgggacaggaggcagcttttctctcaacagaggatcacaggctttaaaatttttcaacacacatcaattaaaatgccagttacaaaggcatccagactgtgcaaatgtgaagcagtggaagggtggacctgtcaagattgaccctctggctttggtacaagccatcgagagataccttgtagttagagggtatggaagagtaagagaagatgatgaagacagcgatgacgatggatcagatgaggaaatagatgagtctctggctgctcagttcctaaattcaggaaatgtaagacacaggctgcagttttatattggagaacatttgctgccgtataacatgactgtgtatcaggcagtacggcagtttagtatacaggctgaagatgaaagagaatccacagatgatgagagcaatcctctaggcagagctggtatttggacaaagactcatacaatatggtataaacctgtgagagaggatgaagaaagtaataaagattgtgttggtggtaaaagaggaagagcccaaacagctccaacgaaaacttcccctagaaatgcaaaaaagcatgatgagttatggcacgatggagtgtgcccatcagtatcaaatcctttagaagtttacctcattcccacaccacctgaaaatataacatttgaagacccgtcattagatgtgatccttcttttaagagttttacatgctatcagtcgatactggtattacttgtatgataatgcaatgtgcaaggaaattattccaactagtgaatttattaacagtaagttaacagcaaaagcaaataggcaacttcaagatcctttagtaatcatgacaggaaacatcccaacatggcttactgagctaggaaaaacctgcccatttttctttccttttgatacccggcaaatgcttttttatgtaactgcatttgatcgggaccgagcaatgcaaagattacttgataccaacccagaaatcaaccagtctgattctcaagatagcagagttgcacctagattggatagaaaaaaacgtactgtgaaccgagaggagctgctgaaacaggcggagtctgtgatgcaggacctcggcagctcacgggccatgttagaaatccagtatgaaaatgaggttggtacaggtcttgggcctacactggagttttatgcgcttgtatctcaggaactacagagagctgacttgggtctttggagaggtgaagaagtaactcttagcaatccaaaagggagccaagaagggaccaagtatattcaaaacctccagggcctgtttgcgcttccctttggtaggacagcaaagccagctcatatcgcaaaggttaagatgaagtttcgcttcttaggaaaattaatggccaaggctatcatggatttcagattggtggaccttccccttggcttacccttttataaatggatgctacggcaagaaacttcactgacatcacacgatttgtttgacatcgacccagttgtagccagatcagtttatcacctagaagacattgtcagacagaagaaaagacttgaacaagataaatcccagaccaaagagagtctacagtatgcattagaaaccttgactatgaatggctgctcagttgaagatctaggactggatttcactctgccagggtttcccaatatcgaactgaagaaaggagggaaggatataccagtcactatccacaatttagaggagtatctaagactggttatattctgggcactaaatgaaggcgtttctaggcaatttgattcgttcagagatggatttgaatcagtcttcccactcagtcatcttcagtacttctacccggaggaactggatcagctcctttgtggcagtaaagcagacacttgggatgcaaagacactgatggaatgctgtaggcctgatcatggttatactcatgacagtcgggctgtgaagtttttgtttgagattctcagtagttttgataatgagcagcagaggttatttctccagtttgtgactggtagcccaagattgcctgttggaggattccggagtttgaatccacctttgacaattgtccgaaagacgtttgaatcaacagaaaacccagatgacttcttgccctctgtaatgacttgtgtgaactatcttaagttgccggactattcaagcattgagataatgcgtgaaaaactgttgatagcagcaagagaagggcagcagtcgttccatctttcctgatcatagcaagaaatgcagtgtctgcctgttacagcaaaagaaacaaatcatgatttcttttctaatgttatcacctgagtcaaggaaacatgttacgccttcttgttgtaggaaaaacggcttgcagattataaagagacatttggttgatattcattaatggccccatggacttaaagtgatcaggccctaaaacgttgttgtgatgaggtttctttagcaagttcttgtttaaattatcatttatttgatgagtgaagtttttaacatgctttgctgtgtgaaatttaaaaaagggatgtttttccaggctggaacaataaatgtggctgtgcagtttaattctgggctgtgtgtatccatctagctaagtctgcagttttctttcctccaaagacaactcttgtacataagtacagaaatttaagctcacatgtatttgacaaatatagtttagtagactagctctatgtgcttttcactttcctctgattttctctccctgattcattattatctgtgcagctcacagttttttttttgtatacaactcacagttctcaaattttcgttacccatgggcttctgttgtcccatgttctctccagttaagatctaatttaaaattcattggattgaaatttattgaatataattcagcttttgtaactaggtagacttttcttatagtttagttttaatatagtttagggtattactggctttttcccaggtgacacactaaggactgtttacatggcaattccagcagcaacagcctctggaatgagacaaggaaagctcatttgtttcttttatgaaggttaagaagtctacagcttgggctggccggtatttattattctgtggccagaggattttaaattaatgtaaattttttaaacaaaataagcagttttccttccctgttggagtaaaaaaatttttttccctttgttgttttacgtttttgttcatagtcttctttattccacgctcctcttccccttctcccagtgctgacttgggacaaaacagttcagcctttgtctcgacgcagataaaagcacctgtaagcaatgctgtccagtcattttatgtgctgatttctcaaatctgcaataatccatcaggttaatgtttttacctgaaaataaagaaagtttgcttcacctttttgtttatagttttgtgctgtatgcataactttcaattgtatagatgtatttcaatgcaaggaaatccacatatctccatgattcgggtcatggctgattttgctattcaaacaatttataatagcaacttgaagaaactaaaatgtgaagagaaaatgggaggagattccttcctaaggtccaaaactaggcctgtggcataaatttgaaggaattttccataattcatctccttgaaaataagagatgagctagtttttttttttaattgaactttgagaaatcaatttttttgactgttctgtaagttttaattaattgacacaaaagcccttttccctatcccaccacccaaaagaa

SEQ ID NO: 408552 - DNA, 4803 bp, Homo sapiens
catgtggggcatcacgggcagagtacctgatatttttagtatttacttcagaagagaaggtgtaatgcatcaagtaaaacacttagcagaatcagagtctttgttgacaagtccaccaaaggcatgtacgaatggatcgggatccatgggatccacaacttcagtcagcagtgggacagccacagctgccactcatgctgcagctgacttgggatcacccagcttgcagcacagcagggatgattctttagatctcagccctcaaggtcgattaagtgatgttctaaagagaaaacgactgccaaaacgagggccaagaaggccaaagtactcacctccaagagatgatgacaaagtagacaatcaagctaaaagccccaccactactcagtcacctaaatcttctttcctggcaagcttgaatccaaaaacatggggaaggttaagtacacagtccaacagcaacaacattgagccagcacggactgcgggaggtagtggccttgccagggctgcctcaaaggataccatctccaataatagagaaaaaattaaaggttggattaaggagcaggcacataaatttgtagaacgttatttcagttctgagaatatggatggaagcaaccctgcattgaatgtccttcagagactttgtgctgcaaccgaacaactcaacctccaggtggatggtggagctgagtgccttgtagaaatccgtagcatagtctcagagtcagatgtttcatcatttgaaatccaacatagtggatttgtgaagcagctgttgctttatttgacatctaaaagtgaaaaggatgctgtgagcagagagatcagattaaagcgatttcttcatgtatttttttcttctccacttcctggagaagagcccattggaagagtggaaccagtgggtaatgcacctttgttggcattagttcacaagatgaacaactgcctcagccagatggaacaatttccagtcaaagtacatgatttccctagtggaaatgggacaggaggcagcttttctctcaacagaggatcacaggctttaaaatttttcaacacacatcaattaaaatgccagttacaaaggcatccagactgtgcaaatgtgaagcagtggaagggtggacctgtcaagattgaccctctggctttggtacaagccatcgagagataccttgtagttagagggtatggaagagtaagagaagatgatgaagacagcgatgacgatggatcagatgaggaaatagatgagtctctggctgctcagttcctaaattcaggaaatgtaagacacaggctgcagttttatattggagaacatttgctgccgtataacatgactgtgtatcaggcagtacggcagtttagtatacaggctgaagatgaaagagaatccacagatgatgagagcaatcctctaggcagagctggtatttggacaaagactcatacaatatggtataaacctgtgagagaggatgaagaaagtaataaagattgtgttggtggtaaaagaggaagagcccaaacagctccaacgaaaacttcccctagaaatgcaaaaaagcatgatgagttatggcacgatggagtgtgcccatcagtatcaaatcctttagaagtttacctcattcccacaccacctgaaaatataacatttgaagacccgtcattagatgtgatccttcttttaagagttttacatgctatcagtcgatactggtattacttgtatgataatgcaatgtgcaaggaaattattccaactagtgaatttattaacagtaagttaacagcaaaagcaaataggcaacttcaagatcctttagtaatcatgacaggaaacatcccaacatggcttactgagctaggaaaaacctgcccatttttctttccttttgatacccggcaaatgcttttttatgtaactgcatttgatcgggaccgagcaatgcaaagattacttgataccaacccagaaatcaaccagtctgattctcaagatagcagagttgcacctagattggatagaaaaaaacgtactgtgaaccgagaggagctgctgaaacaggcggagtctgtgatgcaggacctcggcagctcacgggccatgttagaaatccagtatgaaaatgaggttggtacaggtcttgggcctacactggagttttatgcgcttgtatctcaggaactacagagagctgacttgggtctttggagaggtgaagaagtaactcttagcaatccaaaagggagccaagaagggaccaagtatattcaaaacctccagggcctgtttgcgcttccctttggtaggacagcaaagccagctcatatcgcaaaggttaagatgaagtttcgcttcttaggaaaattaatggccaaggctatcatggatttcagattggtggaccttccccttggcttacccttttataaatggatgctacggcaagaaacttcactgacatcacacgatttgtttgacatcgacccagttgtagccagatcagtttatcacctagaagacattgtcagacagaagaaaagacttgaacaagataaatcccagaccaaagagagtctacagtatgcattagaaaccttgactatgaatggctgctcagttgaagatctaggactggatttcactctgccagggtttcccaatatcgaactgaagaaaggagggaaggatataccagtcactatccacaatttagaggagtatctaagactggttatattctgggcactaaatgaaggcgtttctaggcaatttgattcgttcagagatggatttgaatcagtcttcccactcagtcatcttcagtacttctacccggaggaactggatcagctcctttgtggcagtaaagcagacacttgggatgcaaagacactgatggaatgctgtaggcctgatcatggttatactcatgacagtcgggctgtgaagtttttgtttgagattctcagtagttttgataatgagcagcagaggttatttctccagtttgtgactggtagcccaagattgcctgttggaggattccggagtttgaatccacctttgacaattgtccgaaagacgtttgaatcaacagaaaacccagatgacttcttgccctctgtaatgacttgtgtgaactatcttaagttgccggactattcaagcattgagataatgcgtgaaaaactgttgatagcagcaagagaagggcagcagtcgttccatctttcctgatcatagcaagaaatgcagtgtctgcctgttacagcaaaagaaacaaatcatgatttcttttctaatgttatcacctgagtcaaggaaacatgttacgccttcttgttgtaggaaaaacggcttgcagattataaagagacatttggttgatattcattaatggccccatggacttaaagtgatcaggccctaaaacgttgttgtgatgaggtttctttagcaagttcttgtttaaattatcatttatttgatgagtgaagtttttaacatgctttgctgtgtgaaatttaaaaaagggatgtttttccaggctggaacaataaatgtggctgtgcagtttaattctgggctgtgtgtatccatctagctaagtctgcagttttctttcctccaaagacaactcttgtacataagtacagaaatttaagctcacatgtatttgacaaatatagtttagtagactagctctatgtgcttttcactttcctctgattttctctccctgattcattattatctgtgcagctcacagttttttttttgtatacaactcacagttctcaaattttcgttacccatgggcttctgttgtcccatgttctctccagttaagatctaatttaaaattcattggattgaaatttattgaatataattcagcttttgtaactaggtagacttttcttatagtttagttttaatatagtttagggtattactggctttttcccaggtgacacactaaggactgtttacatggcaattccagcagcaacagcctctggaatgagacaaggaaagctcatttgtttcttttatgaaggttaagaagtctacagcttgggctggccggtatttattattctgtggccagaggattttaaattaatgtaaattttttaaacaaaataagcagttttccttccctgttggagtaaaaaaatttttttccctttgttgttttacgtttttgttcatagtcttctttattccacgctcctcttccccttctcccagtgctgacttgggacaaaacagttcagcctttgtctcgacgcagataaaagcacctgtaagcaatgctgtccagtcattttatgtgctgatttctcaaatctgcaataatccatcaggttaatgtttttacctgaaaataaagaaagtttgcttcacctttttgtttatagttttgtgctgtatgcataactttcaattgtatagatgtatttcaatgcaaggaaatccacatatctccatgattcgggtcatggctgattttgctattcaaacaatttataatagcaacttgaagaaactaaaatgtgaagagaaaatgggaggagattccttcctaaggtccaaaactaggcctgtggcataaatttgaaggaattttccataattcatctccttgaaaataagagatgagctagtttttttttttaattgaactttgagaaatcaatttttttgactgttctgtaagttttaattaattgacacaaaagcccttttccctatcccaccacccaaaagaa

SEQ ID NO: 408553 - DNA, 7527 bp, Homo sapiens
gtgctgcggctcagctgataattgaaggaacccggagccgccgccgccgcgccgctggggggggtggggggagctagtggaagttactgccgcgccaccgagtccggaccggagactttggggcctaactagtgaatggtagtgtctagaaagggtatgtcccttcaagagagaggtgccaatgtccaaccggcctaataacaatccaggggggtcactgcgacgttcacagaggaacactgccggggcccaaccacaagacgactcaataggaggaagaagctgcagttcatcatctgctgtgatagttccacaaccagaggatccagacagagccaatacttcagaaagacaaaaaacggggcaggtgcctaagaaagacaattctcgaggagtgaagcgcagtgctagtccagactacaacaggaccaattctcctagctctgcaaaaaaaccaaaagcacttcagcatactgaatctccctcagaaacaaataagccacatagtaagtcaaagaagagacatttagaccaggagcaacaactgaaatctgcacaatcaccatcaacaagcaaggctcataccaggaagagtggggccactggcggttcacggagtcagaaaagaaaaaggacagagagttcttgtgtaaagagtggctccgggtctgaatcaactggtgcagaagagagatctgcgaaacctaccaagctggcttcaaaatcagccacctcagccaaagctgggtgtagcaccatcactgattcttcttctgctgcctctacttcctcctcgtcttctgctgtagcctcggcctcctccactgtaccaccaggtgccagagtgaaacaaggaaaagatcagaacaaggccaggcgttcccgttcagcgtccagtcccagccccagaagaagtagcagggaaaaggaacagaggtcttctaagtcagagacatcaaaacctggaccttctggattacaggccaaattagcaagtttaagaaaatctacgaagaaacgcagtgagtctccacctgctgagctccccagtttgaggcggagcacacgccaaaagaccacgggctcctgtgctagtaccagtcggcgaggctctggcctgggcaaaagaggagcagctgaagctcgtcgacaggagaaaatggcagaccctgaaagcaaccaggaggcagtaaattcttcagctgctcggacagatgaagctccccaaggagctgcaggggctgttggcatgaccacctctggggagagtgaatcagatgattccgagatgggacgtttgcaagctttgttagaggcaaggggtcttccccctcacctatttggtcctcttggtcctcggatgtcacagcttttccatagaacaattggaagtggagctagttctaaggcccagcagctactacaaggattgcaagccagtgatgaaagtcaacagcttcaggcagttattgagatgtgtcagttactggtcatgggaaatgaggagacactgggagggtttcctgtcaagagtgttgttccagctttgattacgttacttcagatggagcacaattttgatattatgaaccatgcttgtcgagccttaacatacatgatggaagcacttcctcgatcttctgctgttgtagtagatgctattcctgtctttttagaaaagctgcaagttattcagtgtattgatgtggcagagcaggccttgactgccttggagatgttgtcacggagacatagtaaagccattctacaggcgggtggtttggcagactgcttgctgtacctagaattcttcagcataaatgcccaaagaaatgcattagcaattgcagctaattgctgccagagtatcacgccagatgaatttcattttgtggcagattcactcccattgctaacccaaaggctaacacatcaggataaaaagtcagtagaaagcacttgcctttgttttgcacgcctagtggacaacttccagcatgaggagaatttactccagcaggttgcttccaaagatctgcttacaaatgttcaacagctgttggtagtgactccacccattttaagttctgggatgtttataatggtggttcgcatgttttctctgatgtgttccaactgtccaactttagctgttcaacttatgaaacaaaacattgcagaaacgcttcactttctcctgtgtggtgcctccaatggaagttgtcaggaacagattgatcttgttccacgaagccctcaagagttgtatgaactgacatctctgatttgtgaacttatgccatgtttaccaaaagaaggcatttttgcagttgataccatgttgaagaagggaaatgcacagaacacagatggtgcgatatggcagtggcgtgatgatcggggcctctggcatccatataacaggattgacagccggatcattgaggcagcccatcaggtcggtgaggatgagataagcttgtccactctgggacgagtttatactattgattttaattctatgcagcaaatcaatgaggacacgggaacagcacgtgccattcagagaaaacctaacccgttagccaatagtaacactagtggatattcagagtcaaagaaggatgatgctcgagcacagcttatgaaagaggatccggaactggctaagtcttttattaagacattatttggtgttctttatgaagtgtatagttcctcagcaggacctgcggtcagacataagtgccttagagcaattcttaggataatttattttgcggatgctgaacttctgaaggatgttctgaaaaatcatgctgtttcaagtcacattgcttccatgctgtcaagccaagacctgaagatagtagtgggagcacttcagatggcagaaattttaatgcagaagttacctgatatttttagtgtttacttcagaagagaaggtgtaatgcatcaagtaaaacacttagcagaatcagagtctttgttgacaagtccaccaaaggcatgtacgaatggatcgggatccatgggatccacaacttcagtcagcagtgggacagccacagctgccactcatgctgcagctgacttgggatcacccagcttgcagcacagcagggatgattctttagatctcagccctcaaggtcgattaagtgatgttctaaagagaaaacgactgccaaaacgagggccaagaaggccaaagtactcacctccaagagatgatgacaaagtagacaatcaagctaaaagccccaccactactcagtcacctaaatcttctttcctggcaagcttgaatccaaaaacatggggaaggttaagtacacagtccaacagcaacaacattgagccagcacggactgcgggaggtagtggccttgccagggctgcctcaaaggataccatctccaataatagagaaaaaattaaaggttggattaaggagcaggcacataaatttgtagaacgttatttcagttctgagaatatggatggaagcaaccctgcattgaatgtccttcagagactttgtgctgcaaccgaacaactcaacctccaggtggatggtggagctgagtgccttgtagaaatccgtagcatagtctcagagtcagatgtttcatcatttgaaatccaacatagtggatttgtgaagcagctgttgctttatttgacatctaaaagtgaaaaggatgctgtgagcagagagatcagattaaagcgatttcttcatgtatttttttcttctccacttcctggagaagagcccattggaagagtggaaccagtgggtaatgcacctttgttggcattagttcacaagatgaacaactgcctcagccagatggaacaatttccagtcaaagtacatgatttccctagtggaaatgggacaggaggcagcttttctctcaacagaggatcacaggctttaaaatttttcaacacacatcaattaaaatgccagttacaaaggcatccagactgtgcaaatgtgaagcagtggaagggtggacctgtcaagattgaccctctggctttggtacaagccatcgagagataccttgtagttagagggtatggaagagtaagagaagatgatgaagacagcgatgacgatggatcagatgaggaaatagatgagtctctggctgctcagttcctaaattcaggaaatgtaagacacaggctgcagttttatattggagaacatttgctgccgtataacatgactgtgtatcaggcagtacggcagtttagtatacaggctgaagatgaaagagaatccacagatgatgagagcaatcctctaggcagagctggtatttggacaaagactcatacaatatggtataaacctgtgagagaggatgaagaaagtaataaagattgtgttggtggtaaaagaggaagagcccaaacagctccaacgaaaacttcccctagaaatgcaaaaaagcatgatgagttatggcacgatggagtgtgcccatcagtatcaaatcctttagaagtttacctcattcccacaccacctgaaaatataacatttgaagacccgtcattagatgtgatccttcttttaagagttttacatgctatcagtcgatactggtattacttgtatgataatgcaatgtgcaaggaaattattccaactagtgaatttattaacagtaagttaacagcaaaagcaaataggcaacttcaagatcctttagtaatcatgacaggaaacatcccaacatggcttactgagctaggaaaaacctgcccatttttctttccttttgatacccggcaaatgcttttttatgtaactgcatttgatcgggaccgagcaatgcaaagattacttgataccaacccagaaatcaaccagtctgattctcaagatagcagagttgcacctagattggatagaaaaaaacgtactgtgaaccgagaggagctgctgaaacaggcggagtctgtgatgcaggacctcggcagctcacgggccatgttagaaatccagtatgaaaatgaggttggtacaggtcttgggcctacactggagttttatgcgcttgtatctcaggaactacagagagctgacttgggtctttggagaggtgaagaagtaactcttagcaatccaaaagggagccaagaagggaccaagtatattcaaaacctccagggcctgtttgcgcttccctttggtaggacagcaaagccagctcatatcgcaaaggttaagatgaagtttcgcttcttaggaaaattaatggccaaggctatcatggatttcagattggtggaccttccccttggcttacccttttataaatggatgctacggcaagaaacttcactgacatcacacgatttgtttgacatcgacccagttgtagccagatcagtttatcacctagaagacattgtcagacagaagaaaagacttgaacaagataaatcccagctggttatattctgggcactaaatgaaggcgtttctaggcaatttgattcgttcagagatggatttgaatcagtcttcccactcagtcatcttcagtacttctacccggaggaactggatcagctcctttgtggcagtaaagcagacacttgggatgcaaagacactgatggaatgctgtaggcctgatcatggttatactcatgacagtcgggctgtgaagtttttgtttgagattctcagtagttttgataatgagcagcagaggttatttctccagtttgtgactggtagcccaagattgcctgttggaggattccggagtttgaatccacctttgacaattgtccgaaagacgtttgaatcaacagaaaacccagatgacttcttgccctctgtaatgacttgtgtgaactatcttaagttgccggactattcaagcattgagataatgcgtgaaaaactgttgatagcagcaagagaagggcagcagtcgttccatctttcctgatcatagcaagaaatgcagtgtctgcctgttacagcaaaagaaacaaatcatgatttcttttctaatgttatcacctgagtcaaggaaacatgttacgccttcttgttgtaggaaaaacggcttgcagattataaagagacatttggttgatattcattaatggccccatggacttaaagtgatcaggccctaaaacgttgttgtgatgaggtttctttagcaagttcttgtttaaattatcatttatttgatgagtgaagtttttaacatgctttgctgtgtgaaatttaaaaaagggatgtttttccaggctggaacaataaatgtggctgtgcagtttaattctgggctgtgtgtatccatctagctaagtctgcagttttctttcctccaaagacaactcttgtacataagtacagaaatttaagctcacatgtatttgacaaatatagtttagtagactagctctatgtgcttttcactttcctctgattttctctccctgattcattattatctgtgcagctcacagttttttttttgtatacaactcacagttctcaaattttcgttacccatgggcttctgttgtcccatgttctctccagttaagatctaatttaaaattcattggattgaaatttattgaatataattcagcttttgtaactaggtagacttttcttatagtttagttttaatatagtttagggtattactggctttttcccaggtgacacactaaggactgtttacatggcaattccagcagcaacagcctctggaatgagacaaggaaagctcatttgtttcttttatgaaggttaagaagtctacagcttgggctggccggtatttattattctgtggccagaggattttaaattaatgtaaattttttaaacaaaataagcagttttccttccctgttggagtaaaaaaatttttttccctttgttgttttacgtttttgttcatagtcttctttattccacgctcctcttccccttctcccagtgctgacttgggacaaaacagttcagcctttgtctcgacgcagataaaagcacctgtaagcaatgctgtccagtcattttatgtgctgatttctcaaatctgcaataatccatcaggttaatgtttttacctgaaaataaagaaagtttgcttcacctttttgtttatagttttgtgctgtatgcataactttcaattgtatagatgtatttcaatgcaaggaaatccacatatctccatgattcgggtcatggctgattttgctattcaaacaatttataatagcaacttgaagaaactaaaatgtgaagagaaaatgggaggagattccttcctaaggtccaaaactaggcctgtggcataaatttgaaggaattttccataattcatctccttgaaaataagagatgagctagtttttttttttaattgaactttgagaaatcaatttttttgactgttctgtaagttttaattaattgacacaaaagcccttttccctatcccaccacccaaaagaa

SEQ ID NO: 408554 - DNA, 2440 bp, Homo sapiens
gttcagaggatcccttcgatggcgggcacttaatggccaaggctatcatggatgtcagataggtggaccttccccttggcttacccttttataaatggatgctacggcaagaaacttcactgacatcacacgatttgtttgacatcgacccagttgtagccagatcagtttatcacctagaagacattgtcagacagaagaaaagacttgaacaagataaatcccagaccaaagagagtctacagtatgcattagaaaccttgactatgaatggctgctcagttgaagatctaggactggatttcactctgccagggtttcccaatatcgaactgaagaaaggagggaaggatataccagtcactatccacaatttagaggagtatctaagactggttatattctgggcactaaatgaaggcgtttctaggcaatttgattcgttcagagatggatttgaatcagtcttcccactcagtcatcttcagtacttctacccggaggaactggatcagctcctttgtggcagtaaagcagacacttgggatgcaaagacactgatggaatgctgtaggcctgatcatggttatactcatgacagtcgggctgtgaagtttttgtttgagattctcagtagttttgataatgagcagcagaggttatttctccagtttgtgactggtagcccaagattgcctgttggaggattccggagtttgaatccacctttgacaattgtccgaaagacgtttgaatcaacagaaaacccagatgacttcttgccctctgtaatgacttgtgtgaactatcttaagttgccggactattcaagcattgagataatgcgtgaaaaactgttgatagcagcaagagaagggcagcagtcgttccatctttcctgatcatagcaagaaatgcagtgtctgcctgttacagcaaaagaaacaaatcatgatttcttttctaatgttatcacctgagtcaaggaaacatgttacgccttcttgttgtaggaaaaacggcttgcagattataaagagacatttggttgatattcattaatggccccatggacttaaagtgatcaggccctaaaacgttgttgtgatgaggtttctttagcaagttcttgtttaaattatcatttatttgatgagtgaagtttttaacatgctttgctgtgtgaaatttaaaaaagggatgtttttccaggctggaacaataaatgtggctgtgcagtttaattctgggctgtgtgtatccatctagctaagtctgcagttttctttcctccaaagacaactcttgtacataagtacagaaatttaagctcacatgtatttgacaaatatagtttagtagactagctctatgtgcttttcactttcctctgattttctctccctgattcattattatctgtgcagctcacagttttttttttgtatacaactcacagttctcaaattttcgttacccatgggcttctgttgtcccatgttctctccagttaagatctaatttaaaattcattggattgaaatttattgaatataattcagcttttgtaactaggtagacttttcttatagtttagttttaatatagtttagggtattactggctttttcccaggtgacacactaaggactgtttacatggcaattccagcagcaacagcctctggaatgagacaaggaaagctcatttgtttcttttatgaaggttaagaagtctacagcttgggctggccggtatttattattctgtggccagaggattttaaattaatgtaaattttttaaacaaaataagcagttttccttccctgttggagtaaaaaaatttttttccctttgttgttttacgtttttgttcatagtcttctttattccacgctcctcttccccttctcccagtgctgacttgggacaaaacagttcagcctttgtctcgacgcagataaaagcacctgtaagcaatgctgtccagtcattttatgtgctgatttctcaaatctgcaataatccatcaggttaatgtttttacctgaaaataaagaaagtttgcttcacctttttgtttatagttttgtgctgtatgcataactttcaattgtatagatgtatttcaatgcaaggaaatccacatatctccatgattcgggtcatggctgattttgctattcaaacaatttataatagcaacttgaagaaactaaaatgtgaagagaaaatgggaggagattccttcctaaggtccaaaactaggcctgtggcataaatttgaaggaattttccataattcatctccttgaaaataagagatgagctagtttttttttttaattgaactttgagaaatcaatttttttgactgttctgtaagttttaattaattgacacaaaagcccttttccctatcccaccacccaaaagaa

SEQ ID NO: 408555 - DNA, 2717 bp, Homo sapiens
gattacttgataccaacccagaaatctttgcatgctcggtcccgagcaatgcaaagattacttgataccaacccagaaatcaaccagtctgattctcaagatagcagagttgcacctagattggatagaaaaaaacgtactgtgaaccgagaggagctgctgaaacaggcggagtctgtgatgcaggacctcggcagctcacgggccatgttagaaatccagtatgaaaatgaggttggtacaggtcttgggcctacactggagttttatgcgcttgtatctcaggaactacagagagctgacttgggtctttggagaggtgaagaagtaactcttagcaatccaaaagggagccaagaagggaccaagtatattcaaaacctccagggcctgtttgcgcttccctttggtaggacagcaaagccagctcatatcgcaaaggttaagatgaagtttcgcttcttaggaaaattaatggccaaggctatcatggatttcagattggtggaccttccccttggcttacccttttataaatggatgctacggcaagaaacttcactgacatcacacgatttgtttgacatcgacccagttgtagccagatcagtttatcacctagaagacattgtcagacagaagaaaagacttgaacaagataaatcccagctggttatattctgggcactaaatgaaggcgtttctaggcaatttgattcgttcagagatggatttgaatcagtcttcccactcagtcatcttcagtacttctacccggaggaactggatcagctcctttgtggcagtaaagcagacacttgggatgcaaagacactgatggaatgctgtaggcctgatcatggttatactcatgacagtcgggctgtgaagtttttgtttgagattctcagtagttttgataatgagcagcagaggttatttctccagtttgtgactggtagcccaagattgcctgttggaggattccggagtttgaatccacctttgacaattgtccgaaagacgtttgaatcaacagaaaacccagatgacttcttgccctctgtaatgacttgtgtgaactatcttaagttgccggactattcaagcattgagataatgcgtgaaaaactgttgatagcagcaagagaagggcagcagtcgttccatctttcctgatcatagcaagaaatgcagtgtctgcctgttacagcaaaagaaacaaatcatgatttcttttctaatgttatcacctgagtcaaggaaacatgttacgccttcttgttgtaggaaaaacggcttgcagattataaagagacatttggttgatattcattaatggccccatggacttaaagtgatcaggccctaaaacgttgttgtgatgaggtttctttagcaagttcttgtttaaattatcatttatttgatgagtgaagtttttaacatgctttgctgtgtgaaatttaaaaaagggatgtttttccaggctggaacaataaatgtggctgtgcagtttaattctgggctgtgtgtatccatctagctaagtctgcagttttctttcctccaaagacaactcttgtacataagtacagaaatttaagctcacatgtatttgacaaatatagtttagtagactagctctatgtgcttttcactttcctctgattttctctccctgattcattattatctgtgcagctcacagttttttttttgtatacaactcacagttctcaaattttcgttacccatgggcttctgttgtcccatgttctctccagttaagatctaatttaaaattcattggattgaaatttattgaatataattcagcttttgtaactaggtagacttttcttatagtttagttttaatatagtttagggtattactggctttttcccaggtgacacactaaggactgtttacatggcaattccagcagcaacagcctctggaatgagacaaggaaagctcatttgtttcttttatgaaggttaagaagtctacagcttgggctggccggtatttattattctgtggccagaggattttaaattaatgtaaattttttaaacaaaataagcagttttccttccctgttggagtaaaaaaatttttttccctttgttgttttacgtttttgttcatagtcttctttattccacgctcctcttccccttctcccagtgctgacttgggacaaaacagttcagcctttgtctcgacgcagataaaagcacctgtaagcaatgctgtccagtcattttatgtgctgatttctcaaatctgcaataatccatcaggttaatgtttttacctgaaaataaagaaagtttgcttcacctttttgtttatagttttgtgctgtatgcataactttcaattgtatagatgtatttcaatgcaaggaaatccacatatctccatgattcgggtcatggctgattttgctattcaaacaatttataatagcaacttgaagaaactaaaatgtgaagagaaaatgggaggagattccttcctaaggtccaaaactaggcctgtggcataaatttgaaggaattttccataattcatctccttgaaaataagagatgagctagtttttttttttaattgaactttgagaaatcaatttttttgactgttctgtaagttttaattaattgacacaaaagcccttttccctatcccaccacccaaaagaa

SEQ ID NO: 408556 - DNA, 6152 bp, Homo sapiens
gtgctgcggctcagctgataattgaaggaacccggagccgccgccgccgcgccgctggggggggtggggggagctagtggaagttactgccgcgccaccgagtccggaccggagactttggggcctaactagtgaatggtagtgtctagaaagggtatgtcccttcaagagagaggtgccaatgtccaaccggcctaataacaatccaggggggtcactgcgacgttcacagaggaacactgccggggcccaaccacaagacgactcaataggaggaagaagctgcagttcatcatctgctgtgatagttccacaaccagaggatccagacagagccaatacttcagaaagacaaaaaacggggcaggtgcctaagaaagacaattctcgaggagtgaagcgcagtgctagtccagactacaacaggaccaattctcctagctctgcaaaaaaaccaaaagcacttcagcatactgaatctccctcagaaacaaataagccacatagtaagtcaaagaagagacatttagaccaggagcaacaactgaaatctgcacaatcaccatcaacaagcaaggctcataccaggaagagtggggccactggcggttcacggagtcagaaaagaaaaaggacagagagttcttgtgtaaagagtggctccgggtctgaatcaactggtgcagaagagagatctgcgaaacctaccaagctggcttcaaaatcagccacctcagccaaagctgggtgtagcaccatcactgattcttcttctgctgcctctacttcctcctcgtcttctgctgtagcctcggcctcctccactgtaccaccaggtgccagagtgaaacaaggaaaagatcagaacaaggccaggcgttcccgttcagcgtccagtcccagccccagaagaagtagcagggaaaaggaacagaggtcttctaagtcagagacatcaaaacctggaccttctggattacaggccaaattagcaagtttaagaaaatctacgaagaaacgcagtgagtctccacctgctgagctccccagtttgaggcggagcacacgccaaaagaccacgggctcctgtgctagtaccagtcggcgaggctctggcctgggcaaaagaggagcagctgaagctcgtcgacaggagaaaatggcagaccctgaaagcaaccaggaggcagtaaattcttcagctgctcggacagatgaagctccccaaggagctgcaggggctgttggcatgaccacctctggggagagtgaatcagatgattccgagatgggacgtttgcaagctttgttagaggcaaggggtcttccccctcacctatttggtcctcttggtcctcggatgtcacagcttttccatagaacaattggaagtggagctagttctaaggcccagcagctactacaaggattgcaagccagtgatgaaagtcaacagcttcaggcagttattgagatgtgtcagttactggtcatgggaaatgaggagacactgggagggtttcctgtcaagagtgttgttccagctttgattacgttacttcagatggagcacaattttgatattatgaaccatgcttgtcgagccttaacatacatgatggaagcacttcctcgatcttctgctgttgtagtagatgctattcctgtctttttagaaaagctgcaagttattcagtgtattgatgtggcagagcaggccttgactgccttggagatgttgtcacggagacatagtaaagccattctacaggcgggtggtttggcagactgcttgctgtacctagaattcttcagcataaatgcccaaagaaatgcattagcaattgcagctaattgctgccagagtatcacgccagatgaatttcattttgtggcagattcactcccattgctaacccaaaggctaacacatcaggataaaaagtcagtagaaagcacttgcctttgttttgcacgcctagtggacaacttccagcatgaggagaatttactccagcaggttgcttccaaagatctgcttacaaatgttcaacagctgttggtagtgactccacccattttaagttctgggatgtttataatggtggttcgcatgttttctctgatgtgttccaactgtccaactttagctgttcaacttatgaaacaaaacattgcagaaacgcttcactttctcctgtgtggtgcctccaatggaagttgtcaggaacagattgatcttgttccacgaagccctcaagagttgtatgaactgacatctctgatttgtgaacttatgccatgtttaccaaaagaaggcatttttgcagttgataccatgttgaagaagggaaatgcacagaacacagatggtgcgatatggcagtggcgtgatgatcggggcctctggcatccatataacaggattgacagccggatcattgaggcagcccatcaggtcggtgaggatgagataagcttgtccactctgggacgagtttatactattgattttaattctatgcagcaaatcaatgaggacacgggaacagcacgtgccattcagagaaaacctaacccgttagccaatagtaacactagtggatattcagagtcaaagaaggatgatgctcgagcacagcttatgaaagaggatccggaactggctaagtcttttattaagacattatttggtgttctttatgaagtgtatagttcctcagcaggacctgcggtcagacataagtgccttagagcaattcttaggataatttattttgcggatgctgaacttctgaaggatgttctgaaaaatcatgctgtttcaagtcacattgcttccatgctgtcaagccaagacctgaagatagtagtgggagcacttcagatggcagaaattttaatgcagaagttacctgatatttttagtgtttacttcagaagagaaggtgtaatgcatcaagtaaaacacttagcagaatcagagtctttgttgacaagtccaccaaaggcatgtacgaatggatcgggatccatgggatccacaacttcagtcagcagtgggacagccacagctgccactcatgctgcagctgacttgggatcacccagcttgcagcacagcagggatgattctttagatctcagccctcaaggtcgattaagtgatgttctaaagagaaaacgactgccaaaacgagggccaagaaggccaaagtactcacctccaagagatgatgacaaagtagacaatcaagctaaaagccccaccactactcagtcacctaaatcttctttcctggcaagcttgaatccaaaaacatggggaaggttaagtacacagtccaacagcaacaacattgagccagcacggactgcgggaggtagtggccttgccagggctgcctcaaaggataccatctccaataatagagaaaaaattaaaggttggattaaggagcaggcacataaatttgtagaacgttatttcagttctgagaatatggatggaagcaaccctgcattgaatgtccttcagagactttgtgctgcaaccgaacaactcaacctccaggtggatggtggagctgagtgccttgtagaaatccgtagcatagtctcagagtcagatgtttcatcatttgaaatccaacatagtggatttgtgaagcagctgttgctttatttgacatctaaaagtgaaaaggatgctgtgagcagagagatcagattaaagcgatttcttcatgtatttttttcttctccacttcctggagaagagcccattggaagagtggaaccagtgggtaatgcacctttgttggcattagttcacaagatgaacaactgcctcagccagatggaacaatttccagtcaaagtacatgatttccctagtggaaatgggacaggaggcagcttttctctcaacagaggatcacaggctttaaaatttttcaacacacatcaattaaaatgccagttacaaaggcatccagactgtgcaaatgtgaagcagtggaagggtggacctgtcaagattgaccctctggctttggtacaagccatcgagagataccttgtagttagagggtatggaagagtaagagaagatgatgaagacagcgatgacgatggatcagatgaggaaatagatgagtctctggctgctcagttcctaaattcaggaaatgtaagacacaggctgcagttttatattggagaacatttgctgccgtataacatgactgtgtatcaggcagtacggcagtttagtatacaggctgaagatgaaagagaatccacagatgatgagagcaatcctctaggcagagctggtatttggacaaagactcatacaatatggtataaacctgtgagagaggatgaagaaagtaataaagattgtgttggtggtaaaagaggaagagcccaaacagctccaacgaaaacttcccctagaaatgcaaaaaagcatgatgagttatggcacgatggagtgtgcccatcagtatcaaatcctttagaagtttacctcattcccacaccacctgaaaatataacatttgaagacccgtcattagatgtgatccttcttttaagagttttacatgctatcagtcgatactggtattacttgtatgataatgcaatgtgcaaggaaattattccaactagtgaatttattaacagtaagttaacagcaaaagcaaataggcaacttcaagatcctttagtaatcatgacaggaaacatcccaacatggcttactgagctaggaaaaacctgcccatttttctttccttttgatacccggcaaatgcttttttatgtaactgcatttgatcgggaccgagcaatgcaaagattacttgataccaacccagaaatcaaccagtctgattctcaagatagcagagttgcacctagattggatagaaaaaaacgtactgtgaaccgagaggagctgctgaaacaggcggagtctgtgatgcaggacctcggcagctcacgggccatgttagaaatccagtatgaaaatgaggttggtacaggtcttgggcctacactggagttttatgcgcttgtatctcaggaactacagagagctgacttgggtctttggagaggtgaagaagtaactcttagcaatccaaaagggagccaagaagggaccaagtatattcaaaacctccagggcctgtttgcgcttccctttggtaggacagcaaagccagctcatatcgcaaaggttaagatgaagtttcgcttcttaggaaaattaatggccaaggctatcatggatttcagattggtggaccttccccttggcttacccttttataaatggatgctacggcaagaaacttcactgacatcacacgatttgtttgacatcgacccagttgtagccagatcagtttatcacctagaagacattgtcagacagaagaaaagacttgaacaagataaatcccagaccaaagagagtctacagtatgcattagaaaccttgactatgaatggctgctcagttgaagatctaggactggatttcactctgccagggtttcccaatatcgaactgaagaaaggagggaaggatataccagtcactatccacaatttagaggagtatctaagagtatgtaactgtgtctttggggggtaggccagttgtgaagacggaggactttgcctgattgtaccttgcttctggctgcacacgctatggcttgagaccttccacatccccaggaccactgcatgaaggctgctttacaaggcactagcttctctttgctcttgagtgcacatatcagatatttcctgtcttatataaccttgaattatttctcctcaggcttgaatgctatctaattacaccacgttttcttagtttaaaaaacaagtgaaaagagacattatttgtgttctcactaaattgcatttttgcatttccatcaaggcagctagcttgacagaatttactccaggcaccgtgcagtgcacacttttatgtttggtgacacctttcaaattactaacttatgggcgaggtgcagtggctcacgcctgtaatcctcccagcactttgtgaggcagaagcaggaggattacttgaggccagtagttcaagaccagcctgggca

SEQ ID NO: 408557 - DNA, 4970 bp, Homo sapiens
  misc_feature (4955)..(4955): n is a, c, g, or t
gtgctgcggctcagctgataattgaaggaacccggagccgccgccgccgcgccgctggggggggtggggggagctagtggaagttactgccgcgccaccgagtccggaccggagactttggggcctaactagtgaatggtagtgtctagaaagggtatgtcccttcaagagagaggtgccaatgtccaaccggcctaataacaatccaggggggtcactgcgacgttcacagaggaacactgccggggcccaaccacaagacgactcaataggaggaagaagctgcagttcatcatctgctgtgatagttccacaaccagaggatccagacagagccaatacttcagaaagacaaaaaacggggcaggtgcctaagaaagacaattctcgaggagtgaagcgcagtgctagtccagactacaacaggaccaattctcctagctctgcaaaaaaaccaaaagcacttcagcatactgaatctccctcagaaacaaataagccacatagtaagtcaaagaagagacatttagaccaggagcaacaactgaaatctgcacaatcaccatcaacaagcaaggctcataccaggaagagtggggccactggcggttcacggagtcagaaaagaaaaaggacagagagttcttgtgtaaagagtggctccgggtctgaatcaactggtgcagaagagagatctgcgaaacctaccaagctggcttcaaaatcagccacctcagccaaagctgggtgtagcaccatcactgattcttcttctgctgcctctacttcctcctcgtcttctgctgtagcctcggcctcctccactgtaccaccaggtgccagagtgaaacaaggaaaagatcagaacaaggccaggcgttcccgttcagcgtccagtcccagccccagaagaagtagcagggaaaaggaacagaggtcttctaagtcagagacatcaaaacctggaccttctggattacaggccaaattagcaagtttaagaaaatctacgaagaaacgcagtgagtctccacctgctgagctccccagtttgaggcggagcacacgccaaaagaccacgggctcctgtgctagtaccagtcggcgaggctctggcctgggcaaaagaggagcagctgaagctcgtcgacaggagaaaatggcagaccctgaaagcaaccaggaggcagtaaattcttcagctgctcggacagatgaagctccccaaggagctgcaggggctgttggcatgaccacctctggggagagtgaatcagatgattccgagatgggacgtttgcaagctttgttagaggcaaggggtcttccccctcacctatttggtcctcttggtcctcggatgtcacagcttttccatagaacaattggaagtggagctagttctaaggcccagcagctactacaaggattgcaagccagtgatgaaagtcaacagcttcaggcagttattgagatgtgtcagttactggtcatgggaaatgaggagacactgggagggtttcctgtcaagagtgttgttccagctttgattacgttacttcagatggagcacaattttgatattatgaaccatgcttgtcgagccttaacatacatgatggaagcacttcctcgatcttctgctgttgtagtagatgctattcctgtctttttagaaaagctgcaagttattcagtgtattgatgtggcagagcaggccttgactgccttggagatgttgtcacggagacatagtaaagccattctacaggcgggtggtttggcagactgcttgctgtacctagaattcttcagcataaatgcccaaagaaatgcattagcaattgcagctaattgctgccagagtatcacgccagatgaatttcattttgtggcagattcactcccattgctaacccaaaggctaacacatcaggataaaaagtcagtagaaagcacttgcctttgttttgcacgcctagtggacaacttccagcatgaggagaatttactccagcaggttgcttccaaagatctgcttacaaatgttcaacagctgttggtagtgactccacccattttaagttctgggatgtttataatggtggttcgcatgttttctctgatgtgttccaactgtccaactttagctgttcaacttatgaaacaaaacattgcagaaacgcttcactttctcctgtgtggtgcctccaatggaagttgtcaggaacagattgatcttgttccacgaagccctcaagagttgtatgaactgacatctctgatttgtgaacttatgccatgtttaccaaaagaaggcatttttgcagttgataccatgttgaagaagggaaatgcacagaacacagatggtgcgatatggcagtggcgtgatgatcggggcctctggcatccatataacaggattgacagccggatcattgaggcagcccatcaggtcggtgaggatgagataagcttgtccactctgggacgagtttatactattgattttaattctatgcagcaaatcaatgaggacacgggaacagcacgtgccattcagagaaaacctaacccgttagccaatagtaacactagtggatattcagagtcaaagaaggatgatgctcgagcacagcttatgaaagaggatccggaactggctaagtcttttattaagacattatttggtgttctttatgaagtgtatagttcctcagcaggacctgcggtcagacataagtgccttagagcaattcttaggataatttattttgcggatgctgaacttctgaaggatgttctgaaaaatcatgctgtttcaagtcacattgcttccatgctgtcaagccaagacctgaagatagtagtgggagcacttcagatggcagaaattttaatgcagaagttacctgatatttttagtgtttacttcagaagagaaggtgtaatgcatcaagtaaaacacttagcagaatcagagtctttgttgacaagtccaccaaaggcatgtacgaatggatcgggatccatgggatccacaacttcagtcagcagtgggacagccacagctgccactcatgctgcagctgacttgggatcacccagcttgcagcacagcagggatgattctttagatctcagccctcaaggtcgattaagtgatgttctaaagagaaaacgactgccaaaacgagggccaagaaggccaaagtactcacctccaagagatgatgacaaagtagacaatcaagctaaaagccccaccactactcagtcacctaaatcttctttcctggcaagcttgaatccaaaaacatggggaaggttaagtacacagtccaacagcaacaacattgagccagcacggactgcgggaggtagtggccttgccagggctgcctcaaaggataccatctccaataatagagaaaaaattaaaggttggattaaggagcaggcacataaatttgtagaacgttatttcagttctgagaatatggatggaagcaaccctgcattgaatgtccttcagagactttgtgctgcaaccgaacaactcaacctccaggtggatggtggagctgagtgccttgtagaaatccgtagcatagtctcagagtcagatgtttcatcatttgaaatccaacatagtggatttgtgaagcagctgttgctttatttgacatctaaaagtgaaaaggatgctgtgagcagagagatcagattaaagcgatttcttcatgtatttttttcttctccacttcctggagaagagcccattggaagagtggaaccagtgggtaatgcacctttgttggcattagttcacaagatgaacaactgcctcagccagatggaacaatttccagtcaaagtacatgatttccctagtggaaatgggacaggaggcagcttttctctcaacagaggatcacaggctttaaaatttttcaacacacatcaattaaaatgccagttacaaaggcatccagactgtgcaaatgtgaagcagtggaagggtggacctgtcaagattgaccctctggctttggtacaagccatcgagagataccttgtagttagagggtatggaagagtaagagaagatgatgaagacagcgatgacgatggatcagatgaggaaatagatgagtctctggctgctcagttcctaaattcaggaaatgtaagacacaggctgcagttttatattggagaacatttgctgccgtataacatgactgtgtatcaggcagtacggcagtttagtatacaggctgaagatgaaagagaatccacagatgatgagagcaatcctctaggcagagctggtatttggacaaagactcatacaatatggtataaacctgtgagagaggatgaagaaagtaataaagattgtgttggtggtaaaagaggaagagcccaaacagctccaacgaaaacttcccctagaaatgcaaaaaagcatgatgagttatggcacgatggagtgtgcccatcagtatcaaatcctttagaagtttacctcattcccacaccacctgaaaatataacatttgaagacccgtcattagatgtgatccttcttttaagagttttacatgctatcagtcgatactggtattacttgtatgataatgcaatgtgcaaggaaattattccaactagtgaatttattaacagtaagttaacagcaaaagcaaataggcaacttcaagatcctttagtaatcatgacaggaaacatcccaacatggcttactgagctaggaaaaacctgcccatttttctttccttttgatacccggcaaatgcttttttatgtaactgcatttgatcgggaccgagcaatgcaaagattacttgataccaacccagaaatcaaccagtctgattctcaagatagcagagttgcacctagattggatagaaaaaaactgtgaccgnagactgtgacagcga

SEQ ID NO: 408558 - DNA, 2025 bp, Homo sapiens
gtgctgcggctcagctgataattgaaggaacccggagccgccgccgccgcgccgctggggggggtggggggagctagtggaagttactgccgcgccaccgagtccggaccggagactttggggcctaactagtgaatggtagtgtctagaaagggtatgtcccttcaagagagaggtgccaatgtccaaccggcctaataacaatccaggggggtcactgcgacgttcacagaggaacactgccggggcccaaccacaagacgactcaataggaggaagaagctgcagttcatcatctgctgtgatagttccacaaccagaggatccagacagagccaatacttcagaaagacaaaaaacggggcaggtgcctaagaaagacaattctcgaggagtgaagcgcagtgctagtccagactacaacaggaccaattctcctagctctgcaaaaaaaccaaaagcacttcagcatactgaatctccctcagaaacaaataagccacatagtaagtcaaagaagagacatttagaccaggagcaacaactgaaatctgcacaatcaccatcaacaagcaaggctcataccaggaagagtggggccactggcggttcacggagtcagaaaagaaaaaggacagagagttcttgtgtaaagagtggctccgggtctgaatcaactggtgcagaagagagatctgcgaaacctaccaagctggcttcaaaatcagccacctcagccaaagctgggtgtagcaccatcactgattcttcttctgctgcctctacttcctcctcgtcttctgctgtagcctcggcctcctccactgtaccaccaggtgccagagtgaaacaaggaaaagatcagaacaaggccaggcgttcccgttcagcgtccagtcccagccccagaagaagtagcagggaaaaggaacagaggtcttctaagtcagagacatcaaaacctggaccttctggattacaggccaaattagcaagtttaagaaaatctacgaagaaacgcagtgagtctccacctgctgagctccccagtttgaggcggagcacacgccaaaagaccacgggctcctgtgctagtaccagtcggcgaggctctggcctgggcaaaagaggagcagctgaagctcgtcgacaggagaaaatggcagaccctgaaagcaaccaggaggcagtaaattcttcagctgctcggacagatgaagctccccaaggagctgcaggggctgttggcatgaccacctctggggagagtgaatcagatgattccgagatgggacgtttgcaagctttgttagaggcaaggggtcttccccctcacctatttggtcctcttggtcctcggatgtcacagcttttccatagaacaattggaagtggagctagttctaaggcccagcagctactacaaggattgcaagccagtgatgaaagtcaacagcttcaggcagttattgagatgtgtcagttactggtcatgggaaatgaggagacactgggagggtttcctgtcaagagtgttgttccagctttgattacgttacttcagatggagcacaattttgatattatgaaccatgcttgtcgagccttaacatacatgatggaagcacttcctcgatcttctgctgttgtagtagatgctattcctgtctttttagaaaaggtgatcctacttttaccccgtttgttcaaaagcaggcatagggagtcaagtttcaaactcttgaattttagctttcattttctaaataaagtatattttttagcccgagaaatgttttatgtccagcagatcaatagtttgaaggtgaagataaatcattgatagaatcagcctagttttgtaatttttagtaataattagcacattaatataataactttcagagaagaactttaaagtacttgattaaaaataatctcatttctagaaaacatgccagtgaggttgatagctactttataccctcattatgtagctgagaaagttgatcagtgggaacatcc

SEQ ID NO: 408559 - DNA, 704 bp, Homo sapiens
aacacccttctgtagtcccctcccacactgcgtcagagattatctgtgtgaccagtagattatggcagaagtgatggtgtacaaactctgagacttagtcatataggcatttcaggttttgccttgttctcttggagtactcaccatgggaaatcagcaaccattgagaagactctcacaaagccctgtggcggggcactgaggtctcctctcagcagccagcacccacctgccagatgtggatgtgcccctcttgagttctcggcaataatgagtgattattgttatttttagccagtaagtttcagaataatttgttactcagcaatagataatacattgtttgagcagtttttaaaaacggcttcagaatgtggctctgagctaaatagaagtctgtgaaacatgttttcaacaaatccatgatttatagaacagattacctagttatatacctacctcctcagagactcaaattgttctgtctcaaattgctgtattaacactaaggaagaaggtctaggaggtacaaaaaaatcagcttctgccttacaagagtaagttcccctaggacaggactaccttaatcacttagtttaaatgttttttaagcacctaccttctctcagttgctgaggatacatcactgaattagttggacaagatctctgctctgctagagacttcatttcatttggggaggt

SEQ ID NO: 408560 - DNA, 716 bp, Homo sapiens
ttccaccctctgggcctgctctccttacaggcattaggccttcaaaagacaattttctccctgtttctcctccttgcccaatctctccttctaaaccctcttccacctgtactcacattctccaggaagccttctctgatgggactcctgtgactctaaggttgctactacagcatccaacatcccagccccttgggccctggcaactgccacctgggatggccttgtgcctgttgccgttactatgttaaatgtagatgtgtgtgtctacttcaccctcagattcagtgctcactagaagtaggaaccaagtgtccccatcagacctgaagctctgcccctgctttgggtacaagacactcacttgcactgacacacacactcgtacacactgcctatcaggctgggagtgcccaaggacaggtcctgtgtccttttctctgccggctcacctttgcctacccacagcctcagcttggcacacagagatggttgtcccccaggtcggtaaggtgggggtggcagtgagggaccatgagcctggagccctccaggattccaagcccagatccctctatcctgatgaagggctgttcccaccttgttcctgccgcccccgccccctacttcctctgagcaagaatctgaatgtcagaaccagggagggccgtgggggacttttgacagcaagtccaagtgagccaaggttgcccaat

SEQ ID NO: 408561 - DNA, 495 bp, Homo sapiens
attattatttttagatggagtcttggtctgtcgcccaggctggagtgcagtggtgcgatcttagcttactgcaatctccgcctcccgggttcaagtgattctcatgccttcagcctcccgagtaccctgggattacagggtgcccgccaccatgccctggctaatttttgtatttttagtagagacggggtttcaccatgttggccaggctggtctcgaactcctgacctcaggtgatccacctgcgtcggcctcccaaagtgctgggattacaggtgtgagtcactgcgcctggcctatgtgtagattatttatgaaagtaaatgcagcaacttggtagcaaggcaacattggttgctttcaggaatgggaatggggggcaggagagaaacttactgtattccctattatctcttttgaatataaacgattgaatgtatttcctattttaaaaataacgaaatgaatgttaaatttgacaaggggactagcaaa

SEQ ID NO: 408562 - DNA, 439 bp, Homo sapiens
aataggaaaaaacagaatattacctaaacttagttgataaagcagtggtaagagtttgagaggattgactccaattttgaaagaaattccactgtgtgtaaaaggctatcaaacatcattgcataaaggacagatctttcatttatgaaacagaatcagtgtagcaaacttaattgttgccctatcttaagaatttgcgtcagccaccccaaccttcagcaaccaccatactgatgagtcagcagccatcaacatcaaagataagtccctctaccagcaaaaagattatgactcactgaagggtcagataattgttagcattcattagcaataaaatattctttaatgaaggtacttttttatgcatatgctattgtacacttaataaacaatagtatagtaaaaacataatttttatatgcactggaaaccaaaaaat

SEQ ID NO: 408563 - DNA, 720 bp, Homo sapiens
ggggattctgtgtccctgcatccagaaaagggacagatatagaaagggaggatgcggtctcaccgggccataaacatatatgaatccttcttggaaggaatcagaaatactcgcaggccttctagtttctgggtaaactgatagaacacaggctctttaactggacagtcaaaccacaatgccccctggtggtgaaatcatgcatatacacatgtcatcacagataggaaattctccaataaggtcaacacgacaaggacatctgcagtgatctttctacatgctctgccaacttggcactcatctataactttagaagaggaggcagaacatcagtgatgactgcaaacatatgcttgatttttttaagcaacgggaaaatgaaaaatgaacgggaggagggaacactgctgccttctgaggacagaagtcgtgtttcaagtagtcaggagtgatggggaggtgggacgagaatgaagacttaggggaatctgaacaaaacaaggtggtgtatggggaatgagggcagtcagtaaagccaaatagtaccaggtggaaaaatagcctaaaagaagtacaagtctaatcatccaaaaattctaaagcaaaactaaaactccatagttcagcaaaagacaccctttcaggtgtttagaagactgtggttatccgtttaaagatgttcctctctcaaggaatctctgagaactataaatgtgt

SEQ ID NO: 408564 - DNA, 607 bp, Homo sapiens
gcaaaactgggtcacatggctattcccacaccgatacctagtaagggaaggagagtcatggtgattggctcaggtgttgtaacaaagagggggcatgatttctaggatggtacaaacactggttcatgagctcccgcacacggttcctgagattatgaatcccaaacactgagcacggcgtctaacacatggcagttgccttatccatattgcttccccctttctctgattccctctaagaacacaagactcccagcctggcctctcctgagccagccttccacccctcaatcctggggcttgggtctccaccagtcagtgcctctcccatcctgacctctggctccatcactgccctccctcttatttctatctcaaaagcttggggatgaacaaagatcacttcgttgtcctcagtgacactgggattcctaaagaataaaagataggagatgctagattcttatataaatgctttcaccaggggagccaaaaattaataacagcatgaacagaaggcctggagtttttaaccactccattcagacaactgaaatgatccgagtacaccgttatctgggcgaggtgcggggactgactgccgact

SEQ ID NO: 408565 - DNA, 6318 bp, Homo sapiens
  misc_feature (2460)..(2460): n is a, c, g, or t
  misc_feature (6036)..(6036): n is a, c, g, or t
agcgggctgggcctgtgatcgctgaggggcgagcagttgcgaccctgggctcctggggacctgagcgttatgtctttccgcgacctccgcaatttcacagagatgatgagagccctgggataccctcgacatatttctatggaaaatttccgtacacccaattttggacttgtatctgaagtgcttctctggcttgtgaaaagatatgagccccagactgacatcccgcctgacgtggatactgaacaggaccgagttttcttcattaaggcaattgcccagttcatggccaccaaggcacatataaaactcaacactaagaagctttatcaagcagatgggtatgcggtaaaagagctgctgaagatcacatctgtcctttataatgctatgaagaccaaggggatggagggctctgaaatagtagaggaagatgtcaacaagttcaagtttgatcttggctcaaagattgcagatttgaaggcagccaggcagcttgcgtctgaaatcacctccaaaggagcatctctgtatgacttgctcggcatggaagtagagttgagggaaatgagaacagaagccattgccagacctctggaaataaacgagactgaaaaagtgatgagaattgcaataaaagagattttgacacaggttcagaagactaaagacctgctcaataatgtggcctctgatgaagctaatttagaagccaaaatcgaaaagagaaaattagaactggaaagaaatcggaagcgactagagactctgcagagtgtcaggccatgttttatggatgagtatgagaagactgaggaagaattacaaaagcagtatgacacttatctggagaaatttcaaaatctgacttatctggaacaacagcttgaagaccatcataggatggagcaagaaaggtttgaggaagctaaaaacactctctgcctgatacagaacaagctcaaggaggaagagaagcgcctgctcaagagtggaagtaacgatgactcggacatagacatccaggaggacgatgaatccgacagtgagttggaagaaaggcggctgcccaagccacagacagccatggagatgctcatgcaaggaagacctggcaaacgcattgtgggcacgatgcaaggtggagactccgatgacaatgtaagtcccccgctcccctcagtggttctgtgcactctgggtttggctgtccccatagatgggagtggctgagttgctgtcagcagccagggagccgtctatggtcagcccggccgtgcctcgatgcgtggcagggtttggcctcatgaggctctggactcttcgttgctcgtggatggctcatctcttttcaagtgaatgtgcttgctctgctttttttgccttctcactgttctttccattctcgctttccaaagatggaagcagcaccagctctcttaggtaaatgcaagacttccagctccaagaagcaggttggttttctgttctgcctcatgtgtttgtgggtgtctgtcagccctcccggggccagccaggggcctctccctaggagtgatgcttcctctctcctgggcaaaaaggccactcaaaagagatcctgtggtgacagcgggatcactgaaggcccctgtgctaaagtggaggcgcaggcacggagcctggaggcggggaaagctcaggccgggccatcctcaggccctgggccgccacctagaaatgaaggaggacgccgagggccgggctcaggaccaacccccctccctgttctgtgctggggacggaatggtgaagcagcactgtccccagaccaggccctcgaggtgccaggcatgaggctgagacataagctgccttgagctttactgagtggataactccctggagcacttaagcaaaaggggattctaggggtcctcagtgaggtccagtcatcagggctctgccgcccattgctcaagcctacgttctttgttgcgtccctggcagtgctgctcggcccacacagcaaagggcgactcaacagagactgaccccaggctgcctccatgtgccctgaatttacagggcacagtctgtagagaagcagagagagcaactggaaaataattttcctaacaagctcgggtgtggatggtatacagcgtctctccgtcttgcccacccaagacagaagcagagggagtgtggcgtgggtgctggcaatgctgaggcagcaccgcctgcctcttctccagggtttgccttctctctcctcagagcgaatgcattagtcgcagctgagctttatgcctggtggtcacttgtttatttcaaggaggctgtgtccatgccgccctccaggcacagggttccatgctttacgtgttcaggcatccaacacgtgtctgttgagtgcctgccacatgccagtgctgtcgtggattatggggaacgcagcaggggcagaggcaagccccngcttcatggctcacaccccagcaataatgatggattgtcggatcagggctcatggtgttaacaggaggaataacagcttcaggggacagggagtgacagggaacaaggagggggtggcgtcttctgcgaggtcagtgaaggcccctgacgtggtggtgtttgagcagggcctgagtggagggagcgagcgcatgggttggcggcacctgggcatgtggaatgcactcctcgcatcgaggagcagaggcagctggtgtgattgtgggtgagtgcgagaggcagcaggggccatgcagagctttgcagggtgagatgaagactctgttttctctgagtgtgaggggaaggccctgaagaatcatgagcccagaagggtcaagagctgatgatccctgtttgagagaagccagttaggaggcgcctgcacccgtggaggtcagaggtgacggtgcttggccgaaggtgtggcagcagaggtgttgagaaatggtcaggtcctgggtctctctaagaaccatcaggttttgtgaattgattggacataggctgttagagaaagagaaaaatgagggtgcctgggcttggtctaatcagcagaaagcagagtttcattttctgagatggggccgacttgacaaaggggcttggaaggcagatcgaaagtttgattttggacattctgaatgtgacagccacatgctagggttgagtagccaggtggaatttaagtctggagttcaagggccacgtctgggctagagattgaattttgggagccacccttatttggttggtatctaagccacaaggatagatgtgactgcctagggagagcaagtagaatgagaagagaggcgacccaaggtcctgagctgcatctgccctgcagaggtccgggaggaaggggcaggcagaggaggctgaggggcgtcagcagtgaggaagggggacctggactagagaaggggccctgggggatggagaagatgggttttaaggatgaaggggtgattccacagctcaagcaggatgaggcctgagaatcgatcccagtccgttgaatgtttccttcttgacaggagcagtgctggggtcagtaggtgagagcccgggggaactgaagcagtcgtgaggggcacaggtgtggacagtgagttcaacgactcgctcaggagctttgtgtgaggggagagagacagggcagagcagctggagaggaaggtgggattacctttggggttttttttcaagaaggaaattacagcatgagtgtgcaccgacaggaatgatctagatagaacgaccagccatcctggtttacatgggacgcaggaactgccgttttaaagctgggctgagttggtcaccctggagccctggatccgatgaggagagagagggtgtgtctttcactttgctccctttttttcttttttttcttttttttttgagatggagtcttgctttggagtgcagtggtgcaatctcggctcactgcacctctgcctcccaggttcaagcgattcttctgcctcagtctccggagtagctgggattcactttgctccttataccaatgtctatgttgctttccatccacaatctacaaaaagccaaaacaggcctcccttccctctctccaagcccctgtccttcttgccatctgtagggggagtctctaggtccagtggccctcagcgcagatgcagagtgcttcttagacgctgcgggaaagccagcccctgcagcaccacacccagatgcacctgcagtttggaggattctggttggatgataaattccagctggcagtacatagcctcagtcccatctgtatgccctcccacagcctgcttgccactctgccagcctcttccttcacacagggatgctgctatagaaagggaggcagagagtcttaggacaagatgtcaggaatgaggcaggatcccccgttgcatctgccatttttttcctataggaggactcggaggagagtgaaattgacatggaagatgatgatgacgaggatgacgatttggaagacgagagcatttctctctcaccaaccaagcccaatcgaagggtccggaaatctgaacccctggatgagagtgacaatgacttctgacccttttgccaagggaccctggcagattaaaaccctcagacttgtaggtaaatgggaacttagaaggttaggaaggtaacccctgttttgtttactaagctggctggactcatgatcactgaagcaatacttatttctgctttagcctcctatgtttgcattccatgaagcttaaataagaattgaagcaaatccctaagatttatttttttccaccttatttatcttctaaaacttgaggaatgcatgtgttcttagtgattcacatccacgggacaaaaactcaagaagaaataagagctgacgccacacaagtcttggctgcttttgttactatacattttctctgagactccagcagagttggggctggaacttggcactggggactcatgtttggaatcgtaggggaacatctggctgttaatcacttgcacagttgagaacatttcctatacatcggcttttaattctagctcttatttcattttgtaatcttattttctttcgtctgcatgttcacaataccaagcattaaatgtattttaataactaaacttttctgaaagaaggttagctaaagttaaatgaaaacttggtttctttgaaaatcaggcaatagagacaggctccagatgaggaatcctccattttctgtccgaagctgacattcctctggcagtccagttcaccttggattacagccaccttcatgtttccacggttggtactaaatctggaaactctggtgacctgggctgccctctcagaaactccagactcccatggcaatgacagccgggacacttttcttccctccagccagggtttctctaaaggagctttgttttgtctaaagtgtggcaagacatagtgcacaacacagggacaaaggcaggtttcctgcagctcgctacctaagtgtttctgtaggggaaggagccaattaagaaaaagtgttggtacagattcatgtttctgatttaaaaaaacaacaacacaggattgaattaagtagagtaatagcactagaagaatttttctgttgtgaaattagaagtggagttggtttttttcttttttcttcttctttttttttaatatgaaaagtacttagctgggagtggtggcaagcgcccttgggtccagctactcaggaggccaaggtgggaggatcacttgagcccaggagttttagactagcctggacaactaagtgagactccatctctacaaaaaattaaaaaattagccaggtgtggaggggcatgcctgtggtctcagctattcaggaggctgaggcaggagaatcacttgagaccaggaagttgaggctgcaatgagccgtgatcatgccactgcactccagcctgggtgacagagtgagaccctgtctttaaaaaaaagaaaaagaaaagcacgctgcttgtaaaaagcgtacagtnggtcaggcgtggtggctcatgcctgtaatcctagcactttgagaggctgaggtgggtagatcacctgaggtcaggggtttgagaccagcctggccaacatggcgaaaccccacctctactaaaaatacaaaaattagccgggcgtggtagcgcatgcctgtaaccccagctactggggaggctgaggcaggagaatcgcttgaacctaggaggcggaggttgcagtgagccgagatggcgccactgcactccagcctgggcagcagagtgagactccatctc

SEQ ID NO: 408566 - DNA, 2988 bp, Homo sapiens
  misc_feature (2706)..(2706): n is a, c, g, or t
cagacatcctgaactccatctgcatcctttctgcagggctgatttcacagagatgatgagagccctgggataccctcgacatatttctatggaaaatttccgtacacccaattttggacttgtatctgaagtgcttctctggcttgtgaaaagatatgagccccagactgacatcccgcctgacgtggatactgaacaggaccgagttttcttcattaaggcaattgcccagttcatggccaccaaggcacatataaaactcaacactaagaagctttatcaagcagatgggtatgcggtaaaagagctgctgaagatcacatctgtcctttataatgctatgaagaccaaggggatggagggctctgaaatagtagaggaagatgtcaacaagttcaagtttgatcttggctcaaagattgcagatttgaaggcagccaggcagcttgcgtctgaaatcacctccaaaggagcatctctgtatgacttgctcggcatggaagtagagttgagggaaatgagaacagaagccattgccagacctctggaaataaacgagactgaaaaagtgatgagaattgcaataaaagagattttgacacaggttcagaagactaaagacctgctcaataatgtggcctctgatgaagctaatttagaagccaaaatcgaaaagagaaaattagaactggaaagaaatcggaagcgactagagactctgcagagtgtcaggccatgttttatggatgagtatgagaagactgaggaagaattacaaaagcagtatgacacttatctggagaaatttcaaaatctgacttatctggaacaacagcttgaagaccatcataggatggagcaagaaaggtttgaggaagctaaaaacactctctgcctgatacagaacaagctcaaggaggaagagaagcgcctgctcaagagtggaagtaacgatgactcggacatagacatccaggaggacgatgaatccgacagtgagttggaagaaaggcggctgcccaagccacagacagccatggagatgctcatgcaaggaagacctggcaaacgcattgtgggcacgatgcaaggtggagactccgatgacaatgaggactcggaggagagtgaaattgacatggaagatgatgatgacgaggatgacgatttggaagacgagagcatttctctctcaccaaccaagcccaatcgaagggtccggaaatctgaacccctggatgagagtgacaatgacttctgacccttttgccaagggaccctggcagattaaaaccctcagacttgtaggtaaatgggaacttagaaggttaggaaggtaacccctgttttgtttactaagctggctggactcatgatcactgaagcaatacttatttctgctttagcctcctatgtttgcattccatgaagcttaaataagaattgaagcaaatccctaagatttatttttttccaccttatttatcttctaaaacttgaggaatgcatgtgttcttagtgattcacatccacgggacaaaaactcaagaagaaataagagctgacgccacacaagtcttggctgcttttgttactatacattttctctgagactccagcagagttggggctggaacttggcactggggactcatgtttggaatcgtaggggaacatctggctgttaatcacttgcacagttgagaacatttcctatacatcggcttttaattctagctcttatttcattttgtaatcttattttctttcgtctgcatgttcacaataccaagcattaaatgtattttaataactaaacttttctgaaagaaggttagctaaagttaaatgaaaacttggtttctttgaaaatcaggcaatagagacaggctccagatgaggaatcctccattttctgtccgaagctgacattcctctggcagtccagttcaccttggattacagccaccttcatgtttccacggttggtactaaatctggaaactctggtgacctgggctgccctctcagaaactccagactcccatggcaatgacagccgggacacttttcttccctccagccagggtttctctaaaggagctttgttttgtctaaagtgtggcaagacatagtgcacaacacagggacaaaggcaggtttcctgcagctcgctacctaagtgtttctgtaggggaaggagccaattaagaaaaagtgttggtacagattcatgtttctgatttaaaaaaacaacaacacaggattgaattaagtagagtaatagcactagaagaatttttctgttgtgaaattagaagtggagttggtttttttcttttttcttcttctttttttttaatatgaaaagtacttagctgggagtggtggcaagcgcccttgggtccagctactcaggaggccaaggtgggaggatcacttgagcccaggagttttagactagcctggacaactaagtgagactccatctctacaaaaaattaaaaaattagccaggtgtggaggggcatgcctgtggtctcagctattcaggaggctgaggcaggagaatcacttgagaccaggaagttgaggctgcaatgagccgtgatcatgccactgcactccagcctgggtgacagagtgagaccctgtctttaaaaaaaagaaaaagaaaagcacgctgcttgtaaaaagcgtacagtnggtcaggcgtggtggctcatgcctgtaatcctagcactttgagaggctgaggtgggtagatcacctgaggtcaggggtttgagaccagcctggccaacatggcgaaaccccacctctactaaaaatacaaaaattagccgggcgtggtagcgcatgcctgtaaccccagctactggggaggctgaggcaggagaatcgcttgaacctaggaggcggaggttgcagtgagccgagatggcgccactgcactccagcctgggcagcagagtgagactccatctc

SEQ ID NO: 408567 - DNA, 2926 bp, Homo sapiens
  misc_feature (2644)..(2644): n is a, c, g, or t
agcgggctgggcctgtgatcgctgaggggcgagcagttgcgaccctgggctcctggggacctgagcgttatgtctttccgcgacctccgcaatatgagccccagactgacatcccgcctgacgtggatactgaacaggaccgagttttcttcattaaggcaattgcccagttcatggccaccaaggcacatataaaactcaacactaagaagctttatcaagcagatgggtatgcggtaaaagagctgctgaagatcacatctgtcctttataatgctatgaagaccaaggggatggagggctctgaaatagtagaggaagatgtcaacaagttcaagtttgatcttggctcaaagattgcagatttgaaggcagccaggcagcttgcgtctgaaatcacctccaaaggagcatctctgtatgacttgctcggcatggaagtagagttgagggaaatgagaacagaagccattgccagacctctggaaataaacgagactgaaaaagtgatgagaattgcaataaaagagattttgacacaggttcagaagactaaagacctgctcaataatgtggcctctgatgaagctaatttagaagccaaaatcgaaaagagaaaattagaactggaaagaaatcggaagcgactagagactctgcagagtgtcaggccatgttttatggatgagtatgagaagactgaggaagaattacaaaagcagtatgacacttatctggagaaatttcaaaatctgacttatctggaacaacagcttgaagaccatcataggatggagcaagaaaggtttgaggaagctaaaaacactctctgcctgatacagaacaagctcaaggaggaagagaagcgcctgctcaagagtggaagtaacgatgactcggacatagacatccaggaggacgatgaatccgacagtgagttggaagaaaggcggctgcccaagccacagacagccatggagatgctcatgcaaggaagacctggcaaacgcattgtgggcacgatgcaaggtggagactccgatgacaatgaggactcggaggagagtgaaattgacatggaagatgatgatgacgaggatgacgatttggaagacgagagcatttctctctcaccaaccaagcccaatcgaagggtccggaaatctgaacccctggatgagagtgacaatgacttctgacccttttgccaagggaccctggcagattaaaaccctcagacttgtaggtaaatgggaacttagaaggttaggaaggtaacccctgttttgtttactaagctggctggactcatgatcactgaagcaatacttatttctgctttagcctcctatgtttgcattccatgaagcttaaataagaattgaagcaaatccctaagatttatttttttccaccttatttatcttctaaaacttgaggaatgcatgtgttcttagtgattcacatccacgggacaaaaactcaagaagaaataagagctgacgccacacaagtcttggctgcttttgttactatacattttctctgagactccagcagagttggggctggaacttggcactggggactcatgtttggaatcgtaggggaacatctggctgttaatcacttgcacagttgagaacatttcctatacatcggcttttaattctagctcttatttcattttgtaatcttattttctttcgtctgcatgttcacaataccaagcattaaatgtattttaataactaaacttttctgaaagaaggttagctaaagttaaatgaaaacttggtttctttgaaaatcaggcaatagagacaggctccagatgaggaatcctccattttctgtccgaagctgacattcctctggcagtccagttcaccttggattacagccaccttcatgtttccacggttggtactaaatctggaaactctggtgacctgggctgccctctcagaaactccagactcccatggcaatgacagccgggacacttttcttccctccagccagggtttctctaaaggagctttgttttgtctaaagtgtggcaagacatagtgcacaacacagggacaaaggcaggtttcctgcagctcgctacctaagtgtttctgtaggggaaggagccaattaagaaaaagtgttggtacagattcatgtttctgatttaaaaaaacaacaacacaggattgaattaagtagagtaatagcactagaagaatttttctgttgtgaaattagaagtggagttggtttttttcttttttcttcttctttttttttaatatgaaaagtacttagctgggagtggtggcaagcgcccttgggtccagctactcaggaggccaaggtgggaggatcacttgagcccaggagttttagactagcctggacaactaagtgagactccatctctacaaaaaattaaaaaattagccaggtgtggaggggcatgcctgtggtctcagctattcaggaggctgaggcaggagaatcacttgagaccaggaagttgaggctgcaatgagccgtgatcatgccactgcactccagcctgggtgacagagtgagaccctgtctttaaaaaaaagaaaaagaaaagcacgctgcttgtaaaaagcgtacagtnggtcaggcgtggtggctcatgcctgtaatcctagcactttgagaggctgaggtgggtagatcacctgaggtcaggggtttgagaccagcctggccaacatggcgaaaccccacctctactaaaaatacaaaaattagccgggcgtggtagcgcatgcctgtaaccccagctactggggaggctgaggcaggagaatcgcttgaacctaggaggcggaggttgcagtgagccgagatggcgccactgcactccagcctgggcagcagagtgagactccatctc

SEQ ID NO: 408568 - DNA, 1778 bp, Homo sapiens
agcgggctgggcctgtgatcgctgaggggcgagcagttgcgaccctgggctcctggggacctgagcgttatgtctttccgcgacctccgcaatttcacagagatgatgagagccctgggataccctcgacatatttctatggaaaatttccgtacacccaattttggacttgtatctgaagtgcttctctggcttgtgaaaagatatgagccccagactgacatcccgcctgacgtggatactgaacaggaccgagttttcttcattaaggcaattgcccagttcatggccaccaaggcacatataaaactcaacactaagaagctttatcaagcagatgggtatgcggtaaaagagctgctgaagatcacatctgtcctttataatgctatgaagaccaaggggatggagggctctgaaatagtagaggaagatgtcaacaagttcaagtttgatcttggctcaaagattgcagatttgaaggcagccaggcagcttgcgtctgaaatcacctccaaaggagcatctctgtatgacttgctcggcatggaagtagagttgagggaaatgagaacagaagccattgccagacctctggaaataaacgagactgaaaaagtgatgagaattgcaataaaagagattttgacacaggttcagaagactaaagacctgctcaataatgtggcctctgatgaagctaatttagaagccaaaatcgaaaagagaaaattagaactggaaagaaatcggaagcgactagagactctgcagagtgtcaggccatgttttatggatgagtatgagaagactgaggaagaattacaaaagcagtatgacacttatctggagaaatttcaaaatctgacttatctggaacaacagcttgaagaccatcataggatggagcaagaaaggtttgaggaagctaaaaacactctctgcctgatacagaacaagctcaaggaggaagagaagcgcctgctcaagagtggaagtaacgatgactcggacatagacatccaggaggacgatgaatccgacagtgagttggaagaaaggcggctgcccaagccacagacagccatggagatgctcatgcaaggaagacctggcaaacgcattgtgggcacgatgcaaggtggagactccgatgacaatgaggactcggaggagagtgaaattgacatggaagatgatgatgacgaggatgacgatttggaagacgagagcatttctctctcaccaaccaagcccaatcgaagggtccggaaatctgaacccctggatgagagtgacaatgacttctgacccttttgccaagggaccctggcagattaaaaccctcagacttgtaggtaaatgggaacttagaaggttaggaaggtaacccctgttttgtttactaagctggctggactcatgatcactgaagcaatacttatttctgctttagcctcctatgtttgcattccatgaagcttaaataagaattgaagcaaatccctaagatttatttttttccaccttatttatcttctaaaacttgaggaatgcatgtgttcttagtgattcacatcctccatggtgctatcagcaccatggaggatgtgcacgctagactggagaccgttaacagtccactatgggaccaggagaaatcaaacaacagctttgtgaggaaaagatctgtatcctcatgtcatggatgtgaagacagaaagccagagaggtggcgtgatttccatagaacaaagctggttggggtctctcatatt

SEQ ID NO: 408569 - DNA, 557 bp, Homo sapiens
agattataaaatttcttggtatatttaattttttttttaaatgcattcctatctatatttatgcatagaaaagtctggaaggatgtatgtcaactatcaagcgcttatacctggtgatgggattatcagtaatttttacgtcattcttcatactttcaggattatttcaagtttttacaaagagcacatcttatttatgatgaaaaagaagtatgttcattttggggggagaaagcagaaaagggaaaatatttttaagcattacaagaatgaaggaccttctctaattaagggtttccagagaaagccaccatggaatctgaaactgtgaatacccatttcaaactactgcatataattcacctttcctttttatttcatttgcttcttttaggccatgttttatggatgagtatgagaagactgaggaagaattacaaaagcagtatgacacttatctggagaaatttcaaaatctgacttatctggaacaacagcttgaagaccatcataggatggagcaagaaaggtttgaggtgagctgagcctgtcctctg

SEQ ID NO: 408570 - DNA, 2550 bp, Homo sapiens
  misc_feature (2268)..(2268): n is a, c, g, or t
cttggctcgctgcgcctctgcctcccaggttcaagagattcttctgcctcagcctcctaagtagctgggattacaggaaatgagaacagaagccattgccagacctctggaaataaacgagactgaaaaagtgatgagaattgcaataaaagagattttgacacaggttcagaagactaaagacctgctcaataatgtggcctctgatgaagctaatttagaagccaaaatcgaaaagagaaaattagaactggaaagaaatcggaagcgactagagactctgcagagtgtcaggccatgttttatggatgagtatgagaagactgaggaagaattacaaaagcagtatgacacttatctggagaaatttcaaaatctgacttatctggaacaacagcttgaagaccatcataggatggagcaagaaaggtttgaggaagctaaaaacactctctgcctgatacagaacaagctcaaggaggaagagaagcgcctgctcaagagtggaagtaacgatgactcggacatagacatccaggaggacgatgaatccgacagtgagttggaagaaaggcggctgcccaagccacagacagccatggagatgctcatgcaaggaagacctggcaaacgcattgtgggcacgatgcaaggtggagactccgatgacaatgaggactcggaggagagtgaaattgacatggaagatgatgatgacgaggatgacgatttggaagacgagagcatttctctctcaccaaccaagcccaatcgaagggtccggaaatctgaacccctggatgagagtgacaatgacttctgacccttttgccaagggaccctggcagattaaaaccctcagacttgtaggtaaatgggaacttagaaggttaggaaggtaacccctgttttgtttactaagctggctggactcatgatcactgaagcaatacttatttctgctttagcctcctatgtttgcattccatgaagcttaaataagaattgaagcaaatccctaagatttatttttttccaccttatttatcttctaaaacttgaggaatgcatgtgttcttagtgattcacatccacgggacaaaaactcaagaagaaataagagctgacgccacacaagtcttggctgcttttgttactatacattttctctgagactccagcagagttggggctggaacttggcactggggactcatgtttggaatcgtaggggaacatctggctgttaatcacttgcacagttgagaacatttcctatacatcggcttttaattctagctcttatttcattttgtaatcttattttctttcgtctgcatgttcacaataccaagcattaaatgtattttaataactaaacttttctgaaagaaggttagctaaagttaaatgaaaacttggtttctttgaaaatcaggcaatagagacaggctccagatgaggaatcctccattttctgtccgaagctgacattcctctggcagtccagttcaccttggattacagccaccttcatgtttccacggttggtactaaatctggaaactctggtgacctgggctgccctctcagaaactccagactcccatggcaatgacagccgggacacttttcttccctccagccagggtttctctaaaggagctttgttttgtctaaagtgtggcaagacatagtgcacaacacagggacaaaggcaggtttcctgcagctcgctacctaagtgtttctgtaggggaaggagccaattaagaaaaagtgttggtacagattcatgtttctgatttaaaaaaacaacaacacaggattgaattaagtagagtaatagcactagaagaatttttctgttgtgaaattagaagtggagttggtttttttcttttttcttcttctttttttttaatatgaaaagtacttagctgggagtggtggcaagcgcccttgggtccagctactcaggaggccaaggtgggaggatcacttgagcccaggagttttagactagcctggacaactaagtgagactccatctctacaaaaaattaaaaaattagccaggtgtggaggggcatgcctgtggtctcagctattcaggaggctgaggcaggagaatcacttgagaccaggaagttgaggctgcaatgagccgtgatcatgccactgcactccagcctgggtgacagagtgagaccctgtctttaaaaaaaagaaaaagaaaagcacgctgcttgtaaaaagcgtacagtnggtcaggcgtggtggctcatgcctgtaatcctagcactttgagaggctgaggtgggtagatcacctgaggtcaggggtttgagaccagcctggccaacatggcgaaaccccacctctactaaaaatacaaaaattagccgggcgtggtagcgcatgcctgtaaccccagctactggggaggctgaggcaggagaatcgcttgaacctaggaggcggaggttgcagtgagccgagatggcgccactgcactccagcctgggcagcagagtgagactccatctc

SEQ ID NO: 408571 - DNA, 333 bp, Homo sapiens
tcctggcttgctcaggtctggaagtagagttgagggaaatgagaacagaagccattgccagacctctggaaataaacgagactgaaaaagtgatgagaattgcaataaaagagattttgacacaggttcagaagactaaagacctgctcaataatgtggcctctgatgaagctaatttagaagccaaaatcgaaaagagaaaattagaactggaaagaaatcggaagcgactagagactctgcagagtgtcaggccatgttttatggatgagtatgagaagacctgaggaagccaggagacctgagcaattgtggagacctgagcaagccagg

SEQ ID NO: 408572 - DNA, 2746 bp, Homo sapiens
  misc_feature (2464)..(2464): n is a, c, g, or t
agcgggctgggcctgtgatcgctgaggggcgagcagttgcgaccctgggctcctggggacctgagcgttatgtctttccgcgacctccgcaatatgagccccagactgacatcccgcctgacgtggatactgaacaggaccgagttttcttcattaaggcaattgcccagttcatgattgcagatttgaaggcagccaggcagcttgcgtctgaaatcacctccaaaggagcatctctgtatgacttgctcggcatggaagtagagttgagggaaatgagaacagaagccattgccagacctctggaaataaacgagactgaaaaagtgatgagaattgcaataaaagagattttgacacaggttcagaagactaaagacctgctcaataatgtggcctctgatgaagctaatttagaagccaaaatcgaaaagagaaaattagaactggaaagaaatcggaagcgactagagactctgcagagtgtcaggccatgttttatggatgagtatgagaagactgaggaagaattacaaaagcagtatgacacttatctggagaaatttcaaaatctgacttatctggaacaacagcttgaagaccatcataggatggagcaagaaaggtttgaggaagctaaaaacactctctgcctgatacagaacaagctcaaggaggaagagaagcgcctgctcaagagtggaagtaacgatgactcggacatagacatccaggaggacgatgaatccgacagtgagttggaagaaaggcggctgcccaagccacagacagccatggagatgctcatgcaaggaagacctggcaaacgcattgtgggcacgatgcaaggtggagactccgatgacaatgaggactcggaggagagtgaaattgacatggaagatgatgatgacgaggatgacgatttggaagacgagagcatttctctctcaccaaccaagcccaatcgaagggtccggaaatctgaacccctggatgagagtgacaatgacttctgacccttttgccaagggaccctggcagattaaaaccctcagacttgtaggtaaatgggaacttagaaggttaggaaggtaacccctgttttgtttactaagctggctggactcatgatcactgaagcaatacttatttctgctttagcctcctatgtttgcattccatgaagcttaaataagaattgaagcaaatccctaagatttatttttttccaccttatttatcttctaaaacttgaggaatgcatgtgttcttagtgattcacatccacgggacaaaaactcaagaagaaataagagctgacgccacacaagtcttggctgcttttgttactatacattttctctgagactccagcagagttggggctggaacttggcactggggactcatgtttggaatcgtaggggaacatctggctgttaatcacttgcacagttgagaacatttcctatacatcggcttttaattctagctcttatttcattttgtaatcttattttctttcgtctgcatgttcacaataccaagcattaaatgtattttaataactaaacttttctgaaagaaggttagctaaagttaaatgaaaacttggtttctttgaaaatcaggcaatagagacaggctccagatgaggaatcctccattttctgtccgaagctgacattcctctggcagtccagttcaccttggattacagccaccttcatgtttccacggttggtactaaatctggaaactctggtgacctgggctgccctctcagaaactccagactcccatggcaatgacagccgggacacttttcttccctccagccagggtttctctaaaggagctttgttttgtctaaagtgtggcaagacatagtgcacaacacagggacaaaggcaggtttcctgcagctcgctacctaagtgtttctgtaggggaaggagccaattaagaaaaagtgttggtacagattcatgtttctgatttaaaaaaacaacaacacaggattgaattaagtagagtaatagcactagaagaatttttctgttgtgaaattagaagtggagttggtttttttcttttttcttcttctttttttttaatatgaaaagtacttagctgggagtggtggcaagcgcccttgggtccagctactcaggaggccaaggtgggaggatcacttgagcccaggagttttagactagcctggacaactaagtgagactccatctctacaaaaaattaaaaaattagccaggtgtggaggggcatgcctgtggtctcagctattcaggaggctgaggcaggagaatcacttgagaccaggaagttgaggctgcaatgagccgtgatcatgccactgcactccagcctgggtgacagagtgagaccctgtctttaaaaaaaagaaaaagaaaagcacgctgcttgtaaaaagcgtacagtnggtcaggcgtggtggctcatgcctgtaatcctagcactttgagaggctgaggtgggtagatcacctgaggtcaggggtttgagaccagcctggccaacatggcgaaaccccacctctactaaaaatacaaaaattagccgggcgtggtagcgcatgcctgtaaccccagctactggggaggctgaggcaggagaatcgcttgaacctaggaggcggaggttgcagtgagccgagatggcgccactgcactccagcctgggcagcagagtgagactccatctc

SEQ ID NO: 408573 - DNA, 3095 bp, Homo sapiens
  misc_feature (2813)..(2813): n is a, c, g, or t
agcgggctgggcctgtgatcgctgaggggcgagcagttgcgaccctgggctcctggggacctgagcgttatgtctttccgcgacctccgcaatttcacagagatgatgagagccctgggataccctcgacatatttctatggaaaatttccgtacacccaattttggacttgtatctgaagtgcttctctggcttgtgaaaagatatgagccccagactgacatcccgcctgacgtggatactgaacaggaccgagttttcttcattaaggcaattgcccagttcatggccaccaaggcacatataaaactcaacactaagaagctttatcaagcagatgggtatgcggtaaaagagctgctgaagatcacatctgtcctttataatgctatgaagaccaaggggatggagggctctgaaatagtagaggaagatgtcaacaagttcaagtttgatcttggctcaaagattgcagatttgaaggcagccaggcagcttgcgtctgaaatcacctccaaaggagcatctctgtatgacttgctcggcatggaagtagagttgagggaaatgagaacagaagccattgccagacctctggaaataaacgagactgaaaaagtgatgagaattgcaataaaagagattttgacacaggttcagaagactaaagacctgctcaataatgtggcctctgatgaagctaatttagaagccaaaatcgaaaagagaaaattagaactggaaagaaatcggaagcgactagagactctgcagagtgtcaggccatgttttatggatgagtatgagaagactgaggaagaattacaaaagcagtatgacacttatctggagaaatttcaaaatctgacttatctggaacaacagcttgaagaccatcataggatggagcaagaaaggtttgaggaagctaaaaacactctctgcctgatacagaacaagctcaaggaggaagagaagcgcctgctcaagagtggaagtaacgatgactcggacatagacatccaggaggacgatgaatccgacagtgagttggaagaaaggcggctgcccaagccacagacagccatggagatgctcatgcaaggaagacctggcaaacgcattgtgggcacgatgcaaggtggagactccgatgacaatatggaagcagcaccagctctcttaggtaaatgcaagacttccagctccaagaagcaggaggactcggaggagagtgaaattgacatggaagatgatgatgacgaggatgacgatttggaagacgagagcatttctctctcaccaaccaagcccaatcgaagggtccggaaatctgaacccctggatgagagtgacaatgacttctgacccttttgccaagggaccctggcagattaaaaccctcagacttgtaggtaaatgggaacttagaaggttaggaaggtaacccctgttttgtttactaagctggctggactcatgatcactgaagcaatacttatttctgctttagcctcctatgtttgcattccatgaagcttaaataagaattgaagcaaatccctaagatttatttttttccaccttatttatcttctaaaacttgaggaatgcatgtgttcttagtgattcacatccacgggacaaaaactcaagaagaaataagagctgacgccacacaagtcttggctgcttttgttactatacattttctctgagactccagcagagttggggctggaacttggcactggggactcatgtttggaatcgtaggggaacatctggctgttaatcacttgcacagttgagaacatttcctatacatcggcttttaattctagctcttatttcattttgtaatcttattttctttcgtctgcatgttcacaataccaagcattaaatgtattttaataactaaacttttctgaaagaaggttagctaaagttaaatgaaaacttggtttctttgaaaatcaggcaatagagacaggctccagatgaggaatcctccattttctgtccgaagctgacattcctctggcagtccagttcaccttggattacagccaccttcatgtttccacggttggtactaaatctggaaactctggtgacctgggctgccctctcagaaactccagactcccatggcaatgacagccgggacacttttcttccctccagccagggtttctctaaaggagctttgttttgtctaaagtgtggcaagacatagtgcacaacacagggacaaaggcaggtttcctgcagctcgctacctaagtgtttctgtaggggaaggagccaattaagaaaaagtgttggtacagattcatgtttctgatttaaaaaaacaacaacacaggattgaattaagtagagtaatagcactagaagaatttttctgttgtgaaattagaagtggagttggtttttttcttttttcttcttctttttttttaatatgaaaagtacttagctgggagtggtggcaagcgcccttgggtccagctactcaggaggccaaggtgggaggatcacttgagcccaggagttttagactagcctggacaactaagtgagactccatctctacaaaaaattaaaaaattagccaggtgtggaggggcatgcctgtggtctcagctattcaggaggctgaggcaggagaatcacttgagaccaggaagttgaggctgcaatgagccgtgatcatgccactgcactccagcctgggtgacagagtgagaccctgtctttaaaaaaaagaaaaagaaaagcacgctgcttgtaaaaagcgtacagtnggtcaggcgtggtggctcatgcctgtaatcctagcactttgagaggctgaggtgggtagatcacctgaggtcaggggtttgagaccagcctggccaacatggcgaaaccccacctctactaaaaatacaaaaattagccgggcgtggtagcgcatgcctgtaaccccagctactggggaggctgaggcaggagaatcgcttgaacctaggaggcggaggttgcagtgagccgagatggcgccactgcactccagcctgggcagcagagtgagactccatctc

SEQ ID NO: 408574 - DNA, 1054 bp, Homo sapiens
agcgggctgggcctgtgatcgctgaggggcgagcagttgcgaccctgggctcctggggacctgagcgttatgtctttccgcgacctccgcaatttcacagagatgatgagagccctgggataccctcgacatatttctatggaaaatttccgtacacccaattttggacttgtatctgaagtgcttctctggcttgtgaaaagatatgagccccagactgacatcccgcctgacgtggatactgaacaggaccgagttttcttcattaaggcaattgcccagttcatggccaccaaggcacatataaaactcaacactaagaagctttatcaagcagatgggtatgcggtaaaagagctgctgaagatcacatctgtcctttataatgctatgaagaccaaggggatggagggctctgaaatagtagaggaagatgtcaacaagttcaagtttgatcttggctcaaagattgcagatttgaaggcagccaggcagcttgcgtctgaaatcacctccaaaggagcatctctgtatgacttgctcggcatggaagtagagttgagggaaatgagaacagaagccattgccagacctctggaaataaacgagactgaaaaagtgatgagaattgcaataaaagagattttgacacaggttcagaagactaaagacctgctcaataatgtggcctctgatgaagctaatttagaagccaaaatcgaaaagagaaaattagaactggaaagaaatcggaagcgactagagactctgcagagtgtcaggccatgttttatggatgagtatgagaagactgaggaagaattacaaaagcagtatgacacttatctggagaaatttcaaaatctgacttatctggaacaacagcttgaagaccatcataggatggagcaagaaaggtttgaggtaacgatgactcggacatagacatccaggaggacgatgaatccgacagtgagttggaagaaaggcggctgcccaagccacagacagccatggagatgctcatgcaaggtaccccggcgtctttcgctgg

SEQ ID NO: 408575 - DNA, 1752 bp, Homo sapiens
ctgcaggggggggggggggggggggctgtcatggcggcaggacggcgaacttgcagtatctccacgacccgcccctacaggtgccagtgcctccagaatgtggcagctcacaagcctcctgctgttcgtggccacctggggaatttccggcacaccagctcctcttgactcagtgttctccagcagcgagcgtgcccaccaggtgctgcggatccgcaaacgtgccaactccttcctggaggagctccgtcacagcagcctggagcgggagtgcatagaggagatctgtgacttcgaggaggccaaggaaattttccaaaatgtggatgacacaacggtgaccagtgcttggtcttgcccttggagcacccgtgcgccagcctgtgctgcgggcacggcacgtgcatcgacggcatcggcagcttcagctgcgactgccgcagcggctgggagggccgcttctgccagcgcgaggtgagcttcctcaattgctcgctggacaacggcggctgcacgcattactgcctagaggaggtgggctggcggcgctgtagctgtgcgcctggctacaagctgggggacgacctcctgcagtgtcaccccgcagtgaagttcccttgtgggaggccctggaagcggatggagaagaagcgcagtcacctgaaacgagacacagaagaccaagaagaccaagtagatccgcggctcattgatgggaagatgaccaggcggggagacagcccctggcaggtggtcctgctggactcaaagaagaagctggcctgcggggcagtgctcatccacccctcctgggtgctgacagcggcccactgcatggatgagtccaagaagctccttgtcaggcttggagagtatgacctgcggcgctgggagaagtgggagctggacctggacatcaaggaggtcttcgtccaccccaactacagcaagagcaccaccgacaatgacatcgcactgctgcacctggcccagcccgccaccctctcgcagaccatagtgcccatctgcctcccggacagcggccttgcagagcgcgagctcaatcaggccggccaggagaccctcgtgacgggctggggctaccacagcagccgagagaaggaggccaagagaaaccgcaccttcgtcctcaacttcatcaagattcccgtggtcccgcacaatgagtgcagcgaggtcatgagcaacatggtgtctgagaacatgctgtgtgcgggcatcctcggggaccggcaggatgcctgcgagggcgacagtggggggcccatggtcgcctccttccacggcacctggttcctggtgggcctggtgagctggggtgagggctgtgggctccttcacaactacggcgtttacaccaaagtcagccgctacctcgactggatccatgggcacatcagagacaaggaagccccccagaagagctgggcaccttagcgaccctccctgcagggctgggcttttgcatggcaatggatgggacattaaagggacatgtaacaagcacaccggcctgctgttctgtccttccatccctcttttgggctcttctggagggaagtaacatttactgagcacctgttgtatgtcacatgccttatgaatagaatcttaactcctagagcaactctgtggggtggggaggagcagatccaagttttgcggggtctaaagctgtgtgtgttgagggggatactctgtttatgaaaaagaataaaaaacacaaccacg

SEQ ID NO: 408576 - DNA, 823 bp, Homo sapiens
ctgcaggggggggggggggggggggctgtcatggcggcaggacggcgaacttgcagtatctccacgacccgcccctacaggtgccagtgcctccagaatgtggcagctcacaagcctcctgctgttcgtggccacctggggaatttccggcacaccagctcctcttgactcagtgttctccagcagcgagcgtgcccaccaggtgctgcggatccgcaaacgtgccaactccttcctggaggagctccgtcacagcagcctggagcgggagtgcatagaggagatctgtgacttcgaggaggccaaggaaattttccaaaatgtggatgacacaacggtgaccagtgcttggtcttgcccttggagcacccgtgcgccagcctgtgctgcgggcacggcacgtgcatcgacggcatcggcagcttcagctgcgactgccgcagcggctgggagggccgcttctgccagcgcggtgagggggagaggtggatgctggcgggcggcggggcggggctggggccgggttggtgcctggccccgggtggtgtacttctatgtggacgatactactggtgtcaaggtgcccatgtatgtgcagtcgatctcccatcagatacccttattaatgcggagcttactctgtcagcttgcggctcatcatcctccctcgcccaatggcgattagcatttcttgaacctttccgtacacgggccctgattcagcactaatccttggttgaatttgaattcgggacccgtttctatctgctacctgaggctctgcctcatgcgccgtcttgatctttctctttcgctctccctt

SEQ ID NO: 408577 - DNA, 702 bp, Homo sapiens
  misc_feature (504)..(504): n is a, c, g, or t
  misc_feature (512)..(512): n is a, c, g, or t
  misc_feature (515)..(516): n is a, c, g, or t
  misc_feature (518)..(518): n is a, c, g, or t
ctgcaggggggggggggggggggggctgtcatggcggcaggacggcgaacttgcagtatctccacgacccgcccctacaggtgccagtgcctccagaatgtggcagctcacaagcctcctgctgttcgtggccacctggggaatttccggcacaccagctcctcttgactcagtgttctccagcagcgagcgtgcccaccaggtgctgcggatccgcaaacgtgccaactccttcctggaggagctccgtcacagcagcctggagcgggagtgcatagaggagatctgtgacttcgaggaggccaaggaaattttccaaaatgtggatgacacactggccttctggtccaagcacgtcgacggtgaccagtgcttggtcttgcccttggagcacccgtgcgccagcctgtgctgcgggcacggcacgtgcatcgacggcatcggcagcttcagctgcgactgccgcagcggctgggagggccgcttctgccagcgcggtgaggnggagaggngcnngnggacccactcctaacgagatgactatggcattatttgggccacttgggatacccggcggcattccatgaacaaccccctctatgaagactaccccatgtaacagactcacaattgggggccagtacgactccctggtgggcgccctccacgctggtgacgctgcgcctcctatctcatctgccg

SEQ ID NO: 408578 - DNA, 1777 bp, Homo sapiens
ctgcaggggggggggggggggggggctgtcatggcggcaggacggcgaacttgcagtatctccacgacccgcccctacaggtgccagtgcctccagaatgtggcagctcacaagcctcctgctgttcgtggccacctggggaatttccggcacaccagctcctcttgactcagtgttctccagcagcgagcgtgcccaccaggtgctgcggatccgcaaacgtgccaactccttcctggaggagctccgtcacagcagcctggagcgggagtgcatagaggagatctgtgacttcgaggaggccaaggaaattttccaaaatgtggatgacacactggccttctggtccaagcacgtcgacggtgaccagtgcttggtcttgcccttggagcacccgtgcgccagcctgtgctgcgggcacggcacgtgcatcgacggcatcggcagcttcagctgcgactgccgcagcggctgggagggccgcttctgccagcgcgaggtgagcttcctcaattgctcgctggacaacggcggctgcacgcattactgcctagaggaggtgggctggcggcgctgtagctgtgcgcctggctacaagctgggggacgacctcctgcagtgtcaccccgcagtgaagttcccttgtgggaggccctggaagcggatggagaagaagcgcagtcacctgaaacgagacacagaagaccaagaagaccaagtagatccgcggctcattgatgggaagatgaccaggcggggagacagcccctggcaggtggtcctgctggactcaaagaagaagctggcctgcggggcagtgctcatccacccctcctgggtgctgacagcggcccactgcatggatgagtccaagaagctccttgtcaggcttggagagtatgacctgcggcgctgggagaagtgggagctggacctggacatcaaggaggtcttcgtccaccccaactacagcaagagcaccaccgacaatgacatcgcactgctgcacctggcccagcccgccaccctctcgcagaccatagtgcccatctgcctcccggacagcggccttgcagagcgcgagctcaatcaggccggccaggagaccctcgtgacgggctggggctaccacagcagccgagagaaggaggccaagagaaaccgcaccttcgtcctcaacttcatcaagattcccgtggtcccgcacaatgagtgcagcgaggtcatgagcaacatggtgtctgagaacatgctgtgtgcgggcatcctcggggaccggcaggatgcctgcgagggcgacagtggggggcccatggtcgcctccttccacggcacctggttcctggtgggcctggtgagctggggtgagggctgtgggctccttcacaactacggcgtttacaccaaagtcagccgctacctcgactggatccatgggcacatcagagacaaggaagccccccagaagagctgggcaccttagcgaccctccctgcagggctgggcttttgcatggcaatggatgggacattaaagggacatgtaacaagcacaccggcctgctgttctgtccttccatccctcttttgggctcttctggagggaagtaacatttactgagcacctgttgtatgtcacatgccttatgaatagaatcttaactcctagagcaactctgtggggtggggaggagcagatccaagttttgcggggtctaaagctgtgtgtgttgagggggatactctgtttatgaaaaagaataaaaaacacaaccacg

SEQ ID NO: 408579 - DNA, 1835 bp, Homo sapiens
ggcactgcccggagctcagaagtcctcctcagacaggtgccagtgcctccagaatgtggcagctcacaagcctcctgctgttcgtggccacctggggaatttccggcacaccagctcctcttgactcagtgttctccagcagcgagcgtgcccaccaggtgctgcggatccgcaaacgtgccaactccttcctggaggagctccgtcacagcagcctggagcgggagtgcatagaggagatctgtgacttcgaggaggccaaggaaattttccaaaatgtggatgacacactggccttctggtccaagcacgtcgacggtgaccagtgcttggtcttgcccttggagcacccgtgcgccagcctgtgctgcgggcacggcacgtgcatcgacggcatcggcagcttcagctgcgactgccgcagcggctgggagggccgcttctgccagcgcggtgagggggagaggtggatgctggcgggcggcggggcggggctggggccgggttgggggcgcggcaccagcaccagctgcccgcgccctcccctgcccgcagaggtgagcttcctcaattgctcgctggacaacggcggctgcacgcattactgcctagaggaggtgggctggcggcgctgtagctgtgcgcctggctacaagctgggggacgacctcctgcagtgtcaccccgcagtgaagttcccttgtgggaggccctggaagcggatggagaagaagcgcagtcacctgaaacgagacacagaagaccaagaagaccaagtagatccgcggctcattgatgggaagatgaccaggcggggagacagcccctggcaggtggtcctgctggactcaaagaagaagctggcctgcggggcagtgctcatccacccctcctgggtgctgacagcggcccactgcatggatgagtccaagaagctccttgtcaggcttggagagtatgacctgcggcgctgggagaagtgggagctggacctggacatcaaggaggtcttcgtccaccccaactacagcaagagcaccaccgacaatgacatcgcactgctgcacctggcccagcccgccaccctctcgcagaccatagtgcccatctgcctcccggacagcggccttgcagagcgcgagctcaatcaggccggccaggagaccctcgtgacgggctggggctaccacagcagccgagagaaggaggccaagagaaaccgcaccttcgtcctcaacttcatcaagattcccgtggtcccgcacaatgagtgcagcgaggtcatgagcaacatggtgtctgagaacatgctgtgtgcgggcatcctcggggaccggcaggatgcctgcgagggcgacagtggggggcccatggtcgcctccttccacggcacctggttcctggtgggcctggtgagctggggtgagggctgtgggctccttcacaactacggcgtttacaccaaagtcagccgctacctcgactggatccatgggcacatcagagacaaggaagccccccagaagagctgggcaccttagcgaccctccctgcagggctgggcttttgcatggcaatggatgggacattaaagggacatgtaacaagcacaccggcctgctgttctgtccttccatccctcttttgggctcttctggagggaagtaacatttactgagcacctgttgtatgtcacatgccttatgaatagaatcttaactcctagagcaactctgtggggtggggaggagcagatccaagttttgcggggtctaaagctgtgtgtgttgagggggatactctgtttatgaaaaagaataaaaaacacaaccacg

SEQ ID NO: 408580 - DNA, 769 bp, Homo sapiens
ctgcaggggggggggggggggggggctgtcatggcggcaggacggcgaacttgcagtatctccacgacccgcccctacaggtgccagtgcctccagaatgtggcagctcacaagcctcctgctgttcgtggccacctggggaatttccggcacaccagctcctcttgactcagtgttctccagcagcgagcgtgcccaccaggtgctgcggatccgcaaacgtgccaactccttcctggaggagctccgtcacagcagcctggagcgggagtgcatagaggagatctgtgacttcgaggaggccaaggaaattttccaaaatgtggatgacacactggccttctggtccaagcacgtcgacggtgaccagtgcttggtcttgcccttggagcacccgtgcgccagcctgtgctgcgggcacggcacgtgcatcgacggcatcggcagcttcagctgcgactgccgcagcggctgggagggccgcttctgccagcgcggtgagggggagaggtggatgctggcgggcggcggggcggggctggggccgggttggaccatgctgaccgtcttatgtcatgccatggttggcccctcgttcagtctgttcccgcccgtctctgaagagcttcgaaccaacaaggccacactgtcgagtatactaacggacgtctacctcgcatatcgatcagagtactggcaggctagttatcatccccgctaagtgcgcagtgtatacgcccactagttctggggaggtctactcctctgc

SEQ ID NO: 408581 - DNA, 320 bp, Homo sapiens
actagtaagtgcttaataattactagctgttatgatgatgaagaaatattatcactcttttactaagagtataagaaaagtcattatcaaagcacactgtttttcatatctaagtgaacagtgatatttgtaataagagcactttaagtattcctattaaagcggaagatagcaggcagggtggaaaagtacaagaataattcccatggagtacaggtctccacttttgtcccttagccatctccaatgtaaggaaagtcttggactgaaagtctgtttctgaaagtcatacaagagctatttttatgccagaaaagcga

SEQ ID NO: 408582 - DNA, 3923 bp, Homo sapiens
  misc_feature (4)..(4): n is a, c, g, or t
  misc_feature (6)..(6): n is a, c, g, or t
  misc_feature (8)..(8): n is a, c, g, or t
acgngncnggagagtgagagaaaggctggaagacgagacctgctcactctgtcaccgaggctagagtacagtggcacaatcacagctcattgcagcctcaacctcccaggctcaatcgatccttccaactgagcctccctagcagctgggactattagtgcacaccaccacacctagcctgcaggatgtttcctcaatgaggggaaggctgctgcacaatggcagtttttgatactcctgaggaggcctttggtgtcttacgtccagtctgtgttcagctcacaaagacccagacagtggagaatgtggagcatctgcagacacgactacaagctgtgagtgacagtgcccttcaggaacttcagcagtacatcctcttccctctgcgatttaccctgaagaccccaggtcccaaaagagagcgtttgatccaaagtgtggtggaatgcctcacatttgtcctttcttcaacatgtgtgaaagaacaggagcttctccaggaactcttttcagaactctctgcttgtctgtattcacccagctcccaaaaacctgcggctgtgtccgaggagttgaaattggctgtgatccagggacttagcacattaatgcactcagcttatggggacatcattctgactttttatgagccctccattctgccacgtttaggatttgctgtatctttactgttaggccttgcagaacaggagaaatcaaagcaaattaaaattgctgccttaaaatgtttacaggttctactcttgcagtgtgattgtcaggaccatccaaggtcattggatgaacttgaacaaaagcagctgggggatttgtttgcctcttttttacctggaatctcaactgcactgaccaggcttatcacaggagactttaaacaaggtcacagcattgtcgtatcttccctaaagatcttttacaagacagtgagcttcattatggctgatgaacagctcaaaagaatctcaaaggtccaagcaaaacctgcagttgagcacagagtagcagagctgatggtttacagggaagcagattgggtaaaaaagactggcgacaagttgactatccttattaaaaagataattgagtgtgtttctgttcacccacactggaaggtgagactggaactggtagaacttgtggaggaccttcttttgaagtgcagtcaatcattggtcgaatgtgctggtccccttctgaaggccttagtgggactagtaaatgatgagagtcctgaaatccaagcccagtgcaataaagttctgagacattttgcagatcaaaaagtagtggtgggcaacaaagccctcgctgacatcttgtcagaaagcctgcattcccttgccacatctcttcctcgcctaatgaactcccaagatgaccagggcaaattctctactctttccttgttacttggttatctgaaactcttgggcccaaaaataaactttgtcctcaactctgtggcccatctccagcggctttccaaagcactcatccaagttctagagctagacgtggctgacatcaagattgttgaggaacggcgttggaactctgatgatctgaatgcttctccaaagacctcagccacacagccttggaaccgcatccagaggagatatttccgcttcttcactgatgagagaatcttcatgctcttgaggcaggtttgtcagctacttggttattatgggaatctttatttgcttgtggatcactttatggaactttaccatcaatctgtggtttaccggaagcaagctgccatgatccttaatgaactggttacaggggctgctgggctggaggttgaggatcttcacgaaaaacatattaaaacaaacccagaagaactgagagagattgtgacatctatacttgaagaatacacaagtcaagaaaattggtatttggttacctgtcttgaaactgaggaaatgggagaggagctgatgatggagcacccaggcctccaagccatcacgtctggtgaacacacctgccaagttacatcttttctagccttctcaaagccaagtcccactatttgctccatgaacagtaacatctggcaaatatgcattcagttggaaggaattggccagtttgcatatgcactaggaaaagacttctgtttgctcttgatgtcagccctttatccagtactggagaaggctggagaccaaaccctactcattagtcaggtggctaccagcaccatgatggacgtttgccgtgcttgtggctacgactccctgcagcacctgatcaatcaaaattcagactatttagtgaatgggatctctttaaatctgcgtcatctggctctgcatcctcataccccaaaggtcctggaagtcatgctgcggaactcagatgctaacctgcttcctttggtggcagatgtggttcaagatgtcttggccaccctggaccaattttacgataagagagctgcttcctttgtcagcgttctgcatgctctgatggcagcattagcccagtggttcccagacacaggtaatcttgggcacctccaagagcaaagtttaggagaagagggaagtcatttgaaccaaagaccagcagctcttgagaagagcaccaccacagctgaagacatcgaacagtttttgctgaactacctcaaagagaaggatgtggcagatggaaatgtctcggattttgataatgaagaagaggaacagtcagtccctcccaaagtggatgagaatgacacccgtccagatgtggagccaccactgccattgcagatccaaatagccatggacgtgatggaacgctgcatccacttgttgtcagataaaaatctgcaaatccgcctgaaggtcttggatgtgctggatctgtgtgtggttgttcttcagtcccacaaaaaccagctgcttcccttggctcatcaggcctggccctcgctcgttcaccgactcacacgggacgcccccctggcagtgcttagagccttcaaggttttacgtaccctgggaagcaagtgtggtgactttcttcgcagccggttctgcaaagatgtcctgccaaagctggctggctccctagtcacccaggcccccatcagtgccagggctggaccagtttactcgcacacgctggccttcaagttgcagctggctgtcttacagggcctgggccccctctgtgagagactggacctaggtgagggtgacctgaataaagtggctgatgcctgcttgatttacctcagtgtcaaacagcccgtgaaattacaagaggctgccaggagcgtcttcctccacttgatgaaggtggacccagactccacctggttcctcctgaacgagctttactgccccgtgcagttcacacctccccaccccagcctccaccctgtgcagctgcacggggccagcgggcagcagaacccctacacgaccaacgtgctccagctgctcaaggagctgcagtgaccctgctcccccaccacagaggccaccgatccctcccctactgccagccagaagctgggctgaccccaccccggccataggcggtggcagcggcagcagagaaggtgaattagttagccaatcgatttataaattgatcgatcacacaactgcttagaaatggattgaaggaaagtagctgactattatttatatttcataccttgtgttttcaagtgacattgtctggtggctctaagggtttaaccccttagcctaccatctctatagccccagctccctcacaggccacacacacacacacacaagaggtcagttcccctccatctgcatacacctccctgtcttcaaataatgagatggaactaatttgttttacctaacctgatctttgggaaacaaacggaaataaagacacttcttggatgaaaagta

SEQ ID NO: 408583 - DNA, 2737 bp, Homo sapiens
  misc_feature (4)..(4): n is a, c, g, or t
  misc_feature (6)..(6): n is a, c, g, or t
  misc_feature (8)..(8): n is a, c, g, or t
acgngncnggagagtgagagaaaggctggaagacgagacctgctcactctgtcaccgaggctagagtacagtggcacaatcacagctcattgcagcctcaacctcccaggctcaatcgatccttccaactgagcctccctagcagctgggactattagtgcacaccaccacacctagcctgcaggatgtttcctcaatgaggggaaggctgctgcacaatggcagtttttgatactcctgaggaggcctttggtgtcttacgtccagtctgtgttcagctcacaaagacccagacagtggagaatgtggagcatctgcagacacgactacaagctgtgagtgacagtgcccttcaggaacttcagcagtacatcctcttccctctgcgatttaccctgaagaccccaggtcccaaaagagagcgtttgatccaaagtgtggtggaatgcctcacatttgtcctttcttcactgatgagagaatcttcatgctcttgaggcaggtttgtcagctacttggttattatgggaatctttatttgcttgtggatcactttatggaactttaccatcaatctgtggtttaccggaagcaagctgccatgatccttaatgaactggttacaggggctgctgggctggaggttgaggatcttcacgaaaaacatattaaaacaaacccagaagaactgagagagattgtgacatctatacttgaagaatacacaagtcaagaaaattggtatttggttacctgtcttgaaactgaggaaatgggagaggagctgatgatggagcacccaggcctccaagccatcacgtctggtgaacacacctgccaagttacatcttttctagccttctcaaagccaagtcccactatttgctccatgaacagtaacatctggcaaatatgcattcagttggaaggaattggccagtttgcatatgcactaggaaaagacttctgtttgctcttgatgtcagccctttatccagtactggagaaggctggagaccaaaccctactcattagtcaggtggctaccagcaccatgatggacgtttgccgtgcttgtggctacgactccctgcagcacctgatcaatcaaaattcagactatttagtgaatgggatctctttaaatctgcgtcatctggctctgcatcctcataccccaaaggtcctggaagtcatgctgcggaactcagatgctaacctgcttcctttggtggcagatgtggttcaagatgtcttggccaccctggaccaattttacgataagagagctgcttcctttgtcagcgttctgcatgctctgatggcagcattagcccagtggttcccagacacaggtaatcttgggcacctccaagagcaaagtttaggagaagagggaagtcatttgaaccaaagaccagcagctcttgagaagagcaccaccacagctgaagacatcgaacagtttttgctgaactacctcaaagagaaggatgtggcagatggaaatgtctcggattttgataatgaagaagaggaacagtcagtccctcccaaagtggatgagaatgacacccgtccagatgtggagccaccactgccattgcagatccaaatagccatggacgtgatggaacgctgcatccacttgttgtcagataaaaatctgcaaatccgcctgaaggtcttggatgtgctggatctgtgtgtggttgttcttcagtcccacaaaaaccagctgcttcccttggctcatcaggcctggccctcgctcgttcaccgactcacacgggacgcccccctggcagtgcttagagccttcaaggttttacgtaccctgggaagcaagtgtggtgactttcttcgcagccggttctgcaaagatgtcctgccaaagctggctggctccctagtcacccaggcccccatcagtgccagggctggaccagtttactcgcacacgctggccttcaagttgcagctggctgtcttacagggcctgggccccctctgtgagagactggacctaggtgagggtgacctgaataaagtggctgatgcctgcttgatttacctcagtgtcaaacagcccgtgaaattacaagaggctgccaggagcgtcttcctccacttgatgaaggtggacccagactccacctggttcctcctgaacgagctttactgccccgtgcagttcacacctccccaccccagcctccaccctgtgcagctgcacggggccagcgggcagcagaacccctacacgaccaacgtgctccagctgctcaaggagctgcagtgaccctgctcccccaccacagaggccaccgatccctcccctactgccagccagaagctgggctgaccccaccccggccataggcggtggcagcggcagcagagaaggtgaattagttagccaatcgatttataaattgatcgatcacacaactgcttagaaatggattgaaggaaagtagctgactattatttatatttcataccttgtgttttcaagtgacattgtctggtggctctaagggtttaaccccttagcctaccatctctatagccccagctccctcacaggccacacacacacacacacaagaggtcagttcccctccatctgcatacacctccctgtcttcaaataatgagatggaactaatttgttttacctaacctgatctttgggaaacaaacggaaataaagacacttcttggatgaaaagta

SEQ ID NO: 408584 - DNA, 1159 bp, Homo sapiens
ccatgtgggagggaagcctgcgctggccgcccacgcgggagggaagcctgcgctggccgtcgtactgaccgctgcctgtgacactgatgcaggcagtctcttttcagtcttggatgtgctggatctgtgtgtggttgttcttcagtcccacaaaaaccagctgcttcccttggctcatcaggcctggccctcgctcgttcaccgactcacacgggacgcccccctggcagtgcttagagccttcaaggttttacgtaccctgggaagcaagtgtggtgactttcttcgcagccggttctgcaaagatgtcctgccaaagctggctggctccctagtcacccaggcccccatcagtgccagggctggaccagtttactcgcacacgctggccttcaagttgcagctggctgtcttacagggcctgggccccctctgtgagagactggacctaggtgagggtgacctgaataaagtggctgatgcctgcttgatttacctcagtgtcaaacagcccgtgaaattacaagaggctgccaggagcgtcttcctccacttgatgaaggtggacccagactccacctggttcctcctgaacgagctttactgccccgtgcagttcacacctccccaccccagcctccaccctgtgcagctgcacggggccagcgggcagcagaacccctacacgaccaacgtgctccagctgctcaaggagctgcagtgaccctgctcccccaccacagaggccaccgatccctcccctactgccagccagaagctgggctgaccccaccccggccataggcggtggcagcggcagcagagaaggtgaattagttagccaatcgatttataaattgatcgatcacacaactgcttagaaatggattgaaggaaagtagctgactattatttatatttcataccttgtgttttcaagtgacattgtctggtggctctaagggtttaaccccttagcctaccatctctatagccccagctccctcacaggccacacacacacacacacaagaggtcagttcccctccatctgcatacacctccctgtcttcaaataatgagatggaactaatttgttttacctaacctgatctttgggaaacaaacggaaataaagacacttcttggatgaaaagta

SEQ ID NO: 408585 - DNA, 194 bp, Homo sapiens
aataaagtggctgatgcctgcttgatttacctcagtgtcaaacagcccgtgaaattacaagaggctgccaggaggtacgtctgcctgatcacccgcatccctttacgtttgttctaaattacagatgatttgctaatggcaagcagagttgaggcatctctgctcttttctctgtcaccctgccaggttaagat

SEQ ID NO: 408586 - DNA, 436 bp, Homo sapiens
aacagtttttgctgaactacctcaaagagaaggatgtggcagatggaaatgtctcggattttgataatgaagaaggtaacttgtttattttggcttagctggttttttctttctgaaacagattattgtaaaaatggtgaaacatcattacagaaagggtagaaataagaaaagttactcataaccttaccaggctaacatagctattctcctgttttgtgtaatctttttccattcttttctgttacaaaactgtttttccgtggttgcagctgtgtaccctttttgtgtttagttataagcaactctgcttattgccgttgaattttgatcattaacgttttaatagctgttactaagtgtccatcccctgtaggacatttaggttgcttctggcttaataataactctaataaacagtgctgcggtggatgat

SEQ ID NO: 408587 - DNA, 3783 bp, Homo sapiens
  misc_feature (4)..(4): n is a, c, g, or t
  misc_feature (6)..(6): n is a, c, g, or t
  misc_feature (8)..(8): n is a, c, g, or t
acgngncnggagagtgagagaaaggctggaagacgagcctgcaggatgtttcctcaatgaggggaaggctgctgcacaatggcagtttttgatactcctgaggaggcctttggtgtcttacgtccagtctgtgttcagctcacaaagacccagacagtggagaatgtggagcatctgcagacacgactacaagctgtgagtgacagtgcccttcaggaacttcagcagtacatcctcttccctctgcgatttaccctgaagaccccaggtcccaaaagagagcgtttgatccaaagtgtggtggaatgcctcacatttgtcctttcttcaacatgtgtgaaagaacaggagcttctccaggaactcttttcagaactctctgcttgtctgtattcacccagctcccaaaaacctgcggctgtgtccgaggagttgaaattggctgtgatccagggacttagcacattaatgcactcagcttatggggacatcattctgactttttatgagccctccattctgccacgtttaggatttgctgtatctttactgttaggccttgcagaacaggagaaatcaaagcaaattaaaattgctgccttaaaatgtttacaggttctactcttgcagtgtgattgtcaggaccatccaaggtcattggatgaacttgaacaaaagcagctgggggatttgtttgcctcttttttacctggaatctcaactgcactgaccaggcttatcacaggagactttaaacaaggtcacagcattgtcgtatcttccctaaagatcttttacaagacagtgagcttcattatggctgatgaacagctcaaaagaatctcaaaggtccaagcaaaacctgcagttgagcacagagtagcagagctgatggtttacagggaagcagattgggtaaaaaagactggcgacaagttgactatccttattaaaaagataattgagtgtgtttctgttcacccacactggaaggtgagactggaactggtagaacttgtggaggaccttcttttgaagtgcagtcaatcattggtcgaatgtgctggtccccttctgaaggccttagtgggactagtaaatgatgagagtcctgaaatccaagcccagtgcaataaagttctgagacattttgcagatcaaaaagtagtggtgggcaacaaagccctcgctgacatcttgtcagaaagcctgcattcccttgccacatctcttcctcgcctaatgaactcccaagatgaccagggcaaattctctactctttccttgttacttggttatctgaaactcttgggcccaaaaataaactttgtcctcaactctgtggcccatctccagcggctttccaaagcactcatccaagttctagagctagacgtggctgacatcaagattgttgaggaacggcgttggaactctgatgatctgaatgcttctccaaagacctcagccacacagccttggaaccgcatccagaggagatatttccgcttcttcactgatgagagaatcttcatgctcttgaggcaggtttgtcagctacttggttattatgggaatctttatttgcttgtggatcactttatggaactttaccatcaatctgtggtttaccggaagcaagctgccatgatccttaatgaactggttacaggggctgctgggctggaggttgaggatcttcacgaaaaacatattaaaacaaacccagaagaactgagagagattgtgacatctatacttgaagaatacacaagtcaagaaaattggtatttggttacctgtcttgaaactgaggaaatgggagaggagctgatgatggagcacccaggcctccaagccatcacgtctggtgaacacacctgccaagttacatcttttctagccttctcaaagccaagtcccactatttgctccatgaacagtaacatctggcaaatatgcattcagttggaaggaattggccagtttgcatatgcactaggaaaagacttctgtttgctcttgatgtcagccctttatccagtactggagaaggctggagaccaaaccctactcattagtcaggtggctaccagcaccatgatggacgtttgccgtgcttgtggctacgactccctgcagcacctgatcaatcaaaattcagactatttagtgaatgggatctctttaaatctgcgtcatctggctctgcatcctcataccccaaaggtcctggaagtcatgctgcggaactcagatgctaacctgcttcctttggtggcagatgtggttcaagatgtcttggccaccctggaccaattttacgataagagagctgcttcctttgtcagcgttctgcatgctctgatggcagcattagcccagtggttcccagacacaggtaatcttgggcacctccaagagcaaagtttaggagaagagggaagtcatttgaaccaaagaccagcagctcttgagaagagcaccaccacagctgaagacatcgaacagtttttgctgaactacctcaaagagaaggatgtggcagatggaaatgtctcggattttgataatgaagaagaggaacagtcagtccctcccaaagtggatgagaatgacacccgtccagatgtggagccaccactgccattgcagatccaaatagccatggacgtgatggaacgctgcatccacttgttgtcagataaaaatctgcaaatccgcctgaaggtcttggatgtgctggatctgtgtgtggttgttcttcagtcccacaaaaaccagctgcttcccttggctcatcaggcctggccctcgctcgttcaccgactcacacgggacgcccccctggcagtgcttagagccttcaaggttttacgtaccctgggaagcaagtgtggtgactttcttcgcagccggttctgcaaagatgtcctgccaaagctggctggctccctagtcacccaggcccccatcagtgccagggctggaccagtttactcgcacacgctggccttcaagttgcagctggctgtcttacagggcctgggccccctctgtgagagactggacctaggtgagggtgacctgaataaagtggctgatgcctgcttgatttacctcagtgtcaaacagcccgtgaaattacaagaggctgccaggagcgtcttcctccacttgatgaaggtggacccagactccacctggttcctcctgaacgagctttactgccccgtgcagttcacacctccccaccccagcctccaccctgtgcagctgcacggggccagcgggcagcagaacccctacacgaccaacgtgctccagctgctcaaggagctgcagtgaccctgctcccccaccacagaggccaccgatccctcccctactgccagccagaagctgggctgaccccaccccggccataggcggtggcagcggcagcagagaaggtgaattagttagccaatcgatttataaattgatcgatcacacaactgcttagaaatggattgaaggaaagtagctgactattatttatatttcataccttgtgttttcaagtgacattgtctggtggctctaagggtttaaccccttagcctaccatctctatagccccagctccctcacaggccacacacacacacacacaagaggtcagttcccctccatctgcatacacctccctgtcttcaaataatgagatggaactaatttgttttacctaacctgatctttgggaaacaaacggaaataaagacacttcttggatgaaaagta

SEQ ID NO: 408588 - DNA, 2494 bp, Homo sapiens
  misc_feature (4)..(4): n is a, c, g, or t
  misc_feature (6)..(6): n is a, c, g, or t
  misc_feature (8)..(8): n is a, c, g, or t
acgngncnggagagtgagagaaaggctggaagacgagcctgcaggatgtttcctcaatgaggggaaggctgctgcacaatggcagtttttgatactcctgaggaggcctttggtgtcttacgtccagtctgtgttcagctcacaaagacccagacagtggagaatgtggagcatctgcagacacgactacaagctcggctttccaaagcactcatccaagttctagagctagacgtggctgacatcaagattgttgaggaacggcgttggaactctgatgatctgaatgcttctccaaagacctcagccacacagccttggaaccgcatccagaggagatatttccgcttcttcactgatgagagaatcttcatgctcttgaggggctgctgggctggaggttgaggatcttcacgaaaaacatattaaaacaaacccagaagaactgagagagattgtgacatctatacttgaagaatacacaagtcaagaaaattggtatttggttacctgtcttgaaactgaggaaatgggagaggagctgatgatggagcacccaggcctccaagccatcacgtctggtgaacacacctgccaagttacatcttttctagccttctcaaagccaagtcccactatttgctccatgaacagtaacatctggcaaatatgcattcagttggaaggaattggccagtttgcatatgcactaggaaaagacttctgtttgctcttgatgtcagccctttatccagtactggagaaggctggagaccaaaccctactcattagtcaggtggctaccagcaccatgatggacgtttgccgtgcttgtggctacgactccctgcagcacctgatcaatcaaaattcagactatttagtgaatgggatctctttaaatctgcgtcatctggctctgcatcctcataccccaaaggtcctggaagtcatgctgcggaactcagatgctaacctgcttcctttggtggcagatgtggttcaagatgtcttggccaccctggaccaattttacgataagagagctgcttcctttgtcagcgttctgcatgctctgatggcagcattagcccagtggttcccagacacaggtaatcttgggcacctccaagagcaaagtttaggagaagagggaagtcatttgaaccaaagaccagcagctcttgagaagagcaccaccacagctgaagacatcgaacagtttttgctgaactacctcaaagagaaggatgtggcagatggaaatgtctcggattttgataatgaagaagaggaacagtcagtccctcccaaagtggatgagaatgacacccgtccagatgtggagccaccactgccattgcagatccaaatagccatggacgtgatggaacgctgcatccacttgttgtcagataaaaatctgcaaatccgcctgaaggtcttggatgtgctggatctgtgtgtggttgttcttcagtcccacaaaaaccagctgcttcccttggctcatcaggcctggccctcgctcgttcaccgactcacacgggacgcccccctggcagtgcttagagccttcaaggttttacgtaccctgggaagcaagtgtggtgactttcttcgcagccggttctgcaaagatgtcctgccaaagctggctggctccctagtcacccaggcccccatcagtgccagggctggaccagtttactcgcacacgctggccttcaagttgcagctggctgtcttacagggcctgggccccctctgtgagagactggacctaggtgagggtgacctgaataaagtggctgatgcctgcttgatttacctcagtgtcaaacagcccgtgaaattacaagaggctgccaggagcgtcttcctccacttgatgaaggtggacccagactccacctggttcctcctgaacgagctttactgccccgtgcagttcacacctccccaccccagcctccaccctgtgcagctgcacggggccagcgggcagcagaacccctacacgaccaacgtgctccagctgctcaaggagctgcagtgaccctgctcccccaccacagaggccaccgatccctcccctactgccagccagaagctgggctgaccccaccccggccataggcggtggcagcggcagcagagaaggtgaattagttagccaatcgatttataaattgatcgatcacacaactgcttagaaatggattgaaggaaagtagctgactattatttatatttcataccttgtgttttcaagtgacattgtctggtggctctaagggtttaaccccttagcctaccatctctatagccccagctccctcacaggccacacacacacacacacaagaggtcagttcccctccatctgcatacacctccctgtcttcaaataatgagatggaactaatttgttttacctaacctgatctttgggaaacaaacggaaataaagacacttcttggatgaaaagta

SEQ ID NO: 408589 - DNA, 622 bp, Homo sapiens
agcaccatgatggacgtttgccgtgcttgtggctacgactccctgcagcacctgatcaatcaaaattcagactatttagtgaatgggatctctttaaatctgcgtcatctggctctgcatcctcataccccaaaggtcctggaagtcatgctgcggaactcagatgctaacctgcttcctttggtggcagatgtggttcaagatgtcttggccaccctggaccaattttacgataagagagctgcttcctttgtcagcgttctgcatgctctgatggcagcattaggtacattgagagccctttttaatgctgatgtgtgggggacaggactcagtctcctagtttgcttagcctcgttttttgcattgtttgtggtgatgctatggaggacgttttaatcattttctctccagtcccataggttatgggggggtttcactgtttatcttttatactttcagtaatctctaccatttattgagctcctgctctatgccagggtataaaccctgcagaataaatgtaaatattatttctattttataaataagaaaaactaagggtcagtgacatcctacttagccagggtcacacaattaataaatgataaaatcaggattt

SEQ ID NO: 408590 - DNA, 507 bp, Homo sapiens
gtttcagaatcgagagatgcttccgttttggatgaacagcaccggcaggcgggaaggttggcagcgtggatggcacggctacgacaacgagctcatggacatgcggggcatcttcctggccttcggacctgatttcaaatccaacttcagagctgctcctatcaggtcggtggacgtctacaatgtcatgtgcaatgtggtgggcatcaccccgctgcccaacaacggatcctggtccagggtgatgtgcatgctgaagggccgcgccagcactgccccgcctgtctggcccagccactgtgccctggcactgattcttctcttcctgcttgcataactgatcatattgcttgtctcagaaaaaaacaccatcagcaaagtgggcctccaaagccagatgattttcattttatgtgtgaataatagcttcattaacacaatcaagaccatgcacattgtaaatacattattcttggataattctatacataaaagttcctacttgtt

SEQ ID NO: 408591 - DNA, 393 bp, Homo sapiens
gtttcagaatcgagagatgcttccgttttggatgaacagcaccggcaggcgggaaggttggcagcgtggatggcacggctacgacaacgagctcatggacatgcggggcatcttcctggccttcggacctggtaggcgaggaaatgaccagatgctctcagaccccattcccaaggaagtgtctgtaaggggggctacgggtgccaggagaggctgcagggatttccttacagaccctctttatgagccaagcagagcaaacccagccggtctccatgaaacatcttttgctggcttcctttcaaatgcttcttgggtttggcaaatgtagccaaatactttgccttgtaaattttaaatcctgagtgcagtgaagaaaatgtattccacatg

SEQ ID NO: 408592 - DNA, 907 bp, Homo sapiens
taaaaaacatgcttgtctgacaagtcaatcattttaagccccttgttcacttcaggatggttgctaaaggcttctctgtgagctaaaagctctcgctgttaaggggctgcctgccctgactgtatgcattaaatggaacagttctctacatggtttcttactacagatgccttgggatatatggacactggcattacctgctgcaacaggtcctctcccagggtactgctgagacctaagggcttaaatgctcaccaaaccaagtgaccttggagggctggtcatggtgggcatctgggagctgggaaagagcattggagaacttcatagggaaacctagtaggcaaaaatgaaagaacccataagggccattggcatgagccatagctaaaggccactgggttagctctcaaagaaaactgcaagattgaagcataaattccttcatcatgaaccagaagtcatggagtggagccaggggcaagaaagagaaagatgaagaggtagaaccaccaggataaaggtgccaagaaaaacagtgagagcaacactcagggaaccagagacaggaacacagctgggaactaggaggagaaaccaccacagctggagcgcaaagtggccaggtcagaaaagcctcatggaatcctggttaactgaatgtttctattgactgaggccactgcttaagccctgtattcttttttatttcaatccccatggttagaaaaatagtcctaaaatgggttcataccctttcctatcctgcaagatcttaaacatcactatcttttcctgcagtagttaaaagcatgggctttggaatcagaaactgggcacaaatctgagccctgctacttattaactgtgtaacattggtcaaatgaataaacttcctggagcctca

SEQ ID NO: 408593 - DNA, 437 bp, Homo sapiens
tttttttttgagactgaggtttgctcttgttgcccaggctggagtgcaatggtgcgatctcagctcaccacaacctctgcctcccagtttcaagtgattctcctgcctcagcctcctcagtagctgggattacaggcatgcaccaccacgcccagctaattttgtatttttagtagagacggggtttctccatattggtcaggctggtcttgaactcctgaactcaggtgatccatctgtctcagcctcccaaagtgctgggattacaggcgtgagccaccacacttggcctaaatacaattatttttaataaaaaagaaagtattatcctgtcaagagccaccctaaccagactcagtacaatgttaatacacatcacccagaagagagggcaccttcagttcgtgccagagaatctctcttgtcagtaaaaagtt

SEQ ID NO: 408594 - DNA, 4613 bp, Homo sapiens
gtctccctaagccctgtgtctaggtcgtttgggaaacgccttggagagtcaagaataaatttgcaggtcaaacaatggatgactggaaaagtcggcttgtaatcaagagcatgcttccccatttcgccatggtgggaaatcgtcaggagcccagaaagctccaggaatcgggaaagaagccctcgtggatggaggaagaagatttatcttttctctacaagagcagcccaggaagaaagcatcagggaactgttaagaggagacaagaagaagaccacttccagtttccagacatggctgatgggggctaccctaataaaattaagaggccttgccttgaagatgtcacccttgcaatgggcccaggtgctcatcctagtactgcttgtgcagaactgcaggtccctccattgacaataaatcctagccctgcggctatgggagtggctggccagtcattactgctggagaataaccctatgaatggcaacatcatgggctcaccatttgtagtaccacagactacagaagtgggactgaaagggcccactgttccttactatgagaaaatcaacagcgtgccggctgtagaccaggagcttcaagagctgctagaggagctcaccaaaattcaagacccttctccaaatgagctagatcttgagaagatactggggacgaagccagaagagccactggttttagatcatccccaggcaaccctaagcacaactcccaagccttcggttcagatgtcacacttggagagcctggcttccagcaaggagtttgcttctagttgcagccaagttactggcatgtcacttcagatcccatcctcctccacagggatcagctattcgattccttccaccagtaagcagatagtgtcaccgagttcttcaatggcacagtccaagagccaggtccaggccatgctccctgtcgctctgccccccttaccagtgcctcagtggcatcacgcccaccagctgaaggcgttggcagccagcaagcaggggtctgctacaaagcagcaagggcccacccccagttggtctggtctgcctcctccaggactctctccaccttcccgcccagtgccatcactacagccaccaccgctgccactgccaccaccaccacccccattcagcccccagagcctcatggtgtcctgcatgtcgtccaataccttgtcgggtagcactctccgaggctctcccaatgccttactgtcaagcatgacgtccagcagcaatgctgccctggggcccgccatgccctatgctcctgagaagctccccagccctgctctcactcaacagccgcagttcggccctcagagctccattcttgccaacctcatgtcctctaccatcaaaacccctcaaggacacctgatgtctgctctgcctgccagcaaccctgggccgtccccaccctatcgcccagagaagctctctagcccaggcttgccacagcagtccttcaccccacagtgttccctgatccgaagcctcactcccaccagtaatcttctaagccagcaacagcagcagcagcagcagcagcagcaagcaaatgtgatctttaagcccataagcagcaactcatccaaaaccctgagcatgatcatgcagcaggggatggcaagctccagcccaggagccacggagccatttacttttggcaacaccaagcccttgtcccattttgtttctgagccgggtccccagaagatgccctccatgcctaccacctctaggcagccttccctgctccactacctgcagcagccgacaccaacgcaggcctcctcagccactgcctcctccacggccactgccaccttgcagctgcagcagcagcagcagcaacagcagcagcagcctgaccattcttcattccttctgcagcagatgatgcagcaaccccagcgttttcagcgatcagtggcctcagattccatgcctgctctgcccagacaggtctgttgccatctgtttgcatggacttctgcagctagctcggtgaagccccagcatcaacacgggaactctttcactagcaggcaagatcctcagcctggagacgtgtcaccgtctaacattactcatgtagacaaagcctgcaagcttggggaagccaggcacccccaggtcagcctcgggcgacagcccccgtcctgccaggccctggggagtgagtccttcctgcccggcagctcctttgctcatgagctggcccgagtcacctcctcgtacagcacctcagaggcagcgccctggggcagctgggatccgaaggcctggaggcaggtgcccgctccactactgcctagctgcgacgccacagcaagaggaacagagatcaggtcttatggcaatgacccctgaacggcagaatgcatatatctcccaacagatgagtccatttgaagccgtccaagaacaagtcacctccaagtgtagccggatcaaggcaagccccccatctagcaagcacttgatgccacccagaactgggcttcttcagaacaatctgagtccaggaatgatcccactcaccaggcaccagagctgcgagggcatgggagtgatctcaccaactctggggaagcggcaaggaattttcacctccagcccccagtgtcccatcctctcacactcaggccagactcccctgggcagacttgactctgtctgccagcatatgcagagccccaaggccaccccaccagaagtgcccctgcctgggttctgtcccagctccctgggcacccagtccttgagtccccaccagctcagacggcctagtgtgccaagaatgcccactgcgttcaacaatgctgcatgggtcacagcggcagcagctgtgaccacagcagtttcggggaaaacacccctcagccaagtggataatagcgttcagcagcactcaccttctggccaggcctgccttcagaggccatctgattgggaggcacaagtgcccgctgcgatgggaacacaagtgcccctggccaacaaccccagcttcagcctgctgggcagccagagcctcaggcagagcccggtacagggcccggtgcctgtagcaaacaccaccaagttcctccagcagggtatggccagctttagtcccctgagccccatacagggcatcgagccaccaagctatgtggctgctgctgccaccgctgctgctgcttctgccgttgctgccagccagttcccaggtccgttcgacagaacggatattccccctgagctgccacctgccgactttttgcgccagccccaacccccactaaatgatctgatttcgtcacctgactgcaatgaggtagatttcattgaagctctcttgaaaggctcctgtgtgagcccagatgaagactgggtgtgcaacttgaggctgatcgacgacattttggaacagcatgctgctgctcaaaatgccacagcccagaattctgggcaagtcacccaggatgctggggcactttaaatctgagcaggatgcccatagaaacccccatggtgacatcactctaggaagtggtgtcgatccatacccgcagttgtctcccgttacaatttgagtggtgttgtcagcccatgcttatccctctctctacctgtgacaaaatggaaagctggtgatttttcaagctacgtgtacatatttgaaaattttgtaaatggttttcctaaacattaatgacagaagtatttatacttcattttgtgactttgtaaataaagcgacggcttttgtttcagtagagttgtgtttactatgcattgttttgtgtttattatacaatgttacaaatatgcagaccgtgttgtttgctccagtgataccttgttaagctaggtggctgagtcgcttatggttttaatgcaatgagcaatgtggatatgaccaagagttgttgtgcaagttgacaaatgccaaatagaaaaccacttggccatttatttctatgttcactaaaaatcctattgccttgtgtgattcttaatctcttttgcgaacctttcagtctccgctagctctttcctaatgagctttacagcagaagctgttttatcgttaagtgccccacagagacactttaccaggaggctgggagagttctccagatttgggagaggcgcagagacagtgtgtgagccgagccctgtctcagcaatccacctggaggagctagagtatcctcctccctttaccattcagaccgagagaaaaagcccagcttgtgtgcaccctcgtggggttaaggcgagctgttcctggtttaaagcctttcagtatttgttttgatgtaaggctctgtggtttgggggggaacatctgtaaacattattagttgatttggggtttgtctttgatggtttctatctgcaattatcgtcatgtatatttaagtgtctgttatagaaaacccacacccactgtcctgtaaacttttctcagtgtccagactttctgtaatcacattttaattgccacctcgtatttcacctctacatttgaaatctggcgtctgtttcaagccagtgtgttttttcttcgttctgtaataaacagccaggagaaaa

SEQ ID NO: 408595 - DNA, 3962 bp, Homo sapiens
gtctccctaagccctgtgtctaggtcgtttgggaaacgccttggagagtcaagaataaatttgcaggtcaaacaatggatgactggaaaagtcggcttgtaatcaagagcatgcttccccatttcgccatggtgggaaatcgtcaggagcccagaaagctccaggaatcgggaaagaagccctcgtggatggaggaagaagatttatcttttctctacaagagcagcccaggaagaaagcatcagggaactgttaagaggagacaagaagaagaccacttccagtttccagacatggctgatgggggctaccctaataaaattaagaggccttgccttgaagatgtcacccttgcaatgggcccaggtgctcatcctagtactgcttgtgcagaactgcaggtccctccattgacaataaatcctagccctgcggctatgggagtggctggccagtcattactgctggagaataaccctatgaatggcaacatcatgggctcaccatttgtagtaccacagactacagaagtgggactgaaagggcccactgttccttactatgagaaaatcaacagcgtgccggctgtagaccaggagcttcaagagctgctagaggagctcaccaaaattcaagacccttctccaaatgagctagatcttgagaagatactggggacgaagccagaagagccactggttttagatcatccccaggcaaccctaagcacaactcccaagccttcggttcagatgtcacacttggagagcctggcttccagcaaggagtttgcttctagttgcagccaagttactggcatgtcacttcagatcccatcctcctccacagggatcagctattcgattccttccaccagtaagcagatagtgtcaccgagttcttcaatggcacagtccaagagccaggtccaggccatgctccctgtcgctctgccccccttaccagtgcctcagtggcatcacgcccaccagctgaaggcgttggcagccagcaagcaggggtctgctacaaagcagcaagggcccacccccagttggtctggtctgcctcctccaggactctctccaccttcccgcccagtgccatcactacagccaccaccgctgccactgccaccaccaccacccccattcagcccccagagcctcatggtgtcctgcatgtcgtccaataccttgtcgggtagcactctccgaggctctcccaatgccttactgtcaagcatgacgtccagcagcaatgctgccctggggcccgccatgccctatgctcctgagaagctccccagccctgctctcactcaacagccgcagttcggccctcagagctccattcttgccaacctcatgtcctctaccatcaaaacccctcaaggacacctgatgtctgctctgcctgccagcaaccctgggccgtccccaccctatcgcccagagaagctctctagcccaggcttgccacagcagtccttcaccccacagtgttccctgatccgaagcctcactcccaccagtaatcttctaagccagcaacagcagcagcagcagcagcagcagcaagcaaatgtgatctttaagcccataagcagcaactcatccaaaaccctgagcatgatcatgcagcaggggatggcaagctccagcccaggagccacggagccatttacttttggcaacaccaagcccttgtcccattttgtttctgagccgggtccccagaagatgccctccatgcctaccacctctaggcagccttccctgctccactacctgcagcagccgacaccaacgcaggcctcctcagccactgcctcctccacggccactgccaccttgcagctgcagcagcagcagcagcaacagcagcagcagcctgaccattcttcattccttctgcagcagatgatgcagcaaccccagcgttttcagcgatcagtggcctcagattccatgcctgctctgcccagacaggtctgttgccatctgtttgcatggacttctgcagctagctcggtgaagccccagcatcaacacgggaactctttcactagcaggcaagatcctcagcctggagacgtgtcaccgtctaacattactcatgtagacaaagcctgcaagcttggggaagccaggcacccccaggtcagcctcgggcgacagcccccgtcctgccaggccctggggagtgagtccttcctgcccggcagctcctttgctcatgagctggcccgagtcacctcctcgtacagcacctcagaggcagcgccctggggcagctgggatccgaaggcctggaggcaggtgcccgctccactactgcctagctgcgacgccacagcaagaggaacagagatcaggtcttatggcaatgacccctgaacggcagaatgcatatatctcccaacagatgagtccatttgaagccgtccaagaacaagtcacctccaagtgtagccggatcaaggcaagccccccatctagcaagcacttgatgccacccagaactgggcttcttcagaacaatctgagtccaggaatgatcccactcaccaggcaccagagctgcgagggcatgggagtgatctcaccaactctggggaagcggcaaggaattttcacctccagcccccagtgtcccatcctctcacactcaggccagactcccctgggcagacttgactctgtctgccagcatatgcagagccccaaggccaccccaccagaagtgcccctgcctgggttctgtcccagctccctgggcacccagtccttgagtccccaccagctcagacggcctagtgtgccaagaatgcccactgcgttcaacaatgctgcatgggtcacagcggcagcagctgtgaccacagcagtttcggggaaaacacccctcagccaagtggataatagcgttcagcagcactcaccttctggccaggcctgccttcagaggccatctgattgggaggcacaagtgcccgctgcgatgggaacacaagtgcccctggccaacaaccccagcttcagcctgctgggcagccagagcctcaggcagagcccggtacagggcccggtgcctgtagcaaacaccaccaagttcctccagcagggtatggccagctttagtcccctgagccccatacagggcatcgagccaccaagctatgtggctgctgctgccaccgctgctgctgcttctgccgttgctgccagccagttcccaggtccgttcgacagaacggatattccccctgagctgccacctgccgactttttgcgccagccccaacccccactaaatgatctgatttcgtcacctgactgcaatgaggtagatttcattgaagctctcttgaaaggctcctgtgtgagcccagatgaagactgggtgtgcaacttgaggctgatcgacgacattttggaacagcatgctgctgctcaaaatgccacagcccagaattctgggcaagtcacccaggatgctggggcactttaaatctgagcaggatgcccatagaaacccccatggtgacatcactctaggaagtggtgtcgatccatacccgcagttgtctcccgttacaatttgagtggtgttgtcagcccatgcttatccctctctctacctgtgacaaaatggaaagctggtgatttttcaagctacgtgtacatatttgaaaattttgtaaatggttttcctaaacattaatgacagaagtatttatacttcattttgtgactttgtaaataaagcgacggcttttgtttcagtagagttgtgtttactatgcattgttttgtgtttattatacaatgttacaaatatgcagaccgtgttgtttgctccagtgataccttgttaagctaggcagtgatgcctgtcccacccccatcgagaaaaccatctccaaagccaaagggcagtgaagccgtcgtaagtagtga

SEQ ID NO: 408596 - DNA, 3499 bp, Homo sapiens
gtctccctaagccctgtgtctaggtcgtttgggaaacgccttggagagtcaagaataaatttgcaggtcaaacaatggatgactggaaaagtcggcttgtaatcaagagcatgcttccccatttcgccatggtgggaaatcgtcaggagcccagaaagctccaggaatcgggaaagaagccctcgtggatggaggaagaagatttatcttttctctacaagagcagcccaggaagaaagcatcagggaactgttaagaggagacaagaagaagaccacttccagtttccagacatggctgatgggggctaccctaataaaattaagaggccttgccttgaagatgtcacccttgcaatgggcccaggtgctcatcctagtactgcttgtgcagaactgcaggtccctccattgacaataaatcctagccctgcggctatgggagtggctggccagtcattactgctggagaataaccctatgaatggcaacatcatgggctcaccatttgtagtaccacagactacagaagtgggactgaaagggcccactgttccttactatgagaaaatcaacagcgtgccggctgtagaccaggagcttcaagagctgctagaggagctcaccaaaattcaagacccttctccaaatgagctagatcttgagaagatactggggacgaagccagaagagccactggttttagatcatccccaggcaaccctaagcacaactcccaagccttcggttcagatgtcacacttggagagcctggcttccagcaaggagtttgcttctagttgcagccaagttactggcatgtcacttcagatcccatcctcctccacagggatcagctattcgattccttccaccagtaagcagatagtgtcaccgagttcttcaatggcacagtccaagagccaggtccaggccatgctccctgtcgctctgccccccttaccagtgcctcagtggcatcacgcccaccagctgaaggcgttggcagccagcaagcaggggtctgctacaaagcagcaagggcccacccccagttggtctggtctgcctcctccaggactctctccaccttcccgcccagtgccatcactacagccaccaccgctgccactgccaccaccaccacccccattcagcccccagagcctcatggtgtcctgcatgtcgtccaataccttgtcgggtagcactctccgaggctctcccaatgccttactgtcaagcatgacgtccagcagcaatgctgccctggggcccgccatgccctatgctcctgagaagctccccagccctgctctcactcaacagccgcagttcggccctcagagctccattcttgccaacctcatgtcctctaccatcaaaacccctcaaggacacctgatgtctgctctgcctgccagcaaccctgggccgtccccaccctatcgcccagagaagctctctagcccaggcttgccacagcagtccttcaccccacagtgttccctgatccgaagcctcactcccaccagtaatcttctaagccagcaacagcagcagcagcagcagcagcagcaagcaaatgtgatctttaagcccataagcagcaactcatccaaaaccctgagcatgatcatgcagcaggggatggcaagctccagcccaggagccacggagccatttacttttggcaacaccaagcccttgtcccattttgtttctgagccgggtccccagaagatgccctccatgcctaccacctctaggcagccttccctgctccactacctgcagcagccgacaccaacgcaggcctcctcagccactgcctcctccacggccactgccaccttgcagctgcagcagcagcagcagcaacagcagcagcagcctgaccattcttcattccttctgcagcagatgatgcagcaaccccagcgttttcagcgatcagtggcctcagattccatgcctgctctgcccagacaggtctgttgccatctgtttgcatggacttctgcagctagctcggtgaagccccagcatcaacacgggaactctttcactagcaggcaagatcctcagcctggagacgtgtcaccgtctaacattactcatgtagacaaagcctgcaagcttggggaagccaggcacccccaggtcagcctcgggcgacagcccccgtcctgccaggccctggggagtgagtccttcctgcccggcagctcctttgctcatgagctggcccgagtcacctcctcgtacagcacctcagaggcagcgccctggggcagctgggatccgaaggcctggaggcaggtgcccgctccactactgcctagctgcgacgccacagcaagaggaacagagatcaggtcttatggcaatgacccctgaacggcagaatgcatatatctcccaacagatgagtccatttgaagccgtccaagaacaagtcacctccaagtgtagccggatcaaggcaagccccccatctagcaagcacttgatgccacccagaactgggcttcttcagaacaatctgagtccaggaatgatcccactcaccaggcaccagagctgcgagggcatgggagtgatctcaccaactctggggaagcggcaaggaattttcacctccagcccccagtgtcccatcctctcacactcaggccagactcccctgggcagacttgactctgtctgccagcatatgcagagccccaaggccaccccaccagaagtgcccctgcctgggttctgtcccagctccctgggcacccagtccttgagtccccaccagctcagacggcctagtgtgccaagaatgcccactgcgttcaacaatgctgcatgggtcacagcggcagcagctgtgaccacagcagtttcggggaaaacacccctcagccaagtggataatagcgttcagcagcactcaccttctggccaggcctgccttcagaggccatctgattgggaggcacaagtgcccgctgcgatgggaacacaagtgcccctggccaacaaccccagcttcagcctgctgggcagccagagcctcaggcagagcccggtacagggcccggtgcctgtagcaaacaccaccaagttcctccagcagggtatggccagctttagtcccctgagccccatacagggcatcgagccaccaagctatgtggctgctgctgccaccgctgctgctgcttctgccgttgctgccagccagttcccaggtccgttcgacagaacggatattccccctgagctgccacctgccgactttttgcgccagccccaacccccactaaatgatctgatttcgtcaccacacccaccaccgctgccactgccaccaccaccacccccattcagcccccagagcctcatggtgtcctgcatgtcgtccaataccttgtcgggtagcactctccgaggctctcccaatgccttactgtcaagcatgacgtccacagcaatgctccctggggccc

SEQ ID NO: 408597 - DNA, 8179 bp, Homo sapiens
ctaaaaataccattaagtaatagtattagcttttgtattctgagattcaacagcagcagtcacttccctccactcctatgtgtatcccaggaccaccctgggcggggagggctgaggtcagggaggtctgaagctggtcctgggctccgggggtgacagtgatgaggaactgggtgcacacatgagtggggcagccgggcctggccagagaagcaacacacacgtgcacagacatgtttatccacatacacatgtgcacgcatgtgcacaaacacattgcaggcaggcatgttgacgcctcaggcagcggaggaccctgactctgggccctgctgacccgggcaaggcccattgtgatgcgtgccatgacctcagaatgtcactggtgcttagcacctatccgctctccagactgcgtctgtgttctacggcagttacacacacgcagtggtattcacaagcggttttgtggactcaaaggttttctccctgagaggcataacccaggccagctgattcatcagaatcaggtgagtgtgacctgctctcttccctccaggctgacttggggacagtggctatggtatgggcggtgttggcctctgggcagctacagaggagggtcatccctgagcactcaccgggcgcccgttctacactgcccatgtagacgattttctctttcgtcttcatggtggcttcgtagagtgggtgctgttcccaaatgtacccattcgacaggtgagccgtctggggtcagagaggcagtaactggcctgggaatccagacaagaccctgggttttgctctcagccctgctgtgtgccatgctagacttcaggcctcaaccctgagacctccctgctctagatcccaaatctgcccagatttccgatccaatgggcagagcctggccctggcagagacactgggatggatccactgtgggtggggaggagggaagggtcctcagaacacacctggggcctaagctgggtcttgatggtcactgtgggacccactggacacacacagtcccttgtctgggagtggcatggggagccttctgcccttgggcagttgtggaaagtgaaggagccctggagagctggctgaggggagactatcttcccttgtgttcaaaggggtccaggcactggggctctccccaagtatttcttattctgtctggcctcgctttccttttgccctgagtattctcaggagggacggtccatctagatgtcctccaggagcaaggacccactgttcttcatcagtgacccaggaaaatgaagccccctcctgtggggacagctcagaatggtggagtccacagtccctccctgagagacatggtttccatgagcacagtggctgctttggagacagtaatcattttcatccccaaaaccaaacacactcctgctcaaatggtgttattgctaaagcagcttcactggttagactgaagggccatggtagcccaagtgatgagcggggtagaatggagcagtcaggagagatcttgttccccgtaggaaactgggcatctctgtggccctgaacatcccaggaggccgatcgtacagagacctctggtgcctgaccgcagttcacatccacatccctggaatagaccatcacaggctcttcacccttggcaggtggacaccattcaacctgccggggcaggatggacatggtagagaatgcagatagtttgcaggcacaggagcggaaggacatacttatgaagtatgacaagggacaccgagctgggctgccagaggacaaggggcctgagcccgttggaatcaacagcagcattgatcgttttggcattttgcatgagacggagctgcctcctgtgactgcacgggaggcgaagaaaattcggcgggagatgacacgaacgagcaagtggatggaaatgctgggagaatgggagacatataagcacagtagcaaactcatagatcgagtgtacaagggaattcccatgaacatccggggcccggtgtggtcagtcctcctgaacattcaggaaatcaagttgaaaaaccccggaagataccagatcatgaaggagaggggcaagaggtcatctgaacacatccaccacatcgacctggacgtgaggacgactctccggaaccatgtcttctttagggatcgatatggagccaagcagagggaactattctacatcctcctggcctattcggagtataacccggaggtgggctactgcagggacctgagccacatcaccgccttgttcctcctttatctgcctgaggaggacgcattctgggcactggtgcagctgctggccagtgagaggcactccctgccaggattccacagcccaaatggtgggacagtccaggggctccaagaccaacaggagcatgtggtacccaagtcacaacccaagaccatgtggcatcaggacaaggaaggtctatgcgggcagtgtgcctcgttaggctgccttctccggaacctgattgacgggatctctctcgggctcaccctgcgcctgtgggacgtgtatttggtggaaggagaacaggtgttgatgccaataaccagcattgctcttaaggttcagcagaagcgcctcatgaagacatccaggtgtggcctgtgggcacgtctgcggaaccaattcttcgatacctgggccatgaacgatgacaccgtgctcaagcatcttagggcctctacgaagaaactaacaaggaagcaaggggacctgccacccccaggcccaacagccctgggacgaaggtgtgtggcaggaagcccccagccagtctgaaccctgggggcagtcccaggagccacccaccatgccccaacggcttccccatgccaggcagcacacacccctccctctgggatcagcagactacaggcgtgtcgtcagtgtcagaccacaggggccacacagagaccccaaggactccagagatgcagccaaacgcgagcaagggtccttggcacccaggcctgtgccggcttcacgtggtgggaagaccctctgcaaggggtataggcaggcccctccaggcccaccagcccagttccagcggcccatttgctcagcttccccgccatgggcatctcgtttttccacgccctgtcctggtggggctgtccgggaagacacgtaccctgtgggcactcagggtgtgcccagcctggccctggctcagggaggacctcagggttcctggagattcctggagtggaagtcaatgccccggctcccaacggacctggatatagggggcccttggttcccccattatgattttgaacggagctgctgggtccgtgccatatcccaggaggaccagctggccacctgctggcaggctgaacactgcggagaggttcacaacaaagatatgagttggcctgaggagatgtcttttacagcaaatagtagtaaaatagatagacaaaaggttcccacagaaaagggagccacaggtctaagcaacctgggaaacacatgcttcatgaactcaagcatccagtgcgttagtaacacacagccactgacacagtattttatctcagggagacatctttatgaactcaacaggacaaatcccattggtatgaaggggcatatggctaaatgctatggtgatttagtgcaggaactctggagtggaactcagaagagtgttgccccattaaagcttcggcggaccatagcaaaatatgctcccaagtttgatgggtttcagcaacaagactcccaagaacttctggcttttctcttggatggtcttcatgaagatctcaaccgagtccatgaaaagccatatgtggaactgaaggacagtgatggccgaccagactgggaagtagctgcagaggcctgggacaaccatctaagaagaaatagatcaattattgtggatttgttccatgggcagctaagatctcaagtcaaatgcaagacatgtgggcatataagtgtccgatttgaccctttcaattttttgtctttgccactaccaatggacagttacatggacttagaaataacagtgattaagttagatggtactacccctgtacggtatggactaagactgaatatggatgaaaagtacacaggtttaaaaaaacagctgagggatctctgtggacttaattcagaacaaatcctactagcagaagtacatgattccaacataaagaactttcctcaggataaccaaaaagtacaactctcagtgagcggatttttgtgtgcatttgaaattcctgtcccttcatctccaatttcagcttctagtccaacacaaatagatttctcctcttcaccatctacaaatggaatgttcaccctaactaccaatggggacctacccaaaccaatattcatccccaatggaatgccaaacactgttgtgccatgtggaactgagaagaacttcacaaatggaatggttaatggtcacatgccatctcttcctgacagcccctttacaggttacatcattgcagtccaccgaaaaatgatgaggacagaactgtatttcctgtcacctcaggagaatcgccccagcctctttggaatgccattgattgttccatgcactgtgcatacccagaagaaagacctatatgatgcggtttggattcaagtatcctggttagcaagaccactcccacctcaggaagctagtattcatgcccaggatcgtgataactgtatgggctatcaatatccattcactctacgagttgtgcagaaagatgggatctcctgtgcttggtgcccacagtatagattttgcagaggctgtaaaattgattgtggggaagacagagctttcattggaaatgcctatattgctgtggattggcaccccacagcccttcaccttcgctatcaaacatcccaggaaagggttgtagataagcatgagagtgtggagcagagtcggcgagcgcaagccgagcccatcaacctggacagctgtctccgtgctttcaccagtgaggaagagctaggggaaagtgagatgtactactgttccaagtgtaagacccactgcttagcaacaaagaagctggatctctggaggcttccacccttcctgattattcaccttaagcgatttcaatttgtaaatgatcagtggataaaatcacagaaaattgtcagatttcttcgggaaagttttgatccgagtgcttttttggtaccacgagacccggccctctgccagcataaaccactcacaccccagggggatgagctctccaagcccaggattctggcaagagaggtgaagaaagtggatgcgcagagttcggctggaaaagaggacatgctcctaagcaaaagcccatcttcactcagcgctaacatcagcagcagcccaaaaggttctccttcttcatcaagaaaaagtggaaccagctgtccctccagcaaaaacagcagccctaatagcagcccacggactttggggaggagcaaagggaggctccggctgccccagattggcagcaaaaataagccgtcaagtagtaagaagaacttggatgccagcaaagagaatggggctgggcagatctgtgagctggctgacgccttgagccgagggcatatgcgggggggcagccaaccagagctggtcactcctcaggaccatgaggtagctttggccaatggattcctttatgagcatgaagcatgtggcaatggctgtggcgatggctacagcaatggtcagcttggaaaccacagtgaagaagacagcactgatgaccaaagagaagacactcatattaagcctatttataatctatatgcaatttcatgccattcaggaattctgagtgggggccattacatcacttatgccaaaaacccaaactgcaagtggtactgttataatgacagcagctgtgaggaacttcaccctgatgaaattgacaccgactctgcctacattcttttctatgagcagcaggggatagactacgcacaatttctgccaaagattgatggcaaaaagatggcagacacaagcagtacggatgaagactctgagtctgattacgaaaagtactctatgttacagtaaagctaccactctggctgctagacagcttggtggcgagggagatgactccttgtagctgatacttggcaaaagtgtcactgaaagacaagctaaatgtagttattttatcctgttagaacaaaaattctaattaaaatagttaacttgaagagtagaaacaattgtattttgaagtctcatacaagctgtctgatagagaactttcaggcagatcccaccattagcctgtaaacaaaaggtgtggcaccagccacctgggaccaaataagaattgaattgtgcttgtccagatatgaacaaatatgtagtgagtatagagtttaccaataatcataacaaatattaaagatttccttggagtcagaggaaaaaacaaacaattataatgttgtctagggacgacatgatacgctacctcctttttcctgaagttttattccattatattgacaagatggagaaagcaagatcatgaaggtgtgcaaatgattcttacggcatggacaaggatttttcaatttattttttaaactgtttccataccctttctttttcttgctttttgtttttgccattgtgtttacgtttgagacacaaccagtcattggtggcaggggcatagagtggtcagtctgaaagggaggctctcttaagagctatgtgccttccaaccagagggagacccagtagaaagaaaaacatcctgggaaatccagctaccagggccctcccagtggaggcatcttacatttaggctacttcaagtatcctcagaaatgtattctgcacccccggccccgcccatgctgagggaaggggagcagttgccaatatttgcaccatcttcacatgcacatgttgcaacaagagcttctgggaaggtaagcggcatcggagctagatcacgtttcacaattagtggttattcttttctgtgtttgttttgcactttaaaaaagagagaacacatgcaaatgaacttgcttgtgtgtatttgatggctctaagggctataaattacaaacaaaacacatcccagacattaggagttcataagtatatttaatgaaattggtggttttaggaagtcaactttagttttgctttgtttgcatgtccactggtttttttattttgatatttgtctttttttaaattttacagtagtcattgaaagttatgtttctttgcttacttcattttttccctctaattatttaagattggaacaaaagtataaatattatttatttgaggtagaatttttttcatgtagtttcttaatatatacttgaaggaaatgtttcaccttatttttggtctttgtttattcatttagaccctgcaagttgattctcattgccagattccattaccctttcttcctcataggtagtaattaccaatgtaactaagcatttgtgttctgatatctgaggccagtaactattaatatctagttctcagagcatttggaaaggttatcttaaatggctacctaaattgaaatccttttcagaaaaaatataattgcaagtaggtaggagtggcctaaattgtctaatgtaataaagtcagacaaaatgcacactttatagtttcaagattttcagtaaataaaatctgtccattcctacctggacatgtcccattaaaaagtggaagattttaaataatttctttacagatgttttatttaaacaggtagcacaatctactaatgttgtgtgatttgtgttatactggttgtaattaatttttttaattcatgaactagcggaaaatttattaaattaactattaactacattcaccttgtaaattactgtataaaacttgttgacaatgcactgactttagaaagatgttaatgtacataaatagagtgtaaataaaatagtgttgatgtactgaaatatgaactgtatcaaaagtattggtaattgtatatggggtgtacctgtttatctgttaactattatccaaacaaattaaatactgtggttgcctctatgtgctgtttttcctcatacaagtaaacacagaaagtc

SEQ ID NO: 408598 - DNA, 387 bp, Homo sapiens
tcgtcctcaggatacttgagaaaagagcaaagatgaaaataccacaagcttatgatgctgtacttatctttgaatttgtagatttctcctcttcaccatctacaaatggaatgttcaccctaactaccaatggggacctacccaaaccaatattcatccccaatggaatgccaaacactgttgtgccatgtggaactgagaagaacttcacaaatggaatggttaatggtcacatgccatctcttcctgacagcccctttacaggttacatcattgcagtccaccgaaaaatggttagttaaatgttaggcaactcactgccagtcttgctagtgtcatttgtgaaatagccattttctgtctttgcaacatcattgaatgcatttt

SEQ ID NO: 408599 - DNA, 7856 bp, Homo sapiens
ctaaaaataccattaagtaatagtattagcttttgtattctgagattcaacagcagcagtcacttccctccactcctatgtgtatcccaggaccaccctgggcggggagggctgaggtcagggaggtctgaagctggtcctgggctccgggggtgacagtgatgaggaactgggtgcacacatgagtggggcagccgggcctggccagagaagcaacacacacgtgcacagacatgtttatccacatacacatgtgcacgcatgtgcacaaacacattgcaggcaggcatgttgacgcctcaggcagcggaggaccctgactctgggccctgctgacccgggcaaggcccattgtgatgcgtgccatgacctcagaatgtcactggtgcttagcacctatccgctctccagactgcgtctgtgttctacggcagttacacacacgcagtggtattcacaagcggttttgtggactcaaaggttttctccctgagaggcataacccaggccagctgattcatcagaatcaggtgagtgtgacctgctctcttccctccaggctgacttggggacagtggctatggtatgggcggtgttggcctctgggcagctacagaggagggtcatccctgagcactcaccgggcgcccgttctacactgcccatgtagacgattttctctttcgtcttcatggtggcttcgtagagtgggtgctgttcccaaatgtacccattcgacaggtgagccgtctggggtcagagaggcagtaactggcctgggaatccagacaagaccctgggttttgctctcagccctgctgtgtgccatgctagacttcaggcctcaaccctgagacctccctgctctagatcccaaatctgcccagatttccgatccaatgggcagagcctggccctggcagagacactgggatggatccactgtgggtggggaggagggaagggtcctcagaacacacctggggcctaagctgggtcttgatggtcactgtgggacccactggacacacacagtcccttgtctgggagtggcatggggagccttctgcccttgggcagttgtggaaagtgaaggagccctggagagctggctgaggggagactatcttcccttgtgttcaaaggggtccaggcactggggctctccccaagtatttcttattctgtctggcctcgctttccttttgccctgagtattctcaggagggacggtccatctagatgtcctccaggagcaaggacccactgttcttcatcagtgacccaggaaaatgaagccccctcctgtggggacagctcagaatggtggagtccacagtccctccctgagagacatggtttccatgagcacagtggctgctttggagacagtaatcattttcatccccaaaaccaaacacactcctgctcaaatggtgttattgctaaagcagcttcactggttagactgaagggccatggtagcccaagtgatgagcggggtagaatggagcagtcaggagagatcttgttccccgtaggaaactgggcatctctgtggccctgaacatcccaggaggccgatcgtacagagacctctggtgcctgaccgcagttcacatccacatccctggaatagaccatcacaggctcttcacccttggcaggtggacaccattcaacctgccggggcaggatggacatggtagagaatgcagatagtttgcaggcacaggagcggaaggacatacttatgaagtatgacaagggacaccgagctgggctgccagaggacaaggggcctgagcccgttggaatcaacagcagcattgatcgttttggcattttgcatgagacggagctgcctcctgtgactgcacgggaggcgaagaaaattcggcgggagatgacacgaacgagcaagtggatggaaatgctgggagaatgggagacatataagcacagtagcaaactcatagatcgagtgtacaagggaattcccatgaacatccggggcccggtgtggtcagtcctcctgaacattcaggaaatcaagttgaaaaaccccggaagataccagatcatgaaggagaggggcaagaggtcatctgaacacatccaccacatcgacctggacgtgaggacgactctccggaaccatgtcttctttagggatcgatatggagccaagcagagggaactattctacatcctcctggcctattcggagtataacccggaggtgggctactgcagggacctgagccacatcaccgccttgttcctcctttatctgcctgaggaggacgcattctgggcactggtgcagctgctggccagtgagaggcactccctgccaggattccacagcccaaatggtgggacagtccaggggctccaagaccaacaggagcatgtggtacccaagtcacaacccaagaccatgtggcatcaggacaaggaaggtctatgcgggcagtgtgcctcgttaggctgccttctccggaacctgattgacgggatctctctcgggctcaccctgcgcctgtgggacgtgtatttggtggaaggagaacaggtgttgatgccaataaccagcattgctcttaaggttcagcagaagcgcctcatgaagacatccaggtgtggcctgtgggcacgtctgcggaaccaattcttcgatacctgggccatgaacgatgacaccgtgctcaagcatcttagggcctctacgaagaaactaacaaggaagcaaggggacctgccacccccagccaaacgcgagcaagggtccttggcacccaggcctgtgccggcttcacgtggtgggaagaccctctgcaaggggtataggcaggcccctccaggcccaccagcccagttccagcggcccatttgctcagcttccccgccatgggcatctcgtttttccacgccctgtcctggtggggctgtccgggaagacacgtaccctgtgggcactcagggtgtgcccagcctggccctggctcagggaggacctcagggttcctggagattcctggagtggaagtcaatgccccggctcccaacggacctggatatagggggcccttggttcccccattatgattttgaacggagctgctgggtccgtgccatatcccaggaggaccagctggccacctgctggcaggctgaacactgcggagaggttcacaacaaagatatgagttggcctgaggagatgtcttttacagcaaatagtagtaaaatagatagacaaaaggttcccacagaaaagggagccacaggtctaagcaacctgggaaacacatgcttcatgaactcaagcatccagtgcgttagtaacacacagccactgacacagtattttatctcagggagacatctttatgaactcaacaggacaaatcccattggtatgaaggggcatatggctaaatgctatggtgatttagtgcaggaactctggagtggaactcagaagagtgttgccccattaaagcttcggcggaccatagcaaaatatgctcccaagtttgatgggtttcagcaacaagactcccaagaacttctggcttttctcttggatggtcttcatgaagatctcaaccgagtccatgaaaagccatatgtggaactgaaggacagtgatggccgaccagactgggaagtagctgcagaggcctgggacaaccatctaagaagaaatagatcaattattgtggatttgttccatgggcagctaagatctcaagtcaaatgcaagacatgtgggcatataagtgtccgatttgaccctttcaattttttgtctttgccactaccaatggacagttacatggacttagaaataacagtgattaagttagatggtactacccctgtacggtatggactaagactgaatatggatgaaaagtacacaggtttaaaaaaacagctgagggatctctgtggacttaattcagaacaaatcctactagcagaagtacatgattccaacataaagatttctcctcttcaccatctacaaatggaatgttcaccctaactaccaatggggacctacccaaaccaatattcatccccaatggaatgccaaacactgttgtgccatgtggaactgagaagaacttcacaaatggaatggttaatggtcacatgccatctcttcctgacagcccctttacaggttacatcattgcagtccaccgaaaaatgatgaggacagaactgtatttcctgtcacctcaggagaatcgccccagcctctttggaatgccattgattgttccatgcactgtgcatacccagaagaaagacctatatgatgcggtttggattcaagtatcctggttagcaagaccactcccacctcaggaagctagtattcatgcccaggatcgtgataactgtatgggctatcaatatccattcactctacgagttgtgcagaaagatgggatctcctgtgcttggtgcccacagtatagattttgcagaggctgtaaaattgattgtggggaagacagagctttcattggaaatgcctatattgctgtggattggcaccccacagcccttcaccttcgctatcaaacatcccaggaaagggttgtagataagcatgagagtgtggagcagagtcggcgagcgcaagccgagcccatcaacctggacagctgtctccgtgctttcaccagtgaggaagagctaggggaaagtgagatgtactactgttccaagtgtaagacccactgcttagcaacaaagaagctggatctctggaggcttccacccttcctgattattcaccttaagcgatttcaatttgtaaatgatcagtggataaaatcacagaaaattgtcagatttcttcgggaaagttttgatccgagtgcttttttggtaccacgagacccggccctctgccagcataaaccactcacaccccagggggatgagctctccaagcccaggattctggcaagagaggtgaagaaagtggatgcgcagagttcggctggaaaagaggacatgctcctaagcaaaagcccatcttcactcagcgctaacatcagcagcagcccaaaaggttctccttcttcatcaagaaaaagtggaaccagctgtccctccagcaaaaacagcagccctaatagcagcccacggactttggggaggagcaaagggaggctccggctgccccagattggcagcaaaaataagccgtcaagtagtaagaagaacttggatgccagcaaagagaatggggctgggcagatctgtgagctggctgacgccttgagccgagggcatatgcgggggggcagccaaccagagctggtcactcctcaggaccatgaggtagctttggccaatggattcctttatgagcatgaagcatgtggcaatggctgtggcgatggctacagcaatggtcagcttggaaaccacagtgaagaagacagcactgatgaccaaagagaagacactcatattaagcctatttataatctatatgcaatttcatgccattcaggaattctgagtgggggccattacatcacttatgccaaaaacccaaactgcaagtggtactgttataatgacagcagctgtgaggaacttcaccctgatgaaattgacaccgactctgcctacattcttttctatgagcagcaggggatagactacgcacaatttctgccaaagattgatggcaaaaagatggcagacacaagcagtacggatgaagactctgagtctgattacgaaaagtactctatgttacagtaaagctaccactctggctgctagacagcttggtggcgagggagatgactccttgtagctgatacttggcaaaagtgtcactgaaagacaagctaaatgtagttattttatcctgttagaacaaaaattctaattaaaatagttaacttgaagagtagaaacaattgtattttgaagtctcatacaagctgtctgatagagaactttcaggcagatcccaccattagcctgtaaacaaaaggtgtggcaccagccacctgggaccaaataagaattgaattgtgcttgtccagatatgaacaaatatgtagtgagtatagagtttaccaataatcataacaaatattaaagatttccttggagtcagaggaaaaaacaaacaattataatgttgtctagggacgacatgatacgctacctcctttttcctgaagttttattccattatattgacaagatggagaaagcaagatcatgaaggtgtgcaaatgattcttacggcatggacaaggatttttcaatttattttttaaactgtttccataccctttctttttcttgctttttgtttttgccattgtgtttacgtttgagacacaaccagtcattggtggcaggggcatagagtggtcagtctgaaagggaggctctcttaagagctatgtgccttccaaccagagggagacccagtagaaagaaaaacatcctgggaaatccagctaccagggccctcccagtggaggcatcttacatttaggctacttcaagtatcctcagaaatgtattctgcacccccggccccgcccatgctgagggaaggggagcagttgccaatatttgcaccatcttcacatgcacatgttgcaacaagagcttctgggaaggtaagcggcatcggagctagatcacgtttcacaattagtggttattcttttctgtgtttgttttgcactttaaaaaagagagaacacatgcaaatgaacttgcttgtgtgtatttgatggctctaagggctataaattacaaacaaaacacatcccagacattaggagttcataagtatatttaatgaaattggtggttttaggaagtcaactttagttttgctttgtttgcatgtccactggtttttttattttgatatttgtctttttttaaattttacagtagtcattgaaagttatgtttctttgcttacttcattttttccctctaattatttaagattggaacaaaagtataaatattatttatttgaggtagaatttttttcatgtagtttcttaatatatacttgaaggaaatgtttcaccttatttttggtctttgtttattcatttagaccctgcaagttgattctcattgccagattccattaccctttcttcctcataggtagtaattaccaatgtaactaagcatttgtgttctgatatctgaggccagtaactattaatatctagttctcagagcatttggaaaggttatcttaaatggctacctaaattgaaatccttttcagaaaaaatataattgcaagtaggtaggagtggcctaaattgtctaatgtaataaagtcagacaaaatgcacactttatagtttcaagattttcagtaaataaaatctgtccattcctacctggacatgtcccattaaaaagtggaagattttaaataatttctttacagatgttttatttaaacaggtagcacaatctactaatgttgtgtgatttgtgttatactggttgtaattaatttttttaattcatgaactagcggaaaatttattaaattaactattaactacattcaccttgtaaattactgtataaaacttgttgacaatgcactgactttagaaagatgttaatgtacataaatagagtgtaaataaaatagtgttgatgtactgaaatatgaactgtatcaaaagtattggtaattgtatatggggtgtacctgtttatctgttaactattatccaaacaaattaaatactgtggttgcctctatgtgctgtttttcctcatacaagtaaacacagaaagtc

SEQ ID NO: 408600 - DNA, 7028 bp, Homo sapiens
ctaaaaataccattaagtaatagtattagcttttgtattctgagattcaacagcagcagtcacttccctccactcctatgtgtatcccaggaccaccctgggcggggagggctgaggtcagggaggtctgaagctggtcctgggctccgggggtgacagtgatgaggaactgggtgcacacatgagtggggcagccgggcctggccagagaagcaacacacacgtgcacagacatgtttatccacatacacatgtgcacgcatgtgcacaaacacattgcaggcaggcatgttgacgcctcaggcagcggaggaccctgactctgggccctgctgacccgggcaaggcccattgtgatgcgtgccatgacctcagaatgtcactggtgcttagcacctatccgctctccagactgcgtctgtgttctacggcagttacacacacgcagtggtattcacaagcggttttgtggactcaaaggttttctccctgagaggcataacccaggccagctgattcatcagaatcaggaaactgggcatctctgtggccctgaacatcccaggaggccgatcgtacagagacctctggtgcctgaccgcagttcacatccacatccctggaatagaccatcacaggctcttcacccttggcaggtggacaccattcaacctgccggggcaggatggacatggtagagaatgcagatagtttgcaggcacaggagcggaaggacatacttatgaagtatgacaagggacaccgagctgggctgccagaggacaaggggcctgagcccgttggaatcaacagcagcattgatcgttttggcattttgcagtcctgcccctcctgggagtcagagccacaggaaggcccttgtcctcccttccctgtgccttctcccgggctgagccctgagctggatagggacagagccagtcctttctgggggtcggctcccaggcttgggcggctccaggccctgtgcacgtcctcagctctgcctgggttgccttacagtgagacggagctgcctcctgtgactgcacgggaggcgaagaaaattcggcgggagatgacacgaacgagcaagtggatggaaatgctgggagaatgggagacatataagcacagtagcaaactcatagatcgagtgtacaagggaattcccatgaacatccggggcccggtgtggtcagtcctcctgaacattcaggaaatcaagttgaaaaaccccggaagataccagatcatgaaggagaggggcaagaggtcatctgaacacatccaccacatcgacctggacgtgaggacgactctccggaaccatgtcttctttagggatcgatatggagccaagcagagggaactattctacatcctcctggcctattcggagtataacccggaggtgggctactgcagggacctgagccacatcaccgccttgttcctcctttatctgcctgaggaggacgcattctgggcactggtgcagctgctggccagtgagaggcactccctgccaggattccacagcccaaatggtgggacagtccaggggctccaagaccaacaggagcatgtggtacccaagtcacaacccaagaccatgtggcatcaggacaaggaaggtctatgcgggcagtgtgcctcgttaggctgccttctccggaacctgattgacgggatctctctcgggctcaccctgcgcctgtgggacgtgtatttggtggaaggagaacaggtgttgatgccaataaccagcattgctcttaaggttcagcagaagcgcctcatgaagacatccaggtgtggcctgtgggcacgtctgcggaaccaattcttcgatacctgggccatgaacgatgacaccgtgctcaagcatcttagggcctctacgaagaaactaacaaggaagcaaggggacctgccacccccagccaaacgcgagcaagggtccttggcacccaggcctgtgccggcttcacgtggtgggaagaccctctgcaaggggtataggcaggcccctccaggcccaccagcccagttccagcggcccatttgctcagcttccccgccatgggcatctcgtttttccacgccctgtcctggtggggctgtccgggaagacacgtaccctgtgggcactcagggtgtgcccagcctggccctggctcagggaggacctcagggttcctggagattcctggagtggaagtcaatgccccggctcccaacggacctggatatagggggcccttggttcccccattatgattttgaacggagctgctgggtccgtgccatatcccaggaggaccagctggccacctgctggcaggctgaacactgcggagaggttcacaacaaagatatgagttggcctgaggagatgtcttttacagcaaatagtagtaaaatagatagacaaaaggttcccacagaaaagggagccacaggtctaagcaacctgggaaacacatgcttcatgaactcaagcatccagtgcgttagtaacacacagccactgacacagtattttatctcagggagacatctttatgaactcaacaggacaaatcccattggtatgaaggggcatatggctaaatgctatggtgatttagtgcaggaactctggagtggaactcagaagagtgttgccccattaaagcttcggcggaccatagcaaaatatgctcccaagtttgatgggtttcagcaacaagactcccaagaacttctggcttttctcttggatggtcttcatgaagatctcaaccgagtccatgaaaagccatatgtggaactgaaggacagtgatggccgaccagactgggaagtagctgcagaggcctgggacaaccatctaagaagaaatagatcaattattgtggatttgttccatgggcagctaagatctcaagtcaaatgcaagacatgtgggcatataagtgtccgatttgaccctttcaattttttgtctttgccactaccaatggacagttacatggacttagaaataacagtgattaagttagatggtactacccctgtacggtatggactaagactgaatatggatgaaaagtacacaggtttaaaaaaacagctgagggatctctgtggacttaattcagaacaaatcctactagcagaagtacatgattccaacataaagatttctcctcttcaccatctacaaatggaatgttcaccctaactaccaatggggacctacccaaaccaatattcatccccaatggaatgccaaacactgttgtgccatgtggaactgagaagaacttcacaaatggaatggttaatggtcacatgccatctcttcctgacagcccctttacaggttacatcattgcagtccaccgaaaaatgatgaggacagaactgtatttcctgtcacctcaggagaatcgccccagcctctttggaatgccattgattgttccatgcactgtgcatacccagaagaaagacctatatgatgcggtttggattcaagtatcctggttagcaagaccactcccacctcaggaagctagtattcatgcccaggatcgtgataactgtatgggctatcaatatccattcactctacgagttgtgcagaaagatgggatctcctgtgcttggtgcccacagtatagattttgcagaggctgtaaaattgattgtggggaagacagagctttcattggaaatgcctatattgctgtggattggcaccccacagcccttcaccttcgctatcaaacatcccaggaaagggttgtagataagcatgagagtgtggagcagagtcggcgagcgcaagccgagcccatcaacctggacagctgtctccgtgctttcaccagtgaggaagagctaggggaaagtgagatgtactactgttccaagtgtaagacccactgcttagcaacaaagaagctggatctctggaggcttccacccttcctgattattcaccttaagcgatttcaatttgtaaatgatcagtggataaaatcacagaaaattgtcagatttcttcgggaaagttttgatccgagtgcttttttggtaccacgagacccggccctctgccagcataaaccactcacaccccagggggatgagctctccaagcccaggattctggcaagagaggtgaagaaagtggatgcgcagagttcggctggaaaagaggacatgctcctaagcaaaagcccatcttcactcagcgctaacatcagcagcagcccaaaaggttctccttcttcatcaagaaaaagtggaaccagctgtccctccagcaaaaacagcagccctaatagcagcccacggactttggggaggagcaaagggaggctccggctgccccagattggcagcaaaaataagccgtcaagtagtaagaagaacttggatgccagcaaagagaatggggctgggcagatctgtgagctggctgacgccttgagccgagggcatatgcgggggggcagccaaccagagctggtcactcctcaggaccatgaggtagctttggccaatggattcctttatgagcatgaagcatgtggcaatggctgtggcgatggctacagcaatggtcagcttggaaaccacagtgaagaagacagcactgatgaccaaagagaagacactcatattaagcctatttataatctatatgcaatttcatgccattcaggaattctgagtgggggccattacatcacttatgccaaaaacccaaactgcaagtggtactgttataatgacagcagctgtgaggaacttcaccctgatgaaattgacaccgactctgcctacattcttttctatgagcagcaggggatagactacgcacaatttctgccaaagattgatggcaaaaagatggcagacacaagcagtacggatgaagactctgagtctgattacgaaaagtactctatgttacagtaaagctaccactctggctgctagacagcttggtggcgagggagatgactccttgtagctgatacttggcaaaagtgtcactgaaagacaagctaaatgtagttattttatcctgttagaacaaaaattctaattaaaatagttaacttgaagagtagaaacaattgtattttgaagtctcatacaagctgtctgatagagaactttcaggcagatcccaccattagcctgtaaacaaaaggtgtggcaccagccacctgggaccaaataagaattgaattgtgcttgtccagatatgaacaaatatgtagtgagtatagagtttaccaataatcataacaaatattaaagatttccttggagtcagaggaaaaaacaaacaattataatgttgtctagggacgacatgatacgctacctcctttttcctgaagttttattccattatattgacaagatggagaaagcaagatcatgaaggtgtgcaaatgattcttacggcatggacaaggatttttcaatttattttttaaactgtttccataccctttctttttcttgctttttgtttttgccattgtgtttacgtttgagacacaaccagtcattggtggcaggggcatagagtggtcagtctgaaagggaggctctcttaagagctatgtgccttccaaccagagggagacccagtagaaagaaaaacatcctgggaaatccagctaccagggccctcccagtggaggcatcttacatttaggctacttcaagtatcctcagaaatgtattctgcacccccggccccgcccatgctgagggaaggggagcagttgccaatatttgcaccatcttcacatgcacatgttgcaacaagagcttctgggaaggtaagcggcatcggagctagatcacgtttcacaattagtggttattcttttctgtgtttgttttgcactttaaaaaagagagaacacatgcaaatgaacttgcttgtgtgtatttgatggctctaagggctataaattacaaacaaaacacatcccagacattaggagttcataagtatatttaatgaaattggtggttttaggaagtcaactttagttttgctttgtttgcatgtccactggtttttttattttgatatttgtctttttttaaattttacagtagtcattgaaagttatgtttctttgcttacttcattttttccctctaattatttaagattggaacaaaagtataaatattatttatttgaggtagaatttttttcatgtagtttcttaatatatacttgaaggaaatgtttcaccttatttttggtctttgtttattcatttagaccctgcaagttgattctcattgccagattccattaccctttcttcctcataggtagtaattaccaatgtaactaagcatttgtgttctgatatctgaggccagtaactattaatatctagttctcagagcatttggaaaggttatcttaaatggctacctaaattgaaatccttttcagaaaaaatataattgcaagtaggtaggagtggcctaaattgtctaatgtaataaagtcagacaaaatgcacactttatagtttcaagattttcagtaaataaaatctgtccattcctacctggacatgtcccattaaaaagtggaagattttaaataatttctttacagatgttttatttaaacaggtagcacaatctactaatgttgtgtgatttgtgttatactggttgtaattaatttttttaattcatgaactagcggaaaatttattaaattaactattaactacattcaccttgtaaattactgtataaaacttgttgacaatgcactgactttagaaagatgttaatgtacataaatagagtgtaaataaaatagtgttgatgtactgaaatatgaactgtatcaaaagtattggtaattgtatatggggtgtacctgtttatctgttaactattatccaaacaaattaaatactgtggttgcctctatgtgctgtttttcctcatacaagtaaacacagaaagtc

SEQ ID NO: 408601 - DNA, 382 bp, Homo sapiens
tttacttttttaagagacagtctcactatgctgcctaggcttttctcaaactcctggactcaagcgatcctcctgcctcagcctcccaagttgctggaattagaggcatgagccactgtgtccggggttattttgttgtttgtttggctttttttgatagcagttgcttaggtcaaacctatttcctgaaaaacagaaaagagttttcttctcctgttattttattttacttacaacaaatagcacatatactgccacaaaaaaaagtgaggcaacttttgtccactccatacaaaccttaaatgctcaacatacctcttagcacttggcacaggcctgggcacataatcagctctcaaagttagattgacagcccagatgc

SEQ ID NO: 408602 - DNA, 875 bp, Homo sapiens
tgacttgctcactatcatgaactcactcaaaagaaactagcaattttttagacttcttttgggatccttgtaccgcatcctatactgcttttatgttcatgtgtgcatttgtgtacatgtatacacatattactccataacgaagcacagtcttcttttatacctttcctggttggggtagtagaggaattttacagcctacaatcagacacatccagaagaagagtggaatatgtatgataccttaaaaatcagcacatttaacaaagtataacttactcatggttacaactaagttaatgttttttccctttatttttcaaaaggctcatttttctccatttctctactatcaaagtcaagaactgcccaatggctctgtcaaggaggctccagctcctactcccacttctctggaagtctcaagtccaccagatactacagaggaagtagatcataagcctaaactctgcaggctggctaaaggtgaaaatggctatggctttcacttaaatgcgattcggggtctgccaggctcattcatcaaagaggtatggtaatctggttccagcagcccaacaaacacagccacaattaggatagtctcagcttttcccacccattgatggcttagtagagaggttccattgaaggcacacactgaggggtctcacttgggttcagataaatgttgtcatggtcccacaccctttaggttagctaccagtacatcataagctcacgtttgtttgtttcccaaacatctgttccaaacagtgtgagttgactgaactctagttgacagtcactatcaaccctgattggcagtcatatttgtttgcttctgtgcatttggcataatgccccttaccctg

SEQ ID NO: 408603 - DNA, 1849 bp, Homo sapiens
ggctcacctgcagagacagaattcctgagtgaacgaacagagcagctcctcttccatctccagaaatgacctccaccttcaacccccgagaatgtaaactgtccaagcaagaagggcaaaactatggcttcttcctgcgaattgagaaggacaccgagggccacctggtccgggtggttgagaagtgtagcccagcagagaaggctggccttcaagatggagacagagttcttaggatcaatggtgtctttgtggacaaagaagaacatatgcaggttgtggatctggtcagaaagagtgggaattcagtgactttactagttctggatggggattcctatgagaaagcagtgaaaacacgggtggacttgaaagagttgggtcaaagtcagaaggagcaaggtttgagtgataatatactttcccctgtgatgaatggaggtgtgcaaacttggacccagccccggctctgctatctcgtgaaggaaggaggcagctatggcttctctctgaaaactgtccaaggtaaaaagggggtgtacatgactgatattacacctcaaggtgtggctatgagagctggagttctggctgatgatcacttgattgaagtgaatggagagaatgtagaggatgccagccatgaggaagtggttgaaaaggtgaagaagtcaggaagccgtgtcatgttcctgctggtggacaaagaaactgacaagcgtcatgttgagcagaagatacaattcaaaagagaaacagccagtttgaaactgttaccccaccagccccgaattgtggagatgaagaaaggaagcaatggctatggtttctatctgagggcaggctcagaacagaaaggtcaaatcatcaaggacatagattctggaagtccagcagaggaggctggcttgaagaacaatgatctggtagttgctgtcaacggcgagtctgtggaaaccctggatcatgacagtgtggtagaaatgattagaaagggtggagatcagacttcactgttggtggtagacaaagagacggacaacatgtacagactggctcatttttctccatttctctactatcaaagtcaagaactgcccaatggctctgtcaaggaggctccagctcctactcccacttctctggaagtctcaagtccaccagatactacagaggaagtagatcataagcctaaactctgcaggctggctaaaggtgaaaatggctatggctttcacttaaatgcgattcggggtctgccaggctcattcatcaaagaggtacagaagggcggtcctgctgacttggctgggctagaggatgaggatgtcatcattgaagtgaatggggtgaatgtgctagatgaaccctatgagaaggtggtggatagaatccagagcagtgggaagaatgtcacacttctagtctgtggaaagaaggcctatgattatttccaagctaagaaaatccctattgtttcctccctggctgatccacttgacacccctccagattctaaagaaggaatagtggtggagtcaaaccatgactcgcacatggcaaaagaacgggcccacagtacagcctcacattcttcttccaattctgaagatacagagatgtgatgaaaacgcggctattgcagacggctaatttatgcttaacttaggaagagataaggttccttgagcaccaaagatgattcataactctgtataggtgacagctgcttataaaagcatcttagcagataagcctattaaaattgtgcttttgtaacaatgttgtggttgctagaataaataccgatgcggccgtctttcttatattttaccttcctctcgtcgtc

SEQ ID NO: 408604 - DNA, 1788 bp, Homo sapiens
ggctcacctgcagagacagaattcctgagtgaacgaacagagcagctcctcttccatctccagaaatgacctccaccttcaacccccgagaatgtaaactgtccaagcaagaagggcaaaactatggcttcttcctgcgaattgagaaggacaccgagggccacctggtccgggtggttgagaagtgtagcccagcagagaaggctggccttcaagatggagacagagttcttaggatcaatggtgtctttgtggacaaagaagaacatatgcaggttgtggatctggtcagaaagagtgggaattcagtgactttactagttctggatggggattcctatgagaaagcagtgaaaacacgggtggacttgaaagagttgggtcaaagtcagaaggagcaaggtttgagtgataatatactttcccctgtgatgaatggaggtgtgcaaacttggacccagccccggctctgctatctcgtgaaggaaggaggcagctatggcttctctctgaaaactgtccaaggtaaaaagggggtgtacatgactgatattacacctcaaggtgtggctatgagagctggagttctggctgatgatcacttgattgaagtgaatggagagaatgtagaggatgccagccatgaggaagtggttgaaaaggtgaagaagtcaggaagccgtgtcatgttcctgctggtggacaaagaaactgacaagcgtcatgttgagcagaagatacaattcaaaagagaaacagccagtttgaaactgttaccccaccagccccgaattgtggagatgaagaaaggaagcaatggctatggtttctatctgagggcaggctcagaacagaaaggtcaaatcatcaaggacatagattctggaagtccagcagaggaggctggcttgaagaacaatgatctggtagttgctgtcaacggcgagtctgtggaaaccctggatcatgacagtgtggtagaaatgattagaaagggtggagatcagacttcactgttggtggtagacaaagagacggacaacatgtacagactggctcatttttctccatttctctactatcaaagtcaagaactgcccaatggctctgtcaaggaggctccagctcctactcccacttctctggaagtctcaagtccaccagatactacagaggaagtagatcataagcctaaactctgcaggctggctaaaggtgaaaatggctatggctttcacttaaatgcgattcggggtctgccaggctcattcatcaaagaggtacagaagggcggtcctgctgacttggctgggctagaggatgaggatgtcatcattgaagtgaatggggtgaatgtgctagatgaaccctatgagaaggtggtggatagaatccagagcagtgggaagaatgtcacacttctagtctgtggaaagaaggcctatgattatttccaagctaagaaaatccctattgtttcctccctggctgatccacttgacacccctccagattctaaagaaggaatagtggtggagtcaaaccatgactcgcacatggcaaaagaacgggcggctattgcagacggctaatttatgcttaacttaggaagagataaggttccttgagcaccaaagatgattcataactctgtataggtgacagctgcttataaaagcatcttagcagataagcctattaaaattgtgcttttgtaacaatgttgtggttgctagaataaataccgatgcggccgtctttcttatattttaccttcctctcgtcgtc

SEQ ID NO: 408605 - DNA, 1184 bp, Homo sapiens
atgacagcttttacataagacgcgtggctacaagtatgcccactgactttctgggaacttgcagccttttaatatgctattttgccaaaatcaaatgtcagatgcttttagtaacaggattattttcgttaagaccccttcattgttaattgctgggttagtttctggggtgagttctgagcaggaaacgagcctagatagtgtgcttataagcttcctgggatgctggtggaaggggtggtagttgtactcagcatgccttttttatctatttcatcagggctttgggctccagcagaaaatctgttttatttttttaggggacttactgataattttattttttggggttgggggagggtaggtcaaatcatcaaggacatagattctggaagtccagcagaggaggctggcttgaagaacaatgatctggtagttgctgtcaacggcgagtctgtggaaaccctggatcatgacagtgtggtagaaatgattagaaagggtggagatcagacttcactgttggtggtagacaaagagacggacaacatgtacagactggctcatttttctccatttctctactatcaaagtcaagaactgcccaatggctctgtcaaggaggctccagctcctactcccacttctctggaagtctcaagtccaccagatactacagaggaagtagatcataagcctaaactctgcaggctggctaaaggtgaaaatggctatggctttcacttaaatgcgattcggggtctgccaggctcattcatcaaagaggtacagaagggcggtcctgctgacttggctgggctagaggatgaggatgtcatcattgaagtgaatggggtgaatgtgctagatgaaccctatgagaaggtggtggatagaatccagagcagtgggaagaatgtcacacttctagtctgtggaaagaaggcctatgattatttccaagctaagaaaatccctattgtttcctccctggctgatccacttgacacccctccagattctaaagaaggaatagtggtggagtcaaaccatgactcgcacatggcaaaagaacgggcccacagtacagcctcacattcttcttccaattctgaagatacagagatgtgatgaaaacgaatcctttctcaaggtgagttgtgacctgtttactgtctctttag

SEQ ID NO: 408606 - DNA, 949 bp, Homo sapiens
tgacttgctcactatcatgaactcactcaaaagaaactagcaattttttagacttcttttgggatccttgtaccgcatcctatactgcttttatgttcatgtgtgcatttgtgtacatgtatacacatattactccataacgaagcacagtcttcttttatacctttcctggttggggtagtagaggaattttacagcctacaatcagacacatccagaagaagagtggaatatgtatgataccttaaaaatcagcacatttaacaaagtataacttactcatggttacaactaagttaatgttttttccctttatttttcaaaaggctcatttttctccatttctctactatcaaagtcaagaactgcccaatggctctgtcaaggaggctccagctcctactcccacttctctggaagtctcaagtccaccagatactacagaggaagtagatcataagcctaaactctgcaggctggctaaaggtgaaaatggctatggctttcacttaaatgcgattcggggtctgccaggctcattcatcaaagaggtacagaagggcggtcctgctgacttggctgggctagaggatgaggatgtcatcattgaagtgaatggggtgaatgtgctagatgaaccctatgagaaggtggtggatagaatccagagcagtgggaagaatgtcacacttctagtctgtggaaagaaggcctatgattatttccaagctaagaaaatccctattgtttcctccctggctgatccacttgacacccctccagattctaaagaaggaatagtggtggagtcaaaccatgactcgcacatggcaaaagaacgggcccacagtacagcctcacattcttcttccaattctgaagatacagagatgtgatgaaaacgaatcctttctcaaggtgagttgtgacctgtttactgtctctttag

SEQ ID NO: 408607 - DNA, 1269 bp, Homo sapiens
tgagacgttgtcttgctctgtcaccaggctggagtgcagtggtgccatctcagctcactgcaatctccacctcccgggttcaagcgattcccctgcctcagcctcctgagtagctggaattacaggtgcgcaccaccatgcccagctaattttttgtattttagtagttttaccatgttggccaggatggtctcgatctcctgaccttgtgatccgcccgcctcggcctcccaaagtgctgggattacaggtataagccaacacgcccgggccacacatttttttcaaggtgtcctatggggcacaacaggaccagagaagccatagggagctagcttttggcttaagaaccaactgaagctgccagaaatgatgagtcattttgcagttggtggaaagtcaagcagaaatcagaggcggctgctgcagctgtttgttgtaaaggggattctgacccctcctgatcttatcatagaatgatttaattgtaatttttctgttttggttaatagagaactttgatcgaaaaagaagcctgccctcatcatctccttccccgctctccaaatcaagaactgcccaatggctctgtcaaggaggctccagctcctactcccacttctctggaagtctcaagtccaccagatactacagaggaagtagatcataagcctaaactctgcaggctggctaaaggtgaaaatggctatggctttcacttaaatgcgattcggggtctgccaggctcattcatcaaagaggtacagaagggcggtcctgctgacttggctgggctagaggatgaggatgtcatcattgaagtgaatggggtgaatgtgctagatgaaccctatgagaaggtggtggatagaatccagagcagtgggaagaatgtcacacttctagtctgtggaaagaaggcctatgattatttccaagctaagaaaatccctattgtttcctccctggctgatccacttgacacccctccagattctaaagaaggaatagtggtggagtcaaaccatgactcgcacatggcaaaagaacgggcggctattgcagacggctaatttatgcttaacttaggaagagataaggttccttgagcaccaaagatgattcataactctgtataggtgacagctgcttataaaagcatcttagcagataagcctattaaaattgtgcttttgtaacaatgttgtggttgctagaataaataccgatgcggccgtctttcttatattttaccttcctctcgtcgtc

SEQ ID NO: 408608 - DNA, 183 bp, Homo sapiens
tccaagcttcaacttaactacatttctctgtatgatgatgtctcttacttctacaggttccttgagcaccaaagatgattcataactctgtataggtgacagctgcttataaaagcatcttagcagataagcctattaaaattgtgcttttgtaacaatgttgtggttgctagaataaatacc

SEQ ID NO: 408609 - DNA, 1678 bp, Homo sapiens
ggctcacctgcagagacagaattcctgagtgaacgaacagagcagctcctcttccatctccagaaatgacctccaccttcaacccccgagaatgtaaactgtccaagcaagaagggcaaaactatggcttcttcctgcgaattgagaaggacaccgagggccacctggtccgggtggttgagaagtgtagcccagcagagaaggctggccttcaagatggagacagagttcttaggatcaatggtgtctttgtggacaaagaagaacatatgcaggttgtggatctggtcagaaagagtgggaattcagtgactttactagttctggatggggattcctatgagaaagcagtgaaaacacgggtggacttgaaagagttgggtcaaagtcagaaggagcaaggtttgagtgataatatactttcccctgtgatgaatggaggtgtgcaaacttggacccagccccggctctgctatctcgtgaaggaaggaggcagctatggcttctctctgaaaactgtccaaggtaaaaagggggtgtacatgactgatattacacctcaaggtgtggctatgagagctggagttctggctgatgatcacttgattgaagtgaatggagagaatgtagaggatgccagccatgaggaagtggttgaaaaggtgaagaagtcaggaagccgtgtcatgttcctgctggtggacaaagaaactgacaagcgtcatgttgagcagaagatacaattcaaaagagaaacagccagtttgaaactgttaccccaccagccccgaattgtggagatgaagaaaggaagcaatggctatggtttctatctgagggcaggctcagaacagaaaggtcaaatcatcaaggacatagattctggaagtccagcagaggaggctggcttgaagaacaatgatctggtagttgctgtcaacggcgagtctgtggaaaccctggatcatgacagtgtggtagaaatgattagaaagggtggagatcagacttcactgttggtggtagacaaagagacggacaacatgtacagactggctcatttttctccatttctctactatcaaagtcaagaactgcccaatggctctgtcaaggaggctccagctcctactcccacttctctggaagtctcaagtccaccagatactacagaggaagtagatcataagcctaaactctgcaggctggctaaaggtgaaaatggctatggctttcacttaaatgcgattcggggtctgccaggctcattcatcaaagaggtacagaagggcggtcctgctgacttggctgggctagaggatgaggatgtcatcattgaagtgaatggggtgaatgtgctagatgaaccctatgagaaggtggtggatagaatccagagcagtgggaagaatgtcacacttctagtctgtggaaagaaggcctatgattatttccaagctaagaaaatccctattgtttcctccctggctgatccacttgacacccctccagattctaaagaaggaatagtggtggagtcaaaccatgactcgcacatggcaaaagaacgggcccacagtacagcctcacattcttcttccaattctgaagatacagagatgtgatgaaaacgaatcctttctcaaggtgagttgtgacctgtttactgtctctttag

SEQ ID NO: 408610 - DNA, 1897 bp, Homo sapiens
ggctcacctgcagagacagaattcctgagtgaacgaacagagcagctcctcttccatctccagaaatgacctccaccttcaacccccgagaatgtaaactgtccaagcaagaagggcaaaactatggcttcttcctgcgaattgagaaggacaccgagggccacctggtccgggtggttgagaagtgtagcccagcagagaaggctggccttcaagatggagacagagttcttaggatcaatggtgtctttgtggacaaagaagaacatatgcaggttgtggatctggtcagaaagagtgggaattcagtgactttactagttctggatggggattcctatgagaaagcagtgaaaacacgggtggacttgaaagagttgggtcaaagtcagaaggagcaaggtttgagtgataatatactttcccctgtgatgaatggaggtgtgcaaacttggacccagccccggctctgctatctcgtgaaggaaggaggcagctatggcttctctctgaaaactgtccaaggtaaaaagggggtgtacatgactgatattacacctcaaggtgtggctatgagagctggagttctggctgatgatcacttgattgaagtgaatggagagaatgtagaggatgccagccatgaggaagtggttgaaaaggtgaagaagtcaggaagccgtgtcatgttcctgctggtggacaaagaaactgacaagcgtcatgttgagcagaagatacaattcaaaagagaaacagccagtttgaaactgttaccccaccagccccgaattgtggagatgaagaaaggaagcaatggctatggtttctatctgagggcaggctcagaacagaaaggtcaaatcatcaaggacatagattctggaagtccagcagaggaggctggcttgaagaacaatgatctggtagttgctgtcaacggcgagtctgtggaaaccctggatcatgacagtgtggtagaaatgattagaaagggtggagatcagacttcactgttggtggtagacaaagagacggacaacatgtacagactggctcatttttctccatttctctactatcaaagtcaagaactgcccaatggctctgtcaaggaggctccagctcctactcccacttctctggaagtctcaagtccaccagatactacagaggaagtagatcataagcctaaactctgcaggctggctaaaggtgaaaatggctatggctttcacttaaatgcgattcggggtctgccaggctcattcatcaaagaggtacagaagggcggtcctgctgacttggctgggctagaggatgaggatgtcatcattgaagtgaatggggtgaatgtgctagatgaaccctatgagaaggtggtggatagaatccagagcagtgggaagaatgtcacacttctagtctgtggaaagaaggcctatgattatttccaagctaagaaaatccctattgtttcctccctggctgatccacttgacacccctccagattctaaagaaggaatagtggtggagtcaaaccatgactcgcacatggcaaaagaacggctctacacaattgctgtcaactgcatgctgtgaaagaaagaaattctagcccacagtacagcctcacattcttcttccaattctgaagatacagagatgtgatgaaaacgcggctattgcagacggctaatttatgcttaacttaggaagagataaggttccttgagcaccaaagatgattcataactctgtataggtgacagctgcttataaaagcatcttagcagataagcctattaaaattgtgcttttgtaacaatgttgtggttgctagaataaataccgatgcggccgtctttcttatattttaccttcctctcgtcgtc

SEQ ID NO: 408611 - DNA, 1318 bp, Homo sapiens
atgacagcttttacataagacgcgtggctacaagtatgcccactgactttctgggaacttgcagccttttaatatgctattttgccaaaatcaaatgtcagatgcttttagtaacaggattattttcgttaagaccccttcattgttaattgctgggttagtttctggggtgagttctgagcaggaaacgagcctagatagtgtgcttataagcttcctgggatgctggtggaaggggtggtagttgtactcagcatgccttttttatctatttcatcagggctttgggctccagcagaaaatctgttttatttttttaggggacttactgataattttattttttggggttgggggagggtaggtcaaatcatcaaggacatagattctggaagtccagcagaggaggctggcttgaagaacaatgatctggtagttgctgtcaacggcgagtctgtggaaaccctggatcatgacagtgtggtagaaatgattagaaagggtggagatcagacttcactgttggtggtagacaaagagacggacaacatgtacagactgagaactttgatcgaaaaagaagcctgccctcatcatctccttccccgctctccaaatcaagaactgcccaatggctctgtcaaggaggctccagctcctactcccacttctctggaagtctcaagtccaccagatactacagaggaagtagatcataagcctaaactctgcaggctggctaaaggtgaaaatggctatggctttcacttaaatgcgattcggggtctgccaggctcattcatcaaagaggtacagaagggcggtcctgctgacttggctgggctagaggatgaggatgtcatcattgaagtgaatggggtgaatgtgctagatgaaccctatgagaaggtggtggatagaatccagagcagtgggaagaatgtcacacttctagtctgtggaaagaaggcctatgattatttccaagctaagaaaatccctattgtttcctccctggctgatccacttgacacccctccagattctaaagaaggaatagtggtggagtcaaaccatgactcgcacatggcaaaagaacgggcggctattgcagacggctaatttatgcttaacttaggaagagataaggttccttgagcaccaaagatgattcataactctgtataggtgacagctgcttataaaagcatcttagcagataagcctattaaaattgtgcttttgtaacaatgttgtggttgctagaataaataccgatgcggccgtctttcttatattttaccttcctctcgtcgtc

SEQ ID NO: 408612 - DNA, 1305 bp, Homo sapiens
ggctcacctgcagagacagaattcctgagtgaacgaacagagcagctcctcttccatctccagaaatgacctccaccttcaacccccgagaatgtaaactgtccaagcaagaagggcaaaactatggcttcttcctgcgaattgagaaggacaccgagggccacctggtccgggtggttgagaagtgtagcccagcagagaaggctggccttcaagatggagacagagttcttaggatcaatggtgtctttgtggacaaagaagaacatatgcaggttgtggatctggtcagaaagagtgggaattcagtgactttactagttctggatggggattcctatgagaaagcagtgaaaacacgggtggacttgaaagagttgggtcaaagtcagaaggagcaaggtttgagtgataatatactttcccctgtgatgaatggaggtgtgcaaacttggacccagccccggctctgctatctcgtgaaggaaggaggcagctatggcttctctctgaaaactgtccaaggtaaaaagggggtgtacatgactgatattacacctcaaggtgtggctatgagagctggagttctggctgatgatcacttgattgaagtgaatggagagaatgtagaggatgccagccatgaggaagtggttgaaaaggtgaagaagtcaggaagccgtgtcatgttcctgctggtggacaaagaaactgacaagcgtcatgttgagcagaagatacaattcaaaagagaaacagccagtttgaaactgttaccccaccagccccgaattgtggagatgaagaaaggaagcaatggctatggtttctatctgagggcaggctcagaacagaaaggtcaaatcatcaaggacatagattctggaagtccagcagaggaggctggcttgaagaacaatgatctggtagttgctgtcaacggcgagtctgtggaaaccctggatcatgacagtgtggtagaaatgattagaaagggtggagatcagacttcactgttggtggtagacaaagagacggacaacatgtacagactggtaagtaatacaaggccatatattcatgcattaaggctgggcccattcactcatgacctcaacttttgcactgagttaggactttgttcctcaaactggaagaggcataacaatcatcattaaggctaaactgaagctcaactcaaattggtagtgataagagaatgccaaatgattgataaatgagttttaagtccttggtcttaagattttgaaagaatttgtgaatataactgcaggcttactcttg

SEQ ID NO: 408613 - DNA, 354 bp, Homo sapiens
tggtaaacatgttgtcccaactctgcaccgtatctgtagttatctagattcccactggcgcttgggggtctcattcagaaaacaccaatccctaggagagaccaagtgagattgcctaccctttaggaattctgcctgtcagactggcccagggtaaaaccacaggtcagtcaaactcgtcctcttcagccgcccacggtgggctcccgaacctgctttgtggtattcaccacaggaagtcaagggctatcacgtggctccccgactccccaaggaagccgtgagccattcccttccccttcagtctttttacagatacctcctcacatcagaagtcacctgtcctgcccctct

SEQ ID NO: 408614 - DNA, 439 bp, Homo sapiens
ccctaatgaataatgatgttgcctattcacatgattagtttccatctgcaagtcttcattggtgaagtgtctaaatccttttgactgttttaaaagctgagttatttcatatacaaaaattaacacaagatggactagagacttaaatgcaaaacctcaaactataaaaatccctggaagaaaatctggtcattagccttggcaaagaatttatgtctaagtcctcaaaagtgaatgcaacaaaaacaaaattgacaattggtacctaattaaacaaaagagcttcctgcacagcaaaaacaaacaaacaacaataacaaaaactaacggcagagtaaacagatgacctatgggatgagagaaaatatttgcaaaatgtacatttcacaaaagaccaatatctagattttataagaaacttgaacaaatcaaaaaaaaa

SEQ ID NO: 408615 - DNA, 679 bp, Homo sapiens
tgtttttgtgtgtgttatttaaatcttcctccagcctaaaagggttttataaaacagcagctaaggccatggataaacctgtatgtaaggactggagcaaagcgagctggtctatccagactggtctgtgagatttaactctgcagcctcccctgggcacttcagacccagacggccaccttctgccactccagcaaagaataagcgccctgcttccttcaggtctcagaccaggactttatggctcatgcagatttttaaggtcatttttcttcccaaggaagaaacttgcctccagttccttcactgttaggtagcttattttcattttctctattttacaatgaaaagagtgagacctgggaagtccttgatttgcaaggaattagactcacagcattggtaaccctagaaccttcttagggtaacactaagtaccttctagacaacatgtctacctaaatgaaatgggatgtgtttcggaacatttgtctccagtttttttttaatcttgcaccctgccatttaaaaagatgtgtaaagcacatattctcaacatatgcacattgatttataaatcatatatacaaactgttacattattcttcatattagaaaacaaatacaaaatagaacattttaaatggtgatataaaaataaattgaaactgaaattcta

SEQ ID NO: 408616 - DNA, 410 bp, Homo sapiens
  misc_feature (16)..(16): n is a, c, g, or t
  misc_feature (18)..(18): n is a, c, g, or t
  misc_feature (20)..(20): n is a, c, g, or t
  misc_feature (132)..(133): n is a, c, g, or t
  misc_feature (147)..(147): n is a, c, g, or t
  misc_feature (149)..(149): n is a, c, g, or t
  misc_feature (155)..(155): n is a, c, g, or t
  misc_feature (177)..(177): n is a, c, g, or t
  misc_feature (182)..(182): n is a, c, g, or t
  misc_feature (186)..(186): n is a, c, g, or t
  misc_feature (193)..(194): n is a, c, g, or t
  misc_feature (196)..(196): n is a, c, g, or t
  misc_feature (216)..(216): n is a, c, g, or t
  misc_feature (268)..(268): n is a, c, g, or t
  misc_feature (336)..(336): n is a, c, g, or t
  misc_feature (370)..(370): n is a, c, g, or t
  misc_feature (372)..(372): n is a, c, g, or t
  misc_feature (376)..(376): n is a, c, g, or t
  misc_feature (395)..(395): n is a, c, g, or t
  misc_feature (397)..(398): n is a, c, g, or t
  misc_feature (405)..(406): n is a, c, g, or t
  misc_feature (410)..(410): n is a, c, g, or t
ctctcaaaaaaaaaananantgtgtgtagctctgttgtttccgtttgagttgcacaaaatgaccaaataggacctttttatttccttcccattttacttattgcattaaccttagcaagaagtcaagaaggnngggcgtggtggctnangtctgnaatcccagtactttggaaggcngaggnaggnggatcanntnaggtcaggagttcgagaccntcctggccaacgtggtgaaacaccgtctctactaaaaatacaaaaattagcnaggtgtggtggtgggcgcctgtaatcccagctactcgggaggctgaggcacaagaattgcttgaaccnaggaggcagaggttgcagtgagccgagatcacgncnctgnactccagcctgggtgacgngnnagactcnntctn

SEQ ID NO: 408617 - DNA, 1088 bp, Homo sapiens
  misc_feature (20)..(20): n is a, c, g, or t
  misc_feature (83)..(83): n is a, c, g, or t
actaggattgttccgttttnttgtttttctaatattgtactcccagaatgtgtaatacttctttcaatgtgtgaccaagtatntcactcagccaacaacttttccacacctggggttggtggctgttcttactgtccaaatgaagctaaaaagaaaggcatctttcttcccttttaaaattgtgtaaactgcaaattataatataatttgaatttatgattattttccagaagaaatcttgtaaacctgtggatactcattaattcttttgttaatatttatttccatgatagcatcattccagccagacttgctgaaaatctactggtgaggcaaatataatatatataaatatgctacatatatatttataaaatttctagtgggagttctatataaatgtttctttggtattcttcagcctgtgatttaaagttttacaaaaagcagagctttttcctaagttacttttcagttaggtaactgtgtgatccagttcttccagctgcttctataatgaggcacatattaatacagtttttatatggtatctatgaaagagttcacttcatagagaataatacttgagcaaatgtatccaagaaagcaagcaaatgaaaagaaacctatttatggaataaactccagatctgaaattcagtattttagaaaaatgccagctcttcttactgtatttattaaaacttgtaataatgtgatttttttcaaggatattagttcaaattgaaatggtttcacgccacacggaaatctttaagttatttgttgaggtaccatatatttagggtgctaggggcaagtaatgttaatatgtgcaataggaactactggtttgaatgtgtaaatgggtgatctctctgagtcctggcaacatccagcaaaactactgcttattctccaaagaatattgggagctctcaatcctcggtgatatgggaaagagaactgagtatttgccctatgactgagctttctataggaattttattaaagaatgtttaattttgttgtccttcttaatgttctcagtcaaataaatgagtgagctggtttcggctgctcttgga

SEQ ID NO: 408618 - DNA, 721 bp, Homo sapiens
cgaccacgcgtccgcgaccacgcgtccgataaatgtttctttggtattcttcagcctgtgatttaaagttttacaaaaagcagagctttttcctaagttacttttcagttaggtaactgtgtgatccagttcttccagctgcttctataatgaggcacatattaatacagtttttatatggtatctatgaaagagttcacttcatagagaataatacttgagcaaatgtatccaagaaagcaagcaaatgaaaagaaacctatttatggaataaactccagatctgaaattcagtattttagaaaaatgccagctcttcttactgtatttattaaaacttgtaataatgtgatttttttcaaggatattagttcaaattgaaatggtttcacgccacacggaaatctttaagttatttgttgaggtaccatatatttagggtgctaggggcaagtaatgttaatatgtgcaataggaactactggtttgaatgtgtaaatgggtgatctctctgagtcctggcaacatccagcaaaactactgcttattctccaaagaatattgggagctctcaatcctcggtgatatgggaaagagaactgagtatttgccctatgactgagctttctataggaattttattaaagaatgtttaattttgttgtccttcttaatgttctcagtcaaataaatgagtgagctggtttcggctgctcttgga

SEQ ID NO: 408619 - DNA, 345 bp, Homo sapiens
gggagagaagattcagtcgtccatttggagggaggaatcccttcctcccggtgatccttactcatattctagccaccaaccacggttagtgcttgcggattgccgtgcagggtaggtttcgaatctgggacagcggatggtgaacgttacagtgagagtcatttggaagatgccttagggttggccggtacgtgaccttttgggtgatggcatggagggccagctaaaagaggtactgtttgcatagtgtagggaaacaggaaaaaggacggagaggcgggtctgtggtttcaggttaaattactagagcttttgcagaagatgggcgggcaggagcaaactcga

SEQ ID NO: 408620 - DNA, 497 bp, Homo sapiens
cgggctccagccgggctgaccgggtgtctgtaaaactctgcacctgctcaggccaggggcctctgggccgaacacaccaccccgcccagtgcccactggacccggccacaggcccatcacgtgtccaagccaggctggccatcacaggggccactcacacacccgcaccacctgctggggacttaggaccgtgctctcccttcactcaaacccaccctgtgccctcccccaactcacttcatgtctggtcccagagcacccctcttgctggggtcgcacctgcttagcccgcagggctggtttccgtggggggtgggttcagggggaagcagaggaggggccgcgagaggggtgagcgtggccctggccccgcagtggagacccaccggacacacacacgggtggacggagcgaggcagccaccgaccctgccggcgggcgggcctaggagagccaggcgaagtccttgtcagggcctctggggggctgcgcggccg

SEQ ID NO: 408621 - DNA, 592 bp, Homo sapiens
tcactctcttcctagggtcctccttcctctgtattagctacactctcagatcctgtcctgcccccagcagctccacagggcttccggttcagaccggaagaacaggagaacagaaggccacgtgcttctcttccaaatgcccaggaggaaaaaggctaattaagtctcattggtcccaccaggtcacatgtacaggctttagccaatcactgtggtcagaggtaggctatgttttgattggttaggtctgagtcacgtgatgagttccaatacaagcacaggaaggaagataaggccagaggatgttctctagagaaaaagtggggctatgttacctgaaccagtcagcacacatgttcagatattctgatcaagttcagaacaacagcctgctttgtctaatgcttgcatttcattttgaaaagttgttatacattggcagcctctgagctgaactactgagggtgtggcctactcatttgcagagtgcattcaaaagattaaaattccagaaaaccctggagaggccaggccattgagaggtcctctaaacccacccacaagccggtaacagtattaagatgaaaaaaaa

SEQ ID NO: 408622 - DNA, 443 bp, Homo sapiens
aaagttgatttcctctgctggtgagccatacatcactgacatccctgtctgtgctgcttgtctgtgacagaatgacaggtgtcatttgtcactggggcttgcggaagctgtgggaagagggattgaaattttttttctggaagggctcagtgtctgccagatcattaaaaagtggggctatgttacctgaaccagtcagcacacatgttcagatattctgatcaagttcagaacaacagcctgctttgtctaatgcttgcatttcattttgaaaagttgttatacattggcagcctctgagctgaactactgagggtgtggcctactcatttgcagagtgcattcaaaagattaaaattccagaaaaccctggagaggccaggccattgagaggtcctctaaacccacccacaagccggtaacagtattaagatgaaaaaaaa

SEQ ID NO: 408623 - DNA, 368 bp, Homo sapiens
ccctggtgctgtatctgccatcttttcacactgggtgtgacccgaagagacagcctgaggtccgtcctcactcactgtgtttcaggaactgagggtcagctggcagtgggatgaggctggcccccttctccgctttcgttccgggaggcctcccgtagagcggtaggggctcgagatggcatttcgtttggggcacgagctggtccgggaggtctgggatctctggttctgacctctgggcacctgctgcagctgtggctgaggcccagaaatgtgaagggcctccatccactccagtagtgaccccaacgtggggttcaatgtggaggggggaggggctgctgcggcagctgcaggagcagaagtgc

SEQ ID NO: 408624 - DNA, 3691 bp, Homo sapiens
taggcggtgcatcccgttcgcgcctggggctgtggtcttcccgcgcctgaggcggcggcggcaggagctgaggggagttgtagggaactgaggggagctgctgtgtcccccgcctcctcctccccatttccgcgctcccgggaccatgtccgcgctggcgggtgaagatgtctggaggtgtccaggctgtggggaccacattgctccaagccagatatggtacaggactgtcaacgaaacctggcacggctcttgcttccggtgttcagaatgccaggattccctcaccaactggtactatgagaaggatgggaagctctactgccccaaggactactgggggaagtttggggagttctgtcatgggtgctccctgctgatgacagggccttttatggtggctggggagttcaagtaccacccagagtgctttgcctgtatgagctgcaaggtgatcattgaggatggggatgcatatgcactggtgcagcatgccaccctctactgtgggaagtgccacaatgaggtggtgctggcacccatgtttgagagactctccacagagtctgttcaggagcagctgccctactctgtcacgctcatctccatgccggccaccactgaaggcaggcggggcttctccgtgtccgtggagagtgcctgctccaactacgccaccactgtgcaagtgaaagaggtcaaccggatgcacatcagtcccaacaatcgaaacgccatccaccctggggaccgcatcctggagatcaatgggacccccgtccgcacacttcgagtggaggaggtggaggatgcaattagccagacgagccagacacttcagctgttgattgaacatgaccccgtctcccaacgcctggaccagctgcggctggaggcccggctcgctcctcacatgcagaatgccggacacccccacgccctcagcaccctggacaccaaggagaatctggaggggacactgaggagacgttccctaaggcgcagtaacagtatctccaagtcccctggccccagctccccaaaggagcccctgctgttcagccgtgacatcagccgctcagaatcccttcgttgttccagcagctattcacagcagatcttccggccctgtgacctaatccatggggaggtcctggggaagggcttctttgggcaggctatcaaggtgacacacaaagccacgggcaaagtgatggtcatgaaagagttaattcgatgtgatgaggagacccagaaaacttttctgactgaggtgaaagtgatgcgcagcctggaccaccccaatgtgctcaagttcattggtgtgctgtacaaggataagaagctgaacctgctgacagagtacattgaggggggcacactgaaggactttctgcgcagtatggatccgttcccctggcagcagaaggtcaggtttgccaaaggaatcgcctccggaatggcctatttgcactctatgtgcatcatccaccgggatctgaactcgcacaactgcctcatcaagttggacaagactgtggtggtggcagactttgggctgtcacggctcatagtggaagagaggaaaagggcccccatggagaaggccaccaccaagaaacgcaccttgcgcaagaacgaccgcaagaagcgctacacggtggtgggaaacccctactggatggcccctgagatgctgaacggaaagagctatgatgagacggtggatatcttctcctttgggatcgttctctgtgagatcattgggcaggtgtatgcagatcctgactgccttccccgaacactggactttggcctcaacgtgaagcttttctgggagaagtttgttcccacagattgtcccccggccttcttcccgctggccgccatctgctgcagactggagcctgagagcagaccagcattctcgaaattggaggactcctttgaggccctctccctgtacctgggggagctgggcatcccgctgcctgcagagctggaggagttggaccacactgtgagcatgcagtacggcctgacccgggactcacctccctagccctggcccagccccctgcaggggggtgttctacagccagcattgcccctctgtgccccattcctgctgtgagcagggccgtccgggcttcctgtggattggcggaatgtttagaagcagaacaagccattcctattacctccccaggaggcaagtgggcgcagcaccagggaaatgtatctccacaggttctggggcctagttactgtctgtaaatccaatacttgcctgaaagctgtgaagaagaaaaaaacccctggcctttgggccaggaggaatctgttactcgaatccacccaggaactccctggcagtggattgtgggaggctcttgcttacactaatcagcgtgacctggacctgctgggcaggatcccagggtgaacctgcctgtgaactctgaagtcactagtccagctgggtgcaggaggacttcaagtgtgtggacgaaagaaagactgatggctcaaagggtgtgaaaaagtcagtgatgctccccctttctactccagatcctgtccttcctggagcaaggttgagggagtaggttttgaagagtcccttaatatgtggtggaacaggccaggagttagagaaagggctggcttctgtttacctgctcactggctctagccagcccagggaccacatcaatgtgagaggaagcctccacctcatgttttcaaacttaatactggagactggctgagaacttacggacaacatcctttctgtctgaaacaaacagtcacaagcacaggaagaggctgggggactagaaagaggccctgccctctagaaagctcagatcttggcttctgttactcatactcgggtgggctccttagtcagatgcctaaaacattttgcctaaagctcgatgggttctggaggacagtgtggcttgtcacaggcctagagtctgagggaggggagtgggagtctcagcaatctcttggtcttggcttcatggcaaccactgctcacccttcaacatgcctggtttaggcagcagcttgggctgggaagaggtggtggcagagtctcaaagctgagatgctgagagagatagctccctgagctgggccatctgacttctacctcccatgtttgctctcccaactcattagctcctgggcagcatcctcctgagccacatgtgcaggtactggaaaacctccatcttggctcccagagctctaggaactcttcatcacaactagatttgcctcttctaagtgtctatgagcttgcaccatatttaataaattgggaatgggtttggggtattaatgcaatgtgtggtggttgtattggagcagggggaattgataaaggagagtggttgctgttaatattatcttatctattgggtggtatgtgaaatattgtacatagacctgatgagttgtgggaccagatgtcatctctggtcagagtttacttgctatatagactgtacttatgtgtgaagtttgcaagcttgctttagggctgagccctggactcccagcagcagcacagttcagcattgtgtggctggttgtttcctggctgtccccagcaagtgtaggagtggtgggcctgaactgggccattgatcagactaaataaattaagcagttaaca

SEQ ID NO: 408625 - DNA, 3806 bp, Homo sapiens
ggcccctgctcaagaatgccagtgtgtgtgtagcctccacagagaggtcgttttctcggagtccagaggggccgcctgagcttctgagaactagggaggagccatcccagccatgagcccctgtgggaatctgctgggggccaagtggcctggagtcctcaggctcccgcagctgctccggagggagaggtgagctcagggcagcctgcctgcagccagaggtgccgggagccccgggcctgtcatggtggccatctacagccggcctgaggcagtcacagacggatttgcagctgagcctgtctatctggtgtgggaagaagatggggagttacttgtcagtcccggcttacttcacctccagagacctgtttcggtgttcagaatgccaggattccctcaccaactggtactatgagaaggatgggaagctctactgccccaaggactactgggggaagtttggggagttctgtcatgggtgctccctgctgatgacagggccttttatggtggctggggagttcaagtaccacccagagtgctttgcctgtatgagctgcaaggtgatcattgaggatggggatgcatatgcactggtgcagcatgccaccctctactgtgggaagtgccacaatgaggtggtgctggcacccatgtttgagagactctccacagagtctgttcaggagcagctgccctactctgtcacgctcatctccatgccggccaccactgaaggcaggcggggcttctccgtgtccgtggagagtgcctgctccaactacgccaccactgtgcaagtgaaagaggtcaaccggatgcacatcagtcccaacaatcgaaacgccatccaccctggggaccgcatcctggagatcaatgggacccccgtccgcacacttcgagtggaggaggtggaggatgcaattagccagacgagccagacacttcagctgttgattgaacatgaccccgtctcccaacgcctggaccagctgcggctggaggcccggctcgctcctcacatgcagaatgccggacacccccacgccctcagcaccctggacaccaaggagaatctggaggggacactgaggagacgttccctaaggcgcagtaacagtatctccaagtcccctggccccagctccccaaaggagcccctgctgttcagccgtgacatcagccgctcagaatcccttcgttgttccagcagctattcacagcagatcttccggccctgtgacctaatccatggggaggtcctggggaagggcttctttgggcaggctatcaaggtgacacacaaagccacgggcaaagtgatggtcatgaaagagttaattcgatgtgatgaggagacccagaaaacttttctgactgaggtgaaagtgatgcgcagcctggaccaccccaatgtgctcaagttcattggtgtgctgtacaaggataagaagctgaacctgctgacagagtacattgaggggggcacactgaaggactttctgcgcagtatggatccgttcccctggcagcagaaggtcaggtttgccaaaggaatcgcctccggaatggcctatttgcactctatgtgcatcatccaccgggatctgaactcgcacaactgcctcatcaagttggacaagactgtggtggtggcagactttgggctgtcacggctcatagtggaagagaggaaaagggcccccatggagaaggccaccaccaagaaacgcaccttgcgcaagaacgaccgcaagaagcgctacacggtggtgggaaacccctactggatggcccctgagatgctgaacggaaagagctatgatgagacggtggatatcttctcctttgggatcgttctctgtgagatcattgggcaggtgtatgcagatcctgactgccttccccgaacactggactttggcctcaacgtgaagcttttctgggagaagtttgttcccacagattgtcccccggccttcttcccgctggccgccatctgctgcagactggagcctgagagcagaccagcattctcgaaattggaggactcctttgaggccctctccctgtacctgggggagctgggcatcccgctgcctgcagagctggaggagttggaccacactgtgagcatgcagtacggcctgacccgggactcacctccctagccctggcccagccccctgcaggggggtgttctacagccagcattgcccctctgtgccccattcctgctgtgagcagggccgtccgggcttcctgtggattggcggaatgtttagaagcagaacaagccattcctattacctccccaggaggcaagtgggcgcagcaccagggaaatgtatctccacaggttctggggcctagttactgtctgtaaatccaatacttgcctgaaagctgtgaagaagaaaaaaacccctggcctttgggccaggaggaatctgttactcgaatccacccaggaactccctggcagtggattgtgggaggctcttgcttacactaatcagcgtgacctggacctgctgggcaggatcccagggtgaacctgcctgtgaactctgaagtcactagtccagctgggtgcaggaggacttcaagtgtgtggacgaaagaaagactgatggctcaaagggtgtgaaaaagtcagtgatgctccccctttctactccagatcctgtccttcctggagcaaggttgagggagtaggttttgaagagtcccttaatatgtggtggaacaggccaggagttagagaaagggctggcttctgtttacctgctcactggctctagccagcccagggaccacatcaatgtgagaggaagcctccacctcatgttttcaaacttaatactggagactggctgagaacttacggacaacatcctttctgtctgaaacaaacagtcacaagcacaggaagaggctgggggactagaaagaggccctgccctctagaaagctcagatcttggcttctgttactcatactcgggtgggctccttagtcagatgcctaaaacattttgcctaaagctcgatgggttctggaggacagtgtggcttgtcacaggcctagagtctgagggaggggagtgggagtctcagcaatctcttggtcttggcttcatggcaaccactgctcacccttcaacatgcctggtttaggcagcagcttgggctgggaagaggtggtggcagagtctcaaagctgagatgctgagagagatagctccctgagctgggccatctgacttctacctcccatgtttgctctcccaactcattagctcctgggcagcatcctcctgagccacatgtgcaggtactggaaaacctccatcttggctcccagagctctaggaactcttcatcacaactagatttgcctcttctaagtgtctatgagcttgcaccatatttaataaattgggaatgggtttggggtattaatgcaatgtgtggtggttgtattggagcagggggaattgataaaggagagtggttgctgttaatattatcttatctattgggtggtatgtgaaatattgtacatagacctgatgagttgtgggaccagatgtcatctctggtcagagtttacttgctatatagactgtacttatgtgtgaagtttgcaagcttgctttagggctgagccctggactcccagcagcagcacagttcagcattgtgtggctggttgtttcctggctgtccccagcaagtgtaggagtggtgggcctgaactgggccattgatcagactaaataaattaagcagttaaca

SEQ ID NO: 408626 - DNA, 2880 bp, Homo sapiens
ggcccctgctcaagaatgccagtgtgtgtgtagcctccacagagaggtcgttttctcggagtccagaggggccgcctgagcttctgagaactagggaggagccatcccagccatgagcccctgtgggaatctgctgggggccaagtggcctggagtcctcaggctcccgcagctgctccggagggagaggtgagctcagggcagcctgcctgcagccagaggtgccgggagccccgggcctgtcatggtggccatctacagccggcctgaggcagtcacagacggatttgcagctgagcctgtctatctggtgtgggaagaagatggggagttacttgtcagtcccggcttacttcacctccagagacctgtttcggtgttcagaatgccaggattccctcaccaactggtactatgagaaggatgggaagctctactgccccaaggactactgggggaagtttggggagttctgtcatgggtgctccctgctgatgacagggccttttatggtggctggggagttcaagtaccacccagagtgctttgcctgtatgagctgcaaggtgatcattgaggatggggatgcatatgcactggtgcagcatgccaccctctactgtgggaagtgccacaatgaggtggtgctggcacccatgtttgagagactctccacagagtctgttcaggagcagctgccctactctgtcacgctcatctccatgccggccaccactgaaggcaggcggggcttctccgtgtccgtggagagtgcctgctccaactacgccaccactgtgcaagtgaaagaggtcaaccggatgcacatcagtcccaacaatcgaaacgccatccaccctggggaccgcatcctggagatcaatgggacccccgtccgcacacttcgagtggaggaggtggaggatgcaattagccagacgagccagacacttcagctgttgattgaacatgaccccgtctcccaacgcctggaccagctgcggctggaggcccggctcgctcctcacatgcagaatgccggacacccccacgccctcagcaccctggacaccaaggagaatctggaggggacactgaggagacgttccctaaggcgcagtaacagtatctccaagtcccctggccccagctccccaaaggagcccctgctgttcagccgtgacatcagccgctcagaatcccttcgttgttccagcagctattcacagcagatcttccggccctgtgacctaatccatggggaggtcctggggaagggcttctttgggcaggctatcaaggtgacacacaaagccacgggcaaagtgatggtcatgaaagagttaattcgatgtgatgaggagacccagaaaacttttctgactgaggtgaaagtgatgcgcagcctggaccaccccaatgtgctcaagttcattggtgtgctgtacaaggataagaagctgaacctgctgacagagtacattgaggggggcacactgaaggactttctgcgcagtatggatccgttcccctggcagcagaaggtcaggtttgccaaaggaatcgcctccggaatggcctatttgcactctatgtgcatcatccaccgggatctgaactcgcacaactgcctcatcaagttggacaagactgtggtggtggcagactttgggctgtcacggctcatagtggaagagaggaaaagggcccccatggagaaggccaccaccaagaaacgcaccttgcgcaagaacgaccgcaagaagcgctacacggtggtgggaaacccctactggatggcccctgagatgctgaacggaaagagctatgatgagacggtggatatcttctcctttgggatcgttctctgtgagatcattgggcaggtgtatgcagatcctgactgccttccccgaacactggactttggcctcaacgtgaagcttttctgggagaagtttgttcccacagattgtcccccggccttcttcccgctggccgccatctgctgcagactggagcctgagagcagagccccccccggggccgcaggagagggcccgggctgcgcggatgatgagggcccagtgaggcgccaagggaaggtcaccatcaagtatgaccccaaggagctacggaagcacctcaacctagaggagtggatcctggagcagctcacgcgcctctacgactgccaggaagaggagatctcagaactagagattgacgtggatgagctcctggacatggagagtgacgatgcctgggcttccagggtcaaggagctgctggttgactgttacaaacccacagaggccttcatctctggcctgctggacaagatccgggccatgcagaagctgagcacaccccagaagaagtgagggtccccgacccaggcgaacggtggctcccataggacaatcgctaccccccgacctcgtagcaacagcaataccgggggaccctgcggccaggcctggttccatgagcagggctcctcgtgcccctggcccaggggtctcttcccctgccccctcagttttccacttttggatttttttattgttattaaactgatgggactttgtgtttttatattgactctgcggcacgggccctttaataaagcgaggtagggtacgcctttggtgcagctcaaaaaaaaaaaaaaaatgatttccagcggtccacattagagttgaaattttctggtgggagaatctataccttgttcctttataggccaaggaccgcagtccttcagtaacaccagtgtaaaagcttgaggagaaattgtgaagctacacagtatttgttttctaatacctcttgtcattctaaatatctttaatttattaaaaaatatatatatacagt

SEQ ID NO: 408627 - DNA, 820 bp, Homo sapiens
tgcttcctccccagggccaggtttgagaacatccccatgaagtcctgacctgtcttttatcctaccaggacaagactgtggtggtggcagactttgggctgtcacggctcatagtggaagagaggaaaagggcccccatggagaaggccaccaccaagaaacgcaccttgcgcaagaacgaccgcaagaagcgctacacggtggtgggaaacccctactggatggcccctgagatgctgaacggaaagagctatgatgagacggtggatatcttctcctttgggatcgttctctgtgagatcattgggcaggtgtatgcagatcctgactgccttccccgaacactggactttggcctcaacgtgaagcttttctgggagaagtttgttcccacagattgtcccccggccttcttcccgctggccgccatctgctgcagactggagcctgagagcaggttggtatcctgcctttttctcccagctcacagggtcctgggacgtttgcctctgtctaaggccacccctgagccctctgcaagcacaggggtgagagaagccttgaggtcaagaatgtggctgtcaacccctgagccatctgacaacacatatgtacaggttggagaagagagaggtaaagacatagcagcaagtaatctggataggacacagaaacacagccattaaaagaaagtttaaaagaaggaaattcacccaaaccatttgaatacagtaagtgtattcatctttcgatattcccctgtccatatctacacatatacttttttttatagtaaatagttctgtattttgccctgcat

SEQ ID NO: 408628 - DNA, 437 bp, Homo sapiens
cttccgagacggggtttcaccttggtgaccaggctggtctcgagctcctgacctcaggtgttcagaatgccaggattccctcaccaactggtactatgagaaggatgggaagctctactgccccaaggactactgggggaagtttggggagttctgtcatgggtgctccctgctgatgacagggccttttatggtgagtgaatcccttcatatctgcccctcttggtcttcagagtccattgacagtgcttccagttccctgtggcctgttaatcttttagtctttccatcagccagggcatctccctttatttattcattcattcaactagcaggtatcaattgagcacctactaagtgaaaggtaagatccttccctcaaagacttaatagttgaacgttgggagtgggaggagaggcaggcagagaggagacac

SEQ ID NO: 408629 - DNA, 5313 bp, Homo sapiens
ggcccctgctcaagaatgccagtgtgtgtgtagcctccacagagaggtcgttttctcggagtccagaggggccgcctgagcttctgagaactagggaggagccatcccagccatgagcccctgtgggaatctgctgggggccaagtggcctggagtcctcaggctcccgcagctgctccggagggagaggtgagctcagggcagcctgcctgcagccagaggtgccgggagccccgggcctgtcatggtggccatctacagccggcctgaggcagtcacagacggatttgcagctgagcctgtctatctggtgtgggaagaagatggggagttacttgtcagtcccggcttacttcacctccagagacctgtttcggtgttcagaatgccaggattccctcaccaactggtactatgagaaggatgggaagctctactgccccaaggactactgggggaagtttggggagttctgtcatgggtgctccctgctgatgacagggccttttatggtggctggggagttcaagtaccacccagagtgctttgcctgtatgagctgcaaggtgatcattgaggatggggatgcatatgcactggtgcagcatgccaccctctactgtgggaagtgccacaatgaggtggtgctggcacccatgtttgagagactctccacagagtctgttcaggagcagctgccctactctgtcacgctcatctccatgccggccaccactgaaggcaggcggggcttctccgtgtccgtggagagtgcctgctccaactacgccaccactgtgcaagtgaaagaggtcaaccggatgcacatcagtcccaacaatcgaaacgccatccaccctggggaccgcatcctggagatcaatgggacccccgtccgcacacttcgagtggaggaggtggaggatgcaattagccagacgagccagacacttcagctgttgattgaacatgaccccgtctcccaacgcctggaccagctgcggctggaggcccggctcgctcctcacatgcagaatgccggacacccccacgccctcagcaccctggacaccaaggagaatctggaggggacactgaggagacgttccctaaggcgcagtaacagtatctccaagtcccctggccccagctccccaaaggagcccctgctgttcagccgtgacatcagccgctcagaatcccttcgttgttccagcagctattcacagcagatcttccggccctgtgacctaatccatggggaggtcctggggaagggcttctttgggcaggctatcaaggtgacacacaaagccacgggcaaagtgatggtcatgaaagagttaattcgatgtgatgaggagacccagaaaacttttctgactgaggtgaaagtgatgcgcagcctggaccaccccaatgtgctcaagttcattggtgtgctgtacaaggataagaagctgaacctgctgacagagtacattgaggggggcacactgaaggactttctgcgcagtatggatccgttcccctggcagcagaaggtcaggtttgccaaaggaatcgcctccggaatggcctatttgcactctatgtgcatcatccaccgggatctgaactcgcacaactgcctcatcaagttggacaagactgtggtggtggcagactttgggctgtcacggctcatagtggaagagaggaaaagggcccccatggagaaggccaccaccaagaaacgcaccttgcgcaagaacgaccgcaagaagcgctacacggtggtgggaaacccctactggatggcccctgagatgctgaacggaaagagctatgatgagacggtggatatcttctcctttgggatcgttctctgtgagatcattgggcaggtgtatgcagatcctgactgccttccccgaacactggactttggcctcaacgtgaagcttttctgggagaagtttgttcccacagattgtcccccggccttcttcccgctggccgccatctgctgcagactggagcctgagagcagagccccccccggggccgcaggagagggcccgggctgcgcggatgatgagggcccagtgaggcgccaagggaaggtcaccatcaagtatgaccccaaggagctacggaagcacctcaacctagaggagtggatcctggagcagctcacgcgcctctacgactgccaggaagaggagatctcagaactagagattgacgtggatgagctcctggacatggagagtgacgatgcctgggcttccagggtcaaggagctgctggttgactgttacaaacccacagaggccttcatctctggcctgctggacaagatccgggccatgcagaagctgagcacaccccagaagaagtgagggtccccgacccaggcgaacggtggctcccataggacaatcgctaccccccgacctcgtagcaacagcaataccgggggaccctgcggccaggcctggttccatgagcagggctcctcgtgcccctggcccaggggtctcttcccctgccccctcagttttccacttttggatttttttattgttattaaactgatgggactttgtgtttttatattgactctgcggcacgggccctttaataaagcgaggtagggtacgcctttggtgcagctcaaaaaaaaaaaaaaaatgatttccagcggtccacattagagttgaaattttctggtgggagaatctataccttgttcctttataggccaaggaccgcagtccttcagtaacaccagtgtaaaagcttgaggagaaattgtgaagctacacagtatttgttttctaatacctcttgtcattctaaatatctttaatttattaaaaaatatatatatacagtattgaatgcctactgtgtgctaggtacagttctaaacacttgggttacagcagcgaacaaaataaaggtgcttaccctcatagaacatagattctagcatggtatctactgtatcatacagtagatacaataagtaaactatattgaatattagaatgtggcagatgctatggaaaaagagtcaagacaagtaaagacgattgttcagggtaccagttgcaattttaaatatggtcgtcagagcaggcctcactgaggtgacatgacatttaagcataaacatggaggaggaggagtaagcctgagctgtcttaggcttccggggcagccaagccatttccgtggcactaggagcctggtgtttccgattccacctttgataactgcattttctctaagatatgggagggaagtttttctcctattgtttttaagtattaactccagctagtccagccttgttatagtgttacctaatctttatagcaaatatatgaggtaccggtaacattatgcccatttctcacagaggcactactaggtgaaggagtttgcctgacgttatacaaccaggaagtagctgagcctagatcccttccacccaccccatggccctgctcatgttccacctgcctctaatttacctcttttccttctagaccagcattctcgaaattggaggactcctttgaggccctctccctgtacctgggggagctgggcatcccgctgcctgcagagctggaggagttggaccacactgtgagcatgcagtacggcctgacccgggactcacctccctagccctggcccagccccctgcaggggggtgttctacagccagcattgcccctctgtgccccattcctgctgtgagcagggccgtccgggcttcctgtggattggcggaatgtttagaagcagaacaagccattcctattacctccccaggaggcaagtgggcgcagcaccagggaaatgtatctccacaggttctggggcctagttactgtctgtaaatccaatacttgcctgaaagctgtgaagaagaaaaaaacccctggcctttgggccaggaggaatctgttactcgaatccacccaggaactccctggcagtggattgtgggaggctcttgcttacactaatcagcgtgacctggacctgctgggcaggatcccagggtgaacctgcctgtgaactctgaagtcactagtccagctgggtgcaggaggacttcaagtgtgtggacgaaagaaagactgatggctcaaagggtgtgaaaaagtcagtgatgctccccctttctactccagatcctgtccttcctggagcaaggttgagggagtaggttttgaagagtcccttaatatgtggtggaacaggccaggagttagagaaagggctggcttctgtttacctgctcactggctctagccagcccagggaccacatcaatgtgagaggaagcctccacctcatgttttcaaacttaatactggagactggctgagaacttacggacaacatcctttctgtctgaaacaaacagtcacaagcacaggaagaggctgggggactagaaagaggccctgccctctagaaagctcagatcttggcttctgttactcatactcgggtgggctccttagtcagatgcctaaaacattttgcctaaagctcgatgggttctggaggacagtgtggcttgtcacaggcctagagtctgagggaggggagtgggagtctcagcaatctcttggtcttggcttcatggcaaccactgctcacccttcaacatgcctggtttaggcagcagcttgggctgggaagaggtggtggcagagtctcaaagctgagatgctgagagagatagctccctgagctgggccatctgacttctacctcccatgtttgctctcccaactcattagctcctgggcagcatcctcctgagccacatgtgcaggtactggaaaacctccatcttggctcccagagctctaggaactcttcatcacaactagatttgcctcttctaagtgtctatgagcttgcaccatatttaataaattgggaatgggtttggggtattaatgcaatgtgtggtggttgtattggagcagggggaattgataaaggagagtggttgctgttaatattatcttatctattgggtggtatgtgaaatattgtacatagacctgatgagttgtgggaccagatgtcatctctggtcagagtttacttgctatatagactgtacttatgtgtgaagtttgcaagcttgctttagggctgagccctggactcccagcagcagcacagttcagcattgtgtggctggttgtttcctggctgtccccagcaagtgtaggagtggtgggcctgaactgggccattgatcagactaaataaattaagcagttaaca

SEQ ID NO: 408630 - DNA, 5644 bp, Homo sapiens
ggcccctgctcaagaatgccagtgtgtgtgtagcctccacagagaggtcgttttctcggagtccagaggggccgcctgagcttctgagaactagggaggagccatcccagccatgagcccctgtgggaatctgctgggggccaagtggcctggagtcctcaggctcccgcagctgctccggagggagaggtgagctcagggcagcctgcctgcagccagaggtgccgggagccccgggcctgtcatggtggccatctacagccggcctgaggcagtcacagacggatttgcagctgagcctgtctatctggtgtgggaagaagatggggagttacttgtcagtcccggcttacttcacctccagagacctgtttcggtgttcagaatgccaggattccctcaccaactggtactatgagaaggatgggaagctctactgccccaaggactactgggggaagtttggggagttctgtcatgggtgctccctgctgatgacagggccttttatggtggctggggagttcaagtaccacccagagtgctttgcctgtatgagctgcaaggtgatcattgaggatggggatgcatatgcactggtgcagcatgccaccctctactgtgggaagtgccacaatgaggtggtgctggcacccatgtttgagagactctccacagagtctgttcaggagcagctgccctactctgtcacgctcatctccatgccggccaccactgaaggcaggcggggcttctccgtgtccgtggagagtgcctgctccaactacgccaccactgtgcaagtgaaagaggtcaaccggatgcacatcagtcccaacaatcgaaacgccatccaccctggggaccgcatcctggagatcaatgggacccccgtccgcacacttcgagtggaggaggtggaggatgcaattagccagacgagccagacacttcagctgttgattgaacatgaccccgtctcccaacgcctggaccagctgcggctggaggcccggctcgctcctcacatgcagaatgccggacacccccacgccctcagcaccctggacaccaaggagaatctggaggggacactgaggagacgttccctaaggcgcagtaacagtatctccaagtcccctggccccagctccccaaaggagcccctgctgttcagccgtgacatcagccgctcagaatcccttcgttgttccagcagctattcacagcagatcttccggccctgtgacctaatccatggggaggtcctggggaagggcttctttgggcaggctatcaaggtgacacacaaagccacgggcaaagtgatggtcatgaaagagttaattcgatgtgatgaggagacccagaaaacttttctgactgaggtgaaagtgatgcgcagcctggaccaccccaatgtgctcaagttcattggtgtgctgtacaaggataagaagctgaacctgctgacagagtacattgaggggggcacactgaaggactttctgcgcagtatggatccgttcccctggcagcagaaggtcaggtttgccaaaggaatcgcctccggaatggcctatttgcactctatgtgcatcatccaccgggatctgaactcgcacaactgcctcatcaagttggacaagactgtggtggtggcagactttgggctgtcacggctcatagtggaagagaggaaaagggcccccatggagaaggccaccaccaagaaacgcaccttgcgcaagaacgaccgcaagaagcgctacacggtggtgggaaacccctactggatggcccctgagatgctgaacggaaagagctatgatgagacggtggatatcttctcctttgggatcgttctctgtgagatcattgggcaggtgtatgcagatcctgactgccttccccgaacactggactttggcctcaacattctcctcacccccaactccaccctcccaggataaccagttgggacataatctttatttaaaaatggtttccggatagagaaagcgcttcggcggcggcagccccggcggcggccgcaggggacaaagggcgggcggatcggcggggagggggcggggcgcgaccaggccaggcccgggggctccgcatgctgcagctgcccccgggcgcccccgccgccgccctcgccgcggagccggcgagctaacctgagccagccggcgggcgtcacggaggcggcggcacaaggaggggccccacgcgcgcacgtggccccggaggccgccgtggcggacagcggcaccgcggggggcgcggcgttggcggccccggccccggcccccaggccaggcagtggcggccaaggaccacgcatctactttcagagccccccccggggccgcaggagagggcccgggctgcgcggatgatgagggcccagtgaggcgccaagggaaggtcaccatcaagtatgaccccaaggagctacggaagcacctcaacctagaggagtggatcctggagcagctcacgcgcctctacgactgccaggaagaggagatctcagaactagagattgacgtggatgagctcctggacatggagagtgacgatgcctgggcttccagggtcaaggagctgctggttgactgttacaaacccacagaggccttcatctctggcctgctggacaagatccgggccatgcagaagctgagcacaccccagaagaagtgagggtccccgacccaggcgaacggtggctcccataggacaatcgctaccccccgacctcgtagcaacagcaataccgggggaccctgcggccaggcctggttccatgagcagggctcctcgtgcccctggcccaggggtctcttcccctgccccctcagttttccacttttggatttttttattgttattaaactgatgggactttgtgtttttatattgactctgcggcacgggccctttaataaagcgaggtagggtacgcctttggtgcagctcaaaaaaaaaaaaaaaatgatttccagcggtccacattagagttgaaattttctggtgggagaatctataccttgttcctttataggccaaggaccgcagtccttcagtaacaccagtgtaaaagcttgaggagaaattgtgaagctacacagtatttgttttctaatacctcttgtcattctaaatatctttaatttattaaaaaatatatatatacagtattgaatgcctactgtgtgctaggtacagttctaaacacttgggttacagcagcgaacaaaataaaggtgcttaccctcatagaacatagattctagcatggtatctactgtatcatacagtagatacaataagtaaactatattgaatattagaatgtggcagatgctatggaaaaagagtcaagacaagtaaagacgattgttcagggtaccagttgcaattttaaatatggtcgtcagagcaggcctcactgaggtgacatgacatttaagcataaacatggaggaggaggagtaagcctgagctgtcttaggcttccggggcagccaagccatttccgtggcactaggagcctggtgtttccgattccacctttgataactgcattttctctaagatatgggagggaagtttttctcctattgtttttaagtattaactccagctagtccagccttgttatagtgttacctaatctttatagcaaatatatgaggtaccggtaacattatgcccatttctcacagaggcactactaggtgaaggagtttgcctgacgttatacaaccaggaagtagctgagcctagatcccttccacccaccccatggccctgctcatgttccacctgcctctaatttacctcttttccttctagaccagcattctcgaaattggaggactcctttgaggccctctccctgtacctgggggagctgggcatcccgctgcctgcagagctggaggagttggaccacactgtgagcatgcagtacggcctgacccgggactcacctccctagccctggcccagccccctgcaggggggtgttctacagccagcattgcccctctgtgccccattcctgctgtgagcagggccgtccgggcttcctgtggattggcggaatgtttagaagcagaacaagccattcctattacctccccaggaggcaagtgggcgcagcaccagggaaatgtatctccacaggttctggggcctagttactgtctgtaaatccaatacttgcctgaaagctgtgaagaagaaaaaaacccctggcctttgggccaggaggaatctgttactcgaatccacccaggaactccctggcagtggattgtgggaggctcttgcttacactaatcagcgtgacctggacctgctgggcaggatcccagggtgaacctgcctgtgaactctgaagtcactagtccagctgggtgcaggaggacttcaagtgtgtggacgaaagaaagactgatggctcaaagggtgtgaaaaagtcagtgatgctccccctttctactccagatcctgtccttcctggagcaaggttgagggagtaggttttgaagagtcccttaatatgtggtggaacaggccaggagttagagaaagggctggcttctgtttacctgctcactggctctagccagcccagggaccacatcaatgtgagaggaagcctccacctcatgttttcaaacttaatactggagactggctgagaacttacggacaacatcctttctgtctgaaacaaacagtcacaagcacaggaagaggctgggggactagaaagaggccctgccctctagaaagctcagatcttggcttctgttactcatactcgggtgggctccttagtcagatgcctaaaacattttgcctaaagctcgatgggttctggaggacagtgtggcttgtcacaggcctagagtctgagggaggggagtgggagtctcagcaatctcttggtcttggcttcatggcaaccactgctcacccttcaacatgcctggtttaggcagcagcttgggctgggaagaggtggtggcagagtctcaaagctgagatgctgagagagatagctccctgagctgggccatctgacttctacctcccatgtttgctctcccaactcattagctcctgggcagcatcctcctgagccacatgtgcaggtactggaaaacctccatcttggctcccagagctctaggaactcttcatcacaactagatttgcctcttctaagtgtctatgagcttgcaccatatttaataaattgggaatgggtttggggtattaatgcaatgtgtggtggttgtattggagcagggggaattgataaaggagagtggttgctgttaatattatcttatctattgggtggtatgtgaaatattgtacatagacctgatgagttgtgggaccagatgtcatctctggtcagagtttacttgctatatagactgtacttatgtgtgaagtttgcaagcttgctttagggctgagccctggactcccagcagcagcacagttcagcattgtgtggctggttgtttcctggctgtccccagcaagtgtaggagtggtgggcctgaactgggccattgatcagactaaataaattaagcagttaaca

SEQ ID NO: 408631 - DNA, 3267 bp, Homo sapiens
  misc_feature (134)..(134): n is a, c, g, or t
  misc_feature (137)..(137): n is a, c, g, or t
gtacccaaagacaaaaaattagctgggcgtggtggcacatgcctgtaatcccatttacttgggaggctgaggcaggagaattgcttgaacctgggaggcggaggttttggtgagccgagattttgcccttgcantcnagcctggttgacagagcgagactctgtctcaaaaaaaaaaaatcccatttgctcattttttggatactagtataactatcactctaaaccagttagtacttaaatcaagcagatatgggagatggtgaattaccatctacagtgttgtcatatatgtcacatactgagcattatcagctagtagaatctagttaattgttctatgtgtgatgtatgcagagttcccattttgaatgtgtttttactatgcttaaataaatgactgatgtcagcaaccccaaaatgatacatctgatgtaagagcccctgttccccaataataacatctaaactatagacattggaatgaacaggtgcccctaagtttcctccctccagggtttcttggccggtctctgaggactacacatccctactcccgtctttcctcatcttcaggcgcagtaacagtatctccaagtcccctggccccagctccccaaaggagcccctgctgttcagccgtgacatcagccgctcagaatcccttcgttgttccagcagctattcacagcagatcttccggccctgtgacctaatccatggggaggtcctggggaagggcttctttgggcaggctatcaaggtgacacacaaagccacgggcaaagtgatggtcatgaaagagttaattcgatgtgatgaggagacccagaaaacttttctgactgaggtgaaagtgatgcgcagcctggaccaccccaatgtgctcaagttcattggtgtgctgtacaaggataagaagctgaacctgctgacagagtacattgaggggggcacactgaaggactttctgcgcagtatggatccgttcccctggcagcagaaggtcaggtttgccaaaggaatcgcctccggaatggcctatttgcactctatgtgcatcatccaccgggatctgaactcgcacaactgcctcatcaagttggacaagactgtggtggtggcagactttgggctgtcacggctcatagtggaagagaggaaaagggcccccatggagaaggccaccaccaagaaacgcaccttgcgcaagaacgaccgcaagaagcgctacacggtggtgggaaacccctactggatggcccctgagatgctgaacggaaagagctatgatgagacggtggatatcttctcctttgggatcgttctctgtgagatcattgggcaggtgtatgcagatcctgactgccttccccgaacactggactttggcctcaacgtgaagcttttctgggagaagtttgttcccacagattgtcccccggccttcttcccgctggccgccatctgctgcagactggagcctgagagcagaccagcattctcgaaattggaggactcctttgaggccctctccctgtacctgggggagctgggcatcccgctgcctgcagagctggaggagttggaccacactgtgagcatgcagtacggcctgacccgggactcacctccctagccctggcccagccccctgcaggggggtgttctacagccagcattgcccctctgtgccccattcctgctgtgagcagggccgtccgggcttcctgtggattggcggaatgtttagaagcagaacaagccattcctattacctccccaggaggcaagtgggcgcagcaccagggaaatgtatctccacaggttctggggcctagttactgtctgtaaatccaatacttgcctgaaagctgtgaagaagaaaaaaacccctggcctttgggccaggaggaatctgttactcgaatccacccaggaactccctggcagtggattgtgggaggctcttgcttacactaatcagcgtgacctggacctgctgggcaggatcccagggtgaacctgcctgtgaactctgaagtcactagtccagctgggtgcaggaggacttcaagtgtgtggacgaaagaaagactgatggctcaaagggtgtgaaaaagtcagtgatgctccccctttctactccagatcctgtccttcctggagcaaggttgagggagtaggttttgaagagtcccttaatatgtggtggaacaggccaggagttagagaaagggctggcttctgtttacctgctcactggctctagccagcccagggaccacatcaatgtgagaggaagcctccacctcatgttttcaaacttaatactggagactggctgagaacttacggacaacatcctttctgtctgaaacaaacagtcacaagcacaggaagaggctgggggactagaaagaggccctgccctctagaaagctcagatcttggcttctgttactcatactcgggtgggctccttagtcagatgcctaaaacattttgcctaaagctcgatgggttctggaggacagtgtggcttgtcacaggcctagagtctgagggaggggagtgggagtctcagcaatctcttggtcttggcttcatggcaaccactgctcacccttcaacatgcctggtttaggcagcagcttgggctgggaagaggtggtggcagagtctcaaagctgagatgctgagagagatagctccctgagctgggccatctgacttctacctcccatgtttgctctcccaactcattagctcctgggcagcatcctcctgagccacatgtgcaggtactggaaaacctccatcttggctcccagagctctaggaactcttcatcacaactagatttgcctcttctaagtgtctatgagcttgcaccatatttaataaattgggaatgggtttggggtattaatgcaatgtgtggtggttgtattggagcagggggaattgataaaggagagtggttgctgttaatattatcttatctattgggtggtatgtgaaatattgtacatagacctgatgagttgtgggaccagatgtcatctctggtcagagtttacttgctatatagactgtacttatgtgtgaagtttgcaagcttgctttagggctgagccctggactcccagcagcagcacagttcagcattgtgtggctggttgtttcctggctgtccccagcaagtgtaggagtggtgggcctgaactgggccattgatcagactaaataaattaagcagttaaca

SEQ ID NO: 408632 - DNA, 1746 bp, Homo sapiens
aatatacggctaggtacgaggctgggggagctgggcatcccgctgcctgcagagctggaggagttggaccacactgtgagcatgcagtacggcctgacccgggactcacctccctagccctggcccagccccctgcaggggggtgttctacagccagcattgcccctctgtgccccattcctgctgtgagcagggccgtccgggcttcctgtggattggcggaatgtttagaagcagaacaagccattcctattacctccccaggaggcaagtgggcgcagcaccagggaaatgtatctccacaggttctggggcctagttactgtctgtaaatccaatacttgcctgaaagctgtgaagaagaaaaaaacccctggcctttgggccaggaggaatctgttactcgaatccacccaggaactccctggcagtggattgtgggaggctcttgcttacactaatcagcgtgacctggacctgctgggcaggatcccagggtgaacctgcctgtgaactctgaagtcactagtccagctgggtgcaggaggacttcaagtgtgtggacgaaagaaagactgatggctcaaagggtgtgaaaaagtcagtgatgctccccctttctactccagatcctgtccttcctggagcaaggttgagggagtaggttttgaagagtcccttaatatgtggtggaacaggccaggagttagagaaagggctggcttctgtttacctgctcactggctctagccagcccagggaccacatcaatgtgagaggaagcctccacctcatgttttcaaacttaatactggagactggctgagaacttacggacaacatcctttctgtctgaaacaaacagtcacaagcacaggaagaggctgggggactagaaagaggccctgccctctagaaagctcagatcttggcttctgttactcatactcgggtgggctccttagtcagatgcctaaaacattttgcctaaagctcgatgggttctggaggacagtgtggcttgtcacaggcctagagtctgagggaggggagtgggagtctcagcaatctcttggtcttggcttcatggcaaccactgctcacccttcaacatgcctggtttaggcagcagcttgggctgggaagaggtggtggcagagtctcaaagctgagatgctgagagagatagctccctgagctgggccatctgacttctacctcccatgtttgctctcccaactcattagctcctgggcagcatcctcctgagccacatgtgcaggtactggaaaacctccatcttggctcccagagctctaggaactcttcatcacaactagatttgcctcttctaagtgtctatgagcttgcaccatatttaataaattgggaatgggtttggggtattaatgcaatgtgtggtggttgtattggagcagggggaattgataaaggagagtggttgctgttaatattatcttatctattgggtggtatgtgaaatattgtacatagacctgatgagttgtgggaccagatgtcatctctggtcagagtttacttgctatatagactgtacttatgtgtgaagtttgcaagcttgctttagggctgagccctggactcccagcagcagcacagttcagcattgtgtggctggttgtttcctggctgtccccagcaagtgtaggagtggtgggcctgaactgggccattgatcagactaaataaattaagcagttaaca

SEQ ID NO: 408633 - DNA, 1770 bp, Homo sapiens
taacacacacaccactacaacatcaccaacacacttacgctacgtaagagctggtatttagcatccgatgctgcagagctggaggagttggaccacactgtgagcatgcagtacggcctgacccgggactcacctccctagccctggcccagccccctgcaggggggtgttctacagccagcattgcccctctgtgccccattcctgctgtgagcagggccgtccgggcttcctgtggattggcggaatgtttagaagcagaacaagccattcctattacctccccaggaggcaagtgggcgcagcaccagggaaatgtatctccacaggttctggggcctagttactgtctgtaaatccaatacttgcctgaaagctgtgaagaagaaaaaaacccctggcctttgggccaggaggaatctgttactcgaatccacccaggaactccctggcagtggattgtgggaggctcttgcttacactaatcagcgtgacctggacctgctgggcaggatcccagggtgaacctgcctgtgaactctgaagtcactagtccagctgggtgcaggaggacttcaagtgtgtggacgaaagaaagactgatggctcaaagggtgtgaaaaagtcagtgatgctccccctttctactccagatcctgtccttcctggagcaaggttgagggagtaggttttgaagagtcccttaatatgtggtggaacaggccaggagttagagaaagggctggcttctgtttacctgctcactggctctagccagcccagggaccacatcaatgtgagaggaagcctccacctcatgttttcaaacttaatactggagactggctgagaacttacggacaacatcctttctgtctgaaacaaacagtcacaagcacaggaagaggctgggggactagaaagaggccctgccctctagaaagctcagatcttggcttctgttactcatactcgggtgggctccttagtcagatgcctaaaacattttgcctaaagctcgatgggttctggaggacagtgtggcttgtcacaggcctagagtctgagggaggggagtgggagtctcagcaatctcttggtcttggcttcatggcaaccactgctcacccttcaacatgcctggtttaggcagcagcttgggctgggaagaggtggtggcagagtctcaaagctgagatgctgagagagatagctccctgagctgggccatctgacttctacctcccatgtttgctctcccaactcattagctcctgggcagcatcctcctgagccacatgtgcaggtactggaaaacctccatcttggctcccagagctctaggaactcttcatcacaactagatttgcctcttctaagtgtctatgagcttgcaccatatttaataaattgggaatgggtttggggtattaatgcaatgtgtggtggttgtattggagcagggggaattgataaaggagagtggttgctgttaatattatcttatctattgggtggtatgtgaaatattgtacatagacctgatgagttgtgggaccagatgtcatctctggtcagagtttacttgctatatagactgtacttatgtgtgaagtttgcaagcttgctttagggctgagccctggactcccagcagcagcacagttcagcattgtgtggctggttgtttcctggctgtccccagcaagtgtaggagtggtgggcctgaactgggccattgatcagactaaataaattaagcagttaaca

SEQ ID NO: 408634 - DNA, 2660 bp, Homo sapiens
ggcccctgctcaagaatgccagtgtgtgtgtagcctccacagagaggtcgttttctcggagtccagaggggccgcctgagcttctgagaactagggaggagccatcccagccatgagcccctgtgggaatctgctgggggccaagtggcctggagtcctcaggctcccgcagctgctccggagggagaggtgagctcagggcagcctgcctgcagccagaggtgccgggagccccgggcctgtcatggtggccatctacagccggcctgaggcagtcacagacggatttgcagctgagcctgtctatctggtgtgggaagaagatggggagttacttgtcagtcccggcttacttcacctccagagacctgtttcggtgttcagaatgccaggattccctcaccaactggtactatgagaaggatgggaagctctactgccccaaggactactgggggaagtttggggagttctgtcatgggtgctccctgctgatgacagggccttttatggtggctggggagttcaagtaccacccagagtgctttgcctgtatgagctgcaaggtgatcattgaggatggggatgcatatgcactggtgcagcatgccaccctctactgtgggaagtgccacaatgaggtggtgctggcacccatgtttgagagactctccacagagtctgttcaggagcagctgccctactctgtcacgctcatctccatgccggccaccactgaaggcaggcggggcttctccgtgtccgtggagagtgcctgctccaactacgccaccactgtgcaagtgaaagaggtcaaccggatgcacatcagtcccaacaatcgaaacgccatccaccctggggaccgcatcctggagatcaatgggacccccgtccgcacacttcgagtggaggaggtggaggatgcaattagccagacgagccagacacttcagctgttgattgaacatgaccccgtctcccaacgcctggaccagctgcggctggaggcccggctcgctcctcacatgcagaatgccggacacccccacgccctcagcaccctggacaccaaggagaatctggaggggacactgaggagacgttccctaaggcgcagtaacagtatctccaagtcccctggccccagctccccaaaggagcccctgctgttcagccgtgacatcagccgctcagaatcccttcgttgttccagcagctattcacagcagatcttccggccctgtgacctaatccatggggaggtcctggggaagggcttctttgggcaggctatcaaggtgacacacaaagccacgggcaaagtgatggtcatgaaagagttaattcgatgtgatgaggagacccagaaaacttttctgactgaggtgaaagtgatgcgcagcctggaccaccccaatgtgctcaagttcattggtgtgctgtacaaggataagaagctgaacctgctgacagagtacattgaggggggcacactgaaggactttctgcgcagtatggatccgttcccctggcagcagaaggtcaggtttgccaaaggaatcgcctccggaatggcctatttgcactctatgtgcatcatccaccgggatctgaactcgcacaactgcctcatcaagttggacaagactgtggtggtggcagactttgggctgtcacggctcatagtggaagagaggaaaagggcccccatggagaaggccaccaccaagaaacgcaccttgcgcaagaacgaccgcaagaagcgctacacggtggtgggaaacccctactggatggcccctgagatgctgaacggaaagagctatgatgagacggtggatatcttctcctttgggatcgttctctgtgagatcattgggcaggtgtatgcagatcctgactgccttccccgaacactggactttggcctcaacgtgaagcttttctgggagaagtttgttcccacagattgtcccccggccttcttcccgctggccgccatctgctgcagactggagcctgagagcagagccccccccggggccgcaggagagggcccgggctgcgcggatgatgagggcccagtgaggcgccaagggaaggtcaccatcaagtatgaccccaaggagctacggaagcacctcaacctagaggagtggatcctggagcagctcacgcgcctctacgactgccaggaagaggagatctcagaactagagattgacgtggatgagctcctggacatggagagtgacgatgcctgggcttccagggtcaaggagctgctggttgactgttacaaacccacagaggccttcatctctggcctgctggacaagatccgggccatgcagaagctgagcacaccccagaagaagtgagggtccccgacccaggcgaacggtggctcccataggacaatcgctaccccccgacctcgtagcaacagcaataccgggggaccctgcggccaggcctggttccatgagcagggctcctcgtgcccctggcccaggggtctcttcccctgccccctcagttttccacttttggatttttttattgttattaaactgatgggactttgtgtttttatattgactctgcggcacgggccctttaataaagcgaggtagggtacgcctttggtgcagctc

SEQ ID NO: 408635 - DNA, 347 bp, Homo sapiens
gacaccaaggagaatctggaggggacactgaggagacgttccctaaggtgccacctcccaccctggctctgttctgtcctatgtctgtctctcggatgaagctgagctggctttcagaagcctgcagagttaggaaaggaaccagctggccagggacagactatgaggattgtgctgacccagctgcccctgtggggatcacagtttacagccagagcctgtgcggacccagctgtctgccaggtttccttagaaacctgagagtcagtctctgtccactgaactcctaagctggacaggaggcagtgatgctaaaccctgaagggcaacatggcctatggagaaag

SEQ ID NO: 408636 - DNA, 430 bp, Homo sapiens
ctggcctgagtgtgtctatttgatagagctttctgctctgattctcccttgctatacaccttttctccccttctcagtggcttctcttgcctatgcttcctccccagggccaggtttgagaacatccccatgaagtcctgacctgtcttttatcctaccaggacaagactgtggtggtggcagactttgggctgtcacggctcatagtggaagagaggaaaagggcccccatggagaaggccaccaccaagaaacgcaccttgcgcaagaacgaccgcaagaagcgctacacggtggtgggaaacccctactggatggcccctgagatgctgaacggtgagtcctgaagccctggaggggacacccgcagagggaggacagatgctgcccttgcatcagagccctgggaattccaggggaggcctgtgaa

SEQ ID NO: 408637 - DNA, 412 bp, Homo sapiens
tggggagagctctctaacctattttaccacctcctcttctgccattcttcctgtccacatcccagcatccctttcccttgccaagtatctgtggcctctgtagtcctttgtaaacagctgtcttcttaccctacagatcattgggcaggtgtatgcagatcctgactgccttccccgaacactggactttggcctcaacgtgaagcttttctgggagaagtttgttcccacagattgtcccccggccttcttcccgctggccgccatctgctgcagactggagcctgagagcaggttggtatcctgcctttttctcccagctcacagggtcctgggacgtttgcctctgtctaaggccacccctgagccctctgcaagcacaggggtgagagaagccttgaggtcaagaatg

SEQ ID NO: 408638 - DNA, 3468 bp, Homo sapiens
ggcccctgctcaagaatgccagtgtgtgtgtagcctccacagagaggtcgttttctcggagtccagaggggccgcctgagcttctgagaactagggaggagccatcccagccatgagcccctgtgggaatctgctgggggccaagtggcctggagtcctcaggctcccgcagctgctccggagggagaggtgagctcagggcagcctgcctgcagccagaggtgccgggagccccgggcctgtcatggtggccatctacagccggcctgaggcagtcacagacggatttgcagctgagcctgtctatctggtgtgggaagaagatggggagttacttgtcagtcccggcttacttcacctccagagacctgtttcggtgttcagaatgccaggattccctcaccaactggtactatgagaaggatgggaagctctactgccccaaggactactgggggaagtttggggagttctgtcatgggtgctccctgctgatgacagggccttttatggtggctggggagttcaagtaccacccagagtgctttgcctgtatgagctgcaaggtgatcattgaggatggggatgcatatgcactggtgcagcatgccaccctctactgtgggaagtgccacaatgaggtggtgctggcacccatgtttgagagactctccacagagtctgttcaggagcagctgccctactctgtcacgctcatctccatgccggccaccactgaaggcaggcggggcttctccgtgtccgtggagagtgcctgctccaactacgccaccactgtgcaagtgaaagaggtcaaccggatgcacatcagtcccaacaatcgaaacgccatccaccctggggaccgcatcctggagatcaatgggacccccgtccgcacacttcgagtggaggaggtggaggatgcaattagccagacgagccagacacttcagctgttgattgaacatgaccccgtctcccaacgcctggaccagctgcggctggaggcccggctcgctcctcacatgcagaatgccggacacccccacgccctcagcaccctggacaccaaggagaatctggaggggacactgaggagacgttccctaaggcgcagtaacagtatctccaagtcccctggccccagctccccaaaggagcccctgctgttcagccgtgacatcagccgctcagaatcccttcgttgttccagcagctattcacagcagatcttccggccctgtgacctaatccatggggaggtcctggggaagggcttctttgggcaggctatcaaggtgacacacaaagccacgggcaaagtgatggtcatgaaagagttaattcgatgtgatgaggagacccagaaaacttttctgactgaggtgaaagtgatgcgcagcctggaccaccccaatgtgctcaagttcattggtgtgctgtacaaggataagaagctgaacctgctgacagagtacattgaggggggcacactgaaggactttctgcgcagtatggatccgttcccctggcagcagaaggtcaggtttgccaaaggaatcgcctccggaatggcctatttgcactctatgtgcatcatccaccgggatctgaactcgcacaactgcctcatcaagttggacaagactgtggtggtggcagactttgggctgtcacggctcatagtggaagagaggaaaagggcccccatggagaaggccaccaccaagaaacgcaccttgcgcaagaacgaccgcaagaagcgctacacggtggtgggaaacccctactggatggcccctgagatgctgaacggaaagagctatgatgagacggtggatatcttctcctttgggatcgttctctgtgagatcattgggcaggtgtatgcagatcctgactgccttccccgaacactggactttggcctcaacgtgaagcttttctgggagaagtttgttcccacagattgtcccccggccttcttcccgctggccgccatctgctgcagactggagcctgagagcagaccagcattctcgaaattggaggactcctttgaggccctctccctgtacctgggggagctgggcatcccgctgcctgcagagctggaggagttggaccacactgtgagcatgcagtacggcctgacccgggactcacctccctagccctggcccagccccctgcaggggggtgttctacagccagcattgcccctctgtgccccattcctgctgtgagcagggccgtccgggcttcctgtggattggcggaatgtttagaagcagaacaagccattcctattacctccccaggaggcaagtgggcgcagcaccagggaaatgtatctccacaggttctggggcctagttactgtctgtaaatccaatacttgcctgaaagctgtgaagaagaaaaaaacccctggcctttgggccaggaggaatctgttactcgaatccacccaggaactccctggcagtggattgtgggaggctcttgcttacactaatcagcgtgacctggacctgctgggcaggatcccagggtgaacctgcctgtgaactctgaagtcactagtccagctgggtgcaggaggacttcaagtgtgtggacgaaagaaagactgatggctcaaagggtgtgaaaaagtcagtgatgctccccctttctactccagatcctgtccttcctggagcaaggttgagggagtaggttttgaagagtcccttaatatgtggtggaacaggccaggagttagagaaagggctggcttctgtttacctgctcactggctctagccagcccagggaccacatcaatgtgagaggaagcctccacctcatgttttcaaacttaatactggagactggctgagaacttacggacaacatcctttctgtctgaaacaaacagtcacaagcacaggaagaggctgggggactagaaagaggccctgccctctagaaagctcagatcttggcttctgttactcatactcgggtgggctccttagtcagatgcctaaaacattttgcctaaagctcgatgggttctggaggacagtgtggcttgtcacaggcctagagtctgagggaggggagtgggagtctcagcaatctcttggtcttggcttcatggcaaccactgctcacccttcaacatgcctggtttaggcagcagcttgggctgggaagaggtggtggcagagtctcaaagctgagatgctgagagagatagctccctgagctgggccatctgacttctacctcccatgtttgctctcccaactcattagctcctgggcagcatcctcctgagccacatgtgcaggtactggaaaacctccatcttggctcccagagctctaggaactcttcatcacaactagatttgcctcttctaagtgtctatgagcttgcaccatatttaataaattgggaatgggtttggggtatt

SEQ ID NO: 408639 - DNA, 1343 bp, Homo sapiens
aaaaatacaaaacttagccaggcatggtggcaggtgcctgtaaccccagctacttgggaggctgaggcaggagaattgcttgaacccaggggcggaggttgcagtgagccgatatcacgccattgcactccagcctcggcaacaagagtgaaactctgtctcaaaaatggggttcttttcctgccatcaaaaatcatgtttcttttaaaaacaagttcaaacattaccaaagtttatagcacaggaaatacgtcttctgtaatctcccttaaccaatatatccctcaacattctcctcacccccaactccaccctcccaggataaccagttgggacataatctttatttaaaaatggtttccggatagagaaagcgcttcggcggcggcagccccggcggcggccgcaggggacaaagggcgggcggatcggcggggagggggcggggcgcgaccaggccaggcccgggggctccgcatgctgcagctgcccccgggcgcccccgccgccgccctcgccgcggagccggcgagctaacctgagccagccggcgggcgtcacggaggcggcggcacaaggaggggccccacgcgcgcacgtggccccggaggccgccgtggcggacagcggcaccgcggggggcgcggcgttggcggccccggccccggcccccaggccaggcagtggcggccaaggaccacgcatctactttcagagccccccccggggccgcaggagagggcccgggctgcgcggatgatgagggcccagtgaggcgccaagggaaggtcaccatcaagtatgaccccaaggagctacggaagcacctcaacctagaggagtggatcctggagcagctcacgcgcctctacgactgccaggaagaggagatctcagaactagagattgacgtggatgagctcctggacatggagagtgacgatgcctgggcttccagggtcaaggagctgctggttgactgttacaaacccacagaggccttcatctctggcctgctggacaagatccgggccatgcagaagctgagcacaccccagaagaagtgagggtccccgacccaggcgaacggtggctcccataggacaatcgctaccccccgacctcgtagcaacagcaataccgggggaccctgcggccaggcctggttccatgagcagggctcctcgtgcccctggcccaggggtctcttcccctgccccctcagttttccacttttggatttttttattgttattaaactgatgggactttgtgtttttatattgactctgcggcacgggccctttaataaagcgaggtagggtacgcctttggtgcagctc

SEQ ID NO: 408640 - DNA, 3996 bp, Homo sapiens
aaaaatacaaaacttagccaggcatggtggcaggtgcctgtaaccccagctacttgggaggctgaggcaggagaattgcttgaacccaggggcggaggttgcagtgagccgatatcacgccattgcactccagcctcggcaacaagagtgaaactctgtctcaaaaatggggttcttttcctgccatcaaaaatcatgtttcttttaaaaacaagttcaaacattaccaaagtttatagcacaggaaatacgtcttctgtaatctcccttaaccaatatatccctcaacattctcctcacccccaactccaccctcccaggataaccagttgggacataatctttatttaaaaatggtttccggatagagaaagcgcttcggcggcggcagccccggcggcggccgcaggggacaaagggcgggcggatcggcggggagggggcggggcgcgaccaggccaggcccgggggctccgcatgctgcagctgcccccgggcgcccccgccgccgccctcgccgcggagccggcgagctaacctgagccagccggcgggcgtcacggaggcggcggcacaaggaggggccccacgcgcgcacgtggccccggaggccgccgtggcggacagcggcaccgcggggggcgcggcgttggcggccccggccccggcccccaggccaggcagtggcggccaaggaccacgcatctactttcagagccccccccggggccgcaggagagggcccgggctgcgcggatgatgagggcccagtgaggcgccaagggaaggtcaccatcaagtatgaccccaaggagctacggaagcacctcaacctagaggagtggatcctggagcagctcacgcgcctctacgactgccaggaagaggagatctcagaactagagattgacgtggatgagctcctggacatggagagtgacgatgcctgggcttccagggtcaaggagctgctggttgactgttacaaacccacagaggccttcatctctggcctgctggacaagatccgggccatgcagaagctgagcacaccccagaagaagtgagggtccccgacccaggcgaacggtggctcccataggacaatcgctaccccccgacctcgtagcaacagcaataccgggggaccctgcggccaggcctggttccatgagcagggctcctcgtgcccctggcccaggggtctcttcccctgccccctcagttttccacttttggatttttttattgttattaaactgatgggactttgtgtttttatattgactctgcggcacgggccctttaataaagcgaggtagggtacgcctttggtgcagctcaaaaaaaaaaaaaaaatgatttccagcggtccacattagagttgaaattttctggtgggagaatctataccttgttcctttataggccaaggaccgcagtccttcagtaacaccagtgtaaaagcttgaggagaaattgtgaagctacacagtatttgttttctaatacctcttgtcattctaaatatctttaatttattaaaaaatatatatatacagtattgaatgcctactgtgtgctaggtacagttctaaacacttgggttacagcagcgaacaaaataaaggtgcttaccctcatagaacatagattctagcatggtatctactgtatcatacagtagatacaataagtaaactatattgaatattagaatgtggcagatgctatggaaaaagagtcaagacaagtaaagacgattgttcagggtaccagttgcaattttaaatatggtcgtcagagcaggcctcactgaggtgacatgacatttaagcataaacatggaggaggaggagtaagcctgagctgtcttaggcttccggggcagccaagccatttccgtggcactaggagcctggtgtttccgattccacctttgataactgcattttctctaagatatgggagggaagtttttctcctattgtttttaagtattaactccagctagtccagccttgttatagtgttacctaatctttatagcaaatatatgaggtaccggtaacattatgcccatttctcacagaggcactactaggtgaaggagtttgcctgacgttatacaaccaggaagtagctgagcctagatcccttccacccaccccatggccctgctcatgttccacctgcctctaatttacctcttttccttctagaccagcattctcgaaattggaggactcctttgaggccctctccctgtacctgggggagctgggcatcccgctgcctgcagagctggaggagttggaccacactgtgagcatgcagtacggcctgacccgggactcacctccctagccctggcccagccccctgcaggggggtgttctacagccagcattgcccctctgtgccccattcctgctgtgagcagggccgtccgggcttcctgtggattggcggaatgtttagaagcagaacaagccattcctattacctccccaggaggcaagtgggcgcagcaccagggaaatgtatctccacaggttctggggcctagttactgtctgtaaatccaatacttgcctgaaagctgtgaagaagaaaaaaacccctggcctttgggccaggaggaatctgttactcgaatccacccaggaactccctggcagtggattgtgggaggctcttgcttacactaatcagcgtgacctggacctgctgggcaggatcccagggtgaacctgcctgtgaactctgaagtcactagtccagctgggtgcaggaggacttcaagtgtgtggacgaaagaaagactgatggctcaaagggtgtgaaaaagtcagtgatgctccccctttctactccagatcctgtccttcctggagcaaggttgagggagtaggttttgaagagtcccttaatatgtggtggaacaggccaggagttagagaaagggctggcttctgtttacctgctcactggctctagccagcccagggaccacatcaatgtgagaggaagcctccacctcatgttttcaaacttaatactggagactggctgagaacttacggacaacatcctttctgtctgaaacaaacagtcacaagcacaggaagaggctgggggactagaaagaggccctgccctctagaaagctcagatcttggcttctgttactcatactcgggtgggctccttagtcagatgcctaaaacattttgcctaaagctcgatgggttctggaggacagtgtggcttgtcacaggcctagagtctgagggaggggagtgggagtctcagcaatctcttggtcttggcttcatggcaaccactgctcacccttcaacatgcctggtttaggcagcagcttgggctgggaagaggtggtggcagagtctcaaagctgagatgctgagagagatagctccctgagctgggccatctgacttctacctcccatgtttgctctcccaactcattagctcctgggcagcatcctcctgagccacatgtgcaggtactggaaaacctccatcttggctcccagagctctaggaactcttcatcacaactagatttgcctcttctaagtgtctatgagcttgcaccatatttaataaattgggaatgggtttggggtattaatgcaatgtgtggtggttgtattggagcagggggaattgataaaggagagtggttgctgttaatattatcttatctattgggtggtatgtgaaatattgtacatagacctgatgagttgtgggaccagatgtcatctctggtcagagtttacttgctatatagactgtacttatgtgtgaagtttgcaagcttgctttagggctgagccctggactcccagcagcagcacagttcagcattgtgtggctggttgtttcctggctgtccccagcaagtgtaggagtggtgggcctgaactgggccattgatcagactaaataaattaagcagttaaca

SEQ ID NO: 408641 - DNA, 3751 bp, Homo sapiens
ggcccctgctcaagaatgccagtgtgtgtgtagcctccacagagaggtcgttttctcggagtccagaggggccgcctgagcttctgagaactagggaggagccatcccagccatgagcccctgtgggaatctgctgggggccaagtggcctggagtcctcaggctcccgcagctgctccggagggagaggtgagctcagggcagcctgcctgcagccagaggtgccgggagccccgggcctgtcatggtggccatctacagccggcctgaggcagtcacagacggatttgcagctgagcctgtctatctggtgtgggaagaagatggggagttacttgtcagtcccggcttacttcacctccagagacctgtttcggtgttcagaatgccaggattccctcaccaactggtactatgagaaggatgggaagctctactgccccaaggactactgggggaagtttggggagttctgtcatgggtgctccctgctgatgacagggccttttatggtggctggggagttcaagtaccacccagagtgctttgcctgtatgagctgcaaggtgatcattgaggatggggatgcatatgcactggtgcagcatgccaccctctactgtgggaagtgccacaatgaggtggtgctggcacccatgtttgagagactctccacagagtctgttcaggagcagctgccctactctgtcacgctcatctccatgccggccaccactgaaggcaggcggggcttctccgtgtccgtggagagtgcctgctccaactacgccaccactgtgcaagtgaaagaggtcaaccggatgcacatcagtcccaacaatcgaaacgccatccaccctggggaccgcatcctggagatcaatgggacccccgtccgcacacttcgagtggaggaggtggaggatgcaattagccagacgagccagacacttcagctgttgattgaacatgaccccgtctcccaacgcctggaccagctgcggctggaggcccggctcgctcctcacatgcagaatgccggacacccccacgccctcagcaccctggacaccaaggagaatctggaggggacactgaggagacgttccctaaggcgcagtaacagtatctccaagtcccctggccccagctccccaaaggagcccctgctgttcagccgtgacatcagccgctcagaatcccttcgttgttccagcagctattcacagcagatcttccggccctgtgacctaatccatggggaggtcctggggaagggcttctttgggcaggctatcaaggtgacacacaaagccacgggcaaagtgatggtcatgaaagagttaattcgatgtgatgaggagacccagaaaacttttctgactgaggtgaaagtgatgcgcagcctggaccaccccaatgtgctcaagttcattggtgtgctgtacaaggataagaagctgaacctgctgacagagtacattgaggggggcacactgaaggactttctgcgcagtatggatccgttcccctggcagcagaaggtcaggtttgccaaaggaatcgcctccggaatggcctatttgcactctatgtgcatcatccaccgggatctgaactcgcacaactgcctcatcaagttggacaagactgtggtggtggcagactttgggctgtcacggctcatagtggaagagaggaaaagggcccccatggagaaggccaccaccaagaaacgcaccttgcgcaagaacgaccgcaagaagcgctacacggtggtgggaaacccctactggatggcccctgagatgctgaacggaaagagctatgatgagacggtggatatcttctcctttgggatcgttctctgtgagatcattgggcaggtgtatgcagatcctgactgccttccccgaacactggactttggcctcaacgtgaagcttttctgggagaagtttgttcccacagattgtcccccggccttcttcccgctggccgccatctgctgcagactggagcctgagagcagaccagcattctcgaaattggaggactcctttgaggccctctccctgtacctgggggagctgggcatcccgctgcctgcagagctggaggagttggaccacactgtgagcatgcagtacggcctgacccgggactcacctccctagccctggcccagccccctgcaggggggtgttctacagccagcattgcccctctgtgccccattcctgctgtgagcagggccgtccgggcttcctgtggattggcggaatgtttagaagcagaacaagccattcctattacctccccaggaggcaagtgggcgcagcaccagggaaatgtatctccacaggttctggggcctagttactgtctgtaaatccaatacttgcctgaaagctgtgaagaagaaaaaaacccctggcctttgggccaggaggaatctgttactcgaatccacccaggaactccctggcagtggattgtgggaggctcttgcttacactaatcagcgtgacctggacctgctgggcaggatcccagggtgaacctgcctgtgaactctgaagtcactagtccagctgggtgcaggaggacttcaagtgtgtggacgaaagaaagactgatggctcaaagggtgtgaaaaagtcagtgatgctccccctttctactccagatcctgtccttcctggagcaaggttgagggagtaggttttgaagagtcccttaatatgtggtggaacaggccaggagttagagaaagggctggcttctgtttacctgctcactggctctagccagcccagggaccacatcaatgtgagaggaagcctccacctcatgttttcaaacttaatactggagactggctgagaacttacggacaacatcctttctgtctgaaacaaacagtcacaagcacaggaagaggctgggggactagaaagaggccctgccctctagaaagctcagatcttggcttctgttactcatactcgggtgggctccttagtcagatgcctgcctagagtctgagggaggggagtgggagtctcagcaatctcttggtcttggcttcatggcaaccactgctcacccttcaacatgcctggtttaggcagcagcttgggctgggaagaggtggtggcagagtctcaaagctgagatgctgagagagatagctccctgagctgggccatctgacttctacctcccatgtttgctctcccaactcattagctcctgggcagcatcctcctgagccacatgtgcaggtactggaaaacctccatcttggctcccagagctctaggaactcttcatcacaactagatttgcctcttctaagtgtctatgagcttgcaccatatttaataaattgggaatgggtttggggtattaatgcaatgtgtggtggttgtattggagcagggggaattgataaaggagagtggttgctgttaatattatcttatctattgggtggtatgtgaaatattgtacatagacctgatgagttgtgggaccagatgtcatctctggtcagagtttacttgctatatagactgtacttatgtgtgaagtttgcaagcttgctttagggctgagccctggactcccagcagcagcacagttcagcattgtgtggctggttgtttcctggctgtccccagcaagtgtaggagtggtgggcctgaactgggccattgatcagactaaataaattaagcagttaaca

SEQ ID NO: 408642 - DNA, 3532 bp, Homo sapiens
ggcccctgctcaagaatgccagtgtgtgtgtagcctccacagagaggtcgttttctcggagtccagaggggccgcctgagcttctgagaactagggaggagccatcccagccatgagcccctgtgggaatctgctgggggccaagtggcctggagtcctcaggctcccgcagctgctccggagggagaggtgagctcagggcagcctgcctgcagccagaggtgccgggagccccgggcctgtcatggtggccatctacagccggcctgaggcagtcacagacggatttgcagctgagcctgtctatctggtgtgggaagaagatggggagttacttgtcagtcccggcttacttcacctccagagacctgtttcggtgttcagaatgccaggattccctcaccaactggtactatgagaaggatgggaagctctactgccccaaggactactgggggaagtttggggagttctgtcatgggtgctccctgctgatgacagggccttttatggtggctggggagttcaagtaccacccagagtgctttgcctgtatgagctgcaaggtgatcattgaggatggggatgcatatgcactggtgcagcatgccaccctctactgtgggaagtgccacaatgaggtggtgctggcacccatgtttgagagactctccacagagtctgttcaggagcagctgccctactctgtcacgctcatctccatgccggccaccactgaaggcaggcggggcttctccgtgtccgtggagagtgcctgctccaactacgccaccactgtgcaagtgaaagaggtcaaccggatgcacatcagtcccaacaatcgaaacgccatccaccctggggaccgcatcctggagatcaatgggacccccgtccgcacacttcgagtggaggaggtggaggatgcaattagccagacgagccagacacttcagctgttgattgaacatgaccccgtctcccaacgcctggaccagctgcggctggaggcccggctcgctcctcacatgcagaatgccggacacccccacgccctcagcaccctggacaccaaggagaatctggaggggacactgaggagacgttccctaaggcgcagtaacagtatctccaagtcccctggccccagctccccaaaggagcccctgctgttcagccgtgacatcagccgctcagaatcccttcgttgttccagcagctattcacagcagatcttccggccctgtgacctaatccatggggaggtcctggggaagggcttctttgggcaggctatcaaggtgacacacaaagccacgggcaaagtgatggtcatgaaagagttaattcgatgtgatgaggagacccagaaaacttttctgactgaggtgaaagtgatgcgcagcctggaccaccccaatgtgctcaagttcattggtgtgctgtacaaggataagaagctgaacctgctgacagagtacattgaggggggcacactgaaggactttctgcgcagtatggatccgttcccctggcagcagaaggtcaggtttgccaaaggaatcgcctccggaatggcctatttgcactctatgtgcatcatccaccgggatctgaactcgcacaactgcctcatcaagttggacaagactgtggtggtggcagactttgggctgtcacggctcatagtggaagagaggaaaagggcccccatggagaaggccaccaccaagaaacgcaccttgcgcaagaacgaccgcaagaagcgctacacggtggtgggaaacccctactggatggcccctgagatgctgaacggaaagagctatgatgagacggtggatatcttctcctttgggatcgttctctgtgagatcattgggcaggtgtatgcagatcctgactgccttccccgaacactggactttggcctcaacgtgaagcttttctgggagaagtttgttcccacagattgtcccccggccttcttcccgctggccgccatctgctgcagactggagcctgagagcagaccagcattctcgaaattggaggactcctttgaggccctctccctgtacctgggggagctgggcatcccgctgcctgcagagctggaggagttggaccacactgtgagcatgcagtacggcctgacccgggactcacctccctagccctggcccagccccctgcaggggggtgttctacagccagcattgcccctctgtgccccattcctgctgtgagcagggccgtccgggcttcctgtggattggcggaatgtttagaagcagaacaagccattcctattacctccccaggaggcaagtgggcgcagcaccagggaaatgtatctccacaggttctggggcctagttactgtctgtaaatccaatacttgcctgaaagctgtgaagaagaaaaaaacccctggcctttgggccaggaggaatctgttactcgaatccacccaggaactccctggcagtggattgtgggaggctcttgcttacactaatcagcgtgacctggacctgctgggcaggatcccagggtgaacctgcctgtgaactctgaagtcactagtccagctgggtgcaggaggacttcaagtgtgtggacgaaagaaagactgatggctcaaagggtgtgaaaaagtcagtgatgctccccctttctactccagatcctgtccttcctggagcaaggttgagggagtaggttttgaagagtcccttaatatgtggtggaacaggccaggagttagagaaagggctggcttctgtttacctgctcactggctctagccagcccagggaccacatcaatgtgagaggaagcctccacctcatgttttcaaacttaatactggagactggctgagaacttacggacaacatcctttctgtctgaaacaaacagtcacaagcacaggaagaggctgggggactagaaagaggccctgccctctagaaagctcagatcttggcttctgttactcatactcgggtgggctccttagtcagatgcctaaaacattttgcctaaagctcgatgggttctggaggacagtgtggcttgtcacaggcctagagtctgagggaggggagtgggagtctcagcaatctcttggtcttggcttcatggcaaccactgctcacccttcaacatgcctggtttaggcagcagcttgggctgggaagaggtggtggcagagtctcaaagctgagatgctgagagagatagctccctgagctgggccatctgacttctacctcccatgtttgctctcccaactcattagctcctgggcagcatcctcctgagccacatgtgcaggtactggaaaacctccatcttggctcccagagctctaggaactcttcatcacaactagatttgcctcttctaagttcagagccaggcctggctctgaacttaggagatgcatccccagtggggactaggcaagcaagaggcccagcagccccattaatgtcacagaatctgactcttgttgtgagaatcg

SEQ ID NO: 408643 - DNA, 2395 bp, Homo sapiens
ggcccctgctcaagaatgccagtgtgtgtgtagcctccacagagaggtcgttttctcggagtccagaggggccgcctgagcttctgagaactagggaggagccatcccagccatgagcccctgtgggaatctgctgggggccaagtggcctggagtcctcaggctcccgcagctgctccggagggagaggtgagctcagggcagcctgcctgcagccagaggtgccgggagccccgggcctgtcatggtggccatctacagccggcctgaggcagtcacagacggatttgcagctgagcctgtctatctggtgtgggaagaagatggggagttacttgtcagtcccggcttacttcacctccagagacctgtttcggtgttcagaatgccaggattccctcaccaactggtactatgagaaggatgggaagctctactgccccaaggactactgggggaagtttggggagttctgtcatgggtgctccctgctgatgacagggccttttatggtggctggggagttcaagtaccacccagagtgctttgcctgtatgagctgcaaggtgatcattgaggatggggatgcatatgcactggtgcagcatgccaccctctactgtgggaagtgccacaatgaggtggtgctggcacccatgtttgagagactctccacagagtctgttcaggagcagctgccctactctgtcacgctcatctccatgccggccaccactgaaggcaggcggggcttctccgtgtccgtggagagtgcctgctccaactacgccaccactgtgcaagtgaaagaggtcaaccggatgcacatcagtcccaacaatcgaaacgccatccaccctggggaccgcatcctggagatcaatgggacccccgtccgcacacttcgagtggaggaggtggaggatgcaattagccagacgagccagacacttcagctgttgattgaacatgaccccgtctcccaacgcctggaccagctgcggctggaggcccggctcgctcctcacatgcagaatgccggacacccccacgccctcagcaccctggacaccaaggagaatctggaggggacactgaggagacgttccctaaggcgcagtaacagtatctccaagtcccctggccccagctccccaaaggagcccctgctgttcagccgtgacatcagccgctcagaatcccttcgttgttccagcagctattcacagcagatcttccggccctgtgacctaatccatggggaggtcctggggaagggcttctttgggcaggctatcaaggtgacacacaaagccacgggcaaagtgatggtcatgaaagagttaattcgatgtgatgaggagacccagaaaacttttctgactgaggtgaaagtgatgcgcagcctggaccaccccaatgtgctcaagttcattggtgtgctgtacaaggataagaagctgaacctgctgacagagtacattgaggggggcacactgaaggactttctgcgcagtatggatccgttcccctggcagcagaaggtcaggtttgccaaaggaatcgcctccggaatggcctatttgcactctatgtgcatcatccaccgggatctgaactcgcacaactgcctcatcaagttggacaagactgtggtggtggcagactttgggctgtcacggctcatagtggaagagaggaaaagggcccccatggagaaggccaccaccaagaaacgcaccttgcgcaagaacgaccgcaagaagcgctacacggtggtgggaaacccctactggatggcccctgagatgctgaacggaaagagctatgatgagacggtggatatcttctcctttgggatcgttctctgtgagatcattgggcaggtgtatgcagatcctgactgccttccccgaacactggactttggcctcaacgtgaagcttttctgggagaagtttgttcccacagattgtcccccggccttcttcccgctggccgccatctgctgcagactggagcctgagagcaggttggtatcctgcctttttctcccagctcacagggtcctgggacgtttgcctctgtctaaggccacccctgagccctctgcaagcacaggggtgagagaagccttgaggtcaagaatgtggctgtcaacccctgagccatctgacaacacatatgtacaggttggagaagagagaggtaaagacatagcagcaagtaatctggataggacacagaaacacagccattaaaagaaagtttaaaagaaggaaattcacccaaaccatttgaatacagtaagtgtattcatctttcgatattcccctgtccatatctacacatatacttttttttatagtaaatagttctgtattttgccctgcat

SEQ ID NO: 408644 - DNA, 6989 bp, Homo sapiens
  misc_feature (91)..(91): n is a, c, g, or t
  misc_feature (156)..(156): n is a, c, g, or t
  misc_feature (256)..(256): n is a, c, g, or t
  misc_feature (1135)..(1135): n is a, c, g, or t
  misc_feature (1144)..(1144): n is a, c, g, or t
  misc_feature (1348)..(1348): n is a, c, g, or t
  misc_feature (1354)..(1354): n is a, c, g, or t
  misc_feature (1381)..(1381): n is a, c, g, or t
  misc_feature (1428)..(1428): n is a, c, g, or t
  misc_feature (1448)..(1448): n is a, c, g, or t
  misc_feature (1496)..(1496): n is a, c, g, or t
  misc_feature (1512)..(1512): n is a, c, g, or t
  misc_feature (1529)..(1529): n is a, c, g, or t
  misc_feature (1555)..(1555): n is a, c, g, or t
  misc_feature (3615)..(3615): n is a, c, g, or t
aaatttaggtccccacaaaagcattcttttttcttttttgagggagccttgctgttgctcaggctggagtacagtggcgtgatcacggctnactggagcctcaatctcctgggctcaaatgatcatcccacctcagtctcctgagcagctgggacnacagccagcacacccacctaaatttttatttttggtagagacgggagctcaccatgttgcccaggttgatcttgaactcctgggatcaagcaatcctccngcctcagcctcccaaatcactgggattacaggcatgagccactgcacccagccagctctctgctttttgttgcctcagttattctctctgtaagatgggaagaatcctcctggccttatcccaactctccagctggactgggggaagaactataaaagctgagcaagaggtttttatgatttttgttttttctgctgctaccacccaccatgggcatgagacggtttggtttcctggcagcagagctgtgtaggaggttcagtctgttcccctaccacacctaaaactctttcaaccaaacctgcctcaggctgggaagatacagaattttcaacagaggggggagattcactcgggctggtcactggagcttagcagtgcagattaaatcaccccaagaccacagacactgtgttcccaggagttgcatggtctttggtccctaaaaatctgagggctggcagactctggacagtttctgcgggtctccagccagcatgacactggcttgtaccccagggcctggagctgctgcctatatatgctctatatagtaggcataggcaggttttagtatcaaaatattgtacctggctgatatttgtgaatttggattggtgaagtggttcttagcattggctgtgctagagtcaaactctcctagacaggaaggagcttgggtattttaaaaaaaaaaaaaaagagccaaattactggtggctcaacagctgaaaacaatgggagcagaagtgaaatggtggctggggtaaagccaagaatccatttaaggggtgactctacagagatgcatttacttattaagtcacgacttagctgtaggggaaggtgggggaaagacacatagttctgccctcacantgttcagtntaatcaggacagggtatgtgcattcaggccttcctgcccgccacacgtgctgtttcctctgcatggaatgtccttctaccctttctttgtcccctctcctgctgtacttcaatgtatcacctccatggggtaataacatactcttaacgtgtataaggcactttatggtttaaaaagccctctcggccgggcgcagtggctcangcctgnaatcccagcactttgggaggccgaggngggtggatcatctgaggtcaggagttcgagaccagcctggccaacanggtgaaaccctatctctacnaaaaatacaaaaaattagctgggtgtggtgtcgggcgcctgttgtccnagcttctcaggaggcngaggcggaagaatcacntgaacccgggaggcggaggttgcagngatccaagattgcgccactgtactctagcctaggcaacagggtgagactctgtctcaaacagaaaagccttctcaagtacttagttcatttcactcccaccataaccaggcagggcaagaatgtcacttagctgttcagacacgagggcaggaaccagggtctcgatttctggcctggggcagagccatcctctggctcctgctgaaccccctgcagtactatgcatgcactgtgtgctcctaatgcaggaatttgaggcggggtgttgtggggtgcaatggatgggttttttctgcctctttagtgtagaccactagggttatggcgaaatcttacctagtgttgagatacatctttatccttccttccctctcctgccagcaaattggaaggaggttttactgaaacatatcagccctgaccaggtgcctgtggagtatgggggcaccatgactgaccctgatggaaaccccaagtgcaaatccaagggtatgagccgccagaggctagaggtgaacagggatgcctggctcaaatgcacattccagttcactccatgccatgcttctagatcaactacgggggtgacatccccaggaagtattatgtgcgagaccaggtgaaacagcagtatgaacacagcgtgcagatttcccgtggctcctcccaccaagtggagtatgagatcctcttccctggctgtgtcctcaggtaggggcctgggcccttccaggagacccgagctttcatctataggtcctgataggtgggctggaataggagaagccctggtgccaggaccccggagagggcacacacagacagaattatgtctcaattggtgatatcccctgcaggtggcagtttatgtcagatggagcggatgttggttttgggattttcctgaagaccaagatgggagagaggcagcgggcaggggagatgacagaggtgctgcccaaccagaggtacaactcccacctggtccctgaagatgggaccctcacctgcagtgatcctggcatctgtaagtatctctgccttggcaatgccttgaagccccatgtccagctttctgcctgtgaggttcctcttcctccatggatttttggctctgagtgttagaactagaagtggaatgccatcagttcaatcctctccttgtatagatgaagaaatctaggcttggagacttgtttatggtgacccaactggttaacagcagggtgggactttgatctcatactcctaggtatgggtgagtcacagtcctaggcgatcacaggggttcaacacgtctgctttctggtccaggtctaactgggtctgtgactggacagatatttcttggggatgctccttcccagaggtcacagagacagaactggctgggtgggcatgggatcacaaggtaagcagatgctcaaaagtgcagccttcacccctgagtttcactcatctcccagctgaccaaagaatggacacagactatgagcaggcagtttacacaagaatataagaatgggaaacagacatttgaaaaggtgcttaatctctcttaactttgtaataccattaaaattccccttgactcagcaattctacttgtgaaaatttatcctacagaaatacacaaatactcaaagatacaggaacaaggatattcccggtagcctgggaaactggcagtaaaccatatgaccatgataaggtctgttaagtaaattacagtccatccatacaatgttaaagagaataaactgacatgtaaactgtctgggacatgttaaacaaataagcatgaaacacagcatgtatggtatgtacttactttggttaaggaagtgtgtacacagaaaagaactctggggaaatttatgctaactctaacagtggttatctctgggatgataggatgtttatggagggctttcatttttacagtatttctgcaaatatattttatgatgactacgtattaatattacatttataagcagaaaaaccatacctacactcccttcaacacccacaatcaaatctccagtttctttttgtnagagccaatggaaaatcaatcagagcaaaggctttatcatcagagctgagctggacttgactaaaggctagctccatggcctttggcaagtgacaaaacctaagcttcggtttccggactgctacactggggtatctcacagggatacctgatgatttgatgtgataggttctgtgaggcacttagcataatgcctggcatagagcaagcactcaatgcactgcagtcaccactattattgttaggacaaggcctgtgggagaagggccatcctgcagacaatgccgggagatgggagaagccctgtgccccatttctacggtagtaccagcactaccaggagatctgaactagcctcacagatgtcttggcctctctgcttgtctacatggtcacccaacctgagattttgcctccttcctcacatcccaggcacccttcatctccactgccccctcctcacagatgctctgtggtaccatatagctcctgggggaggcggaatattcttattagtgagcagccgggtcctgggggagaaggtgtatactgtgtgcttcagcaagaacaaggcttagcaccagcccagacaatgtcacccacagaggagaaagcacttaatacatataagcttgaatttttttgtctgtttctttgtttttagtagagacgaggtatcgctgtgttgcccaggctggtctcgaactcctgggttcaagcgaccctcctgccttggcctcccaaagtgctgagattaccagcatgagccaccatgcccagccttgaattatttttttaatggatggggaagctggggcatagagaagggatgttctcccataaagtagcttatgtagacatcaagacagaagacatcagagaatcctagagtcctgatccagaacctcttggccattgactgtcctggatgtgtcagagagtgtggaatcccagaccagggaagtaattgacccaaggtcacagagcctgtaggagagccccaaaccattttccagcatctgcccattacccctctatcttctctttagtatctgaaggacattgcccaagaagggaacatgaaccttttaacataatcaggcttgggcttgcaaacccccaaatttattttagttccttctggatacattcccaaccagaacctttacctgcctgcagggtcttgtctgggatctgctccttgcccattcccaagaggagcagaggcaggccacaggatccattcccccttcccaggtacaaagacaatgaagttggaatcagctgttacctggtgccacagctaaggttagatgtgagcccagagagaacccagtattagcttgcaagctcatctgcgggagggcaatgcccttggagaaccaggagacccctggaaagcagaacagtcatccagtggagaaattaaaactgtgccagcctccaatggcaagagcacattaaccttccccaggcttctctggtccttatcccagtgcactaaattaccaaggaggaaaaccaaagtttgaattgatttcgcttttgttttctcacctaatatttaccaagggcctactgagtacagaatactcaactaggaatgaaaagattcccaaagaaagatctggactttgtccactagaagtgcacaatgtggtcagaagactggaaacactatagaaagggtgagcagtgctgtggtgaaaagagcccagccaggcaccaggaggcctggtttctgagtccagctttgccaatgactctcccagtgttttcagcaagtgtctctattaggtttggttttccttctccttaaaatgacagaagtgatggccgggcgtgctttcatcagattctcaagggggtcagttacccaactaaagttaaggagccttatcctggagggtgtctgggggctctgtgagtctatgattagtgtcaaaatgaaccatgcagactctggagctgcaatgactccacttccctctggcctgtggttctctgatcaacccctttcttgtttctgaggccaagtatcttgctaggcagggccattatcgacctagtacttggtgcaatgaatgcaaaggacctctcctccagcatggctgattctggttgctaagactctatcatccagggcagagatgaagcttcactcttgccagagggactattggctctgaaagacctctagtacaggggaaaaatagatgactaacaccttcaccatgaggaaagagtgggtggtgtgtctaccctttgtctaaactatgcattttgtccagggtcaggaaaaggttaagtcttaggattaaatacaggatattttttttcttgctgagaacagtgagagaagaccgggatagggatggggcagaactagtgtttttgttttcacattcagttctcctgaagcggtgtttggctgaaatggaacaacttctcaaagaaacagggttagattaaaagcagcctgttcctctgccaaagtgtggaagctttctctgccaagtgcatgcccattttctctttccagaggaaaccactgctaatgtctattatcctatcaaatatcttccatctagaagcattacatgtttccataataaacagggcatacagtgctcgctttgtcagcacatacactaaaattgaaacaatacagagattagcatggcccctgcgcgaggatgacaatcaggttatcttaaataaataaatagaaaacaggacatacacaaacacacacacacacacacacacacacaatattcacaggaattgtctgtcattcactgtatgtttgaaggaattttgaaactgtcaaactcatcgcaggatttcaggaaactttcccattaggacaagcaccagagtggtatcatcagagaatctgggagtctaagcagacaaagaagtaaagccaaaagtatttttacctatgtagttacaaaaatgttacaaactgtttacatactgttctgcaacttgttttggcctcaggacacattgtggacagtttcctgtcacttctgtggagctaacctcttttttaaaaaatatatcagtattctatcacatggattacaacataaaattgttgaagcaattctcctttgatgaacatttgagttttcccaatctcttattattacaaatagggatgcaacgagcatctctgtccatttacctttttgcaggataaattcctggttcacaaagtttgcacattttaccttttgtcagaaattgaagagggccaggttttccagggtccaagtcaggcagaacaaatgcagcaatgtggaacagacggaaactccagctctgtcatttcctcactgtgtgtcaccagagtcacaccacct

SEQ ID NO: 408645 - DNA, 378 bp, Homo sapiens
taatttttaaaacttttttagtagagacggggtttcatcatgttggccaggctggtcttgaactcctgacctcaagtgatccacccacctcggactcccaaagtgctgggattacaggtgtgagccactggacctggccgaggcccaggctttgggatttcctagaccagtgacatttccaagttttagaatattcccaaatatctattttgccatgtaaggactttaaaacaatgaccatctattgttgccatcattaacacccaaaactataagaatggcaataatctcagatgaaaaagcagtcctttaggaagctgcagtgagccaagatcgtgccactgcactccagcctgggcgacagagactccatctcaa

SEQ ID NO: 408646 - DNA, 2770 bp, Homo sapiens
cgctccctactccgcctctcgggatcctttaagaggcggggcttggctgccagctccgcggcccgggcaaaaggctgggactttactccgggtggcggcgaggacgagtctgtgctccatcagctgccgcacccgccgcctcccgcccccaaaccccatccccgcggttgagccacgatgagcggcagagtcggcgatctgagccccaggcagaaggaggcattggccaagccagaagcttcgacctgcagaagtcggaggccatgctccggaagcatgtggagttccgaaagcaaaaggacattgacaacatcattagctggcagcctccagaggtgatccaacagtatctgtcagggggtatgtgtggctatgacctggatggctgcccagtctggtacgacataattggacctctggatgccaagggtctgctgttctcagcctccaaacaggacctgctgaggaccaagatgcgggagtgtgagctgcttctgcaagagtgtgcccaccagaccacaaagttggggaggaaggtggagaccatcaccataatttatgactgcgaggggcttggcctcaagcatctctggaagcctgctgtggaggcctatggagagtttctctgcatgtttgaggaaaattatcccgaaacactgaagcgtctttttgttgttaaagcccccaaactgtttcctgtggcctataacctcatcaaacccttcctgagtgaggacactcgtaagaagatcatggtcctgggagcaaattggaaggaggttttactgaaacatatcagccctgaccaggtgcctgtggagtatgggggcaccatgactgaccctgatggaaaccccaagtgcaaatccaagatcaactacgggggtgacatccccaggaagtattatgtgcgagaccaggtgaaacagcagtatgaacacagcgtgcagatttcccgtggctcctcccaccaagtggagtatgagatcctcttccctggctgtgtcctcaggtggcagtttatgtcagatggagcggatgttggttttgggattttcctgaagaccaagatgggagagaggcagcgggcaggggagatgacagaggtgctgcccaaccagaggtacaactcccacctggtccctgaagatgggaccctcacctgcagtgatcctggcatctatgtcctgcggtttgacaacacctacagcttcattcatgccaagaaggtcaatttcactgtggaggtcctgcttccagacaaagcctcagaagagaagatgaaacagctgggggcaggcaccccgaaataacaccttctcctatagcaggcctggccccctcagtgtctccctgtcaatttctaccccttgtagcagtcattttcgcacaaccctgaagcccaaagaaactgggctggaggacagacctcaggagctttcatttcagttaggcagaggaagagcgactgcagtgggtctccgtgtctatcaaatacctaaggagtccccaggagctggctggccatcgtgataggatctgtctgtcctgtaaactgtgccaacttcacctgtccagggacagcgaagctgggggtggcggggggcatgtaccacagggtggcagcagggaaaaaaattagaaaagggtgaaagattgggacttaacacttcagggaagtcagctgccggggagaaacttgctcctaaatgaacacataagtttagatcgcaatgaggagtagcagggtagctggttgctagagttacggtggggatcagaaactcttccaaacattttagcactgaggctggggtagcttttggcttttcccaggtctcaggaggtggcctgagtcagcacacatcttcccactcggtagacaggctggcctctccctcactttgagactttggcaactcctgggccacacggcctgcctctttgattactaatgattgtcagtgactcagagcttcctgggacttcgggtacccacccgctgttctccatgcaaacaaagcgccagggaaatgacccacagggatcgcagctgcagggagggccagggaggttgggggtgggagtgaatgctaaaagcagatcgtccagtgcccttttcagtgctaccggcctctcaccaagcagtcctccatgtgagcaaccccgagacaaaaatgctaagtgggatcaagagagcagcactcggagagggtgtttgccagtctgagtgtcccgcggtgcccgccaacccgcttcctgactgacctgagcaaggtcttactaagcagtcccatctctgtgggaggcatgcaacgcgtgcagggagttcaggtgccggtcggcgtagccaggcctggaggccccccaggcaggaggccgcccaaaggcggggccggcgtctcgcagactaggggctgggggcggccacagacggcctcgaaaccacagcccttaccccaatcccacgagccccgccaacgaaccacaggtgctgggctttagagaacatgggaaggcggccccagacctggcgggaacgcctttccctcagagccaggccccggccccgtctgggaagctcatcttgcgaagctgagggagctcagggcaaaggccaggctagcgcggaccggaaggggccgaggctgcacgggcctctgccagaacgctcaggacatcccggcctgggtttacaacgctgttaggaaaattaaccaatgaataaagcaacgttcagtgcgcaaaaaaaagaaaaaatgcccaccgc

SEQ ID NO: 408647 - DNA, 2737 bp, Homo sapiens
cgctccctactccgcctctcgggatcctttaagaggcggggcttggctgccagctccgcggcccgggcaaaaggctgggactttactccgggtggcggcgaggacgagtctgtgctccatcagctgccgcacccgccgcctcccgcccccaaaccccatccccgcggttgagccacgatgagcggcagagtcggcgatctgagccccaggcagaaggaggcattggccaagtttcgggagaatgtccaggatgtgctgccggccctgccgaatccagatgactattttctcctgcgttggctccgagccagaagcttcgacctgcagaagtcggaggccatgctccggaagcatgtggagttccgaaagcaaaaggacattgacaacatcattagctggcagcctccagagcctccaaacaggacctgctgaggaccaagatgcgggagtgtgagctgcttctgcaagagtgtgcccaccagaccacaaagttggggaggaaggtggagaccatcaccataatttatgactgcgaggggcttggcctcaagcatctctggaagcctgctgtggaggcctatggagagtttctctgcatgtttgaggaaaattatcccgaaacactgaagcgtctttttgttgttaaagcccccaaactgtttcctgtggcctataacctcatcaaacccttcctgagtgaggacactcgtaagaagatcatggtcctgggagcaaattggaaggaggttttactgaaacatatcagccctgaccaggtgcctgtggagtatgggggcaccatgactgaccctgatggaaaccccaagtgcaaatccaagatcaactacgggggtgacatccccaggaagtattatgtgcgagaccaggtgaaacagcagtatgaacacagcgtgcagatttcccgtggctcctcccaccaagtggagtatgagatcctcttccctggctgtgtcctcaggtggcagtttatgtcagatggagcggatgttggttttgggattttcctgaagaccaagatgggagagaggcagcgggcaggggagatgacagaggtgctgcccaaccagaggtacaactcccacctggtccctgaagatgggaccctcacctgcagtgatcctggcatctatgtcctgcggtttgacaacacctacagcttcattcatgccaagaaggtcaatttcactgtggaggtcctgcttccagacaaagcctcagaagagaagatgaaacagctgggggcaggcaccccgaaataacaccttctcctatagcaggcctggccccctcagtgtctccctgtcaatttctaccccttgtagcagtcattttcgcacaaccctgaagcccaaagaaactgggctggaggacagacctcaggagctttcatttcagttaggcagaggaagagcgactgcagtgggtctccgtgtctatcaaatacctaaggagtccccaggagctggctggccatcgtgataggatctgtctgtcctgtaaactgtgccaacttcacctgtccagggacagcgaagctgggggtggcggggggcatgtaccacagggtggcagcagggaaaaaaattagaaaagggtgaaagattgggacttaacacttcagggaagtcagctgccggggagaaacttgctcctaaatgaacacataagtttagatcgcaatgaggagtagcagggtagctggttgctagagttacggtggggatcagaaactcttccaaacattttagcactgaggctggggtagcttttggcttttcccaggtctcaggaggtggcctgagtcagcacacatcttcccactcggtagacaggctggcctctccctcactttgagactttggcaactcctgggccacacggcctgcctctttgattactaatgattgtcagtgactcagagcttcctgggacttcgggtacccacccgctgttctccatgcaaacaaagcgccagggaaatgacccacagggatcgcagctgcagggagggccagggaggttgggggtgggagtgaatgctaaaagcagatcgtccagtgcccttttcagtgctaccggcctctcaccaagcagtcctccatgtgagcaaccccgagacaaaaatgctaagtgggatcaagagagcagcactcggagagggtgtttgccagtctgagtgtcccgcggtgcccgccaacccgcttcctgactgacctgagcaaggtcttactaagcagtcccatctctgtgggaggcatgcaacgcgtgcagggagttcaggtgccggtcggcgtagccaggcctggaggccccccaggcaggaggccgcccaaaggcggggccggcgtctcgcagactaggggctgggggcggccacagacggcctcgaaaccacagcccttaccccaatcccacgagccccgccaacgaaccacaggtgctgggctttagagaacatgggaaggcggccccagacctggcgggaacgcctttccctcagagccaggccccggccccgtctgggaagctcatcttgcgaagctgagggagctcagggcaaaggccaggctagcgcggaccggaaggggccgaggctgcacgggcctctgccagaacgctcaggacatcccggcctgggtttacaacgctgttaggaaaattaaccaatgaataaagcaacgttcagtgcgcaaaaaaaagaaaaaatgcccaccgc

SEQ ID NO: 408648 - DNA, 4045 bp, Homo sapiens
  misc_feature (1155)..(1155): n is a, c, g, or t
  misc_feature (1164)..(1164): n is a, c, g, or t
  misc_feature (1368)..(1368): n is a, c, g, or t
  misc_feature (1374)..(1374): n is a, c, g, or t
  misc_feature (1401)..(1401): n is a, c, g, or t
  misc_feature (1448)..(1448): n is a, c, g, or t
  misc_feature (1468)..(1468): n is a, c, g, or t
  misc_feature (1516)..(1516): n is a, c, g, or t
  misc_feature (1532)..(1532): n is a, c, g, or t
  misc_feature (1549)..(1549): n is a, c, g, or t
  misc_feature (1575)..(1575): n is a, c, g, or t
agaaaaaagaggtctgctcggttgcccaggctgcattgcagtggcagtgatcatagcgaactgcggtcttgaactcctgggctcaagggatcttcctgcctaagcctccaaatagctaagactacaagtgcacgccattatgcccagctattttttattttttagtaaagacaggatctcgctttgttgcccaggctggtctcaaactctcgtgctcaagtggtcctcctgcctcagcctcccgagtagctgggattacaggtgtgagccaccacacctggatgcccaatctacctttctagccttttctccctccactgcacccagccagctctctgctttttgttgcctcagttattctctctgtaagatgggaagaatcctcctggccttatcccaactctccagctggactgggggaagaactataaaagctgagcaagaggtttttatgatttttgttttttctgctgctaccacccaccatgggcatgagacggtttggtttcctggcagcagagctgtgtaggaggttcagtctgttcccctaccacacctaaaactctttcaaccaaacctgcctcaggctgggaagatacagaattttcaacagaggggggagattcactcgggctggtcactggagcttagcagtgcagattaaatcaccccaagaccacagacactgtgttcccaggagttgcatggtctttggtccctaaaaatctgagggctggcagactctggacagtttctgcgggtctccagccagcatgacactggcttgtaccccagggcctggagctgctgcctatatatgctctatatagtaggcataggcaggttttagtatcaaaatattgtacctggctgatatttgtgaatttggattggtgaagtggttcttagcattggctgtgctagagtcaaactctcctagacaggaaggagcttgggtattttaaaaaaaaaaaaaaagagccaaattactggtggctcaacagctgaaaacaatgggagcagaagtgaaatggtggctggggtaaagccaagaatccatttaaggggtgactctacagagatgcatttacttattaagtcacgacttagctgtaggggaaggtgggggaaagacacatagttctgccctcacantgttcagtntaatcaggacagggtatgtgcattcaggccttcctgcccgccacacgtgctgtttcctctgcatggaatgtccttctaccctttctttgtcccctctcctgctgtacttcaatgtatcacctccatggggtaataacatactcttaacgtgtataaggcactttatggtttaaaaagccctctcggccgggcgcagtggctcangcctgnaatcccagcactttgggaggccgaggngggtggatcatctgaggtcaggagttcgagaccagcctggccaacanggtgaaaccctatctctacnaaaaatacaaaaaattagctgggtgtggtgtcgggcgcctgttgtccnagcttctcaggaggcngaggcggaagaatcacntgaacccgggaggcggaggttgcagngatccaagattgcgccactgtactctagcctaggcaacagggtgagactctgtctcaaacagaaaagccttctcaagtacttagttcatttcactcccaccataaccaggcagggcaagaatgtcacttagctgttcagacacgagggcaggaaccagggtctcgatttctggcctggggcagagccatcctctggctcctgctgaaccccctgcagtactatgcatgcactgtgtgctcctaatgcaggaatttgaggcggggtgttgtggggtgcaatggatgggttttttctgcctctttagtgtagaccactagggttatggcgaaatcttacctagtgttgagatacatctttatccttccttccctctcctgccagcaaattggaaggaggttttactgaaacatatcagccctgaccaggtgcctgtggagtatgggggcaccatgactgaccctgatggaaaccccaagtgcaaatccaagggtatgagccgccagaggctagaggtgaacagggatgcctggctcaaatgcacattccagttcactccatgccatgcttctagatcaactacgggggtgacatccccaggaagtattatgtgcgagaccaggtgaaacagcagtatgaacacagcgtgcagatttcccgtggctcctcccaccaagtggagtatgagatcctcttccctggctgtgtcctcaggtggcagtttatgtcagatggagcggatgttggttttgggattttcctgaagaccaagatgggagagaggcagcgggcaggggagatgacagaggtgctgcccaaccagaggtacaactcccacctggtccctgaagatgggaccctcacctgcagtgatcctggcatctatgtcctgcggtttgacaacacctacagcttcattcatgccaagaaggtcaatttcactgtggaggtcctgcttccagacaaagcctcagaagagaagatgaaacagctgggggcaggcaccccgaaataacaccttctcctatagcaggcctggccccctcagtgtctccctgtcaatttctaccccttgtagcagtcattttcgcacaaccctgaagcccaaagaaactgggctggaggacagacctcaggagctttcatttcagttaggcagaggaagagcgactgcagtgggtctccgtgtctatcaaatacctaaggagtccccaggagctggctggccatcgtgataggatctgtctgtcctgtaaactgtgccaacttcacctgtccagggacagcgaagctgggggtggcggggggcatgtaccacagggtggcagcagggaaaaaaattagaaaagggtgaaagattgggacttaacacttcagggaagtcagctgccggggagaaacttgctcctaaatgaacacataagtttagatcgcaatgaggagtagcagggtagctggttgctagagttacggtggggatcagaaactcttccaaacattttagcactgaggctggggtagcttttggcttttcccaggtctcaggaggtggcctgagtcagcacacatcttcccactcggtagacaggctggcctctccctcactttgagactttggcaactcctgggccacacggcctgcctctttgattactaatgattgtcagtgactcagagcttcctgggacttcgggtacccacccgctgttctccatgcaaacaaagcgccagggaaatgacccacagggatcgcagctgcagggagggccagggaggttgggggtgggagtgaatgctaaaagcagatcgtccagtgcccttttcagtgctaccggcctctcaccaagcagtcctccatgtgagcaaccccgagacaaaaatgctaagtgggatcaagagagcagcactcggagagggtgtttgccagtctgagtgtcccgcggtgcccgccaacccgcttcctgactgacctgagcaaggtcttactaagcagtcccatctctgtgggaggcatgcaacgcgtgcagggagttcaggtgccggtcggcgtagccaggcctggaggccccccaggcaggaggccgcccaaaggcggggccggcgtctcgcagactaggggctgggggcggccacagacggcctcgaaaccacagcccttaccccaatcccacgagccccgccaacgaaccacaggtgctgggctttagagaacatgggaaggcggccccagacctggcgggaacgcctttccctcagagccaggccccggccccgtctgggaagctcatcttgcgaagctgagggagctcagggcaaaggccaggctagcgcggaccggaaggggccgaggctgcacgggcctctgccagaacgctcaggacatcccggcctgggtttacaacgctgttaggaaaattaaccaatgaataaagcaacgttcagtgcgcaaaaaaaagaaaaaatgcccaccgc

SEQ ID NO: 408649 - DNA, 2518 bp, Homo sapiens
cgctccctactccgcctctcgggatcctttaagaggcggggcttggctgccagctccgcggcccgggcaaaaggctgggactttactccgggtggcggcgaggacgagtctgtgctccatcagctgccgcacccgccgcctcccgcccccaaaccccatccccgcggttgagccacgatgagcggcagagtcggcgatctgagccccaggcagaaggaggcattggccaagtttcgggagaatgtccaggatgtgctgccggccctgccgaatccagatgactattttctcctgcgttggctccgagccagaagcttcgacctgcagaagtcggaggccatgctccggaagcatgtggagttccgaaagcaaaaggacattgacaacatcattagctggcagcctccagaggtgatccaacagtatctgtcagggggtatgtgtggctatgacctggatggctgcccagtctggtacgacataattggacctctggatgccaagggtctgctgttctcagcctccaaacaggacctgctgaggaccaagatgcgggagtgtgagctgcttctgcaagagtgtgcccaccagaccacaaagttggggaggaaggtggagaccatcaccataatttatgactgcgaggggcttggcctcaagcatctctggaagcctgctgtggaggcctatggagagtttctctgcatgtttgaggaaaattatcccgaaacactgaagcgtctttttgttgttaaagcccccaaactgtttcctgtggcctataacctcatcaaacccttcctgagtgaggacactcgtaagaagatcatggtcctgggagcaaattggaaggaggttttactgaaacatatcagccctgaccaggtgcctgtggagtatgggggcaccatgactgaccctgatggaaaccccaagtgcaaatccaagatcaactacgggggtgacatccccaggaagtattatgtgcgagaccaggtgaaacagcagtatgaacacagcgtgcagatttcccgtggctcctcccaccaagtggagtatgagatcctcttccctggctgtgtcctcaggtggcagtttatgtcagatggagcggatgttggttttgggattttcctgaagaccaagatgggagagaggcagcgggcaggggagatgacagaggtgctgcccaaccagaggtacaactcccacctggtccctgaagatgggaccctcacctgcagtgatcctggcatctatgtcctgcggtttgacaacacctacagcttcattcatgccaagaaggtcaatttcactgtggaggtcctgcttccagacaaagcctcagaagagaagatgaaacagctgggggcaggcaccccgaaataacaccttctcctatagcaggcctggccccctcagtgtctccctgtcaatttctaccccttgtagcagtcattttcgcacaaccctgaagcccaaagaaactgggctggaggacagacctcaggagctttcatttcagttaggcagaggaagagcgactgcagtgggtctccgtgtctatcaaatacctaaggagtccccaggagctggctggccatcgtgataggatctgtctgtcctgtaaactgtgccaacttcacctgtccagggacagcgaagctgggggtggcggggggcatgtaccacagggtggcagcagggaaaaaaattagaaaagggtgaaagattgggacttaacacttcagggaagtcagctgccggggagaaacttgctcctaaatgaacacataagtttagatcgcaatgaggagtagcagggtagctggttgctagagttacggtggggatcagaaactcttccaaacattttagcactgaggctggggtagcttttggcttttcccaggtctcaggaggtggcctgagtcagcacacatcttcccactcggtagacaggctggcctctccctcactttgagactttggcaactcctgggccacacggcctgcctctttgattactaatgattgtcagtgactcagagcttcctgggacttcgggtacccacccgctgttctccatgcaaacaaagcgccagggaaatgacccacagggatcgcagctgcagggagggccagggaggttgggggtgggagtgaatgctaaaagcagatcgtccagtgcccttttcagtgctaccggcctctcaccaagcagtcctccatgtgagcaaccccgagacaaaaatgctaagtgggatcaagagagcagcactcggagagggtgtttgccagtctgagtgtcccgcggtgcccgccaacccgcttcctgactgacctgagcaaggtcttactaagcagtcccatctctgtgggaggcatgcaacgcgctgcacgggcctctgccagaacgctcaggacatcccggcctgggtttacaacgctgttaggaaaattaaccaatgaataaagcaacgttcagtgcgcaaaaaaaagaaaaaatgcccaccgc

SEQ ID NO: 408650 - DNA, 229 bp, Homo sapiens
agtgtgcccaccagaccacaaaggtgagtggaccaccatggctagaaatgagttgaccacagcagaggcattccagcagaagcagggatgtcacacaggaatataagcacagcttcagggccaaggcccagcctttttttttttttttttaatttttaaaacttttttagtagagacggggtttcatcatgttggccaggctggtcttgaactcctgacctcaagtgat

SEQ ID NO: 408651 - DNA, 521 bp, Homo sapiens
ggatgggtgaggcaatgggggcagattctgagcctgctggaatcaagagtgattttgtttccacagtttctctgcatgtttgaggaaaattatcccgaaacactgaagcgtctttttgttgttaaaggtaagttgggaatttcttgtgataaagccagatggaaaagaggggtcaaaaacatgactgcggcagatggagggtcaaacagtgagccaaaagagggggtctgaggacatgttcagaagactgctgcccctgctagtgtgctggctcacgcctgtaaccccagcactttgggaggccgaggcaggaggctctcttgagcccaggagtttgagaccagcctgggtaacacagcaagacctcatctctataaaaaagttaaggaaatgagctgggtatggtggtgcatgcctgtagttccagtttctcaaaaggctgaggcaagagcattgcttgagtctaggagtttaaggctgcagtgagccatgattgtgccactgcactccagcctgggcga

SEQ ID NO: 408652 - DNA, 2846 bp, Homo sapiens
cgctccctactccgcctctcgggatcctttaagaggcggggcttggctgccagctccgcggcccgggcaaaaggctgggactttactccgggtggcggcgaggacgagtctgtgctccatcagctgccgcacccgccgcctcccgcccccaaaccccatccccgcggttgagccacgatgagcggcagagtcggcgatctgagccccaggcagaaggaggcattggccaagtttcgggagaatgtccaggatgtgctgccggccctgccgaatccagatgactattttctcctgcgttggctccgagccagaagcttcgacctgcagaagtcggaggccatgctccggaagcatgtggagttccgaaagcaaaaggacattgacaacatcattagctggcagcctccagaggtgatccaacagtatctgtcagggggtatgtgtggctatgacctggatggctgcccagtctggtacgacataattggacctctggatgccaagggtctgctgttctcagcctccaaacaggacctgctgaggaccaagatgcgggagtgtgagctgcttctgcaagagtgtgcccaccagaccacaaagttggggaggaaggtggagaccatcaccataatttatgactgcgaggggcttggcctcaagcatctctggaagcctgctgtggaggcctatggagagtttctctgcatgtttgaggaaaattatcccgaaacactgaagcgtctttttgttgttaaagcccccaaactgtttcctgtggcctataacctcatcaaacccttcctgagtgaggacactcgtaagaagatcatggtcctgggagcaaattggaaggaggttttactgaaacatatcagccctgaccaggtgcctgtggagtatgggggcaccatgactgaccctgatggaaaccccaagtgcaaatccaagatcaactacgggggtgacatccccaggaagtattatgtgcgagaccaggtgaaacagcagtatgaacacagcgtgcagatttcccgtggctcctcccaccaagtggagtatgagatcctcttccctggctgtgtcctcaggtggcagtttatgtcagatggagcggatgttggttttgggattttcctgaagaccaagatgggagagaggcagcgggcaggggagatgacagaggtgctgcccaaccagaggtacaactcccacctggtccctgaagatgggaccctcacctgcagtgatcctggcatctatgtcctgcggtttgacaacacctacagcttcattcatgccaagaaggtcaatttcactgtggaggtcctgcttccagacaaagcctcagaagagaagatgaaacagctgggggcaggcaccccgaaataacaccttctcctatagcaggcctggccccctcagtgtctccctgtcaatttctaccccttgtagcagtcattttcgcacaaccctgaagcccaaagaaactgggctggaggacagacctcaggagctttcatttcagttaggcagaggaagagcgactgcagtgggtctccgtgtctatcaaatacctaaggagtccccaggagctggctggccatcgtgataggatctgtctgtcctgtaaactgtgccaacttcacctgtccagggacagcgaagctgggggtggcggggggcatgtaccacagggtggcagcagggaaaaaaattagaaaagggtgaaagattgggacttaacacttcagggaagtcagctgccggggagaaacttgctcctaaatgaacacataagtttagatcgcaatgaggagtagcagggtagctggttgctagagttacggtggggatcagaaactcttccaaacattttagcactgaggctggggtagcttttggcttttcccaggtctcaggaggtggcctgagtcagcacacatcttcccactcggtagacaggctggcctctccctcactttgagactttggcaactcctgggccacacggcctgcctctttgattactaatgattgtcagtgactcagagcttcctgggacttcgggtacccacccgctgttctccatgcaaacaaagcgccagggaaatgacccacagggatcgcagctgcagggagggccagggaggttgggggtgggagtgaatgctaaaagcagatcgtccagtgcccttttcagtgctaccggcctctcaccaagcagtcctccatgtgagcaaccccgagacaaaaatgctaagtgggatcaagagagcagcactcggagagggtgtttgccagtctgagtgtcccgcggtgcccgccaacccgcttcctgactgacctgagcaaggtcttactaagcagtcccatctctgtgggaggcatgcaacgcgtgcagggagttcaggtgccggtcggcgtagccaggcctggaggccccccaggcaggaggccgcccaaaggcggggccggcgtctcgcagactaggggctgggggcggccacagacggcctcgaaaccacagcccttaccccaatcccacgagccccgccaacgaaccacaggtgctgggctttagagaacatgggaaggcggccccagacctggcgggaacgcctttccctcagagccaggccccggccccgtctgggaagctcatcttgcgaagctgagggagctcagggcaaaggccaggctagcgcggaccggaaggggccgaggctgcacgggcctctgccagaacgctcaggacatcccggcctgggtttacaacgctgttaggaaaattaaccaatgaataaagcaacgttcagtgcgcaaaaaaaagaaaaaatgcccaccgc

SEQ ID NO: 408653 - DNA, 2706 bp, Homo sapiens
cgctccctactccgcctctcgggatcctttaagaggcggggcttggctgccagctccgcggcccgggcaaaaggctgggactttactccgggtggcggcgaggacgagtctgtgctccatcagctgccgcacccgccgcctcccgcccccaaaccccatccccgcggttgagccacgatgagcggcagagtcggcgatctgagccccaggcagaaggaggcattggccaagtttcgggagaatgtccaggatgtgctgccggccctgccgaatccagatgactattttctcctgcgttggctccgagccagaagcttcgacctgcagaagtcggaggccatgctccggaagcatgtggagttccgaaagcaaaaggacattgacaacatcattagctggcagcctccagaggtgatccaacagtatctgtcagggggtatgtgtggctatgacctggatggctgcccagtctggtacgacataattggacctctggatgccaagggtctgctgttctcagcctccaaacaggacctgctgaggaccaagatgcgggagtgtgagctgcttctgcaagagtgtgcccaccagaccacaaagttggggaggaaggtggagaccatcaccataatttatgactgcgaggggcttggcctcaagcatctctggaagcctgctgtggaggcctatggagagtttctctgcatgtttgaggaaaattatcccgaaacactgaagcgtctttttgttgttaaagcccccaaactgtttcctgtggcctataacctcatcaaacccttcctgagtgaggacactcgtaagaagatcatggtcctgggagcaaattggaaggaggttttactgaaacatatcagccctgaccaggtgcctgtggagtatgggggcaccatgactgaccctgatggaaaccccaagtgcaaatccaaggtggcagtttatgtcagatggagcggatgttggttttgggattttcctgaagaccaagatgggagagaggcagcgggcaggggagatgacagaggtgctgcccaaccagaggtacaactcccacctggtccctgaagatgggaccctcacctgcagtgatcctggcatctatgtcctgcggtttgacaacacctacagcttcattcatgccaagaaggtcaatttcactgtggaggtcctgcttccagacaaagcctcagaagagaagatgaaacagctgggggcaggcaccccgaaataacaccttctcctatagcaggcctggccccctcagtgtctccctgtcaatttctaccccttgtagcagtcattttcgcacaaccctgaagcccaaagaaactgggctggaggacagacctcaggagctttcatttcagttaggcagaggaagagcgactgcagtgggtctccgtgtctatcaaatacctaaggagtccccaggagctggctggccatcgtgataggatctgtctgtcctgtaaactgtgccaacttcacctgtccagggacagcgaagctgggggtggcggggggcatgtaccacagggtggcagcagggaaaaaaattagaaaagggtgaaagattgggacttaacacttcagggaagtcagctgccggggagaaacttgctcctaaatgaacacataagtttagatcgcaatgaggagtagcagggtagctggttgctagagttacggtggggatcagaaactcttccaaacattttagcactgaggctggggtagcttttggcttttcccaggtctcaggaggtggcctgagtcagcacacatcttcccactcggtagacaggctggcctctccctcactttgagactttggcaactcctgggccacacggcctgcctctttgattactaatgattgtcagtgactcagagcttcctgggacttcgggtacccacccgctgttctccatgcaaacaaagcgccagggaaatgacccacagggatcgcagctgcagggagggccagggaggttgggggtgggagtgaatgctaaaagcagatcgtccagtgcccttttcagtgctaccggcctctcaccaagcagtcctccatgtgagcaaccccgagacaaaaatgctaagtgggatcaagagagcagcactcggagagggtgtttgccagtctgagtgtcccgcggtgcccgccaacccgcttcctgactgacctgagcaaggtcttactaagcagtcccatctctgtgggaggcatgcaacgcgtgcagggagttcaggtgccggtcggcgtagccaggcctggaggccccccaggcaggaggccgcccaaaggcggggccggcgtctcgcagactaggggctgggggcggccacagacggcctcgaaaccacagcccttaccccaatcccacgagccccgccaacgaaccacaggtgctgggctttagagaacatgggaaggcggccccagacctggcgggaacgcctttccctcagagccaggccccggccccgtctgggaagctcatcttgcgaagctgagggagctcagggcaaaggccaggctagcgcggaccggaaggggccgaggctgcacgggcctctgccagaacgctcaggacatcccggcctgggtttacaacgctgttaggaaaattaaccaatgaataaagcaacgttcagtgcgcaaaaaaaagaaaaaatgcccaccgc

SEQ ID NO: 408654 - DNA, 2591 bp, Homo sapiens
gtcctcgggcataagtggctctacgggtaccgtgcacagagcacacagtgactcaggaagggggaggccatcaggccaaactgcagaaccaaagccatctcagatgtcatctagatccacccagtcatgtactggaaaagaacacagagacctaggcaggaagagtgactcgcctagaccacaattctggcctggggtgattatctcagtttggaaaactctaggtccggccctaactagctctgattgctctctggatgcacagtgcaatcatttggcctggactggaacgggcttctgaagtaggacagcctgacaagacttcctgctctctgttccctgcagttggggaggaaggtggagaccatcaccataatttatgactgcgaggggcttggcctcaagcatctctggaagcctgctgtggaggcctatggagagtttctctgcatgtttgaggaaaattatcccgaaacactgaagcgtctttttgttgttaaagcccccaaactgtttcctgtggcctataacctcatcaaacccttcctgagtgaggacactcgtaagaagatcatggtcctgggagcaaattggaaggaggttttactgaaacatatcagccctgaccaggtgcctgtggagtatgggggcaccatgactgaccctgatggaaaccccaagtgcaaatccaagatcaactacgggggtgacatccccaggaagtattatgtgcgagaccaggtgaaacagcagtatgaacacagcgtgcagatttcccgtggctcctcccaccaagtggagtatgagatcctcttccctggctgtgtcctcaggtggcagtttatgtcagatggagcggatgttggttttgggattttcctgaagaccaagatgggagagaggcagcgggcaggggagatgacagaggtgctgcccaaccagaggtacaactcccacctggtccctgaagatgggaccctcacctgcagtgatcctggcatctatgtcctgcggtttgacaacacctacagcttcattcatgccaagaaggtcaatttcactgtggaggtcctgcttccagacaaagcctcagaagagaagatgaaacagctgggggcaggcaccccgaaataacaccttctcctatagcaggcctggccccctcagtgtctccctgtcaatttctaccccttgtagcagtcattttcgcacaaccctgaagcccaaagaaactgggctggaggacagacctcaggagctttcatttcagttaggcagaggaagagcgactgcagtgggtctccgtgtctatcaaatacctaaggagtccccaggagctggctggccatcgtgataggatctgtctgtcctgtaaactgtgccaacttcacctgtccagggacagcgaagctgggggtggcggggggcatgtaccacagggtggcagcagggaaaaaaattagaaaagggtgaaagattgggacttaacacttcagggaagtcagctgccggggagaaacttgctcctaaatgaacacataagtttagatcgcaatgaggagtagcagggtagctggttgctagagttacggtggggatcagaaactcttccaaacattttagcactgaggctggggtagcttttggcttttcccaggtctcaggaggtggcctgagtcagcacacatcttcccactcggtagacaggctggcctctccctcactttgagactttggcaactcctgggccacacggcctgcctctttgattactaatgattgtcagtgactcagagcttcctgggacttcgggtacccacccgctgttctccatgcaaacaaagcgccagggaaatgacccacagggatcgcagctgcagggagggccagggaggttgggggtgggagtgaatgctaaaagcagatcgtccagtgcccttttcagtgctaccggcctctcaccaagcagtcctccatgtgagcaaccccgagacaaaaatgctaagtgggatcaagagagcagcactcggagagggtgtttgccagtctgagtgtcccgcggtgcccgccaacccgcttcctgactgacctgagcaaggtcttactaagcagtcccatctctgtgggaggcatgcaacgcgtgcagggagttcaggtgccggtcggcgtagccaggcctggaggccccccaggcaggaggccgcccaaaggcggggccggcgtctcgcagactaggggctgggggcggccacagacggcctcgaaaccacagcccttaccccaatcccacgagccccgccaacgaaccacaggtgctgggctttagagaacatgggaaggcggccccagacctggcgggaacgcctttccctcagagccaggccccggccccgtctgggaagctcatcttgcgaagctgagggagctcagggcaaaggccaggctagcgcggaccggaaggggccgaggctgcacgggcctctgccagaacgctcaggacatcccggcctgggtttacaacgctgttaggaaaattaaccaatgaataaagcaacgttcagtgcgcaaaaaaaagaaaaaatgcccaccgc

SEQ ID NO: 408655 - DNA, 3072 bp, Homo sapiens
  misc_feature (1315)..(1315): n is a, c, g, or t
  misc_feature (1440)..(1440): n is a, c, g, or t
cgctccctactccgcctctcgggatcctttaagaggcggggcttggctgccagctccgcggcccgggcaaaaggctgggactttactccgggtggcggcgaggacgagtctgtgctccatcagctgccgcacccgccgcctcccgcccccaaaccccatccccgcggttgagccacgatgagcggcagagtcggcgatctgagccccaggcagaaggaggcattggccaagtttcgggagaatgtccaggatgtgctgccggccctgccgaatccagatgactattttctcctgcgttggctccgagccagaagcttcgacctgcagaagtcggaggccatgctccggaagcatgtggagttccgaaagcaaaaggacattgacaacatcattagctggcagcctccagaggtgatccaacagtatctgtcagggggtatgtgtggctatgacctggatggctgcccagtctggtacgacataattggacctctggatgccaagggtctgctgttctcagcctccaaacaggacctgctgaggaccaagatgcgggagtgtgagctgcttctgcaagagtgtgcccaccagaccacaaagttggggaggaaggtggagaccatcaccataatttatgactgcgaggggcttggcctcaagcatctctggaagcctgctgtggaggcctatggagagtttctctgcatgtttgaggaaaattatcccgaaacactgaagcgtctttttgttgttaaagcccccaaactgtttcctgtggcctataacctcatcaaacccttcctgagtgaggacactcgtaagaagatcatggtcctgggagcaaattggaaggaggttttactgaaacatatcagccctgaccaggtgcctgtggagtatgggggcaccatgactgaccctgatggaaaccccaagtgcaaatccaagatcaactacgggggtgacatccccaggaagtattatgtgcgagaccaggtgaaacagcagtatgaacacagcgtgcagatttcccgtggctcctcccaccaagtggagtatgagatcctcttccctggctgtgtcctcaggtggcagtttatgtcagatggagcggatgttggttttgggattttcctgaagaccaagatgggagagaggcagcgggcaggggagatgacagaggtgctgcccaaccagaggtacaactcccacctggtccctgaagatgggaccctcacctgcagtgatcctggcatctagttttgctcttgttgcccaggatggaatgtaatggctcgatctcgactcactgcanccttcgcctcccaggttcaagtgattctcctgcctcagcctcccaagtagctgggattacaggcatgggccaccacgcctggctaattttgtatttttagtagagatggggtttctccgtgttcnttaggctggtcttgaactcccggcctcaggtgatccacccgcctcagcctcccaaagtgctgggattacaggcgtgagccaccacgcccagccaaattgtgtgctttcatcagattctcaagggggtcagttacccaactaaagttaaggagccttatcctggagggtgtctgggggctctgtgagtctatgattagtgtcaaaatgaaccatgcagactctggagctgcaatgactccacttccctctggcctgtggttctctgatcaacccctttcttgtttctgaggccaagtatcttgctaggcagggccattatcgacctagtacttggtgcaatgaatgcaaaggacctctcctccagcatggctgattctggttgctaagactctatcatccagggcagagatgaagcttcactcttgccagagggactattggctctgaaagacctctagtacaggggaaaaatagatgactaacaccttcaccatgaggaaagagtgggtggtgtgtctaccctttgtctaaactatgcattttgtccagggtcaggaaaaggttaagtcttaggattaaatacaggatattttttttcttgctgagaacagtgagagaagaccgggatagggatggggcagaactagtgtttttgttttcacattcagttctcctgaagcggtgtttggctgaaatggaacaacttctcaaagaaacagggttagattaaaagcagcctgttcctctgccaaagtgtggaagctttctctgccaagtgcatgcccattttctctttccagaggaaaccactgctaatgtctattatcctatcaaatatcttccatctagaagcattacatgtttccataataaacagggcatacagtgctcgctttgtcagcacatacactaaaattgaaacaatacagagattagcatggcccctgcgcgaggatgacaatcaggttatcttaaataaataaatagaaaacaggacatacacaaacacacacacacacacacacacacacaatattcacaggaattgtctgtcattcactgtatgtttgaaggaattttgaaactgtcaaactcatcgcaggatttcaggaaactttcccattaggacaagcaccagagtggtatcatcagagaatctgggagtctaagcagacaaagaagtaaagccaaaagtatttttacctatgtagttacaaaaatgttacaaactgtttacatactgttctgcaacttgttttggcctcaggacacattgtggacagtttcctgtcacttctgtggagctaacctcttttttaaaaaatatatcagtattctatcacatggattacaacataaaattgttgaagcaattctcctttgatgaacatttgagttttcccaatctcttattattacaaatagggatgcaacgagcatctctgtccatttacctttttgcaggataaattcctggttcacaaagtttgcacattttaccttttgtcagaaattgaagagggccaggttttccagggtccaagtcaggcagaacaaatgcagcaatgtggaacagacggaaactccagctctgtcatttcctcactgtgtgtcaccagagtcacaccacct

SEQ ID NO: 408656 - DNA, 232 bp, Homo sapiens
aatcgagcccggtacccctagttttagaagtttcactagcatcctctgaaacttccacaggttctctttgtaaagaatccttttctggtcaagtttcttcttcatcactcatgccacttactccattctggaccctccttcagtcaaatgttcctgtgcttcaacctccattacccttggaaatgccaccacccccaggcagcaatgtgctattgaaacttctaaaactagg

SEQ ID NO: 408657 - DNA, 479 bp, Homo sapiens
  misc_feature (53)..(53): n is a, c, g, or t
  misc_feature (64)..(64): n is a, c, g, or t
tgtctgtgtaaccgcgctggttttgcccgcacaagaggatggccgttactatnatacaaagtancctagttttactttttttcttttttgcattgtagtttcagattggagaactggcaaataccctgacaagtaaattcgagtttctaggcattaatagacaatccatctccaactttcatgtgctgctcttacagactgaggtaagtctttttttttttttttttgggcataaacagttaagtttttggaatgaaatgctgtatgtgttaacgattctgtcttgcttacattttaagcctaaatttaaatttttaacccttgaagaatatttgagccgacaatccaggaaataaaactgtgttaaccaaagcacagtaaatagacttttttctcacaatttaaaattatattatcatggtcagatgaggccatgtaatgttgaagttactttgtttaatattaaagcattataagtc

SEQ ID NO: 408658 - DNA, 10155 bp, Homo sapiens
  misc_feature (4113)..(4113): n is a, c, g, or t
gctgaagatgtgaatgaagaacaagattactatcctctgccagcagggatcatagacggtatttctatgtaaacgaacagtcgggcgagtctcagtgggagtttccagatggtgaagaggaagaagaagaaagccaagcacaagaaaatagagatgagactcttgccaaacagaccttgaaagacaaaactggcactgattcaaattcaacagaatcctctgaaacttccacagtcggaattgagatgggcgattggcaggaagtctgggatgagaacacgggatgttattattattggaatacacaaacaaatgaagtgacttgggagttaccccaatatcttgccacacaggtacagggattacagcattaccagcccagttctgtgccaggtgctgaaactagttttgtggtaaatacagacatatattctaaggagaaaacgatttctgtttccagtagtaaaagtggaccagtcatagccaagcgagaagttaaaaaggaagtaaatgaaggaattcaggctctctcaaatagtgaggaggagaagaaaggggtggcagcatcgctgcttgctcctttattgcctgagggaataaaagaagaagaagagagatggagaagaaaagtaatttgtaaagaggagccagtttcagaagtaaaagaaacaagtacaacagtagaagaagcaacaacaatagtaaagccacaggaaattatgttggacaatatagaagacccttctcaggaggatctttgcagtgttgtccaatctggagaaagtgaggaggaagaggaacaagatacccttgaactggagctagttttggaaaggaaaaaagcagagttgcgagccttggaggaaggagatggtagtgtgtcagggtctagtccacgttctgatatcagccagccagcatctcaagatggaatgcgtaggcttatgtctaaaagaggaaaatggaagatgtttgttcgagctaccagtccagaatctaccagtaggagttctagtaaaactggacgagatactccagaaaatggagaaactgcaattggtgctgaaaattcagaaaaaatagatgagaattcagataaagagatggaagtagaagaatctccagagaaaataaaagtacagacaacaccaaaagtagaagaagaacaggatttgaaatttcagattggagaactggcaaataccctgacaagtaaattcgagtttctaggcattaatagacaatccatctccaactttcatgtgctgctcttacagactgagactcgaattgcagactggcgggaaggggctcttaatggaaactaccttaaacgaaaacttcaggatgcagcagaacaactaaaacagtatgaaataaacgccactcctaaaggctggtcctgccactgggacaggtacgcactcttctccccttttcacctttcacctttgacatctcagacatgatttgtgatcaccaccatctgacgacatgacagcctgtctggagactgagagcagctgcagttagcggtgctgggcaggcaaagcaccgcaagcacaaagtttggccagccacacattggagaaacaaaagcaatgtttaaagtgttccatgtaacggattttttcccaagatatggacaaagctggtttttactctccagagtgttgcacggagtagggcgggcttgggggttaagcgcatgcgagagctctgtgcgctttacaggacctctggaagcaactactcctgattaacctcggtgaagttaaggaaaacttcgtggctgaagatgtgaatgaagaacaagattactatcctctgccagcaggtcagatgaaaacatttctttatatatttggcttttcttgatttttttttcgttatttgaaatctttgctcttttatttttcagctcccagatcctctccctctctttagctttcactgtgtttgatatcaagaatatgaaatgtgaattccacggtccaagaggggaagagtcacctttcacaaacttcgttgttctcttctttggaagggaaattagtgttctaggcgattgagtcccttcattaatgaaacttgaaaccctgttatgcattggcaaatcacaaaaaaagagaaaagtgttttctaagtctcatctgttggagtgagagggttcagggctgtattcacagagttgctggcagtgcaaatagctttgaattatccttggttctccattctcaattgtcaaagctctttgttgcctttgtgaatagcagtccattaagaggttcgtccctgtgaaagcagactgctgtcctgggacaggaccaaatggaagtgtctttgtaggagaacgggttttaaaacatgtgttttctttcttgtaatttagggatcatagacggtatttctatgtaaacgaacagtcgggcgagtctcagtgggagtttccagatggtgaagaggaagaagaagaaagccaagcacaagaaaatagagatgagactcttgccaaacagaccttgaaagacaaaactggcactgattcaaattcaacagaatcctctgaaacttccacaggtgagacaatttaccttgtactaattcagccaaaatgactttagaggaaaaatcttattaatttacattattaaaagattttatgtcataataatataagcttctgattgagaatagtggtgtgaactaaaacaaggaatgcatgagttattatggttggaaatcagcatactattgttatcacgtgtaaaactgtgccccaaagtgaaaagataggctaacagattttgattttaaaaaattgttttataaccattctatcatgccactgactaagctgtgggtctccaaaaataggaatgcttgtgctgaggaactagatagttgaactgtcaatatatgtggcatgctgagatttgttatacatttctatacaacacttagtctgttcatattgcaacctcatttctcacctccactaatcttacaaaaagcgtggttggtacaaatcaaaatgatatgaagaaatgccattagtacttgtttcagagaagcaaaataattgatcatgaaaaatcaccagcaatcttctggtctaaaacaattggcaataggatgtctcattccatttttaaggtactcttggaagaatttagtttagttacatacattttttaaaagataggctttcatgctcctcagttcctttagtttttaaaaagtttccaatgtgtaaagaaacttccacctgttaatcttaagaattggtagctatttgttaaactgatggcatatgaaggcaagagtctatgagtcgtttctaaagtaatagatctttgaaaattttaaaaagtgaaatttgtcaataacagagttaagagctgaattcttttgtctaaaacttatcgaaattgatgcttgtactctactggctccctgatgatagtagaaaagcactagtaatgtaccaaatgaaactggttgtgtaccagatgattttgttaacttcttaaatagcctagaaatcgtcagcaggtcacatacaactgcagtgataatttcagaacatagcaaaaggctgattttattctacttcacattttagaagtgcattttctcaagttacagggcatttcacttcccttttacatgaagagattttcttttgaatatttttcctctcttttggtagcagtgatagacatgactaataatatattggttctttttgtttgctttttagcagttaatgaactgaagaggcttgatcgtagttctggataggtggctccactcctgaccactgtcaacatcccttatatgttccaaagttgaaaattccactgttaccaattctgaatgttctgtgaacactttagatgagtattaagctgttttctccctttatgacacacatagttgatactgtctggtaaaaggaggctcttgagccattcctatttaattaaaacagaactagttgtagtgtaggaaaaagccactgataaaacaggttatattcttaagcctctctttattgagaacccctagaattgcaggataaacttgatcgaagtaaaatccaaatcttanactaagttctgtgagatttaagagcaataatcaacagttctaagcctaataaagagagctcttaatcagctcagtggtggttaaaaccagctatcttttaaagaagagaaaaaacaaaacacagcaatgccctgtctcttcagaaaattgttttaaaaagttagccaggcatagttagtggcccacgcctgtagtccgagctgtttgggaggttgaggtgggaagattggttgagcccaagattttgaggctgcagtaagccataattgtaccactgcactccagcctgagcgacagagaacaagaccctgtctcaaaaataaagtgggggaaggggtgcaaaattacactgtgagaagccaagaagtttcaaagttctatttatttttctaagtcatttttaatcattatttgttgtttcagtgtttgaatttaacattatgtttttaaagatggagtggattctaaagatgagttgggttcaagatatccaacatatcttttatattgggcttatgtcacttaggtgaagttgagctcctttttctttttaatctccatggaacaatttgtataatttcttgatttaaattgctaaactgagctcttcattcaaaatactaaacaataatttctctttggggggaaaattaaggaaggctttctatacatagaaataaagatgcctaggccgggtgcagtggctcatgcctgtaatcccaatactttggggggctgaggcgggtggatcacctgaggtcaagagttcaagaccagcctgggcaacatggtgaaaccctgcctctactaaaagtacaaaaattagctgggcgtggtggcagctgcctgtaatcccagctactcggaggctgaggcacgagaatcacttgaacctgggaggcgaaggttgcagtgaaccaagatcatgccattgcactccagcctgggcgacagagcaaaactctttatctaaaaaaaaaaaaaaaaaaaagacgcctacagaagcaaggttcttaggtgcagtgactcatgcctgtaattccagcactttgggagtttgaggcaagaggatcacttgagctcaggaattcaaaaccagcctgggcaatatggcaagaccccatctttgcagaatattagcctagcttggtagcacgagtatgtggtcctagctacttggaaggctgaggtgggaaggatcacttgagcctggtaggttgaagctgcagtgagctatattcacaccattgcactctagcttgaacaacaaagtgagatcctgtctcaaaaagaaaaaggaaaaattacagctcacggctgtaatcccagcactttgggaggccaaggcgcgcagatcacttgaggtcaggagtttgagaccagccaacatggtatcaccctgtctctactaaaaatacaaaaattagccaggtgtcgtggcgggtgcctgtaatcccagctactcgggaggctgaggcaggagaatcgcttgaacccaggaggcagagattacagtgaaccaagatgacacctctgcactccagcctgggcaacaggcttaaagactccgtcttaaaaaaaaattaagaatttgtattctcataacatattcagttttaagcttgtagcttttaaatctttgagcacgtaataaaagctgcgtaggccaagtgtggtggctcatgcttgtaatcccagcactttgggaggctgaggcaggaggatcacctgaggtcgggagttcaagagcagcttacccaatatgtagaaaccccgcctctactaaaaatacaaaattagccaggcgtggtcgcatgcctgtaatcctagctactcgggaggctgaggcaggagaatcattgaacccaggaggcggaggttgtggtgggccaatatcacaccattgcactccaacctgggcaacaagagcaagagtccatctaaaaaaagagctgtatataccactttaatctgtccttgggcttcagacttaaatattctcttaaacagcaaaaatactaactaagttaaatttaaaagcaaggagaagcatcattgtaatacgacatccatgtgtattcaaactagaattttctgatggtcttcgtaagataaaggagataattgtcatttctatgacacagcttttataatttgaataaacttagttggagattggagtatttttattatttattttcatgtgagatgggtaatgtgctgacctcataacaaagtttgagggagacacattgtatgtgagaatttgaagtgcttatgaagtacaaaagcagaggccaggtgctcacatctgtaatcccagcactttgggaggccaaggcacacagatcacttgaggtcaggagtttgagaccagcctggccaacatggcgaaaacccctctcttactaaaaatacaaaaattagctggatgtggtggtgtgggcctgtaatcccagctactcgcgaggctgaggcaggagaatcgcttgaacctggcaggcagaggttgcggtgagccaagattgcgtcactgcactccggcgtggacaagagagtgagactccgtcacaaaaaaaaaaaaaaaagaagaaaagtattggattcacatattctaaaaatgctcgtcatttgtggctaattttatcaagtctagtttaatctcatatttacagagtttagttaattctaattagctttgttggaggtcataaaccacattattaaccttgaaccgactctgtgtttacttgagttcctctgcataatagcatgtcaccaccatcataaacatgttggtattgcattatgcttctagaggagacatccaccaatatttgaaaatctggctggtccgagtgcagtggtgtttacaactaattgatcacaaccagttacagactttgtttcttctccagtcctgctgcttcacttgactagccttttaaaaaaaagaaagaaaatagagaaaatcttaacttatatttacttactgtatgttgtgattagtttaatagaagggagtttaatccttaataattaagttagtcctcaacgtttattgacttagttctgatgtagtccttgtgtactattgtataatgtagactacttggccatacttgattttgtctaaaagttaatgcataaattaatattaaatatggccaaatataaaagtttaatgagtcatttgaggtcatttagccagaaaactgcatttatgttcctggtgaatttttttcaatgtccttttccaaaagtggcagtaagcagctgtcttaaaataaggagacagtgggaatgatgttgttaaagtcttttatacaatgtattgtctgtctgttccataaaaagtaaaactactctattcgtgaccagcttgggcaacatagtgagactgtctctttaaaaaaaaaaaaaaaattaaaaattagcaggtgtggtgatgcacacctgtagtcctagcaattcgggaagctgaggtaggaagatcgcttgagccaagtgtttgaggttagaatgagctatgatcgcaccacctacactccagcctgggcaacagagcaagacccaaatggctcatggttgctttgtttgttttaccttgttgagtgccagtgtgtattttgagcaaagcagtgtaaatggccttcttgccctagagtctttcataattgagccttatttaatctaccacttttgaccatgaaatttaacaggtgacttcttctgggtatctactccaggtgaagtgatattttttttgactgagatgtctaaagctcttggattcctggtatctcaccaggacatcttagtaaaacagcaagtatcagatgaggaatcagacttgagttctagctctggtctggccactaacattgatatgatcttgggcaagttagttcctgcctgggtttcattacctttaactgaggaggttgaaatagatgatttctcatgtctcttctactcctaaattctatgattttagggagaaaatccccttcaacattcctgggatatatatctaatagtcccatatattgtgaaacttccctattgacgataaagagggctggggaaggctacaagttctctttgtaaagaatccttttctggtcaagtttcttcttcatcactcatgccacttactccattctggaccctccttcagtcaaatgttcctgtgcttcaacctccattacccttggaaatgccaccacccccacctccacctccagaatcacctccaccccctcctccaccacctcctcctgcggaagatggtgagatccaggaggtagagatggaggatgagggaagtgaggagccccctgccccaggaacagaggaagatacccctttgaaaccttcagcacaaaccacagttgtaactagccagagttcagttgattccaccatctctagttcttcttccactaaaggaataaagaggaaagctacagaaattagcactgcagtggttcagaggtcagctaccattggcagttctccagttctctatagccagtcagctatagctacaggtcaccaggcagcagggattggaaaccaggcaacaggaattggacatcagacaataccagttagccttccagcagcaggaatgggtcatcaggccagaggaatgagcctgcagtcaaattaccttggactagcggcagcacctgcaattatgagttatgcagaatgttctgtcccaattggagtgactgctccctcattgcagccagttcaggcccgaggtgctgtgcctaccgctaccattatagaaccaccaccaccacctcctcctcctcctcctccaccaccaccagctcccaaaatgccaccacctgaaaagacaaaaaaaggaaggaaagacaaggcaaagaagagtaagaccaaaatgccatctttggtaaaaaagtggcagagtatccagcgtgagttagatgaagaggacaattctagttccagtgaagaggatcgggaatcaactgcacagaagcgaattgaagagtggaaacagcagcagctggttagtggcatggcagagagaaatgctaattttgaagcccttcctgaggattggagagcaaggctgaagagaaggaaaatggctccaaacacatagtttttaagtttttaaaacttttttgtattattgtttgttttgtgttcagttcaaagtcttaaccagttttattgtcaaataaactataaatgttatgggggagatcttataaatttcctgggcaagagtgtatgcatacaaagttttcacttttgtgaaatgtaatttttctgtttttgcaaagggatgaggtgattggaattgctttgaccatgctgcctttattctcaaactggcaaacttagcatgttaggtgtattaacctcatcagtcttgaagaacatgtggctcatgagtataacacttctgtagaggactccctgacaaaagtgaagaattaacttctcctccagaacaagtgcaattcagaaggcagctctgcattctaccttgcttgactggaattgtctgaagctttttctggcctcttttctctagtcggccacccctgaagtgctgaggtctaagtggtttacctcgtgctgatagatggccacactctttagagtagttctcataagttctagaactggtagctcggtcgtttcgcacactaggtggcatacaggcagcagcaggtgttcatatccttgattttgagaatttcccctcaagtatgtggcagtaaatacaacaagacactctatgtattaatgtctccattgtcttaaccctgttccaaaacaaaattcacctcctttctttatgtgaatgtattctccataaaattccagtatttaaaaagcagtttactgttctgtactttctgttgtatcacaatcaggtaaaagtcactttaaactgaggaaacggcaaattgtgttttaaagctctttgtatttctccagtttctgaccttgtaaatttgtatatatgcactaataaagctttttttataa

SEQ ID NO: 408659 - DNA, 10071 bp, Homo sapiens
  misc_feature (4029)..(4029): n is a, c, g, or t
gctgaagatgtgaatgaagaacaagattactatcctctgccagcagggatcatagacggtatttctatgtaaacgaacagtcgggcgagtctcagtgggagtttccagatggtgaagaggaagaagaagaaagccaagcacaagaaaatagagatgagactcttgccaaacagaccttgaaagacaaaactggcactgattcaaattcaacagaatcctctgaaacttccacagtcggaattgagatgggcgattggcaggaagtctgggatgagaacacgggatgttattattattggaatacacaaacaaatgaagtgacttgggagttaccccaatatcttgccacacaggtacagggattacagcattaccagcccagttctgtgccaggtgctgaaactagttttgtggtaaatacagacatatattctaaggagaaaacgatttctgtttccagtagtaaaagtggaccagtcatagccaagcgagaagttaaaaaggaagtaaatgaaggaattcaggctctctcaaatagtgaggaggagaagaaaggggtggcagcatcgctgcttgctcctttattgcctgagggaataaaagaagaagaagagagatggagaagaaaagtaatttgtaaagaggagccagtttcagaagtaaaagaaacaagtacaacagtagaagaagcaacaacaatagtaaagccacaggaaattatgttggacaatatagaagacccttctcaggaggatctttgcagtgttgtccaatctggagaaagtgaggaggaagaggaacaagatacccttgaactggagctagttttggaaaggaaaaaagcagagttgcgagccttggaggaaggagatggtagtgtgtcagggtctagtccacgttctgatatcagccagccagcatctcaagatggaatgcgtaggcttatgtctaaaagaggaaaatggaagatgtttgttcgagctaccagtccagaatctaccagtaggagttctagtaaaactggacgagatactccagaaaatggagaaactgcaattggtgctgaaaattcagaaaaaatagatgagaattcagataaagagatggaagtagaagaatctccagagaaaataaaagtacagacaacaccaaaagtagaagaagaacaggatttgaaatttcagattggagaactggcaaataccctgacaagtaaattcgagtttctaggcattaatagacaatccatctccaactttcatgtgctgctcttacagactgagactcgaattgcagactggcgggaaggggctcttaatggaaactaccttaaacgaaaacttcaggatgcagcagaacaactaaaacagtatgaaataaacgccactcctaaaggctggtcctgccactgggacaggtacgcactcttctccccttttcacctttcacctttgacatctcagacatgatttgtgatcaccaccatctgacgacatgacagcctgtctggagactgagagcagctgcagttagcggtgctgggcaggcaaagcaccgcaagcacaaagtttggccagccacacattggagaaacaaaagcaatgtttaaagtgttccatgtaacggattttttcccaagatatggacaaagctggtttttactctccagagtgttgcacggagtagggcgggcttgggggttaagcgcatgcgagagctctgtgcgctttacaggacctctggaagcaactactcctgattaacctcggtgaagttaaggaaaacttcgtggctgaagatgtgaatgaagaacaagattactatcctctgccagcagctcccagatcctctccctctctttagctttcactgtgtttgatatcaagaatatgaaatgtgaattccacggtccaagaggggaagagtcacctttcacaaacttcgttgttctcttctttggaagggaaattagtgttctaggcgattgagtcccttcattaatgaaacttgaaaccctgttatgcattggcaaatcacaaaaaaagagaaaagtgttttctaagtctcatctgttggagtgagagggttcagggctgtattcacagagttgctggcagtgcaaatagctttgaattatccttggttctccattctcaattgtcaaagctctttgttgcctttgtgaatagcagtccattaagaggttcgtccctgtgaaagcagactgctgtcctgggacaggaccaaatggaagtgtctttgtaggagaacgggttttaaaacatgtgttttctttcttgtaatttagggatcatagacggtatttctatgtaaacgaacagtcgggcgagtctcagtgggagtttccagatggtgaagaggaagaagaagaaagccaagcacaagaaaatagagatgagactcttgccaaacagaccttgaaagacaaaactggcactgattcaaattcaacagaatcctctgaaacttccacaggtgagacaatttaccttgtactaattcagccaaaatgactttagaggaaaaatcttattaatttacattattaaaagattttatgtcataataatataagcttctgattgagaatagtggtgtgaactaaaacaaggaatgcatgagttattatggttggaaatcagcatactattgttatcacgtgtaaaactgtgccccaaagtgaaaagataggctaacagattttgattttaaaaaattgttttataaccattctatcatgccactgactaagctgtgggtctccaaaaataggaatgcttgtgctgaggaactagatagttgaactgtcaatatatgtggcatgctgagatttgttatacatttctatacaacacttagtctgttcatattgcaacctcatttctcacctccactaatcttacaaaaagcgtggttggtacaaatcaaaatgatatgaagaaatgccattagtacttgtttcagagaagcaaaataattgatcatgaaaaatcaccagcaatcttctggtctaaaacaattggcaataggatgtctcattccatttttaaggtactcttggaagaatttagtttagttacatacattttttaaaagataggctttcatgctcctcagttcctttagtttttaaaaagtttccaatgtgtaaagaaacttccacctgttaatcttaagaattggtagctatttgttaaactgatggcatatgaaggcaagagtctatgagtcgtttctaaagtaatagatctttgaaaattttaaaaagtgaaatttgtcaataacagagttaagagctgaattcttttgtctaaaacttatcgaaattgatgcttgtactctactggctccctgatgatagtagaaaagcactagtaatgtaccaaatgaaactggttgtgtaccagatgattttgttaacttcttaaatagcctagaaatcgtcagcaggtcacatacaactgcagtgataatttcagaacatagcaaaaggctgattttattctacttcacattttagaagtgcattttctcaagttacagggcatttcacttcccttttacatgaagagattttcttttgaatatttttcctctcttttggtagcagtgatagacatgactaataatatattggttctttttgtttgctttttagcagttaatgaactgaagaggcttgatcgtagttctggataggtggctccactcctgaccactgtcaacatcccttatatgttccaaagttgaaaattccactgttaccaattctgaatgttctgtgaacactttagatgagtattaagctgttttctccctttatgacacacatagttgatactgtctggtaaaaggaggctcttgagccattcctatttaattaaaacagaactagttgtagtgtaggaaaaagccactgataaaacaggttatattcttaagcctctctttattgagaacccctagaattgcaggataaacttgatcgaagtaaaatccaaatcttanactaagttctgtgagatttaagagcaataatcaacagttctaagcctaataaagagagctcttaatcagctcagtggtggttaaaaccagctatcttttaaagaagagaaaaaacaaaacacagcaatgccctgtctcttcagaaaattgttttaaaaagttagccaggcatagttagtggcccacgcctgtagtccgagctgtttgggaggttgaggtgggaagattggttgagcccaagattttgaggctgcagtaagccataattgtaccactgcactccagcctgagcgacagagaacaagaccctgtctcaaaaataaagtgggggaaggggtgcaaaattacactgtgagaagccaagaagtttcaaagttctatttatttttctaagtcatttttaatcattatttgttgtttcagtgtttgaatttaacattatgtttttaaagatggagtggattctaaagatgagttgggttcaagatatccaacatatcttttatattgggcttatgtcacttaggtgaagttgagctcctttttctttttaatctccatggaacaatttgtataatttcttgatttaaattgctaaactgagctcttcattcaaaatactaaacaataatttctctttggggggaaaattaaggaaggctttctatacatagaaataaagatgcctaggccgggtgcagtggctcatgcctgtaatcccaatactttggggggctgaggcgggtggatcacctgaggtcaagagttcaagaccagcctgggcaacatggtgaaaccctgcctctactaaaagtacaaaaattagctgggcgtggtggcagctgcctgtaatcccagctactcggaggctgaggcacgagaatcacttgaacctgggaggcgaaggttgcagtgaaccaagatcatgccattgcactccagcctgggcgacagagcaaaactctttatctaaaaaaaaaaaaaaaaaaaagacgcctacagaagcaaggttcttaggtgcagtgactcatgcctgtaattccagcactttgggagtttgaggcaagaggatcacttgagctcaggaattcaaaaccagcctgggcaatatggcaagaccccatctttgcagaatattagcctagcttggtagcacgagtatgtggtcctagctacttggaaggctgaggtgggaaggatcacttgagcctggtaggttgaagctgcagtgagctatattcacaccattgcactctagcttgaacaacaaagtgagatcctgtctcaaaaagaaaaaggaaaaattacagctcacggctgtaatcccagcactttgggaggccaaggcgcgcagatcacttgaggtcaggagtttgagaccagccaacatggtatcaccctgtctctactaaaaatacaaaaattagccaggtgtcgtggcgggtgcctgtaatcccagctactcgggaggctgaggcaggagaatcgcttgaacccaggaggcagagattacagtgaaccaagatgacacctctgcactccagcctgggcaacaggcttaaagactccgtcttaaaaaaaaattaagaatttgtattctcataacatattcagttttaagcttgtagcttttaaatctttgagcacgtaataaaagctgcgtaggccaagtgtggtggctcatgcttgtaatcccagcactttgggaggctgaggcaggaggatcacctgaggtcgggagttcaagagcagcttacccaatatgtagaaaccccgcctctactaaaaatacaaaattagccaggcgtggtcgcatgcctgtaatcctagctactcgggaggctgaggcaggagaatcattgaacccaggaggcggaggttgtggtgggccaatatcacaccattgcactccaacctgggcaacaagagcaagagtccatctaaaaaaagagctgtatataccactttaatctgtccttgggcttcagacttaaatattctcttaaacagcaaaaatactaactaagttaaatttaaaagcaaggagaagcatcattgtaatacgacatccatgtgtattcaaactagaattttctgatggtcttcgtaagataaaggagataattgtcatttctatgacacagcttttataatttgaataaacttagttggagattggagtatttttattatttattttcatgtgagatgggtaatgtgctgacctcataacaaagtttgagggagacacattgtatgtgagaatttgaagtgcttatgaagtacaaaagcagaggccaggtgctcacatctgtaatcccagcactttgggaggccaaggcacacagatcacttgaggtcaggagtttgagaccagcctggccaacatggcgaaaacccctctcttactaaaaatacaaaaattagctggatgtggtggtgtgggcctgtaatcccagctactcgcgaggctgaggcaggagaatcgcttgaacctggcaggcagaggttgcggtgagccaagattgcgtcactgcactccggcgtggacaagagagtgagactccgtcacaaaaaaaaaaaaaaaagaagaaaagtattggattcacatattctaaaaatgctcgtcatttgtggctaattttatcaagtctagtttaatctcatatttacagagtttagttaattctaattagctttgttggaggtcataaaccacattattaaccttgaaccgactctgtgtttacttgagttcctctgcataatagcatgtcaccaccatcataaacatgttggtattgcattatgcttctagaggagacatccaccaatatttgaaaatctggctggtccgagtgcagtggtgtttacaactaattgatcacaaccagttacagactttgtttcttctccagtcctgctgcttcacttgactagccttttaaaaaaaagaaagaaaatagagaaaatcttaacttatatttacttactgtatgttgtgattagtttaatagaagggagtttaatccttaataattaagttagtcctcaacgtttattgacttagttctgatgtagtccttgtgtactattgtataatgtagactacttggccatacttgattttgtctaaaagttaatgcataaattaatattaaatatggccaaatataaaagtttaatgagtcatttgaggtcatttagccagaaaactgcatttatgttcctggtgaatttttttcaatgtccttttccaaaagtggcagtaagcagctgtcttaaaataaggagacagtgggaatgatgttgttaaagtcttttatacaatgtattgtctgtctgttccataaaaagtaaaactactctattcgtgaccagcttgggcaacatagtgagactgtctctttaaaaaaaaaaaaaaaattaaaaattagcaggtgtggtgatgcacacctgtagtcctagcaattcgggaagctgaggtaggaagatcgcttgagccaagtgtttgaggttagaatgagctatgatcgcaccacctacactccagcctgggcaacagagcaagacccaaatggctcatggttgctttgtttgttttaccttgttgagtgccagtgtgtattttgagcaaagcagtgtaaatggccttcttgccctagagtctttcataattgagccttatttaatctaccacttttgaccatgaaatttaacaggtgacttcttctgggtatctactccaggtgaagtgatattttttttgactgagatgtctaaagctcttggattcctggtatctcaccaggacatcttagtaaaacagcaagtatcagatgaggaatcagacttgagttctagctctggtctggccactaacattgatatgatcttgggcaagttagttcctgcctgggtttcattacctttaactgaggaggttgaaatagatgatttctcatgtctcttctactcctaaattctatgattttagggagaaaatccccttcaacattcctgggatatatatctaatagtcccatatattgtgaaacttccctattgacgataaagagggctggggaaggctacaagttctctttgtaaagaatccttttctggtcaagtttcttcttcatcactcatgccacttactccattctggaccctccttcagtcaaatgttcctgtgcttcaacctccattacccttggaaatgccaccacccccacctccacctccagaatcacctccaccccctcctccaccacctcctcctgcggaagatggtgagatccaggaggtagagatggaggatgagggaagtgaggagccccctgccccaggaacagaggaagatacccctttgaaaccttcagcacaaaccacagttgtaactagccagagttcagttgattccaccatctctagttcttcttccactaaaggaataaagaggaaagctacagaaattagcactgcagtggttcagaggtcagctaccattggcagttctccagttctctatagccagtcagctatagctacaggtcaccaggcagcagggattggaaaccaggcaacaggaattggacatcagacaataccagttagccttccagcagcaggaatgggtcatcaggccagaggaatgagcctgcagtcaaattaccttggactagcggcagcacctgcaattatgagttatgcagaatgttctgtcccaattggagtgactgctccctcattgcagccagttcaggcccgaggtgctgtgcctaccgctaccattatagaaccaccaccaccacctcctcctcctcctcctccaccaccaccagctcccaaaatgccaccacctgaaaagacaaaaaaaggaaggaaagacaaggcaaagaagagtaagaccaaaatgccatctttggtaaaaaagtggcagagtatccagcgtgagttagatgaagaggacaattctagttccagtgaagaggatcgggaatcaactgcacagaagcgaattgaagagtggaaacagcagcagctggttagtggcatggcagagagaaatgctaattttgaagcccttcctgaggattggagagcaaggctgaagagaaggaaaatggctccaaacacatagtttttaagtttttaaaacttttttgtattattgtttgttttgtgttcagttcaaagtcttaaccagttttattgtcaaataaactataaatgttatgggggagatcttataaatttcctgggcaagagtgtatgcatacaaagttttcacttttgtgaaatgtaatttttctgtttttgcaaagggatgaggtgattggaattgctttgaccatgctgcctttattctcaaactggcaaacttagcatgttaggtgtattaacctcatcagtcttgaagaacatgtggctcatgagtataacacttctgtagaggactccctgacaaaagtgaagaattaacttctcctccagaacaagtgcaattcagaaggcagctctgcattctaccttgcttgactggaattgtctgaagctttttctggcctcttttctctagtcggccacccctgaagtgctgaggtctaagtggtttacctcgtgctgatagatggccacactctttagagtagttctcataagttctagaactggtagctcggtcgtttcgcacactaggtggcatacaggcagcagcaggtgttcatatccttgattttgagaatttcccctcaagtatgtggcagtaaatacaacaagacactctatgtattaatgtctccattgtcttaaccctgttccaaaacaaaattcacctcctttctttatgtgaatgtattctccataaaattccagtatttaaaaagcagtttactgttctgtactttctgttgtatcacaatcaggtaaaagtcactttaaactgaggaaacggcaaattgtgttttaaagctctttgtatttctccagtttctgaccttgtaaatttgtatatatgcactaataaagctttttttataa

SEQ ID NO: 408660 - DNA, 9180 bp, Homo sapiens
  misc_feature (3138)..(3138): n is a, c, g, or t
gctgaagatgtgaatgaagaacaagattactatcctctgccagcagggatcatagacggtatttctatgtaaacgaacagtcgggcgagtctcagtgggagtttccagatggtgaagaggaagaagaagaaagccaagcacaagaaaatagagatgagactcttgccaaacagaccttgaaagacaaaactggcactgattcaaattcaacagaatcctctgaaacttccacagtcggaattgagatgggcgattggcaggaagtctgggatgagaacacgggatgttattattattggaatacacaaacaaatgaagtgacttgggagttaccccaatatcttgccacacaggtacagggattacagcattaccagcccagttctgtgccaggtgctgaaactagttttgtggtaaatacagacatatattctaaggagaaaacgatttctgtttccagtagtaaaagtggaccagtcatagccaagcgagaagttaaaaaggaagtaaatgaaggaattcaggctctctcaaatagtgaggaggagaagaaaggggtggcagcatcgctgcttgctcctttattgcctgagggaataaaagaagaagaagagagatggagaagaaaagtaatttgtaaagaggagccagtttcagaagtaaaagaaacaagtacaacagtagaagaagcaacaacaatagtaaagccacaggaaattatgttggacaatatagaagacccttctcaggaggatctttgcagtgttgtccaatctggagaaagtgaggaggaagaggaacaagatacccttgaactggagctagttttggaaaggaaaaaagcagagttgcgagccttggaggaaggagatggtagtgtgtcagggtctagtccacgttctgatatcagccagccagcatctcaagatggaatgcgtaggcttatgtctaaaagaggaaaatggaagatgtttgttcgagctaccagtccagaatctaccagtaggagttctagtaaaactggacgagatactccagaaaatggagaaactgcaattggtgctgaaaattcagaaaaaatagatgagaattcagataaagagatggaagtagaagaatctccagagaaaataaaagtacagacaacaccaaaagtagaagaagaacaggatttgaaatttcagattggagaactggcaaataccctgacaagtaaattcgagtttctaggcattaatagacaatccatctccaactttcatgtgctgctcttacagactgagactcgaattgcagactggcgggaaggggctcttaatggaaactaccttaaacgaaaacttcaggatgcagcagaacaactaaaacagtatgaaataaacgccactcctaaaggctggtcctgccactgggacagggatcatagacggtatttctatgtaaacgaacagtcgggcgagtctcagtgggagtttccagatggtgaagaggaagaagaagaaagccaagcacaagaaaatagagatgagactcttgccaaacagaccttgaaagacaaaactggcactgattcaaattcaacagaatcctctgaaacttccacaggtgagacaatttaccttgtactaattcagccaaaatgactttagaggaaaaatcttattaatttacattattaaaagattttatgtcataataatataagcttctgattgagaatagtggtgtgaactaaaacaaggaatgcatgagttattatggttggaaatcagcatactattgttatcacgtgtaaaactgtgccccaaagtgaaaagataggctaacagattttgattttaaaaaattgttttataaccattctatcatgccactgactaagctgtgggtctccaaaaataggaatgcttgtgctgaggaactagatagttgaactgtcaatatatgtggcatgctgagatttgttatacatttctatacaacacttagtctgttcatattgcaacctcatttctcacctccactaatcttacaaaaagcgtggttggtacaaatcaaaatgatatgaagaaatgccattagtacttgtttcagagaagcaaaataattgatcatgaaaaatcaccagcaatcttctggtctaaaacaattggcaataggatgtctcattccatttttaaggtactcttggaagaatttagtttagttacatacattttttaaaagataggctttcatgctcctcagttcctttagtttttaaaaagtttccaatgtgtaaagaaacttccacctgttaatcttaagaattggtagctatttgttaaactgatggcatatgaaggcaagagtctatgagtcgtttctaaagtaatagatctttgaaaattttaaaaagtgaaatttgtcaataacagagttaagagctgaattcttttgtctaaaacttatcgaaattgatgcttgtactctactggctccctgatgatagtagaaaagcactagtaatgtaccaaatgaaactggttgtgtaccagatgattttgttaacttcttaaatagcctagaaatcgtcagcaggtcacatacaactgcagtgataatttcagaacatagcaaaaggctgattttattctacttcacattttagaagtgcattttctcaagttacagggcatttcacttcccttttacatgaagagattttcttttgaatatttttcctctcttttggtagcagtgatagacatgactaataatatattggttctttttgtttgctttttagcagttaatgaactgaagaggcttgatcgtagttctggataggtggctccactcctgaccactgtcaacatcccttatatgttccaaagttgaaaattccactgttaccaattctgaatgttctgtgaacactttagatgagtattaagctgttttctccctttatgacacacatagttgatactgtctggtaaaaggaggctcttgagccattcctatttaattaaaacagaactagttgtagtgtaggaaaaagccactgataaaacaggttatattcttaagcctctctttattgagaacccctagaattgcaggataaacttgatcgaagtaaaatccaaatcttanactaagttctgtgagatttaagagcaataatcaacagttctaagcctaataaagagagctcttaatcagctcagtggtggttaaaaccagctatcttttaaagaagagaaaaaacaaaacacagcaatgccctgtctcttcagaaaattgttttaaaaagttagccaggcatagttagtggcccacgcctgtagtccgagctgtttgggaggttgaggtgggaagattggttgagcccaagattttgaggctgcagtaagccataattgtaccactgcactccagcctgagcgacagagaacaagaccctgtctcaaaaataaagtgggggaaggggtgcaaaattacactgtgagaagccaagaagtttcaaagttctatttatttttctaagtcatttttaatcattatttgttgtttcagtgtttgaatttaacattatgtttttaaagatggagtggattctaaagatgagttgggttcaagatatccaacatatcttttatattgggcttatgtcacttaggtgaagttgagctcctttttctttttaatctccatggaacaatttgtataatttcttgatttaaattgctaaactgagctcttcattcaaaatactaaacaataatttctctttggggggaaaattaaggaaggctttctatacatagaaataaagatgcctaggccgggtgcagtggctcatgcctgtaatcccaatactttggggggctgaggcgggtggatcacctgaggtcaagagttcaagaccagcctgggcaacatggtgaaaccctgcctctactaaaagtacaaaaattagctgggcgtggtggcagctgcctgtaatcccagctactcggaggctgaggcacgagaatcacttgaacctgggaggcgaaggttgcagtgaaccaagatcatgccattgcactccagcctgggcgacagagcaaaactctttatctaaaaaaaaaaaaaaaaaaaagacgcctacagaagcaaggttcttaggtgcagtgactcatgcctgtaattccagcactttgggagtttgaggcaagaggatcacttgagctcaggaattcaaaaccagcctgggcaatatggcaagaccccatctttgcagaatattagcctagcttggtagcacgagtatgtggtcctagctacttggaaggctgaggtgggaaggatcacttgagcctggtaggttgaagctgcagtgagctatattcacaccattgcactctagcttgaacaacaaagtgagatcctgtctcaaaaagaaaaaggaaaaattacagctcacggctgtaatcccagcactttgggaggccaaggcgcgcagatcacttgaggtcaggagtttgagaccagccaacatggtatcaccctgtctctactaaaaatacaaaaattagccaggtgtcgtggcgggtgcctgtaatcccagctactcgggaggctgaggcaggagaatcgcttgaacccaggaggcagagattacagtgaaccaagatgacacctctgcactccagcctgggcaacaggcttaaagactccgtcttaaaaaaaaattaagaatttgtattctcataacatattcagttttaagcttgtagcttttaaatctttgagcacgtaataaaagctgcgtaggccaagtgtggtggctcatgcttgtaatcccagcactttgggaggctgaggcaggaggatcacctgaggtcgggagttcaagagcagcttacccaatatgtagaaaccccgcctctactaaaaatacaaaattagccaggcgtggtcgcatgcctgtaatcctagctactcgggaggctgaggcaggagaatcattgaacccaggaggcggaggttgtggtgggccaatatcacaccattgcactccaacctgggcaacaagagcaagagtccatctaaaaaaagagctgtatataccactttaatctgtccttgggcttcagacttaaatattctcttaaacagcaaaaatactaactaagttaaatttaaaagcaaggagaagcatcattgtaatacgacatccatgtgtattcaaactagaattttctgatggtcttcgtaagataaaggagataattgtcatttctatgacacagcttttataatttgaataaacttagttggagattggagtatttttattatttattttcatgtgagatgggtaatgtgctgacctcataacaaagtttgagggagacacattgtatgtgagaatttgaagtgcttatgaagtacaaaagcagaggccaggtgctcacatctgtaatcccagcactttgggaggccaaggcacacagatcacttgaggtcaggagtttgagaccagcctggccaacatggcgaaaacccctctcttactaaaaatacaaaaattagctggatgtggtggtgtgggcctgtaatcccagctactcgcgaggctgaggcaggagaatcgcttgaacctggcaggcagaggttgcggtgagccaagattgcgtcactgcactccggcgtggacaagagagtgagactccgtcacaaaaaaaaaaaaaaaagaagaaaagtattggattcacatattctaaaaatgctcgtcatttgtggctaattttatcaagtctagtttaatctcatatttacagagtttagttaattctaattagctttgttggaggtcataaaccacattattaaccttgaaccgactctgtgtttacttgagttcctctgcataatagcatgtcaccaccatcataaacatgttggtattgcattatgcttctagaggagacatccaccaatatttgaaaatctggctggtccgagtgcagtggtgtttacaactaattgatcacaaccagttacagactttgtttcttctccagtcctgctgcttcacttgactagccttttaaaaaaaagaaagaaaatagagaaaatcttaacttatatttacttactgtatgttgtgattagtttaatagaagggagtttaatccttaataattaagttagtcctcaacgtttattgacttagttctgatgtagtccttgtgtactattgtataatgtagactacttggccatacttgattttgtctaaaagttaatgcataaattaatattaaatatggccaaatataaaagtttaatgagtcatttgaggtcatttagccagaaaactgcatttatgttcctggtgaatttttttcaatgtccttttccaaaagtggcagtaagcagctgtcttaaaataaggagacagtgggaatgatgttgttaaagtcttttatacaatgtattgtctgtctgttccataaaaagtaaaactactctattcgtgaccagcttgggcaacatagtgagactgtctctttaaaaaaaaaaaaaaaattaaaaattagcaggtgtggtgatgcacacctgtagtcctagcaattcgggaagctgaggtaggaagatcgcttgagccaagtgtttgaggttagaatgagctatgatcgcaccacctacactccagcctgggcaacagagcaagacccaaatggctcatggttgctttgtttgttttaccttgttgagtgccagtgtgtattttgagcaaagcagtgtaaatggccttcttgccctagagtctttcataattgagccttatttaatctaccacttttgaccatgaaatttaacaggtgacttcttctgggtatctactccaggtgaagtgatattttttttgactgagatgtctaaagctcttggattcctggtatctcaccaggacatcttagtaaaacagcaagtatcagatgaggaatcagacttgagttctagctctggtctggccactaacattgatatgatcttgggcaagttagttcctgcctgggtttcattacctttaactgaggaggttgaaatagatgatttctcatgtctcttctactcctaaattctatgattttagggagaaaatccccttcaacattcctgggatatatatctaatagtcccatatattgtgaaacttccctattgacgataaagagggctggggaaggctacaagttctctttgtaaagaatccttttctggtcaagtttcttcttcatcactcatgccacttactccattctggaccctccttcagtcaaatgttcctgtgcttcaacctccattacccttggaaatgccaccacccccacctccacctccagaatcacctccaccccctcctccaccacctcctcctgcggaagatggtgagatccaggaggtagagatggaggatgagggaagtgaggagccccctgccccaggaacagaggaagatacccctttgaaaccttcagcacaaaccacagttgtaactagccagagttcagttgattccaccatctctagttcttcttccactaaaggaataaagaggaaagctacagaaattagcactgcagtggttcagaggtcagctaccattggcagttctccagttctctatagccagtcagctatagctacaggtcaccaggcagcagggattggaaaccaggcaacaggaattggacatcagacaataccagttagccttccagcagcaggaatgggtcatcaggccagaggaatgagcctgcagtcaaattaccttggactagcggcagcacctgcaattatgagttatgcagaatgttctgtcccaattggagtgactgctccctcattgcagccagttcaggcccgaggtgctgtgcctaccgctaccattatagaaccaccaccaccacctcctcctcctcctcctccaccaccaccagctcccaaaatgccaccacctgaaaagacaaaaaaaggaaggaaagacaaggcaaagaagagtaagaccaaaatgccatctttggtaaaaaagtggcagagtatccagcgtgagttagatgaagaggacaattctagttccagtgaagaggatcgggaatcaactgcacagaagcgaattgaagagtggaaacagcagcagctggttagtggcatggcagagagaaatgctaattttgaagcccttcctgaggattggagagcaaggctgaagagaaggaaaatggctccaaacacatagtttttaagtttttaaaacttttttgtattattgtttgttttgtgttcagttcaaagtcttaaccagttttattgtcaaataaactataaatgttatgggggagatcttataaatttcctgggcaagagtgtatgcatacaaagttttcacttttgtgaaatgtaatttttctgtttttgcaaagggatgaggtgattggaattgctttgaccatgctgcctttattctcaaactggcaaacttagcatgttaggtgtattaacctcatcagtcttgaagaacatgtggctcatgagtataacacttctgtagaggactccctgacaaaagtgaagaattaacttctcctccagaacaagtgcaattcagaaggcagctctgcattctaccttgcttgactggaattgtctgaagctttttctggcctcttttctctagtcggccacccctgaagtgctgaggtctaagtggtttacctcgtgctgatagatggccacactctttagagtagttctcataagttctagaactggtagctcggtcgtttcgcacactaggtggcatacaggcagcagcaggtgttcatatccttgattttgagaatttcccctcaagtatgtggcagtaaatacaacaagacactctatgtattaatgtctccattgtcttaaccctgttccaaaacaaaattcacctcctttctttatgtgaatgtattctccataaaattccagtatttaaaaagcagtttactgttctgtactttctgttgtatcacaatcaggtaaaagtcactttaaactgaggaaacggcaaattgtgttttaaagctctttgtatttctccagtttctgaccttgtaaatttgtatatatgcactaataaagctttttttataa

SEQ ID NO: 408661 - DNA, 9814 bp, Homo sapiens
  misc_feature (4113)..(4113): n is a, c, g, or t
gctgaagatgtgaatgaagaacaagattactatcctctgccagcagggatcatagacggtatttctatgtaaacgaacagtcgggcgagtctcagtgggagtttccagatggtgaagaggaagaagaagaaagccaagcacaagaaaatagagatgagactcttgccaaacagaccttgaaagacaaaactggcactgattcaaattcaacagaatcctctgaaacttccacagtcggaattgagatgggcgattggcaggaagtctgggatgagaacacgggatgttattattattggaatacacaaacaaatgaagtgacttgggagttaccccaatatcttgccacacaggtacagggattacagcattaccagcccagttctgtgccaggtgctgaaactagttttgtggtaaatacagacatatattctaaggagaaaacgatttctgtttccagtagtaaaagtggaccagtcatagccaagcgagaagttaaaaaggaagtaaatgaaggaattcaggctctctcaaatagtgaggaggagaagaaaggggtggcagcatcgctgcttgctcctttattgcctgagggaataaaagaagaagaagagagatggagaagaaaagtaatttgtaaagaggagccagtttcagaagtaaaagaaacaagtacaacagtagaagaagcaacaacaatagtaaagccacaggaaattatgttggacaatatagaagacccttctcaggaggatctttgcagtgttgtccaatctggagaaagtgaggaggaagaggaacaagatacccttgaactggagctagttttggaaaggaaaaaagcagagttgcgagccttggaggaaggagatggtagtgtgtcagggtctagtccacgttctgatatcagccagccagcatctcaagatggaatgcgtaggcttatgtctaaaagaggaaaatggaagatgtttgttcgagctaccagtccagaatctaccagtaggagttctagtaaaactggacgagatactccagaaaatggagaaactgcaattggtgctgaaaattcagaaaaaatagatgagaattcagataaagagatggaagtagaagaatctccagagaaaataaaagtacagacaacaccaaaagtagaagaagaacaggatttgaaatttcagattggagaactggcaaataccctgacaagtaaattcgagtttctaggcattaatagacaatccatctccaactttcatgtgctgctcttacagactgagactcgaattgcagactggcgggaaggggctcttaatggaaactaccttaaacgaaaacttcaggatgcagcagaacaactaaaacagtatgaaataaacgccactcctaaaggctggtcctgccactgggacaggtacgcactcttctccccttttcacctttcacctttgacatctcagacatgatttgtgatcaccaccatctgacgacatgacagcctgtctggagactgagagcagctgcagttagcggtgctgggcaggcaaagcaccgcaagcacaaagtttggccagccacacattggagaaacaaaagcaatgtttaaagtgttccatgtaacggattttttcccaagatatggacaaagctggtttttactctccagagtgttgcacggagtagggcgggcttgggggttaagcgcatgcgagagctctgtgcgctttacaggacctctggaagcaactactcctgattaacctcggtgaagttaaggaaaacttcgtggctgaagatgtgaatgaagaacaagattactatcctctgccagcaggtcagatgaaaacatttctttatatatttggcttttcttgatttttttttcgttatttgaaatctttgctcttttatttttcagctcccagatcctctccctctctttagctttcactgtgtttgatatcaagaatatgaaatgtgaattccacggtccaagaggggaagagtcacctttcacaaacttcgttgttctcttctttggaagggaaattagtgttctaggcgattgagtcccttcattaatgaaacttgaaaccctgttatgcattggcaaatcacaaaaaaagagaaaagtgttttctaagtctcatctgttggagtgagagggttcagggctgtattcacagagttgctggcagtgcaaatagctttgaattatccttggttctccattctcaattgtcaaagctctttgttgcctttgtgaatagcagtccattaagaggttcgtccctgtgaaagcagactgctgtcctgggacaggaccaaatggaagtgtctttgtaggagaacgggttttaaaacatgtgttttctttcttgtaatttagggatcatagacggtatttctatgtaaacgaacagtcgggcgagtctcagtgggagtttccagatggtgaagaggaagaagaagaaagccaagcacaagaaaatagagatgagactcttgccaaacagaccttgaaagacaaaactggcactgattcaaattcaacagaatcctctgaaacttccacaggtgagacaatttaccttgtactaattcagccaaaatgactttagaggaaaaatcttattaatttacattattaaaagattttatgtcataataatataagcttctgattgagaatagtggtgtgaactaaaacaaggaatgcatgagttattatggttggaaatcagcatactattgttatcacgtgtaaaactgtgccccaaagtgaaaagataggctaacagattttgattttaaaaaattgttttataaccattctatcatgccactgactaagctgtgggtctccaaaaataggaatgcttgtgctgaggaactagatagttgaactgtcaatatatgtggcatgctgagatttgttatacatttctatacaacacttagtctgttcatattgcaacctcatttctcacctccactaatcttacaaaaagcgtggttggtacaaatcaaaatgatatgaagaaatgccattagtacttgtttcagagaagcaaaataattgatcatgaaaaatcaccagcaatcttctggtctaaaacaattggcaataggatgtctcattccatttttaaggtactcttggaagaatttagtttagttacatacattttttaaaagataggctttcatgctcctcagttcctttagtttttaaaaagtttccaatgtgtaaagaaacttccacctgttaatcttaagaattggtagctatttgttaaactgatggcatatgaaggcaagagtctatgagtcgtttctaaagtaatagatctttgaaaattttaaaaagtgaaatttgtcaataacagagttaagagctgaattcttttgtctaaaacttatcgaaattgatgcttgtactctactggctccctgatgatagtagaaaagcactagtaatgtaccaaatgaaactggttgtgtaccagatgattttgttaacttcttaaatagcctagaaatcgtcagcaggtcacatacaactgcagtgataatttcagaacatagcaaaaggctgattttattctacttcacattttagaagtgcattttctcaagttacagggcatttcacttcccttttacatgaagagattttcttttgaatatttttcctctcttttggtagcagtgatagacatgactaataatatattggttctttttgtttgctttttagcagttaatgaactgaagaggcttgatcgtagttctggataggtggctccactcctgaccactgtcaacatcccttatatgttccaaagttgaaaattccactgttaccaattctgaatgttctgtgaacactttagatgagtattaagctgttttctccctttatgacacacatagttgatactgtctggtaaaaggaggctcttgagccattcctatttaattaaaacagaactagttgtagtgtaggaaaaagccactgataaaacaggttatattcttaagcctctctttattgagaacccctagaattgcaggataaacttgatcgaagtaaaatccaaatcttanactaagttctgtgagatttaagagcaataatcaacagttctaagcctaataaagagagctcttaatcagctcagtggtggttaaaaccagctatcttttaaagaagagaaaaaacaaaacacagcaatgccctgtctcttcagaaaattgttttaaaaagttagccaggcatagttagtggcccacgcctgtagtccgagctgtttgggaggttgaggtgggaagattggttgagcccaagattttgaggctgcagtaagccataattgtaccactgcactccagcctgagcgacagagaacaagaccctgtctcaaaaataaagtgggggaaggggtgcaaaattacactgtgagaagccaagaagtttcaaagttctatttatttttctaagtcatttttaatcattatttgttgtttcagtgtttgaatttaacattatgtttttaaagatggagtggattctaaagatgagttgggttcaagatatccaacatatcttttatattgggcttatgtcacttaggtgaagttgagctcctttttctttttaatctccatggaacaatttgtataatttcttgatttaaattgctaaactgagctcttcattcaaaatactaaacaataatttctctttggggggaaaattaaggaaggctttctatacatagaaataaagatgcctaggccgggtgcagtggctcatgcctgtaatcccaatactttggggggctgaggcgggtggatcacctgaggtcaagagttcaagaccagcctgggcaacatggtgaaaccctgcctctactaaaagtacaaaaattagctgggcgtggtggcagctgcctgtaatcccagctactcggaggctgaggcacgagaatcacttgaacctgggaggcgaaggttgcagtgaaccaagatcatgccattgcactccagcctgggcgacagagcaaaactctttatctaaaaaaaaaaaaaaaaaaaagacgcctacagaagcaaggttcttaggtgcagtgactcatgcctgtaattccagcactttgggagtttgaggcaagaggatcacttgagctcaggaattcaaaaccagcctgggcaatatggcaagaccccatctttgcagaatattagcctagcttggtagcacgagtatgtggtcctagctacttggaaggctgaggtgggaaggatcacttgagcctggtaggttgaagctgcagtgagctatattcacaccattgcactctagcttgaacaacaaagtgagatcctgtctcaaaaagaaaaaggaaaaattacagctcacggctgtaatcccagcactttgggaggccaaggcgcgcagatcacttgaggtcaggagtttgagaccagccaacatggtatcaccctgtctctactaaaaatacaaaaattagccaggtgtcgtggcgggtgcctgtaatcccagctactcgggaggctgaggcaggagaatcgcttgaacccaggaggcagagattacagtgaaccaagatgacacctctgcactccagcctgggcaacaggcttaaagactccgtcttaaaaaaaaattaagaatttgtattctcataacatattcagttttaagcttgtagcttttaaatctttgagcacgtaataaaagctgcgtaggccaagtgtggtggctcatgcttgtaatcccagcactttgggaggctgaggcaggaggatcacctgaggtcgggagttcaagagcagcttacccaatatgtagaaaccccgcctctactaaaaatacaaaattagccaggcgtggtcgcatgcctgtaatcctagctactcgggaggctgaggcaggagaatcattgaacccaggaggcggaggttgtggtgggccaatatcacaccattgcactccaacctgggcaacaagagcaagagtccatctaaaaaaagagctgtatataccactttaatctgtccttgggcttcagacttaaatattctcttaaacagcaaaaatactaactaagttaaatttaaaagcaaggagaagcatcattgtaatacgacatccatgtgtattcaaactagaattttctgatggtcttcgtaagataaaggagataattgtcatttctatgacacagcttttataatttgaataaacttagttggagattggagtatttttattatttattttcatgtgagatgggtaatgtgctgacctcataacaaagtttgagggagacacattgtatgtgagaatttgaagtgcttatgaagtacaaaagcagaggccaggtgctcacatctgtaatcccagcactttgggaggccaaggcacacagatcacttgaggtcaggagtttgagaccagcctggccaacatggcgaaaacccctctcttactaaaaatacaaaaattagctggatgtggtggtgtgggcctgtaatcccagctactcgcgaggctgaggcaggagaatcgcttgaacctggcaggcagaggttgcggtgagccaagattgcgtcactgcactccggcgtggacaagagagtgagactccgtcacaaaaaaaaaaaaaaaagaagaaaagtattggattcacatattctaaaaatgctcgtcatttgtggctaattttatcaagtctagtttaatctcatatttacagagtttagttaattctaattagctttgttggaggtcataaaccacattattaaccttgaaccgactctgtgtttacttgagttcctctgcataatagcatgtcaccaccatcataaacatgttggtattgcattatgcttctagaggagacatccaccaatatttgaaaatctggctggtccgagtgcagtggtgtttacaactaattgatcacaaccagttacagactttgtttcttctccagtcctgctgcttcacttgactagccttttaaaaaaaagaaagaaaatagagaaaatcttaacttatatttacttactgtatgttgtgattagtttaatagaagggagtttaatccttaataattaagttagtcctcaacgtttattgacttagttctgatgtagtccttgtgtactattgtataatgtagactacttggccatacttgattttgtctaaaagttaatgcataaattaatattaaatatggccaaatataaaagtttaatgagtcatttgaggtcatttagccagaaaactgcatttatgttcctggtgaatttttttcaatgtccttttccaaaagtggcagtaagcagctgtcttaaaataaggagacagtgggaatgatgttgttaaagtcttttatacaatgtattgtctgtctgttccataaaaagtaaaactactctattcgtgaccagcttgggcaacatagtgagactgtctctttaaaaaaaaaaaaaaaattaaaaattagcaggtgtggtgatgcacacctgtagtcctagcaattcgggaagctgaggtaggaagatcgcttgagccaagtgtttgaggttagaatgagctatgatcgcaccacctacactccagcctgggcaacagagcaagacccaaatggctcatggttgctttgtttgttttaccttgttgagtgccagtgtgtattttgagcaaagcagtgtaaatggccttcttgccctagagtctttcataattgagccttatttaatctaccacttttgaccatgaaatttaacaggtgacttcttctgggtatctactccaggtgaagtgatattttttttgactgagatgtctaaagctcttggattcctggtatctcaccaggacatcttagtaaaacagcaagtatcagatgaggaatcagacttgagttctagctctggtctggccactaacattgatatgatcttgggcaagttagttcctgcctgggtttcattacctttaactgaggaggttgaaatagatgatttctcatgtctcttctactcctaaattctatgattttagggagaaaatccccttcaacattcctgggatatatatctaatagtcccatatattgtgaaacttccctattgacgataaagagggctggggaaggctacaagttctctttgtaaagaatccttttctggtcaagtttcttcttcatcactcatgccacttactccattctggaccctccttcagtcaaatgttcctgtgcttcaacctccattacccttggaaatgccaccacccccacctccacctccagaatcacctccaccccctcctccaccacctcctcctgcggaagatggtgagatccaggaggtagagatggaggatgagggaagtgaggagccccctgccccaggaacagaggaagatacccctttgaaaccttcagcacaaaccacagttgtaactagccagagttcagttgattccaccatctctagttcttcttccactaaaggaataaagaggaaagctacagaaattagcactgcagtggttcagaggtcagctaccattggcagttctccagttctctatagccagtcagctatagctacaggcaaagaagagtaagaccaaaatgccatctttggtaaaaaagtggcagagtatccagcgtgagttagatgaagaggacaattctagttccagtgaagaggatcgggaatcaactgcacagaagcgaattgaagagtggaaacagcagcagctggttagtggcatggcagagagaaatgctaattttgaagcccttcctgaggattggagagcaaggctgaagagaaggaaaatggctccaaacacatagtttttaagtttttaaaacttttttgtattattgtttgttttgtgttcagttcaaagtcttaaccagttttattgtcaaataaactataaatgttatgggggagatcttataaatttcctgggcaagagtgtatgcatacaaagttttcacttttgtgaaatgtaatttttctgtttttgcaaagggatgaggtgattggaattgctttgaccatgctgcctttattctcaaactggcaaacttagcatgttaggtgtattaacctcatcagtcttgaagaacatgtggctcatgagtataacacttctgtagaggactccctgacaaaagtgaagaattaacttctcctccagaacaagtgcaattcagaaggcagctctgcattctaccttgcttgactggaattgtctgaagctttttctggcctcttttctctagtcggccacccctgaagtgctgaggtctaagtggtttacctcgtgctgatagatggccacactctttagagtagttctcataagttctagaactggtagctcggtcgtttcgcacactaggtggcatacaggcagcagcaggtgttcatatccttgattttgagaatttcccctcaagtatgtggcagtaaatacaacaagacactctatgtattaatgtctccattgtcttaaccctgttccaaaacaaaattcacctcctttctttatgtgaatgtattctccataaaattccagtatttaaaaagcagtttactgttctgtactttctgttgtatcacaatcaggtaaaagtcactttaaactgaggaaacggcaaattgtgttttaaagctctttgtatttctccagtttctgaccttgtaaatttgtatatatgcactaataaagctttttttataa

SEQ ID NO: 408662 - DNA, 10306 bp, Homo sapiens
  misc_feature (4113)..(4113): n is a, c, g, or t
gctgaagatgtgaatgaagaacaagattactatcctctgccagcagggatcatagacggtatttctatgtaaacgaacagtcgggcgagtctcagtgggagtttccagatggtgaagaggaagaagaagaaagccaagcacaagaaaatagagatgagactcttgccaaacagaccttgaaagacaaaactggcactgattcaaattcaacagaatcctctgaaacttccacagtcggaattgagatgggcgattggcaggaagtctgggatgagaacacgggatgttattattattggaatacacaaacaaatgaagtgacttgggagttaccccaatatcttgccacacaggtacagggattacagcattaccagcccagttctgtgccaggtgctgaaactagttttgtggtaaatacagacatatattctaaggagaaaacgatttctgtttccagtagtaaaagtggaccagtcatagccaagcgagaagttaaaaaggaagtaaatgaaggaattcaggctctctcaaatagtgaggaggagaagaaaggggtggcagcatcgctgcttgctcctttattgcctgagggaataaaagaagaagaagagagatggagaagaaaagtaatttgtaaagaggagccagtttcagaagtaaaagaaacaagtacaacagtagaagaagcaacaacaatagtaaagccacaggaaattatgttggacaatatagaagacccttctcaggaggatctttgcagtgttgtccaatctggagaaagtgaggaggaagaggaacaagatacccttgaactggagctagttttggaaaggaaaaaagcagagttgcgagccttggaggaaggagatggtagtgtgtcagggtctagtccacgttctgatatcagccagccagcatctcaagatggaatgcgtaggcttatgtctaaaagaggaaaatggaagatgtttgttcgagctaccagtccagaatctaccagtaggagttctagtaaaactggacgagatactccagaaaatggagaaactgcaattggtgctgaaaattcagaaaaaatagatgagaattcagataaagagatggaagtagaagaatctccagagaaaataaaagtacagacaacaccaaaagtagaagaagaacaggatttgaaatttcagattggagaactggcaaataccctgacaagtaaattcgagtttctaggcattaatagacaatccatctccaactttcatgtgctgctcttacagactgagactcgaattgcagactggcgggaaggggctcttaatggaaactaccttaaacgaaaacttcaggatgcagcagaacaactaaaacagtatgaaataaacgccactcctaaaggctggtcctgccactgggacaggtacgcactcttctccccttttcacctttcacctttgacatctcagacatgatttgtgatcaccaccatctgacgacatgacagcctgtctggagactgagagcagctgcagttagcggtgctgggcaggcaaagcaccgcaagcacaaagtttggccagccacacattggagaaacaaaagcaatgtttaaagtgttccatgtaacggattttttcccaagatatggacaaagctggtttttactctccagagtgttgcacggagtagggcgggcttgggggttaagcgcatgcgagagctctgtgcgctttacaggacctctggaagcaactactcctgattaacctcggtgaagttaaggaaaacttcgtggctgaagatgtgaatgaagaacaagattactatcctctgccagcaggtcagatgaaaacatttctttatatatttggcttttcttgatttttttttcgttatttgaaatctttgctcttttatttttcagctcccagatcctctccctctctttagctttcactgtgtttgatatcaagaatatgaaatgtgaattccacggtccaagaggggaagagtcacctttcacaaacttcgttgttctcttctttggaagggaaattagtgttctaggcgattgagtcccttcattaatgaaacttgaaaccctgttatgcattggcaaatcacaaaaaaagagaaaagtgttttctaagtctcatctgttggagtgagagggttcagggctgtattcacagagttgctggcagtgcaaatagctttgaattatccttggttctccattctcaattgtcaaagctctttgttgcctttgtgaatagcagtccattaagaggttcgtccctgtgaaagcagactgctgtcctgggacaggaccaaatggaagtgtctttgtaggagaacgggttttaaaacatgtgttttctttcttgtaatttagggatcatagacggtatttctatgtaaacgaacagtcgggcgagtctcagtgggagtttccagatggtgaagaggaagaagaagaaagccaagcacaagaaaatagagatgagactcttgccaaacagaccttgaaagacaaaactggcactgattcaaattcaacagaatcctctgaaacttccacaggtgagacaatttaccttgtactaattcagccaaaatgactttagaggaaaaatcttattaatttacattattaaaagattttatgtcataataatataagcttctgattgagaatagtggtgtgaactaaaacaaggaatgcatgagttattatggttggaaatcagcatactattgttatcacgtgtaaaactgtgccccaaagtgaaaagataggctaacagattttgattttaaaaaattgttttataaccattctatcatgccactgactaagctgtgggtctccaaaaataggaatgcttgtgctgaggaactagatagttgaactgtcaatatatgtggcatgctgagatttgttatacatttctatacaacacttagtctgttcatattgcaacctcatttctcacctccactaatcttacaaaaagcgtggttggtacaaatcaaaatgatatgaagaaatgccattagtacttgtttcagagaagcaaaataattgatcatgaaaaatcaccagcaatcttctggtctaaaacaattggcaataggatgtctcattccatttttaaggtactcttggaagaatttagtttagttacatacattttttaaaagataggctttcatgctcctcagttcctttagtttttaaaaagtttccaatgtgtaaagaaacttccacctgttaatcttaagaattggtagctatttgttaaactgatggcatatgaaggcaagagtctatgagtcgtttctaaagtaatagatctttgaaaattttaaaaagtgaaatttgtcaataacagagttaagagctgaattcttttgtctaaaacttatcgaaattgatgcttgtactctactggctccctgatgatagtagaaaagcactagtaatgtaccaaatgaaactggttgtgtaccagatgattttgttaacttcttaaatagcctagaaatcgtcagcaggtcacatacaactgcagtgataatttcagaacatagcaaaaggctgattttattctacttcacattttagaagtgcattttctcaagttacagggcatttcacttcccttttacatgaagagattttcttttgaatatttttcctctcttttggtagcagtgatagacatgactaataatatattggttctttttgtttgctttttagcagttaatgaactgaagaggcttgatcgtagttctggataggtggctccactcctgaccactgtcaacatcccttatatgttccaaagttgaaaattccactgttaccaattctgaatgttctgtgaacactttagatgagtattaagctgttttctccctttatgacacacatagttgatactgtctggtaaaaggaggctcttgagccattcctatttaattaaaacagaactagttgtagtgtaggaaaaagccactgataaaacaggttatattcttaagcctctctttattgagaacccctagaattgcaggataaacttgatcgaagtaaaatccaaatcttanactaagttctgtgagatttaagagcaataatcaacagttctaagcctaataaagagagctcttaatcagctcagtggtggttaaaaccagctatcttttaaagaagagaaaaaacaaaacacagcaatgccctgtctcttcagaaaattgttttaaaaagttagccaggcatagttagtggcccacgcctgtagtccgagctgtttgggaggttgaggtgggaagattggttgagcccaagattttgaggctgcagtaagccataattgtaccactgcactccagcctgagcgacagagaacaagaccctgtctcaaaaataaagtgggggaaggggtgcaaaattacactgtgagaagccaagaagtttcaaagttctatttatttttctaagtcatttttaatcattatttgttgtttcagtgtttgaatttaacattatgtttttaaagatggagtggattctaaagatgagttgggttcaagatatccaacatatcttttatattgggcttatgtcacttaggtgaagttgagctcctttttctttttaatctccatggaacaatttgtataatttcttgatttaaattgctaaactgagctcttcattcaaaatactaaacaataatttctctttggggggaaaattaaggaaggctttctatacatagaaataaagatgcctaggccgggtgcagtggctcatgcctgtaatcccaatactttggggggctgaggcgggtggatcacctgaggtcaagagttcaagaccagcctgggcaacatggtgaaaccctgcctctactaaaagtacaaaaattagctgggcgtggtggcagctgcctgtaatcccagctactcggaggctgaggcacgagaatcacttgaacctgggaggcgaaggttgcagtgaaccaagatcatgccattgcactccagcctgggcgacagagcaaaactctttatctaaaaaaaaaaaaaaaaaaaagacgcctacagaagcaaggttcttaggtgcagtgactcatgcctgtaattccagcactttgggagtttgaggcaagaggatcacttgagctcaggaattcaaaaccagcctgggcaatatggcaagaccccatctttgcagaatattagcctagcttggtagcacgagtatgtggtcctagctacttggaaggctgaggtgggaaggatcacttgagcctggtaggttgaagctgcagtgagctatattcacaccattgcactctagcttgaacaacaaagtgagatcctgtctcaaaaagaaaaaggaaaaattacagctcacggctgtaatcccagcactttgggaggccaaggcgcgcagatcacttgaggtcaggagtttgagaccagccaacatggtatcaccctgtctctactaaaaatacaaaaattagccaggtgtcgtggcgggtgcctgtaatcccagctactcgggaggctgaggcaggagaatcgcttgaacccaggaggcagagattacagtgaaccaagatgacacctctgcactccagcctgggcaacaggcttaaagactccgtcttaaaaaaaaattaagaatttgtattctcataacatattcagttttaagcttgtagcttttaaatctttgagcacgtaataaaagctgcgtaggccaagtgtggtggctcatgcttgtaatcccagcactttgggaggctgaggcaggaggatcacctgaggtcgggagttcaagagcagcttacccaatatgtagaaaccccgcctctactaaaaatacaaaattagccaggcgtggtcgcatgcctgtaatcctagctactcgggaggctgaggcaggagaatcattgaacccaggaggcggaggttgtggtgggccaatatcacaccattgcactccaacctgggcaacaagagcaagagtccatctaaaaaaagagctgtatataccactttaatctgtccttgggcttcagacttaaatattctcttaaacagcaaaaatactaactaagttaaatttaaaagcaaggagaagcatcattgtaatacgacatccatgtgtattcaaactagaattttctgatggtcttcgtaagataaaggagataattgtcatttctatgacacagcttttataatttgaataaacttagttggagattggagtatttttattatttattttcatgtgagatgggtaatgtgctgacctcataacaaagtttgagggagacacattgtatgtgagaatttgaagtgcttatgaagtacaaaagcagaggccaggtgctcacatctgtaatcccagcactttgggaggccaaggcacacagatcacttgaggtcaggagtttgagaccagcctggccaacatggcgaaaacccctctcttactaaaaatacaaaaattagctggatgtggtggtgtgggcctgtaatcccagctactcgcgaggctgaggcaggagaatcgcttgaacctggcaggcagaggttgcggtgagccaagattgcgtcactgcactccggcgtggacaagagagtgagactccgtcacaaaaaaaaaaaaaaaagaagaaaagtattggattcacatattctaaaaatgctcgtcatttgtggctaattttatcaagtctagtttaatctcatatttacagagtttagttaattctaattagctttgttggaggtcataaaccacattattaaccttgaaccgactctgtgtttacttgagttcctctgcataatagcatgtcaccaccatcataaacatgttggtattgcattatgcttctagaggagacatccaccaatatttgaaaatctggctggtccgagtgcagtggtgtttacaactaattgatcacaaccagttacagactttgtttcttctccagtcctgctgcttcacttgactagccttttaaaaaaaagaaagaaaatagagaaaatcttaacttatatttacttactgtatgttgtgattagtttaatagaagggagtttaatccttaataattaagttagtcctcaacgtttattgacttagttctgatgtagtccttgtgtactattgtataatgtagactacttggccatacttgattttgtctaaaagttaatgcataaattaatattaaatatggccaaatataaaagtttaatgagtcatttgaggtcatttagccagaaaactgcatttatgttcctggtgaatttttttcaatgtccttttccaaaagtggcagtaagcagctgtcttaaaataaggagacagtgggaatgatgttgttaaagtcttttatacaatgtattgtctgtctgttccataaaaagtaaaactactctattcgtgaccagcttgggcaacatagtgagactgtctctttaaaaaaaaaaaaaaaattaaaaattagcaggtgtggtgatgcacacctgtagtcctagcaattcgggaagctgaggtaggaagatcgcttgagccaagtgtttgaggttagaatgagctatgatcgcaccacctacactccagcctgggcaacagagcaagacccaaatggctcatggttgctttgtttgttttaccttgttgagtgccagtgtgtattttgagcaaagcagtgtaaatggccttcttgccctagagtctttcataattgagccttatttaatctaccacttttgaccatgaaatttaacaggtgacttcttctgggtatctactccaggtgaagtgatattttttttgactgagatgtctaaagctcttggattcctggtatctcaccaggacatcttagtaaaacagcaagtatcagatgaggaatcagacttgagttctagctctggtctggccactaacattgatatgatcttgggcaagttagttcctgcctgggtttcattacctttaactgaggaggttgaaatagatgatttctcatgtctcttctactcctaaattctatgattttagggagaaaatccccttcaacattcctgggatatatatctaatagtcccatatattgtgaaacttccctattgacgataaagagggctggggaaggctacaagttctctttgtaaagaatccttttctggtcaagtttcttcttcatcactcatgccacttactccattctggaccctccttcagtcaaatgttcctgtgcttcaacctccattacccttggaaatgccaccacccccacctccacctccagaatcacctccaccccctcctccaccacctcctcctgcggaagatggtgagatccaggaggtagagatggaggatgagggaagtgaggagccccctgccccaggaacagaggaagatacccctttgaaaccttcagcacaaaccacagttgtaactagccagagttcagttgattccaccatctctagttcttcttccactaaaggaataaagaggaaagctacagaaattagcactgcagtggttcagaggtcagctaccattggcagttctccagttctctatagccagtcagctatagctacaggtcaccaggcagcagggattggaaaccaggcaacaggaattggacatcagacaataccagttagccttccagcagcaggaatgggtcatcaggccagaggaatgagcctgcagtcaaattaccttggactagcggcagcacctgcaattatgagttatgcagaatgttctgtcccaattggagtgactgctccctcattgcagccagttcaggcccgaggtgctgtgcctaccgctaccattatagaaccaccaccaccacctcctcctcctcctcctccaccaccaccagctcccaaaatgccaccacctgaaaagacaaaaaaaggaaggaaagacaaggcaaagaagagtaagaccaaaatgccatctttggtaaaaaagtggcagagtatccagcgtgagttagatgaagaggacaattctagttccagtgaagaggatcgggaatcaactgcacagaagcgaattgaagagtggaaacagcagcagctggttagtggcatggcagagagaaatgctaattttgaagcccttcctgaggattggagagcaaggctgaagagaaggaaaatggctccaaacacatagtttttaagtttttaaaacttttttgtattattgtttgttttgtgttcagttcaaagtcttaaccagttttattgtcaaataaactataaatgttatgggggagatcttataaatttcctgggcaagagtgtatgcatacaaagttttcacttttgtgaaatgtaatttttctgtttttgcaaagggatgaggtgattggaattgctttgaccatgctgcctttattctcaaactggcaaacttagcatgttaggtgtattaacctcatcagtcttgaagaacatgtggctcatgagtataacacttctgtagaggactccctgacaaaagtgaagaattaacttctcctccagaacaagtgcaattcagaaggcagctctgcattctaccttgcttgactggaattgtctgaagctttttctggcctcttttctctagtcggccacccctgaagtgctgaggtctaagtggtttacctcgtgctgatagatggccacactctttagagtagttctcataagttctagaactggtagctcggtcgtttcgcacactaggtggcatacaggcagcagcaggtgttcatatccttgattttgagaatttcccctcaagtatgtggcagtaaatacaacaagacactctatgtattaatgtctccattgtcttaaccctgttccaaaacaaaattcacctcctttctttatgtgaatgtattctccataaaattccagtatttaaaaagcagtttactgttctgtactttctgttgtatcacaatcaggtaaaagtcactttaaactgaggaaacggcaaattgtgttttaaagctctttgtatttctccagtttctgaccttgtaaatttgtatatatgcactaataaagctttttttataaaaggagaacaaatcagaacaagcaaacgggaaagaaaatgaggacgacggaaaccaaagacaacagaagacaacgaaggacggagcggagaagagagagaacaaaccagagagacacagcgacggagaggaaagagagagtgaaaaagaag

SEQ ID NO: 408663 - DNA, 10175 bp, Homo sapiens
  misc_feature (4113)..(4113): n is a, c, g, or t
gctgaagatgtgaatgaagaacaagattactatcctctgccagcagggatcatagacggtatttctatgtaaacgaacagtcgggcgagtctcagtgggagtttccagatggtgaagaggaagaagaagaaagccaagcacaagaaaatagagatgagactcttgccaaacagaccttgaaagacaaaactggcactgattcaaattcaacagaatcctctgaaacttccacagtcggaattgagatgggcgattggcaggaagtctgggatgagaacacgggatgttattattattggaatacacaaacaaatgaagtgacttgggagttaccccaatatcttgccacacaggtacagggattacagcattaccagcccagttctgtgccaggtgctgaaactagttttgtggtaaatacagacatatattctaaggagaaaacgatttctgtttccagtagtaaaagtggaccagtcatagccaagcgagaagttaaaaaggaagtaaatgaaggaattcaggctctctcaaatagtgaggaggagaagaaaggggtggcagcatcgctgcttgctcctttattgcctgagggaataaaagaagaagaagagagatggagaagaaaagtaatttgtaaagaggagccagtttcagaagtaaaagaaacaagtacaacagtagaagaagcaacaacaatagtaaagccacaggaaattatgttggacaatatagaagacccttctcaggaggatctttgcagtgttgtccaatctggagaaagtgaggaggaagaggaacaagatacccttgaactggagctagttttggaaaggaaaaaagcagagttgcgagccttggaggaaggagatggtagtgtgtcagggtctagtccacgttctgatatcagccagccagcatctcaagatggaatgcgtaggcttatgtctaaaagaggaaaatggaagatgtttgttcgagctaccagtccagaatctaccagtaggagttctagtaaaactggacgagatactccagaaaatggagaaactgcaattggtgctgaaaattcagaaaaaatagatgagaattcagataaagagatggaagtagaagaatctccagagaaaataaaagtacagacaacaccaaaagtagaagaagaacaggatttgaaatttcagattggagaactggcaaataccctgacaagtaaattcgagtttctaggcattaatagacaatccatctccaactttcatgtgctgctcttacagactgagactcgaattgcagactggcgggaaggggctcttaatggaaactaccttaaacgaaaacttcaggatgcagcagaacaactaaaacagtatgaaataaacgccactcctaaaggctggtcctgccactgggacaggtacgcactcttctccccttttcacctttcacctttgacatctcagacatgatttgtgatcaccaccatctgacgacatgacagcctgtctggagactgagagcagctgcagttagcggtgctgggcaggcaaagcaccgcaagcacaaagtttggccagccacacattggagaaacaaaagcaatgtttaaagtgttccatgtaacggattttttcccaagatatggacaaagctggtttttactctccagagtgttgcacggagtagggcgggcttgggggttaagcgcatgcgagagctctgtgcgctttacaggacctctggaagcaactactcctgattaacctcggtgaagttaaggaaaacttcgtggctgaagatgtgaatgaagaacaagattactatcctctgccagcaggtcagatgaaaacatttctttatatatttggcttttcttgatttttttttcgttatttgaaatctttgctcttttatttttcagctcccagatcctctccctctctttagctttcactgtgtttgatatcaagaatatgaaatgtgaattccacggtccaagaggggaagagtcacctttcacaaacttcgttgttctcttctttggaagggaaattagtgttctaggcgattgagtcccttcattaatgaaacttgaaaccctgttatgcattggcaaatcacaaaaaaagagaaaagtgttttctaagtctcatctgttggagtgagagggttcagggctgtattcacagagttgctggcagtgcaaatagctttgaattatccttggttctccattctcaattgtcaaagctctttgttgcctttgtgaatagcagtccattaagaggttcgtccctgtgaaagcagactgctgtcctgggacaggaccaaatggaagtgtctttgtaggagaacgggttttaaaacatgtgttttctttcttgtaatttagggatcatagacggtatttctatgtaaacgaacagtcgggcgagtctcagtgggagtttccagatggtgaagaggaagaagaagaaagccaagcacaagaaaatagagatgagactcttgccaaacagaccttgaaagacaaaactggcactgattcaaattcaacagaatcctctgaaacttccacaggtgagacaatttaccttgtactaattcagccaaaatgactttagaggaaaaatcttattaatttacattattaaaagattttatgtcataataatataagcttctgattgagaatagtggtgtgaactaaaacaaggaatgcatgagttattatggttggaaatcagcatactattgttatcacgtgtaaaactgtgccccaaagtgaaaagataggctaacagattttgattttaaaaaattgttttataaccattctatcatgccactgactaagctgtgggtctccaaaaataggaatgcttgtgctgaggaactagatagttgaactgtcaatatatgtggcatgctgagatttgttatacatttctatacaacacttagtctgttcatattgcaacctcatttctcacctccactaatcttacaaaaagcgtggttggtacaaatcaaaatgatatgaagaaatgccattagtacttgtttcagagaagcaaaataattgatcatgaaaaatcaccagcaatcttctggtctaaaacaattggcaataggatgtctcattccatttttaaggtactcttggaagaatttagtttagttacatacattttttaaaagataggctttcatgctcctcagttcctttagtttttaaaaagtttccaatgtgtaaagaaacttccacctgttaatcttaagaattggtagctatttgttaaactgatggcatatgaaggcaagagtctatgagtcgtttctaaagtaatagatctttgaaaattttaaaaagtgaaatttgtcaataacagagttaagagctgaattcttttgtctaaaacttatcgaaattgatgcttgtactctactggctccctgatgatagtagaaaagcactagtaatgtaccaaatgaaactggttgtgtaccagatgattttgttaacttcttaaatagcctagaaatcgtcagcaggtcacatacaactgcagtgataatttcagaacatagcaaaaggctgattttattctacttcacattttagaagtgcattttctcaagttacagggcatttcacttcccttttacatgaagagattttcttttgaatatttttcctctcttttggtagcagtgatagacatgactaataatatattggttctttttgtttgctttttagcagttaatgaactgaagaggcttgatcgtagttctggataggtggctccactcctgaccactgtcaacatcccttatatgttccaaagttgaaaattccactgttaccaattctgaatgttctgtgaacactttagatgagtattaagctgttttctccctttatgacacacatagttgatactgtctggtaaaaggaggctcttgagccattcctatttaattaaaacagaactagttgtagtgtaggaaaaagccactgataaaacaggttatattcttaagcctctctttattgagaacccctagaattgcaggataaacttgatcgaagtaaaatccaaatcttanactaagttctgtgagatttaagagcaataatcaacagttctaagcctaataaagagagctcttaatcagctcagtggtggttaaaaccagctatcttttaaagaagagaaaaaacaaaacacagcaatgccctgtctcttcagaaaattgttttaaaaagttagccaggcatagttagtggcccacgcctgtagtccgagctgtttgggaggttgaggtgggaagattggttgagcccaagattttgaggctgcagtaagccataattgtaccactgcactccagcctgagcgacagagaacaagaccctgtctcaaaaataaagtgggggaaggggtgcaaaattacactgtgagaagccaagaagtttcaaagttctatttatttttctaagtcatttttaatcattatttgttgtttcagtgtttgaatttaacattatgtttttaaagatggagtggattctaaagatgagttgggttcaagatatccaacatatcttttatattgggcttatgtcacttaggtgaagttgagctcctttttctttttaatctccatggaacaatttgtataatttcttgatttaaattgctaaactgagctcttcattcaaaatactaaacaataatttctctttggggggaaaattaaggaaggctttctatacatagaaataaagatgcctaggccgggtgcagtggctcatgcctgtaatcccaatactttggggggctgaggcgggtggatcacctgaggtcaagagttcaagaccagcctgggcaacatggtgaaaccctgcctctactaaaagtacaaaaattagctgggcgtggtggcagctgcctgtaatcccagctactcggaggctgaggcacgagaatcacttgaacctgggaggcgaaggttgcagtgaaccaagatcatgccattgcactccagcctgggcgacagagcaaaactctttatctaaaaaaaaaaaaaaaaaaaagacgcctacagaagcaaggttcttaggtgcagtgactcatgcctgtaattccagcactttgggagtttgaggcaagaggatcacttgagctcaggaattcaaaaccagcctgggcaatatggcaagaccccatctttgcagaatattagcctagcttggtagcacgagtatgtggtcctagctacttggaaggctgaggtgggaaggatcacttgagcctggtaggttgaagctgcagtgagctatattcacaccattgcactctagcttgaacaacaaagtgagatcctgtctcaaaaagaaaaaggaaaaattacagctcacggctgtaatcccagcactttgggaggccaaggcgcgcagatcacttgaggtcaggagtttgagaccagccaacatggtatcaccctgtctctactaaaaatacaaaaattagccaggtgtcgtggcgggtgcctgtaatcccagctactcgggaggctgaggcaggagaatcgcttgaacccaggaggcagagattacagtgaaccaagatgacacctctgcactccagcctgggcaacaggcttaaagactccgtcttaaaaaaaaattaagaatttgtattctcataacatattcagttttaagcttgtagcttttaaatctttgagcacgtaataaaagctgcgtaggccaagtgtggtggctcatgcttgtaatcccagcactttgggaggctgaggcaggaggatcacctgaggtcgggagttcaagagcagcttacccaatatgtagaaaccccgcctctactaaaaatacaaaattagccaggcgtggtcgcatgcctgtaatcctagctactcgggaggctgaggcaggagaatcattgaacccaggaggcggaggttgtggtgggccaatatcacaccattgcactccaacctgggcaacaagagcaagagtccatctaaaaaaagagctgtatataccactttaatctgtccttgggcttcagacttaaatattctcttaaacagcaaaaatactaactaagttaaatttaaaagcaaggagaagcatcattgtaatacgacatccatgtgtattcaaactagaattttctgatggtcttcgtaagataaaggagataattgtcatttctatgacacagcttttataatttgaataaacttagttggagattggagtatttttattatttattttcatgtgagatgggtaatgtgctgacctcataacaaagtttgagggagacacattgtatgtgagaatttgaagtgcttatgaagtacaaaagcagaggccaggtgctcacatctgtaatcccagcactttgggaggccaaggcacacagatcacttgaggtcaggagtttgagaccagcctggccaacatggcgaaaacccctctcttactaaaaatacaaaaattagctggatgtggtggtgtgggcctgtaatcccagctactcgcgaggctgaggcaggagaatcgcttgaacctggcaggcagaggttgcggtgagccaagattgcgtcactgcactccggcgtggacaagagagtgagactccgtcacaaaaaaaaaaaaaaaagaagaaaagtattggattcacatattctaaaaatgctcgtcatttgtggctaattttatcaagtctagtttaatctcatatttacagagtttagttaattctaattagctttgttggaggtcataaaccacattattaaccttgaaccgactctgtgtttacttgagttcctctgcataatagcatgtcaccaccatcataaacatgttggtattgcattatgcttctagaggagacatccaccaatatttgaaaatctggctggtccgagtgcagtggtgtttacaactaattgatcacaaccagttacagactttgtttcttctccagtcctgctgcttcacttgactagccttttaaaaaaaagaaagaaaatagagaaaatcttaacttatatttacttactgtatgttgtgattagtttaatagaagggagtttaatccttaataattaagttagtcctcaacgtttattgacttagttctgatgtagtccttgtgtactattgtataatgtagactacttggccatacttgattttgtctaaaagttaatgcataaattaatattaaatatggccaaatataaaagtttaatgagtcatttgaggtcatttagccagaaaactgcatttatgttcctggtgaatttttttcaatgtccttttccaaaagtggcagtaagcagctgtcttaaaataaggagacagtgggaatgatgttgttaaagtcttttatacaatgtattgtctgtctgttccataaaaagtaaaactactctattcgtgaccagcttgggcaacatagtgagactgtctctttaaaaaaaaaaaaaaaattaaaaattagcaggtgtggtgatgcacacctgtagtcctagcaattcgggaagctgaggtaggaagatcgcttgagccaagtgtttgaggttagaatgagctatgatcgcaccacctacactccagcctgggcaacagagcaagacccaaatggctcatggttgctttgtttgttttaccttgttgagtgccagtgtgtattttgagcaaagcagtgtaaatggccttcttgccctagagtctttcataattgagccttatttaatctaccacttttgaccatgaaatttaacaggtgacttcttctgggtatctactccaggtgaagtgatattttttttgactgagatgtctaaagctcttggattcctggtatctcaccaggacatcttagtaaaacagcaagtatcagatgaggaatcagacttgagttctagctctggtctggccactaacattgatatgatcttgggcaagttagttcctgcctgggtttcattacctttaactgaggaggttgaaatagatgatttctcatgtctcttctactcctaaattctatgattttagggagaaaatccccttcaacattcctgggatatatatctaatagtcccatatattgtgaaacttccctattgacgataaagagggctggggaaggctacaagttctctttgtaaagaatccttttctggtcaagtttcttcttcatcactcatgccacttactccattctggaccctccttcagtcaaatgttcctgtgcttcaacctccattacccttggaaatgccaccacccccacctccacctccagaatcacctccaccccctcctccaccacctcctcctgcggaagatggtgagatccaggaggtagagatggaggatgagggaagtgaggagccccctgccccaggaacagaggaagatacccctttgaaaccttcagcacaaaccacagttgtaactagccagagttcagttgattccaccatctctagttcttcttccactaaaggaataaagaggaaagctacagaaattagcactgcagtggttcagaggtcagctaccattggcagttctccagttctctatagccagtcagctatagctacaggtcaccaggcagcagggattggaaaccaggcaacaggaattggacatcagacaataccagttagccttccagcagcaggaatgggtcatcaggccagaggaatgagcctgcagtcaaattaccttggactagcggcagcacctgcaattatgagttatgcagaatgttctgtcccaattggagtgactgctccctcattgcagccagttcaggcccgaggtgctgtgcctaccgctaccattatagaaccaccaccaccacctcctcctcctcctcctccaccaccaccagctcccaaaatgccaccacctgaaaagacaaaaaaaggaaggaaagacaaggcaaagaagagtaagaccaaaatgccatctttggtaaaaaagtggcagagtatccagcgtgagttagatgaagaggacaattctagttccagtgaagaggatcgggaatcaactgcacagaagcgaattgaagagtggaaacagcagcagctggttagtggcatggcagagagaaatgctaattttgaagcccttcctgaggattggagagcaaggctgaagagaaggaaaatggctccaaacacatagtttttaagtttttaaaacttttttgtattattgtttgttttgtgttcagttcaaagtcttaaccagttttattgtcaaataaactataaatgttatgggggagatcttataaatttcctgggcaagagtgtatgcatacaaagttttcacttttgtgaaatgtaatttttctgtttttgcaaagggatgaggtgattggaattgctttgaccatgctgcctttattctcaaactggcaaacttagcatgttaggtgtattaacctcatcagtcttgaagaacatgtggctcatgagtataacacttctgtagaggactccctgacaaaagtgaagaattaacttctcctccagaacaagtgcaattcagaaggcagctctgcattctaccttgcttgactggaattgtctgaagctttttctggcctcttttctctagtcggccacccctgaagtgctgaggtctaagtggtttacctcgtgctgatagatggccacactctttagagtagttctcataagttctagaactggtagctcggtcgtttcgcacactaggtggcatacaggcagcagcaggtgttcatatccttgattttgagaatttcccctcaagtatgtggcagtaaatacaacaagacactctatgtattaatgtctccattgtcttaaccctgttccaaaacaaaattcacctcctttctttatgtgaatgtattctccataaaattccagtatttaaaaagcagtttactgttctgtactttctgttgtatcacaatcaggtaaaagtcactttaaactgaggaaacggcaaattgtgttttaaagctctttgtatttctccagtttctgaccttgtaaatttgtatatatgcactaataaagctttttttataatcctgatgggttaaaatttt

SEQ ID NO: 408664 - DNA, 4525 bp, Homo sapiens
gctgaagatgtgaatgaagaacaagattactatcctctgccagcagggatcatagacggtatttctatgtaaacgaacagtcgggcgagtctcagtgggagtttccagatggtgaagaggaagaagaagaaagccaagcacaagaaaatagagatgagactcttgccaaacagaccttgaaagacaaaactggcactgattcaaattcaacagaatcctctgaaacttccacagtcggaattgagatgggcgattggcaggaagtctgggatgagaacacgggatgttattattattggaatacacaaacaaatgaagtgacttgggagttaccccaatatcttgccacacaggtacagggattacagcattaccagcccagttctgtgccaggtgctgaaactagttttgtggtaaatacagacatatattctaaggagaaaacgatttctgtttccagtagtaaaagtggaccagtcatagccaagcgagaagttaaaaaggaagtaaatgaaggaattcaggctctctcaaatagtgaggaggagaagaaaggggtggcagcatcgctgcttgctcctttattgcctgagggaataaaagaagaagaagagagatggagaagaaaagtaatttgtaaagaggagccagtttcagaagtaaaagaaacaagtacaacagtagaagaagcaacaacaatagtaaagccacaggaaattatgttggacaatatagaagacccttctcaggaggatctttgcagtgttgtccaatctggagaaagtgaggaggaagaggaacaagatacccttgaactggagctagttttggaaaggaaaaaagcagagttgcgagccttggaggaaggagatggtagtgtgtcagggtctagtccacgttctgatatcagccagccagcatctcaagatggaatgcgtaggcttatgtctaaaagaggaaaatggaagatgtttgttcgagctaccagtccagaatctaccagtaggagttctagtaaaactggacgagatactccagaaaatggagaaactgcaattggtgctgaaaattcagaaaaaatagatgagaattcagataaagagatggaagtagaagaatctccagagaaaataaaagtacagacaacaccaaaagtagaagaagaacaggatttgaaatttcagattggagaactggcaaataccctgacaagtaaattcgagtttctaggcattaatagacaatccatctccaactttcatgtgctgctcttacagactgagactcgaattgcagactggcgggaaggggctcttaatggaaactaccttaaacgaaaacttcaggatgcagcagaacaactaaaacagtatgaaataaacgccactcctaaaggctggtcctgccactgggacaggtacgcactcttctccccttttcacctttcacctttgacatctcagacatgatttgtgatcaccaccatctgacgacatgacagcctgtctggagactgagagcagctgcagttagcggtgctgggcaggcaaagcaccgcaagcacaaagtttggccagccacacattggagaaacaaaagcaatgtttaaagtgttccatgtaacggattttttcccaagatatggacaaagctggtttttactctccagagtgttgcacggagtagggcgggcttgggggttaagcgcatgcgagagctctgtgcgctttacaggacctctggaagcaactactcctgattaacctcggtgaagttaaggaaaacttcgtggctgaagatgtgaatgaagaacaagattactatcctctgccagcaggtcagatgaaaacatttctttatatatttggcttttcttgatttttttttcgttatttgaaatctttgctcttttatttttcagctcccagatcctctccctctctttagctttcactgtgtttgatatcaagaatatgaaatgtgaattccacggtccaagaggggaagagtcacctttcacaaacttcgttgttctcttctttggaagggaaattagtgttctaggcgattgagtcccttcattaatgaaacttgaaaccctgttatgcattggcaaatcacaaaaaaagagaaaagtgttttctaagtctcatctgttggagtgagagggttcagggctgtattcacagagttgctggcagtgcaaatagctttgaattatccttggttctccattctcaattgtcaaagctctttgttgcctttgtgaatagcagtccattaagaggttcgtccctgtgaaagcagactgctgtcctgggacaggaccaaatggaagtgtctttgtaggagaacgggttttaaaacatgtgttttctttcttgtaatttagggatcatagacggtatttctatgtaaacgaacagtcgggcgagtctcagtgggagtttccagatggtgaagaggaagaagaagaaagccaagcacaagaaaatagagatgagactcttgccaaacagaccttgaaagacaaaactggcactgattcaaattcaacagaatcctctgaaacttccacaggttctctttgtaaagaatccttttctggtcaagtttcttcttcatcactcatgccacttactccattctggaccctccttcagtcaaatgttcctgtgcttcaacctccattacccttggaaatgccaccacccccacctccacctccagaatcacctccaccccctcctccaccacctcctcctgcggaagatggtgagatccaggaggtagagatggaggatgagggaagtgaggagccccctgccccaggaacagaggaagatacccctttgaaaccttcagcacaaaccacagttgtaactagccagagttcagttgattccaccatctctagttcttcttccactaaaggaataaagaggaaagctacagaaattagcactgcagtggttcagaggtcagctaccattggcagttctccagttctctatagccagtcagctatagctacaggtcaccaggcagcagggattggaaaccaggcaacaggaattggacatcagacaataccagttagccttccagcagcaggaatgggtcatcaggccagaggaatgagcctgcagtcaaattaccttggactagcggcagcacctgcaattatgagttatgcagaatgttctgtcccaattggagtgactgctccctcattgcagccagttcaggcccgaggtgctgtgcctaccgctaccattatagaaccaccaccaccacctcctcctcctcctcctccaccaccaccagctcccaaaatgccaccacctgaaaagacaaaaaaaggaaggaaagacaaggcaaagaagagtaagaccaaaatgccatctttggtaaaaaagtggcagagtatccagcgtgagttagatgaagaggacaattctagttccagtgaagaggatcgggaatcaactgcacagaagcgaattgaagagtggaaacagcagcagctggttagtggcatggcagagagaaatgctaattttgaagcccttcctgaggattggagagcaaggctgaagagaaggaaaatggctccaaacacatagtttttaagtttttaaaacttttttgtattattgtttgttttgtgttcagttcaaagtcttaaccagttttattgtcaaataaactataaatgttatgggggagatcttataaatttcctgggcaagagtgtatgcatacaaagttttcacttttgtgaaatgtaatttttctgtttttgcaaagggatgaggtgattggaattgctttgaccatgctgcctttattctcaaactggcaaacttagcatgttaggtgtattaacctcatcagtcttgaagaacatgtggctcatgagtataacacttctgtagaggactccctgacaaaagtgaagaattaacttctcctccagaacaagtgcaattcagaaggcagctctgcattctaccttgcttgactggaattgtctgaagctttttctggcctcttttctctagtcggccacccctgaagtgctgaggtctaagtggtttacctcgtgctgatagatggccacactctttagagtagttctcataagttctagaactggtagctcggtcgtttcgcacactaggtggcatacaggcagcagcaggtgttcatatccttgattttgagaatttcccctcaagtatgtggcagtaaatacaacaagacactctatgtattaatgtctccattgtcttaaccctgttccaaaacaaaattcacctcctttctttatgtgaatgtattctccataaaattccagtatttaaaaagcagtttactgttctgtactttctgttgtatcacaatcaggtaaaagtcactttaaactgaggaaacggcaaattgtgttttaaagctctttgtatttctccagtttctgaccttgtaaatttgtatatatgcactaataaagctttttttataa

SEQ ID NO: 408665 - DNA, 9897 bp, Homo sapiens
  misc_feature (4113)..(4113): n is a, c, g, or t
gctgaagatgtgaatgaagaacaagattactatcctctgccagcagggatcatagacggtatttctatgtaaacgaacagtcgggcgagtctcagtgggagtttccagatggtgaagaggaagaagaagaaagccaagcacaagaaaatagagatgagactcttgccaaacagaccttgaaagacaaaactggcactgattcaaattcaacagaatcctctgaaacttccacagtcggaattgagatgggcgattggcaggaagtctgggatgagaacacgggatgttattattattggaatacacaaacaaatgaagtgacttgggagttaccccaatatcttgccacacaggtacagggattacagcattaccagcccagttctgtgccaggtgctgaaactagttttgtggtaaatacagacatatattctaaggagaaaacgatttctgtttccagtagtaaaagtggaccagtcatagccaagcgagaagttaaaaaggaagtaaatgaaggaattcaggctctctcaaatagtgaggaggagaagaaaggggtggcagcatcgctgcttgctcctttattgcctgagggaataaaagaagaagaagagagatggagaagaaaagtaatttgtaaagaggagccagtttcagaagtaaaagaaacaagtacaacagtagaagaagcaacaacaatagtaaagccacaggaaattatgttggacaatatagaagacccttctcaggaggatctttgcagtgttgtccaatctggagaaagtgaggaggaagaggaacaagatacccttgaactggagctagttttggaaaggaaaaaagcagagttgcgagccttggaggaaggagatggtagtgtgtcagggtctagtccacgttctgatatcagccagccagcatctcaagatggaatgcgtaggcttatgtctaaaagaggaaaatggaagatgtttgttcgagctaccagtccagaatctaccagtaggagttctagtaaaactggacgagatactccagaaaatggagaaactgcaattggtgctgaaaattcagaaaaaatagatgagaattcagataaagagatggaagtagaagaatctccagagaaaataaaagtacagacaacaccaaaagtagaagaagaacaggatttgaaatttcagattggagaactggcaaataccctgacaagtaaattcgagtttctaggcattaatagacaatccatctccaactttcatgtgctgctcttacagactgagactcgaattgcagactggcgggaaggggctcttaatggaaactaccttaaacgaaaacttcaggatgcagcagaacaactaaaacagtatgaaataaacgccactcctaaaggctggtcctgccactgggacaggtacgcactcttctccccttttcacctttcacctttgacatctcagacatgatttgtgatcaccaccatctgacgacatgacagcctgtctggagactgagagcagctgcagttagcggtgctgggcaggcaaagcaccgcaagcacaaagtttggccagccacacattggagaaacaaaagcaatgtttaaagtgttccatgtaacggattttttcccaagatatggacaaagctggtttttactctccagagtgttgcacggagtagggcgggcttgggggttaagcgcatgcgagagctctgtgcgctttacaggacctctggaagcaactactcctgattaacctcggtgaagttaaggaaaacttcgtggctgaagatgtgaatgaagaacaagattactatcctctgccagcaggtcagatgaaaacatttctttatatatttggcttttcttgatttttttttcgttatttgaaatctttgctcttttatttttcagctcccagatcctctccctctctttagctttcactgtgtttgatatcaagaatatgaaatgtgaattccacggtccaagaggggaagagtcacctttcacaaacttcgttgttctcttctttggaagggaaattagtgttctaggcgattgagtcccttcattaatgaaacttgaaaccctgttatgcattggcaaatcacaaaaaaagagaaaagtgttttctaagtctcatctgttggagtgagagggttcagggctgtattcacagagttgctggcagtgcaaatagctttgaattatccttggttctccattctcaattgtcaaagctctttgttgcctttgtgaatagcagtccattaagaggttcgtccctgtgaaagcagactgctgtcctgggacaggaccaaatggaagtgtctttgtaggagaacgggttttaaaacatgtgttttctttcttgtaatttagggatcatagacggtatttctatgtaaacgaacagtcgggcgagtctcagtgggagtttccagatggtgaagaggaagaagaagaaagccaagcacaagaaaatagagatgagactcttgccaaacagaccttgaaagacaaaactggcactgattcaaattcaacagaatcctctgaaacttccacaggtgagacaatttaccttgtactaattcagccaaaatgactttagaggaaaaatcttattaatttacattattaaaagattttatgtcataataatataagcttctgattgagaatagtggtgtgaactaaaacaaggaatgcatgagttattatggttggaaatcagcatactattgttatcacgtgtaaaactgtgccccaaagtgaaaagataggctaacagattttgattttaaaaaattgttttataaccattctatcatgccactgactaagctgtgggtctccaaaaataggaatgcttgtgctgaggaactagatagttgaactgtcaatatatgtggcatgctgagatttgttatacatttctatacaacacttagtctgttcatattgcaacctcatttctcacctccactaatcttacaaaaagcgtggttggtacaaatcaaaatgatatgaagaaatgccattagtacttgtttcagagaagcaaaataattgatcatgaaaaatcaccagcaatcttctggtctaaaacaattggcaataggatgtctcattccatttttaaggtactcttggaagaatttagtttagttacatacattttttaaaagataggctttcatgctcctcagttcctttagtttttaaaaagtttccaatgtgtaaagaaacttccacctgttaatcttaagaattggtagctatttgttaaactgatggcatatgaaggcaagagtctatgagtcgtttctaaagtaatagatctttgaaaattttaaaaagtgaaatttgtcaataacagagttaagagctgaattcttttgtctaaaacttatcgaaattgatgcttgtactctactggctccctgatgatagtagaaaagcactagtaatgtaccaaatgaaactggttgtgtaccagatgattttgttaacttcttaaatagcctagaaatcgtcagcaggtcacatacaactgcagtgataatttcagaacatagcaaaaggctgattttattctacttcacattttagaagtgcattttctcaagttacagggcatttcacttcccttttacatgaagagattttcttttgaatatttttcctctcttttggtagcagtgatagacatgactaataatatattggttctttttgtttgctttttagcagttaatgaactgaagaggcttgatcgtagttctggataggtggctccactcctgaccactgtcaacatcccttatatgttccaaagttgaaaattccactgttaccaattctgaatgttctgtgaacactttagatgagtattaagctgttttctccctttatgacacacatagttgatactgtctggtaaaaggaggctcttgagccattcctatttaattaaaacagaactagttgtagtgtaggaaaaagccactgataaaacaggttatattcttaagcctctctttattgagaacccctagaattgcaggataaacttgatcgaagtaaaatccaaatcttanactaagttctgtgagatttaagagcaataatcaacagttctaagcctaataaagagagctcttaatcagctcagtggtggttaaaaccagctatcttttaaagaagagaaaaaacaaaacacagcaatgccctgtctcttcagaaaattgttttaaaaagttagccaggcatagttagtggcccacgcctgtagtccgagctgtttgggaggttgaggtgggaagattggttgagcccaagattttgaggctgcagtaagccataattgtaccactgcactccagcctgagcgacagagaacaagaccctgtctcaaaaataaagtgggggaaggggtgcaaaattacactgtgagaagccaagaagtttcaaagttctatttatttttctaagtcatttttaatcattatttgttgtttcagtgtttgaatttaacattatgtttttaaagatggagtggattctaaagatgagttgggttcaagatatccaacatatcttttatattgggcttatgtcacttaggtgaagttgagctcctttttctttttaatctccatggaacaatttgtataatttcttgatttaaattgctaaactgagctcttcattcaaaatactaaacaataatttctctttggggggaaaattaaggaaggctttctatacatagaaataaagatgcctaggccgggtgcagtggctcatgcctgtaatcccaatactttggggggctgaggcgggtggatcacctgaggtcaagagttcaagaccagcctgggcaacatggtgaaaccctgcctctactaaaagtacaaaaattagctgggcgtggtggcagctgcctgtaatcccagctactcggaggctgaggcacgagaatcacttgaacctgggaggcgaaggttgcagtgaaccaagatcatgccattgcactccagcctgggcgacagagcaaaactctttatctaaaaaaaaaaaaaaaaaaaagacgcctacagaagcaaggttcttaggtgcagtgactcatgcctgtaattccagcactttgggagtttgaggcaagaggatcacttgagctcaggaattcaaaaccagcctgggcaatatggcaagaccccatctttgcagaatattagcctagcttggtagcacgagtatgtggtcctagctacttggaaggctgaggtgggaaggatcacttgagcctggtaggttgaagctgcagtgagctatattcacaccattgcactctagcttgaacaacaaagtgagatcctgtctcaaaaagaaaaaggaaaaattacagctcacggctgtaatcccagcactttgggaggccaaggcgcgcagatcacttgaggtcaggagtttgagaccagccaacatggtatcaccctgtctctactaaaaatacaaaaattagccaggtgtcgtggcgggtgcctgtaatcccagctactcgggaggctgaggcaggagaatcgcttgaacccaggaggcagagattacagtgaaccaagatgacacctctgcactccagcctgggcaacaggcttaaagactccgtcttaaaaaaaaattaagaatttgtattctcataacatattcagttttaagcttgtagcttttaaatctttgagcacgtaataaaagctgcgtaggccaagtgtggtggctcatgcttgtaatcccagcactttgggaggctgaggcaggaggatcacctgaggtcgggagttcaagagcagcttacccaatatgtagaaaccccgcctctactaaaaatacaaaattagccaggcgtggtcgcatgcctgtaatcctagctactcgggaggctgaggcaggagaatcattgaacccaggaggcggaggttgtggtgggccaatatcacaccattgcactccaacctgggcaacaagagcaagagtccatctaaaaaaagagctgtatataccactttaatctgtccttgggcttcagacttaaatattctcttaaacagcaaaaatactaactaagttaaatttaaaagcaaggagaagcatcattgtaatacgacatccatgtgtattcaaactagaattttctgatggtcttcgtaagataaaggagataattgtcatttctatgacacagcttttataatttgaataaacttagttggagattggagtatttttattatttattttcatgtgagatgggtaatgtgctgacctcataacaaagtttgagggagacacattgtatgtgagaatttgaagtgcttatgaagtacaaaagcagaggccaggtgctcacatctgtaatcccagcactttgggaggccaaggcacacagatcacttgaggtcaggagtttgagaccagcctggccaacatggcgaaaacccctctcttactaaaaatacaaaaattagctggatgtggtggtgtgggcctgtaatcccagctactcgcgaggctgaggcaggagaatcgcttgaacctggcaggcagaggttgcggtgagccaagattgcgtcactgcactccggcgtggacaagagagtgagactccgtcacaaaaaaaaaaaaaaaagaagaaaagtattggattcacatattctaaaaatgctcgtcatttgtggctaattttatcaagtctagtttaatctcatatttacagagtttagttaattctaattagctttgttggaggtcataaaccacattattaaccttgaaccgactctgtgtttacttgagttcctctgcataatagcatgtcaccaccatcataaacatgttggtattgcattatgcttctagaggagacatccaccaatatttgaaaatctggctggtccgagtgcagtggtgtttacaactaattgatcacaaccagttacagactttgtttcttctccagtcctgctgcttcacttgactagccttttaaaaaaaagaaagaaaatagagaaaatcttaacttatatttacttactgtatgttgtgattagtttaatagaagggagtttaatccttaataattaagttagtcctcaacgtttattgacttagttctgatgtagtccttgtgtactattgtataatgtagactacttggccatacttgattttgtctaaaagttaatgcataaattaatattaaatatggccaaatataaaagtttaatgagtcatttgaggtcatttagccagaaaactgcatttatgttcctggtgaatttttttcaatgtccttttccaaaagtggcagtaagcagctgtcttaaaataaggagacagtgggaatgatgttgttaaagtcttttatacaatgtattgtctgtctgttccataaaaagtaaaactactctattcgtgaccagcttgggcaacatagtgagactgtctctttaaaaaaaaaaaaaaaattaaaaattagcaggtgtggtgatgcacacctgtagtcctagcaattcgggaagctgaggtaggaagatcgcttgagccaagtgtttgaggttagaatgagctatgatcgcaccacctacactccagcctgggcaacagagcaagacccaaatggctcatggttgctttgtttgttttaccttgttgagtgccagtgtgtattttgagcaaagcagtgtaaatggccttcttgccctagagtctttcataattgagccttatttaatctaccacttttgaccatgaaatttaacaggtgacttcttctgggtatctactccaggtgaagtgatattttttttgactgagatgtctaaagctcttggattcctggtatctcaccaggacatcttagtaaaacagcaagtatcagatgaggaatcagacttgagttctagctctggtctggccactaacattgatatgatcttgggcaagttagttcctgcctgggtttcattacctttaactgaggaggttgaaatagatgatttctcatgtctcttctactcctaaattctatgattttagggagaaaatccccttcaacattcctgggatatatatctaatagtcccatatattgtgaaacttccctattgacgataaagagggctggggaaggctacaagttctctttgtaaagaatccttttctggtcaagtttcttcttcatcactcatgccacttactccattctggaccctccttcagtcaaatgttcctgtgcttcaacctccattacccttggaaatgccaccacccccacctccacctccagaatcacctccaccccctcctccaccacctcctcctgcggaagatggtgagatccaggaggtagagatggaggatgagggaagtgaggagccccctgccccaggaacagaggaagatacccctttgaaaccttcagcacaaaccacagttgtaactagccagagttcagttgattccaccatctctagttcttcttccactaaaggaataaagaggaaagctacagaaattagcactgcagtggttcagaggtcagctaccattggcagttctccagttctctatagccagtcagctatagctacaggtcaccaggcagcagggattggaaaccaggcaacaggaattggacatcagacaataccagttagccttccagcagcaggaatgggtcatcaggccagaggaatgagcctgcagtcaaattaccttggactagcggcagcacctgcaattatgagttatgcagaatgttctgtcccaattggagtgactgctccctcattgcagccagttcaggcccgaggtgctgtgcctaccgctaccattatagaaccaccaccaccacctcctcctcctcctcctccaccaccaccagctcccaaaatgccaccacctgaaaagacaaaaaaaggaaggaaagacaaggcaaagaagagtaagaccaaaatgccatctttggtaaaaaagtggcagagtatccagcgtgagttagatgaagaggacaattctagttccagtgaagaggatcgggaatcaactgcacagaagcgaattgaagagtggaaacagcagcagctggttagtggcatggcagagagaaatgctaattttgaagcccttcctgaggattggagagcaaggctgaagagaaggaaaatggctccaaacacatagtttttaagtttttaaaacttttttgtattattgtttgttttgtgttcagttcaaagtcttaaccagttttattgtcaaataaactataaatgttatgggggagatcttataaatttcctgggcaagagtgtatgcatacaaagttttcacttttgtgaaatgtaatttttctgtttttgcaaagggatgagttgactggaattgtctgaagctttttctggcctcttttctctagtcggccacccctgaagtgctgaggtctaagtggtttacctcgtgctgatagatggccacactctttagagtagttctcataagttctagaactggtagctcggtcgtttcgcacactaggtggcatacaggcagcagcaggtgttcatatccttgattttgagaatttcccctcaagtatgtggcagtaaatacaacaagacactctatgtattaatgtctccattgtcttaaccctgttccaaaacaaaattcacctcctttctttatgtgaatgtattctccataaaattccagtatttaaaaagcagtttactgttctgtactttctgttgtatcacaatcagtttctccagtttctgaccttgtaaatttgtatatatgcactaataaagctttttttataa

SEQ ID NO: 408666 - DNA, 3701 bp, Homo sapiens
gctgaagatgtgaatgaagaacaagattactatcctctgccagcagggatcatagacggtatttctatgtaaacgaacagtcgggcgagtctcagtgggagtttccagatggtgaagaggaagaagaagaaagccaagcacaagaaaatagagatgagactcttgccaaacagaccttgaaagacaaaactggcactgattcaaattcaacagaatcctctgaaacttccacagtcggaattgagatgggcgattggcaggaagtctgggatgagaacacgggatgttattattattggaatacacaaacaaatgaagtgacttgggagttaccccaatatcttgccacacaggtacagggattacagcattaccagcccagttctgtgccaggtgctgaaactagttttgtggtaaatacagacatatattctaaggagaaaacgatttctgtttccagtagtaaaagtggaccagtcatagccaagcgagaagttaaaaaggaagtaaatgaaggaattcaggctctctcaaatagtgaggaggagaagaaaggggtggcagcatcgctgcttgctcctttattgcctgagggaataaaagaagaagaagagagatggagaagaaaagtaatttgtaaagaggagccagtttcagaagtaaaagaaacaagtacaacagtagaagaagcaacaacaatagtaaagccacaggaaattatgttggacaatatagaagacccttctcaggaggatctttgcagtgttgtccaatctggagaaagtgaggaggaagaggaacaagatacccttgaactggagctagttttggaaaggaaaaaagcagagttgcgagccttggaggaaggagatggtagtgtgtcagggtctagtccacgttctgatatcagccagccagcatctcaagatggaatgcgtaggcttatgtctaaaagaggaaaatggaagatgtttgttcgagctaccagtccagaatctaccagtaggagttctagtaaaactggacgagatactccagaaaatggagaaactgcaattggtgctgaaaattcagaaaaaatagatgagaattcagataaagagatggaagtagaagaatctccagagaaaataaaagtacagacaacaccaaaagtagaagaagaacaggatttgaaatttcagattggagaactggcaaataccctgacaagtaaattcgagtttctaggcattaatagacaatccatctccaactttcatgtgctgctcttacagactgagactcgaattgcagactggcgggaaggggctcttaatggaaactaccttaaacgaaaacttcaggatgcagcagaacaactaaaacagtatgaaataaacgccactcctaaaggctggtcctgccactgggacagggatcatagacggtatttctatgtaaacgaacagtcgggcgagtctcagtgggagtttccagatggtgaagaggaagaagaagaaagccaagcacaagaaaatagagatgagactcttgccaaacagaccttgaaagacaaaactggcactgattcaaattcaacagaatcctctgaaacttccacaggttctctttgtaaagaatccttttctggtcaagtttcttcttcatcactcatgccacttactccattctggaccctccttcagtcaaatgttcctgtgcttcaacctccattacccttggaaatgccaccacccccacctccacctccagaatcacctccaccccctcctccaccacctcctcctgcggaagatggtgagatccaggaggtagagatggaggatgagggaagtgaggagccccctgccccaggaacagaggaagatacccctttgaaaccttcagcacaaaccacagttgtaactagccagagttcagttgattccaccatctctagttcttcttccactaaaggaataaagaggaaagctacagaaattagcactgcagtggttcagaggtcagctaccattggcagttctccagttctctatagccagtcagctatagctacaggtcaccaggcagcagggattggaaaccaggcaacaggaattggacatcagacaataccagttagccttccagcagcaggaatgggtcatcaggccagaggaatgagcctgcagtcaaattaccttggactagcggcagcacctgcaattatgagttatgcagaatgttctgtcccaattggagtgactgctccctcattgcagccagttcaggcccgaggtgctgtgcctaccgctaccattatagaaccaccaccaccacctcctcctcctcctcctccaccaccaccagctcccaaaatgccaccacctgaaaagacaaaaaaaggaaggaaagacaaggcaaagaagagtaagaccaaaatgccatctttggtaaaaaagtggcagagtatccagcgtgagttagatgaagaggacaattctagttccagtgaagaggatcgggaatcaactgcacagaagcgaattgaagagtggaaacagcagcagctggttagtggcatggcagagagaaatgctaattttgaagcccttcctgaggattggagagcaaggctgaagagaaggaaaatggctccaaacacatagtttttaagtttttaaaacttttttgtattattgtttgttttgtgttcagttcaaagtcttaaccagttttattgtcaaataaactataaatgttatgggggagatcttataaatttcctgggcaagagtgtatgcatacaaagttttcacttttgtgaaatgtaatttttctgtttttgcaaagggatgaggtgattggaattgctttgaccatgctgcctttattctcaaactggcaaacttagcatgttaggtgtattaacctcatcagtcttgaagaacatgtggctcatgagtataacacttctgtagaggactccctgacaaaagtgaagaattaacttctcctccagaacaagtgcaattcagaaggcagctctgcattctaccttgcttgactggaattgtctgaagctttttctggcctcttttctctagtcggccacccctgaagtgctgaggtctaagtggtttacctcgtgctgatagatggccacactctttagagtagttctcataagttctagaactggtagctcggtcgtttcgcacactaggtggcatacaggcagcagcaggtgttcatatccttgattttgagaatttcccctcaagtatgtggcagtaaatacaacaagacactctatgtattaatgtctccattgtcttaaccctgttccaaaacaaaattcacctcctttctttatgtgaatgtattctccataaaattccagtatttaaaaagcagtttactgttctgtactttctgttgtatcacaatcaggtaaaagtcactttaaactgaggaaacggcaaattgtgttttaaagctctttgtatttctccagtttctgaccttgtaaatttgtatatatgcactaataaagctttttttataaaaggagaacaaatcagaacaagcaaacgggaaagaaaatgaggacgacggaaaccaaagacaacagaagacaacgaaggacggagcggagaagagagagaacaaaccagagagacacagcgacggagaggaaagagagagtgaaaaagaag

SEQ ID NO: 408667 - DNA, 9317 bp, Homo sapiens
  misc_feature (4113)..(4113): n is a, c, g, or t
gctgaagatgtgaatgaagaacaagattactatcctctgccagcagggatcatagacggtatttctatgtaaacgaacagtcgggcgagtctcagtgggagtttccagatggtgaagaggaagaagaagaaagccaagcacaagaaaatagagatgagactcttgccaaacagaccttgaaagacaaaactggcactgattcaaattcaacagaatcctctgaaacttccacagtcggaattgagatgggcgattggcaggaagtctgggatgagaacacgggatgttattattattggaatacacaaacaaatgaagtgacttgggagttaccccaatatcttgccacacaggtacagggattacagcattaccagcccagttctgtgccaggtgctgaaactagttttgtggtaaatacagacatatattctaaggagaaaacgatttctgtttccagtagtaaaagtggaccagtcatagccaagcgagaagttaaaaaggaagtaaatgaaggaattcaggctctctcaaatagtgaggaggagaagaaaggggtggcagcatcgctgcttgctcctttattgcctgagggaataaaagaagaagaagagagatggagaagaaaagtaatttgtaaagaggagccagtttcagaagtaaaagaaacaagtacaacagtagaagaagcaacaacaatagtaaagccacaggaaattatgttggacaatatagaagacccttctcaggaggatctttgcagtgttgtccaatctggagaaagtgaggaggaagaggaacaagatacccttgaactggagctagttttggaaaggaaaaaagcagagttgcgagccttggaggaaggagatggtagtgtgtcagggtctagtccacgttctgatatcagccagccagcatctcaagatggaatgcgtaggcttatgtctaaaagaggaaaatggaagatgtttgttcgagctaccagtccagaatctaccagtaggagttctagtaaaactggacgagatactccagaaaatggagaaactgcaattggtgctgaaaattcagaaaaaatagatgagaattcagataaagagatggaagtagaagaatctccagagaaaataaaagtacagacaacaccaaaagtagaagaagaacaggatttgaaatttcagattggagaactggcaaataccctgacaagtaaattcgagtttctaggcattaatagacaatccatctccaactttcatgtgctgctcttacagactgagactcgaattgcagactggcgggaaggggctcttaatggaaactaccttaaacgaaaacttcaggatgcagcagaacaactaaaacagtatgaaataaacgccactcctaaaggctggtcctgccactgggacaggtacgcactcttctccccttttcacctttcacctttgacatctcagacatgatttgtgatcaccaccatctgacgacatgacagcctgtctggagactgagagcagctgcagttagcggtgctgggcaggcaaagcaccgcaagcacaaagtttggccagccacacattggagaaacaaaagcaatgtttaaagtgttccatgtaacggattttttcccaagatatggacaaagctggtttttactctccagagtgttgcacggagtagggcgggcttgggggttaagcgcatgcgagagctctgtgcgctttacaggacctctggaagcaactactcctgattaacctcggtgaagttaaggaaaacttcgtggctgaagatgtgaatgaagaacaagattactatcctctgccagcaggtcagatgaaaacatttctttatatatttggcttttcttgatttttttttcgttatttgaaatctttgctcttttatttttcagctcccagatcctctccctctctttagctttcactgtgtttgatatcaagaatatgaaatgtgaattccacggtccaagaggggaagagtcacctttcacaaacttcgttgttctcttctttggaagggaaattagtgttctaggcgattgagtcccttcattaatgaaacttgaaaccctgttatgcattggcaaatcacaaaaaaagagaaaagtgttttctaagtctcatctgttggagtgagagggttcagggctgtattcacagagttgctggcagtgcaaatagctttgaattatccttggttctccattctcaattgtcaaagctctttgttgcctttgtgaatagcagtccattaagaggttcgtccctgtgaaagcagactgctgtcctgggacaggaccaaatggaagtgtctttgtaggagaacgggttttaaaacatgtgttttctttcttgtaatttagggatcatagacggtatttctatgtaaacgaacagtcgggcgagtctcagtgggagtttccagatggtgaagaggaagaagaagaaagccaagcacaagaaaatagagatgagactcttgccaaacagaccttgaaagacaaaactggcactgattcaaattcaacagaatcctctgaaacttccacaggtgagacaatttaccttgtactaattcagccaaaatgactttagaggaaaaatcttattaatttacattattaaaagattttatgtcataataatataagcttctgattgagaatagtggtgtgaactaaaacaaggaatgcatgagttattatggttggaaatcagcatactattgttatcacgtgtaaaactgtgccccaaagtgaaaagataggctaacagattttgattttaaaaaattgttttataaccattctatcatgccactgactaagctgtgggtctccaaaaataggaatgcttgtgctgaggaactagatagttgaactgtcaatatatgtggcatgctgagatttgttatacatttctatacaacacttagtctgttcatattgcaacctcatttctcacctccactaatcttacaaaaagcgtggttggtacaaatcaaaatgatatgaagaaatgccattagtacttgtttcagagaagcaaaataattgatcatgaaaaatcaccagcaatcttctggtctaaaacaattggcaataggatgtctcattccatttttaaggtactcttggaagaatttagtttagttacatacattttttaaaagataggctttcatgctcctcagttcctttagtttttaaaaagtttccaatgtgtaaagaaacttccacctgttaatcttaagaattggtagctatttgttaaactgatggcatatgaaggcaagagtctatgagtcgtttctaaagtaatagatctttgaaaattttaaaaagtgaaatttgtcaataacagagttaagagctgaattcttttgtctaaaacttatcgaaattgatgcttgtactctactggctccctgatgatagtagaaaagcactagtaatgtaccaaatgaaactggttgtgtaccagatgattttgttaacttcttaaatagcctagaaatcgtcagcaggtcacatacaactgcagtgataatttcagaacatagcaaaaggctgattttattctacttcacattttagaagtgcattttctcaagttacagggcatttcacttcccttttacatgaagagattttcttttgaatatttttcctctcttttggtagcagtgatagacatgactaataatatattggttctttttgtttgctttttagcagttaatgaactgaagaggcttgatcgtagttctggataggtggctccactcctgaccactgtcaacatcccttatatgttccaaagttgaaaattccactgttaccaattctgaatgttctgtgaacactttagatgagtattaagctgttttctccctttatgacacacatagttgatactgtctggtaaaaggaggctcttgagccattcctatttaattaaaacagaactagttgtagtgtaggaaaaagccactgataaaacaggttatattcttaagcctctctttattgagaacccctagaattgcaggataaacttgatcgaagtaaaatccaaatcttanactaagttctgtgagatttaagagcaataatcaacagttctaagcctaataaagagagctcttaatcagctcagtggtggttaaaaccagctatcttttaaagaagagaaaaaacaaaacacagcaatgccctgtctcttcagaaaattgttttaaaaagttagccaggcatagttagtggcccacgcctgtagtccgagctgtttgggaggttgaggtgggaagattggttgagcccaagattttgaggctgcagtaagccataattgtaccactgcactccagcctgagcgacagagaacaagaccctgtctcaaaaataaagtgggggaaggggtgcaaaattacactgtgagaagccaagaagtttcaaagttctatttatttttctaagtcatttttaatcattatttgttgtttcagtgtttgaatttaacattatgtttttaaagatggagtggattctaaagatgagttgggttcaagatatccaacatatcttttatattgggcttatgtcacttaggtgaagttgagctcctttttctttttaatctccatggaacaatttgtataatttcttgatttaaattgctaaactgagctcttcattcaaaatactaaacaataatttctctttggggggaaaattaaggaaggctttctatacatagaaataaagatgcctaggccgggtgcagtggctcatgcctgtaatcccaatactttggggggctgaggcgggtggatcacctgaggtcaagagttcaagaccagcctgggcaacatggtgaaaccctgcctctactaaaagtacaaaaattagctgggcgtggtggcagctgcctgtaatcccagctactcggaggctgaggcacgagaatcacttgaacctgggaggcgaaggttgcagtgaaccaagatcatgccattgcactccagcctgggcgacagagcaaaactctttatctaaaaaaaaaaaaaaaaaaaagacgcctacagaagcaaggttcttaggtgcagtgactcatgcctgtaattccagcactttgggagtttgaggcaagaggatcacttgagctcaggaattcaaaaccagcctgggcaatatggcaagaccccatctttgcagaatattagcctagcttggtagcacgagtatgtggtcctagctacttggaaggctgaggtgggaaggatcacttgagcctggtaggttgaagctgcagtgagctatattcacaccattgcactctagcttgaacaacaaagtgagatcctgtctcaaaaagaaaaaggaaaaattacagctcacggctgtaatcccagcactttgggaggccaaggcgcgcagatcacttgaggtcaggagtttgagaccagccaacatggtatcaccctgtctctactaaaaatacaaaaattagccaggtgtcgtggcgggtgcctgtaatcccagctactcgggaggctgaggcaggagaatcgcttgaacccaggaggcagagattacagtgaaccaagatgacacctctgcactccagcctgggcaacaggcttaaagactccgtcttaaaaaaaaattaagaatttgtattctcataacatattcagttttaagcttgtagcttttaaatctttgagcacgtaataaaagctgcgtaggccaagtgtggtggctcatgcttgtaatcccagcactttgggaggctgaggcaggaggatcacctgaggtcgggagttcaagagcagcttacccaatatgtagaaaccccgcctctactaaaaatacaaaattagccaggcgtggtcgcatgcctgtaatcctagctactcgggaggctgaggcaggagaatcattgaacccaggaggcggaggttgtggtgggccaatatcacaccattgcactccaacctgggcaacaagagcaagagtccatctaaaaaaagagctgtatataccactttaatctgtccttgggcttcagacttaaatattctcttaaacagcaaaaatactaactaagttaaatttaaaagcaaggagaagcatcattgtaatacgacatccatgtgtattcaaactagaattttctgatggtcttcgtaagataaaggagataattgtcatttctatgacacagcttttataatttgaataaacttagttggagattggagtatttttattatttattttcatgtgagatgggtaatgtgctgacctcataacaaagtttgagggagacacattgtatgtgagaatttgaagtgcttatgaagtacaaaagcagaggccaggtgctcacatctgtaatcccagcactttgggaggccaaggcacacagatcacttgaggtcaggagtttgagaccagcctggccaacatggcgaaaacccctctcttactaaaaatacaaaaattagctggatgtggtggtgtgggcctgtaatcccagctactcgcgaggctgaggcaggagaatcgcttgaacctggcaggcagaggttgcggtgagccaagattgcgtcactgcactccggcgtggacaagagagtgagactccgtcacaaaaaaaaaaaaaaaagaagaaaagtattggattcacatattctaaaaatgctcgtcatttgtggctaattttatcaagtctagtttaatctcatatttacagagtttagttaattctaattagctttgttggaggtcataaaccacattattaaccttgaaccgactctgtgtttacttgagttcctctgcataatagcatgtcaccaccatcataaacatgttggtattgcattatgcttctagaggagacatccaccaatatttgaaaatctggctggtccgagtgcagtggtgtttacaactaattgatcacaaccagttacagactttgtttcttctccagtcctgctgcttcacttgactagccttttaaaaaaaagaaagaaaatagagaaaatcttaacttatatttacttactgtatgttgtgattagtttaatagaagggagtttaatccttaataattaagttagtcctcaacgtttattgacttagttctgatgtagtccttgtgtactattgtataatgtagactacttggccatacttgattttgtctaaaagttaatgcataaattaatattaaatatggccaaatataaaagtttaatgagtcatttgaggtcatttagccagaaaactgcatttatgttcctggtgaatttttttcaatgtccttttccaaaagtggcagtaagcagctgtcttaaaataaggagacagtgggaatgatgttgttaaagtcttttatacaatgtattgtctgtctgttccataaaaagtaaaactactctattcgtgaccagcttgggcaacatagtgagactgtctctttaaaaaaaaaaaaaaaattaaaaattagcaggtgtggtgatgcacacctgtagtcctagcaattcgggaagctgaggtaggaagatcgcttgagccaagtgtttgaggttagaatgagctatgatcgcaccacctacactccagcctgggcaacagagcaagacccaaatggctcatggttgctttgtttgttttaccttgttgagtgccagtgtgtattttgagcaaagcagtgtaaatggccttcttgccctagagtctttcataattgagccttatttaatctaccacttttgaccatgaaatttaacaggtgacttcttctgggtatctactccaggtgaagtgatattttttttgactgagatgtctaaagctcttggattcctggtatctcaccaggacatcttagtaaaacagcaagtatcagatgaggaatcagacttgagttctagctctggtctggccactaacattgatatgatcttgggcaagttagttcctgcctgggtttcattacctttaactgaggaggttgaaatagatgatttctcatgtctcttctactcctaaattctatgattttagggagaaaatccccttcaacattcctgggatatatatctaatagtcccatatattgtgaaacttccctattgacgataaagagggctggggaaggctacaagttctctttgtaaagaatccttttctggtcaagtttcttcttcatcactcatgccacttactccattctggaccctccttcagtcaaatgttcctgtgcttcaacctccattacccttggaaatgccaccacccccacctccacctccagaatcacctccaccccctcctccaccacctcctcctgcggaagatggtgagatccaggaggtagagatggaggatgagggaagtgaggagccccctgccccaggaacagaggaagatacccctttgaaaccttcagcacaaaccacagttgtaactagccagagttcagttgattccaccatctctagttcttcttccactaaaggaataaagaggaaagctacagaaattagcactgcagtggttcagaggtcagctaccattggcagttctccagttctctatagccagtcagctatagctacaggtcaccaggcagcagggattggaaaccaggcaacaggaattggacatcagacaataccagttagccttccagcagcaggaatgggtcatcaggccagaggaatgagcctgcagtcaaattaccttggactagcggcagcacctgcaattatgagttatgcagaatgttctgtcccaattggagtgactgctccctcattgcagccagttcaggcccgaggtgctgtgcctaccgctaccattatagaaccaccaccaccacctcctcctcctcctcctccaccaccacctcggtcgtttcgcacactaggtggcatacaggcagcagcaggtgttcatatccttgattttgagaatttcccctcaagtatgtggcagtaaatacaacaagacactctatgtattaatgtctccattgtcttaaccctgttccaaaacaaaattcacctcctttctttatgtgaatgtattctccataaaattccagtatttaaaaagcagtttactgttctgtactttctgttgtatcacaatcaggtaaaagtcactttaaactgaggaaacggcaaattgtgttttaaagctctttgtatttctccagtttctgaccttgtaaatttgtatatatgcactaataaagctttttttataa

SEQ ID NO: 408668 - DNA, 3958 bp, Homo sapiens
gctgaagatgtgaatgaagaacaagattactatcctctgccagcagggatcatagacggtatttctatgtaaacgaacagtcgggcgagtctcagtgggagtttccagatggtgaagaggaagaagaagaaagccaagcacaagaaaatagagatgagactcttgccaaacagaccttgaaagacaaaactggcactgattcaaattcaacagaatcctctgaaacttccacagtcggaattgagatgggcgattggcaggaagtctgggatgagaacacgggatgttattattattggaatacacaaacaaatgaagtgacttgggagttaccccaatatcttgccacacaggtacagggattacagcattaccagcccagttctgtgccaggtgctgaaactagttttgtggtaaatacagacatatattctaaggagaaaacgatttctgtttccagtagtaaaagtggaccagtcatagccaagcgagaagttaaaaaggaagtaaatgaaggaattcaggctctctcaaatagtgaggaggagaagaaaggggtggcagcatcgctgcttgctcctttattgcctgagggaataaaagaagaagaagagagatggagaagaaaagtaatttgtaaagaggagccagtttcagaagtaaaagaaacaagtacaacagtagaagaagcaacaacaatagtaaagccacaggaaattatgttggacaatatagaagacccttctcaggaggatctttgcagtgttgtccaatctggagaaagtgaggaggaagaggaacaagatacccttgaactggagctagttttggaaaggaaaaaagcagagttgcgagccttggaggaaggagatggtagtgtgtcagggtctagtccacgttctgatatcagccagccagcatctcaagatggaatgcgtaggcttatgtctaaaagaggaaaatggaagatgtttgttcgagctaccagtccagaatctaccagtaggagttctagtaaaactggacgagatactccagaaaatggagaaactgcaattggtgctgaaaattcagaaaaaatagatgagaattcagataaagagatggaagtagaagaatctccagagaaaataaaagtacagacaacaccaaaagtagaagaagaacaggatttgaaatttcagattggagaactggcaaataccctgacaagtaaattcgagtttctaggcattaatagacaatccatctccaactttcatgtgctgctcttacagactgagactcgaattgcagactggcgggaaggggctcttaatggaaactaccttaaacgaaaacttcaggatgcagcagaacaactaaaacagtatgaaataaacgccactcctaaaggctggtcctgccactgggacaggtacgcactcttctccccttttcacctttcacctttgacatctcagacatgatttgtgatcaccaccatctgacgacatgacagcctgtctggagactgagagcagctgcagttagcggtgctgggcaggcaaagcaccgcaagcacaaagtttggccagccacacattggagaaacaaaagcaatgtttaaagtgttccatgtaacggattttttcccaagatatggacaaagctggtttttactctccagagtgttgcacggagtagggcgggcttgggggttaagcgcatgcgagagctctgtgcgctttacaggacctctggaagcaactactcctgattaacctcggtgaagttaaggaaaacttcgtggctgaagatgtgaatgaagaacaagattactatcctctgccagcaggtcagatgaaaacatttctttatatatttggcttttcttgatttttttttcgttatttgaaatctttgctcttttatttttcagctcccagatcctctccctctctttagctttcactgtgtttgatatcaagaatatgaaatgtgaattccacggtccaagaggggaagagtcacctttcacaaacttcgttgttctcttctttggaagggaaattagtgttctaggcgattgagtcccttcattaatgaaacttgaaaccctgttatgcattggcaaatcacaaaaaaagagaaaagtgttttctaagtctcatctgttggagtgagagggttcagggctgtattcacagagttgctggcagtgcaaatagctttgaattatccttggttctccattctcaattgtcaaagctctttgttgcctttgtgaatagcagtccattaagaggttcgtccctgtgaaagcagactgctgtcctgggacaggaccaaatggaagtgtctttgtaggagaacgggttttaaaacatgtgttttctttcttgtaatttagggatcatagacggtatttctatgtaaacgaacagtcgggcgagtctcagtgggagtttccagatggtgaagaggaagaagaagaaagccaagcacaagaaaatagagatgagactcttgccaaacagaccttgaaagacaaaactggcactgattcaaattcaacagaatcctctgaaacttccacaggttctctttgtaaagaatccttttctggtcaagtttcttcttcatcactcatgccacttactccattctggaccctccttcagtcaaatgttcctgtgcttcaacctccattacccttggaaatgccaccacccccacctccacctccagaatcacctccaccccctcctccaccaccagctcccaaaatgccaccacctgaaaagacaaaaaaaggaaggaaagacaaggcaaagaagagtaagaccaaaatgccatctttggtaaaaaagtggcagagtatccagcgtgagttagatgaagaggacaattctagttccagtgaagaggatcgggaatcaactgcacagaagcgaattgaagagtggaaacagcagcagctggttagtggcatggcagagagaaatgctaattttgaagcccttcctgaggattggagagcaaggctgaagagaaggaaaatggctccaaacacatagtttttaagtttttaaaacttttttgtattattgtttgttttgtgttcagttcaaagtcttaaccagttttattgtcaaataaactataaatgttatgggggagatcttataaatttcctgggcaagagtgtatgcatacaaagttttcacttttgtgaaatgtaatttttctgtttttgcaaagggatgaggtgattggaattgctttgaccatgctgcctttattctcaaactggcaaacttagcatgttaggtgtattaacctcatcagtcttgaagaacatgtggctcatgagtataacacttctgtagaggactccctgacaaaagtgaagaattaacttctcctccagaacaagtgcaattcagaaggcagctctgcattctaccttgcttgactggaattgtctgaagctttttctggcctcttttctctagtcggccacccctgaagtgctgaggtctaagtggtttacctcgtgctgatagatggccacactctttagagtagttctcataagttctagaactggtagctcggtcgtttcgcacactaggtggcatacaggcagcagcaggtgttcatatccttgattttgagaatttcccctcaagtatgtggcagtaaatacaacaagacactctatgtattaatgtctccattgtcttaaccctgttccaaaacaaaattcacctcctttctttatgtgaatgtattctccataaaattccagtatttaaaaagcagtttactgttctgtactttctgttgtatcacaatcaggtaaaagtcactttaaactgaggaaacggcaaattgtgttttaaagctctttgtatttctccagtttctgaccttgtaaatttgtatatatgcactaataaagctttttttataa

SEQ ID NO: 408669 - DNA, 8559 bp, Homo sapiens
  misc_feature (4113)..(4113): n is a, c, g, or t
gctgaagatgtgaatgaagaacaagattactatcctctgccagcagggatcatagacggtatttctatgtaaacgaacagtcgggcgagtctcagtgggagtttccagatggtgaagaggaagaagaagaaagccaagcacaagaaaatagagatgagactcttgccaaacagaccttgaaagacaaaactggcactgattcaaattcaacagaatcctctgaaacttccacagtcggaattgagatgggcgattggcaggaagtctgggatgagaacacgggatgttattattattggaatacacaaacaaatgaagtgacttgggagttaccccaatatcttgccacacaggtacagggattacagcattaccagcccagttctgtgccaggtgctgaaactagttttgtggtaaatacagacatatattctaaggagaaaacgatttctgtttccagtagtaaaagtggaccagtcatagccaagcgagaagttaaaaaggaagtaaatgaaggaattcaggctctctcaaatagtgaggaggagaagaaaggggtggcagcatcgctgcttgctcctttattgcctgagggaataaaagaagaagaagagagatggagaagaaaagtaatttgtaaagaggagccagtttcagaagtaaaagaaacaagtacaacagtagaagaagcaacaacaatagtaaagccacaggaaattatgttggacaatatagaagacccttctcaggaggatctttgcagtgttgtccaatctggagaaagtgaggaggaagaggaacaagatacccttgaactggagctagttttggaaaggaaaaaagcagagttgcgagccttggaggaaggagatggtagtgtgtcagggtctagtccacgttctgatatcagccagccagcatctcaagatggaatgcgtaggcttatgtctaaaagaggaaaatggaagatgtttgttcgagctaccagtccagaatctaccagtaggagttctagtaaaactggacgagatactccagaaaatggagaaactgcaattggtgctgaaaattcagaaaaaatagatgagaattcagataaagagatggaagtagaagaatctccagagaaaataaaagtacagacaacaccaaaagtagaagaagaacaggatttgaaatttcagattggagaactggcaaataccctgacaagtaaattcgagtttctaggcattaatagacaatccatctccaactttcatgtgctgctcttacagactgagactcgaattgcagactggcgggaaggggctcttaatggaaactaccttaaacgaaaacttcaggatgcagcagaacaactaaaacagtatgaaataaacgccactcctaaaggctggtcctgccactgggacaggtacgcactcttctccccttttcacctttcacctttgacatctcagacatgatttgtgatcaccaccatctgacgacatgacagcctgtctggagactgagagcagctgcagttagcggtgctgggcaggcaaagcaccgcaagcacaaagtttggccagccacacattggagaaacaaaagcaatgtttaaagtgttccatgtaacggattttttcccaagatatggacaaagctggtttttactctccagagtgttgcacggagtagggcgggcttgggggttaagcgcatgcgagagctctgtgcgctttacaggacctctggaagcaactactcctgattaacctcggtgaagttaaggaaaacttcgtggctgaagatgtgaatgaagaacaagattactatcctctgccagcaggtcagatgaaaacatttctttatatatttggcttttcttgatttttttttcgttatttgaaatctttgctcttttatttttcagctcccagatcctctccctctctttagctttcactgtgtttgatatcaagaatatgaaatgtgaattccacggtccaagaggggaagagtcacctttcacaaacttcgttgttctcttctttggaagggaaattagtgttctaggcgattgagtcccttcattaatgaaacttgaaaccctgttatgcattggcaaatcacaaaaaaagagaaaagtgttttctaagtctcatctgttggagtgagagggttcagggctgtattcacagagttgctggcagtgcaaatagctttgaattatccttggttctccattctcaattgtcaaagctctttgttgcctttgtgaatagcagtccattaagaggttcgtccctgtgaaagcagactgctgtcctgggacaggaccaaatggaagtgtctttgtaggagaacgggttttaaaacatgtgttttctttcttgtaatttagggatcatagacggtatttctatgtaaacgaacagtcgggcgagtctcagtgggagtttccagatggtgaagaggaagaagaagaaagccaagcacaagaaaatagagatgagactcttgccaaacagaccttgaaagacaaaactggcactgattcaaattcaacagaatcctctgaaacttccacaggtgagacaatttaccttgtactaattcagccaaaatgactttagaggaaaaatcttattaatttacattattaaaagattttatgtcataataatataagcttctgattgagaatagtggtgtgaactaaaacaaggaatgcatgagttattatggttggaaatcagcatactattgttatcacgtgtaaaactgtgccccaaagtgaaaagataggctaacagattttgattttaaaaaattgttttataaccattctatcatgccactgactaagctgtgggtctccaaaaataggaatgcttgtgctgaggaactagatagttgaactgtcaatatatgtggcatgctgagatttgttatacatttctatacaacacttagtctgttcatattgcaacctcatttctcacctccactaatcttacaaaaagcgtggttggtacaaatcaaaatgatatgaagaaatgccattagtacttgtttcagagaagcaaaataattgatcatgaaaaatcaccagcaatcttctggtctaaaacaattggcaataggatgtctcattccatttttaaggtactcttggaagaatttagtttagttacatacattttttaaaagataggctttcatgctcctcagttcctttagtttttaaaaagtttccaatgtgtaaagaaacttccacctgttaatcttaagaattggtagctatttgttaaactgatggcatatgaaggcaagagtctatgagtcgtttctaaagtaatagatctttgaaaattttaaaaagtgaaatttgtcaataacagagttaagagctgaattcttttgtctaaaacttatcgaaattgatgcttgtactctactggctccctgatgatagtagaaaagcactagtaatgtaccaaatgaaactggttgtgtaccagatgattttgttaacttcttaaatagcctagaaatcgtcagcaggtcacatacaactgcagtgataatttcagaacatagcaaaaggctgattttattctacttcacattttagaagtgcattttctcaagttacagggcatttcacttcccttttacatgaagagattttcttttgaatatttttcctctcttttggtagcagtgatagacatgactaataatatattggttctttttgtttgctttttagcagttaatgaactgaagaggcttgatcgtagttctggataggtggctccactcctgaccactgtcaacatcccttatatgttccaaagttgaaaattccactgttaccaattctgaatgttctgtgaacactttagatgagtattaagctgttttctccctttatgacacacatagttgatactgtctggtaaaaggaggctcttgagccattcctatttaattaaaacagaactagttgtagtgtaggaaaaagccactgataaaacaggttatattcttaagcctctctttattgagaacccctagaattgcaggataaacttgatcgaagtaaaatccaaatcttanactaagttctgtgagatttaagagcaataatcaacagttctaagcctaataaagagagctcttaatcagctcagtggtggttaaaaccagctatcttttaaagaagagaaaaaacaaaacacagcaatgccctgtctcttcagaaaattgttttaaaaagttagccaggcatagttagtggcccacgcctgtagtccgagctgtttgggaggttgaggtgggaagattggttgagcccaagattttgaggctgcagtaagccataattgtaccactgcactccagcctgagcgacagagaacaagaccctgtctcaaaaataaagtgggggaaggggtgcaaaattacactgtgagaagccaagaagtttcaaagttctatttatttttctaagtcatttttaatcattatttgttgtttcagtgtttgaatttaacattatgtttttaaagatggagtggattctaaagatgagttgggttcaagatatccaacatatcttttatattgggcttatgtcacttaggtgaagttgagctcctttttctttttaatctccatggaacaatttgtataatttcttgatttaaattgctaaactgagctcttcattcaaaatactaaacaataatttctctttggggggaaaattaaggaaggctttctatacatagaaataaagatgcctaggccgggtgcagtggctcatgcctgtaatcccaatactttggggggctgaggcgggtggatcacctgaggtcaagagttcaagaccagcctgggcaacatggtgaaaccctgcctctactaaaagtacaaaaattagctgggcgtggtggcagctgcctgtaatcccagctactcggaggctgaggcacgagaatcacttgaacctgggaggcgaaggttgcagtgaaccaagatcatgccattgcactccagcctgggcgacagagcaaaactctttatctaaaaaaaaaaaaaaaaaaaagacgcctacagaagcaaggttcttaggtgcagtgactcatgcctgtaattccagcactttgggagtttgaggcaagaggatcacttgagctcaggaattcaaaaccagcctgggcaatatggcaagaccccatctttgcagaatattagcctagcttggtagcacgagtatgtggtcctagctacttggaaggctgaggtgggaaggatcacttgagcctggtaggttgaagctgcagtgagctatattcacaccattgcactctagcttgaacaacaaagtgagatcctgtctcaaaaagaaaaaggaaaaattacagctcacggctgtaatcccagcactttgggaggccaaggcgcgcagatcacttgaggtcaggagtttgagaccagccaacatggtatcaccctgtctctactaaaaatacaaaaattagccaggtgtcgtggcgggtgcctgtaatcccagctactcgggaggctgaggcaggagaatcgcttgaacccaggaggcagagattacagtgaaccaagatgacacctctgcactccagcctgggcaacaggcttaaagactccgtcttaaaaaaaaattaagaatttgtattctcataacatattcagttttaagcttgtagcttttaaatctttgagcacgtaataaaagctgcgtaggccaagtgtggtggctcatgcttgtaatcccagcactttgggaggctgaggcaggaggatcacctgaggtcgggagttcaagagcagcttacccaatatgtagaaaccccgcctctactaaaaatacaaaattagccaggcgtggtcgcatgcctgtaatcctagctactcgggaggctgaggcaggagaatcattgaacccaggaggcggaggttgtggtgggccaatatcacaccattgcactccaacctgggcaacaagagcaagagtccatctaaaaaaagagctgtatataccactttaatctgtccttgggcttcagacttaaatattctcttaaacagcaaaaatactaactaagttaaatttaaaagcaaggagaagcatcattgtaatacgacatccatgtgtattcaaactagaattttctgatggtcttcgtaagataaaggagataattgtcatttctatgacacagcttttataatttgaataaacttagttggagattggagtatttttattatttattttcatgtgagatgggtaatgtgctgacctcataacaaagtttgagggagacacattgtatgtgagaatttgaagtgcttatgaagtacaaaagcagaggccaggtgctcacatctgtaatcccagcactttgggaggccaaggcacacagatcacttgaggtcaggagtttgagaccagcctggccaacatggcgaaaacccctctcttactaaaaatacaaaaattagctggatgtggtggtgtgggcctgtaatcccagctactcgcgaggctgaggcaggagaatcgcttgaacctggcaggcagaggttgcggtgagccaagattgcgtcactgcactccggcgtggacaagagagtgagactccgtcacaaaaaaaaaaaaaaaagaagaaaagtattggattcacatattctaaaaatgctcgtcatttgtggctaattttatcaagtctagtttaatctcatatttacagagtttagttaattctaattagctttgttggaggtcataaaccacattattaaccttgaaccgactctgtgtttacttgagttcctctgcataatagcatgtcaccaccatcataaacatgttggtattgcattatgcttctagaggagacatccaccaatatttgaaaatctggctggtccgagtgcagtggtgtttacaactaattgatcacaaccagttacagactttgtttcttctccagtcctgctgcttcacttgactagccttttaaaaaaaagaaagaaaatagagaaaatcttaacttatatttacttactgtatgttgtgattagtttaatagaagggagtttaatccttaataattaagttagtcctcaacgtttattgacttagttctgatgtagtccttgtgtactattgtataatgtagactacttggccatacttgattttgtctaaaagttaatgcataaattaatattaaatatggccaaatataaaagtttaatgagtcatttgaggtcatttagccagaaaactgcatttatgttcctggtgaatttttttcaatgtccttttccaaaagtggcagtaagcagctgtcttaaaataaggagacagtgggaatgatgttgttaaagtcttttatacaatgtattgtctgtctgttccataaaaagtaaaactactctattcgtgaccagcttgggcaacatagtgagactgtctctttaaaaaaaaaaaaaaaattaaaaattagcaggtgtggtgatgcacacctgtagtcctagcaattcgggaagctgaggtaggaagatcgcttgagccaagtgtttgaggttagaatgagctatgatcgcaccacctacactccagcctgggcaacagagcaagacccaaatggctcatggttgctttgtttgttttaccttgttgagtgccagtgtgtattttgagcaaagcagtgtaaatggccttcttgccctagagtctttcataattgagccttatttaatctaccacttttgaccatgaaatttaacaggtgacttcttctgggtatctactccaggtgaagtgatattttttttgactgagatgtctaaagctcttggattcctggtatctcaccaggacatcttagtaaaacagcaagtatcagatgaggaatcagacttgagttctagctctggtctggccactaacattgatatgatcttgggcaagttagttcctgcctgggtttcattacctttaactgaggaggttgaaatagatgatttctcatgtctcttctactcctaaattctatgattttagggagttccctattgacgataaagagggctggggaaggctacaagtaagtatatcctattttctctaatctttaaaggttttcccagcagagaaaagacagtaatcaatgatggcttttacaaagtttgaggaaagctgatcctgcaacttttcagctgcaatttcgtaatgtagacttcagcaacagcaatttcaaaaccactgcagttttaaaaaatctgagttatatactttgaagatttatcttcctaaatttctcttttatcgcaaaagtaaaaattgccatccctaacttgtgtctctgtgatatcacaaatgaatgtaatgtatgcaagggtgtgaaggaatgatatagttgacagtagcaccttgcaaatggattttttaaatttagtaacccaaattaaacacaatgggtagaactttcccgagtattttgaatgaatatt

SEQ ID NO: 408670 - DNA, 6986 bp, Homo sapiens
  misc_feature (4113)..(4113): n is a, c, g, or t
gctgaagatgtgaatgaagaacaagattactatcctctgccagcagggatcatagacggtatttctatgtaaacgaacagtcgggcgagtctcagtgggagtttccagatggtgaagaggaagaagaagaaagccaagcacaagaaaatagagatgagactcttgccaaacagaccttgaaagacaaaactggcactgattcaaattcaacagaatcctctgaaacttccacagtcggaattgagatgggcgattggcaggaagtctgggatgagaacacgggatgttattattattggaatacacaaacaaatgaagtgacttgggagttaccccaatatcttgccacacaggtacagggattacagcattaccagcccagttctgtgccaggtgctgaaactagttttgtggtaaatacagacatatattctaaggagaaaacgatttctgtttccagtagtaaaagtggaccagtcatagccaagcgagaagttaaaaaggaagtaaatgaaggaattcaggctctctcaaatagtgaggaggagaagaaaggggtggcagcatcgctgcttgctcctttattgcctgagggaataaaagaagaagaagagagatggagaagaaaagtaatttgtaaagaggagccagtttcagaagtaaaagaaacaagtacaacagtagaagaagcaacaacaatagtaaagccacaggaaattatgttggacaatatagaagacccttctcaggaggatctttgcagtgttgtccaatctggagaaagtgaggaggaagaggaacaagatacccttgaactggagctagttttggaaaggaaaaaagcagagttgcgagccttggaggaaggagatggtagtgtgtcagggtctagtccacgttctgatatcagccagccagcatctcaagatggaatgcgtaggcttatgtctaaaagaggaaaatggaagatgtttgttcgagctaccagtccagaatctaccagtaggagttctagtaaaactggacgagatactccagaaaatggagaaactgcaattggtgctgaaaattcagaaaaaatagatgagaattcagataaagagatggaagtagaagaatctccagagaaaataaaagtacagacaacaccaaaagtagaagaagaacaggatttgaaatttcagattggagaactggcaaataccctgacaagtaaattcgagtttctaggcattaatagacaatccatctccaactttcatgtgctgctcttacagactgagactcgaattgcagactggcgggaaggggctcttaatggaaactaccttaaacgaaaacttcaggatgcagcagaacaactaaaacagtatgaaataaacgccactcctaaaggctggtcctgccactgggacaggtacgcactcttctccccttttcacctttcacctttgacatctcagacatgatttgtgatcaccaccatctgacgacatgacagcctgtctggagactgagagcagctgcagttagcggtgctgggcaggcaaagcaccgcaagcacaaagtttggccagccacacattggagaaacaaaagcaatgtttaaagtgttccatgtaacggattttttcccaagatatggacaaagctggtttttactctccagagtgttgcacggagtagggcgggcttgggggttaagcgcatgcgagagctctgtgcgctttacaggacctctggaagcaactactcctgattaacctcggtgaagttaaggaaaacttcgtggctgaagatgtgaatgaagaacaagattactatcctctgccagcaggtcagatgaaaacatttctttatatatttggcttttcttgatttttttttcgttatttgaaatctttgctcttttatttttcagctcccagatcctctccctctctttagctttcactgtgtttgatatcaagaatatgaaatgtgaattccacggtccaagaggggaagagtcacctttcacaaacttcgttgttctcttctttggaagggaaattagtgttctaggcgattgagtcccttcattaatgaaacttgaaaccctgttatgcattggcaaatcacaaaaaaagagaaaagtgttttctaagtctcatctgttggagtgagagggttcagggctgtattcacagagttgctggcagtgcaaatagctttgaattatccttggttctccattctcaattgtcaaagctctttgttgcctttgtgaatagcagtccattaagaggttcgtccctgtgaaagcagactgctgtcctgggacaggaccaaatggaagtgtctttgtaggagaacgggttttaaaacatgtgttttctttcttgtaatttagggatcatagacggtatttctatgtaaacgaacagtcgggcgagtctcagtgggagtttccagatggtgaagaggaagaagaagaaagccaagcacaagaaaatagagatgagactcttgccaaacagaccttgaaagacaaaactggcactgattcaaattcaacagaatcctctgaaacttccacaggtgagacaatttaccttgtactaattcagccaaaatgactttagaggaaaaatcttattaatttacattattaaaagattttatgtcataataatataagcttctgattgagaatagtggtgtgaactaaaacaaggaatgcatgagttattatggttggaaatcagcatactattgttatcacgtgtaaaactgtgccccaaagtgaaaagataggctaacagattttgattttaaaaaattgttttataaccattctatcatgccactgactaagctgtgggtctccaaaaataggaatgcttgtgctgaggaactagatagttgaactgtcaatatatgtggcatgctgagatttgttatacatttctatacaacacttagtctgttcatattgcaacctcatttctcacctccactaatcttacaaaaagcgtggttggtacaaatcaaaatgatatgaagaaatgccattagtacttgtttcagagaagcaaaataattgatcatgaaaaatcaccagcaatcttctggtctaaaacaattggcaataggatgtctcattccatttttaaggtactcttggaagaatttagtttagttacatacattttttaaaagataggctttcatgctcctcagttcctttagtttttaaaaagtttccaatgtgtaaagaaacttccacctgttaatcttaagaattggtagctatttgttaaactgatggcatatgaaggcaagagtctatgagtcgtttctaaagtaatagatctttgaaaattttaaaaagtgaaatttgtcaataacagagttaagagctgaattcttttgtctaaaacttatcgaaattgatgcttgtactctactggctccctgatgatagtagaaaagcactagtaatgtaccaaatgaaactggttgtgtaccagatgattttgttaacttcttaaatagcctagaaatcgtcagcaggtcacatacaactgcagtgataatttcagaacatagcaaaaggctgattttattctacttcacattttagaagtgcattttctcaagttacagggcatttcacttcccttttacatgaagagattttcttttgaatatttttcctctcttttggtagcagtgatagacatgactaataatatattggttctttttgtttgctttttagcagttaatgaactgaagaggcttgatcgtagttctggataggtggctccactcctgaccactgtcaacatcccttatatgttccaaagttgaaaattccactgttaccaattctgaatgttctgtgaacactttagatgagtattaagctgttttctccctttatgacacacatagttgatactgtctggtaaaaggaggctcttgagccattcctatttaattaaaacagaactagttgtagtgtaggaaaaagccactgataaaacaggttatattcttaagcctctctttattgagaacccctagaattgcaggataaacttgatcgaagtaaaatccaaatcttanactaagttctgtgagatttaagagcaataatcaacagttctaagcctaataaagagagctcttaatcagctcagtggtggttaaaaccagctatcttttaaagaagagaaaaaacaaaacacagcaatgccctgtctcttcagaaaattgttttaaaaagttagccaggcatagttagtggcccacgcctgtagtccgagctgtttgggaggttgaggtgggaagattggttgagcccaagattttgaggctgcagtaagccataattgtaccactgcactccagcctgagcgacagagaacaagaccctgtctcaaaaataaagtgggggaaggggtgcaaaattacactgtgagaagccaagaagtttcaaagttctatttatttttctaagtcatttttaatcattatttgttgtttcagtgtttgaatttaacattatgtttttaaagatggagtggattctaaagatgagttgggttcaagatatccaacatatcttttatattgggcttatgtcacttaggtgaagttgagctcctttttctttttaatctccatggaacaatttgtataatttcttgatttaaattgctaaactgagctcttcattcaaaatactaaacaataatttctctttggggggaaaattaaggaaggctttctatacatagaaataaagatgcctaggccgggtgcagtggctcatgcctgtaatcccaatactttggggggctgaggcgggtggatcacctgaggtcaagagttcaagaccagcctgggcaacatggtgaaaccctgcctctactaaaagtacaaaaattagctgggcgtggtggcagctgcctgtaatcccagctactcggaggctgaggcacgagaatcacttgaacctgggaggcgaaggttgcagtgaaccaagatcatgccattgcactccagcctgggcgacagagcaaaactctttatctaaaaaaaaaaaaaaaaaaaagacgcctacagaagcaaggttcttaggtgcagtgactcatgcctgtaattccagcactttgggagtttgaggcaagaggatcacttgagctcaggaattcaaaaccagcctgggcaatatggcaagaccccatctttgcagaatattagcctagcttggtagcacgagtatgtggtcctagctacttggaaggctgaggtgggaaggatcacttgagcctggtaggttgaagctgcagtgagctatattcacaccattgcactctagcttgaacaacaaagtgagatcctgtctcaaaaagaaaaaggaaaaattacagctcacggctgtaatcccagcactttgggaggccaaggcgcgcagatcacttgaggtcaggagtttgagaccagccaacatggtatcaccctgtctctactaaaaatacaaaaattagccaggtgtcgtggcgggtgcctgtaatcccagctactcgggaggctgaggcaggagaatcgcttgaacccaggaggcagagattacagtgaaccaagatgacacctctgcactccagcctgggcaacaggcttaaagactccgtcttaaaaaaaaattaagaatttgtattctcataacatattcagttttaagcttgtagcttttaaatctttgagcacgtaataaaagctgcgtaggccaagtgtggtggctcatgcttgtaatcccagcactttgggaggctgaggcaggaggatcacctgaggtcgggagttcaagagcagcttacccaatatgtagaaaccccgcctctactaaaaatacaaaattagccaggcgtggtcgcatgcctgtaatcctagctactcgggaggctgaggcaggagaatcattgaacccaggaggcggaggttgtggtgggccaatatcacaccattgcactccaacctgggcaacaagagcaagagtccatctaaaaaaagagctgtatataccactttaatctgtccttgggcttcagacttaaatattctcttaaacagcaaaaatactaactaagttaaatttaaaagcaaggagaagcatcattgtaatacgacatccatgtgtattcaaactagaattttctgatggtcttcgtaagataaaggagataattgtcatttctatgacacagcttttataatttgaataaacttagttggagattggagtatttttattatttattttcatgtgagatgggtaatgtgctgacctcataacaaagtttgagggagacacattgtatgtgagaatttgaagtgcttatgaagtacaaaagcagaggccaggtgctcacatctgtaatcccagcactttgggaggccaaggcacacagatcacttgaggtcaggagtttgagaccagcctggccaacatggcgaaaacccctctcttactaaaaatacaaaaattagctggatgtggtggtgtgggcctgtaatcccagctactcgcgaggctgaggcaggagaatcgcttgaacctggcaggcagaggttgcggtgagccaagattgcgtcactgcactccggcgtggacaagagagtgagactccgtcacaaaaaaaaaaaaaaaagaagaaaagtattggattcacatattctaaaaatgctcgtcatttgtggctaattttatcaagtctagtttaatctcatatttacagagtttagttaattctaattagctttgttggaggtcataaaccacattattaaccttgaaccgactctgtgtttacttgagttcctctgcataatagcatgtcaccaccatcataaacatgttggtattgcattatgcttctagaggagacatccaccaatatttgtgtgattttacaaaaagcttttgtaatcagtta

SEQ ID NO: 408671 - DNA, 1578 bp, Homo sapiens
gctgaagatgtgaatgaagaacaagattactatcctctgccagcagggatcatagacggtatttctatgtaaacgaacagtcgggcgagtctcagtgggagtttccagatggtgaagaggaagaagaagaaagccaagcacaagaaaatagagatgagactcttgccaaacagaccttgaaagacaaaactggcactgattcaaattcaacagaatcctctgaaacttccacagtcggaattgagatgggcgattggcaggaagtctgggatgagaacacgggatgttattattattggaatacacaaacaaatgaagtgacttgggagttaccccaatatcttgccacacaggtacagggattacagcattaccagcccagttctgtgccaggtgctgaaactagttttgtggtaaatacagacatatattctaaggagaaaacgatttctgtttccagtagtaaaagtggaccagtcatagccaagcgagaagttaaaaaggaagtaaatgaaggaattcaggctctctcaaatagtgaggaggagaagaaaggggtggcagcatcgctgcttgctcctttattgcctgagggaataaaagaagaagaagagagatggagaagaaaagtaatttgtaaagaggagccagtttcagaagtaaaagaaacaagtacaacagtagaagaagcaacaacaatagtaaagccacaggaaattatgttggacaatatagaagacccttctcaggaggatctttgcagtgttgtccaatctggagaaagtgaggaggaagaggaacaagatacccttgaactggagctagttttggaaaggaaaaaagcagagttgcgagccttggaggaaggagatggtagtgtgtcagggtctagtccacgttctgatatcagccagccagcatctcaagatggaatgcgtaggcttatgtctaaaagaggaaaatggaagatgtttgttcgagctaccagtccagaatctaccagtaggagttctagtaaaactggacgagatactccagaaaatggagaaactggtaatttgtgcttcacattaaacttcagagttgaaagatatagaggggaaggaaactcttgtctttttttgtttcctcttcaacaaaacaggagattgtacttttactctttgggagaagtgctgggaaggaagcttccatccacctctctaccttttccagatctttttctagtagaggagtaagagcctgagaggctgacacccactggatggtggtgtattcagagtccagtcccatttcttctctctgtctacgttgcccagcctctgtgtgggtgggtagagagtttgattgtgtcatgaggacccaagttgtcttcattcaggtaataaggaccttatcattcattcatggtaaggtcgaagagctcctgctgcattttttaatctattttcagagatccctggatgaagctaatattttaatctccatttggccctaattatttttttttcttttcctttttgagacggaggtctcactctgtcacacaggctggaagacaaaggcatgatcttggct

SEQ ID NO: 408672 - DNA, 1145 bp, Homo sapiens
aatcgagcccggtacccctagttttagaagtttcactagcatcctctgaaacttccacagtcggaattgagatgggcgattggcaggaagtctgggatgagaacacgggatgttattattattggaatacacaaacaaatgaagtgacttgggagttaccccaatatcttgccacacaggtacagggattacagcattaccagcccagttctgtgccaggtgctgaaactagttttgtggtaaatacagacatatattctaaggagaaaacgatttctgtttccagtagtaaaagtggaccagtcatagccaagcgagaagttaaaaaggaagtaaatgaaggaattcaggctctctcaaatagtgaggaggagaagaaaggggtggcagcatcgctgcttgctcctttattgcctgagggaataaaagaagaagaagagagatggagaagaaaagtaatttgtaaagaggagccagtttcagaagtaaaagaaacaagtacaacagtagaagaagcaacaacaatagtaaagccacaggaaattatgttggacaatatagaagacccttctcaggaggatctttgcagtgttgtccaatctggagaaagtgaggaggaagaggaacaagatacccttgaactggagctagttttggaaaggaaaaaagcagagttgcgagccttggaggaaggagatggtagtgtgtcagggtctagtccacgttctgatatcagccagccagcatctcaagatggaatgcgtaggcttatgtctaaaagaggaaaatggaagatgtttgttcgagctaccagtccagaatctaccagtaggagttctagtaaaactggacgagatactccagaaaatggagaaactgcaattggtgctggaaattcaggaaaaaacaaggacggaaagacaaggcaaggaagaagttagacccaaatgccatcttgggtaaaaaaggtggccagagtatcccggcggggagttatgatagacgaggggcgcaatccctaagtttccccggttggaaaaaaaggggatcgggggaattccaattgggggcaaagaaaagggaaaatttggaccgactggggaccggcgaacacaggtgggttaactggggcgattgggctaggc

SEQ ID NO: 408673 - DNA, 192 bp, Homo sapiens
cctgggtgacagtgcgagactccatctcaaaaaaaaaaaaagtcgtttttaccttgagtattcagctactgaaaacagttaatatgaatgtgtgtgcaattgaatgtatgtgcaggtgagatttgtttcagaattaaatgagactaaattattttgttctttataggaagtaaatgaaggaattcaggctct

SEQ ID NO: 408674 - DNA, 377 bp, Homo sapiens
gcaagggtgcgcggggggacctgaactcgagctcagggcttgcggcctaggctcctcacggcgcctggccagacccggcgagggaggcgggcgaggtcggcttccgaggcctgcctgctgcgggcctgcaggcggggcggccctgggctccgggccgcagaagggccaggccgagttctgcgccctcggcccgggccaagcccgaggcgccatctgtggtgcagggcttgccccgggaacgtttgaaatatgaccgaagttcgggcatcctgagtctcccaaacgccccgggtcggttttgggtaacgcagagggtggatgtgaggatgagtttccgcgtgcgcggcctgtgactgtgggccaggcctttccacacg

SEQ ID NO: 408675 - DNA, 321 bp, Homo sapiens
attccgtctcaatcagtcaataataaataaataaatatgcacttagacatatacgtaaaactggggtagtgtttggttgacctatcagaatgaagaagtttgatgaagaatatactgatgtttggctgagaaacaaaagattttcataaacatagacgtgatagatcaggtttttaatttcagttagatttttatttgctgggaaatgaatacttttgttaatttttctttccactaaaataatctgtatgttgttttcacagtggcatggcagagagaaatgctaattttgaagcccttcctgaggattggagagcaagg

SEQ ID NO: 408676 - DNA, 284 bp, Homo sapiens
tccccttcaacattcctgggatatatatctaatagtcccatatattgtgaaacttccctattgacgataaagagggctggggaaggctacaagtaagtatatcctattttctctaatctttaaaggttttcccagcagagaaaagacagtaatcaatgatggcttttacaaagtttgaggaaagctgatcctgcaacttttcagctgcaatttcgtaatgtagacttcagcaacagcaatttcaaaaccactgcagttttaaaaaatctgagttatatactttg

SEQ ID NO: 408677 - DNA, 986 bp, Homo sapiens
caacaatagtaaagccacaggaaattatgttggacaatatagaagacccttctcaggaggatctttgcagtgttgtccaatctggagaaagtgaggaggaagaggaacaagatacccttgaactggagctagttttggaaaggaaaaaagtaagcttttgaaagttacttgtagaatgttttttcctcagtactactctacagggatcattgtgcttgacttacaaccattattgggattttgtttttcttatcccatcatctaggtatgttgaagcttatgcagcaaaaactttaaactacagaggtgtaggttttttggtccttgatgatacttttggtagttatcgggggaactcacccccaatatttcaacctaggttctttctattttccataagtgtcggccagctgagaaatagaaagagtataatgagaggaattttacagctgggccgccgggggtgacatcacatatcggtaggactatgatgcccacccgagcctcaaaccagcaagttttttattaagggtttcaaaaggggaggaggtgtaagaacagggagtagatcatgtgcttcaaagggcaaaaaggtactgataagggtctatgttcagcggtgcacatgttgtcttgataaacatcttaaacaacagaaaacagggttcaagagcagagaatcagtctgaccacagacttaccagggccgggtttttccccaccctaataagcctgagggtacttcaggagaccagggcgtatctcagtccttatctcaaccgcataggacagacattcccagagcggcagtttatagacctacccccaggaatgcattccttccccaggatattaatattaatattccttgctaggaaaagaatttagcgatatcttccctacttgcatgtccatttatgggctctatgcaagaagaaaaatatggctctttttgcctgaccctgcaggcagtgagaccttatggt

SEQ ID NO: 408678 - DNA, 436 bp, Homo sapiens
aagcaggaggattgcttaagcccaggaggctgcaatgagtcatgatctcaccactgcagcttgtgcaacagaatgagagcctgtctcaaaaaaaggaggtgggagcgggctatgtttaaccatggccttcagccactgataacaaatgtttgtgtttcagagttcagttgattccaccatctctagttcttcttccactaaaggaataaagaggaaagctacagaaattagcactgcagtggttcagaggtcagctaccattggcagttctccagttctctatagccagtcagctatagctacaggtaattgtgcatagagcgtggtttttcctcaatgtattgtttcttttcttttcagcattagatgccataaaaactaaagaaatgttaaaggctcttgattgcaaagactgtcagtatgcatttattttact

SEQ ID NO: 408679 - DNA, 4118 bp, Homo sapiens
aggcgcttgcgcaagcgcgtgctccgctggttgaaagcggatccgggctggaggcggtgtcacggtgtatgaatattgattacgcgtcgcagcgcccagggcccagcgcccagcctccagtgcccgcccctctcggccgcccgacgctctctgctcgcgcttgggctcgcgatggggaagaagtcccgggcggtacccggccgtaggcccatcctgcaactctctccgccgggtcctcggggcagcacgccgggccgggacccggagccggaacccgacactgagccggactcaaccgcggcggtccccagccagcccgccccgtcggcggcgacgaccaccgcggtgactgccgccgcggcctcggacgactcgccttcagaagatgaacaggaagcggtgcaggaggttcctagagttgttcagaatcctccaaaaccagtcatgaccactagacccacagctgttaaagcaacaggcggtctatgcttgcttggtgcttatgctgacagtgatgacgatgacaatgatgtttccgaaaaactagcacaatccaaagagacaaatggaaaccagtcaactgatattgatagtacattggccaacttcctagcggagatcgatgccataacagctcctcagcctgcagctcctgtaggagcttctgctccacctccaactccacctcgaccagagccaaaggaagcagcaacatctaccctttcttcttctacttcaaatggaacagactccacccaaacatctggttggcaatatgatactcagtgttcactggcaggagtcggaattgagatgggcgattggcaggaagtctgggatgagaacacgggatgttattattattggaatacacaaacaaatgaagtgacttgggagttaccccaatatcttgccacacaggtacagggattacagcattaccagcccagttctgtgccaggtgctgaaactagttttgtggtaaatacagacatatattctaaggagaaaacgatttctgtttccagtagtaaaagtggaccagtcatagccaagcgagaagttaaaaaggaagtaaatgaaggaattcaggctctctcaaatagtgaggaggagaagaaaggggtggcagcatcgctgcttgctcctttattgcctgagggaataaaagaagaagaagagagatggagaagaaaagtaatttgtaaagaggagccagtttcagaagtaaaagaaacaagtacaacagtagaagaagcaacaacaatagtaaagccacaggaaattatgttggacaatatagaagacccttctcaggaggatctttgcagtgttgtccaatctggagaaagtgaggaggaagaggaacaagatacccttgaactggagctagttttggaaaggaaaaaagcagagttgcgagccttggaggaaggagatggtagtgtgtcagggtctagtccacgttctgatatcagccagccagcatctcaagatggaatgcgtaggcttatgtctaaaagaggaaaatggaagatgtttgttcgagctaccagtccagaatctaccagtaggagttctagtaaaactggacgagatactccagaaaatggagaaactgcaattggtgctgaaaattcagaaaaaatagatgagaattcagataaagagatggaagtagaagaatctccagagaaaataaaagtacagacaacaccaaaagtagaagaagaacaggatttgaaatttcagattggagaactggcaaataccctgacaagtaaattcgagtttctaggcattaatagacaatccatctccaactttcatgtgctgctcttacagactgagactcgaattgcagactggcgggaaggggctcttaatggaaactaccttaaacgaaaacttcaggatgcagcagaacaactaaaacagtatgaaataaacgccactcctaaaggctggtcctgccactgggacagggatcatagacggtatttctatgtaaacgaacagtcgggcgagtctcagtgggagtttccagatggtgaagaggaagaagaagaaagccaagcacaagaaaatagagatgagactcttgccaaacagaccttgaaagacaaaactggcactgattcaaattcaacagaatcctctgaaacttccacaggttctctttgtaaagaatccttttctggtcaagtttcttcttcatcactcatgccacttactccattctggaccctccttcagtcaaatgttcctgtgcttcaacctccattacccttggaaatgccaccacccccacctccacctccagaatcacctccaccccctcctccaccacctcctcctgcggaagatggtgagatccaggaggtagagatggaggatgagggaagtgaggagccccctgccccaggaacagaggaagatacccctttgaaaccttcagcacaaaccacagttgtaactagccagagttcagttgattccaccatctctagttcttcttccactaaaggaataaagaggaaagctacagaaattagcactgcagtggttcagaggtcagctaccattggcagttctccagttctctatagccagtcagctatagctacaggtcaccaggcagcagggattggaaaccaggcaacaggaattggacatcagacaataccagttagccttccagcagcaggaatgggtcatcaggccagaggaatgagcctgcagtcaaattaccttggactagcggcagcacctgcaattatgagttatgcagaatgttctgtcccaattggagtgactgctccctcattgcagccagttcaggcccgaggtgctgtgcctaccgctaccattatagaaccaccaccaccacctcctcctcctcctcctccaccaccaccagctcccaaaatgccaccacctgaaaagacaaaaaaaggaaggaaagacaaggcaaagaagagtaagaccaaaatgccatctttggtaaaaaagtggcagagtatccagcgtgagttagatgaagaggacaattctagttccagtgaagaggatcgggaatcaactgcacagaagcgaattgaagagtggaaacagcagcagctggttagtggcatggcagagagaaatgctaattttgaagcccttcctgaggattggagagcaaggctgaagagaaggaaaatggctccaaacacatagtttttaagtttttaaaacttttttgtattattgtttgttttgtgttcagttcaaagtcttaaccagttttattgtcaaataaactataaatgttatgggggagatcttataaatttcctgggcaagagtgtatgcatacaaagttttcacttttgtgaaatgtaatttttctgtttttgcaaagggatgaggtgattggaattgctttgaccatgctgcctttattctcaaactggcaaacttagcatgttaggtgtattaacctcatcagtcttgaagaacatgtggctcatgagtataacacttctgtagaggactccctgacaaaagtgaagaattaacttctcctccagaacaagtgcaattcagaaggcagctctgcattctaccttgcttgactggaattgtctgaagctttttctggcctcttttctctagtcggccacccctgaagtgctgaggtctaagtggtttacctcgtgctgatagatggccacactctttagagtagttctcataagttctagaactggtagctcggtcgtttcgcacactaggtggcatacaggcagcagcaggtgttcatatccttgattttgagaatttcccctcaagtatgtggcagtaaatacaacaagacactctatgtattaatgtctccattgtcttaaccctgttccaaaacaaaattcacctcctttctttatgtgaatgtattctccataaaattccagtatttaaaaagcagtttactgttctgtactttctgttgtatcacaatcaggtaaaagtcactttaaactgaggaaacggcaaattgtgttttaaagctctttgtatttctccagtttctgaccttgtaaatttgtatatatgcactaataaagctttttttataa

SEQ ID NO: 408680 - DNA, 9838 bp, Homo sapiens
  misc_feature (3796)..(3796): n is a, c, g, or t
gctgaagatgtgaatgaagaacaagattactatcctctgccagcagggatcatagacggtatttctatgtaaacgaacagtcgggcgagtctcagtgggagtttccagatggtgaagaggaagaagaagaaagccaagcacaagaaaatagagatgagactcttgccaaacagaccttgaaagacaaaactggcactgattcaaattcaacagaatcctctgaaacttccacagtcggaattgagatgggcgattggcaggaagtctgggatgagaacacgggatgttattattattggaatacacaaacaaatgaagtgacttgggagttaccccaatatcttgccacacaggtacagggattacagcattaccagcccagttctgtgccaggtgctgaaactagttttgtggtaaatacagacatatattctaaggagaaaacgatttctgtttccagtagtaaaagtggaccagtcatagccaagcgagaagttaaaaaggaagtaaatgaaggaattcaggctctctcaaatagtgaggaggagaagaaaggggtggcagcatcgctgcttgctcctttattgcctgagggaataaaagaagaagaagagagatggagaagaaaagtaatttgtaaagaggagccagtttcagaagtaaaagaaacaagtacaacagtagaagaagcaacaacaatagtaaagccacaggaaattatgttggacaatatagaagacccttctcaggaggatctttgcagtgttgtccaatctggagaaagtgaggaggaagaggaacaagatacccttgaactggagctagttttggaaaggaaaaaagcagagttgcgagccttggaggaaggagatggtagtgtgtcagggtctagtccacgttctgatatcagccagccagcatctcaagatggaatgcgtaggcttatgtctaaaagaggaaaatggaagatgtttgttcgagctaccagtccagaatctaccagtaggagttctagtaaaactggacgagatactccagaaaatggagaaactgcaattggtgctgaaaattcagaaaaaatagatgagaattcagataaagagatggaagtagaagaatctccagagaaaataaaagtacagacaacaccaaaagtagaagaagaacaggatttgaaatttcagattggagaactggcaaataccctgacaagtaaattcgagtttctaggcattaatagacaatccatctccaactttcatgtgctgctcttacagactgagactcgaattgcagactggcgggaaggggctcttaatggaaactaccttaaacgaaaacttcaggatgcagcagaacaactaaaacagtatgaaataaacgccactcctaaaggctggtcctgccactgggacaggacctctggaagcaactactcctgattaacctcggtgaagttaaggaaaacttcgtggctgaagatgtgaatgaagaacaagattactatcctctgccagcaggtcagatgaaaacatttctttatatatttggcttttcttgatttttttttcgttatttgaaatctttgctcttttatttttcagctcccagatcctctccctctctttagctttcactgtgtttgatatcaagaatatgaaatgtgaattccacggtccaagaggggaagagtcacctttcacaaacttcgttgttctcttctttggaagggaaattagtgttctaggcgattgagtcccttcattaatgaaacttgaaaccctgttatgcattggcaaatcacaaaaaaagagaaaagtgttttctaagtctcatctgttggagtgagagggttcagggctgtattcacagagttgctggcagtgcaaatagctttgaattatccttggttctccattctcaattgtcaaagctctttgttgcctttgtgaatagcagtccattaagaggttcgtccctgtgaaagcagactgctgtcctgggacaggaccaaatggaagtgtctttgtaggagaacgggttttaaaacatgtgttttctttcttgtaatttagggatcatagacggtatttctatgtaaacgaacagtcgggcgagtctcagtgggagtttccagatggtgaagaggaagaagaagaaagccaagcacaagaaaatagagatgagactcttgccaaacagaccttgaaagacaaaactggcactgattcaaattcaacagaatcctctgaaacttccacaggtgagacaatttaccttgtactaattcagccaaaatgactttagaggaaaaatcttattaatttacattattaaaagattttatgtcataataatataagcttctgattgagaatagtggtgtgaactaaaacaaggaatgcatgagttattatggttggaaatcagcatactattgttatcacgtgtaaaactgtgccccaaagtgaaaagataggctaacagattttgattttaaaaaattgttttataaccattctatcatgccactgactaagctgtgggtctccaaaaataggaatgcttgtgctgaggaactagatagttgaactgtcaatatatgtggcatgctgagatttgttatacatttctatacaacacttagtctgttcatattgcaacctcatttctcacctccactaatcttacaaaaagcgtggttggtacaaatcaaaatgatatgaagaaatgccattagtacttgtttcagagaagcaaaataattgatcatgaaaaatcaccagcaatcttctggtctaaaacaattggcaataggatgtctcattccatttttaaggtactcttggaagaatttagtttagttacatacattttttaaaagataggctttcatgctcctcagttcctttagtttttaaaaagtttccaatgtgtaaagaaacttccacctgttaatcttaagaattggtagctatttgttaaactgatggcatatgaaggcaagagtctatgagtcgtttctaaagtaatagatctttgaaaattttaaaaagtgaaatttgtcaataacagagttaagagctgaattcttttgtctaaaacttatcgaaattgatgcttgtactctactggctccctgatgatagtagaaaagcactagtaatgtaccaaatgaaactggttgtgtaccagatgattttgttaacttcttaaatagcctagaaatcgtcagcaggtcacatacaactgcagtgataatttcagaacatagcaaaaggctgattttattctacttcacattttagaagtgcattttctcaagttacagggcatttcacttcccttttacatgaagagattttcttttgaatatttttcctctcttttggtagcagtgatagacatgactaataatatattggttctttttgtttgctttttagcagttaatgaactgaagaggcttgatcgtagttctggataggtggctccactcctgaccactgtcaacatcccttatatgttccaaagttgaaaattccactgttaccaattctgaatgttctgtgaacactttagatgagtattaagctgttttctccctttatgacacacatagttgatactgtctggtaaaaggaggctcttgagccattcctatttaattaaaacagaactagttgtagtgtaggaaaaagccactgataaaacaggttatattcttaagcctctctttattgagaacccctagaattgcaggataaacttgatcgaagtaaaatccaaatcttanactaagttctgtgagatttaagagcaataatcaacagttctaagcctaataaagagagctcttaatcagctcagtggtggttaaaaccagctatcttttaaagaagagaaaaaacaaaacacagcaatgccctgtctcttcagaaaattgttttaaaaagttagccaggcatagttagtggcccacgcctgtagtccgagctgtttgggaggttgaggtgggaagattggttgagcccaagattttgaggctgcagtaagccataattgtaccactgcactccagcctgagcgacagagaacaagaccctgtctcaaaaataaagtgggggaaggggtgcaaaattacactgtgagaagccaagaagtttcaaagttctatttatttttctaagtcatttttaatcattatttgttgtttcagtgtttgaatttaacattatgtttttaaagatggagtggattctaaagatgagttgggttcaagatatccaacatatcttttatattgggcttatgtcacttaggtgaagttgagctcctttttctttttaatctccatggaacaatttgtataatttcttgatttaaattgctaaactgagctcttcattcaaaatactaaacaataatttctctttggggggaaaattaaggaaggctttctatacatagaaataaagatgcctaggccgggtgcagtggctcatgcctgtaatcccaatactttggggggctgaggcgggtggatcacctgaggtcaagagttcaagaccagcctgggcaacatggtgaaaccctgcctctactaaaagtacaaaaattagctgggcgtggtggcagctgcctgtaatcccagctactcggaggctgaggcacgagaatcacttgaacctgggaggcgaaggttgcagtgaaccaagatcatgccattgcactccagcctgggcgacagagcaaaactctttatctaaaaaaaaaaaaaaaaaaaagacgcctacagaagcaaggttcttaggtgcagtgactcatgcctgtaattccagcactttgggagtttgaggcaagaggatcacttgagctcaggaattcaaaaccagcctgggcaatatggcaagaccccatctttgcagaatattagcctagcttggtagcacgagtatgtggtcctagctacttggaaggctgaggtgggaaggatcacttgagcctggtaggttgaagctgcagtgagctatattcacaccattgcactctagcttgaacaacaaagtgagatcctgtctcaaaaagaaaaaggaaaaattacagctcacggctgtaatcccagcactttgggaggccaaggcgcgcagatcacttgaggtcaggagtttgagaccagccaacatggtatcaccctgtctctactaaaaatacaaaaattagccaggtgtcgtggcgggtgcctgtaatcccagctactcgggaggctgaggcaggagaatcgcttgaacccaggaggcagagattacagtgaaccaagatgacacctctgcactccagcctgggcaacaggcttaaagactccgtcttaaaaaaaaattaagaatttgtattctcataacatattcagttttaagcttgtagcttttaaatctttgagcacgtaataaaagctgcgtaggccaagtgtggtggctcatgcttgtaatcccagcactttgggaggctgaggcaggaggatcacctgaggtcgggagttcaagagcagcttacccaatatgtagaaaccccgcctctactaaaaatacaaaattagccaggcgtggtcgcatgcctgtaatcctagctactcgggaggctgaggcaggagaatcattgaacccaggaggcggaggttgtggtgggccaatatcacaccattgcactccaacctgggcaacaagagcaagagtccatctaaaaaaagagctgtatataccactttaatctgtccttgggcttcagacttaaatattctcttaaacagcaaaaatactaactaagttaaatttaaaagcaaggagaagcatcattgtaatacgacatccatgtgtattcaaactagaattttctgatggtcttcgtaagataaaggagataattgtcatttctatgacacagcttttataatttgaataaacttagttggagattggagtatttttattatttattttcatgtgagatgggtaatgtgctgacctcataacaaagtttgagggagacacattgtatgtgagaatttgaagtgcttatgaagtacaaaagcagaggccaggtgctcacatctgtaatcccagcactttgggaggccaaggcacacagatcacttgaggtcaggagtttgagaccagcctggccaacatggcgaaaacccctctcttactaaaaatacaaaaattagctggatgtggtggtgtgggcctgtaatcccagctactcgcgaggctgaggcaggagaatcgcttgaacctggcaggcagaggttgcggtgagccaagattgcgtcactgcactccggcgtggacaagagagtgagactccgtcacaaaaaaaaaaaaaaaagaagaaaagtattggattcacatattctaaaaatgctcgtcatttgtggctaattttatcaagtctagtttaatctcatatttacagagtttagttaattctaattagctttgttggaggtcataaaccacattattaaccttgaaccgactctgtgtttacttgagttcctctgcataatagcatgtcaccaccatcataaacatgttggtattgcattatgcttctagaggagacatccaccaatatttgaaaatctggctggtccgagtgcagtggtgtttacaactaattgatcacaaccagttacagactttgtttcttctccagtcctgctgcttcacttgactagccttttaaaaaaaagaaagaaaatagagaaaatcttaacttatatttacttactgtatgttgtgattagtttaatagaagggagtttaatccttaataattaagttagtcctcaacgtttattgacttagttctgatgtagtccttgtgtactattgtataatgtagactacttggccatacttgattttgtctaaaagttaatgcataaattaatattaaatatggccaaatataaaagtttaatgagtcatttgaggtcatttagccagaaaactgcatttatgttcctggtgaatttttttcaatgtccttttccaaaagtggcagtaagcagctgtcttaaaataaggagacagtgggaatgatgttgttaaagtcttttatacaatgtattgtctgtctgttccataaaaagtaaaactactctattcgtgaccagcttgggcaacatagtgagactgtctctttaaaaaaaaaaaaaaaattaaaaattagcaggtgtggtgatgcacacctgtagtcctagcaattcgggaagctgaggtaggaagatcgcttgagccaagtgtttgaggttagaatgagctatgatcgcaccacctacactccagcctgggcaacagagcaagacccaaatggctcatggttgctttgtttgttttaccttgttgagtgccagtgtgtattttgagcaaagcagtgtaaatggccttcttgccctagagtctttcataattgagccttatttaatctaccacttttgaccatgaaatttaacaggtgacttcttctgggtatctactccaggtgaagtgatattttttttgactgagatgtctaaagctcttggattcctggtatctcaccaggacatcttagtaaaacagcaagtatcagatgaggaatcagacttgagttctagctctggtctggccactaacattgatatgatcttgggcaagttagttcctgcctgggtttcattacctttaactgaggaggttgaaatagatgatttctcatgtctcttctactcctaaattctatgattttagggagaaaatccccttcaacattcctgggatatatatctaatagtcccatatattgtgaaacttccctattgacgataaagagggctggggaaggctacaagttctctttgtaaagaatccttttctggtcaagtttcttcttcatcactcatgccacttactccattctggaccctccttcagtcaaatgttcctgtgcttcaacctccattacccttggaaatgccaccacccccacctccacctccagaatcacctccaccccctcctccaccacctcctcctgcggaagatggtgagatccaggaggtagagatggaggatgagggaagtgaggagccccctgccccaggaacagaggaagatacccctttgaaaccttcagcacaaaccacagttgtaactagccagagttcagttgattccaccatctctagttcttcttccactaaaggaataaagaggaaagctacagaaattagcactgcagtggttcagaggtcagctaccattggcagttctccagttctctatagccagtcagctatagctacaggtcaccaggcagcagggattggaaaccaggcaacaggaattggacatcagacaataccagttagccttccagcagcaggaatgggtcatcaggccagaggaatgagcctgcagtcaaattaccttggactagcggcagcacctgcaattatgagttatgcagaatgttctgtcccaattggagtgactgctccctcattgcagccagttcaggcccgaggtgctgtgcctaccgctaccattatagaaccaccaccaccacctcctcctcctcctcctccaccaccaccagctcccaaaatgccaccacctgaaaagacaaaaaaaggaaggaaagacaaggcaaagaagagtaagaccaaaatgccatctttggtaaaaaagtggcagagtatccagcgtgagttagatgaagaggacaattctagttccagtgaagaggatcgggaatcaactgcacagaagcgaattgaagagtggaaacagcagcagctggttagtggcatggcagagagaaatgctaattttgaagcccttcctgaggattggagagcaaggctgaagagaaggaaaatggctccaaacacatagtttttaagtttttaaaacttttttgtattattgtttgttttgtgttcagttcaaagtcttaaccagttttattgtcaaataaactataaatgttatgggggagatcttataaatttcctgggcaagagtgtatgcatacaaagttttcacttttgtgaaatgtaatttttctgtttttgcaaagggatgaggtgattggaattgctttgaccatgctgcctttattctcaaactggcaaacttagcatgttaggtgtattaacctcatcagtcttgaagaacatgtggctcatgagtataacacttctgtagaggactccctgacaaaagtgaagaattaacttctcctccagaacaagtgcaattcagaaggcagctctgcattctaccttgcttgactggaattgtctgaagctttttctggcctcttttctctagtcggccacccctgaagtgctgaggtctaagtggtttacctcgtgctgatagatggccacactctttagagtagttctcataagttctagaactggtagctcggtcgtttcgcacactaggtggcatacaggcagcagcaggtgttcatatccttgattttgagaatttcccctcaagtatgtggcagtaaatacaacaagacactctatgtattaatgtctccattgtcttaaccctgttccaaaacaaaattcacctcctttctttatgtgaatgtattctccataaaattccagtatttaaaaagcagtttactgttctgtactttctgttgtatcacaatcaggtaaaagtcactttaaactgaggaaacggcaaattgtgttttaaagctctttgtatttctccagtttctgaccttgtaaatttgtatatatgcactaataaagctttttttataa

SEQ ID NO: 408681 - DNA, 9600 bp, Homo sapiens
  misc_feature (3558)..(3558): n is a, c, g, or t
gctgaagatgtgaatgaagaacaagattactatcctctgccagcagggatcatagacggtatttctatgtaaacgaacagtcgggcgagtctcagtgggagtttccagatggtgaagaggaagaagaagaaagccaagcacaagaaaatagagatgagactcttgccaaacagaccttgaaagacaaaactggcactgattcaaattcaacagaatcctctgaaacttccacagtcggaattgagatgggcgattggcaggaagtctgggatgagaacacgggatgttattattattggaatacacaaacaaatgaagtgacttgggagttaccccaatatcttgccacacaggtacagggattacagcattaccagcccagttctgtgccaggtgctgaaactagttttgtggtaaatacagacatatattctaaggagaaaacgatttctgtttccagtagtaaaagtggaccagtcatagccaagcgagaagttaaaaaggaagtaaatgaaggaattcaggctctctcaaatagtgaggaggagaagaaaggggtggcagcatcgctgcttgctcctttattgcctgagggaataaaagaagaagaagagagatggagaagaaaagtaatttgtaaagaggagccagtttcagaagtaaaagaaacaagtacaacagtagaagaagcaacaacaatagtaaagccacaggaaattatgttggacaatatagaagacccttctcaggaggatctttgcagtgttgtccaatctggagaaagtgaggaggaagaggaacaagatacccttgaactggagctagttttggaaaggaaaaaagcagagttgcgagccttggaggaaggagatggtagtgtgtcagggtctagtccacgttctgatatcagccagccagcatctcaagatggaatgcgtaggcttatgtctaaaagaggaaaatggaagatgtttgttcgagctaccagtccagaatctaccagtaggagttctagtaaaactggacgagatactccagaaaatggagaaactgcaattggtgctgaaaattcagaaaaaatagatgagaattcagataaagagatggaagtagaagaatctccagagaaaataaaagtacagacaacaccaaaagtagaagaagaacaggatttgaaatttcagattggagaactggcaaataccctgacaagtaaattcgagtttctaggcattaatagacaatccatctccaactttcatgtgctgctcttacagactgagactcgaattgcagactggcgggaaggggctcttaatggaaactaccttaaacgaaaacttcaggatgcagcagaacaactaaaacagtatgaaataaacgccactcctaaaggctggtcctgccactgggacaggtacgcactcttctccccttttcacctttcacctttgacatctcagacatgatttgtgatcaccaccatctgacgacatgacagcctgtctggagactgagagcagctgcagttagcggtgctgggcaggcaaagcaccgcaagcacaaagtttggccagccacacattggagaaacaaaagcaatgtttaaagtgttccatgtaacggattttttcccaagatatggacaaagctggtttttactctccagagtgttgcacggagtagggcgggcttgggggttaagcgcatgcgagagctctgtgcgctttacaggacctctggaagcaactactcctgattaacctcggtgaagttaaggaaaacttcgtggctgaagatgtgaatgaagaacaagattactatcctctgccagcagggatcatagacggtatttctatgtaaacgaacagtcgggcgagtctcagtgggagtttccagatggtgaagaggaagaagaagaaagccaagcacaagaaaatagagatgagactcttgccaaacagaccttgaaagacaaaactggcactgattcaaattcaacagaatcctctgaaacttccacaggtgagacaatttaccttgtactaattcagccaaaatgactttagaggaaaaatcttattaatttacattattaaaagattttatgtcataataatataagcttctgattgagaatagtggtgtgaactaaaacaaggaatgcatgagttattatggttggaaatcagcatactattgttatcacgtgtaaaactgtgccccaaagtgaaaagataggctaacagattttgattttaaaaaattgttttataaccattctatcatgccactgactaagctgtgggtctccaaaaataggaatgcttgtgctgaggaactagatagttgaactgtcaatatatgtggcatgctgagatttgttatacatttctatacaacacttagtctgttcatattgcaacctcatttctcacctccactaatcttacaaaaagcgtggttggtacaaatcaaaatgatatgaagaaatgccattagtacttgtttcagagaagcaaaataattgatcatgaaaaatcaccagcaatcttctggtctaaaacaattggcaataggatgtctcattccatttttaaggtactcttggaagaatttagtttagttacatacattttttaaaagataggctttcatgctcctcagttcctttagtttttaaaaagtttccaatgtgtaaagaaacttccacctgttaatcttaagaattggtagctatttgttaaactgatggcatatgaaggcaagagtctatgagtcgtttctaaagtaatagatctttgaaaattttaaaaagtgaaatttgtcaataacagagttaagagctgaattcttttgtctaaaacttatcgaaattgatgcttgtactctactggctccctgatgatagtagaaaagcactagtaatgtaccaaatgaaactggttgtgtaccagatgattttgttaacttcttaaatagcctagaaatcgtcagcaggtcacatacaactgcagtgataatttcagaacatagcaaaaggctgattttattctacttcacattttagaagtgcattttctcaagttacagggcatttcacttcccttttacatgaagagattttcttttgaatatttttcctctcttttggtagcagtgatagacatgactaataatatattggttctttttgtttgctttttagcagttaatgaactgaagaggcttgatcgtagttctggataggtggctccactcctgaccactgtcaacatcccttatatgttccaaagttgaaaattccactgttaccaattctgaatgttctgtgaacactttagatgagtattaagctgttttctccctttatgacacacatagttgatactgtctggtaaaaggaggctcttgagccattcctatttaattaaaacagaactagttgtagtgtaggaaaaagccactgataaaacaggttatattcttaagcctctctttattgagaacccctagaattgcaggataaacttgatcgaagtaaaatccaaatcttanactaagttctgtgagatttaagagcaataatcaacagttctaagcctaataaagagagctcttaatcagctcagtggtggttaaaaccagctatcttttaaagaagagaaaaaacaaaacacagcaatgccctgtctcttcagaaaattgttttaaaaagttagccaggcatagttagtggcccacgcctgtagtccgagctgtttgggaggttgaggtgggaagattggttgagcccaagattttgaggctgcagtaagccataattgtaccactgcactccagcctgagcgacagagaacaagaccctgtctcaaaaataaagtgggggaaggggtgcaaaattacactgtgagaagccaagaagtttcaaagttctatttatttttctaagtcatttttaatcattatttgttgtttcagtgtttgaatttaacattatgtttttaaagatggagtggattctaaagatgagttgggttcaagatatccaacatatcttttatattgggcttatgtcacttaggtgaagttgagctcctttttctttttaatctccatggaacaatttgtataatttcttgatttaaattgctaaactgagctcttcattcaaaatactaaacaataatttctctttggggggaaaattaaggaaggctttctatacatagaaataaagatgcctaggccgggtgcagtggctcatgcctgtaatcccaatactttggggggctgaggcgggtggatcacctgaggtcaagagttcaagaccagcctgggcaacatggtgaaaccctgcctctactaaaagtacaaaaattagctgggcgtggtggcagctgcctgtaatcccagctactcggaggctgaggcacgagaatcacttgaacctgggaggcgaaggttgcagtgaaccaagatcatgccattgcactccagcctgggcgacagagcaaaactctttatctaaaaaaaaaaaaaaaaaaaagacgcctacagaagcaaggttcttaggtgcagtgactcatgcctgtaattccagcactttgggagtttgaggcaagaggatcacttgagctcaggaattcaaaaccagcctgggcaatatggcaagaccccatctttgcagaatattagcctagcttggtagcacgagtatgtggtcctagctacttggaaggctgaggtgggaaggatcacttgagcctggtaggttgaagctgcagtgagctatattcacaccattgcactctagcttgaacaacaaagtgagatcctgtctcaaaaagaaaaaggaaaaattacagctcacggctgtaatcccagcactttgggaggccaaggcgcgcagatcacttgaggtcaggagtttgagaccagccaacatggtatcaccctgtctctactaaaaatacaaaaattagccaggtgtcgtggcgggtgcctgtaatcccagctactcgggaggctgaggcaggagaatcgcttgaacccaggaggcagagattacagtgaaccaagatgacacctctgcactccagcctgggcaacaggcttaaagactccgtcttaaaaaaaaattaagaatttgtattctcataacatattcagttttaagcttgtagcttttaaatctttgagcacgtaataaaagctgcgtaggccaagtgtggtggctcatgcttgtaatcccagcactttgggaggctgaggcaggaggatcacctgaggtcgggagttcaagagcagcttacccaatatgtagaaaccccgcctctactaaaaatacaaaattagccaggcgtggtcgcatgcctgtaatcctagctactcgggaggctgaggcaggagaatcattgaacccaggaggcggaggttgtggtgggccaatatcacaccattgcactccaacctgggcaacaagagcaagagtccatctaaaaaaagagctgtatataccactttaatctgtccttgggcttcagacttaaatattctcttaaacagcaaaaatactaactaagttaaatttaaaagcaaggagaagcatcattgtaatacgacatccatgtgtattcaaactagaattttctgatggtcttcgtaagataaaggagataattgtcatttctatgacacagcttttataatttgaataaacttagttggagattggagtatttttattatttattttcatgtgagatgggtaatgtgctgacctcataacaaagtttgagggagacacattgtatgtgagaatttgaagtgcttatgaagtacaaaagcagaggccaggtgctcacatctgtaatcccagcactttgggaggccaaggcacacagatcacttgaggtcaggagtttgagaccagcctggccaacatggcgaaaacccctctcttactaaaaatacaaaaattagctggatgtggtggtgtgggcctgtaatcccagctactcgcgaggctgaggcaggagaatcgcttgaacctggcaggcagaggttgcggtgagccaagattgcgtcactgcactccggcgtggacaagagagtgagactccgtcacaaaaaaaaaaaaaaaagaagaaaagtattggattcacatattctaaaaatgctcgtcatttgtggctaattttatcaagtctagtttaatctcatatttacagagtttagttaattctaattagctttgttggaggtcataaaccacattattaaccttgaaccgactctgtgtttacttgagttcctctgcataatagcatgtcaccaccatcataaacatgttggtattgcattatgcttctagaggagacatccaccaatatttgaaaatctggctggtccgagtgcagtggtgtttacaactaattgatcacaaccagttacagactttgtttcttctccagtcctgctgcttcacttgactagccttttaaaaaaaagaaagaaaatagagaaaatcttaacttatatttacttactgtatgttgtgattagtttaatagaagggagtttaatccttaataattaagttagtcctcaacgtttattgacttagttctgatgtagtccttgtgtactattgtataatgtagactacttggccatacttgattttgtctaaaagttaatgcataaattaatattaaatatggccaaatataaaagtttaatgagtcatttgaggtcatttagccagaaaactgcatttatgttcctggtgaatttttttcaatgtccttttccaaaagtggcagtaagcagctgtcttaaaataaggagacagtgggaatgatgttgttaaagtcttttatacaatgtattgtctgtctgttccataaaaagtaaaactactctattcgtgaccagcttgggcaacatagtgagactgtctctttaaaaaaaaaaaaaaaattaaaaattagcaggtgtggtgatgcacacctgtagtcctagcaattcgggaagctgaggtaggaagatcgcttgagccaagtgtttgaggttagaatgagctatgatcgcaccacctacactccagcctgggcaacagagcaagacccaaatggctcatggttgctttgtttgttttaccttgttgagtgccagtgtgtattttgagcaaagcagtgtaaatggccttcttgccctagagtctttcataattgagccttatttaatctaccacttttgaccatgaaatttaacaggtgacttcttctgggtatctactccaggtgaagtgatattttttttgactgagatgtctaaagctcttggattcctggtatctcaccaggacatcttagtaaaacagcaagtatcagatgaggaatcagacttgagttctagctctggtctggccactaacattgatatgatcttgggcaagttagttcctgcctgggtttcattacctttaactgaggaggttgaaatagatgatttctcatgtctcttctactcctaaattctatgattttagggagaaaatccccttcaacattcctgggatatatatctaatagtcccatatattgtgaaacttccctattgacgataaagagggctggggaaggctacaagttctctttgtaaagaatccttttctggtcaagtttcttcttcatcactcatgccacttactccattctggaccctccttcagtcaaatgttcctgtgcttcaacctccattacccttggaaatgccaccacccccacctccacctccagaatcacctccaccccctcctccaccacctcctcctgcggaagatggtgagatccaggaggtagagatggaggatgagggaagtgaggagccccctgccccaggaacagaggaagatacccctttgaaaccttcagcacaaaccacagttgtaactagccagagttcagttgattccaccatctctagttcttcttccactaaaggaataaagaggaaagctacagaaattagcactgcagtggttcagaggtcagctaccattggcagttctccagttctctatagccagtcagctatagctacaggtcaccaggcagcagggattggaaaccaggcaacaggaattggacatcagacaataccagttagccttccagcagcaggaatgggtcatcaggccagaggaatgagcctgcagtcaaattaccttggactagcggcagcacctgcaattatgagttatgcagaatgttctgtcccaattggagtgactgctccctcattgcagccagttcaggcccgaggtgctgtgcctaccgctaccattatagaaccaccaccaccacctcctcctcctcctcctccaccaccaccagctcccaaaatgccaccacctgaaaagacaaaaaaaggaaggaaagacaaggcaaagaagagtaagaccaaaatgccatctttggtaaaaaagtggcagagtatccagcgtgagttagatgaagaggacaattctagttccagtgaagaggatcgggaatcaactgcacagaagcgaattgaagagtggaaacagcagcagctggttagtggcatggcagagagaaatgctaattttgaagcccttcctgaggattggagagcaaggctgaagagaaggaaaatggctccaaacacatagtttttaagtttttaaaacttttttgtattattgtttgttttgtgttcagttcaaagtcttaaccagttttattgtcaaataaactataaatgttatgggggagatcttataaatttcctgggcaagagtgtatgcatacaaagttttcacttttgtgaaatgtaatttttctgtttttgcaaagggatgaggtgattggaattgctttgaccatgctgcctttattctcaaactggcaaacttagcatgttaggtgtattaacctcatcagtcttgaagaacatgtggctcatgagtataacacttctgtagaggactccctgacaaaagtgaagaattaacttctcctccagaacaagtgcaattcagaaggcagctctgcattctaccttgcttgactggaattgtctgaagctttttctggcctcttttctctagtcggccacccctgaagtgctgaggtctaagtggtttacctcgtgctgatagatggccacactctttagagtagttctcataagttctagaactggtagctcggtcgtttcgcacactaggtggcatacaggcagcagcaggtgttcatatccttgattttgagaatttcccctcaagtatgtggcagtaaatacaacaagacactctatgtattaatgtctccattgtcttaaccctgttccaaaacaaaattcacctcctttctttatgtgaatgtattctccataaaattccagtatttaaaaagcagtttactgttctgtactttctgttgtatcacaatcaggtaaaagtcactttaaactgaggaaacggcaaattgtgttttaaagctctttgtatttctccagtttctgaccttgtaaatttgtatatatgcactaataaagctttttttataa

SEQ ID NO: 408682 - DNA, 10101 bp, Homo sapiens
  misc_feature (4113)..(4113): n is a, c, g, or t
gctgaagatgtgaatgaagaacaagattactatcctctgccagcagggatcatagacggtatttctatgtaaacgaacagtcgggcgagtctcagtgggagtttccagatggtgaagaggaagaagaagaaagccaagcacaagaaaatagagatgagactcttgccaaacagaccttgaaagacaaaactggcactgattcaaattcaacagaatcctctgaaacttccacagtcggaattgagatgggcgattggcaggaagtctgggatgagaacacgggatgttattattattggaatacacaaacaaatgaagtgacttgggagttaccccaatatcttgccacacaggtacagggattacagcattaccagcccagttctgtgccaggtgctgaaactagttttgtggtaaatacagacatatattctaaggagaaaacgatttctgtttccagtagtaaaagtggaccagtcatagccaagcgagaagttaaaaaggaagtaaatgaaggaattcaggctctctcaaatagtgaggaggagaagaaaggggtggcagcatcgctgcttgctcctttattgcctgagggaataaaagaagaagaagagagatggagaagaaaagtaatttgtaaagaggagccagtttcagaagtaaaagaaacaagtacaacagtagaagaagcaacaacaatagtaaagccacaggaaattatgttggacaatatagaagacccttctcaggaggatctttgcagtgttgtccaatctggagaaagtgaggaggaagaggaacaagatacccttgaactggagctagttttggaaaggaaaaaagcagagttgcgagccttggaggaaggagatggtagtgtgtcagggtctagtccacgttctgatatcagccagccagcatctcaagatggaatgcgtaggcttatgtctaaaagaggaaaatggaagatgtttgttcgagctaccagtccagaatctaccagtaggagttctagtaaaactggacgagatactccagaaaatggagaaactgcaattggtgctgaaaattcagaaaaaatagatgagaattcagataaagagatggaagtagaagaatctccagagaaaataaaagtacagacaacaccaaaagtagaagaagaacaggatttgaaatttcagattggagaactggcaaataccctgacaagtaaattcgagtttctaggcattaatagacaatccatctccaactttcatgtgctgctcttacagactgagactcgaattgcagactggcgggaaggggctcttaatggaaactaccttaaacgaaaacttcaggatgcagcagaacaactaaaacagtatgaaataaacgccactcctaaaggctggtcctgccactgggacaggtacgcactcttctccccttttcacctttcacctttgacatctcagacatgatttgtgatcaccaccatctgacgacatgacagcctgtctggagactgagagcagctgcagttagcggtgctgggcaggcaaagcaccgcaagcacaaagtttggccagccacacattggagaaacaaaagcaatgtttaaagtgttccatgtaacggattttttcccaagatatggacaaagctggtttttactctccagagtgttgcacggagtagggcgggcttgggggttaagcgcatgcgagagctctgtgcgctttacaggacctctggaagcaactactcctgattaacctcggtgaagttaaggaaaacttcgtggctgaagatgtgaatgaagaacaagattactatcctctgccagcaggtcagatgaaaacatttctttatatatttggcttttcttgatttttttttcgttatttgaaatctttgctcttttatttttcagctcccagatcctctccctctctttagctttcactgtgtttgatatcaagaatatgaaatgtgaattccacggtccaagaggggaagagtcacctttcacaaacttcgttgttctcttctttggaagggaaattagtgttctaggcgattgagtcccttcattaatgaaacttgaaaccctgttatgcattggcaaatcacaaaaaaagagaaaagtgttttctaagtctcatctgttggagtgagagggttcagggctgtattcacagagttgctggcagtgcaaatagctttgaattatccttggttctccattctcaattgtcaaagctctttgttgcctttgtgaatagcagtccattaagaggttcgtccctgtgaaagcagactgctgtcctgggacaggaccaaatggaagtgtctttgtaggagaacgggttttaaaacatgtgttttctttcttgtaatttagggatcatagacggtatttctatgtaaacgaacagtcgggcgagtctcagtgggagtttccagatggtgaagaggaagaagaagaaagccaagcacaagaaaatagagatgagactcttgccaaacagaccttgaaagacaaaactggcactgattcaaattcaacagaatcctctgaaacttccacaggtgagacaatttaccttgtactaattcagccaaaatgactttagaggaaaaatcttattaatttacattattaaaagattttatgtcataataatataagcttctgattgagaatagtggtgtgaactaaaacaaggaatgcatgagttattatggttggaaatcagcatactattgttatcacgtgtaaaactgtgccccaaagtgaaaagataggctaacagattttgattttaaaaaattgttttataaccattctatcatgccactgactaagctgtgggtctccaaaaataggaatgcttgtgctgaggaactagatagttgaactgtcaatatatgtggcatgctgagatttgttatacatttctatacaacacttagtctgttcatattgcaacctcatttctcacctccactaatcttacaaaaagcgtggttggtacaaatcaaaatgatatgaagaaatgccattagtacttgtttcagagaagcaaaataattgatcatgaaaaatcaccagcaatcttctggtctaaaacaattggcaataggatgtctcattccatttttaaggtactcttggaagaatttagtttagttacatacattttttaaaagataggctttcatgctcctcagttcctttagtttttaaaaagtttccaatgtgtaaagaaacttccacctgttaatcttaagaattggtagctatttgttaaactgatggcatatgaaggcaagagtctatgagtcgtttctaaagtaatagatctttgaaaattttaaaaagtgaaatttgtcaataacagagttaagagctgaattcttttgtctaaaacttatcgaaattgatgcttgtactctactggctccctgatgatagtagaaaagcactagtaatgtaccaaatgaaactggttgtgtaccagatgattttgttaacttcttaaatagcctagaaatcgtcagcaggtcacatacaactgcagtgataatttcagaacatagcaaaaggctgattttattctacttcacattttagaagtgcattttctcaagttacagggcatttcacttcccttttacatgaagagattttcttttgaatatttttcctctcttttggtagcagtgatagacatgactaataatatattggttctttttgtttgctttttagcagttaatgaactgaagaggcttgatcgtagttctggataggtggctccactcctgaccactgtcaacatcccttatatgttccaaagttgaaaattccactgttaccaattctgaatgttctgtgaacactttagatgagtattaagctgttttctccctttatgacacacatagttgatactgtctggtaaaaggaggctcttgagccattcctatttaattaaaacagaactagttgtagtgtaggaaaaagccactgataaaacaggttatattcttaagcctctctttattgagaacccctagaattgcaggataaacttgatcgaagtaaaatccaaatcttanactaagttctgtgagatttaagagcaataatcaacagttctaagcctaataaagagagctcttaatcagctcagtggtggttaaaaccagctatcttttaaagaagagaaaaaacaaaacacagcaatgccctgtctcttcagaaaattgttttaaaaagttagccaggcatagttagtggcccacgcctgtagtccgagctgtttgggaggttgaggtgggaagattggttgagcccaagattttgaggctgcagtaagccataattgtaccactgcactccagcctgagcgacagagaacaagaccctgtctcaaaaataaagtgggggaaggggtgcaaaattacactgtgagaagccaagaagtttcaaagttctatttatttttctaagtcatttttaatcattatttgttgtttcagtgtttgaatttaacattatgtttttaaagatggagtggattctaaagatgagttgggttcaagatatccaacatatcttttatattgggcttatgtcacttaggtgaagttgagctcctttttctttttaatctccatggaacaatttgtataatttcttgatttaaattgctaaactgagctcttcattcaaaatactaaacaataatttctctttggggggaaaattaaggaaggctttctatacatagaaataaagatgcctaggccgggtgcagtggctcatgcctgtaatcccaatactttggggggctgaggcgggtggatcacctgaggtcaagagttcaagaccagcctgggcaacatggtgaaaccctgcctctactaaaagtacaaaaattagctgggcgtggtggcagctgcctgtaatcccagctactcggaggctgaggcacgagaatcacttgaacctgggaggcgaaggttgcagtgaaccaagatcatgccattgcactccagcctgggcgacagagcaaaactctttatctaaaaaaaaaaaaaaaaaaaagacgcctacagaagcaaggttcttaggtgcagtgactcatgcctgtaattccagcactttgggagtttgaggcaagaggatcacttgagctcaggaattcaaaaccagcctgggcaatatggcaagaccccatctttgcagaatattagcctagcttggtagcacgagtatgtggtcctagctacttggaaggctgaggtgggaaggatcacttgagcctggtaggttgaagctgcagtgagctatattcacaccattgcactctagcttgaacaacaaagtgagatcctgtctcaaaaagaaaaaggaaaaattacagctcacggctgtaatcccagcactttgggaggccaaggcgcgcagatcacttgaggtcaggagtttgagaccagccaacatggtatcaccctgtctctactaaaaatacaaaaattagccaggtgtcgtggcgggtgcctgtaatcccagctactcgggaggctgaggcaggagaatcgcttgaacccaggaggcagagattacagtgaaccaagatgacacctctgcactccagcctgggcaacaggcttaaagactccgtcttaaaaaaaaattaagaatttgtattctcataacatattcagttttaagcttgtagcttttaaatctttgagcacgtaataaaagctgcgtaggccaagtgtggtggctcatgcttgtaatcccagcactttgggaggctgaggcaggaggatcacctgaggtcgggagttcaagagcagcttacccaatatgtagaaaccccgcctctactaaaaatacaaaattagccaggcgtggtcgcatgcctgtaatcctagctactcgggaggctgaggcaggagaatcattgaacccaggaggcggaggttgtggtgggccaatatcacaccattgcactccaacctgggcaacaagagcaagagtccatctaaaaaaagagctgtatataccactttaatctgtccttgggcttcagacttaaatattctcttaaacagcaaaaatactaactaagttaaatttaaaagcaaggagaagcatcattgtaatacgacatccatgtgtattcaaactagaattttctgatggtcttcgtaagataaaggagataattgtcatttctatgacacagcttttataatttgaataaacttagttggagattggagtatttttattatttattttcatgtgagatgggtaatgtgctgacctcataacaaagtttgagggagacacattgtatgtgagaatttgaagtgcttatgaagtacaaaagcagaggccaggtgctcacatctgtaatcccagcactttgggaggccaaggcacacagatcacttgaggtcaggagtttgagaccagcctggccaacatggcgaaaacccctctcttactaaaaatacaaaaattagctggatgtggtggtgtgggcctgtaatcccagctactcgcgaggctgaggcaggagaatcgcttgaacctggcaggcagaggttgcggtgagccaagattgcgtcactgcactccggcgtggacaagagagtgagactccgtcacaaaaaaaaaaaaaaaagaagaaaagtattggattcacatattctaaaaatgctcgtcatttgtggctaattttatcaagtctagtttaatctcatatttacagagtttagttaattctaattagctttgttggaggtcataaaccacattattaaccttgaaccgactctgtgtttacttgagttcctctgcataatagcatgtcaccaccatcataaacatgttggtattgcattatgcttctagaggagacatccaccaatatttgaaaatctggctggtccgagtgcagtggtgtttacaactaattgatcacaaccagttacagactttgtttcttctccagtcctgctgcttcacttgactagccttttaaaaaaaagaaagaaaatagagaaaatcttaacttatatttacttactgtatgttgtgattagtttaatagaagggagtttaatccttaataattaagttagtcctcaacgtttattgacttagttctgatgtagtccttgtgtactattgtataatgtagactacttggccatacttgattttgtctaaaagttaatgcataaattaatattaaatatggccaaatataaaagtttaatgagtcatttgaggtcatttagccagaaaactgcatttatgttcctggtgaatttttttcaatgtccttttccaaaagtggcagtaagcagctgtcttaaaataaggagacagtgggaatgatgttgttaaagtcttttatacaatgtattgtctgtctgttccataaaaagtaaaactactctattcgtgaccagcttgggcaacatagtgagactgtctctttaaaaaaaaaaaaaaaattaaaaattagcaggtgtggtgatgcacacctgtagtcctagcaattcgggaagctgaggtaggaagatcgcttgagccaagtgtttgaggttagaatgagctatgatcgcaccacctacactccagcctgggcaacagagcaagacccaaatggctcatggttgctttgtttgttttaccttgttgagtgccagtgtgtattttgagcaaagcagtgtaaatggccttcttgccctagagtctttcataattgagccttatttaatctaccacttttgaccatgaaatttaacaggtgacttcttctgggtatctactccaggtgaagtgatattttttttgactgagatgtctaaagctcttggattcctggtatctcaccaggacatcttagtaaaacagcaagtatcagatgaggaatcagacttgagttctagctctggtctggccactaacattgatatgatcttgggcaagttagttcctgcctgggtttcattacctttaactgaggaggttgaaatagatgatttctcatgtctcttctactcctaaattctatgattttagggagaaaatccccttcaacattcctgggatatatatctaatagtcccatatattgtgaaacttccctattgacgataaagagggctggggaaggctacaagttctctttgtaaagaatccttttctggtcaagtttcttcttcatcactcatgccacttactccattctggaccctccttcagtcaaatgttcctgtgcttcaacctccattacccttggaaatgccaccacccccacctccacctccagaatcacctccaccccctcctccaccacctcctcctgcggaagatggtgagatccaggaggtagagatggaggatgagggaagtgaggagccccctgccccaggaacagaggaagatacccctttgaaaccttcagcacaaaccacagttgtaactagccagagttcagttgattccaccatctctagttcttcttccactaaaggaataaagaggaaagctacagaaattagcactgcagtggttcagaggtcagctaccattggcagttctccagttctctatagccagtcagctatagctacaggtcaccaggcagcagggattggaaaccaggcaacaggaattggacatcagacaataccagttagccttccagcagcaggaatgggtcatcaggccagaggaatgagcctgcagtcaaattaccttggactagcggcagcacctgcaattatgagttatgcagaatgttctgtcccaattggagtgactgctccctcattgcagccagttcaggcccgaggtgctgtgcctaccgctaccattatagaaccaccaccaccacctcctcctcctcctcctccaccaccaccagctcccaaaatgccaccacctgaaaagacaaaaaaaggaaggaaagacaaggcaaagaagagtaagaccaaaatgccatctttggtaaaaaagtggcagagtatccagcgtgagttagatgaagaggacaattctagttccagtgaagaggatcgggaatcaactgcacagaagcgaattgaagagtggaaacagcagcagctggttagtggcatggcagagagaaatgctaattttgaagcccttcctgaggattggagagcaaggctgaagagaaggaaaatggctccaaacacatagtttttaagttttttttattgtcaaataaactataaatgttatgggggagatcttataaatttcctgggcaagagtgtatgcatacaaagttttcacttttgtgaaatgtaatttttctgtttttgcaaagggatgaggtgattggaattgctttgaccatgctgcctttattctcaaactggcaaacttagcatgttaggtgtattaacctcatcagtcttgaagaacatgtggctcatgagtataacacttctgtagaggactccctgacaaaagtgaagaattaacttctcctccagaacaagtgcaattcagaaggcagctctgcattctaccttgcttgactggaattgtctgaagctttttctggcctcttttctctagtcggccacccctgaagtgctgaggtctaagtggtttacctcgtgctgatagatggccacactctttagagtagttctcataagttctagaactggtagctcggtcgtttcgcacactaggtggcatacaggcagcagcaggtgttcatatccttgattttgagaatttcccctcaagtatgtggcagtaaatacaacaagacactctatgtattaatgtctccattgtcttaaccctgttccaaaacaaaattcacctcctttctttatgtgaatgtattctccataaaattccagtatttaaaaagcagtttactgttctgtactttctgttgtatcacaatcaggtaaaagtcactttaaactgaggaaacggcaaattgtgttttaaagctctttgtatttctccagtttctgaccttgtaaatttgtatatatgcactaataaagctttttttataa

SEQ ID NO: 408683 - DNA, 3550 bp, Homo sapiens
gctgaagatgtgaatgaagaacaagattactatcctctgccagcagggatcatagacggtatttctatgtaaacgaacagtcgggcgagtctcagtgggagtttccagatggtgaagaggaagaagaagaaagccaagcacaagaaaatagagatgagactcttgccaaacagaccttgaaagacaaaactggcactgattcaaattcaacagaatcctctgaaacttccacagtcggaattgagatgggcgattggcaggaagtctgggatgagaacacgggatgttattattattggaatacacaaacaaatgaagtgacttgggagttaccccaatatcttgccacacaggtacagggattacagcattaccagcccagttctgtgccaggtgctgaaactagttttgtggtaaatacagacatatattctaaggagaaaacgatttctgtttccagtagtaaaagtggaccagtcatagccaagcgagaagttaaaaaggaagtaaatgaaggaattcaggctctctcaaatagtgaggaggagaagaaaggggtggcagcatcgctgcttgctcctttattgcctgagggaataaaagaagaagaagagagatggagaagaaaagtaatttgtaaagaggagccagtttcagaagtaaaagaaacaagtacaacagtagaagaagcaacaacaatagtaaagccacaggaaattatgttggacaatatagaagacccttctcaggaggatctttgcagtgttgtccaatctggagaaagtgaggaggaagaggaacaagatacccttgaactggagctagttttggaaaggaaaaaagcagagttgcgagccttggaggaaggagatggtagtgtgtcagggtctagtccacgttctgatatcagccagccagcatctcaagatggaatgcgtaggcttatgtctaaaagaggaaaatggaagatgtttgttcgagctaccagtccagaatctaccagtaggagttctagtaaaactggacgagatactccagaaaatggagaaactgcaattggtgctgaaaattcagaaaaaatagatgagaattcagataaagagatggaagtagaagaatctccagagaaaataaaagtacagacaacaccaaaagtagaagaagaacaggatttgaaatttcagattggagaactggcaaataccctgacaagtaaattcgagtttctaggcattaatagacaatccatctccaactttcatgtgctgctcttacagactgagactcgaattgcagactggcgggaaggggctcttaatggaaactaccttaaacgaaaacttcaggatgcagcagaacaactaaaacagtatgaaataaacgccactcctaaaggctggtcctgccactgggacagggatcatagacggtatttctatgtaaacgaacagtcgggcgagtctcagtgggagtttccagatggtgaagaggaagaagaagaaagccaagcacaagaaaatagagatgagactcttgccaaacagaccttgaaagacaaaactggcactgattcaaattcaacagaatcctctgaaacttccacaggttctctttgtaaagaatccttttctggtcaagtttcttcttcatcactcatgccacttactccattctggaccctccttcagtcaaatgttcctgtgcttcaacctccattacccttggaaatgccaccacccccacctccacctccagaatcacctccaccccctcctccaccacctcctcctgcggaagatggtgagatccaggaggtagagatggaggatgagggaagtgaggagccccctgccccaggaacagaggaagatacccctttgaaaccttcagcacaaaccacagttgtaactagccagagttcagttgattccaccatctctagttcttcttccactaaaggaataaagaggaaagctacagaaattagcactgcagtggttcagaggtcagctaccattggcagttctccagttctctatagccagtcagctatagctacaggtcaccaggcagcagggattggaaaccaggcaacaggaattggacatcagacaataccagttagccttccagcagcaggaatgggtcatcaggccagaggaatgagcctgcagtcaaattaccttggactagcggcagcacctgcaattatgagttatgcagaatgttctgtcccaattggagtgactgctccctcattgcagccagttcaggcccgaggtgctgtgcctaccgctaccattatagaaccaccaccaccacctcctcctcctcctcctccaccaccaccagctcccaaaatgccaccacctgaaaagacaaaaaaaggaaggaaagacaaggcaaagaagagtaagaccaaaatgccatctttggtaaaaaagtggcagagtatccagcgtgagttagatgaagaggacaattctagttccagtgaagaggatcgggaatcaactgcacagaagcgaattgaagagtggaaacagcagcagctggttagtggcatggcagagagaaatgctaattttgaagcccttcctgaggattggagagcaaggctgaagagaaggaaaatggctccaaacacatagtttttaagtttttaaaacttttttgtattattgtttgttttgtgttcagttcaaagtcttaaccagttttattgtcaaataaactataaatgttatgggggagatcttataaatttcctgggcaagagtgtatgcatacaaagttttcacttttgtgaaatgtaatttttctgtttttgcaaagggatgaggtgattggaattgctttgaccatgctgcctttattctcaaactggcaaacttagcatgttaggtgtattaacctcatcagtcttgaagaacatgtggctcatgagtataacacttctgtagaggactccctgacaaaagtgaagaattaacttctcctccagaacaagtgcaattcagaaggcagctctgcattctaccttgcttgactggaattgtctgaagctttttctggcctcttttctctagtcggccacccctgaagtgctgaggtctaagtggtttacctcgtgctgatagatggccacactctttagagtagttctcataagttctagaactggtagctcggtcgtttcgcacactaggtggcatacaggcagcagcaggtgttcatatccttgattttgagaatttcccctcaagtatgtggcagtaaatacaacaagacactctatgtattaatgtctccattgtcttaaccctgttccaaaacaaaattcacctcctttctttatgtgaatgtattctccataaaattccagtatttaaaaagcagtttactgttctgtactttctgttgtatcacaatcaggtaaaagtcactttaaactgaggaaacggcaaattgtgttttaaagctctttgtatttctccagtttctgaccttgtaaatttgtatatatgcactaataaagctttttttataa

SEQ ID NO: 408684 - DNA, 8417 bp, Homo sapiens
  misc_feature (2375)..(2375): n is a, c, g, or t
gctgaagatgtgaatgaagaacaagattactatcctctgccagcagggatcatagacggtatttctatgtaaacgaacagtcgggcgagtctcagtgggagtttccagatggtgaagaggaagaagaagaaagccaagcacaagaaaatagagatgagactcttgccaaacagaccttgaaagacaaaactggcactgattcaaattcaacagaatcctctgaaacttccacagtcggaattgagatgggcgattggcaggaagtctgggatgagaacacgggatgttattattattggaatacacaaacaaatgaagtgacttgggagttaccccaatatcttgccacacaggtacagggattacagcattaccagcccagttctgtgccaggtgctgaaactagttttgtggtaaatacagacatatattctaaggagaaaacgatttctgtttccagtagtaaaagtggaccagtcatagccaagcgagaagttaaaaaggaagtaaatgaaggaattcaggctctctcaaatagtgaggaggagaagaaaggggtggcagcatcgctgcttgctcctttattgcctgagggaataaaagaagaagaagagagatggagaagaaaagtaatttgtaaagaggagccagtttcagaagtaaaagaaacaagtacaacagtagaagaagcaacaacaatagtaaagccacaggaaattatgttggacaatatagaagacccttctcaggaggatctttgcagtgttgtccaatctggagaaagtgaggaggaagaggaacaagatacccttgaactggagctagttttggaaaggaaaaaagcagagttgcgagccttggaggaaggagatggtagtgtgtcagggtctagtccacgttctgatatcagccagccagcatctcaagatggaatgcgtaggcttatgtctaaaagaggaaaatggaagatgtttgttcgagctaccagtccagaatctaccagtaggagttctagtaaaactggacgagatactccagaaaatggagaaactgcaattggtgctgaaaattcagaaaaaatagatgagaattcagataaagagatggaagtagaagaatctccagagaaaataaaagtacagacaacaccaaaagtagaagaagaacaggatttgaaatttcagattggagaactggcaaataccctgacaagtaaattcgagtttctaggcattaatagacaatccatctccaactttcatgtgctgctcttacagactgagactcgaattgcagactggcgggaaggggctcttaatggaaactaccttaaacgaaaacttcaggatgcagcagaacaactaaaacagtatgaaataaacgccactcctaaaggctggtcctgccactgggacaggtacgcactcttctccccttttcacctttcacctttgacatctcagacatgatttgtgatcaccaccatctgacgacatgacagcctgtctggagactgagagcagctgcagttagcggtgctgggcaggcaaagcaccgcaagcacaaagtttggccagccacacattggagaaacaaaagcaatgtttaaagtgttccatgtaacggattttttcccaagatatggacaaagctggtttttactctccagagtgttgcacggagtagggcgggcttgggggttaagcgcatgcgagagctctgtgcgctttacaggacctctggaagcaactactcctgattaacctcggtgaagttaaggaaaacttcgtggctgaagatgtgaatgaagaacaagattactatcctctgccagcagggatcatagacggtatttctatgtaaacgaacagtcgggcgagtctcagtgggagtttccagatggtgaagaggaagaagaagaaagccaagcacaagaaaatagagatgagactcttgccaaacagaccttgaaagacaaaactggcactgattcaaattcaacagaatcctctgaaacttccacagcagttaatgaactgaagaggcttgatcgtagttctggataggtggctccactcctgaccactgtcaacatcccttatatgttccaaagttgaaaattccactgttaccaattctgaatgttctgtgaacactttagatgagtattaagctgttttctccctttatgacacacatagttgatactgtctggtaaaaggaggctcttgagccattcctatttaattaaaacagaactagttgtagtgtaggaaaaagccactgataaaacaggttatattcttaagcctctctttattgagaacccctagaattgcaggataaacttgatcgaagtaaaatccaaatcttanactaagttctgtgagatttaagagcaataatcaacagttctaagcctaataaagagagctcttaatcagctcagtggtggttaaaaccagctatcttttaaagaagagaaaaaacaaaacacagcaatgccctgtctcttcagaaaattgttttaaaaagttagccaggcatagttagtggcccacgcctgtagtccgagctgtttgggaggttgaggtgggaagattggttgagcccaagattttgaggctgcagtaagccataattgtaccactgcactccagcctgagcgacagagaacaagaccctgtctcaaaaataaagtgggggaaggggtgcaaaattacactgtgagaagccaagaagtttcaaagttctatttatttttctaagtcatttttaatcattatttgttgtttcagtgtttgaatttaacattatgtttttaaagatggagtggattctaaagatgagttgggttcaagatatccaacatatcttttatattgggcttatgtcacttaggtgaagttgagctcctttttctttttaatctccatggaacaatttgtataatttcttgatttaaattgctaaactgagctcttcattcaaaatactaaacaataatttctctttggggggaaaattaaggaaggctttctatacatagaaataaagatgcctaggccgggtgcagtggctcatgcctgtaatcccaatactttggggggctgaggcgggtggatcacctgaggtcaagagttcaagaccagcctgggcaacatggtgaaaccctgcctctactaaaagtacaaaaattagctgggcgtggtggcagctgcctgtaatcccagctactcggaggctgaggcacgagaatcacttgaacctgggaggcgaaggttgcagtgaaccaagatcatgccattgcactccagcctgggcgacagagcaaaactctttatctaaaaaaaaaaaaaaaaaaaagacgcctacagaagcaaggttcttaggtgcagtgactcatgcctgtaattccagcactttgggagtttgaggcaagaggatcacttgagctcaggaattcaaaaccagcctgggcaatatggcaagaccccatctttgcagaatattagcctagcttggtagcacgagtatgtggtcctagctacttggaaggctgaggtgggaaggatcacttgagcctggtaggttgaagctgcagtgagctatattcacaccattgcactctagcttgaacaacaaagtgagatcctgtctcaaaaagaaaaaggaaaaattacagctcacggctgtaatcccagcactttgggaggccaaggcgcgcagatcacttgaggtcaggagtttgagaccagccaacatggtatcaccctgtctctactaaaaatacaaaaattagccaggtgtcgtggcgggtgcctgtaatcccagctactcgggaggctgaggcaggagaatcgcttgaacccaggaggcagagattacagtgaaccaagatgacacctctgcactccagcctgggcaacaggcttaaagactccgtcttaaaaaaaaattaagaatttgtattctcataacatattcagttttaagcttgtagcttttaaatctttgagcacgtaataaaagctgcgtaggccaagtgtggtggctcatgcttgtaatcccagcactttgggaggctgaggcaggaggatcacctgaggtcgggagttcaagagcagcttacccaatatgtagaaaccccgcctctactaaaaatacaaaattagccaggcgtggtcgcatgcctgtaatcctagctactcgggaggctgaggcaggagaatcattgaacccaggaggcggaggttgtggtgggccaatatcacaccattgcactccaacctgggcaacaagagcaagagtccatctaaaaaaagagctgtatataccactttaatctgtccttgggcttcagacttaaatattctcttaaacagcaaaaatactaactaagttaaatttaaaagcaaggagaagcatcattgtaatacgacatccatgtgtattcaaactagaattttctgatggtcttcgtaagataaaggagataattgtcatttctatgacacagcttttataatttgaataaacttagttggagattggagtatttttattatttattttcatgtgagatgggtaatgtgctgacctcataacaaagtttgagggagacacattgtatgtgagaatttgaagtgcttatgaagtacaaaagcagaggccaggtgctcacatctgtaatcccagcactttgggaggccaaggcacacagatcacttgaggtcaggagtttgagaccagcctggccaacatggcgaaaacccctctcttactaaaaatacaaaaattagctggatgtggtggtgtgggcctgtaatcccagctactcgcgaggctgaggcaggagaatcgcttgaacctggcaggcagaggttgcggtgagccaagattgcgtcactgcactccggcgtggacaagagagtgagactccgtcacaaaaaaaaaaaaaaaagaagaaaagtattggattcacatattctaaaaatgctcgtcatttgtggctaattttatcaagtctagtttaatctcatatttacagagtttagttaattctaattagctttgttggaggtcataaaccacattattaaccttgaaccgactctgtgtttacttgagttcctctgcataatagcatgtcaccaccatcataaacatgttggtattgcattatgcttctagaggagacatccaccaatatttgaaaatctggctggtccgagtgcagtggtgtttacaactaattgatcacaaccagttacagactttgtttcttctccagtcctgctgcttcacttgactagccttttaaaaaaaagaaagaaaatagagaaaatcttaacttatatttacttactgtatgttgtgattagtttaatagaagggagtttaatccttaataattaagttagtcctcaacgtttattgacttagttctgatgtagtccttgtgtactattgtataatgtagactacttggccatacttgattttgtctaaaagttaatgcataaattaatattaaatatggccaaatataaaagtttaatgagtcatttgaggtcatttagccagaaaactgcatttatgttcctggtgaatttttttcaatgtccttttccaaaagtggcagtaagcagctgtcttaaaataaggagacagtgggaatgatgttgttaaagtcttttatacaatgtattgtctgtctgttccataaaaagtaaaactactctattcgtgaccagcttgggcaacatagtgagactgtctctttaaaaaaaaaaaaaaaattaaaaattagcaggtgtggtgatgcacacctgtagtcctagcaattcgggaagctgaggtaggaagatcgcttgagccaagtgtttgaggttagaatgagctatgatcgcaccacctacactccagcctgggcaacagagcaagacccaaatggctcatggttgctttgtttgttttaccttgttgagtgccagtgtgtattttgagcaaagcagtgtaaatggccttcttgccctagagtctttcataattgagccttatttaatctaccacttttgaccatgaaatttaacaggtgacttcttctgggtatctactccaggtgaagtgatattttttttgactgagatgtctaaagctcttggattcctggtatctcaccaggacatcttagtaaaacagcaagtatcagatgaggaatcagacttgagttctagctctggtctggccactaacattgatatgatcttgggcaagttagttcctgcctgggtttcattacctttaactgaggaggttgaaatagatgatttctcatgtctcttctactcctaaattctatgattttagggagaaaatccccttcaacattcctgggatatatatctaatagtcccatatattgtgaaacttccctattgacgataaagagggctggggaaggctacaagttctctttgtaaagaatccttttctggtcaagtttcttcttcatcactcatgccacttactccattctggaccctccttcagtcaaatgttcctgtgcttcaacctccattacccttggaaatgccaccacccccacctccacctccagaatcacctccaccccctcctccaccacctcctcctgcggaagatggtgagatccaggaggtagagatggaggatgagggaagtgaggagccccctgccccaggaacagaggaagatacccctttgaaaccttcagcacaaaccacagttgtaactagccagagttcagttgattccaccatctctagttcttcttccactaaaggaataaagaggaaagctacagaaattagcactgcagtggttcagaggtcagctaccattggcagttctccagttctctatagccagtcagctatagctacaggtcaccaggcagcagggattggaaaccaggcaacaggaattggacatcagacaataccagttagccttccagcagcaggaatgggtcatcaggccagaggaatgagcctgcagtcaaattaccttggactagcggcagcacctgcaattatgagttatgcagaatgttctgtcccaattggagtgactgctccctcattgcagccagttcaggcccgaggtgctgtgcctaccgctaccattatagaaccaccaccaccacctcctcctcctcctcctccaccaccaccagctcccaaaatgccaccacctgaaaagacaaaaaaaggaaggaaagacaaggcaaagaagagtaagaccaaaatgccatctttggtaaaaaagtggcagagtatccagcgtgagttagatgaagaggacaattctagttccagtgaagaggatcgggaatcaactgcacagaagcgaattgaagagtggaaacagcagcagctggttagtggcatggcagagagaaatgctaattttgaagcccttcctgaggattggagagcaaggctgaagagaaggaaaatggctccaaacacatagtttttaagtttttaaaacttttttgtattattgtttgttttgtgttcagttcaaagtcttaaccagttttattgtcaaataaactataaatgttatgggggagatcttataaatttcctgggcaagagtgtatgcatacaaagttttcacttttgtgaaatgtaatttttctgtttttgcaaagggatgaggtgattggaattgctttgaccatgctgcctttattctcaaactggcaaacttagcatgttaggtgtattaacctcatcagtcttgaagaacatgtggctcatgagtataacacttctgtagaggactccctgacaaaagtgaagaattaacttctcctccagaacaagtgcaattcagaaggcagctctgcattctaccttgcttgactggaattgtctgaagctttttctggcctcttttctctagtcggccacccctgaagtgctgaggtctaagtggtttacctcgtgctgatagatggccacactctttagagtagttctcataagttctagaactggtagctcggtcgtttcgcacactaggtggcatacaggcagcagcaggtgttcatatccttgattttgagaatttcccctcaagtatgtggcagtaaatacaacaagacactctatgtattaatgtctccattgtcttaaccctgttccaaaacaaaattcacctcctttctttatgtgaatgtattctccataaaattccagtatttaaaaagcagtttactgttctgtactttctgttgtatcacaatcaggtaaaagtcactttaaactgaggaaacggcaaattgtgttttaaagctctttgtatttctccagtttctgaccttgtaaatttgtatatatgcactaataaagctttttttataa

SEQ ID NO: 408685 - DNA, 5856 bp, Homo sapiens
ggctctttgcgtgcgaggcatacatagtcaatgagggagtatcattgagcccaagattttgaggctgcagtaagccataattgtaccactgcactccagcctgagcgacagagaacaagaccctgtctcaaaaataaagtgggggaaggggtgcaaaattacactgtgagaagccaagaagtttcaaagttctatttatttttctaagtcatttttaatcattatttgttgtttcagtgtttgaatttaacattatgtttttaaagatggagtggattctaaagatgagttgggttcaagatatccaacatatcttttatattgggcttatgtcacttaggtgaagttgagctcctttttctttttaatctccatggaacaatttgtataatttcttgatttaaattgctaaactgagctcttcattcaaaatactaaacaataatttctctttggggggaaaattaaggaaggctttctatacatagaaataaagatgcctaggccgggtgcagtggctcatgcctgtaatcccaatactttggggggctgaggcgggtggatcacctgaggtcaagagttcaagaccagcctgggcaacatggtgaaaccctgcctctactaaaagtacaaaaattagctgggcgtggtggcagctgcctgtaatcccagctactcggaggctgaggcacgagaatcacttgaacctgggaggcgaaggttgcagtgaaccaagatcatgccattgcactccagcctgggcgacagagcaaaactctttatctaaaaaaaaaaaaaaaaaaaagacgcctacagaagcaaggttcttaggtgcagtgactcatgcctgtaattccagcactttgggagtttgaggcaagaggatcacttgagctcaggaattcaaaaccagcctgggcaatatggcaagaccccatctttgcagaatattagcctagcttggtagcacgagtatgtggtcctagctacttggaaggctgaggtgggaaggatcacttgagcctggtaggttgaagctgcagtgagctatattcacaccattgcactctagcttgaacaacaaagtgagatcctgtctcaaaaagaaaaaggaaaaattacagctcacggctgtaatcccagcactttgggaggccaaggcgcgcagatcacttgaggtcaggagtttgagaccagccaacatggtatcaccctgtctctactaaaaatacaaaaattagccaggtgtcgtggcgggtgcctgtaatcccagctactcgggaggctgaggcaggagaatcgcttgaacccaggaggcagagattacagtgaaccaagatgacacctctgcactccagcctgggcaacaggcttaaagactccgtcttaaaaaaaaattaagaatttgtattctcataacatattcagttttaagcttgtagcttttaaatctttgagcacgtaataaaagctgcgtaggccaagtgtggtggctcatgcttgtaatcccagcactttgggaggctgaggcaggaggatcacctgaggtcgggagttcaagagcagcttacccaatatgtagaaaccccgcctctactaaaaatacaaaattagccaggcgtggtcgcatgcctgtaatcctagctactcgggaggctgaggcaggagaatcattgaacccaggaggcggaggttgtggtgggccaatatcacaccattgcactccaacctgggcaacaagagcaagagtccatctaaaaaaagagctgtatataccactttaatctgtccttgggcttcagacttaaatattctcttaaacagcaaaaatactaactaagttaaatttaaaagcaaggagaagcatcattgtaatacgacatccatgtgtattcaaactagaattttctgatggtcttcgtaagataaaggagataattgtcatttctatgacacagcttttataatttgaataaacttagttggagattggagtatttttattatttattttcatgtgagatgggtaatgtgctgacctcataacaaagtttgagggagacacattgtatgtgagaatttgaagtgcttatgaagtacaaaagcagaggccaggtgctcacatctgtaatcccagcactttgggaggccaaggcacacagatcacttgaggtcaggagtttgagaccagcctggccaacatggcgaaaacccctctcttactaaaaatacaaaaattagctggatgtggtggtgtgggcctgtaatcccagctactcgcgaggctgaggcaggagaatcgcttgaacctggcaggcagaggttgcggtgagccaagattgcgtcactgcactccggcgtggacaagagagtgagactccgtcacaaaaaaaaaaaaaaaagaagaaaagtattggattcacatattctaaaaatgctcgtcatttgtggctaattttatcaagtctagtttaatctcatatttacagagtttagttaattctaattagctttgttggaggtcataaaccacattattaaccttgaaccgactctgtgtttacttgagttcctctgcataatagcatgtcaccaccatcataaacatgttggtattgcattatgcttctagaggagacatccaccaatatttgaaaatctggctggtccgagtgcagtggtgtttacaactaattgatcacaaccagttacagactttgtttcttctccagtcctgctgcttcacttgactagccttttaaaaaaaagaaagaaaatagagaaaatcttaacttatatttacttactgtatgttgtgattagtttaatagaagggagtttaatccttaataattaagttagtcctcaacgtttattgacttagttctgatgtagtccttgtgtactattgtataatgtagactacttggccatacttgattttgtctaaaagttaatgcataaattaatattaaatatggccaaatataaaagtttaatgagtcatttgaggtcatttagccagaaaactgcatttatgttcctggtgaatttttttcaatgtccttttccaaaagtggcagtaagcagctgtcttaaaataaggagacagtgggaatgatgttgttaaagtcttttatacaatgtattgtctgtctgttccataaaaagtaaaactactctattcgtgaccagcttgggcaacatagtgagactgtctctttaaaaaaaaaaaaaaaattaaaaattagcaggtgtggtgatgcacacctgtagtcctagcaattcgggaagctgaggtaggaagatcgcttgagccaagtgtttgaggttagaatgagctatgatcgcaccacctacactccagcctgggcaacagagcaagacccaaatggctcatggttgctttgtttgttttaccttgttgagtgccagtgtgtattttgagcaaagcagtgtaaatggccttcttgccctagagtctttcataattgagccttatttaatctaccacttttgaccatgaaatttaacaggtgacttcttctgggtatctactccaggtgaagtgatattttttttgactgagatgtctaaagctcttggattcctggtatctcaccaggacatcttagtaaaacagcaagtatcagatgaggaatcagacttgagttctagctctggtctggccactaacattgatatgatcttgggcaagttagttcctgcctgggtttcattacctttaactgaggaggttgaaatagatgatttctcatgtctcttctactcctaaattctatgattttagggagaaaatccccttcaacattcctgggatatatatctaatagtcccatatattgtgaaacttccctattgacgataaagagggctggggaaggctacaagttctctttgtaaagaatccttttctggtcaagtttcttcttcatcactcatgccacttactccattctggaccctccttcagtcaaatgttcctgtgcttcaacctccattacccttggaaatgccaccacccccacctccacctccagaatcacctccaccccctcctccaccacctcctcctgcggaagatggtgagatccaggaggtagagatggaggatgagggaagtgaggagccccctgccccaggaacagaggaagatacccctttgaaaccttcagcacaaaccacagttgtaactagccagagttcagttgattccaccatctctagttcttcttccactaaaggaataaagaggaaagctacagaaattagcactgcagtggttcagaggtcagctaccattggcagttctccagttctctatagccagtcagctatagctacaggtcaccaggcagcagggattggaaaccaggcaacaggaattggacatcagacaataccagttagccttccagcagcaggaatgggtcatcaggccagaggaatgagcctgcagtcaaattaccttggactagcggcagcacctgcaattatgagttatgcagaatgttctgtcccaattggagtgactgctccctcattgcagccagttcaggcccgaggtgctgtgcctaccgctaccattatagaaccaccaccaccacctcctcctcctcctcctccaccaccaccagctcccaaaatgccaccacctgaaaagacaaaaaaaggaaggaaagacaaggcaaagaagagtaagaccaaaatgccatctttggtaaaaaagtggcagagtatccagcgtgagttagatgaagaggacaattctagttccagtgaagaggatcgggaatcaactgcacagaagcgaattgaagagtggaaacagcagcagctggttagtggcatggcagagagaaatgctaattttgaagcccttcctgaggattggagagcaaggctgaagagaaggaaaatggctccaaacacatagtttttaagtttttaaaacttttttgtattattgtttgttttgtgttcagttcaaagtcttaaccagttttattgtcaaataaactataaatgttatgggggagatcttataaatttcctgggcaagagtgtatgcatacaaagttttcacttttgtgaaatgtaatttttctgtttttgcaaagggatgaggtgattggaattgctttgaccatgctgcctttattctcaaactggcaaacttagcatgttaggtgtattaacctcatcagtcttgaagaacatgtggctcatgagtataacacttctgtagaggactccctgacaaaagtgaagaattaacttctcctccagaacaagtgcaattcagaaggcagctctgcattctaccttgcttgactggaattgtctgaagctttttctggcctcttttctctagtcggccacccctgaagtgctgaggtctaagtggtttacctcgtgctgatagatggccacactctttagagtagttctcataagttctagaactggtagctcggtcgtttcgcacactaggtggcatacaggcagcagcaggtgttcatatccttgattttgagaatttcccctcaagtatgtggcagtaaatacaacaagacactctatgtattaatgtctccattgtcttaaccctgttccaaaacaaaattcacctcctttctttatgtgaatgtattctccataaaattccagtatttaaaaagcagtttactgttctgtactttctgttgtatcacaatcaggtaaaagtcactttaaactgaggaaacggcaaattgtgttttaaagctctttgtatttctccagtttctgaccttgtaaatttgtatatatgcactaataaagctttttttataa

SEQ ID NO: 408686 - DNA, 3653 bp, Homo sapiens
gctgaagatgtgaatgaagaacaagattactatcctctgccagcagggatcatagacggtatttctatgtaaacgaacagtcgggcgagtctcagtgggagtttccagatggtgaagaggaagaagaagaaagccaagcacaagaaaatagagatgagactcttgccaaacagaccttgaaagacaaaactggcactgattcaaattcaacagaatcctctgaaacttccacagtcggaattgagatgggcgattggcaggaagtctgggatgagaacacgggatgttattattattggaatacacaaacaaatgaagtgacttgggagttaccccaatatcttgccacacaggtacagggattacagcattaccagcccagttctgtgccaggtgctgaaactagttttgtggtaaatacagacatatattctaaggagaaaacgatttctgtttccagtagtaaaagtggaccagtcatagccaagcgagaagttaaaaaggaagtaaatgaaggaattcaggctctctcaaatagtgaggaggagaagaaaggggtggcagcatcgctgcttgctcctttattgcctgagggaataaaagaagaagaagagagatggagaagaaaagtaatttgtaaagaggagccagtttcagaagtaaaagaaacaagtacaacagtagaagaagcaacaacaatagtaaagccacaggaaattatgttggacaatatagaagacccttctcaggaggatctttgcagtgttgtccaatctggagaaagtgaggaggaagaggaacaagatacccttgaactggagctagttttggaaaggaaaaaagcagagttgcgagccttggaggaaggagatggtagtgtgtcagggtctagtccacgttctgatatcagccagccagcatctcaagatggaatgcgtaggcttatgtctaaaagaggaaaatggaagatgtttgttcgagctaccagtccagaatctaccagtaggagttctagtaaaactggacgagatactccagaaaatggagaaactgcaattggtgctgaaaattcagaaaaaatagatgagaattcagataaagagatggaagtagaagaatctccagagaaaataaaagtacagacaacaccaaaagtagaagaagaacaggatttgaaatttcagattggagaactggcaaataccctgacaagtaaattcgagtttctaggcattaatagacaatccatctccaactttcatgtgctgctcttacagactgagactcgaattgcagactggcgggaaggggctcttaatggaaactaccttaaacgaaaacttcaggatgcagcagaacaactaaaacagtatgaaataaacgccactcctaaaggctggtcctgccactgggacaggacctctggaagcaactactcctgattaacctcggtgaagttaaggaaaacttcgtggctgaagatgtgaatgaagaacaagattactatcctctgccagcagggatcatagacggtatttctatgtaaacgaacagtcgggcgagtctcagtgggagtttccagatggtgaagaggaagaagaagaaagccaagcacaagaaaatagagatgagactcttgccaaacagaccttgaaagacaaaactggcactgattcaaattcaacagaatcctctgaaacttccacaggttctctttgtaaagaatccttttctggtcaagtttcttcttcatcactcatgccacttactccattctggaccctccttcagtcaaatgttcctgtgcttcaacctccattacccttggaaatgccaccacccccacctccacctccagaatcacctccaccccctcctccaccacctcctcctgcggaagatggtgagatccaggaggtagagatggaggatgagggaagtgaggagccccctgccccaggaacagaggaagatacccctttgaaaccttcagcacaaaccacagttgtaactagccagagttcagttgattccaccatctctagttcttcttccactaaaggaataaagaggaaagctacagaaattagcactgcagtggttcagaggtcagctaccattggcagttctccagttctctatagccagtcagctatagctacaggtcaccaggcagcagggattggaaaccaggcaacaggaattggacatcagacaataccagttagccttccagcagcaggaatgggtcatcaggccagaggaatgagcctgcagtcaaattaccttggactagcggcagcacctgcaattatgagttatgcagaatgttctgtcccaattggagtgactgctccctcattgcagccagttcaggcccgaggtgctgtgcctaccgctaccattatagaaccaccaccaccacctcctcctcctcctcctccaccaccaccagctcccaaaatgccaccacctgaaaagacaaaaaaaggaaggaaagacaaggcaaagaagagtaagaccaaaatgccatctttggtaaaaaagtggcagagtatccagcgtgagttagatgaagaggacaattctagttccagtgaagaggatcgggaatcaactgcacagaagcgaattgaagagtggaaacagcagcagctggttagtggcatggcagagagaaatgctaattttgaagcccttcctgaggattggagagcaaggctgaagagaaggaaaatggctccaaacacatagtttttaagtttttaaaacttttttgtattattgtttgttttgtgttcagttcaaagtcttaaccagttttattgtcaaataaactataaatgttatgggggagatcttataaatttcctgggcaagagtgtatgcatacaaagttttcacttttgtgaaatgtaatttttctgtttttgcaaagggatgaggtgattggaattgctttgaccatgctgcctttattctcaaactggcaaacttagcatgttaggtgtattaacctcatcagtcttgaagaacatgtggctcatgagtataacacttctgtagaggactccctgacaaaagtgaagaattaacttctcctccagaacaagtgcaattcagaaggcagctctgcattctaccttgcttgactggaattgtctgaagctttttctggcctcttttctctagtcggccacccctgaagtgctgaggtctaagtggtttacctcgtgctgatagatggccacactctttagagtagttctcataagttctagaactggtagctcggtcgtttcgcacactaggtggcatacaggcagcagcaggtgttcatatccttgattttgagaatttcccctcaagtatgtggcagtaaatacaacaagacactctatgtattaatgtctccattgtcttaaccctgttccaaaacaaaattcacctcctttctttatgtgaatgtattctccataaaattccagtatttaaaaagcagtttactgttctgtactttctgttgtatcacaatcaggtaaaagtcactttaaactgaggaaacggcaaattgtgttttaaagctctttgtatttctccagtttctgaccttgtaaatttgtatatatgcactaataaagctttttttataa

SEQ ID NO: 408687 - DNA, 9274 bp, Homo sapiens
  misc_feature (4113)..(4113): n is a, c, g, or t
gctgaagatgtgaatgaagaacaagattactatcctctgccagcagggatcatagacggtatttctatgtaaacgaacagtcgggcgagtctcagtgggagtttccagatggtgaagaggaagaagaagaaagccaagcacaagaaaatagagatgagactcttgccaaacagaccttgaaagacaaaactggcactgattcaaattcaacagaatcctctgaaacttccacagtcggaattgagatgggcgattggcaggaagtctgggatgagaacacgggatgttattattattggaatacacaaacaaatgaagtgacttgggagttaccccaatatcttgccacacaggtacagggattacagcattaccagcccagttctgtgccaggtgctgaaactagttttgtggtaaatacagacatatattctaaggagaaaacgatttctgtttccagtagtaaaagtggaccagtcatagccaagcgagaagttaaaaaggaagtaaatgaaggaattcaggctctctcaaatagtgaggaggagaagaaaggggtggcagcatcgctgcttgctcctttattgcctgagggaataaaagaagaagaagagagatggagaagaaaagtaatttgtaaagaggagccagtttcagaagtaaaagaaacaagtacaacagtagaagaagcaacaacaatagtaaagccacaggaaattatgttggacaatatagaagacccttctcaggaggatctttgcagtgttgtccaatctggagaaagtgaggaggaagaggaacaagatacccttgaactggagctagttttggaaaggaaaaaagcagagttgcgagccttggaggaaggagatggtagtgtgtcagggtctagtccacgttctgatatcagccagccagcatctcaagatggaatgcgtaggcttatgtctaaaagaggaaaatggaagatgtttgttcgagctaccagtccagaatctaccagtaggagttctagtaaaactggacgagatactccagaaaatggagaaactgcaattggtgctgaaaattcagaaaaaatagatgagaattcagataaagagatggaagtagaagaatctccagagaaaataaaagtacagacaacaccaaaagtagaagaagaacaggatttgaaatttcagattggagaactggcaaataccctgacaagtaaattcgagtttctaggcattaatagacaatccatctccaactttcatgtgctgctcttacagactgagactcgaattgcagactggcgggaaggggctcttaatggaaactaccttaaacgaaaacttcaggatgcagcagaacaactaaaacagtatgaaataaacgccactcctaaaggctggtcctgccactgggacaggtacgcactcttctccccttttcacctttcacctttgacatctcagacatgatttgtgatcaccaccatctgacgacatgacagcctgtctggagactgagagcagctgcagttagcggtgctgggcaggcaaagcaccgcaagcacaaagtttggccagccacacattggagaaacaaaagcaatgtttaaagtgttccatgtaacggattttttcccaagatatggacaaagctggtttttactctccagagtgttgcacggagtagggcgggcttgggggttaagcgcatgcgagagctctgtgcgctttacaggacctctggaagcaactactcctgattaacctcggtgaagttaaggaaaacttcgtggctgaagatgtgaatgaagaacaagattactatcctctgccagcaggtcagatgaaaacatttctttatatatttggcttttcttgatttttttttcgttatttgaaatctttgctcttttatttttcagctcccagatcctctccctctctttagctttcactgtgtttgatatcaagaatatgaaatgtgaattccacggtccaagaggggaagagtcacctttcacaaacttcgttgttctcttctttggaagggaaattagtgttctaggcgattgagtcccttcattaatgaaacttgaaaccctgttatgcattggcaaatcacaaaaaaagagaaaagtgttttctaagtctcatctgttggagtgagagggttcagggctgtattcacagagttgctggcagtgcaaatagctttgaattatccttggttctccattctcaattgtcaaagctctttgttgcctttgtgaatagcagtccattaagaggttcgtccctgtgaaagcagactgctgtcctgggacaggaccaaatggaagtgtctttgtaggagaacgggttttaaaacatgtgttttctttcttgtaatttagggatcatagacggtatttctatgtaaacgaacagtcgggcgagtctcagtgggagtttccagatggtgaagaggaagaagaagaaagccaagcacaagaaaatagagatgagactcttgccaaacagaccttgaaagacaaaactggcactgattcaaattcaacagaatcctctgaaacttccacaggtgagacaatttaccttgtactaattcagccaaaatgactttagaggaaaaatcttattaatttacattattaaaagattttatgtcataataatataagcttctgattgagaatagtggtgtgaactaaaacaaggaatgcatgagttattatggttggaaatcagcatactattgttatcacgtgtaaaactgtgccccaaagtgaaaagataggctaacagattttgattttaaaaaattgttttataaccattctatcatgccactgactaagctgtgggtctccaaaaataggaatgcttgtgctgaggaactagatagttgaactgtcaatatatgtggcatgctgagatttgttatacatttctatacaacacttagtctgttcatattgcaacctcatttctcacctccactaatcttacaaaaagcgtggttggtacaaatcaaaatgatatgaagaaatgccattagtacttgtttcagagaagcaaaataattgatcatgaaaaatcaccagcaatcttctggtctaaaacaattggcaataggatgtctcattccatttttaaggtactcttggaagaatttagtttagttacatacattttttaaaagataggctttcatgctcctcagttcctttagtttttaaaaagtttccaatgtgtaaagaaacttccacctgttaatcttaagaattggtagctatttgttaaactgatggcatatgaaggcaagagtctatgagtcgtttctaaagtaatagatctttgaaaattttaaaaagtgaaatttgtcaataacagagttaagagctgaattcttttgtctaaaacttatcgaaattgatgcttgtactctactggctccctgatgatagtagaaaagcactagtaatgtaccaaatgaaactggttgtgtaccagatgattttgttaacttcttaaatagcctagaaatcgtcagcaggtcacatacaactgcagtgataatttcagaacatagcaaaaggctgattttattctacttcacattttagaagtgcattttctcaagttacagggcatttcacttcccttttacatgaagagattttcttttgaatatttttcctctcttttggtagcagtgatagacatgactaataatatattggttctttttgtttgctttttagcagttaatgaactgaagaggcttgatcgtagttctggataggtggctccactcctgaccactgtcaacatcccttatatgttccaaagttgaaaattccactgttaccaattctgaatgttctgtgaacactttagatgagtattaagctgttttctccctttatgacacacatagttgatactgtctggtaaaaggaggctcttgagccattcctatttaattaaaacagaactagttgtagtgtaggaaaaagccactgataaaacaggttatattcttaagcctctctttattgagaacccctagaattgcaggataaacttgatcgaagtaaaatccaaatcttanactaagttctgtgagatttaagagcaataatcaacagttctaagcctaataaagagagctcttaatcagctcagtggtggttaaaaccagctatcttttaaagaagagaaaaaacaaaacacagcaatgccctgtctcttcagaaaattgttttaaaaagttagccaggcatagttagtggcccacgcctgtagtccgagctgtttgggaggttgaggtgggaagattggttgagcccaagattttgaggctgcagtaagccataattgtaccactgcactccagcctgagcgacagagaacaagaccctgtctcaaaaataaagtgggggaaggggtgcaaaattacactgtgagaagccaagaagtttcaaagttctatttatttttctaagtcatttttaatcattatttgttgtttcagtgtttgaatttaacattatgtttttaaagatggagtggattctaaagatgagttgggttcaagatatccaacatatcttttatattgggcttatgtcacttaggtgaagttgagctcctttttctttttaatctccatggaacaatttgtataatttcttgatttaaattgctaaactgagctcttcattcaaaatactaaacaataatttctctttggggggaaaattaaggaaggctttctatacatagaaataaagatgcctaggccgggtgcagtggctcatgcctgtaatcccaatactttggggggctgaggcgggtggatcacctgaggtcaagagttcaagaccagcctgggcaacatggtgaaaccctgcctctactaaaagtacaaaaattagctgggcgtggtggcagctgcctgtaatcccagctactcggaggctgaggcacgagaatcacttgaacctgggaggcgaaggttgcagtgaaccaagatcatgccattgcactccagcctgggcgacagagcaaaactctttatctaaaaaaaaaaaaaaaaaaaagacgcctacagaagcaaggttcttaggtgcagtgactcatgcctgtaattccagcactttgggagtttgaggcaagaggatcacttgagctcaggaattcaaaaccagcctgggcaatatggcaagaccccatctttgcagaatattagcctagcttggtagcacgagtatgtggtcctagctacttggaaggctgaggtgggaaggatcacttgagcctggtaggttgaagctgcagtgagctatattcacaccattgcactctagcttgaacaacaaagtgagatcctgtctcaaaaagaaaaaggaaaaattacagctcacggctgtaatcccagcactttgggaggccaaggcgcgcagatcacttgaggtcaggagtttgagaccagccaacatggtatcaccctgtctctactaaaaatacaaaaattagccaggtgtcgtggcgggtgcctgtaatcccagctactcgggaggctgaggcaggagaatcgcttgaacccaggaggcagagattacagtgaaccaagatgacacctctgcactccagcctgggcaacaggcttaaagactccgtcttaaaaaaaaattaagaatttgtattctcataacatattcagttttaagcttgtagcttttaaatctttgagcacgtaataaaagctgcgtaggccaagtgtggtggctcatgcttgtaatcccagcactttgggaggctgaggcaggaggatcacctgaggtcgggagttcaagagcagcttacccaatatgtagaaaccccgcctctactaaaaatacaaaattagccaggcgtggtcgcatgcctgtaatcctagctactcgggaggctgaggcaggagaatcattgaacccaggaggcggaggttgtggtgggccaatatcacaccattgcactccaacctgggcaacaagagcaagagtccatctaaaaaaagagctgtatataccactttaatctgtccttgggcttcagacttaaatattctcttaaacagcaaaaatactaactaagttaaatttaaaagcaaggagaagcatcattgtaatacgacatccatgtgtattcaaactagaattttctgatggtcttcgtaagataaaggagataattgtcatttctatgacacagcttttataatttgaataaacttagttggagattggagtatttttattatttattttcatgtgagatgggtaatgtgctgacctcataacaaagtttgagggagacacattgtatgtgagaatttgaagtgcttatgaagtacaaaagcagaggccaggtgctcacatctgtaatcccagcactttgggaggccaaggcacacagatcacttgaggtcaggagtttgagaccagcctggccaacatggcgaaaacccctctcttactaaaaatacaaaaattagctggatgtggtggtgtgggcctgtaatcccagctactcgcgaggctgaggcaggagaatcgcttgaacctggcaggcagaggttgcggtgagccaagattgcgtcactgcactccggcgtggacaagagagtgagactccgtcacaaaaaaaaaaaaaaaagaagaaaagtattggattcacatattctaaaaatgctcgtcatttgtggctaattttatcaagtctagtttaatctcatatttacagagtttagttaattctaattagctttgttggaggtcataaaccacattattaaccttgaaccgactctgtgtttacttgagttcctctgcataatagcatgtcaccaccatcataaacatgttggtattgcattatgcttctagaggagacatccaccaatatttgaaaatctggctggtccgagtgcagtggtgtttacaactaattgatcacaaccagttacagactttgtttcttctccagtcctgctgcttcacttgactagccttttaaaaaaaagaaagaaaatagagaaaatcttaacttatatttacttactgtatgttgtgattagtttaatagaagggagtttaatccttaataattaagttagtcctcaacgtttattgacttagttctgatgtagtccttgtgtactattgtataatgtagactacttggccatacttgattttgtctaaaagttaatgcataaattaatattaaatatggccaaatataaaagtttaatgagtcatttgaggtcatttagccagaaaactgcatttatgttcctggtgaatttttttcaatgtccttttccaaaagtggcagtaagcagctgtcttaaaataaggagacagtgggaatgatgttgttaaagtcttttatacaatgtattgtctgtctgttccataaaaagtaaaactactctattcgtgaccagcttgggcaacatagtgagactgtctctttaaaaaaaaaaaaaaaattaaaaattagcaggtgtggtgatgcacacctgtagtcctagcaattcgggaagctgaggtaggaagatcgcttgagccaagtgtttgaggttagaatgagctatgatcgcaccacctacactccagcctgggcaacagagcaagacccaaatggctcatggttgctttgtttgttttaccttgttgagtgccagtgtgtattttgagcaaagcagtgtaaatggccttcttgccctagagtctttcataattgagccttatttaatctaccacttttgaccatgaaatttaacaggtgacttcttctgggtatctactccaggtgaagtgatattttttttgactgagatgtctaaagctcttggattcctggtatctcaccaggacatcttagtaaaacagcaagtatcagatgaggaatcagacttgagttctagctctggtctggccactaacattgatatgatcttgggcaagttagttcctgcctgggtttcattacctttaactgaggaggttgaaatagatgatttctcatgtctcttctactcctaaattctatgattttagggagaaaatccccttcaacattcctgggatatatatctaatagtcccatatattgtgaaacttccctattgacgataaagagggctggggaaggctacaagttctctttgtaaagaatccttttctggtcaagtttcttcttcatcactcatgccacttactccattctggaccctccttcagtcaaatgttcctgtgcttcaacctccattacccttggaaatgccaccacccccacctccacctccagaatcacctccaccccctcctccaccacctcctcctgcggaagatggtgagatccaggaggtagagatggaggatgagggaagtgaggagccccctgccccaggaacagaggaagatacccctttgaaaccttcagcacaaaccacagttgtaactagccagagttcagttgattccaccatctctagttcttcttccactaaaggaataaagaggaaagctacagaaattagcactgcagtggttcagaggtcagctaccattggcagttctccagttctctatagccagtcagctatagctacaggtcaccaggcagcagggattggaaaccaggcaacaggaattggacatcagacaataccagttagccttccagcagcaggaatgggtcatcaggccagaggaatgagcctgcagtcaaattaccttggactagcggcagcacctgcaattatgagttatgcagaatgttctgtcccaattggagtgactgctccctcattgcagccagttcaggcccgaggtgctgtgcctaccgctaccattatagaaccaccaccaccacctcctcctcctcctcctccaccaccaccagctcccaaaatgccaccacctgaaaagacaaaaaaaggaaggaaagacaaggcaaagaagagtaagaccaaaatgccatctttggtaaaaaagtggcagagtatccagcgtgagttagatgaagaggacaattctagttccagtgaagaggatcgggaatcaactgcacagaagcgaattgaagagtggaaacagcagcagctggttagtggcatggcagagagaactgaactgtggaaaaatgacctttccttaacttgaagctacttttaaaatttgagggtctggaccaaagaagaggatatcatgtgcgggata

SEQ ID NO: 408688 - DNA, 9028 bp, Homo sapiens
  misc_feature (4113)..(4113): n is a, c, g, or t
gctgaagatgtgaatgaagaacaagattactatcctctgccagcagggatcatagacggtatttctatgtaaacgaacagtcgggcgagtctcagtgggagtttccagatggtgaagaggaagaagaagaaagccaagcacaagaaaatagagatgagactcttgccaaacagaccttgaaagacaaaactggcactgattcaaattcaacagaatcctctgaaacttccacagtcggaattgagatgggcgattggcaggaagtctgggatgagaacacgggatgttattattattggaatacacaaacaaatgaagtgacttgggagttaccccaatatcttgccacacaggtacagggattacagcattaccagcccagttctgtgccaggtgctgaaactagttttgtggtaaatacagacatatattctaaggagaaaacgatttctgtttccagtagtaaaagtggaccagtcatagccaagcgagaagttaaaaaggaagtaaatgaaggaattcaggctctctcaaatagtgaggaggagaagaaaggggtggcagcatcgctgcttgctcctttattgcctgagggaataaaagaagaagaagagagatggagaagaaaagtaatttgtaaagaggagccagtttcagaagtaaaagaaacaagtacaacagtagaagaagcaacaacaatagtaaagccacaggaaattatgttggacaatatagaagacccttctcaggaggatctttgcagtgttgtccaatctggagaaagtgaggaggaagaggaacaagatacccttgaactggagctagttttggaaaggaaaaaagcagagttgcgagccttggaggaaggagatggtagtgtgtcagggtctagtccacgttctgatatcagccagccagcatctcaagatggaatgcgtaggcttatgtctaaaagaggaaaatggaagatgtttgttcgagctaccagtccagaatctaccagtaggagttctagtaaaactggacgagatactccagaaaatggagaaactgcaattggtgctgaaaattcagaaaaaatagatgagaattcagataaagagatggaagtagaagaatctccagagaaaataaaagtacagacaacaccaaaagtagaagaagaacaggatttgaaatttcagattggagaactggcaaataccctgacaagtaaattcgagtttctaggcattaatagacaatccatctccaactttcatgtgctgctcttacagactgagactcgaattgcagactggcgggaaggggctcttaatggaaactaccttaaacgaaaacttcaggatgcagcagaacaactaaaacagtatgaaataaacgccactcctaaaggctggtcctgccactgggacaggtacgcactcttctccccttttcacctttcacctttgacatctcagacatgatttgtgatcaccaccatctgacgacatgacagcctgtctggagactgagagcagctgcagttagcggtgctgggcaggcaaagcaccgcaagcacaaagtttggccagccacacattggagaaacaaaagcaatgtttaaagtgttccatgtaacggattttttcccaagatatggacaaagctggtttttactctccagagtgttgcacggagtagggcgggcttgggggttaagcgcatgcgagagctctgtgcgctttacaggacctctggaagcaactactcctgattaacctcggtgaagttaaggaaaacttcgtggctgaagatgtgaatgaagaacaagattactatcctctgccagcaggtcagatgaaaacatttctttatatatttggcttttcttgatttttttttcgttatttgaaatctttgctcttttatttttcagctcccagatcctctccctctctttagctttcactgtgtttgatatcaagaatatgaaatgtgaattccacggtccaagaggggaagagtcacctttcacaaacttcgttgttctcttctttggaagggaaattagtgttctaggcgattgagtcccttcattaatgaaacttgaaaccctgttatgcattggcaaatcacaaaaaaagagaaaagtgttttctaagtctcatctgttggagtgagagggttcagggctgtattcacagagttgctggcagtgcaaatagctttgaattatccttggttctccattctcaattgtcaaagctctttgttgcctttgtgaatagcagtccattaagaggttcgtccctgtgaaagcagactgctgtcctgggacaggaccaaatggaagtgtctttgtaggagaacgggttttaaaacatgtgttttctttcttgtaatttagggatcatagacggtatttctatgtaaacgaacagtcgggcgagtctcagtgggagtttccagatggtgaagaggaagaagaagaaagccaagcacaagaaaatagagatgagactcttgccaaacagaccttgaaagacaaaactggcactgattcaaattcaacagaatcctctgaaacttccacaggtgagacaatttaccttgtactaattcagccaaaatgactttagaggaaaaatcttattaatttacattattaaaagattttatgtcataataatataagcttctgattgagaatagtggtgtgaactaaaacaaggaatgcatgagttattatggttggaaatcagcatactattgttatcacgtgtaaaactgtgccccaaagtgaaaagataggctaacagattttgattttaaaaaattgttttataaccattctatcatgccactgactaagctgtgggtctccaaaaataggaatgcttgtgctgaggaactagatagttgaactgtcaatatatgtggcatgctgagatttgttatacatttctatacaacacttagtctgttcatattgcaacctcatttctcacctccactaatcttacaaaaagcgtggttggtacaaatcaaaatgatatgaagaaatgccattagtacttgtttcagagaagcaaaataattgatcatgaaaaatcaccagcaatcttctggtctaaaacaattggcaataggatgtctcattccatttttaaggtactcttggaagaatttagtttagttacatacattttttaaaagataggctttcatgctcctcagttcctttagtttttaaaaagtttccaatgtgtaaagaaacttccacctgttaatcttaagaattggtagctatttgttaaactgatggcatatgaaggcaagagtctatgagtcgtttctaaagtaatagatctttgaaaattttaaaaagtgaaatttgtcaataacagagttaagagctgaattcttttgtctaaaacttatcgaaattgatgcttgtactctactggctccctgatgatagtagaaaagcactagtaatgtaccaaatgaaactggttgtgtaccagatgattttgttaacttcttaaatagcctagaaatcgtcagcaggtcacatacaactgcagtgataatttcagaacatagcaaaaggctgattttattctacttcacattttagaagtgcattttctcaagttacagggcatttcacttcccttttacatgaagagattttcttttgaatatttttcctctcttttggtagcagtgatagacatgactaataatatattggttctttttgtttgctttttagcagttaatgaactgaagaggcttgatcgtagttctggataggtggctccactcctgaccactgtcaacatcccttatatgttccaaagttgaaaattccactgttaccaattctgaatgttctgtgaacactttagatgagtattaagctgttttctccctttatgacacacatagttgatactgtctggtaaaaggaggctcttgagccattcctatttaattaaaacagaactagttgtagtgtaggaaaaagccactgataaaacaggttatattcttaagcctctctttattgagaacccctagaattgcaggataaacttgatcgaagtaaaatccaaatcttanactaagttctgtgagatttaagagcaataatcaacagttctaagcctaataaagagagctcttaatcagctcagtggtggttaaaaccagctatcttttaaagaagagaaaaaacaaaacacagcaatgccctgtctcttcagaaaattgttttaaaaagttagccaggcatagttagtggcccacgcctgtagtccgagctgtttgggaggttgaggtgggaagattggttgagcccaagattttgaggctgcagtaagccataattgtaccactgcactccagcctgagcgacagagaacaagaccctgtctcaaaaataaagtgggggaaggggtgcaaaattacactgtgagaagccaagaagtttcaaagttctatttatttttctaagtcatttttaatcattatttgttgtttcagtgtttgaatttaacattatgtttttaaagatggagtggattctaaagatgagttgggttcaagatatccaacatatcttttatattgggcttatgtcacttaggtgaagttgagctcctttttctttttaatctccatggaacaatttgtataatttcttgatttaaattgctaaactgagctcttcattcaaaatactaaacaataatttctctttggggggaaaattaaggaaggctttctatacatagaaataaagatgcctaggccgggtgcagtggctcatgcctgtaatcccaatactttggggggctgaggcgggtggatcacctgaggtcaagagttcaagaccagcctgggcaacatggtgaaaccctgcctctactaaaagtacaaaaattagctgggcgtggtggcagctgcctgtaatcccagctactcggaggctgaggcacgagaatcacttgaacctgggaggcgaaggttgcagtgaaccaagatcatgccattgcactccagcctgggcgacagagcaaaactctttatctaaaaaaaaaaaaaaaaaaaagacgcctacagaagcaaggttcttaggtgcagtgactcatgcctgtaattccagcactttgggagtttgaggcaagaggatcacttgagctcaggaattcaaaaccagcctgggcaatatggcaagaccccatctttgcagaatattagcctagcttggtagcacgagtatgtggtcctagctacttggaaggctgaggtgggaaggatcacttgagcctggtaggttgaagctgcagtgagctatattcacaccattgcactctagcttgaacaacaaagtgagatcctgtctcaaaaagaaaaaggaaaaattacagctcacggctgtaatcccagcactttgggaggccaaggcgcgcagatcacttgaggtcaggagtttgagaccagccaacatggtatcaccctgtctctactaaaaatacaaaaattagccaggtgtcgtggcgggtgcctgtaatcccagctactcgggaggctgaggcaggagaatcgcttgaacccaggaggcagagattacagtgaaccaagatgacacctctgcactccagcctgggcaacaggcttaaagactccgtcttaaaaaaaaattaagaatttgtattctcataacatattcagttttaagcttgtagcttttaaatctttgagcacgtaataaaagctgcgtaggccaagtgtggtggctcatgcttgtaatcccagcactttgggaggctgaggcaggaggatcacctgaggtcgggagttcaagagcagcttacccaatatgtagaaaccccgcctctactaaaaatacaaaattagccaggcgtggtcgcatgcctgtaatcctagctactcgggaggctgaggcaggagaatcattgaacccaggaggcggaggttgtggtgggccaatatcacaccattgcactccaacctgggcaacaagagcaagagtccatctaaaaaaagagctgtatataccactttaatctgtccttgggcttcagacttaaatattctcttaaacagcaaaaatactaactaagttaaatttaaaagcaaggagaagcatcattgtaatacgacatccatgtgtattcaaactagaattttctgatggtcttcgtaagataaaggagataattgtcatttctatgacacagcttttataatttgaataaacttagttggagattggagtatttttattatttattttcatgtgagatgggtaatgtgctgacctcataacaaagtttgagggagacacattgtatgtgagaatttgaagtgcttatgaagtacaaaagcagaggccaggtgctcacatctgtaatcccagcactttgggaggccaaggcacacagatcacttgaggtcaggagtttgagaccagcctggccaacatggcgaaaacccctctcttactaaaaatacaaaaattagctggatgtggtggtgtgggcctgtaatcccagctactcgcgaggctgaggcaggagaatcgcttgaacctggcaggcagaggttgcggtgagccaagattgcgtcactgcactccggcgtggacaagagagtgagactccgtcacaaaaaaaaaaaaaaaagaagaaaagtattggattcacatattctaaaaatgctcgtcatttgtggctaattttatcaagtctagtttaatctcatatttacagagtttagttaattctaattagctttgttggaggtcataaaccacattattaaccttgaaccgactctgtgtttacttgagttcctctgcataatagcatgtcaccaccatcataaacatgttggtattgcattatgcttctagaggagacatccaccaatatttgaaaatctggctggtccgagtgcagtggtgtttacaactaattgatcacaaccagttacagactttgtttcttctccagtcctgctgcttcacttgactagccttttaaaaaaaagaaagaaaatagagaaaatcttaacttatatttacttactgtatgttgtgattagtttaatagaagggagtttaatccttaataattaagttagtcctcaacgtttattgacttagttctgatgtagtccttgtgtactattgtataatgtagactacttggccatacttgattttgtctaaaagttaatgcataaattaatattaaatatggccaaatataaaagtttaatgagtcatttgaggtcatttagccagaaaactgcatttatgttcctggtgaatttttttcaatgtccttttccaaaagtggcagtaagcagctgtcttaaaataaggagacagtgggaatgatgttgttaaagtcttttatacaatgtattgtctgtctgttccataaaaagtaaaactactctattcgtgaccagcttgggcaacatagtgagactgtctctttaaaaaaaaaaaaaaaattaaaaattagcaggtgtggtgatgcacacctgtagtcctagcaattcgggaagctgaggtaggaagatcgcttgagccaagtgtttgaggttagaatgagctatgatcgcaccacctacactccagcctgggcaacagagcaagacccaaatggctcatggttgctttgtttgttttaccttgttgagtgccagtgtgtattttgagcaaagcagtgtaaatggccttcttgccctagagtctttcataattgagccttatttaatctaccacttttgaccatgaaatttaacaggtgacttcttctgggtatctactccaggtgaagtgatattttttttgactgagatgtctaaagctcttggattcctggtatctcaccaggacatcttagtaaaacagcaagtatcagatgaggaatcagacttgagttctagctctggtctggccactaacattgatatgatcttgggcaagttagttcctgcctgggtttcattacctttaactgaggaggttgaaatagatgatttctcatgtctcttctactcctaaattctatgattttagggagaaaatccccttcaacattcctgggatatatatctaatagtcccatatattgtgaaacttccctattgacgataaagagggctggggaaggctacaagttctctttgtaaagaatccttttctggtcaagtttcttcttcatcactcatgccacttactccattctggaccctccttcagtcaaatgttcctgtgcttcaacctccattacccttggaaatgccaccacccccacctccacctccagaatcacctccaccccctcctccaccacctcctcctgcggaagatggtgagatccaggaggtagagatggaggatgagggaagtgaggagccccctgccccaggaacagaggaagatacccctttgaaaccttcagcacaaaccacagttgtaactagccagagttcagttgattccaccatctctagttcttcttccactaaaggaataaagaggaaagctacagaaattagcactgcagtggttcagaggtcagctaccattggcagttctccagttctctatagccagtcagctatagctacaggtcaccaggcagcagggattggaaaccaggcaacaggaattggacatcagacaataccagttagccttccagcagcaggaatgggtcatcaggccagaggaatgagcctgcagtcaaattaccttggactagcggcagcacctgcaattatgagttatgcagaatgttctgtcccaattggagtgactgctccctcattgcagccagttcaggcccgaggtgctgtgcctaccgctaccattatagaaccaccaccaccacctcctcctcctcctcctccaccaccaccagctcccaaaatgccaccacctgaaaagacaaaaaaaggaaggaaagacaaggtataataaatttcccttttt

SEQ ID NO: 408689 - DNA, 8954 bp, Homo sapiens
  misc_feature (4113)..(4113): n is a, c, g, or t
  misc_feature (8898)..(8898): n is a, c, g, or t
gctgaagatgtgaatgaagaacaagattactatcctctgccagcagggatcatagacggtatttctatgtaaacgaacagtcgggcgagtctcagtgggagtttccagatggtgaagaggaagaagaagaaagccaagcacaagaaaatagagatgagactcttgccaaacagaccttgaaagacaaaactggcactgattcaaattcaacagaatcctctgaaacttccacagtcggaattgagatgggcgattggcaggaagtctgggatgagaacacgggatgttattattattggaatacacaaacaaatgaagtgacttgggagttaccccaatatcttgccacacaggtacagggattacagcattaccagcccagttctgtgccaggtgctgaaactagttttgtggtaaatacagacatatattctaaggagaaaacgatttctgtttccagtagtaaaagtggaccagtcatagccaagcgagaagttaaaaaggaagtaaatgaaggaattcaggctctctcaaatagtgaggaggagaagaaaggggtggcagcatcgctgcttgctcctttattgcctgagggaataaaagaagaagaagagagatggagaagaaaagtaatttgtaaagaggagccagtttcagaagtaaaagaaacaagtacaacagtagaagaagcaacaacaatagtaaagccacaggaaattatgttggacaatatagaagacccttctcaggaggatctttgcagtgttgtccaatctggagaaagtgaggaggaagaggaacaagatacccttgaactggagctagttttggaaaggaaaaaagcagagttgcgagccttggaggaaggagatggtagtgtgtcagggtctagtccacgttctgatatcagccagccagcatctcaagatggaatgcgtaggcttatgtctaaaagaggaaaatggaagatgtttgttcgagctaccagtccagaatctaccagtaggagttctagtaaaactggacgagatactccagaaaatggagaaactgcaattggtgctgaaaattcagaaaaaatagatgagaattcagataaagagatggaagtagaagaatctccagagaaaataaaagtacagacaacaccaaaagtagaagaagaacaggatttgaaatttcagattggagaactggcaaataccctgacaagtaaattcgagtttctaggcattaatagacaatccatctccaactttcatgtgctgctcttacagactgagactcgaattgcagactggcgggaaggggctcttaatggaaactaccttaaacgaaaacttcaggatgcagcagaacaactaaaacagtatgaaataaacgccactcctaaaggctggtcctgccactgggacaggtacgcactcttctccccttttcacctttcacctttgacatctcagacatgatttgtgatcaccaccatctgacgacatgacagcctgtctggagactgagagcagctgcagttagcggtgctgggcaggcaaagcaccgcaagcacaaagtttggccagccacacattggagaaacaaaagcaatgtttaaagtgttccatgtaacggattttttcccaagatatggacaaagctggtttttactctccagagtgttgcacggagtagggcgggcttgggggttaagcgcatgcgagagctctgtgcgctttacaggacctctggaagcaactactcctgattaacctcggtgaagttaaggaaaacttcgtggctgaagatgtgaatgaagaacaagattactatcctctgccagcaggtcagatgaaaacatttctttatatatttggcttttcttgatttttttttcgttatttgaaatctttgctcttttatttttcagctcccagatcctctccctctctttagctttcactgtgtttgatatcaagaatatgaaatgtgaattccacggtccaagaggggaagagtcacctttcacaaacttcgttgttctcttctttggaagggaaattagtgttctaggcgattgagtcccttcattaatgaaacttgaaaccctgttatgcattggcaaatcacaaaaaaagagaaaagtgttttctaagtctcatctgttggagtgagagggttcagggctgtattcacagagttgctggcagtgcaaatagctttgaattatccttggttctccattctcaattgtcaaagctctttgttgcctttgtgaatagcagtccattaagaggttcgtccctgtgaaagcagactgctgtcctgggacaggaccaaatggaagtgtctttgtaggagaacgggttttaaaacatgtgttttctttcttgtaatttagggatcatagacggtatttctatgtaaacgaacagtcgggcgagtctcagtgggagtttccagatggtgaagaggaagaagaagaaagccaagcacaagaaaatagagatgagactcttgccaaacagaccttgaaagacaaaactggcactgattcaaattcaacagaatcctctgaaacttccacaggtgagacaatttaccttgtactaattcagccaaaatgactttagaggaaaaatcttattaatttacattattaaaagattttatgtcataataatataagcttctgattgagaatagtggtgtgaactaaaacaaggaatgcatgagttattatggttggaaatcagcatactattgttatcacgtgtaaaactgtgccccaaagtgaaaagataggctaacagattttgattttaaaaaattgttttataaccattctatcatgccactgactaagctgtgggtctccaaaaataggaatgcttgtgctgaggaactagatagttgaactgtcaatatatgtggcatgctgagatttgttatacatttctatacaacacttagtctgttcatattgcaacctcatttctcacctccactaatcttacaaaaagcgtggttggtacaaatcaaaatgatatgaagaaatgccattagtacttgtttcagagaagcaaaataattgatcatgaaaaatcaccagcaatcttctggtctaaaacaattggcaataggatgtctcattccatttttaaggtactcttggaagaatttagtttagttacatacattttttaaaagataggctttcatgctcctcagttcctttagtttttaaaaagtttccaatgtgtaaagaaacttccacctgttaatcttaagaattggtagctatttgttaaactgatggcatatgaaggcaagagtctatgagtcgtttctaaagtaatagatctttgaaaattttaaaaagtgaaatttgtcaataacagagttaagagctgaattcttttgtctaaaacttatcgaaattgatgcttgtactctactggctccctgatgatagtagaaaagcactagtaatgtaccaaatgaaactggttgtgtaccagatgattttgttaacttcttaaatagcctagaaatcgtcagcaggtcacatacaactgcagtgataatttcagaacatagcaaaaggctgattttattctacttcacattttagaagtgcattttctcaagttacagggcatttcacttcccttttacatgaagagattttcttttgaatatttttcctctcttttggtagcagtgatagacatgactaataatatattggttctttttgtttgctttttagcagttaatgaactgaagaggcttgatcgtagttctggataggtggctccactcctgaccactgtcaacatcccttatatgttccaaagttgaaaattccactgttaccaattctgaatgttctgtgaacactttagatgagtattaagctgttttctccctttatgacacacatagttgatactgtctggtaaaaggaggctcttgagccattcctatttaattaaaacagaactagttgtagtgtaggaaaaagccactgataaaacaggttatattcttaagcctctctttattgagaacccctagaattgcaggataaacttgatcgaagtaaaatccaaatcttanactaagttctgtgagatttaagagcaataatcaacagttctaagcctaataaagagagctcttaatcagctcagtggtggttaaaaccagctatcttttaaagaagagaaaaaacaaaacacagcaatgccctgtctcttcagaaaattgttttaaaaagttagccaggcatagttagtggcccacgcctgtagtccgagctgtttgggaggttgaggtgggaagattggttgagcccaagattttgaggctgcagtaagccataattgtaccactgcactccagcctgagcgacagagaacaagaccctgtctcaaaaataaagtgggggaaggggtgcaaaattacactgtgagaagccaagaagtttcaaagttctatttatttttctaagtcatttttaatcattatttgttgtttcagtgtttgaatttaacattatgtttttaaagatggagtggattctaaagatgagttgggttcaagatatccaacatatcttttatattgggcttatgtcacttaggtgaagttgagctcctttttctttttaatctccatggaacaatttgtataatttcttgatttaaattgctaaactgagctcttcattcaaaatactaaacaataatttctctttggggggaaaattaaggaaggctttctatacatagaaataaagatgcctaggccgggtgcagtggctcatgcctgtaatcccaatactttggggggctgaggcgggtggatcacctgaggtcaagagttcaagaccagcctgggcaacatggtgaaaccctgcctctactaaaagtacaaaaattagctgggcgtggtggcagctgcctgtaatcccagctactcggaggctgaggcacgagaatcacttgaacctgggaggcgaaggttgcagtgaaccaagatcatgccattgcactccagcctgggcgacagagcaaaactctttatctaaaaaaaaaaaaaaaaaaaagacgcctacagaagcaaggttcttaggtgcagtgactcatgcctgtaattccagcactttgggagtttgaggcaagaggatcacttgagctcaggaattcaaaaccagcctgggcaatatggcaagaccccatctttgcagaatattagcctagcttggtagcacgagtatgtggtcctagctacttggaaggctgaggtgggaaggatcacttgagcctggtaggttgaagctgcagtgagctatattcacaccattgcactctagcttgaacaacaaagtgagatcctgtctcaaaaagaaaaaggaaaaattacagctcacggctgtaatcccagcactttgggaggccaaggcgcgcagatcacttgaggtcaggagtttgagaccagccaacatggtatcaccctgtctctactaaaaatacaaaaattagccaggtgtcgtggcgggtgcctgtaatcccagctactcgggaggctgaggcaggagaatcgcttgaacccaggaggcagagattacagtgaaccaagatgacacctctgcactccagcctgggcaacaggcttaaagactccgtcttaaaaaaaaattaagaatttgtattctcataacatattcagttttaagcttgtagcttttaaatctttgagcacgtaataaaagctgcgtaggccaagtgtggtggctcatgcttgtaatcccagcactttgggaggctgaggcaggaggatcacctgaggtcgggagttcaagagcagcttacccaatatgtagaaaccccgcctctactaaaaatacaaaattagccaggcgtggtcgcatgcctgtaatcctagctactcgggaggctgaggcaggagaatcattgaacccaggaggcggaggttgtggtgggccaatatcacaccattgcactccaacctgggcaacaagagcaagagtccatctaaaaaaagagctgtatataccactttaatctgtccttgggcttcagacttaaatattctcttaaacagcaaaaatactaactaagttaaatttaaaagcaaggagaagcatcattgtaatacgacatccatgtgtattcaaactagaattttctgatggtcttcgtaagataaaggagataattgtcatttctatgacacagcttttataatttgaataaacttagttggagattggagtatttttattatttattttcatgtgagatgggtaatgtgctgacctcataacaaagtttgagggagacacattgtatgtgagaatttgaagtgcttatgaagtacaaaagcagaggccaggtgctcacatctgtaatcccagcactttgggaggccaaggcacacagatcacttgaggtcaggagtttgagaccagcctggccaacatggcgaaaacccctctcttactaaaaatacaaaaattagctggatgtggtggtgtgggcctgtaatcccagctactcgcgaggctgaggcaggagaatcgcttgaacctggcaggcagaggttgcggtgagccaagattgcgtcactgcactccggcgtggacaagagagtgagactccgtcacaaaaaaaaaaaaaaaagaagaaaagtattggattcacatattctaaaaatgctcgtcatttgtggctaattttatcaagtctagtttaatctcatatttacagagtttagttaattctaattagctttgttggaggtcataaaccacattattaaccttgaaccgactctgtgtttacttgagttcctctgcataatagcatgtcaccaccatcataaacatgttggtattgcattatgcttctagaggagacatccaccaatatttgaaaatctggctggtccgagtgcagtggtgtttacaactaattgatcacaaccagttacagactttgtttcttctccagtcctgctgcttcacttgactagccttttaaaaaaaagaaagaaaatagagaaaatcttaacttatatttacttactgtatgttgtgattagtttaatagaagggagtttaatccttaataattaagttagtcctcaacgtttattgacttagttctgatgtagtccttgtgtactattgtataatgtagactacttggccatacttgattttgtctaaaagttaatgcataaattaatattaaatatggccaaatataaaagtttaatgagtcatttgaggtcatttagccagaaaactgcatttatgttcctggtgaatttttttcaatgtccttttccaaaagtggcagtaagcagctgtcttaaaataaggagacagtgggaatgatgttgttaaagtcttttatacaatgtattgtctgtctgttccataaaaagtaaaactactctattcgtgaccagcttgggcaacatagtgagactgtctctttaaaaaaaaaaaaaaaattaaaaattagcaggtgtggtgatgcacacctgtagtcctagcaattcgggaagctgaggtaggaagatcgcttgagccaagtgtttgaggttagaatgagctatgatcgcaccacctacactccagcctgggcaacagagcaagacccaaatggctcatggttgctttgtttgttttaccttgttgagtgccagtgtgtattttgagcaaagcagtgtaaatggccttcttgccctagagtctttcataattgagccttatttaatctaccacttttgaccatgaaatttaacaggtgacttcttctgggtatctactccaggtgaagtgatattttttttgactgagatgtctaaagctcttggattcctggtatctcaccaggacatcttagtaaaacagcaagtatcagatgaggaatcagacttgagttctagctctggtctggccactaacattgatatgatcttgggcaagttagttcctgcctgggtttcattacctttaactgaggaggttgaaatagatgatttctcatgtctcttctactcctaaattctatgattttagggagaaaatccccttcaacattcctgggatatatatctaatagtcccatatattgtgaaacttccctattgacgataaagagggctggggaaggctacaagttctctttgtaaagaatccttttctggtcaagtttcttcttcatcactcatgccacttactccattctggaccctccttcagtcaaatgttcctgtgcttcaacctccattacccttggaaatgccaccacccccacctccacctccagaatcacctccaccccctcctccaccacctcctcctgcggaagatggtgagatccaggaggtagagatggaggatgagggaagtgaggagccccctgccccaggaacagaggaagatacccctttgaaaccttcagcacaaaccacagttgtaactagccagagttcagttgattccaccatctctagttcttcttccactaaaggaataaagaggaaagctacagaaattagcactgcagtggttcagaggtcagctaccattggcagttctccagttctctatagccagtcagctatagctacaggtcaccaggcagcagggattggaaaccaggcaacaggaattggacatcagacaataccagttagccttccagcagcaggaatgggtcatcaggccagaggaatgagcctgcagtcaaattaccttggactagcggcagcacctgcaattatgagttatgcagaatgttctgtcccaattggagtgactgctccctcattgcagccagttcaggcccgaggtgctgtgcctgncacactcagtccccaccacactgaatctcccctcaatagcctcgtggagatcctct

SEQ ID NO: 408690 - DNA, 1145 bp, Homo sapiens
cgtggatccctcgggctgcaggacttcggcacgagaaaggaaggaatgacagcaaagaagagtaagaccaaaatgccatctttggtaaaaaagtggcagagtatccagcgtgagttagatgaagaggacaattctagttccagtgaagaggatcgggaatcaactgcacagaagcgaattgaagagtggaaacagcagcagctggttagtggcatggcagagagaaatgctaattttgaagcccttcctgaggattggagagcaaggctgaagagaaggaaaatggctccaaacacatagtttttaagttttttttattgtcaaataaactataaatgttatgggggagatcttataaatttcctgggcaagagtgtatgcatacaaagttttcacttttgtgaaatgtaatttttctgtttttgcaaagggatgaggtgattggaattgctttgaccatgctgcctttattctcaaactggcaaacttagcatgttaggtgtattaacctcatcagtcttgaagaacatgtggctcatgagtataacacttctgtagaggactccctgacaaaagtgaagaattaacttctcctccagaacaagtgcaattcagaaggcagctctgcattctaccttgcttgactggaattgtctgaagctttttctggcctcttttctctagtcggccacccctgaagtgctgaggtctaagtggtttacctcgtgctgatagatggccacactctttagagtagttctcataagttctagaactggtagctcggtcgtttcgcacactaggtggcatacaggcagcagcaggtgttcatatccttgattttgagaatttcccctcaagtatgtggcagtaaatacaacaagacactctatgtattaatgtctccattgtcttaaccctgttccaaaacaaaattcacctcctttctttatgtgaatgtattctccataaaattccagtatttaaaaagcagtttactgttctgtactttctgttgtatcacaatcaggtaaaagtcactttaaactgaggaaacggcaaattgtgttttaaagctctttgtatttctccagtttctgaccttgtaaatttgtatatatgcactaataaagctttttttataa

SEQ ID NO: 408691 - DNA, 1559 bp, Homo sapiens
gctgaagatgtgaatgaagaacaagattactatcctctgccagcagggatcatagacggtatttctatgtaaacgaacagtcgggcgagtctcagtgggagtttccagatggtgaagaggaagaagaagaaagccaagcacaagaaaatagagatgagactcttgccaaacagaccttgaaagacaaaactggcactgattcaaattcaacagaatcctctgaaacttccacagtcggaattgagatgggcgattggcaggaagtctgggatgagaacacgggatgttattattattggaatacacaaacaaatgaagtgacttgggagttaccccaatatcttgccacacaggtacagggattacagcattaccagcccagttctgtgccaggtgctgaaactagttttgtggtaaatacagacatatattctaaggagaaaacgatttctgtttccagtagtaaaagtggaccagtcatagccaagcgagaagttaaaaaggaagtaaatgaaggaattcaggctctctcaaatagtgaggaggagaagaaaggggtggcagcatcgctgcttgctcctttattgcctgagggaataaaagaagaagaagagagatggagaagaaaagtaatttgtaaagaggagccagtttcagaagtaaaagaaacaagtacaacagtagaagaagcaacaacaatagtaaagccacaggaaattatgttggacaatatagaagacccttctcaggaggatctttgcagtgttgtccaatctggagaaagtgaggaggaagaggaacaagatacccttgaactggagctagttttggaaaggaaaaaagcagagttgcgagccttggaggaaggagatggtagtgtgtcagggtctagtccacgttctgatatcagccagccagcatctcaagatggaatgcgtaggcttatgtctaaaagaggaaaatggaagatgtttgttcgagctaccagtccagaatctaccagtaggagttctagtaaaactggacgagatactccagaaaatggagaaactgcaattggtgctgaaaattcagaaaaaatagatgagaattcagataaagagatggaagtagaagaatctccagagaaaataaaagtacagacaacaccaaaagtagaagaagaacaggatttgaaatttcagattggagaactggcaaataccctgacaagtaaattcgagtttctaggcattaatagacaatccatctccaactttcatgtgctgctcttacagactgaggtaagtctttttttttttttttttgggcataaacagttaagtttttggaatgaaatgctgtatgtgttaacgattctgtcttgcttacattttaagcctaaatttaaatttttaacccttgaagaatatttgagccgacaatccaggaaataaaactgtgttaaccaaagcacagtaaatagacttttttctcacaatttaaaattatattatcatggtcagatgaggccatgtaatgttgaagttactttgtttaatattaaagcattataagtc

SEQ ID NO: 408692 - DNA, 262 bp, Homo sapiens
gcgggaagctgaaaggctggcccgagtcttgcaggagttcgcaatccaggcggggagttaggaagtgactcttttttaagggggagctggacagctctcgtcggccttcaccaagcgcccacttcgtgtccggcctcaggccacacaaccagaagggcccgggcctagaagcccgagggctcggggtaacgaggcgacgccgggcggcggggaggaggccggggaccgccggggttcctgcaggcctgggacggcgggcctg

SEQ ID NO: 408693 - DNA, 319 bp, Homo sapiens
cttgaacccaggaggcagaggttgcggtgagctgagattgcacgattgcactccatcctgggcaacaagagtgaaactccgtctcaaaaaaaaaaggtggtaaagctttccttaataatttgctttatttcaaaagcatgtaactttaaacttgctacttatatgttcatctttttctgaaatgtactaactcatacttcctattggtgtgaaaatgtttgatgtggcttaaactctgtgactgaataacactgttttaaatacttgtaatatcacatgagctacagagcttcagccagaaaatgttagctatttaatg

SEQ ID NO: 408694 - DNA, 447 bp, Homo sapiens
acaggttgatgggtgcagcaaaccaccatggcacttgtatacatatgtaacaaacctgcatgttctccacatgtatcccagaactgaaagtataataataaaaaaataaagatacattttcttgcctagaaccttgcttctgctaagattactttcaaaagtaagatttattccaagggtaagaataatgaactgtagtgataccagcattcccagaactatccgtggtagaagctaactggcatgtttgaagactgcaaggctctaggttgagcagataatttattgtctaaatggagctacttctaagagtgaaggagggtgttaatctcactggagcaagaagcatacataccatcctggaaaaacctggacatagttgaccatcactagacagtccctaaaattccaccttttgagattcacttcataaggggtgagaagatt

SEQ ID NO: 408695 - DNA, 405 bp, Homo sapiens
tgctacggatggtactccaagcttcaggtgtgttgagactagcaagatagtaggtaaggacagcatgggggtggggtgcagtgtgtgctggacgatgaaaagctgagaaaacaaagaggaggatcccacaggcaacagctctcagaacacctctatattcaccatatccaagaaacttgatggtatatacatctcttcagaggacaccaaaatgcaaaatcaaaatcttacttcatctggacctcacctgctggaaagctggggaaggagttccataacatgacactgaggaaaaaaaagcaagaaaaagcactctgaagcccagacttgggggaagactgcagatttctggctatcatggtagtgttcaccatcaaaaccctcagatttcagacgaaaagaaca

SEQ ID NO: 408696 - DNA, 382 bp, Homo sapiens
aggcactgctcaaagaagaaagggacaccatccctagtttcaaggcgcgacttgtcctgcccctgatggctgtggctgatccacgaggaagtaaacttggactgggaaaacacaaactggtctcggcctgcaacatacatcccattgataaatgtattgataaaccctaacatcgataagacatctgtctggacctttcaggtctgaacagacagggcagctgctgagaacctggggaaactgacaatccgattcctctctgtgtctgaaccttccctcttctcactgcaccaccagtgcaggcctctttgactcacacaagaccgtttttttagcacaaggtcacctcgaggtcaaccgtcaaccccaatgctacagaaac

SEQ ID NO: 408697 - DNA, 527 bp, Homo sapiens
ctgcagcctcaggaaggtgggctggctctccataccccacccaggtgggcctcagacacccagggaggtgctgggatggtgatgggttctcctatttacacaagaacaaaggctcctgctccacacaaagccgtggtgatgagcgtggagaaagaggctgccaggctaatttcagttccagcacaattaaaacggctctgataatgcaggagacaactgtcagcccacaaataggatgtgtcgaggtggatgctgccctgggcctgcctcggtgtctgagagcagctgcctggtccccaccgagcccctaagtcagcaccggtctcgtctgtggcccacctggggtccgtggggactctccaggtgggcgacagagcacttgggcccccagtggctgggggcatctgtgagccacagctgctctctgctgctttctccccatgcccggggctagcaaagaacccccctagcctctctggggaccctctctctgcccagtgatgccaacagctggagcaggccaaccc

SEQ ID NO: 408698 - DNA, 688 bp, Homo sapiens
tgagcaggccacaatgtccaggtcccactgacaaggcccctgttgatcaagccataaggtcgaggtacccactgaccaggcctcagctgaccaggccacaatgtccaggttcccactgatcagacccccgctgaccaggccacaatgtccaggtcccactgacaaggcccccactgaccaggccacaatgtccaggtcccactgacaaggcccctgttgaccaagccacaaggtccaggtccccactgaccagaccaggcctcggctgaccaggccacaatgtccaggttcccactgaccaggcccctcagccatggtgctcaaagtccgttcctgtggcccccactcagcccacagactctcccctccccacatctgcactcacaggccaggcccctgagggtctttttgggacagggcccctcctccaggacacagggagggacagctggccttaggctccaggcgcccagcttcacactcgccccccacaaggccctatgggctcatctcaaagggacagtaaattggcatggcaccacctggaccttttgctgagctgcagtccagggaatggagggatgtttgtcacaccaggcatcctttgtgctaggcatcccaagcccttcccgtggagtctggatctagagacacagtgcagatgcggtgaggtgaccagcccaggacc

SEQ ID NO: 408699 - DNA, 381 bp, Homo sapiens
ttcgaggtaggtattaacatctccattttacagatgaagaaagtgaggttcagagaggtgaattcaagtgcccaaggccacacagtcagcaagaggcagagttccacctggaactcagtctgtctgactcccaaggccagtgtcctcccacctaagctgcctccctccctagcattggcagagagatgggcaggtggcctggaggatgggcgctggggcaggcgcggtggttcccaggcctgtgtctctctcctgtaatcctccagagatccctgggccagcctttttctcagccagggcttagcaacttttcctagaaagggccaagcaggaaatgtcttgggctttgagggccacctctggtatctgtcgcatattctt

SEQ ID NO: 408700 - DNA, 414 bp, Homo sapiens
ctgcagtgagccgcgattgcaccgctgcactccagcctgggtgacagagtgagacctctgtttcaaaaaaaaaaaaaaaagacctgatgattcttgacgaacccccaccctctgcaacatttccaaagctgcagggtcgcctccgcccacccttacctgccgtgacccttggcctccaccacgcccacggattccactcttgccagagaagggccgcggaccccgtgtctctttcccacctgctccccccagcaccaggggacaggcccccacctgctctggcagccctggagctgcgagtgggccctccctgtactgtaggcccagcgtccatccaggccctgagggtcgccgtcgccacggcctccgcctggcatcacctgccagtgccccgcccaggggcccagtccccgt

SEQ ID NO: 408701 - DNA, 384 bp, Homo sapiens
catgttggcatgagcctgtaatcccagctactagcgaggctgaggcagaagaatctcttaaacccgggaggcggaggttgcagtgagccgagattgcgtcactgcactccagcctgggcaacagagcgagactccgtttcaaaaaaaaaaaaaaaaaaaagagcctagctgcacacaggggaccctcgggcgctcagcagtgatgcgacagttcctaagaggatgcaccaacgtatgtgggtgtatccaggcagcgaagtggttaatcccgccagaagggaagcggtggggacaggactccgacagggatcgccggacccagagcaagcctggggttgagtgggtgggtgggtgagtggaagcattccgcgttgggggcggtgt

SEQ ID NO: 408702 - DNA, 324 bp, Homo sapiens
gggaggccaaggcaggcagattgcttgagcccaggagttggagaccagcctgagcaacgtggcgaaaccctatctctacaaaaaatataaaaattggctgggcatggtggcacgcacctgtagttctagccattcgggaggctgaggtgggaggattgcttgagcttgtgtggtggaggctgcagcaagctaggattgtgccactgcactccagcctgggcgacagaacaaaaccatgcaaaaacaacaacaacaaagttattcagatgccttagcctgggaaagatcatggtgcccaccgtccagctgtaattcaagtaaaaa

SEQ ID NO: 408703 - DNA, 478 bp, Homo sapiens
tgaaactctgtctcaacaacaacaacaacaacaaaaaaaaaaaaaagaagaaaaagaaatgatggaggcaaataagtttaactcatctgaagaggaatttaggccaggcttggagataggtaggaggatatattctagtaaagtgattcttaacttttttgggtcattcttctttagaaaaaggtacttggtacatctacaatattgagtctggggccaggctctggcaccacagagcagaaagggcactttgaaggcgatatacctgagtcgattaggaaagagcctactggaaggcaggaggaagggggaggcagtcagtacttgcagagcccttctagtgcctgactctgtgatctggcaggaactgaaaaaagcacagggcctgctgcgggtctgagactggtgggcagccttagaggttccaggagtggaatcatctgtgactcagtgtgaagtcccacagggctggggcttt

SEQ ID NO: 408704 - DNA, 386 bp, Homo sapiens
gatttgaccaggtgtgtcattcacatagcaaaaagactggccctccaagcctaaccttttattatacaaatgaggcttctacctggctgtgccatgacacctgcacatgtggggacaaagaaaagggagcaggaggctgggcgcagtagctcatgcctgtaatcccagcactttggtaggccgaggtgggcggatcacctgaggtcaggagttcgagaccagcctggccaacatggcaaaatcccatctcaactaaaaatacaaaaattagccgggcgtggtggtgtgcacctacaattccagctactcaggaggctgaggcaggagaatcgcttgaacccaggaggtggaggttgcagtaagccaagattgcaccactgcattcc

SEQ ID NO: 408705 - DNA, 580 bp, Homo sapiens
ttaccctaaaatctggctcctggcactctgggtaagagagatgggagtaagaagactcatgcctcaaggtcaaagttgggtgacctagaaggacttctctttaaccctgattgcaatgaaagtagttttcatccacagagagagttctcacggtatttgttgatttttcttccattttgtcttggggcaggcactgagttgaacgcttttggactcacctcttcctgccttgtcccagcttttcctttatatgtgtttcaggcatttgaaagtttaggaccaggcacagtggctcatgcctataatcccggcactttgggaggctgaggtaagaggattgcttgagctcaggagtttgagaccagccagggcaactgacctcacctctacaaaaacagggcaagaccttgcctcaacaaaaaataaaaaaattagctgggtatggtggtgtgtgcctgtggtcccagctacttgggaggctgagatgagaggattgcttgagcccaggaggttgaagctgcagtgagctatgattgtgccactgcactccagcctgggtgacagagcaaaaaaaaagaaa

SEQ ID NO: 408706 - DNA, 388 bp, Homo sapiens
ctaatcatgtgatgattcaatgcataatggtttgtgacaaattttagcattttgctcttaccattatgtgtgattcaaaagtaagcacaaatctataataattggtatttaatgtgactaattcacttttccctagtgagtctacagattccttgagcagatctgtcttctaaaccttagttacttctcccacacaaccacctaccccattgcccattgtctgaattatcttacacaaaacaaatgctccatacatggatttgacgtcatcttgcttctgtggcctcaataagtgattgctgcttccagatgatcagtatctgaggttcccccttggtagccaatgaggaatttcataaaagcagcagcttgagaagaggacattttt

SEQ ID NO: 408707 - DNA, 362 bp, Homo sapiens
ctcaggaaaccttcagtcatggcagaaggcaaaagggtaagcaggcatgtcttcacatggtggagcaggagagagagagagtgaaggggaaggtgctacacacttttaaacaatgagatttcatgagaacatattcactatcatgacaacagcaagggggaagtccaccctatgatccagtcacctcccaccgggcccctcctccaacattgggtattacagtttgatatgagatttgggtgggaacccaaatccaaaccatatcactggcttatgtataaaagggaattttatgttttttttgtgcttttattttaaattgaatgcaactttggcattgaaaaaatttttctgaatatgga

SEQ ID NO: 408708 - DNA, 466 bp, Homo sapiens
aggaggtgaccagctgcctgcctgcaggggcttgggtggcctcccctgctgctggtccctgtgcccctcctccccgtgcttgctgtgagggtgcagctgtggcggtttcttttctgtgtctcctgcattgctgttacctccataatgtgaaatgtaaaccatgtgaatgaaaaggaagctccgtccctgtcgtcctctccaggccggtgcgggaaggcggatgtgtggctcatcccggacgctggcttctcttccctcttccatacgcgcacacccgccggggtctgctcaccttgccttctcagccttgtcagtcgggcagtgtgctaaggttaccaggaggtgttctgaagcatcttttttgagacgtgatgtcgctgtcacccaggctggagggcagtagcacagtcttggctcactgtagcctcgacctgtgctcaagagatcctcccacctcagccccctg

SEQ ID NO: 408709 - DNA, 438 bp, Homo sapiens
tctgtcgcccaggctggagggcagtggcgcgatcttggcttactgcaacctccgcctcctgggttcaagagattctcctgcctcagcctcctgcgtagctgggattataggcacccgccaccacgcccggctatttttttattttagtagagatagggtttcgtcatgttggccatggtggtcttgaactcctgacctcaggtgatccactcacctcagccttccaaagtgctgggatcacaggcgtgagccaccacgcccggcctagtcaaggcaattctgtaagggaggagcaggaggtagacacgcttgctccagttgccattcattcattcactcattttttcaggcaccggagaggtcattcagtgcatttggttttgtggccctatggcatatattgattgtctccaaatgtcatcatttcctgagcacagc

SEQ ID NO: 408710 - DNA, 400 bp, Homo sapiens
tgttatttaaaaattaaagcgtcttgcatctgctctttttcaagaatgttagtaatagccattcctctgcccttcctcaccccaacacgagcttgtattagaaacaaaataaggaccgggtacagtggctcacgcctgtaatcccaacactttgggaaaccaaggtgagcagaacatgaggtcaggagaccaagacgtggttaacacagtgaaatcccgtctctattaaaaatacaaaaaattagctgggcatggtggcgggtgcctgtaatcccagccactcgggaggctgaggcaggagaatggtgtgaacccaggaggtggaggttgcagtgagccgagatcgcgccattgcactccagcctgggcgatagagcgagactccgtctcaaaaaaaaga

SEQ ID NO: 408711 - DNA, 486 bp, Homo sapiens
caaaataaattatttgcactagaatgtgtatctcagcatttacttttaggagaacccaaactaaggctacctctgggcttcctggaaatctagagggaaactaaataacataactgttatatttagaaagtagaaaataaatcagttcttcaattgaggcaaagtatttctgcctcccctgcccttccactctccattccaaaactggacgggcccgcggtgtggctcacacctgtaatcccagcactttgggaggctgaggtgggcagatcacctgaggtcaggagtttgagaccagcctggccaacacggtgaaacctcgtctctactaaaaatacaaaaattagccaggcgtgatggcaggcgcctgtgatcccagctactcaggaggctgaggcaggagaatcgcttgaatccgggaggcggaggttgtagtgagcccagattgtgccactcaagcctggatgacaaagcgagactccatct

SEQ ID NO: 408712 - DNA, 286 bp, Homo sapiens
ataaaattcaaggcaaaaatcagtaaatgggataagaaggatattttatattgataaatagtacaccaacatgatataacatatataaaattttatgtactcaataatgtgaattaaatgtataaagcaagtatttaagaaaacttagggacaatatcacaaaactattatatattcatgatgggaaacaacaacatacttctatcagaatgtcacagatcaattatacaaaataattaaagacatagaggagtaacaaacttgatttttgtatttatgggtgtat

SEQ ID NO: 408713 - DNA, 427 bp, Homo sapiens
ggagtgtgccttgtgctgggatgggctcctgtccagggttggttgctgcattgagcactgagctgccaggataagctccagcttcctgcacctctgaactggaataagttgtccacttattccagttcagtgttgaagatggctggagcccatcccagtagctcagggcagaaggcaggaaccaaccctgggtaagatgtcatgtcattgcagagctcactcacacacatccactgatataatttgggtctgtgtctctgcccacatttcatgtcaaattataaccccagtgttgaaggttggacctggtgggaagtaattggatcatgtgggttgatttcctcttgggtgctgttctcctgatagtgagtgaggtctcatgagttctggttgtttaaaagtgtgtagcacctcccaccttgctctc

SEQ ID NO: 408714 - DNA, 403 bp, Homo sapiens
gagattgcaccactgcactccagcctggatgacaaagcaagggtccatctcaaaaaaaaagcaaagaagaaaaagtgaccaatatacaataaggtacttaacacccttgcagagtagagaaatacaaattaactataactccatcagaatggctaatattaaaaggactgaccaggccaggcctggtggctcacgcttgtaatcccagcactttgggaggccgagatgggaggatcacctgaggtcaggagttcgagacccgcctggccaacatggtgaaacctcgtctctactaaaaatacaaaaattagccagccgtggtgatgcgcacctgtaatcccagctactggggaggctgaggcatgagaattgcttgaaccaaggagatggaggttgcagtgag

SEQ ID NO: 408715 - DNA, 405 bp, Homo sapiens
cgatcttagctgcctccatgggcccttcttatgggctactgatggaatggtggggagcaaatccgcagctggcccagatccagcaccactggacccaaacctgtcacctgctgcgagtgaggaaggaggaggatctactgcctctgtttcccctggttgctcagtccacagggtacagacgcgaggtgtctgagctggaaggtgatgtccggagccccagtccaacacctcgtggacctgggtcaacctggctcagcctctacgagctgtgaggccaccgggaagtctctgaccctctctggacctggctttgtatctgaaacgaaaagcacagctctctcgcgggctggcagaggaggtgccgtcctgagctggcacctggcttccatgcattctcccgtggaa

SEQ ID NO: 408716 - DNA, 167 bp, Homo sapiens
aggtctggaggcagaaaaccacgttgtcttctctgcctaaaaagcaacaccacatcttcatagacaaggttggctatggagtagactcacagcattccatgataactagttagaatgcagcagtgttccaaatgggccaaaccttgtctagacaggagcaacaggca

SEQ ID NO: 408717 - DNA, 1720 bp, Homo sapiens
ggcaagcacacatttaaaaaaatgaaacagaaaagaatacaagatataagattgcatggcacagggtaaatgtaaagatttttcttgaatcaaccttttgttttaattattcatacatatataaagtatacataagttgcaatacaaagtgtatttttactgggggccacagtcaaaaagtttgacagccactgttttatcctcactaatgctgttttacagtcactggtgctgtgaatggatgagttaggaagctgacatggcagtccagataagacatgggtcatgaactagagcatttactacatgtggagcgaagaggaacagcctccaaaaacatggaaaaagcaaaagaactggcagaaactgtaactgactagatgttagggaaagaagaaaatgtatacaatgacttccagatttccatcctcaagtgttttatgacttgacaagcacactgtcagatacactaaatgaacagagatcctctccactttgttctactccacttcttccacacaaaccctgtttactttatgcccttttccctggtaagtggagttcagccaaaccagcgctcagaaccaccactgaggaagtgaagagatcaagctcagacaagctgctttcgttcctgtcatttcaccaacatctccatacatttttccagtttggttttcctatctacttccttcctatatgggacttaacacaagattcttaactttcatgtatgcagtttatactagaaaacacacaaagagaactacactgaagtcaacattaaggataaatgctaaatactacccaatctttccccatcttacaactacttacctacataaccctccctctaccctttactctcaaattattatattctttatccaaaaacatttagtgctttcttcaacaacccacctcgtgcttctgcttattgaaatcctttatagccctagatcacataggtcacattttacccatgaaacctttctaaattaccttttacacatgtaacactgcaggatcgttggctatctcttggtacctaccccaaagccttgaggagctgggctgggtgggcacagtggggtaacttttagattgtggacttagcctcaaggttaccagacaggagctggctgttaggcagaattgaggtgcctgaattgggcaaacctctcttcaactgttgggttttgccagggacgaaacccttgctctcctgccatgtccacgggtgtttggactgagggtgttggctattctggacgaagactcctagttatgtgccatggtttccaccctctgctccacccccagccttttctgtaccaggctgggacccccagtcctggagccccccaccttcttgtctcatggctggcactggaggctgctgttggccacctgctccatccagcgcctcccctccctccatgttccctctctgcacccttgttcacctgttgccccgcttccattctccccattcctctctgccgttgtttacctggagactcaggagagattagtgcacctgttcaagttatcacctttaagtggaaattagctttcatttagaaatgtgtggcccagggcaggggcagtggctcactcctgtcatcccagccccttgggatgccaaggtgagaggattgcttgagcccaggagtttgagaccagcctgggcaacagaccgaggccccgtctctacaaa

SEQ ID NO: 408718 - DNA, 1144 bp, Homo sapiens
aggcagcgcgcgccgcgagctgtcgcgtctggtcgtggtctggcggagctgcggttggcttgtggcgtctccgccgccgccgccctcccttcctcttccccatcttcttctctcggtcccgggagcccccgcccggagagagtcgcggttgctgatcgtggtgcttgagtagagccgtggttggtgacagcatgacgagcgaggtgatagaagacgagaagcaattctattccaaggccaagacctactggaaacaaatcccacccacggtggacggcatgcttggggggtatggccacatctccagcatcgacatcaacagctcccggaagtttctgcagaggttttgagggtaggcaggtctggcgtgctctccaggagaggctgtggctctggtggcactgccgagtccatgtggggtgccaccttttacacatgtaacactgcaggatcgttggctatctcttggtacctaccccaaagccttgaggagctgggctgggtgggcacagtggggtaacttttagattgtggacttagcctcaaggttaccagacaggagctggctgttaggcagaattgaggtgcctgaattgggcaaacctctcttcaactgttgggttttgccagggacgaaacccttgctctcctgccatgtccacgggtgtttggactgagggtgttggctattctggacgaagactcctagttatgtgccatggtttccaccctctgctccacccccagccttttctgtaccaggctgggacccccagtcctggagccccccaccttcttgtctcatggctggcactggaggctgctgttggccacctgctccatccagcgcctcccctccctccatgttccctctctgcacccttgttcacctgttgccccgcttccattctccccattcctctctgccgttgtttacctggagactcaggagagattagtgcacctgttcaagttatcacctttaagtggaaattagctttcatttagaaatgtgtggcccagggcaggggcagtggctcactcctgtcatcccagccccttgggatgccaaggtgagaggattgcttgagcccaggagtttgagaccagcctgggcaacagaccgaggccccgtctctacaaa

SEQ ID NO: 408719 - DNA, 384 bp, Homo sapiens
aaacctttcccagttttgagctgtttttccccctcttttggtgggaagagagctgaatgcttgagttaatcagatattgcagaaaagcaatggggctgtgtccagccggagggaggcacacagtgtgtctggggcacctcatgtgtctcaggtgcctgagttatctggggtttctggggtgtctggggttcctggcattgactggggtacctggagtgtctggggtggctggggtgcctggagtgcctggcatatctggggtgccttttgtgtctgtcgtgtctggggtgcctggggtatctggggtgccagcatctaggcagctgtgggcaggcccagagccactggagcacagaggacatttcagcccaaatgcagaggaca

SEQ ID NO: 408720 - DNA, 419 bp, Homo sapiens
tctctctgaagcagagggggctccctgaggtcagggcctgagctggcttaactcagcacgtcctgtgagcacctgtgccaggactgccagatttagtcaataaaaatacaggctgtccagggaagtttgtatttcagagaaatggtgagtcatgtttttttagtatactccatactaaagactgtaatagttcagggcgctggctgagccccctgtaaacttggcacctggatctaattctggtcctgtcccagcccactgggctcaggaacctagcaaagcacagatcccactgcccgatacccgttgtgggtcccgccaccgtcagaggtttacatgtatttggtgtttatgtgagattcagatttaacttggcaccttgaatttcacccagcagccctaacccaagcccctccttt

SEQ ID NO: 408721 - DNA, 1321 bp, Homo sapiens
ctacatcccacatgaaagattaatatcatcaagtaagaaaaatacatagtttaaactacaatgctgaaaatataaaaggaacctggtagttcaatggggatggagaaaacagagcattcctctgagagcagagatcttgtcattattgcaattaatgcccaaacaggttaaatgtggaagaaagtatggaggaaataaccccagccttcctcataccactggatttccacatcaccttttaacttatgcttgagctcccttttgagaaaaaatatttatatgcttatatatatatatatgtatatgcttgagaaagtggtttttcaagatgtatgtgtacagtacacacatggacacgcttcagtcctctgacttcccatgtgctacctcatgtgtttctcttctcatgaggatttgcaatggatagttgtacaacctggggactgtcagtgactcattggtatcagcatatgctaaagaagctcttgaatccaatcttgaaacctgatctcccttcgtcaacattccccaataccaaactggcccgtttacccatacaaatgcacagtaaagggaagaacagcggtatttttcctagccaactgactctatcatttgtttaatgtttgctggtttttttctggttttgttttgttttagagcaggggtgggagtggctgtaacttcacaatcctaatacagtaaatgttttgcatcttccatgttttatgcaaaaacagacatttaaatcaataaataattgtgccctagactgaaggttaatgtttaggagaggaaaaaaattgttggaattttttctacatttttttgtgaagaatcttttttggaaaggaaggatacatatttttgttgtgtaatattttctatttttgaatgcattttattggtacaagactgtttttttggtgaagacattatttaaaaaaaaaaaaagaaaaaaactaatcgaaaagtttgcccttaaggatatgctgcagttttgaggttaaaaaaaaattactgattcaagatgcgtgttaaaagttgggattatattgttgttttttgtaattgttacaagaagaagtttgtacccactgctgtttattttgtttcagatgagtaagtaaagggattgttcttgttttattctttttttagagaaaaaaagctatttatgaaatgtcaaaaacactggactgtgagtttaagtgtggaagcattttaccaccctgtgtcttcaaccaattatgggaaaccccttttctcttccccctaccccctgccttagccttgccaaatgagaaaaatataacagctg

SEQ ID NO: 408722 - DNA, 374 bp, Homo sapiens
aaacaaattggctatgtaacaaatttgtgtgtgagtgtgtatatatatatgtatatgcttatatatatatatatgtatatgcttgagaaagtggtttttcaagatgtatgtgtacagtacacacatggacacgcttcagtcctctgacttcccatgtgctacctcatgtgtttctcttctcatgaggatttgcaatggatagttgtacaacctggggactgtcagtgactcattggtatcagcatatgctaaagaagctcttgaatccaatcttgaaacctgatctcccttcgtcaacattccccaataccaaactggcccgtttacccatacaaatgcacagtaaagggaagaacagcggtatttttcctagc

SEQ ID NO: 408723 - DNA, 430 bp, Homo sapiens
tcgtcaacattccccaataccaaactggcccgtttacccatacaaatgcacagtaaagggaagaacagcggtatttttcctagccaactgactctatcatttgtttaatgtttgctggtttttttctggttttgttttgttttagagcaggggtgggagtggctgtaacttcacaatcctaatacagtaaatgttttgcatcttccatgttttatgcaaaaacagacatttaaatcaataaataattgtgccctagactgaaggttaatgtttaggagaggaaaaaaattgttggaattttttctacatttttttgtgaagaatcttttttggaaaggaaggatacatatttttgttgtgtaatattttctatttttgaatgcattttattggtacaagactgtttttttggtgaagacattatttaaaa

SEQ ID NO: 408724 - DNA, 2439 bp, Homo sapiens
  misc_feature (1612)..(1612): n is a, c, g, or t
agctataaaggacattcttgggacaattgacgtttagatatggattgtggggttcgatcatagtatcatatcaatgcaaattgtcctagctctgataagcatatgtgtttatgtaagagagtgtccttgtttttagggaacaaacactgaaatatacaatagtagagaggcatcatgtctccaccatactctcagatggttcaggagaaatatgcgtgtgtctccgtacatattaatatagagagaatggtacagccagtgggacaagttgtaagcaattggtgaatctaggtaaagggtatatgggaaattgcatcaaaattaaaagttatgaaaatgggggagaaaacccagttcttctataaaaacagcctccagcctctccctccagcacaacctgtccccacacgtggggcacccggcacccatgctctggctcttgtctctctgggtcttagtcccacttagcaccccacacccaaaggtcatgttttcacagatgtgtaccctcaagactaaacacacacttgaggcattcatgtgactatacatatttatggaaaaagaaaattcttgggctcacaaaactgaacgctccagggtggactgtctcaggtggccttaatcggggtgctgacaacatccagacgagcacgcaggcttctctccctgccacagcggtgccattctccaacggactctgccgccgtggctgcaagatggtggcagcagctccaacccctgcacccttttgtggccaagtccagtgggaagaatgtgaggtcttcttccagaagcttctgcagattctcattagcttcagctgggtcatgtgtctgtcatccctgacctggcctctggggtcaggaaggcaccatggtcagactggccaggcctgagccccaagccccaagtccaacctcttcacaaagcacagctggctggggcagagcggtgcccccagtggaaaatcaagatgcagtttcagaaggatggaaatggatgctgggtggcgaaacggcagaaacccaccccggcccacgcccttgcctgtccaaaatccatgcacatgcttcttcccatgctccctctgggggaggtgtgctaggcagcacagatgtatgcacagctccccacagatgccaccctcatccttggaaactgtcaatgcccatgaatttgttacctcacgtagcaaaagagactttgcagatgtaattaaggctgctcgtcagttgaccttaaaatagggagagtgtcttggatcatccacatgggctcagtgggtcacacaagcccttaaaagcagagaactttccatggctggtggcagaggtagaaaggacattggaaagagacagcatgggggaaagggagatttaaagcttgggaaggaaggatggaaagcgcgactgctgctttgaaaacaaaggaagcctcaggccacgtagcaaagaaatggagaccccaggcctgcaatcataagcgactgaattctgctcacaaccctaatgagcacctccgggaaagagcccagcctgccaacacctcgattttgccttgtaagcccctaagcagaaaatacagttgaggcactctctgcccagacttncagtgcacagaaactgtgatgctaaatggatgttgcttgaagctgctcagttggtggcactttgttacagcagcaatggaaaatgaatactggaggtaacactgtctctcccagtgacaggtccggctccaggagctggaccccagtgaccgtgttacagtctaggcttaaggcccccctcactcccaacctcacctgtgcagagagggaaggaaaagtgccatgtcaacccccagtaagggaaaggaggatgggagacccctagcctgcagcacatccaaagccctgctagaaaaatactgagaaatgttagacattgagctaccacaggacccaggattacaactcctgggtatctacccaaggcaaatgaaaacatgtgtccccagaaaaatttgcacacaatgttcatagcagcattatttataataattgagaaatgggaatagcccaaatgcccatcagctaatgaatagataaacaaaatatggcatagctatacaatggaatattatatggccctaaaaagtaatgaagaagccagacataaaaggctttgtgtgattccatttccagacagaaagcagattagtagttgctgcaggctggcgggagggaggaatggaaagtggctgctaacaggaacacggtttattctgggggcaatgaaagtgttctaaacttagatgtgatgatggatgtacaactgcgtgaatatactaaaaagcattgaatggcattgaatggttcatcttaaatgggtgaattttatagtgcgtgaattatatagataaagatgtaaaagatttgtttaacatcaataaaga

SEQ ID NO: 408725 - DNA, 677 bp, Homo sapiens
gtagagcctggctttctggtatgggtgcacaggtgggggagggagacgtaggcgtcgccactacccctgtgtggacctggttagccgcttagttcccagagttggtaacccgagaagatgagccttaagaaaaaaaaaagtatcaggttccgtttgccgccgagaggtgagtggtggtgaaaatgaatttgcccctttcccctcagaattgtttacccttttatttgcaaatgaatcgttctgctgccttcctcccgccaccaaacccacacccttgcgtagattgcactttgaggcctctttggtgatggttttagctgttagagctcttcacagccatccaggctcaaactaaacttcagatttaacgggttttctgtgttagaaatcttggaattgtaggagttggaacgctgcagccaccctcccccgatgccccaaacagtagcagttcaagggggaaaaaagaaaaaaaaaacaaaaaacaacaactttgaatcctttctgcagttaaagccttaaacatttcagaagtccacattatacatttttctgtatttgtgactgcataaagagacactgttgaggtcagtacaactttatgccaagaatctaaaaacgctgtgagtgtaaatttactgcttatgttcggaaatacaccgccaagattgtcataa

SEQ ID NO: 408726 - DNA, 2701 bp, Homo sapiens
  misc_feature (704)..(704): n is a, c, g, or t
  misc_feature (925)..(925): n is a, c, g, or t
gatgcagcagctggctgaaggctccagagggttccccgaggtgggactggcctctccccgtgtgtgtgggcaccacagtccctgggcaagcagggtgctctgggaccgcacttcatcgagctcacgagccagctaggctctgtttgtgatagaaaaatcaagaccatgttaatgatcgtaataaaagctttctactgtcgttggggtggtgggtggggctgggaagaaactggtttgagcttttagagtttgcctttgtaccttagagatgtgtctcagggccaggcatgggacctgccatcgagggttcctccccgcaccctcgattttcctgttttgcttctctctccatttctgtccaggcctccgcccaattccacagtgaggggtggttaggagctatgggccgggatggctccttgggaagggaagtcgggatcccaggctaggaggaagctggcagccccgtccccactgggcccacagtgtgagtcgtgccttagagactccgggttgtcctgttctttctgggcttgctcatctccccccaaccctgtcccaccccacccctcccatacctccactgctgaagttcctccagcccctctgtctgccttgtgaaggtggcaggggccaggtctgcctgacataggaccacatcctgtccctccctcacctggagcagcacagcagagttcaggcanggcacagccaggccctggtcagcgctgaatggcagaggaaagatcttaggaaaggagaggaatcgccaccccctcctgccaactgggatgactggggagggccacgctcattcaaagctgaatcagaaaccagccgtggaacagaattcctgccgagtcttccagggccgctcctccaccaccctcccccaggttgaggcactatggcaccctcatcaggnagaggtttggggtccccttgttgtcactgctggctctgccaccccatcttgttcatggcagctggttgggtcaggtccatggtagagccaggcccttcccagggctgcggagaaaacctgctctcttctagtcgggcttctccagaagccagtaatcagaaaggatgtgtctcctgctccaactctgcccccgagacagctcagagccagaaggcaccccgagacagctcagagccagaaggcaccccgagacagctcagagccagaaggcaccgaggactctggcccaagtggggaagctgaggcagagagcagagggggtcatgcagtgagtgggtggggtgcaggagacagagaggggctgggggcgtggggtgggggtgtctgcctcttccctccacctcctcccctccttagcagctgaagactcagccctgaggtctggggcaatggaagtcaagacacccgacccctacatcctggggtaggcccgactcagcatcctgtcccagcttcagccccacactcatttctggcatagaagattccgccgaggcagctctttcctctcggggtctgccaggggtgcctcagctggttcctgctcccaggcctagccccgaagccttaggggccttctcagccttagccctgggtactggggtgaagttggcaggggagagcttgacacttcgcctccctgatggccatgctgagggacagtggtgaccctggtcacttggtgctggtgtaggggcctgtgcccttccagggccagtgagacagccttctactcccccgacccagagctgagtccgaggaccccaggcccacctcctggccctcttggaggtctgtgctcttacctcccagcccccaccctgcgggagagcagccccagcgcctcatctccccaaaggcggcagatgcttgattctcctgccctctttcttccttccctcgtatttatttatttatttattgcttgtgctaaagaccaaaatagtctccctctttagtgcacttgaagcgggagggcggatgggatgagccaggagcgaggaagacttggcccctggggagtgtgtgtgtggaggcgtgtgcctgtgtgagcctgcatgcatacatgtgtggtgcacacatgcacactcggctcttcatgtgtatgactgggttagtaatacagatacgtgatctatacgtgtgtgtgtgtgtgtgtgtgtgtgtgtgtgtgtatgcaggcggttatgtgtctgtctacccccaggtgtttccgtgtacaagtttcctgtgagggagggcacccacccatcaggttgggcactggcacaggtgaaccccacagtccccgaccctctgccctgattatgcacgtctgctcctgagtggagcttgtgttccaggatgagacatctggaggtgagcgtgtgcgtccggctcgtgtgtaggaggctgtgtgtgtgcccatgtgaaaccgtgtacttgagtgtgtgtctgtgtgcagcctatgcctgctgctcagagcacggtggccaccccctgagcctctgctggtgctgtgctgcgtggtccccacccagagggtcctggggggcggggaggagccaccgttgggaggcccctgtacggggtgtctgccctgcgtgagggcatagaatgtcaaattattttaaatggtgaaactggagagttttcatgttattttcaatacatagcagtatctaaagacgtaggcgatgagactagaccacattaaatgcattttgatctctttga

SEQ ID NO: 408727 - DNA, 2664 bp, Homo sapiens
  misc_feature (704)..(704): n is a, c, g, or t
  misc_feature (925)..(925): n is a, c, g, or t
gatgcagcagctggctgaaggctccagagggttccccgaggtgggactggcctctccccgtgtgtgtgggcaccacagtccctgggcaagcagggtgctctgggaccgcacttcatcgagctcacgagccagctaggctctgtttgtgatagaaaaatcaagaccatgttaatgatcgtaataaaagctttctactgtcgttggggtggtgggtggggctgggaagaaactggtttgagcttttagagtttgcctttgtaccttagagatgtgtctcagggccaggcatgggacctgccatcgagggttcctccccgcaccctcgattttcctgttttgcttctctctccatttctgtccaggcctccgcccaattccacagtgaggggtggttaggagctatgggccgggatggctccttgggaagggaagtcgggatcccaggctaggaggaagctggcagccccgtccccactgggcccacagtgtgagtcgtgccttagagactccgggttgtcctgttctttctgggcttgctcatctccccccaaccctgtcccaccccacccctcccatacctccactgctgaagttcctccagcccctctgtctgccttgtgaaggtggcaggggccaggtctgcctgacataggaccacatcctgtccctccctcacctggagcagcacagcagagttcaggcanggcacagccaggccctggtcagcgctgaatggcagaggaaagatcttaggaaaggagaggaatcgccaccccctcctgccaactgggatgactggggagggccacgctcattcaaagctgaatcagaaaccagccgtggaacagaattcctgccgagtcttccagggccgctcctccaccaccctcccccaggttgaggcactatggcaccctcatcaggnagaggtttggggtccccttgttgtcactgctggctctgccaccccatcttgttcatggcagctggttgggtcaggtccatggtagagccaggcccttcccagggctgcggagaaaacctgctctcttctagtcgggcttctccagaagccagtaatcagaaaggatgtgtctcctgctccaactctgcccccgagacagctcagagccagaaggcaccccgagacagctcagagccagaaggcaccccgagacagctcagagccagaaggcaccgaggactctggcccaagtggggaagctgaggcagagagcagagggggtcatgcagtgagtgggtggggtgcaggagacagagaggggctgggggcgtggggtgggggtgtctgcctcttccctccacctcctcccctccttagcagctgaagactcagccctgaggtctggggcaatggaagtcaagacacccgacccctacatcctggggtaggcccgactcagcatcctgtcccagcttcagccccacactcatttctggcatagaagattccgccgaggcagctctttcctctcggggtctgccaggggtgcctcagctggttcctgctcccaggcctagccccgaagccttaggggccttctcagccttagccctgggtactggggtgaagttggcaggggagagcttgacacttcgcctccctgatggccatgctgagggacagtggtgaccctggtcacttggtgctggtgtaggggcctgtgcccttccagggccagtgagacagccttctactcccccgacccagagctgagtccgaggaccccaggcccacctcctggccctcttggaggtctgtgctcttacctcccagcccccaccctgcgggagagcagccccagcgcctcatctccccaaaggcggcagatgcttgattctcctgccctctttcttccttccctcgtatttatttatttatttattgcttgtgctaaagaccaaaatagtctccctctttagtgcacttgaagcgggagggcggatgggatgagccaggagcgaggaagacttggcccctggggagtgtgtgtgtggaggcgtgtgcctgtgtgagcctgcatgcatacatgtgtggtgcacacatgcacactcggctcttcatgtgtatgactgggttagtaatacagatacgtgatctatacgtgtgtgtgtgtgtgtgtgtgtgtgtgtgtgtgtatgcaggcgaagtttcctgtgagggagggcacccacccatcaggttgggcactggcacaggtgaaccccacagtccccgaccctctgccctgattatgcacgtctgctcctgagtggagcttgtgttccaggatgagacatctggaggtgagcgtgtgcgtccggctcgtgtgtaggaggctgtgtgtgtgcccatgtgaaaccgtgtacttgagtgtgtgtctgtgtgcagcctatgcctgctgctcagagcacggtggccaccccctgagcctctgctggtgctgtgctgcgtggtccccacccagagggtcctggggggcggggaggagccaccgttgggaggcccctgtacggggtgtctgccctgcgtgagggcatagaatgtcaaattattttaaatggtgaaactggagagttttcatgttattttcaatacatagcagtatctaaagacgtaggcgatgagactagaccacattaaatgcattttgatctctttga

SEQ ID NO: 408728 - DNA, 905 bp, Homo sapiens
ctcagaacttatgacactgctgtgtttaaaagtttctcaactccaaaatattaagtcacctctattaagtgctccaagatttcaaagtgtatctacttttgacagttacccactttccttttcttatagttaagaggaaaagtctagttatttgaaaagccattggattttggtctgctttcataaagactttatccatccctatctatgagaaattaaactattgaccatagaatatttgtaaatacttcataaattccccattttgtcttacactttgcaacttcaacattcatattgatgactcaactgatactggactcaatggtagaaaacaagtttaactggggaatggaaagtaacccagctctccaccaacaaagccacagcctggaactgtgcttcaagatcttaacccggacattctccctttccagtatggcttcccccttccaaaacccatgaaccttccaaattaactggaactgatcattgctgcagttctctaattcatcattttcaaagtgtaatttgcagaaactagtccgtaagatggcccatgaaaataaggatcctgtgtttgtatatgatcttaaaatattcaatccccctcttggagattcatgagcatatgaaagactctgtaaaggtctgcagtacaggaacttaactagctgagcacacccccaaaatactactattactatttgtgttgataccacttcaaaaaactttccacttagtcctttagcttcccttccagccatccttttctattcctgcccagagtccagaacagttttcttaatggggaatgggggtggaacaaagaactgaagaacatcacccagaatgttctaaaaacatacataaacatctctcccatttcttgttgtcctactcct

SEQ ID NO: 408729 - DNA, 890 bp, Homo sapiens
tgaatcatttaaaattggaagatatgttaaatatccagcccagtcccctcaatttataaatgagggaactgaggccctctccaacacacagttcctgattgtctgctttgagccaaagccaaatccagtgaacaagctgcttaactttaaatagctattaaatagagcataaaagggtaaaaatcatcttaggtccatttctagctatctaggcattatccttcaatctagcagtccaccttttaggagttcaccctgagcatacacctccaacaatacgaaagtacagatgcacaggttattcattacatcagtatttgtaactttgcaatattggaaactatctagatgtccaagcatagagagtgattgaatggcctatggtacatatatacactggattactatgcagctggaaaaaaatggtatgagaatgatcaccaggaacggatacagagtgattttcaggataaagtgttaaagaaaaacagtgacatccaaaagaacataggctatattttatataagaaataagggaaattattaaaatatatgtacctttgcttattttacaaaaaaaaaaaatcaagaaaaataatccagaacgcaatgaagttggttatcctcaaggagtgggagagaataggttggaaaatatacagtaaagagaaatttttttctaagtataccttcttgtacagttttcacattaggaagcatcactctctatcctttcaatcctgaggttaactaaggaagtacatattggaaaaatataattaaatctttagagaggaaaaggattttagaaacctgaaaatgaaagcaaattgaaacaagtcaacctgattgtattttaaatgaatatcccaaccacaatcagtgcaaaa

SEQ ID NO: 408730 - DNA, 380 bp, Homo sapiens
tcacctcagatcaatagtttgagaacagcctggccaatatagtgaagccccatctctactaaaaatacaaaaaattagccaggcgtggtggcaggcactgtaatcccagctacttgggaggctgaggcaggagaatagtttcaacccaagaggcgaaggttgcagtgagccgaggtcgtgccattgcactcaagcccaggcaacaagagcgaaactgtcaatttaaaaaaaaagaattgagccagaataaaatgtatttaagggttattaaggggaatgtttctagcacataagtgtttgttccacgtcttattatattaggcaatatcctttcatgtaatatcagcttctccaagatagggatgtcaaagagaaactaa

SEQ ID NO: 408731 - DNA, 1054 bp, Homo sapiens
aatttattttgagacagagtcttgctctgtgggccaggctggaatgcagtggcctgatcttggctcactgcaacctctgcctcccgggtttaagcgattctcctgtctcagcctcccgagtagctgggattacatgcatgagctactgtgcccagccttggtttttcttttgagacagggttttgctctgtcacccaggctggagtgcagtggtgtagtcatagctcactgcagcctcaaagtcctgagttcaagcaatcctcttgcctcagcctcccaacgtgctgggatctcaggcgggagccactgcgcctggcccgaaaccaagctttcttatcccaagcgctgacctttatcaagttgacctaatcctttatcatctcctaagtgtccctcatgagtgatcacttcacattcctcccacatggagagctcacccactggggcctatttttcccattggaaaagtgtggttattggaagtttcctgtttttggaaagaacaggattggaggtgctctctggggtgtcctcctaccaagcagcctgttgaaggcctcgtggtgctcagggagcacgagcgacactcgccgtcgcttcagcttcatcttgaggccacacagcatctccgccacccagatctcctcaggctcaggggcgagcaccttccgtggctcctcctccaacgactcctcagattcgtcccaccactccatcttccttttccagcaaaaggacctatgcggggggctgggatctaccccaggggctgagtaaagaaaccaggccacggtgtaatgcttctgcagttgatcacactagagcccgacccaaaaccccaaaccactctccatcctccccagcctcgcagactgctggcttctccaagccatctttccttctgtctgtctcctctgctgagctccatgtgccgctccttctcctccccattctcccgtttttctgtcctcagaacacttcctcatatccttcctggtccctggctctctgagtccctttttttttttttttttcgttgttgttgtcgttgttg

SEQ ID NO: 408732 - DNA, 170 bp, Homo sapiens
gtaaaaggctaaggtgggaggattgggaggatcacttgaccctgggaggtggaggctgcagttagctattaactgcactctggctgcttgatagagtgagactgtgtctcaaaaaccaaccaaacaaacaacagaagatgcaagaactcagaactttggcacaatttcaa

SEQ ID NO: 408733 - DNA, 351 bp, Homo sapiens
aacaattgggcagggaccagaggctcacacctttaattccagcactttgaaatgtcgaggcaggtggattccttgagctcaggagttcaagaccaggctgggcaacttggagataccccatctctgcaaaacatgaaaattagccagatatggtgaggctcgcttgtagtcgcagctaatcaggaggctgaagctggaggatagcttggacccaggaggtcgaggctgctataagccatgattgtgccactgcactccagcctggaaataagagcaagaccctatctcaaacaaaccctatctcaaacaaacaaataaaaacagccatattttattttaaaatatgtatca

SEQ ID NO: 408734 - DNA, 602 bp, Homo sapiens
gcttgaacccgggaagcagaggttgcagtgagccgagatcgcaccactgcactccaacctgggtgacagagcaagactccatctcaaaaacaaagaaacactgaacagttatcctatctgatctttttatatgcaggatagtgattaaatcactctacaaccactttcctctaatttctcctcataagcctaatcaaatgtatttgccttacttcctaccattctgttgaagattctccgaaaattggagaaagcactaaatatggtaggaagattctcttgaagttcctgtgatcttttgaaactgcattcctgagttctatccttacttccttaaagcagcatgcacttttggtttgttgttaatcaggggtctcctgtgcttggtgtgtggggtaggaaggcaggtgatcacctgcaacaattcttcacagattggaagttaaacatgaaaagcccccggagaccccacgaactagatgccagaaagttctgcagtcattgactgttaactgcaattccaactatacggtcagccctccatatccatgggttccatatccgtggattcaaccaacatggattgaaatattccaaaaaaa

SEQ ID NO: 408735 - DNA, 1165 bp, Homo sapiens
atatttaaattgagcaccttttcttggtttattggctactcagacagcctcttttatgaagacatccaaatatattctacgtttgagtcttttgtccatttttctgttgggctgtcttttttttgtttaataggaattctttatgtaatctgtcaggtagtattttatctccccagattatatttttagtttttaaatgatgtcttctgatatacagaagttcatgatgttataattgaatatgtaacttttttctctttctgtatcctgttcaagaaatagttgtctactccaaggtcatgcagatgtttttttctaaatgctttattgtcttgtcttttattttttatatctatggtctatttggtatggcttcgtgtgtgtggtgtgaggtagggattgagattcttttttttccattgggatatctgattgacccagcatcattttctaaaagatgcctttcctcattgcactgcggcgcctcctgtgtgcttttgacagggatgacagggatgaggatgataaagaataggcatagcgtgtctttctcttgtgagacacagggattccaactcctattctcaatcttaaaaagaagttatttttcctcctccaagtgggaattttactagtgcttctgcttccgataccaagggttcgagttttggaggatgaagaggggtcgaaggacattgaattgtcagatgacccttatgactgcatacgactaagtgtggagaatgtcccctgcattgtcactctgtgcaagattggctatcggcatgtggtggatgctactcttcaggaggaggcctgctcgctggccagcttgctggtgtcggtgaccagcaagggagttgtgacgtgcatgaggaaagtggggaagggcagcctggacccagagagcatcttcgagatgatggagactggcaagcgtgtgggcaaggtactgcatgcctccttgcagagtgttctgcacaaggaagaaagcctggggcccaagagacagaaagttggattcctgggatgatttgcacatcaactgctcaactgtggattgttttttacttttccttttaaaccggttcgtatatatttttcttcgctgttacgaatttacagcagcatttgtacatgtaaaattaaaggctattttctggtc

SEQ ID NO: 408736 - DNA, 477 bp, Homo sapiens
tcccctgggagtcttttgagtccagcccgtcatttcttcccttgtactttgcctcccaaatactcctctacccaggttttggcactcgacagtaacttcttctgtctcaaaaaaaaaaaagcagtgtcctttaactggggtaatacctaaagtaataagtgatgcttggttttttttcctttttcaattcctgtctcccttagcttctggaatgtggtggaaatttgtttgatgccatttccattgctgtaaaggctgctctcttcaatacaaggtaagtcttcctagaaacagctctgcgaacctgtggagaaccagagcagacacttgtaatggaacactgaggaaatttctattgtagctcatatgtgaagataacagggggttttaacattgaaaatggtgacatctaacgttaaactccagaaaagatagatttcgtgaattaaaactacatatatacgtatattctgtatt

SEQ ID NO: 408737 - DNA, 278 bp, Homo sapiens
tacaggatctgtatgcgcgacgcttccatcaagccggggtttccagttcccgctaggaagcgttggggacgtccgggcactgcgcacctcgccagtgccggttaccaagcgcctcctcccccgtctgtgggacaacgctctggaagacctccgtgtggatggccgtggctgtgaggactaccgatgtgtcgaagtggaaactgatgtggtgtccaacactagtgggtccgccagggtcaagctggtcacacagacatcttgatggaagcgtcgcgcat

SEQ ID NO: 408738 - DNA, 1769 bp, Homo sapiens
gaggggacgcgcgcagatgacgtgcggctcgtggggcagctcggcagcatggcgtccgtgacgctgagcgaggcggagaaggtgtacatcgtgcatggcgtccaggaagacctccgtgtggatggccgtggctgtgaggactaccgatgtgtcgaagtggaaactgatgtggtgtccaacactagtgggtccgccagggtcaagctgggtcacacagacatcttggtgggagtgaaagcagaaatggggacgccgaagctggagaaaccaaatgaaggctacttggagttctttgttgactgttcagccagtgctacccctgaatttgaaggtagaggaggtgatgaccttggcaccgagatcgctaacaccctctatcggatatttaacaataaaagcagtgtcgacttaaagaccctctgcattagtcctcgggagcactgctgggttctctatgtggatgtgctgcttctggaatgtggtggaaatttgtttgatgccatttccattgctgtaaaggctgctctcttcaatacaaggataccaagggttcgagttttggaggatgaagaggggtcgaaggacattgaattgtcagatgacccttatgactgcatacgactaagtgtggagaatgtcccctgcattgtcactctgtgcaagattggctatcggcatgtggtggatgctactcttcaggaggaggcctgctcgctggccagcttgctggtgtcggtgaccagcaagggagttgtgacgtgcatgaggaaagtggggaagggcagcctggacccagagagcatcttcgagatgatggagactggcaagcgtgtgggcaaggtactgcatgcctccttgcagagtgttctgcacaaggaagaaagcctggggcccaagagacagaaagttggattcctgggatgatttgcacatcaactgctcaactgtggattgttttttacttttccttttaaaccggttcgtatatatttttcttcgctgttacgaatttacagcagcatttgtacatgtaaaattaaaggctattttctggtcaaaaaaaaaaaaaaaaaaattggggggattaatgcgcgggggcgggaaacaagagggcacacgaatgggcccatgggccatagctggtaccatggacccatttcccgggcacaacgggcgaatccggccggtcaccctataggggagccggataaattccgaataaggcccgaggttaaacccgggattaagaaagagaggtgggagaaaagaaggcgagagcagagggaccgcgggggaacgcgagagaaacacgagacggaagacggggacgacgaccacagagagcagcacagaaaaagagcgggagaaagaagagacgacacagacgacagacacagacaacaaagcaccgagaaagaaggcgaacgccagcagccggaggaaggagcggcgacaagcgcaaccgggcgagggaaaccagaggcgaatcacgcaagagaggagaaagaagaagggcgaaacggtgaagagggggggggagcgagagaggaaaagagagccagaaagacggcggagcggacagccaggaggaagagagaacagacagaggaagaaggaagaggagagcagaggctggcggaggaagagaaggacggagagcgaagcggggcgaagggaaagagagaagagcgagggaaggggggggagagaacgaaagctctacgtaaggaagaggaagagtaaggcgccgggcaggaaggtgtagtggt

SEQ ID NO: 408739 - DNA, 1413 bp, Homo sapiens
gaggggacgcgcgcagatgacgtgcggctcgtggggcagctcggcagcatggcgtccgtgacgctgagcgaggcggagaaggtgtacatcgtgcatggcgtccaggaagacctccgtgtggatggccgtggctgtgaggactaccgatgtgtcgaagtggaaactgatgtggtgtccaacactagtgggtccgccagggtcaagctgggtcacacagacatcttggtgggagtgaaagcagaaatggggacgccgaagctggagaaaccaaatgaaggctacttggagttctttgttgactgttcagccagtgctacccctgaatttgaaggtagaggaggtgatgaccttggcaccgagatcgctaacaccctctatcggatatttaacaataaaagcagtgtcgacttaaagaccctctgcattagtcctcgggagcactgctgggttctctatgtggatgtgctgcttctggaatgtggtggaaatttgtttgatgccatttccattgctgtaaaggctgctctcttcaatacaaggataccaagggttcgagttttggaggatgaagaggggtcgaaggacattgaattgtcagatgacccttatgactgcatacgactaagtgtggagaatgtcccctgcattgtcactctgtgcaagattggctatcggcatgtggtggatgctactcttcaggaggaggcctgctcgctggccagcttgctggtgtcggtgaccagcaagggagttgtgacgtgcatgaggaaagtggggaagggcagcctggacccagagagcatcttcgagatgatggagactggcaagcgtgtgggcaaggtactgcatgcctccttgcagagtgttctgcacaaggaagaaagcctggggcccaagagacagaaagttggattcctgggatgatttgcacatcaactgctcaactgtggattgttttttacttttccttttaaaccgagcgtttcaaccgtggcatttgctctctgcattccagttagcaaatggggtaaggcgttaggaatttatcaccaaatggaaagaacataatgtgagctgaagcccttgggactgcttccagaggtcctggtgtgggcgttcctcccagcaaggccaggtccatccctgtggagagaagcagctgcctagacttgggcttaatgggggagcttctgccctgttgagagcatagcctgggttttcatcttttatgtttcttcagtgactatctacaggcaccatgacagtgttcccaacaaggcagaaatcagcctggtctctccttccctgctcctggttgactgcccgtgacatgacaaaacattggcagtggtggcgcagagatgcaactcgagtgtgaataaagtttagaagcgtttgcttttgatggttaat

SEQ ID NO: 408740 - DNA, 1476 bp, Homo sapiens
  misc_feature (1464)..(1464): n is a, c, g, or t
  misc_feature (1467)..(1468): n is a, c, g, or t
gaggggacgcgcgcagatgacgtgcggctcgtggggcagctcggcagcatggcgtccgtgacgctgagcgaggcggagaaggtgtacatcgtgcatggcgtccaggaagacctccgtgtggatggccgtggctgtgaggactaccgatgtgtcgaagtggaaactgatgtggtgtccaacactagtgggtccgccagggtcaagctgggtcacacagacatcttggtgggagtgaaagcagaaatggggacgccgaagctggagaaaccaaatgaaggctacttggagttctttgttgactgttcagccagtgctacccctgaatttgaaggtagaggaggtgatgaccttggcaccgagatcgctaacaccctctatcggatatttaacaataaaagcagtgtcgacttaaagaccctctgcattagtcctcgggagcactgctgggttctctatgtggatgtgctgcttctggaatgtggtggaaatttgtttgatgccatttccattgctgtaaaggctgctctcttcaatacaaggataccaagggttcgagttttggaggatgaagaggggtcgaaggacattgaattgtcagatgacccttatgactgcatacgactaagtgtggagaatgtcccctgcattgtcactctgtgcaagattggctatcggcatgtggtggatgctactcttcaggaggaggcctgctcgctggccagcttgctggtgtcggtgaccagcaagggagttgtgacgtgcatgaggaaagtggggaagggcagcctggacccagagagcatcttcgagatgatggagactggcaagcgtgtgggcaaggtactgcatgcctccttgcagagtgttctgcacaaggaagaaagcctggggcccaagagacagaaagttggattcctgggatgatttgcacatcaactgctcaactgtggattgttttttacttttccttttaaaccggggaactgaaactcctaaatcttaaaacaccctggggaaggagctgattcacgaaggagagcgtttcaaccgtggcatttgctctctgcattccagttagcaaatggggtaaggcgttaggaatttatcaccaaatggaaagaacataatgtgagctgaagcccttgggactgcttccagaggtcctggtgtgggcgttcctcccagcaaggccaggtccatccctgtggagagaagcagctgcctagacttgggcttaatgggggagcttctgccctgttgagagcatagcctgggttttcatcttttatgtttcttcagtgactatctacaggcaccatgacagtgttcccaacaaggcagaaatcagcctggtctctccttccctgctcctggttgactgcccgtgacatgacaaaacattggcagtggtggcgcagagatgcaacttctaattttaaaataccaatttgtaaataaaccaanttnncaaaaatg

SEQ ID NO: 408741 - DNA, 1198 bp, Homo sapiens
gaggggacgcgcgcagatgacgtgcggctcgtggggcagctcggcagcatggcgtccgtgacgctgagcgaggcggagaaggtgtacatcgtgcatggcgtccaggaagacctccgtgtggatggccgtggctgtgaggactaccgatgtgtcgaagtggaaactgatgtggtgtccaacactagtgggtccgccagggtcaagctgggtcacacagacatcttggtgggagtgaaagcagaaatggggacgccgaagctggagaaaccaaatgaaggctacttggagttctttgttgactgttcagccagtgctacccctgaatttgaaggtagaggaggtgatgaccttggcaccgagatcgctaacaccctctatcggatatttaacaataaaagcagtgtcgacttaaagaccctctgcattagtcctcgggagcactgctgggttctctatgtggatgtgctgcttctggaatgtggtggaaatttgtttgatgccatttccattgctgtaaaggctgctctcttcaatacaaggataccaagggttcgagttttggaggatgaagaggggtcgaaggacattgaattgtcagatgacccttatgactgcatacgactaagtgtggagaatgtcccctgcattgtcactctgtgcaagattggctatcggcatgtggtggatgctactcttcaggaggaggcctgctcgctggccagcttgctggtgtcggtgaccagcaagggagttgtgacgtgcatgaggaaagtggggaagggcagcctggacccagagagcatcttcgagatgatggagactggcaagcgtgtgggcaaggtactgcatgcctccttgcagagtgttctgcacaaggaagaaagcctggggcccaagagacagaaagttggattcctgggatgatttgcacatcaactgctcaactgtggattgttttttacttttccttttaaaccggttcgtatatatttttcttcgctgttacgaatttacagcagcatttgtacatgtaaaattaaaggctattttctggtcaaaaaaaaaaatacaaagaaacaaaaaaagaaagaaaaaagagaacagacaaaaagaaaaaaaacaaaagaagacacccacacaacgggcaagaagaagaaagacgaaaaaaacagagggaaacaaccaaaggacgcaagga

SEQ ID NO: 408742 - DNA, 1715 bp, Homo sapiens
gaggggacgcgcgcagatgacgtgcggctcgtggggcagctcggcagcatggcgtccgtgacgctgagcgaggcggagaaggtgtacatcgtgcatggcgtccaggaagacctccgtgtggatggccgtggctgtgaggactaccgatgtgtcgaagtggaaactgatgtggtgtccaacactagtgggtccgccagggtcaagctgggtcacacagacatcttggtgggagtgaaagcagaaatggggacgccgaagctggagaaaccaaatgaaggctacttggagttctttgttgactgttcagccagtgctacccctgaatttgaaggtagaggaggtgatgaccttggcaccgagatcgctaacaccctctatcggatatttaacaataaaagcagtgtcgacttaaagaccctctgcattagtcctcgggagcactgctgggttctctatgtggatgtgctgcttctggaatgtggtggaaatttgtttgatgccatttccattgctgtaaaggctgctctcttcaatacaaggataccaagggttcgagttttggaggatgaagaggggtcgaaggacattgaattgtcagatgacccttatgactgcatacgactaagtgtggagaatgtcccctgcattgtcactctgtgcaagattggctatcggcatgtggtggatgctactcttcaggaggaggcctgctcgctggccagcttgctggtgtcggtgaccagcaagggagttgtgacgtgcatgaggaaagtggggaagggcagcctggacccagagagcatcttcgagatgatggagactggcaagcgtgtgggcaaggtactgcatgcctccttgcagagtgttctgcacaaggatcaactgctcaactgtggattgttttttacttttccttttaaaccggttcgtatatatttttcttcgctgttacgaatttacagcagcatttgtacatgtaaaattaaaggctattttctggtcaaaaaaaaaaaaaaaaaaattggggggattaatgcgcgggggcgggaaacaagagggcacacgaatgggcccatgggccatagctggtaccatggacccatttcccgggcacaacgggcgaatccggccggtcaccctataggggagccggataaattccgaataaggcccgaggttaaacccgggattaagaaagagaggtgggagaaaagaaggcgagagcagagggaccgcgggggaacgcgagagaaacacgagacggaagacggggacgacgaccacagagagcagcacagaaaaagagcgggagaaagaagagacgacacagacgacagacacagacaacaaagcaccgagaaagaaggcgaacgccagcagccggaggaaggagcggcgacaagcgcaaccgggcgagggaaaccagaggcgaatcacgcaagagaggagaaagaagaagggcgaaacggtgaagagggggggggagcgagagaggaaaagagagccagaaagacggcggagcggacagccaggaggaagagagaacagacagaggaagaaggaagaggagagcagaggctggcggaggaagagaaggacggagagcgaagcggggcgaagggaaagagagaagagcgagggaaggggggggagagaacgaaagctctacgtaaggaagaggaagagtaaggcgccgggcaggaaggtgtagtggt

SEQ ID NO: 408743 - DNA, 1271 bp, Homo sapiens
taagatccctaggcagctataacctaatgtcctctgtgttctatattaaatccctggttatgaccactccagaacgagggttgaaaaatgttggacctggtaacgagctaccctgtatcctcctccggctgtgtctccacttgttaacctacggtgtggtcctcctatcagagttcttcatcccatccttggcagagttctggcgacagtcctacctcttttcctcatgcctttcctctgtcagtaccaactgcaaagtcagtggtcccgtgatgtagccatcggattgaagcggccagctatcattgaagtcccacaacgaagacctccgtgtggatggccgtggctgtgaggactaccgatgtgtcgaagtggaaactgatgtggtgtccaacactagtgggtccgccagggtcaagctgggtcacacagacatcttggtgggagtgaaagcagaaatggggacgccgaagctggagaaaccaaatgaaggctacttggagttctttgttgactgttcagccagtgctacccctgaatttgaaggtagaggaggtgatgaccttggcaccgagatcgctaacaccctctatcggatatttaacaataaaagcagtgtcgacttaaagaccctctgcattagtcctcgggagcactgctgggttctctatgtggatgtgctgcttctggaatgtggtggaaatttgtttgatgccatttccattgctgtaaaggctgctctcttcaatacaaggataccaagggttcgagttttggaggatgaagaggggtcgaaggacattgaattgtcagatgacccttatgactgcatacgactaagtgtggagaatgtcccctgcattgtcactctgtgcaagattggctatcggcatgtggtggatgctactcttcaggaggaggcctgctcgctggccagcttgctggtgtcggtgaccagcaagggagttgtgacgtgcatgaggaaagtggggaagggcagcctggacccagagagcatcttcgagatgatggagactggcaagcgtgtgggcaaggtactgcatgcctccttgcagagtgttctgcacaaggaagaaagcctggggcccaagagacagaaagttggattcctgggatgatttgcacatcaactgctcaactgtggattgttttttacttttccttttaaaccggttcgtatatatttttcttcgctgttacgaatttacagcagcatttgtacatgtaaaattaaaggctattttctggtc

SEQ ID NO: 408744 - DNA, 775 bp, Homo sapiens
tctagaggacccagatgacacttcagccagtgctacccctgaatttgaaggtagaggaggtgatgaccttggcaccgagatcgctaacaccctctatcggatatttaacaataaaagcagtgtcgacttaaagaccctctgcattagtcctcgggagcactgctgggttctctatgtggatgtgctgcttctggaatgtggtggaaatttgtttgatgccatttccattgctgtaaaggctgctctcttcaatacaaggataccaagggttcgagttttggaggatgaagaggggtcgaaggacattgaattgtcagatgacccttatgactgcatacgactaagtgtggagaatgtcccctgcattgtcactctgtgcaagattggctatcggcatgtggtggatgctactcttcaggaggaggcctgctcgctggccagcttgctggtgtcggtgaccagcaagggagttgtgacgtgcatgaggaaagtggggaagggcagcctggacccagagagcatcttcgagatgatggagactggcaagcgtgtgggcaaggtactgcatgcctccttgcagagtgttctgcacaaggaagaaagcctggggcccaagagacagaaagttggattcctgggatgatttgcacatcaactgctcaactgtggattgttttttacttttccttttaaaccggttcgtatatatttttcttcgctgttacgaatttacagcagcatttgtacatgtaaaattaaaggctattttctggtc

SEQ ID NO: 408745 - DNA, 1065 bp, Homo sapiens
gaggggacgcgcgcagatgacgtgcggctcgtggggcagctcggcagcatggcgtccgtgacgctgagcgaggcggagaaggtgtacatcgtgcatggcgtccagaacgagggttgaaaaatgttggacctggataccaagggttcgagttttggaggatgaagaggggtcgaaggacattgaattgtcagatgacccttatgactgcatacgactaagtgtggagaatgtcccctgcattgtcactctgtgcaagattggctatcggcatgtggtggatgctactcttcaggaggaggcctgctcgctggccagcttgctggtgtcggtgaccagcaagggagttgtgacgtgcatgaggaaagtggggaagggcagcctggacccagagagcatcttcgagatgatggagactggcaagcgtgtgggcaaggtactgcatgcctccttgcagagtgttctgcacaaggaagaaagcctggggcccaagagacagaaagttggattcctgggatgatttgcacatcaactgctcaactgtggattgttttttacttttccttttaaaccggggaactgaaactcctaaatcttaaaacaccctggggaaggagctgattcacgaaggagagcgtttcaaccgtggcatttgctctctgcattccagttagcaaatggggtaaggcgttaggaatttatcaccaaatggaaagaacataatgtgagctgaagcccttgggactgcttccagaggtcctggtgtgggcgttcctcccagcaaggccaggtccatccctgtggagagaagcagctgcctagacttgggcttaatgggggagcttctgccctgttgagagcatagcctgggttttcatcttttatgtttcttcagtgactatctacaggcaccatgacagtgttcccaacaaggcagaaatcagcctggtctctccttccctgctcctggttgactgcccgtgacatgacaaaacattggcagtggtggcgcagagatgcaactcgagtgtgaataaagtttagaagcgtttgcttttgatggttaat

SEQ ID NO: 408746 - DNA, 1056 bp, Homo sapiens
gaggggacgcgcgcagatgacgtgcggctcgtggggcagctcggcagcatggcgtccgtgacgctgagcgaggcggagaaggtgtacatcgtgcatggcgtccaggaagacctccgtgtggatggccgtggctgtgaggactaccgatgtgtcgaagtggaaactgatgtggtgtccaacactagtgggtccgccagggtcaagctgggtcacacagacatcttggtgggagtgaaagcagaaatggggacgccgaagctggagaaaccaaatgaaggctacttggagttctttgttgactgttcagccagtgctacccctgaatttgaaggtagaggaggtgatgaccttggcaccgagatcgctaacaccctctatcggatatttaacaataaaagcagtgtcgacttaaagaccctctgcattagtcctcgggagcactgctgggttctctatgtggatgtgctgcttctggaatgtggtggaaatttgtttgatgccatttccattgctgtaaaggctgctctcttcaatacaaggataccaagggttcgagttttggaggatgaagaggggtcgaaggacattgaattgtcagatgacccttatgactgcatacgactaagtgtggagaatgtcccctgcattgtcactctgtgcaagattggctatcggcatgtggtggatgctactcttcaggaggaggcctgctcgctggccagcttgctggtgtcggtgaccagcaagggagttgtgacgtgcatgaggaaagtggggaagggcagcctggacccagagagcatcttcgagatgatggagactggcaagcgtgtgggcaaggtactgcatgcctccttgcagagtgttctgcacaaggaagaaagcctggggcccaagagacagaaagttggattcctgggatgatttgcacatcaactgctcaactgtggattgttttttacttttccttttaaaccggttcgtatatatttttcttcgctgttacgaatttacagcagcatttgtacatgtaaaattaaaggctattttctggtc

SEQ ID NO: 408747 - DNA, 1472 bp, Homo sapiens
gaggggacgcgcgcagatgacgtgcggctcgtggggcagctcggcagcatggcgtccgtgacgctgagcgaggcggagaaggtgtacatcgtgcatggcgtccaggaagacctccgtgtggatggccgtggctgtgaggactaccgatgtgtcgaagtggaaactgatgtggtgtccaacactagtgggtccgccagggtcaagctgggtcacacagacatcttggtgggagtgaaagcagaaatggggacgccgaagctggagaaaccaaatgaaggctacttggagttctttgttgactgttcagccagtgctacccctgaatttgaaggtagaggaggtgatgaccttggcaccgagatcgctaacaccctctatcggatatttaacaataaaagcagtgtcgacttaaagaccctctgcattagtcctcgggagcactgctgggttctctatgtggatgtgctgcttctggaatgtggtggaaatttgtttgatgccatttccattgctgtaaaggctgctctcttcaatacaaggataccaagggttcgagttttggaggatgaagaggggtcgaaggacattgaattgtcagatgacccttatgactgcatacgactaagtgtggagaatgtcccctgcattgtcactctgtgcaagattggctatcggcatgtggtggatgctactcttcaggaggaggcctgctcgctggccagcttgctggtgtcggtgaccagcaagggagttgtgacgtgcatgaggaaagtggggaagggcagcctggacccagagagcatcttcgagatgatggagactggcaagcgtgtgggcaaggtactgcatgcctccttgcagagtgttctgcacaaggaagaaagcctggggcccaagagacagaaagttggattcctgggatgatttgcacatcaactgctcaactgtggattgttttttacttttccttttaaaccggggaactgaaactcctaaatcttaaaacaccctggggaaggagctgattcacgaaggagagcgtttcaaccgtggcatttgctctctgcattccagttagcaaatggggtaaggcgttaggaatttatcaccaaatggaaagaacataatgtgagctgaagcccttgggactgcttccagaggtcctggtgtgggcgttcctcccagcaaggccaggtccatccctgtggagagaagcagctgcctagacttgggcttaatgggggagcttctgccctgttgagagcatagcctgggttttcatcttttatgtttcttcagtgactatctacaggcaccatgacagtgttcccaacaaggcagaaatcagcctggtctctccttccctgctcctggttgactgcccgtgacatgacaaaacattggcagtggtggcgcagagatgcaactcgagtgtgaataaagtttagaagcgtttgcttttgatggttaat

SEQ ID NO: 408748 - DNA, 1487 bp, Homo sapiens
gaggggacgcgcgcagatgacgtgcggctcgtggggcagctcggcagcatggcgtccgtgacgctgagcgaggcggagaaggtgtacatcgtgcatggcgtccaggaagacctccgtgtggatggccgtggctgtgaggactaccgatgtgtcgaagtggaaactgatgtggtgtccaacactagtgggtccgccagggtcaagctgggtcacacagacatcttggtgggagtgaaagcagaaatggggacgccgaagctggagaaaccaaatgaaggctacttggagttctttgttgactgttcagccagtgctacccctgaatttgaaggtagaggaggtgatgaccttggcaccgagatcgctaacaccctctatcggatatttaacaataaaagcagtgtcgacttaaagaccctctgcattagtcctcgggagcactgctgggttctctatgtggatgtgctgcttctggaatgtggtggaaatttgtttgatgccatttccattgctgtaaaggctgctctcttcaatacaaggataccaagggttcgagttttggaggatgaagaggggtcgaaggacattgaattgtcagatgacccttatgactgcatacgactaagtgtggagaatgtcccctgcattgtcactctgtgcaagattggctatcggcatgtggtggatgctactcttcaggaggaggcctgctcgctggccagcttgctggtgtcggtgaccagcaagggagttgtgacgtgcatgaggaaagtggggaagggcagcctggacccagagagcatcttcgagatgatggagactggcaagcgtgtgggcaaggtactgcatgcctccttgcagagtgttctgcacaaggaagaaagcctggggcccaagagacagaaagttggattcctgggatgatttgcacatcaactgctcaactgtggattgttttttacttttccttttaaaccggggaactgaaactcctaaatcttaaaacaccctggggaaggagctgattcacgaaggagagcgtttcaaccgtggcatttgctctctgcattccagttagcaaatggggtaaggcgttaggaatttatcaccaaatggaaagaacataatgtgagctgaagcccttgggactgcttccagaggtcctggtgtgggcgttcctcccagcaaggccaggtccatccctgtggagagaagcagctgcctagacttgggcttaatgggggagcttctgccctgttgagagcatagcctgggttttcatcttttatgtttcttcagtgactatctacaggcaccatgacagtgttcccaacaaggcagaaatcagcctggtctctccttccctgctcctggttgactgcccgtgacatgacaaaacattggcagtggtggcgcagagatgcaactgggggggccccgtttccccaatttcgacccctttagatgaagtctcgttttacaatttt

SEQ ID NO: 408749 - DNA, 1259 bp, Homo sapiens
gaggggacgcgcgcagatgacgtgcggctcgtggggcagctcggcagcatggcgtccgtgacgctgagcgaggcggagaaggtgtacatcgtgcatggcgtccaggaagacctccgtgtggatggccgtggctgtgaggactaccgatgtgtcgaagtggaaactgatgtggtgtccaacactagtgggtccgccagggtcaagctgggtcacacagacatcttggtgggagtgaaagcagaaatggggacgccgaagctggagaaaccaaatgaaggctacttggagttctttgttgactgttcagccagtgctacccctgaatttgaaggtagaggaggtgatgaccttggcaccgagatcgctaacaccctctatcggatatttaacaataaaagcagtgtcgacttaaagaccctctgcattagtcctcgggagcactgctgggttctctatgtggatgtgctgcttctggaatgtggtggaaatttgtttgatgccatttccattgctgtaaaggctgctctcttcaatacaaggataccaagggttcgagttttggaggatgaagaggggtcgaaggacattgaattgtcagatgacccttatgactgcatacgactaagtgtggagaatgtcccctgcattgtcactctgtgcaagattggctatcggcatgtggtggatgctactcttcaggaggaggcctgctcgctggccagcttgctggtgtcggtgaccagcaagggagttgtgacgtgcatgaggaaagtggggaagggcagcctggacccagagagcatcttcgagatgatggagactggcaagcgtgtgggcaaggtactgcatgcctccttgcagagtgttctgcacaaggaagaaagcctggggcccaagagacagaaagttggattcctgggatgatttgcacatcaactgctcaactgtggattgttttttacttttccttttaaaccggggaactgaaactcctaaatcttaaaacaccctggggaaggagctgattcacgaaggagagcgtttcaaccgtggcatttgctctctgcattccagttagcaaatgggtgactatctacaggcaccatgacagtgttcccaacaaggcagaaatcagcctggtctctccttccctgctcctggttgactgcccgtgacatgacaaaacattggcagtggtggcgcagagatgcaactcgagtgtgaataaagtttagaagcgtttgcttttgatggttaat

SEQ ID NO: 408750 - DNA, 1042 bp, Homo sapiens
  misc_feature (4)..(4): n is a, c, g, or t
tttntacaaaaagcaagctgtaccggtccggtattcccggatcgtgacgctgagcgaggcggagaaggtgtacatcgtgcatggcgtccaggaagacctccgtgtggatggccgtggctgtgaggactaccgatgtgtcgaagtggaaactgatgtggtgtccaacactagtgggtccgccagggtcaagctgggtcacacagacatcttggtgggagtgaaagcagaaatggggacgccgaagctggagaaaccaaatgaaggctacttggagttctttgttgactgttcagccagtgctacccctgaatttgaaggtagaggaggtgatgaccttggcaccgagatcgctaacaccctctatcggatatttaacaataaaagcagtgtcgacttaaagaccctctgcattagtcctcgggagcactgctgggttctctatgtggatgtgctgcttctggaatgtggtggaaatttgtttgatgccatttccattgctgtaaaggctgctctcttcaatacaaggataccaagggttcgagttttggaggatgaagaggggtcgaaggacattgaattgtcagatgacccttatgactgcatacgactaagtgtggagaatgtcccctgcattgtcactctgtgcaagattggctatcggcatgtggtggatgctactcttcaggaggaggcctgctcgctggccagcttgctggtgtcggtgaccagcaagggagttgtgacgtgcatgaggaaagtggggaagggcagcctggacccagagagcatcttcgagatgatggagactggcaagcgtgtgggcaaggtactgcatgcctccttgcagagtgttctgcacaaggaagaaagcctggggcccaagagacagaaagttggattcctgggatgatttgcacatcaactgctcaactgtggattgttttttacttttccttttaaaccggttcgtatatatttttcttcgctgttacgaatttacagcagcatttgtacatgtaaaattaaaggctattttctggtc

SEQ ID NO: 408751 - DNA, 1097 bp, Homo sapiens
  misc_feature (150)..(150): n is a, c, g, or t
gaggggacgcgcgcagatgacgtgcggctcgtggggcagctcggcagcatggcgtccgtgacgctgagcgaggcggagaaggtgtacatcgtgcatggcgtccaggaagacctccgtgtggatggccgtggctgtgaggactaccgatgnttgttcgacaaggttggggggcaaaaaaaaacccctgggaactgctgggttgattcccaaaacccacctaagtgggtccgcccagggttcaaagcctgggtcacacagacatcttggtgggagtgaaagcagaaatggggacgccgaagctggagaaaccaaatgaaggctacttggagttctttgttgactgttcagccagtgctacccctgaatttgaaggtagaggaggtgatgaccttggcaccgagatcgctaacaccctctatcggatatttaacaataaaagcagtgtcgacttaaagaccctctgcattagtcctcgggagcactgctgggttctctatgtggatgtgctgcttctggaatgtggtggaaatttgtttgatgccatttccattgctgtaaaggctgctctcttcaatacaaggataccaagggttcgagttttggaggatgaagaggggtcgaaggacattgaattgtcagatgacccttatgactgcatacgactaagtgtggagaatgtcccctgcattgtcactctgtgcaagattggctatcggcatgtggtggatgctactcttcaggaggaggcctgctcgctggccagcttgctggtgtcggtgaccagcaagggagttgtgacgtgcatgaggaaagtggggaagggcagcctggacccagagagcatcttcgagatgatggagactggcaagcgtgtgggcaaggtactgcatgcctccttgcagagtgttctgcacaaggaagaaagcctggggcccaagagacagaaagttggattcctgggatgatttgcacatcaactgctcaactgtggattgttttttacttttccttttaaaccggttcgtatatatttttcttcgctgttacgaatttacagcagcatttgtacatgtaaaattaaaggctattttctggtc

SEQ ID NO: 408752 - DNA, 929 bp, Homo sapiens
gaggggacgcgcgcagatgacgtgcggctcgtggggcagctcggcagcatggcgtccgtgacgctgagcgaggcggagaaggtgtacatcgtgcatggcgtccaggaagacctccgtgtggatggccgtggctgtgaggactaccgatgtgtcgaagtggaaactgatgtggtgtccaacactagtgggtccgccagggtcaagctgggtcacacagacatcttggtgggagtgaaagcagaaatggggacgccgaagctggagaaaccaaatgaaggctacttggagttctttgttgactgttcagccagtgctacccctgaatttgaaggtagaggaggtgatgaccttggcaccgagatcgctaacaccctctatcggatatttaacaataaaagcagtgtcgacttaaagaccctctgcattagtcctcgggagcactgctgggttctctatgtggatgtgctgcttctggaatgtggtggaaatttgtttgatgccatttccattgctgtaaaggctgctctcttcaatacaaggataccaagggttcgagttttggaggatgaagaggggtcgaaggacattgaattgtcagatgacccttatgactgcatacgactaagtgtggagaatgtcccctgcattgtcactctgtgcaagattggctatcggcatcttcgagatgatggactggcaagcgtgtgggcaaggtactgcatgcctccttgcagagtgttctgcacaaggaagaaagcctggggcccaagagacagaaagttggattcctgggatgatttgcacatcaactgctcaactgtggattgttttttacttttccttttaaaccggttcgtatatatttttcttcgctgttacgaatttacagcagcatttgtacatgtaaaattaaaggctattttctggtc

SEQ ID NO: 408753 - DNA, 1442 bp, Homo sapiens
aatgcccatactcccactcggccatcgcaaggggttggggttggctttttttcgggcaactgctcacagctcccagtaatcacttccatcaagccggggtttccagttcccgctaggaagcgttggggacgtccgggcactgcgcacctcgccagtgccggttaccaagcgcctcctcccccgtctgtgggacaacgctctggaagacctccgtgtggatggccgtggctgtgaggactaccgatgtgtcgaagtggaaactgatgtggtgtccaacactagtgggtccgccagggtcaagctgggtcacacagacatcttggtgggagtgaaagcagaaatggggacgccgaagctggagaaaccaaatgaaggctacttggagttctttgttgactgttcagccagtgctacccctgaatttgaaggtagaggaggtgatgaccttggcaccgagatcgctaacaccctctatcggatatttaacaataaaagcagtgtcgacttaaagaccctctgcattagtcctcgggagcactgctgggttctctatgtggatgtgctgcttctggaatgtggtggaaatttgtttgatgccatttccattgctgtaaaggctgctctcttcaatacaaggataccaagggttcgagttttggaggatgaagaggggtcgaaggacattgaattgtcagatgacccttatgactgcatacgactaagtgtggagaatgtcccctgcattgtcactctgtgcaagattggctatcggcatcttcgagatgatggactggcaagcgtgtgggcaaggtactgcatgcctccttgcagagtgttctgcacaaggaagaaagcctggggcccaagagacagaaagttggattcctgggatgatttgcacatcaactgctcaactgtggattgttttttacttttccttttaaaccggggaactgaaactcctaaatcttaaaacaccctggggaaggagctgattcacgaaggagagcgtttcaaccgtggcatttgctctctgcattccagttagcaaatggggtaaggcgttaggaatttatcaccaaatggaaagaacataatgtgagctgaagcccttgggactgcttccagaggtcctggtgtgggcgttcctcccagcaaggccaggtccatccctgtggagagaagcagctgcctagacttgggcttaatgggggagcttctgccctgttgagagcatagcctgggttttcatcttttatgtttcttcagtgactatctacaggcaccatgacagtgttcccaacaaggcagaaatcagcctggtctctccttccctgctcctggttgactgcccgtgacatgacaaaacattggcagtggtggcgcagagatgcaactcgagtgtgaataaagtttagaagcgtttgcttttgatggttaat

SEQ ID NO: 408754 - DNA, 149 bp, Homo sapiens
cagcctcccaaaatgctgggattacaggcatgagccactgcacctggcttcaaagttctttcagttatactggcaacaaagcagcttttggggctttgaaattcctctattttatttaacacttctgaaatcacagtgaccaggaagga

SEQ ID NO: 408755 - DNA, 418 bp, Homo sapiens
gcaaagacgaagaccaccaagaaatgccctcagtgcacaatatccaatgtgtttgccatgtttgaccagtcacagattcaggagttcaaagaggccttcaacatgattgattagaacagagatggtttcatcaacaaggaagatttgcatgatatgcttgcttctctagggaagaatcccactgatgcataccttgatgccacgatgaatgaggcaccagggcccattaatttcactatgtttggtgagaagttaaatggcacagatcctgaagatgtcatcagaaatgcttctgcttgctttgatgaagaagcaacaggcaccattcaggaagattacctgagagagctgatgacaaccatgggggatcagtttacagatgaggaagtggatgagctgcacagagaagcacctattg

SEQ ID NO: 408756 - DNA, 271 bp, Homo sapiens
tctgtgacaaacccacatagaatccaaggaatgtaggtgatctgacaaaagccctcacgtttaaaatttgccctaagtttccacaaatccaccaaaaatttccccgcatgggccacgttttcagatacagtttagctatccgttcttgtgacactagttgcatttgaagagttcttgggagcggcgtgcggtgtctcacgtccataatcccagcagtttgggaggccacgcaggtggatcacttgaggtcaggagtccgagaccagcctgg

SEQ ID NO: 408757 - DNA, 715 bp, Homo sapiens
gtcctggtttgggtcatgtgactgtccctgactcaatgactgtggccaggtataggaggtggtgctttccctggccagacttgcatcatgagtccgctcccagaactggaaggtaggtttagctctgctttatccactcggactaggatcagggaaggctgattctccacaggaatatgagatgctgttactgaaaagcagaggaagctacatgatctttaccactgggttactcaatagtagatgagggcaagcatctctctataaaagtattctgattattaaattaaaaaggaatggtggaatttgaataccaccattttgtaaccctcaataatgatgcattatgtattggtgactgctgacaccatagaaggaggcaagcattatgtgccccctgtagtcttgtcaaagggatcaaacctgagtccagtccagtttctggtactagccaccaatgtgcaggtgatacacaggacacagcacttgttgaactgcaccatgagtatacagtcagcaaaatccagactgtgggaatcttggcaagtcagatggcctggattctttcccagaacaatggaaaggaaaagaaaaaaatggcataaaatgtgcagattaaaagaaaattaaataacatattaaagttttttttaaggccaggcacagtgactcacacctgtaatcttagcactttgggaggccaaggcaggaggat

SEQ ID NO: 408758 - DNA, 211 bp, Homo sapiens
gtggaatcaagcaatatgtagcccttttggtctggcttctttcacttagtaaaacgcagtcaagattctcccatgttttgtggataattatttcattcctttttatcactgagtagtacttcattgtgtggatgtaccacagttttattatccattcactaactgatgaacttgtaagatgtttctagttttggtgaatatgaacaaattt

SEQ ID NO: 408759 - DNA, 1125 bp, Homo sapiens
ttaatatttgcattatactttccagttgagcatcccaaattcgaaaatcagaaatttataccaggcatggtgatgcacacctatagttcctgctactcaggaggctgaagcaagaggtttgcttgagccctaggagttcagggctgttgtgcactatgattaggcctatgaatagtcaccacactgtagcctggacaacacagtaagaccttgtctctaatacacacacacacaaacacacacatctgtatgtgtatgtaaaatccaaaatcctccaatgagcattttctttgagcatcatgttggcattcaaaaagtttcagattttggagcattttggattttggactttcagatttgggttctcagcctgtatagtgtttgtcaatggtgaacgtttgtcatttagagtaggacagttctgttgatgtacagaacaatcctgtgtattgctgtcccctgcccaacagatacctgtatgggccttctagtcactgtgatatcaaaacctcccatacatactcaaaatctccccttggagagaagagtgcacaataccacccctattgagaaccattggtttaatggggagtgcaagttaaaggttcaccctgattctactgtttaatacagctattatttttagtcattccctcccaggctttttacacatatatgctttctgttttgatagtgtacataaagtggcaagtattactgggaccatactggtctctagcttcccagtcaatctggggagagcctcagcccacaaggcagggtacctgagcaatgctcacatatgcagatgattttaggacagaaaagtatctttttcatattgagatcctgagaccattttgaaacgggctgtaaaatatagggagaaacttatttgtgaatttcagaggttgatactaggagtataccaggaagagtttggttttcctgtccccaaagttgtattatccctgtgctagtcagatgtatttgaatcttccatatcccactatctctttaaagtgtgcttcaaatggaaaatccagataaacctattagatttgagcacttagctgcttgtatcaggaatgcttgctaaattgtcctttagcctgatttgtaaaa

SEQ ID NO: 408760 - DNA, 240 bp, Homo sapiens
aagaaatgccttgctcgcagttctggaggctggaagtctgagatgaggctgccagcatggtcaggttctggtgacggccaggcagcagaccgtcagcttcttcccacatcctcatatggcagagagagggccagagcactgactagactcccttgtgtaaaggcactgatcccattcatgacccagtcatttcctcacccagtcacttcccaagggctctacctcttaaggtcatcacct

SEQ ID NO: 408761 - DNA, 609 bp, Homo sapiens
aaatagtcgctggttggaatgtaaaatggtacgactaccttaggagaccgttttttaaaagttaaacatacacttatcatataatccagccattctacaccttggtatctacccaacagaaaagaaagcatatagctatacaaagacttgtacaactcaaaacaacctagatatctattagcaagtgaataagtaatcaaattataccatttccatacacagcaatactactcagcaataaaaaggaatgaactatttatatatcacacaacatggatgactcttaaaataattaggctgagtgaaagcctgactctcctccttcccctccccaaagtacataatggattattctatttgtgtaaaattattggagattcatactaatccacagtgacaataaaattattgattacttggagagggaatagctagagaagagaactttggggggtaatggatacgtttattaccttgattatggcaaaggtacatatatatatgtgtgtgtgtatatacgtagtaaatgcagcatatgtatacatatattatatacacacatatacatatatgtgtatgtattacaaaaaccaatagaattatcgcaag

SEQ ID NO: 408762 - DNA, 294 bp, Homo sapiens
aactcctgacctcagatgatctgcctgcctcggtctcccaaagtgctgggattatgggcatgagccgctgtgcccggccatgtcttttgcatattgtattatctacaaaggacatgagttactttttaaataagtgatcttgttaatcaagtgatcttcctgccttggcttcccaaagtgcttggattataggcgtgagccaccacgcccagccaaagaaaagtttttaataagtagatttgattttgcagttacaaagtgaggcagaaaattcagcacatctatgtttaatag

SEQ ID NO: 408763 - DNA, 316 bp, Homo sapiens
gactttgcaaatctctgtaggccagagaacacctgcagggctggctggaggtcccagttgggaggttctttccagtgaggaggggcaatattggggacttacttaaagaagcagtgtggccacactttcctagagcagctgtgttgtgctgggttaccactttcgtcccagttggctttggctctctgtgggccagagaataccagcagggatggttggaggtcccagttgtgaggtcctgctctgtgatgaggaatggattgggaacctgcttaaccagcagtctgaccacattttggtaaagaagtcatgctat

SEQ ID NO: 408764 - DNA, 299 bp, Homo sapiens
gctggagtgcattggctactcacaggcatgatcatggtgtattatagcctcaaactcctggcctccagcgatcttcctgtctcagctcccaagtagctcccaagtgtgcaactgagactacaggtgcaaaacacagtgccctggcttctctgtaaattttagaatcagtttgtagacagtgtctgggaggaaaaactttttatctaccctcaggtttagtctttggggacctgtgaattaaacagacgaaagatatattaacaagagaaggccaagcgtggtggcttacacccataatc

SEQ ID NO: 408765 - DNA, 707 bp, Homo sapiens
gttgtttgttttttgttttttgttttgttttgttttgttttgagacagagtctctctctgtcacccaggctggagtgcagtagtgtgaacttagctcactgcaacctctgcctcacaggttcaagcaattctcctgcctcaacctcccgagtagctgggattacaggcatgtgccaccacgcccggctaattttttgtatttttagtagagtcggggtttcaccatgttggtcaggctggtcttgagctcctgacctcaagtgatctacccgccttggcctcacaaagtgctgggattacaggcgtgagccaccacgcctggactgttttttaaatttctcattgagttaaattcagaatcctcaaaatgacattcaaggccttgcacaatgtggccccaacctaattttctaatttaattttaatttaattttattttattttattttgagatggagtctcactctgtcacccaggctggagtaaagtggtgcgatctctgctcactgcaacctccacctcctgggttcaagctattctcctacctcagcctcccaagtagctgggattgcaggcatgtgccaccacgcccggctaatttttgtatttttagtagtgacggggtttcaccatgttggtcaggctggtcttgaactcctgacctcatgatctgctctccttggcctcccaaagtgctgggattgccg

SEQ ID NO: 408766 - DNA, 319 bp, Homo sapiens
ctcagtttcctgcaacagcacaactctcaaattttggaaatgataggttaccagtactcttcttttcctgttccacattgatttttaaaaaactatagctagtaataattatagtacataatagttattttgcactgtattaaaaaactagcacattatcagttctcaagtatttgaagtatgttttataagaatccttttcggccgggcgtggtggctcacgcttgtaatcccagcactttgggaggtcgaggcaggcagatcacctgaggtcaggggtttgtgaccagcctggccaacatggtgaaactccgtctct

SEQ ID NO: 408767 - DNA, 209 bp, Homo sapiens
gcagcctgatttctcccaaagtgctgagattacaggcataagccatcacaccccaccttaaatctttaatttttatgagtgctcaatctttacttcttagagtacttaatccttatttacatatattaaatttgtctattgagagagatttttgatcttagtaatggactgaccaatatcagatgcttaacttaattgattactataga

SEQ ID NO: 408768 - DNA, 172 bp, Homo sapiens
gggagagccttcattgagtcttcagtcctttctacatacaggagaaatcacataggagagaaattgtatgaatgtaaggagcatgaaaaagcctgtgaatgttcactatattttaatattcacatgcaagttgtctggtcgtagaccatgtgaaaatagaggagaaaaaagg

SEQ ID NO: 408769 - DNA, 958 bp, Homo sapiens
acagctttaacttagtctccttaaaaatcactcaggttgtaaccaaaggctgctctatggctgagtagaattgttaattattaataactgttaatcaactacatagtcaacctcagacaagagggcaagagataattccttagacacacacacaaaaagagcaaaatgttaaggttagaaaacagtaaaaacgatgaagatatttaattctttttgcatactttgtaattatttgtttaaatatctatttccctagcctctgtgccagtttttctcgttgttttttatttttatttttttaagagagggtcttgtgttgttgcccaggctggagtccagtggtgcaaccatgactcactgcatcctcacactactgggctttgatcctcccatgtcagggtcccagctactcgggaggctgaggcaggagaatggcatgaacctgggaggcggagcttgcagtgagctgaaactgtgccattgcactccagcctgggcgacagagcaagactctgactcaaaaaaaaaaaaaaaagaaaaaaaagaaaaagaagagttattatcaataagaaggaatgtctgggtttcgataaggggttgtgcagaccaaagttttctcatgcagctgaagcctccaggtggcaggcttcagagagactagattgtaaatatttattatcagatgtaaggtctgtgttgatgttaataccggaggttatattgaggcatgttcaaccctacttcccgtcatagcctgagccagtctttctggttaaattttagagttctctggcctggcaggaagtccatttacatggttgaggaacttagaattttgtttttggtttacaaagagaaagcagagaagggtgaacccaggaggcggagcttgcagtgagccgagatcacaccactgcactccatccagcctgggtgacagggtgagactctgtctcaa

SEQ ID NO: 408770 - DNA, 227 bp, Homo sapiens
acgaaagaagagttaaatgccctcaagtcgacaggggatgggaccctaggaaagccagtgaggtggaggtgaagaatgaaatcgtggcgaatgtggggaaaagagaaatcttgcacaatactgagaaagaacaacacacagaggacacagtgaaggattgtgtgttttctgtggctgtctgaagtgaattgttcctcttctccatcatcaggacgctaagagggcca

SEQ ID NO: 408771 - DNA, 287 bp, Homo sapiens
acgaaagaagagttaaatgccctcaagtcgacaggggatgggaccctaggaaagccagtgaggtggaggtgaagaatgaaatcgtggcgaatgtggggaaaagagaaatcttgcacaatactgagaaagaacaacacacagaggacacagtgaaggattgtgtggacatagaggtattcactgctggtgagaataccgaggaccagaaatcctctgaagacactgccccattcctaggaaccttagcaggtgctacctatgaggaacaggttcaaagccaaattctt

SEQ ID NO: 408772 - DNA, 248 bp, Homo sapiens
aggcgtgagccgccgcgcctggcctgccaaatgtagttctatgtcttggatctgtattgtttcatttaatcctcacaacaatcaggaggtaggtagtattattttctcctttttaagattgattaaaaactgggacaaggtgggcactgtggctcatgcctgtaatgccaatactctgggaggccgaggcaggtggatcacttaaggtcaggagatcaagaccatcctggctaacatggtgaaacccc

SEQ ID NO: 408773 - DNA, 279 bp, Homo sapiens
gacctgtatcttgtgctgacctcctatctcatcccgtgacttagaatgccttcactgtctgggaatttagcccagtagttctcagcattgttttacccagcccctattcaagatggagttgctctggctcacatgcctctgacagaatggctgacatgatgtcaaatagaatcacgtgttttttaaatatacatgccttaaaaaaagccaaaaaaatgaagtcattaaaacttttggtgttcagcagtcatcagaaaggcatgatgcatgcacacatac

SEQ ID NO: 408774 - DNA, 780 bp, Homo sapiens
ggtgtttatctttgggtttaatccatcacaacttctctgctaaatttaaaggtatctttgaaacattgaattgtcaattccatttgctttgtaaggaatcaaaatttagctctaagaataatcaggaacgtttgtcaacaagatattttgatacttcaccttaaaatatttaaaataggctgggctcgatgggtcatgcctgtaatcccatccctttgggaggccgaggtgggcagatgacttgagctcaggagttccatgctagcctggccagcatggcgaaacccccatctctacaaaacaacaacaacaacacaaattagctggtcacggtggcatgtgcctgtagtcccaacatgggtgaagggggtgtaaaggagggggcaggtgctgaggtgggaggatctcatgacccaggaaggtggaggctgcagtgagctgcaccactacactctggcccgggcaacagtgcgaccctgaatcagaaaaattgagacaggtactcgctgttgacaggtcaccacgccgggctaattgtttttgttttgtagagatggggttttgccatgttgccctggctggtcatgaactcctgagctccggtgatctgcccacctcccctcccaaagtgctgggattacaggcctaagccgtggtgcctgccccaaattaaatgtttaaaatacaaaatacttaaccttttatggcttgctaaggctcaggtttttccagactgaattttgtcacccccatcttttaattttgtggagatcattggtt

SEQ ID NO: 408775 - DNA, 429 bp, Homo sapiens
gatccccaacgctgctcacagagatggtgtttctgcatgttggtcaggctggtctcgaactcctgacctcgtgatctgcccgcctcggcctcccaaagtgctgggattacaggcatgagccaccgagcccagcctcccgttttctttgtaattgttaggggctattttttttattgtggtaaaatatatataacataaaatgtaccatttaaaccattttttagtgtacccttcggtgacaggtaagggctttctgaaacgcattgtctttttattatagccattctagtagtaaggtgtgaagtggtatctcatagtggtttgggttgtatttccctgatattgggatgttggaaagttgatgagcatcttttcctgtgcttattaaccatccgtttatcttctttggtgaaatgtctagtcaaaaat

SEQ ID NO: 408776 - DNA, 359 bp, Homo sapiens
tgcatgtataaataaataaagaaggcacacacacttagggaagtcccgctgtaaagtagattcccaggagtagaattgctgggtcaaaggatgagcacatttaaagctttgatcaatattgccgaattgccctctcaaaaggttatcccagtctgtgctgctgtaggtggcgtatgtgcagcgtcgcctccccacagcctcaccacgggctgacctttcatttagaaggattaatctactcatgaggtgccttgacttgtgtgacactgaaaattgcatctatttttagttgaaggaaagaaaccctcatgggtcaggatgttgagtagtgcacagctgattcatttggtttttggaac

SEQ ID NO: 408777 - DNA, 276 bp, Homo sapiens
gaatgaaattctcagattccctcaggcatcctttctccttagggattatgcaccactgcagaaaatagctgtggtaaataaaagtagaaaaatgaactatgtgagtttaatggtacactgaaaacaaagtacagatatccctcggtatccatagggaattggtcccaggaccccctgtggctaccaaaatgcacagatgctctagtctcatatataaaatggcatagtatttgcatataacctatgtacattctcccatatactttatttatgaat

SEQ ID NO: 408778 - DNA, 330 bp, Homo sapiens
tgaacatgattctaacaacagttggccacatttatttagccaaaacttggtgattgacacaagaggaggctaccgtctgtttacaattccatttaggttttagttcacggtgtactgagaaacctttagcctgaacttgatttaacagtgttgaggggagattgtatggaactgtgaaataaaagcaatgtaggatgtttgaaataaaagagagtacataaatgttaaacaatgatttgtttaaacttttgcagtaggtgcaatagctttctttggttaaaaatagatggcaaggccaggtgtggtggctcgcaccataatcccagcact

SEQ ID NO: 408779 - DNA, 169 bp, Homo sapiens
tagtaatatttctacttattgtagaatttttttctttttttccttcgtttttccaacagtgggcttaagatattgaataaaccacgctataaacgtgctgtaatttagtccttgttattccacttatagagcacaggcaaagtagatttagcataaggttaagaaccct

SEQ ID NO: 408780 - DNA, 277 bp, Homo sapiens
atatgacaagaactggaatttccacattgatggggatgcttctcttcaaatcaactagaaattttgccatactgctctctgaaatgaatgcagaaattagcattcctttcagcaatgtacaagacttccttttgctccatattctcaccaacacttgctatagacctgatgagaagattgctcatcagcattctgacttagaggtcaaatgcacagcggcagatttttgttaaggatatcaagcagcatatggaaggagctgaaagatgacttgagg

SEQ ID NO: 408781 - DNA, 1178 bp, Homo sapiens
tcctttttttagagtatctcgttcttttctcacggatgcaatattttctcttatttctttgaggatgttagtaatgttttgttgttgtttctgttgaagtgtttctcaccatgcctaatctcttctttgtccaagttaatttttttttctgattgttgaaaagacaagccacatactgggagaatatattacagcacaaataacgcacaaagcattactatccggaatacataagtaattcttacaaattggtaagaagacaactcaattaaaaaagagcaaaagatatgaatgagcatttcacagcagaaaaatatgaatgaaaaataaaccacaagaaaagattctcagccttatagaaatcaggaaaatgtaaattaagaccacaggaagattttccatggaaaagaagtcccatagtggcaagtattggagaggcaggaatcaacagggatccttatatgctcctaatgcagtgtaaattgctgcaaccactttagaatattgcgatttcattactaagtgtaaaccctggagatacacttgcatgcaagcacccagagacaggtgcaaggatattcatagcagtgctgtttattatggtaaaaacatggaaaccaccctaatgtccttaacagtaaaattaattaattgtggcatcaccatataatgaaatcctatacagcagtggcaatgagtctaacatagctgtggctggatacagaaggaatcatagaattataatgcggagtgagaaaagcctgttgcagaagactacatacaacaggatttgacacttgtaaggctccaaaacaaagaaaattaaatgatattgtttaggttttcatacataggtgataaaagtgtgtttctttgtttttaatgagaaaattagtcacagaatttaagatcttagttacttctatagggaaggcaggggaatgggacaaggaggaagcccacagcattggtcatgctctcatgttgaagttgggttcaaaggtgttcattattaaaatgcttcataatgatgaccatacatttggtatttctaggacaatcttggtttacatctattgtctcaacataattattcagtgcaagcctttcctttctcagaaaggtcctaatgtagataataaattattttggccaacttatttcttataaaatgcaaa

SEQ ID NO: 408782 - DNA, 698 bp, Homo sapiens
gggtgcatagtgctcattagcaccttgcctggtacctaagtgggttttttttattttggaagggtgaaattgttctctgaagcttgatggtcaaggtccagatgtccattccggggtgggagtgagggtaccagtttacagtggcacagtctaaagagatgacctccagagatggatgagggaagtgtgaccatttaaagtgcacctgcagtgtactggtcactttgtgagccattctatctcatcctcccccaaaccccttcctcccttttcggaaaggtttagtaacttaccacagccacacagctagtaagtgctggcagaattggctcctaggtctagctgaccttgagacctatgtagtttctattttaccacactgccagaaataaaaagtattactattattggtttgattggggatggggggatctgattgctgtcttggcaagaaagaattttatgagcagcactttgcttctgaggtggttccctgacttggggtgagacccaggccttctaatgaggcccttgaaaatacctcttgcttaggactggaagccctatcaaaatccttggattcccacagttctctgctgctgtttaaggttaaccttggaagctttaacagaatgataacgataaagctaattgtaactccttaatctttattaaaagtctcacaaatcattcattaa

SEQ ID NO: 408783 - DNA, 406 bp, Homo sapiens
ccccttccatgggaagataaatattcaatttacataagatgacatttatgtgacaattaagaagattccccgatggaatgttgtgaacacatttgcttataggagaaataaatctaataataaacaaactcataataacagcacaaatcctccgacagggcggattgtctacccaacaaagagggagatgatgaatgctgaaataagcagtttttgcaacaagaaagaaatatgagcccttgaaaatacctcttgcttaggactggaagccctatcaaaatccttggattcccacagttctctgctgctgtttaaggttaaccttggaagctttaacagaatgataacgataaagctaattgtaactccttaatctttattaaaagtctcacaaatcattcattaa

SEQ ID NO: 408784 - DNA, 579 bp, Homo sapiens
ggtggggcggccaggattggcaaaactgtcctgggattctgaagctctttcccctaggatcccttttagaattgaagacgccagttgatatcgtggctgtgtgttagcccaaatgcttatgtccctgcgtgttttctcctgcctttccacaccttccttcccttcgtgaaagtaataaggagtcagaactacaacaaagtaaaattggggtgttcagcttagggatgtaatcaacagtctcactccctttagaaatgagcctcgtttccatagtgaagttgggccgagtgggatcctccattgtcatagagttctttgtgtacaggtttgggttgaaggacaacaaaataaacagaaccagacccaccacccagcatttggacgccacgccggggctggacaaagtggacttgctgtccgtgtacctgagtgtcagggtggttttgccctgtgccctgccaaatcagagtgaatgaacattcctgtctctgtttagcagacttggccctttggaaactcaagaaatgcatcctgaaaaagctggcactgtgctttcctcttaggaccacaataggcaaa

SEQ ID NO: 408785 - DNA, 567 bp, Homo sapiens
gtttttggaggggatttacacctacccaggtagaatcaggcatggcattctgtgaggctttatttacctggcttgtcctagatggggccaaaaggcttgacagcatttgtcatctggactgcattccatttagatattcattttgatgtggtaggtcttatagttctttaattttcatcagaaatatatgtacagttttaaaattaaattatcacaaaagcatctcctccctgttgctaaatttggttccccagatgcaaattttttttttaccattttgtccattacttctgtcaattaaatccctatgtctagactgaccttttcacaagatgctcaaatactccagtcatttctttgttctatttgttgtatgtttttaatggcaacatctcttttggaattcctatacatcctttgcctctgttttgaatcccaattcctgcatcacaagacttcttccttgtttactccattactttgtagcactaaagaaataaatcttgaggaaaagttataaaaggcaatatttttgagtcctcacatgttttaaaagttgttttactt

SEQ ID NO: 408786 - DNA, 508 bp, Homo sapiens
acacgcctcccccacctcccaacagtgggaccctcactccctcacctgcctgtgctcactgggcccagtgctgagcaaacaaagatgagttttcagtcccggggccacagtgcctctggcccaggtgaggcccctcctatacagcctcactacctcaggccctgagagccaggccatcccagatgaccagggtcccacaggcaccaccgcccactgggccgggacccgtcgttcccccatgtgcaaacaccaagtcacctcggcccctcccagccccacctgtggactcagcctcctggcggctctccaaccctctgcccgtccccattctgtgctggccccaaccagccccctccagccctgtgctccccatcaatagcagagtgggccctgatctggttcccctgcccagcccttccacagttcccaactggcccgaaactggccacaggaaacccatgaatgcccctcctcagtggccgaccgaggggtctctgtgcctatccga

SEQ ID NO: 408787 - DNA, 541 bp, Homo sapiens
caaacctcaccccactaaaaaaaaaaaaaaataataataataataataatagtagctaaagcaagagaggtaggtggtcaagagctggtgtcatacactgtagggtcctgggcttattcttgcttgttgctccatcatcctcagcatgtggctccatcatcctcagcatgtggcatcccctttattgaggtccagccagcatgtctatgttccagctaaagagaaaatggcaaagtcaaagaagggcacacctcctccactgaaggactctaaatgcttccggtcacagatagtaatttgctatcattaataatttgctattgggaggccgaggtgggtggatcacttcaggttggaagttcaagaccagtctggccaacatggtgaaaccccatctctgctaaaaatacaaaaaaaattagctgagcctggtggtgtgcacctgtaatcccagctactcaggaggctgagacaggagaattgcttgaacccaggaggcagaggttgcagtgagccaagatcatgccactgcactccagcc

SEQ ID NO: 408788 - DNA, 197 bp, Homo sapiens
cccttctgccatcagtcctagattaggccctgttcagccatgcaggggtgttggtttatgcgtgctgcagcagtgggcataatgaatataatttacccagtggacaaaggtgtgtaccaagtgaatttaaataattggtgtggattggccagtagctaagaagtgggcttttaaagagtattgaagattgaaaggtg

SEQ ID NO: 408789 - DNA, 673 bp, Homo sapiens
ccctctcagaaccttactagaccatgcgattggcgcgcgggccctgctacggtagacgtgaccatggatcctaagctgttctcctacggacatcctggctcatgattagtggttgaacttctctaccaattaccatagaacatccggcggatgagcactgcatgctgttctgaacaaatccagataggcagttatcgtgccgtcgatgttactgagaatctatcagatcagcgagttcctaagctgagctccgcattatctaaagttacgccccactcttcagatcctcctaagtgctcttccccaggtcttatctctttctgtcccccattcctttgatctcttggctattgaggcctttttctgggtgatcttcactctagttctctgttctatgaaagtttccacatctggctgggcatgatggctcacgcctgtaattccagcatgggaggctgaggtgggcggatcacttgaggtcaggagtttgagatcagcatggccaacatggtgaaaccctatctctactgaaaaagcaaaaattagctgggcatggtagtgcaggcctgtaatcccagctactcgggaggctgaggcaggagaatcgcttgatcacttgaacccaggaggcggaggttgcagtgagctgagatcacgccattgcactccagcc

SEQ ID NO: 408790 - DNA, 946 bp, Homo sapiens
cttcccaagcagctgggattaattaaaggtgtgtgccaccacagccgactaattttgtatttttagtagagacagggtttcaccatgtaggccaggctggtctcgaactcttgacctcaggtgatccgcccacctcagcctcccaaaagtgctaggatttcaggtgtgagtcatcatgcccagagtgagttccttcctttctttacatacatctctttagagaacttgttccatttttattgtctgccttatcattcaactgtttgctctgtgaagaatggagccctattatctttgaattctcatacctattacagtgtctggcatttaggctttcaataaatgcttgttaaaaaatgagtggcaaaaaatatatatacattttcctttaaattcttatgtcttatattttaaagaaagtttaactgtaaattttatataattacctttattttggaaacttaggtagaatgccttaaactttacaaagtcaaaagataagtttagctattaatagtataagactgttgaacacaaagaaacaataaaatggtggttaccagaggctggagggtaggggagtagggagatactggtcaaatgacacaaaatttcagttaggaggtgtaaattcaagagatctatcgtacatcatggtaactacagttaataacaatacattgcatatttgaaaactgctaagaaagtagatattgtgttctcaccacgaaaaaaagtatgtgttaatgcacatgttttaagtagcttgatgtagccattccagattatatacatctatcaaaagatcctattatataccataaacatatgatttttacttgttgattaaaaaataaattaaaaatagtgtgactttaatgctgctgacactgaaaaaatactctttccttcagcagttaaagatagcagtcaagtcttcactctt

SEQ ID NO: 408791 - DNA, 464 bp, Homo sapiens
attgagtattcctgggcaagaccaaatcctggctaccagcaagtatacagataatgtataacttgaaatactaagctgctaaagtattaaaaataaatgtttataaaacatggtattttacattgaaatggaataaaaatactttgacataaatcataatgctgctcctctgtcgacagtaaggaagaattgaaacacgagagaacagttgtaaaagtagatcaactttggactgaaagttgttaaaaagaataaagatattaatcagccatctaacagcatttttgttaaagcatccttagaatgggtagacttgtttggaagttataaattctggtatgtttgctaacaatgggtcctacttcttacagggacacctcagtggtagacctcagtttgggcagtgctgggtaactagtctgttggtattctgtctttttaaataaaaggttttctaataaaaa

SEQ ID NO: 408792 - DNA, 399 bp, Homo sapiens
tccctagaaattttctcaactttgtgagtttcatccaggtactttgccgttcttgaacatattttcatgtggttttataatatttattcaacattattttccattagttctctaattttaattgttggtaagcatttcgatgtgtagctattacatggtgcagaactgatttatccacgttaatgtctgaggagaccatgacccattttatctgctgcgtggtcagccctggtattcatggcaggttgtctgaatatttctgatgaagtctttaagtacatgtaattctgaaaacacattcccattcagtaagacttatacaggatggtaagcctaacatggcaaaaggtttctaaaaaattccataaacattaagcatatttatgtcatagcattaag

SEQ ID NO: 408793 - DNA, 794 bp, Homo sapiens
tgctaaaggagtttgcaggaagcagacacctccttttgggatggccagaaataatgactgaaatttgactttgcatagtctgatagacaagagcatttccgatgaatataatgatagcttgttgaaatgaatttctcctatgatccattttgacctttcttatttccttgttgttaatagcatttactttgtttctcgaagctgaaaaccttaagggccttcgactcctccctttcctttgtccatcatgtctaattgatggactcagagctgcatgctttcacaaacattctctcacctgatcttcacgtgaaccctgcaagattggtatttaatgttctcacttaaacggatagaaaaactgaggctaagaacagttaagtcacttcttcagtgtccctagctactggttgttggaactggtatctaaaagagagacagagatctttctgatggactctaaatttcatgctgaaatggagaagagctgaagagcacagaggagagagaatagagaataaagagggccaggcgcggtggctcatgcctgtaatcccagcgctttgggaggctgaggcgagcggatcgtttgagtgcaggagttcaagagcagccttggcaacatggcgaaaccctgtctctacaaaagttttaaaaaattagctgggcgtagtggcactggggaggctgaggtgggaggatcgcctgaacccgggaagcagaggttgcaatgagccgagagcacactactgcactccagcctgggtgacagagtgagactccatctcaaaaaa

SEQ ID NO: 408794 - DNA, 546 bp, Homo sapiens
tggcacacagtaggtgtacttttcccctttcagacaaagtgtaagcattgccatccttattttctctaggaagtgcaaagcctattttatgccctggtaggtgagtcagtggaggagaagaaggtggtagaaaaatagctggaggtaaagtagtgaagacagcagaggagattgggaggagaggcaatactgtagtaagcacctgctatacacagggagctagatgcagccattgtggggttttgttttgttttgttttttagtaatggtaggttttcctggttctaggagtaattcatgcatgctgtagaggctttggaagattacctttgtatagatcattttagtgtttcagataggaaacactgtggcacttgctgtgaaaaggatcctggtggtcatcccatgaacattgattgagtcccagatgtgtgctccggggagtgctgaacaatggaataaagaagcacatctcaggaggtgctgggaagaaacttgggatttcatctggggaacagagttgctgccagtgcttcagttagcatt

SEQ ID NO: 408795 - DNA, 450 bp, Homo sapiens
gtagatgcagagggcagtaagatataactcaactttgaaaatgtcagccgttatagttgaagaaatctgacccaagagacttcgctccgctgcaagatggaaggaagcttaagtaagacataaatttgtaatgaacttgctcacaacatccgccgccactgtgacttgcagtcatcatccattaccacaaaattaggtgagcctgtgcttgaatctcgtttcttttttttcagcagctcagagatggagtttaaatcattgatatactttatctgaaaatatgtaataatatgagaacaggaagatttaaaggggttattaagataataagatagaaaaatcatcagaagaaatttctacactttattgtattttaagtgggacccttttttcctatcccaaggaatcttagatcaagttcagtaggtggagctcttaactcttacttaa

SEQ ID NO: 408796 - DNA, 352 bp, Homo sapiens
actatgtgttagaagttgtctaaaatacccacctagccccccccccccccgccaccccggcttcttgcttaacaagtaacctcaaggaccaagaaagaggttaaagtttcaagttcaacagatggggattgcgtgtgctaataatcctctaatgaatagaatctgctcacttcaatgaaaaataagaaaaaagaaatatttgttcctttataatgtactcatttgctcatagttaatgaatatcacataagattaaaagtcgcttaaggttttcttgctatgtcctttaactggtttattttttaattttttaaattttaaatagagatggggtttcgcaatgttgcccagg

SEQ ID NO: 408797 - DNA, 424 bp, Homo sapiens
agaaagaaaatatatagtaattaaaagaaggtgagctactttcatagattcagcattcttaaggatcttcagacactattcagaagatagcaatggtggaaaaatgatttttttgttgttgtttaaagagaactagcacattggctgggtgcagtgcttcacgcctgtaatccagcactttgggagaccgaggtgggcagatcacctgaggtcaggagtttgagaccagcctgaccaatatggtgaaaccccatctctactaaaaatacaaaattaaccacgcatggtggtgcatgccttcaatcctagctacttgggaggctgaggcaggagaattgcttgaacctgggaggaggaggttgcagagagctgagatcatgccattgcactccagcctgggcaataagagtgaaagtcagcctca

SEQ ID NO: 408798 - DNA, 425 bp, Homo sapiens
gaaatatgctttgattccaattgcctagcaggagccagtagcattgcaggcatttccctagctccagttccttaatggtgccatgcactttaggaacccagaggtaatcagagaaagttgcttccaggggcaccagggcagagaacaggacaagaccctcaaaagaaagagggaagtgtgcaggagactgggctgctcaagatgacctcacctcagtaatgctgcccacagtcctacagtgggtggaacagctgactcctacctgtagcagcatggaagaactcagggcagagaaggggaggccctgatgtgtgtcaggtgccctgtgaggtcagaaacatatttgcccaagttcagctggaagaagtggggacaggaaatatgagcatgaacttagtccatgcaaccattgcctcgaacagacc

SEQ ID NO: 408799 - DNA, 416 bp, Homo sapiens
agttctttctttacccagcctttctccttcatgtgaaaatgttcattcttctctcctccttgaagctctattctttgtcatatgtaactctttatgctctggttcttctctatttctgtttcttttttgttttctctatgggctctttttttattcattacctaaatgtaggtattcccatggtttcatccttgaccttactctacaaacacgatttctatttccctgatttcatttctcatctgtatgcttatgacctttctgtcaagtattagattcacatatccaaatggcagctactgcttcacctggatgcctcatagccatttcaaatccacctagtcattcaaagtagaaacccacaggtaactatgaacccccaaacaccaccttcttaacttcatatatttaatgaa

SEQ ID NO: 408800 - DNA, 412 bp, Homo sapiens
gaacatgagttctaatcccagctctgctacaaattcacggtgtgaccctgggcaacaacttgcccctttctgagcctcagttcactcatcagcagaacagtggcaatcactctcccctcactgaggagatgcaaagtccaacaagatagcacatctaaaactgctttagaaagtcctgacatgaggcaagcatggagggggaggaaggacgggatctgagtggtcagatggcagccccactcctccacacaaatacccaactgggtcaccccgactggccatttggatccaaaggaccccaagggcatgcacccgatttgcatcagtgctctgaggtccagggtgaaaggaaagaatccccagcagcccgggccccagggcaagtggaggtggggaccgggaggaatgtgcc

SEQ ID NO: 408801 - DNA, 386 bp, Homo sapiens
agaactgtaagacagtgtgtcagaatggattcagttgcagagcaggaagcctggatcccagcgccggacggaaatgagaggtcgatggtgcaggctggtgtgggggttcctccaccgtcagggcccaggctccttctcaggtctcagtctcactcttcttagcacgaggtcaggtctcattccttggctgcgggagctccagccagcacacgttttaggaagaaggaggaaggaagaaggtaaagggtggatggcagctgcctcctcctctcttggaagctcacagagcgctgggtcacaattccctgggtagaactggatcacacaggcacccctgtcagcaaaagaggctggaaaaagtatttctgaagctgaatcaaattaag

SEQ ID NO: 408802 - DNA, 385 bp, Homo sapiens
ttaaccttgcttgaatttcatcagatttaacagtgagactcagcggctagtgtccagtatctcctctagagtgcttcttatgaatagaagtaacagtggcagaaacacgtaaagatcccccctgctgtgttttccatttcttatatttgctcttttggagaaatgttagtctgctttcaagaaaaaaggacagagtagataatctttttgctggttcgagatctagaattacgacaagcttgctgacagtgggaaggataagagaagagaggttgctgtttttcttttgttcagccttctcttctctgttccataagtgctctgatacaaagattttctagagctaaaaaatgtttcagtcttttttaaaaaccttatgtggctc

SEQ ID NO: 408803 - DNA, 1152 bp, Homo sapiens
ccctcctaagagttcctctgctgtacgactgcactcccgcaccctcccctaaatcccccctcttcggcctgtttaccttttaacttggcttcgttgcacgtttgtgtgtgtgtgtttgctcttcgcagcctcttgagcgtcttttgtacttaattcttacactgtggacgctctctcgcgcccgccatcccccgacccctctgatctccgatccttgacgatgtctagcctgcattgattggcccttttccctgggtatggcagatctattgcttgatgatcctctccccccaagaattctaacacaggagctgtcctgaggctctggatgactttattcttcaaatggctttaccctcccagtagctccagggaccctccattttccatatccaggaaaatgtgatgcgccacaggtatcagcgtctggatcgccacttcacgttttagccacaagtgactcagtggaagatccagagtcaacagaggctcgtcaggaagatgtctacagaaaaggtagaccaaaaggaggaagctggggaaaaagaggtgtgcggagaccagatcaaaggaccggacaaagaggaggaaccaccagctgctgcatcccatggcccaggggtggcgtccaggtggcagagcagctaggaacgcaaggcctgaacctggggccagacaccctgctctcccggccatggtcaacgaccctccagtacctgccttactgtgggcccaggaggtgggccaagtcttggcaggccgtgcccgcaggctgctgctgcagtttggggtgctcttctgcaccatcctccttttgctctgggtgtctgtcttcctctatggctccttctactattcctatatgccgacagtcagccacctcagccctgtgcatttctactacaggaccgactgtgattcctccagcactcactctgctccttccctgttgccaatgtctcgctgactaagggtggacgtgatcgggtgctgatgtatggacagccgtatcgtgttaccttagagcttgagctgccagagtccctgtgaatcaagattgggcatgtgcttggtcaccatttcctggtacaccagaggtggccgaatcatctccatatcttcgcgtacggtgatgctgtattaccggtcaga

SEQ ID NO: 408804 - DNA, 1035 bp, Homo sapiens
ccctcctaagagttcctctgctgtacgactgcactcccgcaccctcccctaaatcccccctcttcggcctgtttaccttttaacttggcttcgttgcacgtttgtgtgtgtgtgtttgctcttcgcagcctcttgagcgtcttttgtacttaattcttacactgtggacgctctctcgcgcccgccatcccccgacccctctgatctccgatccttgacgatgtctagcctgcattgattggcccttttccctggggaccctccattttccatatccaggaaaatgtgatgcgccacaggtatcagcgtctggatcgccacttcacgttttagccacaagtgactcagtggaagatccagagtcaacagaggctcgtcaggaagatgtctacagaaaaggtagaccaaaaggaggaagctggggaaaaagaggtgtgcggagaccagatcaaaggaccggacaaagaggaggaaccaccagctgctgcatcccatggcccaggggtggcgtccaggtggcagagcagctaggaacgcaaggcctgaacctggggccagacaccctgctctcccggccatggtcaacgaccctccagtacctgccttactgtgggcccaggaggtgggccaagtcttggcaggccgtgcccgcaggctgctgctgcagtttggggtgctcttctgcaccatcctccttttgctctgggtgtctgtcttcctctatggctccttctactattcctatatgccgacagtcagccacctcagccctgtgcatttctactacaggaccgactgtgattcctccagcactcactctgctccttccctgttgccaatgtctcgctgactaagggtggacgtgatcgggtgctgatgtatggacagccgtatcgtgttaccttagagcttgagctgccagagtccctgtgaatcaagattgggcatgtgcttggtcaccatttcctggtacaccagaggtggccgaatcatctccatatcttcgcgtacggtgatgctgtattaccggtcaga

SEQ ID NO: 408805 - DNA, 809 bp, Homo sapiens
tagcacctgaatcttcgtttctctcccagggaccctccattttccatatccaggaaaatgtgatgcgccacaggtatcagcgtctggatcgccacttcacgttttagccacaagtgactcagtggaagatccagagtcaacagaggctcgtcaggaagatgtctacagaaaaggtagaccaaaaggaggaagctggggaaaaagaggtgtgcggagaccagatcaaaggaccggacaaagaggaggaaccaccagctgctgcatcccatggcccaggggtggcgtccaggtggcagagcagctaggaacgcaaggcctgaacctggggccagacaccctgctctcccggccatggtcaacgaccctccagtacctgccttactgtgggcccaggaggtgggccaagtcttggcaggccgtgcccgcaggctgctgctgcagtttggggtgctcttctgcaccatcctccttttgctctgggtgtctgtcttcctctatggctccttctactattcctatatgccgacagtcagccacctcagccctgtgcatttctactacaggaccgactgtgattcctccagcactcactctgctccttccctgttgccaatgtctcgctgactaagggtggacgtgatcgggtgctgatgtatggacagccgtatcgtgttaccttagagcttgagctgccagagtccctgtgaatcaagattgggcatgtgcttggtcaccatttcctggtacaccagaggtggccgaatcatctccatatcttcgcgtacggtgatgctgtattaccggtcaga

SEQ ID NO: 408806 - DNA, 534 bp, Homo sapiens
ggcacacaagccatgccccctcttttctctttgggataccaccagtgccgctggaactatgaagatgagcaggatgtaaaagcagtggatgcagggtttgatgagcatgacattccttatgatgccatgtggctggacatagagcacactgagggcaagaggtacttcacctgggacaaaaacagattcccaaaccccaagaggatgcaagagctgctcaggagcaaaaagcgtaagcttgtggtcatcagtgatccccacatcaagattgatcctgactactcagtatatgtgaaggccaaagatcagggcttctttgtgaagaatcaggaaggggaagactttgaaggggtgtgttggccaggtctctcctcttacctggatttcaccaatcccaaggtcagagagtggtattcaagtctttttgctttccctgtttatcaggttggtttttattcctttgttcttttctagttacctgaaagagtgaaagaagtggaaaaagtgattgaataaaactattctttttcattg

SEQ ID NO: 408807 - DNA, 646 bp, Homo sapiens
ggcacacaagccatgccccctcttttctctttgggataccaccagtgccgctggaactatgaagatgagcaggatgtaaaagcagtggatgcagggtttgatgagcatgacattccttatgatgccatgtggctggacatagagcacactgagggcaagaggtacttcacctgggacaaaaacagattcccaaaccccaagaggatgcaagagctgctcaggagcaaaaagcgtaagcttgtggtcatcagtgatccccacatcaagattgatcctgactactcagtatatgtgaaggccaaagatcagggcttctttgtgaagaatcaggaaggggaagactttgaaggggtgtgttggccaggtctctcctcttacctggatttcaccaatcccaaggtcagagagtggtattcaagtctttttgctttccctgtttatcagggatctacggacatcctcttcctttggaatgacatgaatgagccttctgtctttagagggccagagcaaaccatgcagaagaatgccattcatcatggcaattgggagcacagagagctccacaacatctacggtttttatcatgtaagacatccaaaaagaattaaactgggcttgtgtgacccaccttttggctgaaggt

SEQ ID NO: 408808 - DNA, 786 bp, Homo sapiens
ggcacacaagccatgccccctcttttctctttgggataccaccagtgccgctggaactatgaagatgagcaggatgtaaaagcagtggatgcagggtttgatgagcatgacattccttatgatgccatgtggctggacatagagcacactgagggcaagaggtacttcacctgggacaaaaacagattcccaaaccccaagaggatgcaagagctgctcaggagcaaaaagcgtaagcttgtggtcatcagtgatccccacatcaagattgatcctgactactcagtatatgtgaaggccaaagatcagggcttctttgtgaagaatcaggaaggggaagactttgaaggggtgtgttggccaggtctctcctcttacctggatttcaccaatcccaaggtcagagagtggtattcaagtctttttgctttccctgtttatcagggatctacggacatcctcttcctttggaatgacatgaatgagccttctgtctttagagggccagagcaaaccatgcagaagaatgccattcatcatggcaattgggagcacagagagctccacaacatctacggtttttatcatcaaatggctactgcagaaggactgataaaacgatctaaagggaaggagagaccctttgttcttacacgttctttctttgctggatcacaaaagtatggtgccgtgtggacaggcgacaacacagcagaatggagcaacttgaaaatttctatcccaatgttactcactctcagcattactgggatctctttttgcgga

SEQ ID NO: 408809 - DNA, 382 bp, Homo sapiens
tgggaggcagagcttgcagtgagccgagatcacaccactgcactccagcctgggcgaccgagcaagaatccgtctcaaaaaaaaaaaaaagactatggatctcataggctttcactgtttgacgaaaagtagatgttatgataggacttagaaaaaaatgcactgtcctcttgcaaatataaagtttgtggggaaagtacctcttcctgattcttctcttcataggcaagcagattttctatagtttagctagtttctcgtgcttaatatataaacaatgcaaactggaaaacacataagtttctcagaaagatgtctttatttactatgttgttttgaacagctccatctactactgagggtgctcaccagctacaggggg

SEQ ID NO: 408810 - DNA, 553 bp, Homo sapiens
ggaggcagaggttgcagtgagccgagatcaaaccactgcactccagcctgggcagcaaagcaagactctgtctcaaaaaaaataaataaataaaagaaattatgttcacttccaataggacaattttgtattttctcagaaatattaaaaggagccaggcatggtggcttgaacctgtagtcccagctactttaggggttgagacaggaggatcacttgagtctaggagtccaaagaccagcctgggcaacatagtgagactctgtctctataaaacattaaaaaattagccagatgcttgccaggcgtgatggctcacacctgtaatcgcagcactttgggaggccaaggcaggtcgatcacaaggtcaggagttcaagaccagcctggccaagagggtgaaaccccgtctctactaaaaatacaaaaaattagccgggcatggtggcagacacctgtaatcccagctactcgggaggctgaggcagagaattgcttgaactcaggaggcagaggctgcagtgagctgagatcatgccactgcactccagcc

SEQ ID NO: 408811 - DNA, 764 bp, Homo sapiens
gaattacaagtagtctgagcaggaagaacctctctccagctgaaaagactctcaggaagtagtattggtttggggtttgagtaatgcactgaatttgcaaaggcaaagagtgacacaagaaggatgaggctctatagattaagaaatcagtatgagcaagaaatgataaatgctgggcattattatgaaccaacaaatacaccaaataggctagagtgtagggcttataaacaggagacaactaaaagaatgtgattctaatagaaaacagtaattccccaaacttgctaatcatctaaggaatttcttgaatatgtatttatagatgccacccctagagacagctggcttgggaagcctgagatgggatcatagaatttgatcagttctatattatgtgctttttttgttttatttctctaaagaattcatcttgtcttcctgttttctttattcttactaatatgcaaatgatttttacagctcatgcagtcctgtaatcatgattattgctatgctactttgcaaaaaataaaaacaaaaaattcataccaaaacaaatacagactagatttggggtggggaggggaaataagtgagtcttaaaagtagttttgttacttgcaacaaactgtatatatagaaactttgtacaacccagggtgactatttccaaagactgttacctatttgttgaacaacagtgggaaaactacttagcctaaatgaggaggaggaatattgtatgcttccatcgtaaccgt

SEQ ID NO: 408812 - DNA, 242 bp, Homo sapiens
gaaaaacaaaaaaaggagatgggggtgggagattgacatcttgtggatcacagataatagcatcaatccaaaagaggcagaagtttgctaattatttgctgaatttagagaagtgtccctctcacccatttgcatccttatagacttttctgaaaaagtgacagcaccccagaggtgtcccataaccattagcccgtcttacacactctaatcccatagcgtaagtctgggtgggctaaccc

SEQ ID NO: 408813 - DNA, 426 bp, Homo sapiens
gcaacgagagcgaaactctatctgaagaaataatagaagagaagagaagaataaaataaaaagtaaaataaaatagttctgatggtacatgataccatactaaacctagctttaaacaaataagatgaccaggcacattggttgacacctgtaatctcagcactttgggtggccaaggcaggcgggtcacttgagcccagcagttcgagaccagcctgggcactctagggagaccctgtctctaaaaacaaaacaaaaaaccaaaaatttgccaggtgtggtggcatgggcctgtagtcgcagctactcaggctgaggcaggaggatcactggaacttggaaggttgaggcggcagtgagctgtgatcatgtcatccacactccagcctggatggcagagtaagaccccatctcaaaaaaacaaaa

SEQ ID NO: 408814 - DNA, 353 bp, Homo sapiens
gtgcagtggcgtgatctcggctcactgcaacctcggcctcctgggtttaagcgattctccttcctcagcctccagagtagctgggactacaggcacgtgccaccatgcccggccaatttttatatttttagtagagacggggtttcaccatgttggccaagatgttctcaatctcctgaccttgtgatccgcctgcctcccaagtgctgggattataggcgtgagccaccgcgcccggccttgcgtagccatttttatggtgaaagagaacaacagctcaaccacagatttatattcaagtctgttcattagcatgtgtgcttggaaaaagtgacttttattccatatttaat

SEQ ID NO: 408815 - DNA, 395 bp, Homo sapiens
aaatgctgtaactaggaatgggtcagtgaagttcaaacgacttttccttgagggagtattttaatcggacaagggaactctttttcttttgggcattggccaacaggactgagaagccagagagcttgcacctgagccatctcagccgtgagagtaacagtcctaggaaaatagatgggggctgggggtaaggaaatgtgctgaagacagagctattctggatggattttggtttgcaaaaattctactttaaaacaattttgcctgtagcaagtacatttttttgcaattggagtgtaaacattctgtgtggcaacagttaaaagctgttataacaatttgcttgggtgtgtgtgcatgtgtgtgtgtgtgtgtgtgtgtgtatacattgttgc

SEQ ID NO: 408816 - DNA, 401 bp, Homo sapiens
ttcctcctcgtgcccgccggagagaatagtttcgctgaaaatttctctttgtcaatgggatcagtattaaatcagcaatatacaagcggggctagcaaaggtggtggagaagagcccgggaagctgccggagccggcagaggaggaatcccaggttttgcgcggaactggccactgtaagtggttcaatgtgcgcatgggatttggattcatctccatgataaaccgagagggaagccccttggatattccagtcgatgtatttgtacaccaaagcaaactattcatggaaggatttagaagcctaaaagaaggagaaccagtggaattcacatttaaaaaatcttccaaaggccttgagtcaatacgggtaacaggacctggtgggagcccctgtttagg

SEQ ID NO: 408817 - DNA, 905 bp, Homo sapiens
tatctgttagatctagtgatgtctgaaggaacccaaaggtcaagtaatccaactccctcatagtgtacaaagaaatcttgcatatcttccacaggtttattgacttttatccaacacttttcatgttttaatttcagcctttgtgaaagttgatattaaaaatacagaggtgagaacttgttagaataaccaaatgaatccacataatgttagatcaaaatacaaatgacaaagataaaatgctatgtagtgcctaccctctttacattttgtctattttatttaagtttttctgtattgtagttaacatcaaacattgtccagtcttgtaggtgaggaaaccaggacgaaatatattttgtatttcaacattgacataaatctgaaattgttggttctactaatagtactctgcactgaaggcactggcaaaataatggttaaaattgagcacaggtgttccaagttgtgtgtgtgtgtttattactgaacattgggagccgtgatagggaagtaatttgtgagttcatgatttcttaaggttctagtgtgacatttatacactgataaaactcaggcaagcaaaatgtaattaaatgttccccctgccccccccccttttaatatatatatacggagcttcactcttgtcacccatgctggagtgcaatgacatgatctcaggtcactgcaacctctgcctcccgggttcaagcgattctgcctcagcctgacttcccttctgtttctttattttcgcactgtgtagaccagctgactgccttaatatgtattgaatcaattcaagatttatgttcatagagtgctgtgtttatacagtggtgtcatgtgatttcttaatagcctatagatccaataaatacagaggaatattagttacaact

SEQ ID NO: 408818 - DNA, 331 bp, Homo sapiens
aaactattggacaaggcagaatgaatatagcctcccatggcactgcactgtagaccaccttacatattggtattgactgttgttaagcagcacacattgaatgcagaagttcaatcatttatgaatctacccaggtgaactattacctattttgtctgtaagaattcttagctgggcatggtggcttacacctgtaatcccagcactttgagaggccgaggcaggcagatcacgaggtcaggaaaatgagaccatcctgcctaacatggtgaaaccccgtctctacaaaaaatacagaaaattagccaggcgtggtggtgggcgcctgtag

SEQ ID NO: 408819 - DNA, 2738 bp, Homo sapiens
gggtgggtggagctgtgggattaggaaaactggaatgaagactcattcttttgaaactcagcctcagataaataacaaactaggaaatggaaatctgtttcaagaattgcagtaacatctactctaaggaattagtaatttcactttttattatttgtaccaaatgtatgtgtgtgttgtgtatgttggtgtaaatgtggagaggtggtagcaatacatactgatgctgcttgtaatttgttgcagggaattactgcacaatctcagaaaatagaaagcttccccagtgctttctgtcatcagagttgggatgattgtgaggttttgaatgatagtattggacctaagaaataggattagcatcatgatcagaactgttgagaatccttgtacaattatgtacattattgcatgtagagtaaacctgagagcttagagatgtatacgtttccactgctggaaaatcattataagttagggcaacattttctataggtggcagcagtaggagctcatcacattgaacattttcagattttaaaatgaaaattttcatccgtaggaatggcccaatgtatagttattagctactgagcttagaactcttgacccatgagattttttttttaaatttttatttttatagaggcaaggtcttgctatgttgtcaggctggtctcaagctcctggcctcatcagttctcctgccttccaagtagccggaactacaggtgtgcaccattgcacctggcctcatgagtattttagttagataagatttgtttggttcagtgggtcttagttttttaagacctgttaatttgtaattagacatcttgggccttaaactgtatttttgttttagtggtgaggttgggttttactttgtgtattccagcgttctcaactttgtcagatattgctagggaccagtgagatagataatccaaaaataataatttgactttggttgagtatgtcattaccacagtgttagttgaattgcactttaggttagaaaagttaattttcacatctgtgctgcgggttaggtgatattgtcctcagcacaatagatgaggaagaaactgaatcagaacagttaaatgacaggcttccaagtcatccatgtagcaaggagcacatttgcctcccaaactgatgctttttctctagaaccataatgcccccctaattacatttcagtagcatagaccgcaatgaacttcctactgtagggagacttgagtctggaatacattcagaacaaggttaacattacagttcttaatttcctttagggcaaacaagataattaaacttgggttttgtgagtctttttttgatttgcagattatatatggtaacacaataatggtggtttgtttttaagttttttctcatcaggtttgataatttaatgcaaacttcaaatctggatgtgaataataatatttttattatagtataatccaggtgagtttatagaatttgtgttttgtgcttataaactgtcaccttctgatacttttcttcatccctctatttgaaaaacccttgtagaatttaacgatttaatggaaaatgttgcactttatagaaggccattttagaacttacaggtaacctttttgaagagcttagatttgtagaccactgtttatgctgagtgacatttcttttaaatggttgcatttgtcaaatctataaagatgttttttatattgcagttttctttttgtgctacttaaaggaatctttgcaatgctgcatatagataattgttgacctttttagttcagcagtttttaaacttgaagtaacatcagcatttatttgaatatcaggttttagctaactgcctaatgtaccaaaaaaaaattagcaatgtcttatgtgggatgaggggttaagttaaagttgctgatcaagtaatggccgtgtggcacaagatgataactaagaatttctggttctaaggtagtaatgccttttgggatttatatttgtttaatgttgagattctggggaccataggtgggcctgtcaactcttaacagactatagtaaaggagagatggtggcacatgtgagataaaacttgtttatatttacattcttattagtggatagatatcacctcagtacaacactgaaattaaactgccttgttcatgctttcatgtctcaaatcaaggcctaaatgagtaaaaagatgattacagattacctaaaacccttaaccagttttggtttttgattatgcatatgtgttggcttgcaattaggtttttagtttctgtttatgtgacttgtttgaaaacattggattcgtcttctctccacagtttctacttgaacctagtagcttattttaattccctgtaagaggaaaataatatagggaatctgttcaactattcctttaataaatcatgtgacttggccaattacagaaattcctaagtgtagtattttgaaatgtggccagtgtcccagatttgtaaggtacagtgtgcatacagtgtgtcttaggatttttttaagtaaattaaggatgtttaccagaaattattgatttactgaaccaagtatttattttcagaagcccacttttggggaaggttgcctatatttttgatagtaattagatggaagattaaatcctgtttaacctggatagaaacagttttaactattgctgaagttaaaatcactttggggtggggtggggtggc

SEQ ID NO: 408820 - DNA, 481 bp, Homo sapiens
tccctgcacaagctctcttctcttgtctgctgccatgtgagatgtgcctttcaccttctgccatgattgtgaggcctcccccgccacatggaacttttaaacctgtttcttttgtaaattgcccagtctcaggtatgtctttatcagcagtgtgaaaatggactaatacagcacaatagatgacagcagacctcaaattgatgtaaacctcatggtttaggaatagttaacttgatcttgtacaagtagtgtttgaatagtgaaactgagcattaagtccatagcttatataaccaaaaacttgcaaagatacacacagagggtgattgcatttactggtgcaactgaccacttgcctgtgctgttattcatgttaattattgtcaaaaaagtatctcgggttttaaaagaagataatcatactatctgcaaataatgttatctcctttttactaataaaaggtttgtcatatagtggaga

SEQ ID NO: 408821 - DNA, 352 bp, Homo sapiens
taataatgaataaaaatgatctcagttaatttgtggctagaaagtaaatctcttgagaaacttaggtgtcacaagggtttttgcaaatttgcatgtggagaatccactgtaccagacagagcggctctttgtataaaggcctacattggtcttccctattggtcctcacacttctcatttcaatcaacctttctttactgtgttggcaacaagtctttccttagacaatttcatatttctcacatttaaatgaagtaatgtttagtgcaaagtggcttcctttaaaatattagttatctgttagactaactactgaagttattcatgtatttattcaagtgatatttctgag

SEQ ID NO: 408822 - DNA, 687 bp, Homo sapiens
ttttttgagacggagtctcgctctgtcacccaggctggagtgcagtggcgtagtctcggctcactgcaagctccgcctcccgggttcacgccgttctcctgcctcagcctctctgagaagctgggactacaggcgcccgccaccacgcccggctaatttttttgtatttttagtagagacggggtttcactgtggtctcgatctcctgacctcgtgatccgcccgccttggcctcccaaagtgctgggattacaagcgtgagccaccgcaccccgcctgaaaatattttctaaaaagataaaaaatatacataacgatgaaaaataatacaaatttaaaaaccaatacagtataacaactatttacatagtgcttacattgtattaggtgttataagcaatctagagatgatttagcaagtatacaggaggatgtgcctaggttatatgcaaatactgtgccattttatatcaggaacttgagcatctgcagatattggtatcggagggcggtcctggaaccaagcatccacggatactgaggggtgacatttcatgaagtgtagatcattgtattcagagattgtaaatgaaaaaaatatagaaactatttagttttggtagattttttttctgactatgtgaccagattgaatttcctcataaagaaaaaatggcgtgccttgtg

SEQ ID NO: 408823 - DNA, 295 bp, Homo sapiens
caagctatggaagaagtaggggatgggacccaccttcaggagctgctgttcatcgtagagggaagccctccattgcttggagaaagacagggaagaccatcccacgtcaccttgcatggtgagaatgttgagagctttcagaatttgagaacaaaggaaattcccagaacgctagtcttaggcaaggctttctagaaggggcaggacttgaactggctttgaagatcagtcagccataaggtagacccaaggtgtcaaggaagacatcactgtggagagggaacagcaaaggccc

SEQ ID NO: 408824 - DNA, 605 bp, Homo sapiens
accaccacacctggataatttttgtatttttagtagacacaaagtttcaccatgttggtcagactggtcttgaactcctgacctcgtgatctgcccgcctcagcctcccaaagtgctgggattacaggcgtgagccaccacacctggcctttctgcaacatttttttaaaaaaatctaataaatcttagatttttaaaaaagaattaaaatgtgggagttctcagaaagaaataaacacatgagaataagattattacacattttggaaggacttttgaggaatgatgtgatgtgtagagaatagaaagatttagatatatgcctgtgacaggaatagattctgggttcaggggtccccatctgtcaaatgagaagattggattatctaatcttttagatccttaacaactctgatattctgagattctctcatttgtagaatgcccgctgatgcattgtttattttttttgctcataatataaatatcagattatgtttaggagtggattaggtaattagtgtcactacatgtatcattaaaggtcctaaaaggaattgttaggcggcaggctttgtgttacgtgttacatggagtgagggtag

SEQ ID NO: 408825 - DNA, 489 bp, Homo sapiens
cgagactcggtacccgtctcaatgttctacacctttctgcaacatttttttaaaaaaatctaataaatcttagatttttaaaaaagaattaaaatgtgggagttctcagaaagaaataaacacatgagaataagattattacacattttggaaggacttttgaggaatgatgtgatgtgtagagaatagaaagatttagatatatgcctgtgacaggaatagattctgggttcaggggtccccatctgtcaaatgagaagattggattatctaatcttttagatccttaacaactctgatattctgagattctctcatttgtagaatgcccgctgatgcattgtttattttttttgctcataatataaatatcagattatgtttaggagtggattaggtaattagtgtcactacatgtatcattaaaggtcctaaaaggaattgttaggcggcaggctttgtgttacgtgttacatggagtgagggtag

SEQ ID NO: 408826 - DNA, 489 bp, Homo sapiens
aggaagtggtacataaatatgtctgttattatgcaatcgtaggtcatgataatttattcagttatagaaaacatgccacagaagcctatgtaacaagtggtgcttctttagaaagttgtcattagaatgttctgaggaagttaagcagctgcttcatcaatcccatgacacatgccttgttagcatgcccatcaaataatcagatcaaacacctgctccttattgccatacccacgaactgttaaatataaaaaaattcaaagtatttgacatcttaagcaaatatccagaatatttttaagtaaaaaaccatcttaagtattcaaaatttccttggttttttaaaggtgataattttgctttgtgttacttttttgctcttgaatgtatcgttatgatggtctcttataatcatggtatctttcacagaataaaaattaaaaataatgccagggtgcaagtgaccaaggccttatcttgaaagttaaa

SEQ ID NO: 408827 - DNA, 846 bp, Homo sapiens
tgtcgaggttcaaccatcattaactcatggtcaatcatctgtcatgcccatcttgtttgatgcgtgtctgcttccaaacctgtctgcctttccaatcccagcaatgccagggcatttcacttttcaatttattatttacatatatatcctaagtggatacattcatctactgtactctacacactgggttccacaaaagcaagcagacatgtgtggtgctgtacaactacttttatagaacttgccaccatacatttataaattataaccatataatgtaccaacaatgctttgaggtagaatactaccactttacagatgaaggaactgaaacacagaggttaggcaacttgcccaccatcacacagtgagttaagcagcagaactgagatttgaaccccaaacagtctggttccagaggctatgcctttagccatgacaccacagccttcacacaggaatttacatgcactactgaacgctcaactgcttagccaaagcttctgcattggaatggttcctgccttgttaccccagatcaatgaatagagactttccttaaaacactattcggatggctctcctcatccccaaacaataccacaagttactccagggcatattctgtttataattttgaaatgtcaggtttcatttcattcatggcatcaaaactttgaaatttgctgagatgaaacttacggcacagtatatgatcagtttttataaatattcaatgtgtgcttgaaaagaatatatattctgcaattgttgggttctatacacatccactagattgttagtcatgtgttcagctttatatgcatataaaatgttaaaatttca

SEQ ID NO: 408828 - DNA, 472 bp, Homo sapiens
cacttttaaaaggtgagttttacggtatatgaataccattcacataccatatttaaactcaatttaaaaatcatatagaattgaagacaccaccctgaacaacacagtgagaccccatttcttcaaaaaactttttttaaaaattagcagagtcagggcaaaggagaggagctgagatgagagggttccttgagcctaggaggttgaactatgattgtgctactgcgttccaatctgggtaactgagtggaaaccctgtctttaaaaaataaataaaggaaaacagtggtgtacttctaataaactgctatcaaacctggatacttttgacagtgaggggtcttacttaatagttacacctgtctcaggtaaaccagaatgtatgttctccctactttggtgtgttgaaactatttttccttcagaaatgtgaagaatataaaattcttctcatattcttctttagcaagtg

SEQ ID NO: 408829 - DNA, 384 bp, Homo sapiens
gtcaccacatagatctttttataaggagcaatatttttaattgtgatcttataaaaaatataaaaattctgtttttgttatggtagcatcctatagaatttgagcccaaagtgcaaatttaggtgcagttgttgcaagcatttcttcggtaggtgggcagaactgtgagatctgtggaaattgtagtgatggtgctgattcctagtgaggcagcttttattaatgtctattatcaattgccatgggcttataatgactgaaaggagaatttcattcatagtatttactatttgctacataatcttaaattgccaaaaatttccttggacactcaagttatgtttgggttaattcaaatatttaatgctagtggctcaatctgaa

SEQ ID NO: 408830 - DNA, 1264 bp, Homo sapiens
ctcccaagtagctgggactacaggcatcgaatctttttgcctaatttttcgtttggttgactgttttcttaatgaattttgagggttctgttcattttctggatacaagtcctttgtcagatatgtgatttacaaatatgttctgtttgtaagtttttattcttttaacaatttcacagaggtttttattttaatgaagtctaatttatccatttttaaattttatgaatggtgactttgatgttgtctctaagaactctgcctaactctaaagtcacaaagatttctcttctgtcttcttctaagagttttataattttacatttaggtctctgattttgagttaaattttgtataagatgtgaggtactgtaaataggtcaaggctcattttaaaaaatatgttgaggtcgggtgtggtggctcatgcctgtaatcccaacactttgggaggctgaggtgggtgggtcacctgaggtcaggagttccagaggagcctggctaacatggcaacagaatgagactgtctcaaaaaacaaaaaaatcagtgttcatgtgaaaacctgtgcgtcaatgcttatatcaactttatttgtaaaaaataaaaataaaaaactggaaacaactcaaatgtctcttatctgggggatgtataaacaaactgtgatgcacccttacaacggaatacaactctgcagtaaggaacgagccaccgatgcacacagcaatctgcgtgcattttgaagccgcactgattgaaatgcactgcgccatatgcagccagacccaaaaggccacgtactgtattactgcacttatgtacgttctggaaaaggcaaaatgatagggaaggtgttgccaggacttaggattggggactgttttgatgatactgggatagcacaggggaatcctgggggaagggtgactgttccatcttccttgtggtggtggttacaggactgcgtttgtcaaaactcatggaattacacaccagaaagagcagatttcactgtgtgtaaattttcacctaagttataatagcaactcatcctttcctaatgacattttaccacaatcggtccaattgtctgggtgatagaaggatgcatcacggcgcgctcctgggcttctctaaccaactccacgttttcgcactgccagcccgtggctcgaaatctgatgtggtgggagcatttacccatggaaattgggaaacgctacagatcaaaggtgaatttgttatgttaataatgccaattaa

SEQ ID NO: 408831 - DNA, 773 bp, Homo sapiens
tgttgggattacaggcatgagccaccacacccgacctcaacatattttttaaaatgagccttgacctatttacagtacctcacatcttatatcaactttatttgtaaaaaataaaaataaaaaactggaaacaactcaaatgtctcttatctgggggatgtataaacaaactgtgatgcacccttacaacggaatacaactctgcagtaaggaacgagccaccgatgcacacagcaatctgcgtgcattttgaagccgcactgattgaaatgcactgcgccatatgcagccagacccaaaaggccacgtactgtattactgcacttatgtacgttctggaaaaggcaaaatgatagggaaggtgttgccaggacttaggattggggactgttttgatgatactgggatagcacaggggaatcctgggggaagggtgactgttccatcttccttgtggtggtggttacaggactgcgtttgtcaaaactcatggaattacacaccagaaagagcagatttcactgtgtgtaaattttcacctaagttataatagcaactcatcctttcctaatgacattttaccacaatcggtccaattgtctgggtgatagaaggatgcatcacggcgcgctcctgggcttctctaaccaactccacgttttcgcactgccagcccgtggctcgaaatctgatgtggtgggagcatttacccatggaaattgggaaacgctacagatcaaaggtgaatttgttatgttaataatgccaattaa

SEQ ID NO: 408832 - DNA, 908 bp, Homo sapiens
  misc_feature (754)..(754): n is a, c, g, or t
  misc_feature (802)..(802): n is a, c, g, or t
cgatgattcattcagtgaagctcactccgagttcctaaaagcagccagcaacttgagggataactaccgatttgcacatacgaatgttgagtctctggtgaacgagtatgatgataacggagatggtatcatcttatttcgtccttcacatctcactaacaagttggaggacaagactgtggcatatacagtgcaaaaaatgaccagtggcaaaattaaaaagtttatccaggaaaacatttttggtatctgccctcacatgacagaagacaataaagatttgatacagggcaaggacttacttattgcttactatgatgtggactatgaaaagaatgctaaaggttccaactactggagaaacagggtaatgatggtggcaaagaaattcctggatgctgggcacaaactcaactttgctgtagctagccgcaaaacctttagccatgaactttctgattttggcttggagagcactgctggagagattcctgttgttgctatcagaactgctaaaggagagaagtttgtcatgcaggaggatttctcgcgtgatgggaatgctctggagaggttcctgcaggattactttgatggcaatctgaagagatacctgaagtctgaacctatcccagagagcaatgatgggcctgtgaaggtagtggtagcagagaattttgaatgtgatatgaaatagattctgatgattatcccttgtggcactgagactgagcagttagactgcagagtacanactgattgatgcaatgtgccacagtggcttcatgaggagtctcatctntcgcaagagtatcagaatgaggctataggtttgttcacgagtcacctgtagaaacgaaaagcggtctagtgacatgaagctcatgactggtgctgatctgcgagtt

SEQ ID NO: 408833 - DNA, 1592 bp, Homo sapiens
cgatgattcattcagtgaagctcactccgagttcctaaaagcagccagcaacttgagggataactaccgatttgcacatacgaatgttgagtctctggtgaacgagtatgatgataacggagatggtatcatcttatttcgtccttcacatctcactaacaagttggaggacaagactgtggcatatacagtgcaaaaaatgaccagtggcaaaattaaaaagtttatccaggaaaacatttttggtatctgccctcacatgacagaagacaataaagatttgatacagggcaaggacttacttattgcttactatgatgtggactatgaaaagaatgctaaaggttccaactactggagaaacagggtaatgatggtggcaaagaaattcctggatgctgggcacaaactcaactttgctgtagctagccgcaaaacctttagccatgaactttctgattttggcttggagagcactgctggagagattcctgttgttgctatcagaactgctaaaggagagaagtttgtcatgcaggaggatttctcgcgtgatgggaatgctctggagaggttcctgcaggattactttgatggcaatctgaagagatacctgaagtctgaacctatcccagagagcaatgatgggcctgtgaaggtagtggtagcagagaattttgatgaaatagtgaataatgaaaataaagatgtgctgattgaattttatgccccttggtgtggtcactgtaagaacctggagcccaagtataaagaacttggcgagaagctcagcaaagacctgaatatcgtcatagccaagatggatgccacagccaatgatgtgccttctccatatgaagtcagagttttcctaccatatacttctctccagccaacaagaagctaaatccaaagaaatatgaaggtggccatgaattaagtgattttattagctatctacaacgagaagctacaaacccccctgtaattcaagaagaaaaacccaagaagaagaaggcacaggaggatctctaaagcagtaggcaaacaccactttgtaaaaggactcttccaccagagatgggaaaaccactggggaggactaggacccatatgggaattattacgtctcagggccgagaggacagaatggatataatctgaatcctgttaaattttctctaagccatttcttagctgcactgttatggaaataccaggaccagtttatgtttgtggttttgggaaaaattatttgtgttgggggaaatgttgtgggagtcgggttgagttgggggtattttctaatttttttgtgcatttggaacagtgacaataaataagacccctttaaactgtaaaaaaaaaaaaaataggaatgcggtccatggtttacttaatcgtataatatcagtgttcattttcttattttgataattgtcataatgttgtgtgaaatattctctttagggagcctgggaaagaatatataagaactctactatttttgtaacttttgtggaggactgcaatcatttctaaataaatagtcttaaaaataactaaagtaataaaaataataaagtacatga

SEQ ID NO: 408834 - DNA, 1538 bp, Homo sapiens
cgatgattcattcagtgaagctcactccgagttcctaaaagcagccagcaacttgagggataactaccgatttgcacatacgaatgttgagtctctggtgaacgagtatgatgataacggagatggtatcatcttatttcgtccttcacatctcactaacaagttggaggacaagactgtggcatatacagtgcaaaaaatgaccagtggcaaaattaaaaagtttatccaggaaaacatttttggtatctgccctcacatgacagaagacaataaagatttgatacagggcaaggacttacttattgcttactatgatgtggactatgaaaaattcctggatgctgggcacaaactcaactttgctgtagctagccgcaaaacctttagccatgaactttctgattttggcttggagagcactgctggagagattcctgttgttgctatcagaactgctaaaggagagaagtttgtcatgcaggaggatttctcgcgtgatgggaatgctctggagaggttcctgcaggattactttgatggcaatctgaagagatacctgaagtctgaacctatcccagagagcaatgatgggcctgtgaaggtagtggtagcagagaattttgatgaaatagtgaataatgaaaataaagatgtgctgattgaattttatgccccttggtgtggtcactgtaagaacctggagcccaagtataaagaacttggcgagaagctcagcaaagacctgaatatcgtcatagccaagatggatgccacagccaatgatgtgccttctccatatgaagtcagagttttcctaccatatacttctctccagccaacaagaagctaaatccaaagaaatatgaaggtggccatgaattaagtgattttattagctatctacaacgagaagctacaaacccccctgtaattcaagaagaaaaacccaagaagaagaaggcacaggaggatctctaaagcagtaggcaaacaccactttgtaaaaggactcttccaccagagatgggaaaaccactggggaggactaggacccatatgggaattattacgtctcagggccgagaggacagaatggatataatctgaatcctgttaaattttctctaagccatttcttagctgcactgttatggaaataccaggaccagtttatgtttgtggttttgggaaaaattatttgtgttgggggaaatgttgtgggagtcgggttgagttgggggtattttctaatttttttgtgcatttggaacagtgacaataaataagacccctttaaactgtaaaaaaaaaaaaaataggaatgcggtccatggtttacttaatcgtataatatcagtgttcattttcttattttgataattgtcataatgttgtgtgaaatattctctttagggagcctgggaaagaatatataagaactctactatttttgtaacttttgtggaggactgcaatcatttctaaataaatagtcttaaaaataactaaagtaataaaaataataaagtacatga

SEQ ID NO: 408835 - DNA, 584 bp, Homo sapiens
ctcatgctcgtcgagttcttcgccccctggtgtggacactgcaagagacttgctcctgagtatgaagctgcagctaccagattaaaaggaatagtcccattagcaaaggctgattgcactgccaacactaacacctgtaataaatatggagtcagtggatatccaaccctgaatatgtttagagatggtgaagaagcaggtgcttatgatggacctaggactgctgatggaattgtcagccacctgaagaagcaggcaggcccagcttcagtgcctctcaggactgaggaagaatttaagaaattcattagtgataaagatgcctctatagtaggttttttcgatgattcattcagtgaagctcactccgagttcctaaaagcagccagcaacttgagggataactaccgatttgcacatacgaatgttgagtctctggtgaacgagtatgatgataacggagatggtatcatcttatttcgtccttcacatctcactaacaagttggaggacaagactgtggcatatacagtgcaaaaaatgaccagtggcaaaattaaaaagtttatccaggaaaacatttt

SEQ ID NO: 408836 - DNA, 576 bp, Homo sapiens
aaaaacattgatttttaaagtacacttatgtattcctatatgtatacttgtcactattcagcattataattattataaaaacagtaatgtttctattaagcttaagcaccaaactggcaaaaatactattaataaaaataattaatttgaggcctaatatgagccaagcactttggtaaatatttttaaataaacacctcacataagcttcacaataacccatgaaattgattcttctatggcttatctttcatagatgaggaacttgaaggttgaagaggagactcagctctttagtggtcagcacagctgattgagggaggagttctagacaggcccaaagccatttaatgggtttttaacctctatgcaaaactgttttataagctggtaatattgataatatgcagatttaattacacactgtaatgggtaaactgactgcaggagacacaggaattctccttagggaaaggacttgtttgcttgtttgtttagagaagcagagttaagctttttggctgtaaaaatttaaagagggaagaaagagactgtttgagagttgccaaatgcttt

SEQ ID NO: 408837 - DNA, 1384 bp, Homo sapiens
tggataaaagccattataactggggtgaaatgaaatctcattgtagttttgatttgcatttatctgatgattagtaatgaatggtgagcattttttcatatacctgctggcagttaaggataatgtgattcaatctaggtagattattccagctactggaaaaaaggatttgatgaggctaaagagtcaagggagatcaacttggaggttactgttatatcaaatcctggcaggagatttaaaaagtcctgaactagaatgtagttatttaagatttgagaaggcggtaaacatttaagaaatactttaagagataaagtcatcaggacttggtgcccatatcatgtaaatagggagctggaaagaaattcaaccaaagttataccatctatttaatctcaaaggttacttgtagatgttactgaggacactttaaagaatttaaagtactgcgacagtccctatattaggaaattaaagggaacaaacatacacataaaataaaccaacaatgcaaatttaagttatgccccaattaagaaattacataaagttaagaaaaatggaagaatgacaatgctatcagataaaaagacttccgagtgaaagtgggatttatattttatactatgagaaaactgatgtagctttaaatgtttactagcatttaacctatatttttaaatttaaaattccattgctattatctaaaataaaaaaacctagatttatggtctttttttgaaaatcagaaggatctaacaacactagactcacattcctacacatatcaactagacaactagacaaagtgattaccttacaataggcaaacactttctagttttctacttcccacagttttccctaacaccgtgagtgaatattagttgccatttattaccacacgtacagtgttgttttttgacagtagggacacagttccatgtaccttgatctctagcaacgagggaaaataagaaagatcaagattattgtgtctaaagaaaactgggaatatatatacttgacccgcttcacttgcttacattgtctgtctgattcttccaagcattaattagaatttgcaactcctagctgggcacagtggctcatgcctgtaattccagcactttgggaggccgaggctggtagattacttgaggtcaggagttcaagacaagcctggccaacatggcaaaaccgcatctctactaaaggtacaataaccagcctagcatggtgttgtgcgccggtggtcccagctactcaggagactaaggcagagaatcgtttgaatccaggaggcaggggttgcagtgagcagagatcgtgccattgcactccagcctgggcaacagagcaagactctgtctcaaaaaaa

SEQ ID NO: 408838 - DNA, 991 bp, Homo sapiens
gagcccaacttggtcacagtgagtgaaggaacatggctctgaatcatgcctgtctgtctccccaggtctgtgcttaaaaccacgaagttcaagatggaaactgaagggaagagtgtcaaggggatgggagagaggacttgtccatgactttggcagcataaggaaaaaatacccagggacaagtggcgactttggaaactccattcctctgcaaaatgacatcacgaggagagtggtggggcctgcggatgaaaagatctggcttctcctcccaactctgctatgaggaagcgctggatggccctgtcggccgcggtcatcgccgcctcggcccgggagctcagcattgcagccgcaccggaggcctgaaaccgtctcctccgctaccgccgccgccgccgccgccgccggaccgagggatacgacggttcccgagacagcggaacctgcggccgcagtcccagcacctcgggggaacgtagaccgcaggacagctcccagggggaccggaagtagctgcccccggagagcaatagctgacggaccacgtcctttctttcttttcccttagcaacaggccccggcgtcggttgctacgctgggctcagttgcctggggctgcttggttttcagatttgcttaggctccattcataaatacagatggcacacttctaggatggaccctgggtcatgatttgaatttttcgatgtggggaagggaggccaacagccgaaagtcgggtcaggcctctgctataattagttattattgtggccagagtggaaataggtcgcagaggaaggaactttaatgagcatgaggcccatctctgacgatatcagtagagaaatcaacgtctttaatagccaacaaacttattgtttacttgggtgccaggtatagagctaagtatgttacattcattatttacatttaatattcacaccaactctaacattacccacattttacatcccagggaacccag

SEQ ID NO: 408839 - DNA, 1050 bp, Homo sapiens
aggcactgaaaggactgagggcactgacagaattaggggccttgacaagactggagtgccccgggtgtcctgggaacaatgacaggagggggagggactgacagacctggggagtgcagacagaattggtgttgccgaaggactggagcccgtcagtcctcccacctacgggcccaggcctccaaccctaaaggacgcagaaccttccagaatgcccgcgcgggccctggagaccccaactagggcatgaaaaagccgtcacgggcccaagctggggaccctggtcccggcctcttcggcagccccgccccccaaaatctcacctgacggccgccccggtccgcaggaagcgctggatggccctgtcggccgcggtcatcgccgcctcggcccgggagctcagcattgcagccgcaccggaggcctgaaaccgtctcctccgctaccgccgccgccgccgccgccgccggaccgagggatacgacggttcccgagacagcggaacctgcggccgcagtcccagcacctcgggggaacgtagaccgcaggacagctcccagggggaccggaagtagctgcccccggagagcaatagctgacggaccacgtcctttctttcttttcccttagcaacaggccccggcgtcggttgctacgctgggctcagttgcctggggctgcttggttttcagatttgcttaggctccattcataaatacagatggcacacttctaggatggaccctgggtcatgatttgaatttttcgatgtggggaagggaggccaacagccgaaagtcgggtcaggcctctgctataattagttattattgtggccagagtggaaataggtcgcagaggaaggaactttaatgagcatgaggcccatctctgacgatatcagtagagaaatcaacgtctttaatagccaacaaacttattgtttacttgggtgccaggtatagagctaagtatgttacattcattatttacatttaatattcacaccaactctaacattacccacattttacatcccagggaacccag

SEQ ID NO: 408840 - DNA, 597 bp, Homo sapiens
catggtcgtgggctaaggggccagagtgcttttatgctcagacagccttgactacgttacaaaacactttctacagagcagatagtggccctttgcaggcttcaggaggaaattcatagccggggatggtggtgcacccctgtaattctagctacttgggaggctgaggcaggagaatcgcttgaacccaggaggtggatgttgcagtgagccaagattgtgccactgcactccagcctgggtgacagagcaagactctgtctcaaacaaacaaagaaacaaacaaacaaacaaacaaaacacaagattcagcctactagactgaaggaagtgttgttgtggaggattcagcctaagggtggacctgggcctgctgggtgaccacaggcaggtgattggacctctctgagcctcattttctgcacctctaaagtgagggtcatagcagctgtcatctcacatggccatggggacaaactggcagattacaaggtgcctgtaatcccagcacatggggatgccaagtcaggaggattgcttaaagccaggagtttgagaccagcgtgagcaacaaagtgggatcctgtctctgaaatt

SEQ ID NO: 408841 - DNA, 758 bp, Homo sapiens
gacgccgccgaggaaaaccgtgtactattagccatggtcaaccccaccgtgttcttcgacattgccgtcgacggcgagcccttgggccgcgtctcctttgagctgtttgcagacaaggtcccaaagacagcagaaaattttcgtgctctgagcactggagagaaaggatttggttataagggttcctgctttcacagaattattccagggtttatgtgtcagggtggtgacttcacacgccataatggcactggtggcaagtccatctatggggagaaatttgaagatgagaacttcatcctaaagcatacgggtcctggcatcttgtccatggcaaatgctggacccaacacaaatggttcccagtttttcatctgcactgccaagactgagtggttggatggcaagcatgtggtgtttggcaaagtgaaagaaggcatgaatattgtggaggccatggagcgctttgggtccaggaatggcaagaccagcaagaagatcaccattgctgactgtggacaactcgaataagtttgacttgtgttttatcttaaccaccagatcattccttctgtagctcaggagagcacccctccacccatttgctcgcagtatcctagaatctttgtgctctcgctgcagttccctttgggttccatgttttccttgttccctcccatgcctagctggattgcagagttaagtttatgattatgaattaaaaactaaataacaaaaaatatatatatataagaaaa

SEQ ID NO: 408842 - DNA, 406 bp, Homo sapiens
agcagatacacaaaggagaaagagaagggaatcaaatcttagcactacagtaaaccgccaaaccttaatgataaacaataggagagaacaaaaataacaaaggatatataaaacaaccagaggcaattaaaaattgataggaataagtcctcacctaccagtaataaccttgaatgtaagcagattaaatttcaccacttaaaagacataaactggtgaaatgaaatttttaaaaaccgtgacacaattatatgctacctacaagaaactcacttcacttcttttttttcttttttcctttttttgagacggagtctcgcttgctcgcctaggctggagtgcagtggtgcaatcttggctcactgcaaccttcgcctcccgggttcaaacaactctcctgcctcag

SEQ ID NO: 408843 - DNA, 505 bp, Homo sapiens
cacaaagcaaataggaggcagaactagaatgaggacgaagcttctgagcctgagcccagcagcctttcctgtcctgccccggtggccagacatccacttgccatgggaacctgtcacctcccaggcccatctgagacctcaacagcttctgagtgtttttgctgggctgtgccctgcccatggtgctgaggacacagaggtgagccatggccatagcagctccaaggggctatgcatggggccctggccataaattctgtatacaactggaggaatggacaacgaaggaacaaatgtgcacccattccagagacaaaacgagggagcaatggattctgcttgggaaagtcaggaagacaggaagctggcactggaagatagggaggaaattccaggcagagggaatgatgtcatcaaagcacaaactaagaataagacaaaaaataagaaccagaagactctgacacacttatcaagggttcgtttccaggcagcactgcactaa

SEQ ID NO: 408844 - DNA, 1108 bp, Homo sapiens
aaattctgcaagttttcttgtaaatttggccaagtactgcagaattcctggaagactgcagaatacacatactcagaaccaagaatgaagagacgttgcgagccatccccactatgcagggcaccaacgggctgccgcagcccactcacaacctcctgaatacagaagcagttgtgtttgtgctttctaaacaaattaaagaaaaccgtgtaaaagaattctttgcaatagtctttgcagagcagaggaagtactaggtctctttccaagacttctctctcagagggaaaattgcaacccttgcctacaaccagactgacagcataatttcttaggaatcaagaatcaatacagggttatttctttagattaaaccttaaaagcccccttggaggctgaagaagcagaggatagccatgcatacacttgaacgtgaaaaatggtcctctttcattggagaggtcttcctcttcagctaaaccgacagagtggtgaaaagaagaagggaccccttgttgaccaaaataatccagacaaatcaaatcggccctttccagcaaggagtggaacagcccaagggtggctagatcacatcttctgctcacaccaccactgagcaaccctctccaggactgccacctatgcataggtcatgccctgtgcaagagcacataaagtgggagctgaagtcctgcccaggctccattcaccaagcagagcttatgttgttgtgtgtctgtgtctacccagaggatgtgggtcctttttaaaatgtgcaccaatgcatcttgtatgagctggcaccagctcggaccatcccaccctcataccctggtcctatccagggttatattccctactttagaagaattaattatttttatgaacgtatttagtttattgtaaaaaatgaaatatatgacacaaattgaaattaatttcagaggtaaaggtcagaatattaccatgtatgtgaattatgtttgtatgtatatgtatatatcaagagagttatatgaatatacatttttgtgtatcagaagtgaggacaatttaactttgttaagtgtttgaaataaaattattttgagttttggaaaaaaaaaaa

SEQ ID NO: 408845 - DNA, 1146 bp, Homo sapiens
cgcgcgagcgcgtcccccgggccccggcggcctccctgctgcggcggggaggggcggctagccgcgacggcggcggacggagggggagggccgcgagccttcggaaccagcctcgagggtgctgaaccccgcgcgcccgcctcgccgcggcccccgggtgggggcgtccacggcccgggttcccggcgggcttggggcagggacgcagtccggagattccgggactgcccggctgctgcagcccgcaggctcctctctcctccccgcttcccctccgcactgcctgggctaaaggcggccaagctgaggctccgaaagaaaagggaaaattgcaacccttgcctacaaccagactgacagcataatttcttaggaatcaagaatcaatacagggttatttctttagattaaaccttaaaagcccccttggaggctgaagaagcagaggatagccatgcatacacttgaacgtgaaaaatggtcctctttcattggagaggtcttcctcttcagctaaaccgacagagtggtgaaaagaagaagggaccccttgttgaccaaaataatccagacaaatcaaatcggccctttccagcaaggagtggaacagcccaagggtggctagatcacatcttctgctcacaccaccactgagcaaccctctccaggactgccacctatgcataggtcatgccctgtgcaagagcacataaagtgggagctgaagtcctgcccaggctccattcaccaagcagagcttatgttgttgtgtgtctgtgtctacccagaggatgtgggtcctttttaaaatgtgcaccaatgcatcttgtatgagctggcaccagctcggaccatcccaccctcataccctggtcctatccagggttatattccctactttagaagaattaattatttttatgaacgtatttagtttattgtaaaaaatgaaatatatgacacaaattgaaattaatttcagaggtaaaggtcagaatattaccatgtatgtgaattatgtttgtatgtatatgtatatatcaagagagttatatgaatatacatttttgtgtatcagaagtgaggacaatttaactttgttaagtgtttgaaataaaattattttgagttttggaaaaaaaaaaa

SEQ ID NO: 408846 - DNA, 770 bp, Homo sapiens
tgctgttctagaggatcctccaacgcgctcacagataaacgttaaagcccttgcgtgctgaagaagcagaggatagccatgcatacacttgaacgtgaaaaatggtcctctttcattggagaggtcttcctcttcagctaaaccgacagagtggtgaaaagaagaagggaccccttgttgaccaaaataatccagacaaatcaaatcggccctttccagcaaggagtggaacagcccaagggtggctagatcacatcttctgctcacaccaccactgagcaaccctctccaggactgccacctatgcataggtcatgccctgtgcaagagcacataaagtgggagctgaagtcctgcccaggctccattcaccaagcagagcttatgttgttgtgtgtctgtgtctacccagaggatgtgggtcctttttaaaatgtgcaccaatgcatcttgtatgagctggcaccagctcggaccatcccaccctcataccctggtcctatccagggttatattccctactttagaagaattaattatttttatgaacgtatttagtttattgtaaaaaatgaaatatatgacacaaattgaaattaatttcagaggtaaaggtcagaatattaccatgtatgtgaattatgtttgtatgtatatgtatatatcaagagagttatatgaatatacatttttgtgtatcagaagtgaggacaatttaactttgttaagtgtttgaaataaaattattttgagttttggaaaaaaaaaaa

SEQ ID NO: 408847 - DNA, 835 bp, Homo sapiens
catgatggaaattcgcaacgatcgcactcactcatactggcattgtagattggtatacgcatcatcaggctgacaagaggatgtctttagatcacacgatacaagcgccgcatgccagggtcaagactcaaaagatagccttgctttcactagaacgcagtatgatgcgaactcttctttatgtagaggagttactctttagctatactcaagaagtggagaaccaatgattgacccctaggtgaccaaaggattgctgaccgatccaataaagacctttacagctccgtgtggaacagcccaagggtggctagatcacatcttctgctcacaccaccactgagcaaccctctccaggactgccacctatgcataggtcatgccctgtgcaagagcacataaagtgggagctgaagtcctgcccaggctccattcaccaagcagagcttatgttgttgtgtgtctgtgtctacccagaggatgtgggtcctttttaaaatgtgcaccaatgcatcttgtatgagctggcaccagctcggaccatcccaccctcataccctggtcctatccagggttatattccctactttagaagaattaattatttttatgaacgtatttagtttattgtaaaaaatgaaatatatgacacaaattgaaattaatttcagaggtaaaggtcagaatattaccatgtatgtgaattatgtttgtatgtatatgtatatatcaagagagttatatgaatatacatttttgtgtatcagaagtgaggacaatttaactttgttaagtgtttgaaataaaattattttgagttttggaaaaaaaaaaa

SEQ ID NO: 408848 - DNA, 890 bp, Homo sapiens
gatgaatctcatcaaatttaaatcacttgcacaatttcatctcattaggtagtttgagaataaggactcggatccaatctggggtgctttccactatctaaccctttcttcccaaattccagttttatattctttttccaaaataaaagtccttctaaaatcgtatttcagtagtttgagctcctactctgataaattcctgttagtagttttgaaacaggcctttcttatggcttatactaaggccacttaaaggtaaatttattttggttttaaaatactatgcatctgttataacctacgaccctaagatatagaaagtttataaaagattactgaaataagacatgcttgttatttcttgatatatggaaattagaattgatttcatatactgtttgtcctgaaagtcaataaattgggtcacttaggagatagcttgagcttattcttagtgttactgatataatttctaaacagttactaagcagtgttatacaaatggactaacttctgatttgttttttccagagggaaaattgcaacccttgcctacaaccagactgacagcataatttcttaggaatcaagaatcaatacagggttatttctttagattaaaccttaaaagcccccttggaggctgaagaagcagaggatagccatgcatacacttgaacgtgaaaaatggtcctctttcattggagaggtcttcctcttcagctaaaccgacagagtggtgaaaagaagaagggaccccttgttgaccaaaataatccagacaaatcaaatcggccctttccagcaaggagtggaacagcccaagggtggctagatcacatcttctgctcacaccaccactgagcaaccctctccaggactgccaccta

SEQ ID NO: 408849 - DNA, 422 bp, Homo sapiens
acagacaaggtggagtgaatcaaggagcatgtggaggagaaagagggaatccctccacaacagcagaggctcatctacagtggcaaacatgaatgatgagaagacagcagctgattacaagattttaggtggttcagtccttcacctggtgttggctctgagaggaggaggtggtcttaggcagtgatggaccctccattttacctccctaccctgtcgctcgtaatgaggcatcatatatcctctcactctctgggacaccagagccactgccccctcccttggatgcccagtaatgtatgtctactggtgggagactgtgaggacaccaggattcagtattcctggcccagagggcccttgctgactattggatgttagtttggagtcctgtgtgcttctctctcttatggctgtgtccc

SEQ ID NO: 408850 - DNA, 497 bp, Homo sapiens
ctccatctttaaaacctaaacaggcattttggacaacacattattgtacaccacaaatatctaacagaccataaaatacaactgttttgtaagtattttaataactttgatactgctctgcttttcttcatttttaaaaattcacttctccatttatgtattgctatatgtgttgcatgagaattctattactttctctaagacgttttactgtttttctgactcttacttcaagggaataaaacctcctctttacccgcaagaaagttttagctgaattaattaatgtatgatggagactctttttcaagtgttaaccaatatattggtgtagaagcctccagtctcttaaatttttgtttgcccagtgcttgaacagtggtatctcgtagttgcttgaattggcatttccctgcctactgaaattatcttttaatatgtttattagtaatttgtatttcctctcctatgaatttccagtttttatcctttgccct

SEQ ID NO: 408851 - DNA, 517 bp, Homo sapiens
ttcaccgctccaacacttcaacactattttgttttatttttcttattaatataagaaggcaggaatgtcaggcctctgagcccaagccaagccatcgcatcccctgtgacttgcacatatacgcccagatggcctgaagtaactgaagaatcacaaaagaagtgaaaaggccctgccctgccttaactgatgacattccaccattgtgatttgttcctgccccaccttaactgagtgattaaccctgtgaatttccttctcctggctcagaagctgccccaccttaactgagtgattaaccctgcgaatttccttctcctggctcagaagctcccccactgagcaccttgtgacccccgcccctgcccaccagagagcaaccccctttgactgtaattttccattaccttcccaaatcctataaaacggccccacccctatctcccttggctgactctctttgcggactcagcccgcctgcacccaggtgaaataaacagccatgttgctcacacaa

SEQ ID NO: 408852 - DNA, 403 bp, Homo sapiens
gtctttgggtcctgcatgctttcctttgtgttggctggttcctctggctgagttcactgttggtctgtctgtggcaattacggagaagcatgacagtcacagcttccctgagttctactgaactcatgaactttgttcataacagactctacaagtggtacaggattcctatggccacaactcaactcaactccgtagaaatcaatgtttatggatcattggagctaaaagaaaacttgcagatcagatcatctcatccaattccctgactttacagaatgaggaaactgaggcacagtaagatttttttttttattttttgcccaggtctgaataaaattgaaggcacccttaccatagccaggattctttgtatataccactggctgaccagtggtagctg

SEQ ID NO: 408853 - DNA, 2375 bp, Homo sapiens
  misc_feature (2338)..(2338): n is a, c, g, or t
accatcctcttgaaaaacccagacacagagttggctgggagctccccagccgtccccgcccccatataagaaaagcctggctagccggtttctcagggccctgggcgcccgcccaagaccctggcggaccagtatgcttgctctcattgcggagtctggtcccctcccctccgctcctagcgcgcgggaggcgggattgtgcttgcacgacttcccccggcccgcggcctgtgagcccaggtcctggggtgaaccgagcgctcgctcgttcgtcagaccgtagcgctccagcggctgtccttactgtgtagtagccaaagctgagggtgatgactgtgaaccagaacagactgcctcgctgaaaagtcacttggaactcttctgtggcatctgaagcagatggacgaagccaagagggccgagagtatctcagcacctagaaatggacaaggctggttattagaacaaagatttcgcaggtggtgagtctcaaaggcgaagctgaatgaggcaagaatctgcatcaaagagccctggaagcaatcatggctcaactgtgatgcctttagaacatgaagtcctccaagaagatgccataggaatggcctccatcccagggcctggagagcagccagagacaagaagagtagcccaggagggcactggcagtcagtgctacactgtggcctgtcagtctcagagccaggatttaatcactggatctcccattaaccagtcataatgaagtaagaacaagaagatggggaagaggaagtgtaaaaccgtggcttaaatttaccaaggataagctgagtgtacttcagcagtcatttgcacagaatccttatcctaattttacaaccagggaaaaactggctggacagtctcttgtcctgtgtttgtaattgataactggtttcaaaataaaagccagaccaccacttagagagagacacagaatgttcactgccagggaactgcatgattcctctgccaaaggccacccatttacaagaatccaggaaaaccaggtggaatctcccaatgatgaccctgagcagaacttcttgtacccaggaagttctactgggtggagctggccactcttccgtggagacacaggggactcccaattaacatgatggctcaaataactgtagccttatggattaaaaggaaactaagctgtgatttggagtatccaggtgatacagaaaatggcccttgtcgatgtagatcagcattatttccttatccttctgcatctcctcctcagtattctgaaagggacaagcctgagatgggggaaagccagcatgcaaggccctcccctttgtgctgtgttcatggtgtgcacggagagaggcagcagcaggaggaacagaaaggttattttctttactgactctttcaaggacatcagcagaatggttgggaatgtcatcatgagcagcctcagcctcagaattaccaggagaagctggtcttccaggatcaggttctaatgtatatgagtcacaggatttagggaagcaggcactttcccttcagtcccagcagcatggttgatgttcccaagtaatggagagtccctgtgctctcagttgtggcacacacctttgcaaatagtgatcagatctccacaaacgcctcttgggtaagatatgcagcaacatagctggctgcagagcaacccagttcccaaatccagcagctcttggatgagaagtctgcaagtgtttactgctgggaccaggactgtgtttctaggaaatggtgctaggcttcagagagcatcatccacaggtcatcccacaaccatccacacagaagcctgaggaaaagggctctgcagagcttgcacataaagatgctgaactcaggaaggctctgtgagctgctggtctcttctgttagggcagcagtgtcctgagaaggtggagctagagtatggagaacaaaactaacaagcaccaaggcagcaagcaaggcaacccccaaatgacagcagttgccaaatccaaagcaatctgtgcttcagaagacagaggctctgcacagtccctgtctcagacattgtctcctccttagaagatacctaacaacagcactgtgggaggctgaggtgggtggatcaccaggtcaggagatcaagaccatccttgatctttagtagagacggtgaaacactgtctctactaaaaaatacaaaaaaaaattagctagccgtggcggcgggcacctgtagtcccaactatttgggaggctgaggcaggagaatggcctgaacccgggaggcagagcttgcagtgagctgagattgcgccactgcactccngcctgggcaacagagtgagactccatctcaaaaaaaa

SEQ ID NO: 408854 - DNA, 2138 bp, Homo sapiens
  misc_feature (2101)..(2101): n is a, c, g, or t
accatcctcttgaaaaacccagacacagagttggctgggagctccccagccgtccccgcccccatataagaaaagcctggctagccggtttctcagggccctgggcgcccgcccaagaccctggcggaccagtatgcttgctctcattgcggagtctggtcccctcccctccgctcctagcgcgcgggaggcgggattgtgcttgcacgacttcccccggcccgcggcctgtgagcccaggtcctggggtgaaccgagcgctcgctcgttcgtcagaccgtagcgctccagcggctgtccttactgtgtagtagccaaagctgagggtgatgactgtgaaccagaacagactgcctcgctgaaaagtcacttggaactcttctgtggcatctgaagcagatggacgaagccaagagggccgagagtatctcagcacctagaaatggacaaggctggttattagaacaaagatttcgcaggtggatctcccattaaccagtcataatgaagtaagaacaagaagatggggaagaggaagtgtaaaaccgtggcttaaatttaccaaggataagctgagtgtacttcagcagtcatttgcacagaatccttatcctaattttacaaccagggaaaaactggctggacagtctcttgtcctgtgtttgtaattgataactggtttcaaaataaaagccagaccaccacttagagagagacacagaatgttcactgccagggaactgcatgattcctctgccaaaggccacccatttacaagaatccaggaaaaccaggtggaatctcccaatgatgaccctgagcagaacttcttgtacccaggaagttctactgggtggagctggccactcttccgtggagacacaggggactcccaattaacatgatggctcaaataactgtagccttatggattaaaaggaaactaagctgtgatttggagtatccaggtgatacagaaaatggcccttgtcgatgtagatcagcattatttccttatccttctgcatctcctcctcagtattctgaaagggacaagcctgagatgggggaaagccagcatgcaaggccctcccctttgtgctgtgttcatggtgtgcacggagagaggcagcagcaggaggaacagaaaggttattttctttactgactctttcaaggacatcagcagaatggttgggaatgtcatcatgagcagcctcagcctcagaattaccaggagaagctggtcttccaggatcaggttctaatgtatatgagtcacaggatttagggaagcaggcactttcccttcagtcccagcagcatggttgatgttcccaagtaatggagagtccctgtgctctcagttgtggcacacacctttgcaaatagtgatcagatctccacaaacgcctcttgggtaagatatgcagcaacatagctggctgcagagcaacccagttcccaaatccagcagctcttggatgagaagtctgcaagtgtttactgctgggaccaggactgtgtttctaggaaatggtgctaggcttcagagagcatcatccacaggtcatcccacaaccatccacacagaagcctgaggaaaagggctctgcagagcttgcacataaagatgctgaactcaggaaggctctgtgagctgctggtctcttctgttagggcagcagtgtcctgagaaggtggagctagagtatggagaacaaaactaacaagcaccaaggcagcaagcaaggcaacccccaaatgacagcagttgccaaatccaaagcaatctgtgcttcagaagacagaggctctgcacagtccctgtctcagacattgtctcctccttagaagatacctaacaacagcactgtgggaggctgaggtgggtggatcaccaggtcaggagatcaagaccatccttgatctttagtagagacggtgaaacactgtctctactaaaaaatacaaaaaaaaattagctagccgtggcggcgggcacctgtagtcccaactatttgggaggctgaggcaggagaatggcctgaacccgggaggcagagcttgcagtgagctgagattgcgccactgcactccngcctgggcaacagagtgagactccatctcaaaaaaaa

SEQ ID NO: 408855 - DNA, 1956 bp, Homo sapiens
  misc_feature (1919)..(1919): n is a, c, g, or t
agatttgatatttcatgaaattcagaaataatttggagcttttcaaacctgggatatggaagaaactgacactcctgttctctgggaagaggcaagaatctgcatcaaagagccctggaagcaatcatggctcaactgtgatgcctttagaacatgaagtcctccaagaagatgccataggaatggcctccatcccagggcctggagagcagccagagacaagaagagtagcccaggagggcactggcagtcagtgctacactgtggcctgtcagtctcagagccaggatttaatcactggatctcccattaaccagtcataatgaagtaagaacaagaagatggggaagaggaagtgtaaaaccgtggcttaaatttaccaaggataagctgagtgtacttcagcagtcatttgcacagaatccttatcctaattttacaaccagggaaaaactggctggacagtctcttgtcctgtgtttgtaattgataactggtttcaaaataaaagccagaccaccacttagagagagacacagaatgttcactgccagggaactgcatgattcctctgccaaaggccacccatttacaagaatccaggaaaaccaggtggaatctcccaatgatgaccctgagcagaacttcttgtacccaggaagttctactgggtggagctggccactcttccgtggagacacaggggactcccaattaacatgatggctcaaataactgtagccttatggattaaaaggaaactaagctgtgatttggagtatccaggtgatacagaaaatggcccttgtcgatgtagatcagcattatttccttatccttctgcatctcctcctcagtattctgaaagggacaagcctgagatgggggaaagccagcatgcaaggccctcccctttgtgctgtgttcatggtgtgcacggagagaggcagcagcaggaggaacagaaaggttattttctttactgactctttcaaggacatcagcagaatggttgggaatgtcatcatgagcagcctcagcctcagaattaccaggagaagctggtcttccaggatcaggttctaatgtatatgagtcacaggatttagggaagcaggcactttcccttcagtcccagcagcatggttgatgttcccaagtaatggagagtccctgtgctctcagttgtggcacacacctttgcaaatagtgatcagatctccacaaacgcctcttgggtaagatatgcagcaacatagctggctgcagagcaacccagttcccaaatccagcagctcttggatgagaagtctgcaagtgtttactgctgggaccaggactgtgtttctaggaaatggtgctaggcttcagagagcatcatccacaggtcatcccacaaccatccacacagaagcctgaggaaaagggctctgcagagcttgcacataaagatgctgaactcaggaaggctctgtgagctgctggtctcttctgttagggcagcagtgtcctgagaaggtggagctagagtatggagaacaaaactaacaagcaccaaggcagcaagcaaggcaacccccaaatgacagcagttgccaaatccaaagcaatctgtgcttcagaagacagaggctctgcacagtccctgtctcagacattgtctcctccttagaagatacctaacaacagcactgtgggaggctgaggtgggtggatcaccaggtcaggagatcaagaccatccttgatctttagtagagacggtgaaacactgtctctactaaaaaatacaaaaaaaaattagctagccgtggcggcgggcacctgtagtcccaactatttgggaggctgaggcaggagaatggcctgaacccgggaggcagagcttgcagtgagctgagattgcgccactgcactccngcctgggcaacagagtgagactccatctcaaaaaaaa

SEQ ID NO: 408856 - DNA, 514 bp, Homo sapiens
agatttgatatttcatgaaattcagaaataatttggagcttttcaaacctgggatatggaagaaactgacactcctgttctctgggaagaggcaagaatctgcatcaaagagccctggaagcaatcatggctcaactgtgatgcctttagaacatgaagtcctccaagaagatgccataggaatggcctccatcccagggcctggagagcagccagagacaagaagagtagcccaggagggcactggcagtcagtgctacactgtggcctgtcagtctcagagccaggatttaatcactggatctcccattaaccagtcataatgaagtaagaacaagaagatggggaagaggaagtgtaaaaccgtggcttaaatttaccaaggataagctgagtgtacttcagcagtcatttgcacagaatccttatcctaattttacaaccagggaaaaactggctggacagtctcttgtcctgtgtttgtaattgatgtaagtaaaatattaaaagcttt

SEQ ID NO: 408857 - DNA, 1831 bp, Homo sapiens
  misc_feature (1049)..(1049): n is a, c, g, or t
agcgggtgagtgcgggccgcgctctcggcggcgcgcatgtgcgtgtgtgctggctgccgggctgccccgagccggcggggagccggtccgctccaggtggcgggcggctggagcgagggagcggacatggactacgactcgtaccagcactatttctacgactatgactgcggggaggatttctaccgctccacggcgcccagcgaggacatctggaagaaattcgagctggtgccatcgccccccacgtcgccgccctggggcttgggtcccggcgcaggggacccggcccccgggattggtcccccggagccgtggcccggagggtgcaccggagacgaagcggaatcccggggccactcgaaaggctggggcaggaactacgcctccatcatacgccgtgactgcatgtggagcggcttctcggcccgggaacggctggagagagctgtgagcgaccggctcgctcctggcgcgccccgggggaacccgcccaaggcgtccgccgccccggactgcactcccagcctcgaagccggcaacccggcgcccgccgccccctgtccgctgggcgaacccaagacccaggcctgctccgggtccgagagcccaagcgactcgggtaaggacctccccgagccatccaagagggggccaccccatgggtggccaaagctctgcccctgcctgaggtcaggcattggctcttctcaagctcttgggccatctccgcctctctttggctgaagctgcccgtgtagtccccaaccgtgtctgtctggcacgtgggtgtgttggtaaacagtttggaaaagtggcgtgggagccagcctccctttgatgattattggagccccaggggacaagggatttgaggtgagggttggcgcttagagaggacaatactggggttggactgtaagggattgaagggggtaccttaagagacactccaaacctgaagtttttttgctgctgcctctttccctaggaaactcacactcccctagggggagaagaagccgagagccttttgtgcaaagccaaanccttcgtccttttaaaaacctaggtctccagttggctttactttaaaatgccaataataaatgccctcttctcgtgcctccccaccaccacttaccactcgtgcatccctgagacagggagggaagaatgaacactccccattaacagatggaaaaactgaggcttagagatagacaatcactacaagtcagctccagctttctgccatctagccagcccctcttccccaatgctccatcccaaccaggcacctcttccttgatgtttggggtctttgtggtagcttatcttagaagcactacaccttgccttgctgtttgtcctgagatggaaaagtgtccttcttgctccccctcaatagatctccagcgtcagctgctccctggcattcaacaaatattcactggcccctactttgtggcaatctgtgggctacatgctggggtcaaggcagtagaactccaggccctcctctcccatccttgatgcaagtgcaacctcgctgagggcagactggggcatcctgtgccactaaactacattgttcttattctggcatcttagacctccacacccgtgagaaatcctggagagggtatttttgtagagtgtagactgtggctagtgacaaataaattaggaccaagaaagctcactgtagcttttaggaataacttttacacgaccatttgatagggaactggggaatggggtatggaagttttcctacacttgagagaaaaaataggataacaaaaattaaaagtcttttttttcctgg

SEQ ID NO: 408858 - DNA, 1651 bp, Homo sapiens
agcgggtgagtgcgggccgcgctctcggcggcgcgcatgtgcgtgtgtgctggctgccgggctgccccgagccggcggggagccggtccgctccaggtggcgggcggctggagcgagggagcggacatggactacgactcgtaccagcactatttctacgactatgactgcggggaggatttctaccgctccacggcgcccagcgaggacatctggaagaaattcgagctggtgccatcgccccccacgtcgccgccctggggcttgggtcccggcgcaggggacccggcccccgggattggtcccccggagccgtggcccggagggtgcaccggagacgaagcggaatcccggggccactcgaaaggctggggcaggaactacgcctccatcatacgccgtgactgcatgtggagcggcttctcggcccgggaacggctggagagagctgtgagcgaccggctcgctcctggcgcgccccgggggaacccgcccaaggcgtccgccgccccggactgcactcccagcctcgaagccggcaacccggcgcccgccgccccctgtccgctgggcgaacccaagacccaggcctgctccgggtccgagagcccaagcgactcggagaatgaagaaattgatgttgtgacagtagagaagaggcagtctctgggtattcggaagccggtcaccatcacggtgcgagcagaccccctggatccctgcatgaagcatttccacatctccatccatcagcaacagcacaactatgctgcccgttttcctccagaaagctgctcccaagaagaggcttcagagaggggtccccaagaagaggttctggagagagatgctgcaggggaaaaggaagatgaggaggatgaagagattgtgagtcccccacctgtagaaagtgaggctgcccagtcctgccaccccaaacctgtcagttctgatactgaggatgtgaccaagaggaagaatcacaacttcctggagcgcaagaggcggaatgacctgcgttcgcgattcttggcgctgagggaccaggtgcccaccctggccagctgctccaaggcccccaaagtagtgatcctaagcaaggccttggaatacttgcaagccctggtgggggctgagaagaggatggctacagagaaaagacagctccgatgccggcagcagcagttgcagaaaagaattgcatacctcagtggctactaactgaccaaaaagcctgacagttctgtcttacgaagacacaagtttattttttaacctccctctcccctttagtaatttgcacattttggttatggtgggacagtctggacagtagatcccagaatgcattgcagccggtgcacacacaataaaggcttgcattcttggaaaccttgaaacccagctctccctcttccctgactcatgggagtgctgtatgttctctggcgcctttggcttcccagcaggcagctgactgaggagccttggggtctgcctagctcactagctctgaagaaaaggctgacagatgctatgcaacaggtggtggatgttgtcaggggctccagcctgcatgaaatctcacactctgcatgagctttaggctaggaaaggatgctcccaactggtgtctctggggtgatgcaag

SEQ ID NO: 408859 - DNA, 1947 bp, Homo sapiens
  misc_feature (1049)..(1049): n is a, c, g, or t
agcgggtgagtgcgggccgcgctctcggcggcgcgcatgtgcgtgtgtgctggctgccgggctgccccgagccggcggggagccggtccgctccaggtggcgggcggctggagcgagggagcggacatggactacgactcgtaccagcactatttctacgactatgactgcggggaggatttctaccgctccacggcgcccagcgaggacatctggaagaaattcgagctggtgccatcgccccccacgtcgccgccctggggcttgggtcccggcgcaggggacccggcccccgggattggtcccccggagccgtggcccggagggtgcaccggagacgaagcggaatcccggggccactcgaaaggctggggcaggaactacgcctccatcatacgccgtgactgcatgtggagcggcttctcggcccgggaacggctggagagagctgtgagcgaccggctcgctcctggcgcgccccgggggaacccgcccaaggcgtccgccgccccggactgcactcccagcctcgaagccggcaacccggcgcccgccgccccctgtccgctgggcgaacccaagacccaggcctgctccgggtccgagagcccaagcgactcgggtaaggacctccccgagccatccaagagggggccaccccatgggtggccaaagctctgcccctgcctgaggtcaggcattggctcttctcaagctcttgggccatctccgcctctctttggctgaagctgcccgtgtagtccccaaccgtgtctgtctggcacgtgggtgtgttggtaaacagtttggaaaagtggcgtgggagccagcctccctttgatgattattggagccccaggggacaagggatttgaggtgagggttggcgcttagagaggacaatactggggttggactgtaagggattgaagggggtaccttaagagacactccaaacctgaagtttttttgctgctgcctctttccctaggaaactcacactcccctagggggagaagaagccgagagccttttgtgcaaagccaaanccttcgtccttttaaaaacctaggtctccagttggctttactttaaaatgccaataataaatgccctcttctcgtgcctccccaccaccacttaccactcgtgcatccctgagacagggagggaagaatgaacactccccattaacagatggaaaaactgaggcttagagatagacaatcactacaagtcagctccagctttctgccatctagccagcccctcttccccaatgctccatcccaaccaggcacctcttccttgatgtttggggtctttgtggtagcttatcttagaagcactacaccttgccttgctgtttgtcctgagatggaaaagtgtccttcttgctccccctcaatagatctccagcgtcagctgctccctggcattcaacaaatattcactggcccctactttgtggcaatctgtgggctacatgctggggtcaaggcagtagaactccaggccctcctctcccatccttgatgcaagtgcaacctcgctgagggcagactggggcatcctgtgccactaaactacattgttcttattctggcatcttagacctccacacccgtgagaaatcctggagagggtatttttgtagagtgtagactgtggctagtgacaaataaattaggaccaagaaagctcactgtagcttttaggaataacttttacacgaccatttgatagggaactggggaatggggtatggaagttttcctacacttgagagaaaaaataggataacaaaaattaaaagtcttttttttcctggtccactgtgttaaggtcatttttaaccagcttgctttctacaccaagagtttatgtttgtttaatggctggaaagagaatcttgagatcaaaaaaccaataaagatgtatctctac

SEQ ID NO: 408860 - DNA, 820 bp, Homo sapiens
tggctgccgggctgccccgagccggcggggagccggtccgctccaggtggcgggcggctggagcgaggtgaggctgcgggtggccagggcacgggcgcgggtcccgcggtgcgggctggctgcaggctgccttctgggcacggcgcgcccccgcccggccccgccgggccctgggagctgcgctccgggcggcgctggcaaagtttgctttgaactcgctgcccacagtcgggtccgcgcgctgcgattggcttcccctaccactctgacccggggcccggcttcccgggacgcgaggactgggcgcaggctgcaagctggtggggttggggaggaacgagagcccggcagccgactgtgccgagggacccggggacacctccttcgcccggccggcacccggtcagcacgtccccccttccctcccgcagggagcggacatggactacgactcgtaccagcactatttctacgactatgactgcggggaggatttctaccgctccacggcgcccagcgaggacatctggaagaaattcgagctggtgccatcgccccccacgtcgccgccctggggcttgggtcccggcgcaggggacccggcccccgggattggtcccccggagccgtggcccggagggtgcaccggagacgaagcggaatcccggggccactcgaaaggctggggcaggaactacgcctccatcatacgccgtgactgcatgtggagcggcttctcggcccgggaacggctggagagagctgtgagcgaccggctcgctcctggcgcgccccgggggaacccgcccaaggcgtccgc

SEQ ID NO: 408861 - DNA, 916 bp, Homo sapiens
tccaaaatgcataagttctcgcgagacgcagtaaggcaccggctcgaactggggcgggccactgccaggaaagcaacgcccctgaatgcttatgccggtggttggtagaggaaatggaattccccagactgtacctcttgacttgctactggtacctggaagagatgtaacacctgaccatgggacatcaagtgactgtgtgaatcaaactgcccatcatgaattgttgttatttgactcatcaaactgtacaactggatgaacacaggagcagtgcactacatatgggactggaaccatgaatgagcaggtgactcagactcctatagtacctgcctctactccttcagcacttctccctcaacccacataaactgtcatcataatgagttccctctgaccagttaatggaagagaaaaaagtatggatgttatggatatcctaacatatttctggccattggacccctagaaacctgtggcaagagtcctggaagtttttcaaggttcatcttgcaccttctagcatgcatatgtcgtaccaaagcatgtagaatgctgcctacttctgctcttcagtttcatttaatataatttcattactctgataaatcagtgtgatgttctatggaataacaaaagaccgtcaaggtcccttcataccatatagagaacaggagagttgatgtagcctgagacaagacagtaaggacttactgttatccctcctatttaaacgtagtctgtttctgattctccttagaatgggggtggggggacatttccagatcaatatcagatcagtatcgtgtcaacatgggtattaatttcttccgaagaagataccacacctagaacagcaaccataattggcatccctacctaattaaagtttgcagtccactgtcattcttca

SEQ ID NO: 408862 - DNA, 991 bp, Homo sapiens
tccaaaatgcataagttctcgcgagacgcagtaaggcaccggctcgaactggggcgggccactgccaggaaagcaacgcccctgaatgcttatgccggtggttggtagaggaaatggaattccccagactggtaagagcgcgcgcagacacagccttgtctcacgcgcccaatcaggagcgtgtggtgggaggtgccaaggattaattaccagatacctttagtctagctcgagccgggattttgaggtttccggtggagcaggtgagcagtatttactcgcctgccctcctgggctggttatggtgtgggaggaggcgcccctcgagatgggaatagtagttttaaatagacccaggttggccgctcatcagcgctcccacgtgctgaagtctagtgcacgtctgaccctaagggagcaatactgagaacagcagggagcaggctgagtcaagctcaattgagtggatggggctaggacagagagagttaggggcagggttttcactggtctccgtaatcagtcgctgccgtccgccaaggtgtagatgtgggaacaagcttaaattctcaaactttagcttctgttgctgtgtttcagttcttgagccagaaagtgttgagactaattagttaattaggtagagtttagagtcagaaaaacaatacaatacttcctgaaatatccaagttgggaggtgggatttacctcagtaggattggcctgttttagtcaagggtttaaagtatggagacggcagttatgctctctagtgtatccttcaggcaaaagaaagaccttaatttttatgaggaatttaaaagtgggtaagcactgaccagcttaaggttttttaacattccttaatgaccccagttaccgaagtggagatcttcaattacttggaaaaataaacttgttttaaaaatacacttaatttgaaaactgttgcagaaagttttacctaataaaaacttaacacgtcaacaat

SEQ ID NO: 408863 - DNA, 703 bp, Homo sapiens
attttctgcatctccaggctcctctgctcacacggagccccagtggcccccatgactccttacctgatgctgtgccagccacacaagagatgtggggacaagttctacgaccccctgcagcactgttgctatgatgatgccgtcgtgcccttggccaggacccagacgtgtggaaactgcaccttcagagtctgctttgagcagtgctgcccctggaccttcatggtgaagctgataaaccagaactgcgactcagcccggacctcggatgacaggctttgtcgcagtgtcagctaatggaacatcaggggaacgatgactcctggattctccttcctgggtgggcctggagaaagaggctggtgttacctgagatctgggatgctgagtggctgtttgggggccagagaaacacacactcaactgcccacttcattctgtgacctgtctgaggcccaccctgccgctgccctgaggaggcccacaggtccccttctagaattctggacagcatgagatgcgtgtgctgatgggggcccagggactctgaaccctcctgatgacccctatggccaacatcaacccggcaccaccccaaggctggctggggaacccttcacccttctgtgagattttccatcatctcaagttctcttctatccaggagcaaagcacaggatcataataaatttatgtactttat

SEQ ID NO: 408864 - DNA, 625 bp, Homo sapiens
ccgagctcgattcccttgtctttgttctacgaccccctgcagcactgttgctatgatgatgccgtcgtgcccttggccaggacccagacgtgtggaaactgcaccttcagagtctgctttgagcagtgctgcccctggaccttcatggtgaagctgataaaccagaactgcgactcagcccggacctcggatgacaggctttgtcgcagtgtcagctaatggaacatcaggggaacgatgactcctggattctccttcctgggtgggcctggagaaagaggctggtgttacctgagatctgggatgctgagtggctgtttgggggccagagaaacacacactcaactgcccacttcattctgtgacctgtctgaggcccaccctgccgctgccctgaggaggcccacaggtccccttctagaattctggacagcatgagatgcgtgtgctgatgggggcccagggactctgaaccctcctgatgacccctatggccaacatcaacccggcaccaccccaaggctggctggggaacccttcacccttctgtgagattttccatcatctcaagttctcttctatccaggagcaaagcacaggatcataataaatttatgtactttat

SEQ ID NO: 408865 - DNA, 289 bp, Homo sapiens
gaattccggctctctggggaattccggctctctggggaggcccaccctgccgctgccctgaggaggcccacaggtccccttctagaattctggacagcatgagatgcgtgtgctgatgggggcccagggactctgaaccctcctgatgacccctatggccaacatcaacccggcaccaccccaaggctggctggggaacccttcacccttctgtgagattttccatcatctcaagttctcttctatccaggagcaaagcacaggatcataataaatttatgtactttat

SEQ ID NO: 408866 - DNA, 115 bp, Homo sapiens
cttccaggggaccccaggctgggacccacctgccactacctcctggatctcaccagctctgtctcctccagtggcccccatgactccttacctgatgctgtgccagccacacaag

SEQ ID NO: 408867 - DNA, 157 bp, Homo sapiens
ccaccacgcctgtccaatgctcatctttttttaaaaaaatagacttttcacactgtacaagaaccaacacctttgtgatttgttttctgttcctgaagcctgcctgttccattttgtttcctgagctggcattaaacattgatgtattccttaaaat

SEQ ID NO: 408868 - DNA, 373 bp, Homo sapiens
agcatcttaaatttcattttaaagttcagctaagatgttttaaaaatcatcattctagagaaaaggcttcagtggaaaaactggtgaaatctgactcagttctgtattttatttaatggtattatatcaagattaatttcttagttgtgagaactgatctatggttgcataagatgttaaaacaagaggacactgtgtatagattcattagagtattcattatgagtaactcttctgtaagaataaaattatcttttaaaaagtcacaatggaaatattcaatctttgccctagtctatttggaccttatttccaagtactaattgccttatgtcttgcttatgaaatgaagtccccaacttgtaaaccagtt

SEQ ID NO: 408869 - DNA, 635 bp, Homo sapiens
gcggccgcggcgagcggcgctgcccgggccgggcgcgcacggcgggcgccctgtgagcggccccgatgtggcaggaggcgatgcggcgccgccgctacctgcgggaccgctccgaggaggcggcgggcggcggagacgggctgccgcggtcccgggactggctctacgagtcctactactgcatgagccagcagcacccgctcatcgtcttcctgctgctcatcgtcatgggctcctgcctcgccctgctcgccgtcttcttcgcgctcgggctggaagttgaagaccatgtggcgtttctaataacagttccaactgccctggcgattttctttgcgatatttatcctggtctgcatcgagtctgtgtttaagaagctgctgcgcctcttctcgttggtgatatggatatgccttgttgccatgggatacctgttcatgtgttttggaggcaccgtctctccctgggaccaggtatcgttcttcctcttcatcatcttcgtggtgtacaccatgctgcccttcaacatgcgagacgccatcattgccagcgtcctcacctcctcctcccacaccatcgtgcttagcgtctgcctgtctgcaacaccgggaggcaaggagcacctggtctggcag

SEQ ID NO: 408870 - DNA, 699 bp, Homo sapiens
gcggccgcggcgagcggcgctgcccgggccgggcgcgcacggcgggcgccctgtgagcggccccgatgtggcaggaggcgatgcggcgccgccgctacctgcgggaccgctccgaggaggcggcgggcggcggagacgggctgccgcggtcccgggactggctctacgagtcctactactgcatgagccagcagcacccgctcatcgtcttcctgctgctcatcgtcatgggctcctgcctcgccctgctcgccgtcttcttcgcgctcgggctggtgagtggcctccccgcgggtccagcgccgcgccttccccggccctgagaggagcccggccagccgagccgcgtcccgctccgggctgcccctcggcccgcggcagcccctcggcccgcggctccctgcttctcctgctggcccgcggcccggtggactctggcaagggctgcgggcgggagaaaagtttcctgggaaggctcttcccaaaataaagttcccgaggtgttcaccaggtggacgggcagggcgtgtgctttttgcatctttgcgcacccgctggcaaactctgcgctttccgccgggcaccgctgcccgcagcgctcgaataggtcttccccgactcagccctgggcttcctgggcgagtcgctgtctcctgcccggttccactggcatggccccacagttggcattttagttgg

SEQ ID NO: 408871 - DNA, 532 bp, Homo sapiens
tgtacagcctgcaaaaccatgagccaattaaacttctttcctttataaactacccagcctcaggtatttctctacagtaatgcaaacaatggcctaatacaccgaccttcccctgaagcaggtcataagacagacccttcttatgagagaagccttatgagcctgattactcttcatctcatttggttcttctttctcctcagcaatgatccttaactgaaaataacttcttgtgagaggttccttccccacaccaagaggaaaggaacattcctatctctgaaaacaagtcacagagaagaatctgaacaaacagtccttgctaagtttctcccagtttgttaccatttaatcatacaatttcccccatcatatttctccatgactgtttactcttcaccgaacctggcataaaaatacacaggaagctgtggcaggaggatcacttgagcccaggagttggagattgcaatgagttatgattgcaccattgcattccagccggggtgacagagcaagaccttgtctctta

SEQ ID NO: 408872 - DNA, 507 bp, Homo sapiens
atccctcataaatgttgtgcggttaatactcccactggcatgtgatcgtacccgtctccatagtaattgcatctaagaactgaggctacataggaaaaaatcttaaggtccatggttgttaggtatcagatgccctataatggatgaatatttaagtaaataatggcacattgacttgctgtctgacacaactgctgaaaatgttggtgaaaagtgagtctcgaagtggtagctcacacttgtaataccagcactttcggaggctgagacggggatcgctcgaggccaggagttcaagagcagcctgggcaacataacgagacccccatctctaccaaaaatttaaaaattagccgggcatggtggcgcaagcctgttgtcccagttactcctgagactaaggcaagaggatcccttgagtccaggagttcaaggctgcagtgagctatgattgagccactgcactccagcctgggtgacagagcaagactcttatctacctgtggg

SEQ ID NO: 408873 - DNA, 1346 bp, Homo sapiens
gagcaagtaggctctattaaggagagatatgaccacaggctcatgttgaaacatctccctccagaattcagcatctttctagaccatatctcttctttggattattttacaaaaccagactaccagcttcttacatccgtgtttgacaatagcatcaagacttttggagtaattgagagtgacccttttgactgggagaagactggaaatgatggctccctaacaaccaccactacttctaccacccctcagttgcacactcgcttgacccctgctgcaattggaattgccaatgctactcccatccctggagacttgcttcgagaaaatacagatgaggtatttccagatgaacagcttagcgatggagaaaatggcatccctgttggtgtgtcaccagataaattgcctggatctctgggacacccccgtccccaggagaaggatgtttgggaagagatggatgccaacaaaaacaagataaagcttggaatttgtaaggctgctactgaagaggagaacagccatggccaggcaaatggtcttctcaatgctccaagccttgggtcaccaattcgtgtccgctcagagattactcagccagacagagatattccactggtgcgaaagttacgttccattcacagctttgagctggaaaaacgtctgaccctggagccaaagccagacactgacaagttccttgagacctggtataaaatagtgtatttttctttttaaagcttctaaggtaccattattattgttgtcattgttgttattattattgtatatttctgttacataaagtctttcaaataagaaatccttgcatttttgtaacactgagtctattcagctccaattttcatccatgtttttaattattattatcctgattcttaattattataaattctatagcatatcctttggctttggaagctgagcagtaagagctgatgacttcctaacactaggtacaagttaaatgaacatttttacagtaactttgtttagaaagtaatctcttccacacaacagtgtagtgctggagagggcatgataaagatggcattaggcagagatgaggggaatacataaaggaggggaaaaagtaattcatacacaagggacggtgagttcaattcactttagtgaagaccctctaggagtaagatactgtgggaaaacagataccaataagtatatcatgcttgccctcgagagtttgcaatctacctagagagaaaggaaggtgaaacttgagagatctatatacataggtaaagattgtagtgcatggttttgaggcacattatccctacaacaaattttgataacag

SEQ ID NO: 408874 - DNA, 929 bp, Homo sapiens
atattattttgaaaggcttcaatgattcctctcatgtgtgttgcctagaatgtttttcatgattttattttatattttggataggctgctactgaagaggagaacagccatggccaggcaaatggtcttctcaatgctccaagccttgggtcaccaattcgtgtccgctcagagattactcagccagacagagatattccactggtgcgaaagttacgttccattcacagctttgagctggaaaaacgtctgaccctggagccaaagccagacactgacaagttccttgagacctggtataaaatagtgtatttttctttttaaagcttctaaggtaccattattattgttgtcattgttgttattattattgtatatttctgttacataaagtctttcaaataagaaatccttgcatttttgtaacactgagtctattcagctccaattttcatccatgtttttaattattattatcctgattcttaattattataaattctatagcatatcctttggctttggaagctgagcagtaagagctgatgacttcctaacactaggtacaagttaaatgaacatttttacagtaactttgtttagaaagtaatctcttccacacaacagtgtagtgctggagagggcatgataaagatggcattaggcagagatgaggggaatacataaaggaggggaaaaagtaattcatacacaagggacggtgagttcaattcactttagtgaagaccctctaggagtaagatactgtgggaaaacagataccaataagtatatcatgcttgccctcgagagtttgcaatctacctagagagaaaggaaggtgaaacttgagagatctatatacataggtaaagattgtagtgcatggttttgaggcacattatccctacaacaaattttgataacag

SEQ ID NO: 408875 - DNA, 487 bp, Homo sapiens
ggaatggtaattgaatattagcattcatttaaagtcaccaactgcattgacctctaacaagaaagccagcccaggctgggaaaagtggcttacacctgtaattccagtgctttgggaggctgaggttggaggatcacttgaggtcaagagttcaagaccagccagcacaacagagcgtgacgctgtctctacaaagtaaagagtcagcccgtcctttgaatctttgaagtcagatattagcttacctagagctgtgaaagtcctaaatggcatctcctgaagtaaggctgttttgtctctgttaaaactctagtagagctacctctgccatttatctagatattctggaaatgcttgctgcagattccacatcagcaattgctacttcactttgtacttttatgttatggaaatgacttgttaaacctcacgaactgatctttgccagcttccagcatttcttctgcagctaactcacctctcagcc

SEQ ID NO: 408876 - DNA, 325 bp, Homo sapiens
gaatgagatgatagagagtggaaaggggttcagagaaattctgattgaagtgtgaagttggggtccctctgatagtgtgatatttgacctgaaacctgaaaaacaagaagtagttataaaaaaagagcctgagggccgggcgcggtggctcacgactgtaatcccagcactttaagaggccgaggctggcggtttcaccatgttggccaggctggtctcttaactccttacctcaaatgatccacccacctcggcctcccaaagtgctgggattatagatgtgagccactgcacccagcccttcctctccctttctctttggggt

SEQ ID NO: 408877 - DNA, 1109 bp, Homo sapiens
ccacaagctggccccttggcctcctagagaccctgacatctcctccagcagcatctgtcctctctcctcagggaggcaagcatttgatgctcgaggtccctggcagttgtggtccttggcaagtgatgtgtgagtcccgtgtgtcataggaagctccccatccccatctggtgaccaaaggcctggctacaagtagtgagtccttcctcctccacccagacctcactgctcagatccccttcgccaactgggacatcttccgacatggcctggatgctgttgctcatcttgatcatggtccatccaggatcctgtgctctctgggtgtcccagccccctgagattcgtaccctggaaggatcctctgccttcctgccctgctccttcaatgccagccaagggagactggccattggctccgtcacgtggttccgagatgaggtggttccagggaaggaggtgaggaatggaaccccagagttcaggggccgcctggccccacttgcttcttcccgtttcctccatgaccaccaggctgagctgcacatccgggacgtgcgaggccatgacgccagcatctacgtgtgcagagtggaggtgctgggccttggtgtcgggacagggaatgggactcggctggtggtggagaaagaacatcctcagctaggggctggtacagtcctcctccttcgggctggattctatgctgtcagctttctctctgtggccgtgggcagcaccgtctattaccagggcaaatatgccaaatctactctctccggattcccccaactctgaactttcccttccaccaggtctgacctggaaaggtccaagaaggcagctgccggctgtggtcccagcgcccctcccaccaccatgtgggagctcagcacatctgcttcccccagtcccaggaggctgagcctgattgtcctgagaaatgggaaggatcagatatgactcctccttggcaactgccctttcctgccaggcccacacataccctcttctggctgttaggggagcttgggtccctgaacactgtcattcacccaataaattactatttgaccccagagtgggtggaagggtgagccatgtgtttt

SEQ ID NO: 408878 - DNA, 875 bp, Homo sapiens
ccacaagctggccccttggcctcctagagaccctgacatctcctccagcagcatctgtcctctctcctcagggaggcaagcatttgatgctcgaggtccctggcagttgtggtccttggcaagtgatgtgtgagtcccgtgtgtcataggaagctccccatccccatctggtgaccaaaggcctggctacaagtagtgagtccttcctcctccacccagacctcactgctcagatccccttcgccaactgggacatcttccgacatggcctggatgctgttgctcatcttgatcatggtccatccaggatcctgtgctctctgggtgtcccagccccctgagattcgtaccctggaaggatcctctgccttcctgccctgctccttcaatgccagccaagggagactggccattggctccgtcacgtggttccgagatgaggtggttccagggaaggaggtgaggaatggaaccccagagttcaggggccgcctggccccacttgcttcttcccgtttcctccatgaccaccaggctgagctgcacatccgggacgtgcgaggccatgacgccagcatctacgtgtgcagagtggaggtgctgggccttggtgtcgggacagggaatgggactcggctggtggtggagaaagaacatcctcagctaggggctggtacagtcctcctccttcgggctggattctatgctgtcagctttctctctgtggccgtgggcagcaccgtctattaccagggcaaatgccactgtcacatgggaacacactgccactcctcagatgggccccgaggagtgattccagagcccagatgtccctagtcctcttcaaaagaccccaataaatctgccccaccact

SEQ ID NO: 408879 - DNA, 1054 bp, Homo sapiens
ccacaagctggccccttggcctcctagagaccctgacatctcctccagcagcatctgtcctctctcctcagggaggcaagcatttgatgctcgaggtccctggcagttgtggtccttggcaagtgatgtgtgagtcccgtgtgtcataggaagctccccatccccatctggtgaccaaaggcctggctacaagtagtgagtccttcctcctccacccagacctcactgctcagatccccttcgccaactgggacatcttccgacatggcctggatgctgttgctcatcttgatcatggtccatccaggatcctgtgctctctgggtgtcccagccccctgagattcgtaccctggaaggatcctctgccttcctgccctgctccttcaatgccagccaagggagactggccattggctccgtcacgtggttccgagatgaggtggttccagggaaggaggtgaggaatggaaccccagagttcaggggccgcctggccccacttgcttcttcccgtttcctccatgaccaccaggctgagctgcacatccgggacgtgcgaggccatgacgccagcatctacgtgtgcagagtggaggtgctgggccttggtgtcgggacagggaatgggactcggctggtggtggagaaagaacatcctcagctaggggctggtacagtcctcctccttcgggctggattctatgctgtcagctttctctctgtggccgtgggcagcaccgtctattaccagggcaaatgtctgacctggaaaggtccaagaaggcagctgccggctgtggtcccagcgcccctcccaccaccatgtgggagctcagcacatctgcttcccccagtcccaggaggctgagcctgattgtcctgagaaatgggaaggatcagatatgactcctccttggcaactgccctttcctgccaggcccacacataccctcttctggctgttaggggagcttgggtccctgaacactgtcattcacccaataaattactatttgaccccagagtgggtggaagggtgagccatgtgtttt

SEQ ID NO: 408880 - DNA, 940 bp, Homo sapiens
ccacaagctggccccttggcctcctagagaccctgacatctcctccagcagcatctgtcctctctcctcagggaggcaagcatttgatgctcgaggtccctggcagttgtggtccttggcaagtgatgtgatcctgtgctctctgggtgtcccagccccctgagattcgtaccctggaaggatcctctgccttcctgccctgctccttcaatgccagccaagggagactggccattggctccgtcacgtggttccgagatgaggtggttccagggaaggaggtgaggaatggaaccccagagttcaggggccgcctggccccacttgcttcttcccgtttcctccatgaccaccaggctgagctgcacatccgggacgtgcgaggccatgacgccagcatctacgtgtgcagagtggaggtgctgggccttggtgtcgggacagggaatgggactcggctggtggtggagaaagaacatcctcagctaggggctggtacagtcctcctccttcgggctggattctatgctgtcagctttctctctgtggccgtgggcagcaccgtctattaccagggcaaatatgccaaatctactctctccggattcccccaactctgaactttcccttccaccaggtctgacctggaaaggtccaagaaggcagctgccggctgtggtcccagcgcccctcccaccaccatgtgggagctcagcacatctgcttcccccagtcccaggaggctgagcctgattgtcctgagaaatgggaaggatcagatatgactcctggaatgccttctgcaggccaaatacctcttctgttgtaaggagttggggctggaacatggattcaccaatattctattgaccgatgggggggggggaaacaaaacaacaaaacccggcttctggggggcaacagaaaggcggaacggtgc

SEQ ID NO: 408881 - DNA, 3034 bp, Homo sapiens
  misc_feature (570)..(571): n is a, c, g, or t
aattgagatggtttactgtaaaattaaaatgggagttagttttctagacatgtaactctctggggagtataaaactggtcacaatgggctttgcgttgaagtatctgtccctcagatctcatcagaaggagtatataatacaaaaatataaattcaacctctgtatgttttcttctatgttttatgctgggactcactggagatctttgtaagtaatcaaagctggccctttatctttgattttggcttttagggaattctagggacttcctttccccaaattaaaactcattttgaggtgtttggttttgtcttttaatttttgcaacttcaaaattgatgactcagttctagtgtactttatcctcgaacttgtttaaaataggttactttcttgaaataaataataatataatgaagagatcatgacttggatttgggtgggggaattaaataccttttcaaaattgccatcagtatcatcttggatgaagaaagttcagtggttaaaagcgtcttctgaagtgtggtcatagtcggtgaggtttatttcagtttggcttctcattnnaattttcagatgtatatcacatatatgtgaaaagtactgacaaaaataatttatgaaataaacacagtagggcatgaggttgtgttatttgtgaggcagcaatggagcatgacttgtagtcaacaaacatgggtgtcctgatcaaagctctgctgtgctattcggcaagactctatgtggatgcctcttgtagaatgtggttaataataccagccgatctcatagggcactgtgcagactcagcattatggtgcacagctccttgaactcataggagtggcacttaactggagctttgtgtcgtactcatcaaacatcttcccccagacaatgattcttctgattctgctaactctggacagagtttgcattgtcttttgagaaaaatgaatttatcacttagtcaaaaaactgtaaaaatacataggctctttccgatgcttgctttctcagagccctatgagtttgtctctctggaatggctgcaaaagtggttggatgaatcaacacctaccaaacctattgataatcacgcttgcctgtgttcccatgacaagcttcacccggataaaatatcaattatgaagaggatatctgaatatgcagctgacattttctatagtagatatggaggaggtccaagactaactgtgaaagccctgtgtaaggaatgtgtagtagaacgttgtcgcatattgcgtctgaagaaccaactaaatgaagattataaaactgttaataatctgctgaaagcagcagtaaagggcgatggattttgggtggggaagtcctccttgcggagttggcgccagctagctcttgaacagctggatgagcaagatggtgatgcagaacaaagcaacggaaagatgaacggtagcaccttaaataaagatgaatcaaaggaagaaagaaaagaagaggaggaattaaattttaatgaagatattctgtgtccacatggtgagttatgcatatctgaaaatgaaagaaggcttgtttctaaagaggcttggagcaaactgcagcagtactttccaaaggctcctgagtttccaagttacaaagagtgctgttcacagtgcaagattttagaaagagaaggggaagaaaatgaagccttacataagatgattgcaaacgagcaaaagacttctctcccaaatttgttccaggataaaaacagaccgtgtctcagtaactggccagaggatacggatgtcctctacatcgtgtctcagttctttgtagaagagtggcggaaatttgttagaaagcctacaagatgcagccctgtgtcatcagttgggaacagtgctcttttgtgtccccacgggggcctcatgtttacatttgcttccatgaccaaagaagattctaaacttatagctctcatatggcccagtgagtggcaaatgatacaaaagctctttgttgtggatcatgtaattaaaatcacgagaattgaagtgggagatgtaaacccttcagaaacacagtatatttctgagcccaaactctgtccagaatgcagagaaggcttattgtgtcagcagcagagggacctgcgtgaatacactcaagccaccatctatgtccataaagttgtggataataaaaaggtgatgaaggattcggctccggaactgaatgtgagtagttctgaaacagaggaggacaaggaagaagctaaaccagatggagaaaaagatccagattttaatcaaatcatgcatgcattttcagttgctccttttgaccagaatttgtcaattgatggaaagattttaagtgatgactgtgccaccctaggcacccttggcgtcattcctgaatctgtcattttattgaaggctgatgaaccaattgcagattatgctgcaatggatgatgtcatgcaagtttgtatgccagaagaagggtttaaaggtactggtcttcttggacattaatctttgaatacttgctgactgctaagaaatgaccagaggggaagaggagtttgacatgttagggcattaaagcaaaggtggatttaagaattaaaccattacatgccccttccaaaaggcagaaatccattcaaacgtgactgtcccaaatgccttatgtcaaataaagcagattgcactgatggacatcagacttgaaggaaatgtttccaattttatatttaaggggggtggtgggtgggagggggcaagtaaagacggaacaagtttagtagcagtaatagtaaatcatgtttacatatgagatttatagtcgtgggaggggaataaagttctgttatatttccttgctcgagtttcataccagatgcgttggtccataaaggattgtatcaagtagatgggacaacattctgctctgaacgaaaagtaattttagagacataacctgcttaccaatgcctgtctttgattcatattctactttcaataaagcatgaaagtgaagaac

SEQ ID NO: 408882 - DNA, 198 bp, Homo sapiens
gcggccgcctactactactatggggctgtgagaagacgacagaggggaagaggagtttgacatgttagggcattaaagcaaaggtggatttaagaattaaaccattacatgccccttccaaaaggcagaaatccattcaaacgtgactgtcccaaatgccttatgtcaaataaagcagattgcactgatggacatcag

SEQ ID NO: 408883 - DNA, 116 bp, Homo sapiens
tcaagcttctaacgatgtacggggacatgccccttccaaaaggcagaaatccattcaaacgtgactgtcccaaatgccttatgtcaaataaagcagattgcactgatggacatcag

SEQ ID NO: 408884 - DNA, 3798 bp, Homo sapiens
  misc_feature (570)..(571): n is a, c, g, or t
aattgagatggtttactgtaaaattaaaatgggagttagttttctagacatgtaactctctggggagtataaaactggtcacaatgggctttgcgttgaagtatctgtccctcagatctcatcagaaggagtatataatacaaaaatataaattcaacctctgtatgttttcttctatgttttatgctgggactcactggagatctttgtaagtaatcaaagctggccctttatctttgattttggcttttagggaattctagggacttcctttccccaaattaaaactcattttgaggtgtttggttttgtcttttaatttttgcaacttcaaaattgatgactcagttctagtgtactttatcctcgaacttgtttaaaataggttactttcttgaaataaataataatataatgaagagatcatgacttggatttgggtgggggaattaaataccttttcaaaattgccatcagtatcatcttggatgaagaaagttcagtggttaaaagcgtcttctgaagtgtggtcatagtcggtgaggtttatttcagtttggcttctcattnnaattttcagatgtatatcacatatatgtgaaaagtactgacaaaaataatttatgaaataaacacagtagggcatgaggttgtgttatttgtgaggcagcaatggagcatgacttgtagtcaacaaacatgggtgtcctgatcaaagctctgctgtgctattcggcaagactctatgtggatgcctcttgtagaatgtggttaataataccagccgatctcatagggcactgtgcagactcagcattatggtgcacagctccttgaactcataggagtggcacttaactggagctttgtgtcgtactcatcaaacatcttcccccagacaatgattcttctgattctgctaactctggacagagtttgcattgtcttttgagaaaaatgaatttatcacttagtcaaaaaactgtaaaaatacataggctctttccgatgcttgctttctcagagccctatgagtttgtctctctggaatggctgcaaaagtggttggatgaatcaacacctaccaaacctattgataatcacgcttgcctgtgttcccatgacaagcttcacccggataaaatatcaattatgaagaggatatctgaatatgcagctgacattttctatagtagatatggaggaggtccaagactaactgtgaaagccctgtgtaaggaatgtgtagtagaacgttgtcgcatattgcgtctgaagaaccaactaaatgaagattataaaactgttaataatctgctgaaagcagcagtaaagggcgatggattttgggtggggaagtcctccttgcggagttggcgccagctagctcttgaacagctggatgagcaagatggtgatgcagaacaaagcaacggaaagatgaacggtagcaccttaaataaagatgaatcaaaggaagaaagaaaagaagaggaggaattaaattttaatgaagatattctgtgtccacatggtgagttatgcatatctgaaaatgaaagaaggcttgtttctaaagaggcttggagcaaactgcagcagtactttccaaaggctcctgagtttccaagttacaaagagtgctgttcacagtgcaagattttagaaagagaaggggaagaaaatgaagccttacataagatgattgcaaacgagcaaaagacttctctcccaaatttgttccaggataaaaacagaccgtgtctcagtaactggccagaggatacggatgtcctctacatcgtgtctcagttctttgtagaagagtggcggaaatttgttagaaagcctacaagatgcagccctgtgtcatcagttgggaacagtgctcttttgtgtccccacgggggcctcatgtttacatttgcttccatgaccaaagaagattctaaacttatagctctcatatggcccagtgagtggcaaatgatacaaaagctctttgttgtggatcatgtaattaaaatcacgagaattgaagtgggagatgtaaacccttcagaaacacagtatatttctgagcccaaactctgtccagaatgcagagaaggcttattgtgtcagcagcagagggacctgcgtgaatacactcaagccaccatctatgtccataaagttgtggataataaaaaggtgatgaaggattcggctccggaactgaatgtgagtagttctgaaacagaggaggacaaggaagaagctaaaccagatggagaaaaagatccagattttaatcaaagcaatggtggaacaaagcggcaaaagatatcccatcaaaattatatagcctatcaaaagcaagttattcgccgaagtatgcgacatagaaaagttcgtggtgagaaagcacttctcgtttctgctaatcagacgttaaaagaattgaaaattcagatcatgcatgcattttcagttgctccttttgaccagaatttgtcaattgatggaaagattttaagtgatgactgtgccaccctaggcacccttggcgtcattcctgaatctgtcattttattgaaggctgatgaaccaattgcagattatgctgcaatggatgatgtcatgcaagtttgtatgccagaagaagggtttaaaggtactggtcttcttggacattaatctttgaatacttgctgactgctaagaaatgaccagaggggaagaggagtttgacatgttagggcattaaagcaaaggtggatttaagaattaaaccattacatgccccttccaaaaggcagaaatccattcaaacgtgactgtcccaaatgccttatgtcaaataaagcagattgcactgatggacatcagacttgaaggaaatgtttccaattttatatttaaggggggtggtgggtgggagggggcaagtaaagacggaacaagtttagtagcagtaatagtaaatcatgtttacatatgagatttatagtcgtgggaggggaataaagttctgttatatttccttgctcgagtttcataccagatgcgttggtccataaaggattgtatcaagtagatgggacaacattctgctctgaacgaaaagtaattttagagacataacctgcttaccaatgcctgtctttgattcatattctactttcaataaagcatgaaagtgaagaacttgtcctaagtgtggaaaagtgtcttcagatttagactcttctccatgtcagctgcagcgccacccgccttacacctgcccggccgtctgtctcttggtattgggtaaaggagggggcacctgcatgtctcctgcaatgagcaaggaattatgtctcatgttttgacttcagaggctttttgctttggtgcatttcagaaaggatggagaacatttattatgtgtgaaagcatcctcttccggttttgctgttattcaaaagtgggaaatgtacctggcacgtttgaaaataaaaaatctgactacctatcagaagagtaaatcagactgaagtacatttggataacacaaggtttctataaaatttgttcttcctgtcctccatgtcactgtttcttggacctcagttctctttttgaaagcattattccaaaatgccctgagagggtctcttagatcattgtttaaaaaaggaaaaaagtatatggatgtgctgtccatccaactcaggattatcattcttagcaacacgtaaccgaagcaatattcttaagaatattgaaggggtttttttaattgaacttaagactggagtttttcctttgaaa

SEQ ID NO: 408885 - DNA, 2871 bp, Homo sapiens
  misc_feature (570)..(571): n is a, c, g, or t
aattgagatggtttactgtaaaattaaaatgggagttagttttctagacatgtaactctctggggagtataaaactggtcacaatgggctttgcgttgaagtatctgtccctcagatctcatcagaaggagtatataatacaaaaatataaattcaacctctgtatgttttcttctatgttttatgctgggactcactggagatctttgtaagtaatcaaagctggccctttatctttgattttggcttttagggaattctagggacttcctttccccaaattaaaactcattttgaggtgtttggttttgtcttttaatttttgcaacttcaaaattgatgactcagttctagtgtactttatcctcgaacttgtttaaaataggttactttcttgaaataaataataatataatgaagagatcatgacttggatttgggtgggggaattaaataccttttcaaaattgccatcagtatcatcttggatgaagaaagttcagtggttaaaagcgtcttctgaagtgtggtcatagtcggtgaggtttatttcagtttggcttctcattnnaattttcagatgtatatcacatatatgtgaaaagtactgacaaaaataatttatgaaataaacacagtagggcatgaggttgtgttatttgtgaggcagcaatggagcatgacttgtagtcaacaaacatgggtgtcctgatcaaagctctgctgtgctattcggcaagactctatgtggatgcctcttgtagaatgtggttaataataccagccgatctcatagggcactgtgcagactcagcattatggtgcacagctccttgaactcataggagtggcacttaactggagctttgtgtcgtactcatcaaacatcttcccccagacaatgattcttctgattctgctaactctggacagagtttgcattgtcttttgagaaaaatgaatttatcacttagtcaaaaaactgtaaaaatacataggctctttccgatgcttgctttctcagagccctatgagtttgtctctctggaatggctgcaaaagtggttggatgaatcaacacctaccaaacctattgataatcacgcttgcctgtgttcccatgacaagcttcacccggataaaatatcaattatgaagaggatatctgaatatgcagctgacattttctatagtagatatggaggaggtccaagactaactgtgaaagccctgtgtaaggaatgtgtagtagaacgttgtcgcatattgcgtctgaagaaccaactaaatgaagattataaaactgttaataatctgctgaaagcagcagtaaagggcgatggattttgggtggggaagtcctccttgcggagttggcgccagctagctcttgaacagctggatgagcaagatggtgatgcagaacaaagcaacggaaagatgaacggtagcaccttaaataaagatgaatcaaaggaagaaagaaaagaagaggaggaattaaattttaatgaagatattctgtgtccacatggtgagttatgcatatctgaaaatgaaagaaggcttgtttctaaagaggcttggagcaaactgcagcagtactttccaaaggctcctgagtttccaagttacaaagagtgctgttcacagtgcaagattttagaaagagaaggggaagaaaatgaagccttacataagatgattgcaaacgagcaaaagacttctctcccaaatttgttccaggataaaaacagaccgtgtctcagtaactggccagaggatacggatgtcctctacatcgtgtctcagttctttgtagaagagtggcggaaatttgttagaaagcctacaagatgcagccctgtgtcatcagttgggaacagtgctcttttgtgtccccacgggggcctcatgtttacatttgcttccatgaccaaagaagattctaaacttatagctctcatatggcccagtgagtggcaaatgatacaaaagctctttgttgtggatcatgtaattaaaatcacgagaattgaagtgggagatgtaaacccttcagaaacacagtatatttctgagcccaaactctgtccagaatgcagagaaggcttattgtgtcagcagcagagggacctgcgtgaatacactcaagccaccatctatgtccataaagttgtggataataaaaaggtgatgaaggattcggctccggaactgaatgtgagtagttctgaaacagaggaggacaaggaagaagctaaaccagatggagaaaaagatccagattttaatcaaagcaatggtggaacaaagcggcaaaagatatcccatcaaaattatatagcctatcaaaagcaagttattcgccgaagtatgcgacatagaaaagttcgtggtgagaaagcacttctcgtttctgctaatcagacgttaaaagaattgaaaattcagatcatgcatgcattttcagttgctccttttgaccagaatttgtcaattgatggaaagattttaagtgatgactgtgccaccctaggcacccttggcgtcattcctgaatctgtcattttattgaaggctgatgaaccaattgcagattatgctgcaatggatgatgtcatgcaagtttgtatgccagaagaagggtttaaaggtactggtcttcttggacattaatctttgaatacttgctgactgctaagaaatgaccagaggggaagaggagtttgacatgttagggcattaaagcaaaggtggatttaagaattaaaccattacatgccccttccaaaaggcagaaatccattcaaacgtgactgtcccaaatgccttatgtcaaataaagcagattgcactgatggacatcag

SEQ ID NO: 408886 - DNA, 2362 bp, Homo sapiens
gtgatctagaggatcccactgtaataaagatgaatcaaaggaagaaagaaaagaagaggaggaattaaattttaatgaagatattctgtgtccacatggtgagttatgcatatctgaaaatgaaagaaggcttgtttctaaagaggcttggagcaaactgcagcagtactttccaaaggctcctgagtttccaagttacaaagagtgctgttcacagtgcaagattttagaaagagaaggggaagaaaatgaagccttacataagatgattgcaaacgagcaaaagacttctctcccaaatttgttccaggataaaaacagaccgtgtctcagtaactggccagaggatacggatgtcctctacatcgtgtctcagttctttgtagaagagtggcggaaatttgttagaaagcctacaagatgcagccctgtgtcatcagttgggaacagtgctcttttgtgtccccacgggggcctcatgtttacatttgcttccatgaccaaagaagattctaaacttatagctctcatatggcccagtgagtggcaaatgatacaaaagctctttgttgtggatcatgtaattaaaatcacgagaattgaagtgggagatgtaaacccttcagaaacacagtatatttctgagcccaaactctgtccagaatgcagagaaggcttattgtgtcagcagcagagggacctgcgtgaatacactcaagccaccatctatgtccataaagttgtggataataaaaaggtgatgaaggattcggctccggaactgaatgtgagtagttctgaaacagaggaggacaaggaagaagctaaaccagatggagaaaaagatccagattttaatcaaagcaatggtggaacaaagcggcaaaagatatcccatcaaaattatatagcctatcaaaagcaagttattcgccgaagtatgcgacatagaaaagttcgtggtgagaaagcacttctcgtttctgctaatcagacgttaaaagaattgaaaattcagatcatgcatgcattttcagttgctccttttgaccagaatttgtcaattgatggaaagattttaagtgatgactgtgccaccctaggcacccttggcgtcattcctgaatctgtcattttattgaaggctgatgaaccaattgcagattatgctgcaatggatgatgtcatgcaagtttgtatgccagaagaagggtttaaaggtactggtcttcttggacattaatctttgaatacttgctgactgctaagaaatgaccagaggggaagaggagtttgacatgttagggcattaaagcaaaggtggatttaagaattaaaccattacatgccccttccaaaaggcagaaatccattcaaacgtgactgtcccaaatgccttatgtcaaataaagcagattgcactgatggacatcagacttgaaggaaatgtttccaattttatatttaaggggggtggtgggtgggagggggcaagtaaagacggaacaagtttagtagcagtaatagtaaatcatgtttacatatgagatttatagtcgtgggaggggaataaagttctgttatatttccttgctcgagtttcataccagatgcgttggtccataaaggattgtatcaagtagatgggacaacattctgctctgaacgaaaagtaattttagagacataacctgcttaccaatgcctgtctttgattcatattctactttcaataaagcatgaaagtgaagaacttgtcctaagtgtggaaaagtgtcttcagatttagactcttctccatgtcagctgcagcgccacccgccttacacctgcccggccgtctgtctcttggtattgggtaaaggagggggcacctgcatgtctcctgcaatgagcaaggaattatgtctcatgttttgacttcagaggctttttgctttggtgcatttcagaaaggatggagaacatttattatgtgtgaaagcatcctcttccggttttgctgttattcaaaagtgggaaatgtacctggcacgtttgaaaataaaaaatctgactacctatcagaagagtaaatcagactgaagtacatttggataacacaaggtttctataaaatttgttcttcctgtcctccatgtcactgtttcttggacctcagttctctttttgaaagcattattccaaaatgccctgagagggtctcttagatcattgtttaaaaaaggaaaaaagtatatggatgtgctgtccatccaactcaggattatcattcttagcaacacgtaaccgaagcaatattcttaagaatattgaaggggtttttttaattgaacttaagactggagtttttcctttgaaa

SEQ ID NO: 408887 - DNA, 2715 bp, Homo sapiens
  misc_feature (570)..(571): n is a, c, g, or t
aattgagatggtttactgtaaaattaaaatgggagttagttttctagacatgtaactctctggggagtataaaactggtcacaatgggctttgcgttgaagtatctgtccctcagatctcatcagaaggagtatataatacaaaaatataaattcaacctctgtatgttttcttctatgttttatgctgggactcactggagatctttgtaagtaatcaaagctggccctttatctttgattttggcttttagggaattctagggacttcctttccccaaattaaaactcattttgaggtgtttggttttgtcttttaatttttgcaacttcaaaattgatgactcagttctagtgtactttatcctcgaacttgtttaaaataggttactttcttgaaataaataataatataatgaagagatcatgacttggatttgggtgggggaattaaataccttttcaaaattgccatcagtatcatcttggatgaagaaagttcagtggttaaaagcgtcttctgaagtgtggtcatagtcggtgaggtttatttcagtttggcttctcattnnaattttcagatgtatatcacatatatgtgaaaagtactgacaaaaataatttatgaaataaacacagtagggcatgaggttgtgttatttgtgaggcagcaatggagcatgacttgtagtcaacaaacatgggtgtcctgatcaaagctctgctgtgctattcggcaagactctatgtggatgcctcttgtagaatgtggttaataataccagccgatctcatagggcactgtgcagactcagcattatggtgcacagctccttgaactcataggagtggcacttaactggagctttgtgtcgtactcatcaaacatcttcccccagacaatgattcttctgattctgctaactctggacagagtttgcattgtcttttgagaaaaatgaatttatcacttagtcaaaaaactgtaaaaatacataggctctttccgatgcttgctttctcagagccctatgagtttgtctctctggaatggctgcaaaagtggttggatgaatcaacacctaccaaacctattgataatcacgcttgcctgtgttcccatgacaagcttcacccggataaaatatcaattatgaagaggatatctgaatatgcagctgacattttctatagtagatatggaggaggtccaagactaactgtgaaagccctgtgtaaggaatgtgtagtagaacgttgtcgcatattgcgtctgaagaaccaactaaatgaagattataaaactgttaataatctgctgaaagcagcagtaaagggcgatggattttgggtggggaagtcctccttgcggagttggcgccagctagctcttgaacagctggatgagcaagatggtgatgcagaacaaagcaacggaaagatgaacggtagcaccttaaataaagatgaatcaaaggaagaaagaaaagaagaggaggaattaaattttaatgaagatattctgtgtccacatggtgagttatgcatatctgaaaatgaaagaaggcttgtttctaaagaggcttggagcaaactgcagcagtactttccaaaggctcctgagtttccaagttacaaagagtgctgttcacagtgcaagattttagaaagagaaggggaagaaaatgaagccttacataagatgattgcaaacgagcaaaagacttctctcccaaatttgttccaggataaaaacagaccgtgtctcagtaactggccagaggatacggatgtcctctacatcgtgtctcagttctttgtagaagagtggcggaaatttgttagaaagcctacaagatgcagccctgtgtcatcagttgggaacagtgctcttttgtgtccccacgggggcctcatgtttacatttgcttccatgaccaaagaagattctaaacttatagctctcatatggcccagtgagtggcaaatgatacaaaagctctttgttgtggatcatgtaattaaaatcacgagaattgaagtgggagatgtaaacccttcagaaacacagtatatttctgagcccaaactctgtccagaatgcagagaaggcttattgtgtcagcagcagagggacctgcgtgaatacactcaagccaccatctatgtccataaagttgtggataataaaaaggtgatgaaggattcggctccggaactgaatgtgagtagttctgaaacagaggaggacaaggaagaagctaaaccagatggagaaaaagatccagattttaatcaaatcatgcatgcattttcagttgctccttttgaccagaatttgtcaattgatggaaagattttaagtgatgactgtgccaccctaggcacccttggcgtcattcctgaatctgtcattttattgaaggctgatgaaccaattgcagattatgctgcaatggatgatgtcatgcaagtttgtatgccagaagaagggtttaaaggtactggtcttcttggacattaatctttgaatacttgctgactgctaagaaatgaccagaggggaagaggagtttgacatgttagggcattaaagcaaaggtggatttaagaattaaaccattacatgccccttccaaaaggcagaaatccattcaaacgtgactgtcccaaatgccttatgtcaaataaagcagattgcactgatggacatcag

SEQ ID NO: 408888 - DNA, 4354 bp, Homo sapiens
  misc_feature (570)..(571): n is a, c, g, or t
  misc_feature (2752)..(2752): n is a, c, g, or t
  misc_feature (3721)..(3721): n is a, c, g, or t
  misc_feature (3785)..(3785): n is a, c, g, or t
aattgagatggtttactgtaaaattaaaatgggagttagttttctagacatgtaactctctggggagtataaaactggtcacaatgggctttgcgttgaagtatctgtccctcagatctcatcagaaggagtatataatacaaaaatataaattcaacctctgtatgttttcttctatgttttatgctgggactcactggagatctttgtaagtaatcaaagctggccctttatctttgattttggcttttagggaattctagggacttcctttccccaaattaaaactcattttgaggtgtttggttttgtcttttaatttttgcaacttcaaaattgatgactcagttctagtgtactttatcctcgaacttgtttaaaataggttactttcttgaaataaataataatataatgaagagatcatgacttggatttgggtgggggaattaaataccttttcaaaattgccatcagtatcatcttggatgaagaaagttcagtggttaaaagcgtcttctgaagtgtggtcatagtcggtgaggtttatttcagtttggcttctcattnnaattttcagatgtatatcacatatatgtgaaaagtactgacaaaaataatttatgaaataaacacagtagggcatgaggttgtgttatttgtgaggcagcaatggagcatgacttgtagtcaacaaacatgggtgtcctgatcaaagctctgctgtgctattcggcaagactctatgtggatgcctcttgtagaatgtggttaataataccagccgatctcatagggcactgtgcagactcagcattatggtgcacagctccttgaactcataggagtggcacttaactggagctttgtgtcgtactcatcaaacatcttcccccagacaatgattcttctgattctgctaactctggacagagtttgcattgtcttttgagaaaaatgaatttatcacttagtcaaaaaactgtaaaaatacataggctctttccgatgcttgctttctcagagccctatgagtttgtctctctggaatggctgcaaaagtggttggatgaatcaacacctaccaaacctattgataatcacgcttgcctgtgttcccatgacaagcttcacccggataaaatatcaattatgaagaggatatctgaatatgcagctgacattttctatagtagatatggaggaggtccaagactaactgtgaaagccctgtgtaaggaatgtgtagtagaacgttgtcgcatattgcgtctgaagaaccaactaaatgaagattataaaactgttaataatctgctgaaagcagcagtaaagggcgatggattttgggtggggaagtcctccttgcggagttggcgccagctagctcttgaacagctggatgagcaagatggtgatgcagaacaaagcaacggaaagatgaacggtagcaccttaaataaagatgaatcaaaggaagaaagaaaagaagaggaggaattaaattttaatgaagatattctgtgtccacatggtgagttatgcatatctgaaaatgaaagaaggcttgtttctaaagaggcttggagcaaactgcagcagtactttccaaaggctcctgagtttccaagttacaaagagtgctgttcacagtgcaagattttagaaagagaaggggaagaaaatgaagccttacataagatgattgcaaacgagcaaaagacttctctcccaaatttgttccaggataaaaacagaccgtgtctcagtaactggccagaggatacggatgtcctctacatcgtgtctcagttctttgtagaagagtggcggaaatttgttagaaagcctacaagatgcagccctgtgtcatcagttgggaacagtgctcttttgtgtccccacgggggcctcatgtttacatttgcttccatgaccaaagaagattctaaacttatagctctcatatggcccagtgagtggcaaatgatacaaaagctctttgttgtggatcatgtaattaaaatcacgagaattgaagtgggagatgtaaacccttcagaaacacagtatatttctgagcccaaactctgtccagaatgcagagaaggcttattgtgtcagcagcagagggacctgcgtgaatacactcaagccaccatctatgtccataaagttgtggataataaaaaggtgatgaaggattcggctccggaactgaatgtgagtagttctgaaacagaggaggacaaggaagaagctaaaccagatggagaaaaagatccagattttaatcaaagcaatggtggaacaaagcggcaaaagatatcccatcaaaattatatagcctatcaaaagcaagttattcgccgaagtatgcgacatagaaaagttcgtggtgagaaagcacttctcgtttctgctaatcagacgttaaaagaattgaaaattcagatcatgcatgcattttcagttgctccttttgaccagaatttgtcaattgatggaaagattttaagtgatgactgtgccaccctaggcacccttggcgtcattcctgaatctgtcattttattgaaggctgatgaaccaattgcagattatgctgcaatggatgatgtcatgcaaggtaaagatgaatttgttttaggaatctgctgattaggttttagacggaggtgggattttagatattgaagctttagtgtacagtgcttttactttgaaccttgaaaaaagcttccacatattnttacagtagaatacattatcttaaaagatcatagaaaggagggaaagatatctacaaaaacttggaaagctaacctgaggaaactgaaataaatgtgagctctgcctgtggaggaggtcaacaagaagcaaaactaagtcagattgcagtgccccagacaggcacacacaaattagaggcctaggtacctctgaaggtgggaatgaattgtgagcctaaaaagaagataacatgatacttgtttggaaaactgtataagaagcagttagacaactctctacctttcacatccttgtcacttccccatctccacctggacctcagatgggcacccagaattatgtgtttccacacttggaaaaattaaactagaaaggtgggaacgaagcctataccaaataggagaccatctcttagccctttgctcaaattcgggcagcccattacttaccctcccccaggtgggaagggatttctctccagggaaactagtcaagaaaataaccagtggatgtaaaaagtctggttctgtatgatcaagtgagatttctcccagggatgcaaggatgttcaacatatgcaaaccaatacatcacatcagcagaatgaaggacaaaaatcatatgatcatcttaatagacaaagaaaaagcatttgataaaattcaacatcccttcgtggtaaaaactctcaaaaaaccaagtacagaaggaacatacctcaatataataaaggccatatgtgagacccacagctgacatcatacctaatggcgaaaagcttaaagcctttcctctaagaactggaatagacaaggacggccattttcaccactcttattcaacatagtattggaagtcctagcaagagcaattaggcaagataaataagtaaaaagcatgcaaaattggaaaagaggaagtcaaatggtccctctttgcagatgacatgctttttttttagagtctntgttgcccagactggagtgcagtggcaccatctcagctcactgcagccaccactcctgggttcnagcaattcttgtgcctcagactcctgagtagctgggactacaggcatgtgccatgacacccagctaatttttgtatttttactagagatgaggatttcccatgttggccaggctggtcccgaactcctggccccctgtgatctggccacctgggcctcccaaaatgctagaattacaggcatgagccaccacacctggcctacatatatttttttttcttttttgagacagtcttgctttttgtcggaagtatgtagtcgactacatacttccgagaggatatctgaatatgcagctgacattttctatagtagatatggaggaggtccaagactaactgtgaaagccctgtgtaaggaatgtgtagtagaacgttgtcgcatattgcgtctgaagaaccaactaaatgaagattataaaactgttaataatctgctgaaagcagcagtaaagggcagcgatggattttgggtggggaagtcctccttgcggagttggcgccagctagctcttgaacagctggatgagcaagatggtgatgcagaacaaagcaacggaagtatgtagtc

SEQ ID NO: 408889 - DNA, 2633 bp, Homo sapiens
  misc_feature (570)..(571): n is a, c, g, or t
aattgagatggtttactgtaaaattaaaatgggagttagttttctagacatgtaactctctggggagtataaaactggtcacaatgggctttgcgttgaagtatctgtccctcagatctcatcagaaggagtatataatacaaaaatataaattcaacctctgtatgttttcttctatgttttatgctgggactcactggagatctttgtaagtaatcaaagctggccctttatctttgattttggcttttagggaattctagggacttcctttccccaaattaaaactcattttgaggtgtttggttttgtcttttaatttttgcaacttcaaaattgatgactcagttctagtgtactttatcctcgaacttgtttaaaataggttactttcttgaaataaataataatataatgaagagatcatgacttggatttgggtgggggaattaaataccttttcaaaattgccatcagtatcatcttggatgaagaaagttcagtggttaaaagcgtcttctgaagtgtggtcatagtcggtgaggtttatttcagtttggcttctcattnnaattttcagatgtatatcacatatatgtgaaaagtactgacaaaaataatttatgaaataaacacagtagggcatgaggttgtgttatttgtgaggcagcaatggagcatgacttgtagtcaacaaacatgggtgtcctgatcaaagctctgctgtgctattcggcaagactctatgtggatgcctcttgtagaatgtggttaataataccagccgatctcatagggcactgtgcagactcagcattatggtgcacagctccttgaactcataggagtggcacttaactggagctttgtgtcgtactcatcaaacatcttcccccagacaatgattcttctgattctgctaactctggacagagtttgcattgtcttttgagaaaaatgaatttatcacttagtcaaaaaactgtaaaaatacataggctctttccgatgcttgctttctcagagccctatgagtttgtctctctggaatggctgcaaaagtggttggatgaatcaacacctaccaaacctattgataatcacgcttgcctgtgttcccatgacaagcttcacccggataaaatatcaattatgaagaggatatctgaatatgcagctgacattttctatagtagatatggaggaggtccaagactaactgtgaaagccctgtgtaaggaatgtgtagtagaacgttgtcgcatattgcgtctgaagaaccaactaaatgaagattataaaactgttaataatctgctgaaagcagcagtaaagggcgatggattttgggtggggaagtcctccttgcggagttggcgccagctagctcttgaacagctggatgagcaagatggtgatgcagaacaaagcaacggaaagatgaacggtagcaccttaaataaagatgaatcaaaggaagaaagaaaagaagaggaggaattaaattttaatgaagatattctgtgtccacatggtgagttatgcatatctgaaaatgaaagaaggcttgtttctaaagaggcttggagcaaactgcagcagtactttccaaaggctcctgagtttccaagttacaaagagtgctgttcacagtgcaagattttagaaagagaaggggaagaaaatgaagccttacataagatgattgcaaacgagcaaaagacttctctcccaaatttgttccaggataaaaacagaccgtgtctcagtaactggccagaggatacggatgtcctctacatcgtgtctcagttctttgtagaagagtggcggaaatttgttagaaagcctacaagatgcagccctgtgtcatcagttgggaacagtgctcttttgtgtccccacgggggcctcatgtttacatttgcttccatgaccaaagaagattctaaacttatagctctcatatggcccagtgagtggcaaatgatacaaaagctctttgttgtggatcatgtaattaaaatcacgagaattgaagtgggagatgtaaacccttcagaaacacagtatatttctgagcccaaactctgtccagaatgcagagaaggcttattgtgtcagcagcagagggacctgcgtgaatacactcaagccaccatctatgtccataaagttgtggataataaaaaggtactggtccctcttgtggcaatgactagtaatgatcaagcgtgctctttggcttgatttgctgttgtatttgcactgagggtctgcctaggactgcatttttgttccttcagagctgtttggcatcagaattgaaattggacaataattgaaaatgaacagttatgtgattatatgagaatttagtttgttattaattgatgcatagatatttactgaatgtcagctgtgttccaggaatggtccaggtgctggggatacagtgataaagaaggcaggtataataccttctctcaaaattataggcacctagtgaggaagatcaggaataaagtataaattcatatgatttcacacagaaatgattgttttgaaggaactttagcagggtcaagtggaggttagtgtgagacagggagtagacaggagaggcgtcttgg

SEQ ID NO: 408890 - DNA, 2515 bp, Homo sapiens
  misc_feature (10)..(10): n is a, c, g, or t
  misc_feature (913)..(913): n is a, c, g, or t
  misc_feature (1882)..(1882): n is a, c, g, or t
  misc_feature (1946)..(1946): n is a, c, g, or t
taaccatgtngattcatgtaatttcagtccatttagtttcgctgctgtggtaacattcctttgtatgaaaaactattctttgttgatgatacgtatcttttctctctaattcctttggattaaatgttagtgttaatggttttggtttagcagactaatggattatgttaattctcttaatttccatgtgtcttaaggcatgttgtgttttttttttgcacagtatagctctcatatggcccagtgagtggcaaatgatacaaaagctctttgttgtggatcatgtaattaaaatcacgagaattgaagtgggagatgtaaacccttcagaaacacagtatatttctgagcccagtgatgaaggattcggctccggaactgaatgtgagtagttctgaaacagaggaggacaaggaagaagctaaaccagatggagaaaaagatccagattttaatcaaagcaatggtggaacaaagcggcaaaagatatcccatcaaaattatatagcctatcaaaagcaagttattcgccgaagtatgcgacatagaaaagttcgtggtgagaaagcacttctcgtttctgctaatcagacgttaaaagaattgaaaattcagatcatgcatgcattttcagttgctccttttgaccagaatttgtcaattgatggaaagattttaagtgatgactgtgccaccctaggcacccttggcgtcattcctgaatctgtcattttattgaaggctgatgaaccaattgcagattatgctgcaatggatgatgtcatgcaaggtaaagatgaatttgttttaggaatctgctgattaggttttagacggaggtgggattttagatattgaagctttagtgtacagtgcttttactttgaaccttgaaaaaagcttccacatattnttacagtagaatacattatcttaaaagatcatagaaaggagggaaagatatctacaaaaacttggaaagctaacctgaggaaactgaaataaatgtgagctctgcctgtggaggaggtcaacaagaagcaaaactaagtcagattgcagtgccccagacaggcacacacaaattagaggcctaggtacctctgaaggtgggaatgaattgtgagcctaaaaagaagataacatgatacttgtttggaaaactgtataagaagcagttagacaactctctacctttcacatccttgtcacttccccatctccacctggacctcagatgggcacccagaattatgtgtttccacacttggaaaaattaaactagaaaggtgggaacgaagcctataccaaataggagaccatctcttagccctttgctcaaattcgggcagcccattacttaccctcccccaggtgggaagggatttctctccagggaaactagtcaagaaaataaccagtggatgtaaaaagtctggttctgtatgatcaagtgagatttctcccagggatgcaaggatgttcaacatatgcaaaccaatacatcacatcagcagaatgaaggacaaaaatcatatgatcatcttaatagacaaagaaaaagcatttgataaaattcaacatcccttcgtggtaaaaactctcaaaaaaccaagtacagaaggaacatacctcaatataataaaggccatatgtgagacccacagctgacatcatacctaatggcgaaaagcttaaagcctttcctctaagaactggaatagacaaggacggccattttcaccactcttattcaacatagtattggaagtcctagcaagagcaattaggcaagataaataagtaaaaagcatgcaaaattggaaaagaggaagtcaaatggtccctctttgcagatgacatgctttttttttagagtctntgttgcccagactggagtgcagtggcaccatctcagctcactgcagccaccactcctgggttcnagcaattcttgtgcctcagactcctgagtagctgggactacaggcatgtgccatgacacccagctaatttttgtatttttactagagatgaggatttcccatgttggccaggctggtcccgaactcctggccccctgtgatctggccacctgggcctcccaaaatgctagaattacaggcatgagccaccacacctggcctacatatatttttttttcttttttgagacagtcttgctttttgtcggaagtatgtagtcgactacatacttccgagaggatatctgaatatgcagctgacattttctatagtagatatggaggaggtccaagactaactgtgaaagccctgtgtaaggaatgtgtagtagaacgttgtcgcatattgcgtctgaagaaccaactaaatgaagattataaaactgttaataatctgctgaaagcagcagtaaagggcagcgatggattttgggtggggaagtcctccttgcggagttggcgccagctagctcttgaacagctggatgagcaagatggtgatgcagaacaaagcaacggaagtatgtagtc

SEQ ID NO: 408891 - DNA, 602 bp, Homo sapiens
atcttttcaatttggaattcttctttttttctttttttcagtttgtatgccagaagaagggtttaaaggtactggtcttcttggacattaatctttgaatacttgctgactgctaagaaatgaccagaggggaagaggagtttgacatgttagggcattaaagcaaaggtggatttaagaattaaaccattacatgccccttccaaaaggcagaaatccattcaaacgtgactgtcccaaatgccttatgtcaaataaagcagattgcactgatggacatcagacttgaaggaaatgtttccaattttatatttaaggggggtggtgggtgggagggggcaagtaaagacggaacaagtttagtagcagtaatagtaaatcatgtttacatatgagatttatagtcgtgggaggggaataaagttctgttatatttccttgctcgagtttcataccagatgcgttggtccataaaggattgtatcaagtagatgggacaacattctgctctgaacgaaaagtaattttagagacataacctgcttaccaatgcctgtctttgattcatattctactttcaataaagcatgaaagtgaagaac

SEQ ID NO: 408892 - DNA, 576 bp, Homo sapiens
cttgaactcctgggattataggtgggagcctcctcaccaaaccttaaatgtctcttgtaacaaacatttaaactgcttacatgcacttagaggtgtgtattactcattattttcttttatcaattttatgtgagcctgctaagaaagtctcgttagtttctactcattgtttacattgaatttcaaatagttaagggaccaataaggaaacagcttttgtttacctgaaaaacttcatgagcaagggtcacattgtggttaatttcagtgctttcttcatttccaatcttcattatagagcaatggtggaacaaagcggcaaaagatatcccatcaaaattatatagcctatcaaaagcaagttattcgccgaagtatgcgacatagaaaagttcgtggtgagaaagcacttctcgtttctgctaatcagacgttaaaagaattgaaaattcaggtgagggaaacatttgttcaagtttgctctggacttaaaagggcctttatgaattcctgctttccacctgtatttacatatatgtatgtatctgtgtttttttccagaagacttaaagtttt

SEQ ID NO: 408893 - DNA, 968 bp, Homo sapiens
ggctagtcagcgggacgggcgggcgcgcgggcgctgttgggctcctctgagcggttgaggttggggctggggttgagctcgggttgggttcctcctggggcaggagggaaaggcgggagccagggcgtcagggcctgcggacgatgtgtgtgtgaaagggcgcgtcagccataagaagccatatgcgtgcgagccggtccccaccgtccccgcggcgttgtcaccatcatcatgaggccactggagcagcctcaggcgctgctgccggggggccgggcgcggggtgcgtcgggctctgcaggttggcactcacacccagcgcgcaggatggcaggaatagcacatttcaaacctacaagaaagaagtgtgcctcccccgtcattcgatgcaccctggcccctgggccatctgctgtgaatgccagaccagattcgggggccgcctgcctgtgtccagggtggaagcagcactgccttactgggtccctctgtccctgagaccccgaaagcagcacccctgctggatgcatgctgctggcacaactgctggcggatctgcggtgatgagtgcctgttgtccaagttccagcagctccaggccccctaccaggaccagctaccggctcctgcagcgcgtctgctgcccctcggcctcctgaccctcctccaggccatcccgagggtcatcatggccattcgccagtgttttggggtttgaagttggaatcttcagctactgtcaagaacagccacaaaaatgtgtcacgatcaagatctttgagagtccaccaatcaggaggcgtctgtgacagtcgctgtcttctcagaacagaatccacacccaggattcaacccaaatgatttctcatcaggtgattcttggttgtagcaaagttcatgtgaatgtgggtgagtttctgttatgaatgtggtcaataaatgttatttgtgaaactctaaactggcca

SEQ ID NO: 408894 - DNA, 849 bp, Homo sapiens
gtgattcatatgcttccatagcaggtgtctgcttctgagccaagctcccagggcagcggagcaggcaccaaccagcatcccaggggagggcacagcttgtccagctgggatgtttgggtgccctgtgagatgccccaagccaccaacccagcttatctcaggagaagcctcggcggcccgtctgccggcctggagagatgtgctacagcagccgggggtggggggagagggtgggcttagaatctcttggcagggagcccccaagagcagggtgagacctgccttcatttcacctgtccccttcacagttctgcaaagccagcattatcatcccttttcagaaggagtgggcactcaggtggaatgcctcaccccagtcctgcggctggaaagcgatatggccaggactgcaccccacccctcatccctgcaccccttccctgcctgggattcctccagccctgtgcactgtggagcgcctctgccttccgctcatggaggtttcccaagggcacgcgctgagggcagctggtctcagcctggggccgggtcctagtaactgtctctctttgctttccagccagtgttttggggtttgaagttggaatcttcagctactgtcaagaacagccacaaaaatgtgtcacgatcaagatctttgagagtccaccaatcaggaggcgtctgtgacagtcgctgtcttctcagaacagaatccacacccaggattcaacccaaatgatttctcatcaggtgattcttggttgtagcaaagttcatgtgaatgtgggtgagtttctgttatgaatgtggtcaataaatgttatttgtgaaactctaaactggcca

SEQ ID NO: 408895 - DNA, 452 bp, Homo sapiens
cgcacgctggaggacatcttccacgagcacatgcaggagctcatcctgatgaagttcatctacaccagtcagtacgacaactgcctgacctaccgccgcatctacctgccgcccagccgccccgacgacctcatcaagcctggccctcctccaggccatcccgagggtcatcatggccattcgccagtgttttggggtttgaagttggaatcttcagctactgtcaagaacagccacaaaaatgtgtcacgatcaagatctttgagagtccaccaatcaggaggcgtctgtgacagtcgctgtcttctcagaacagaatccacacccaggattcaacccaaatgatttctcatcaggtgattcttggttgtagcaaagttcatgtgaatgtgggtgagtttctgttatgaatgtggtcaataaatgttatttgtgaaactctaaactggcca

SEQ ID NO: 408896 - DNA, 1022 bp, Homo sapiens
tccccgctgggcagcagacagtggagatcgacctgaggcatcggatccagctgcccgacctcgagaaccagcgcaacttcaatgagctctcccgcatcgtcctggaggtgcgcgagagggtgcgccaggagcagcaggaaggcgggcacgaggcgggcgagggtcgtggccggcagggcccccgggagtcccagccaagccctgcccagcccagggcagaggcgcccagcaagggcccagatgggacacctggtgaggatggtggcgagcctggggatgccgtagctgcggccgagcagcctgcccagtgtgggcaggggcagccgttcgtgctgcccgtgggcgtgagctccaggaatgaggactacccccgaacctgcaggatgtggaatagcacatttcaaacctacaagaaagaagtgtgcctcccccgtcattcgatgcaccctggcccctgggccatctgctgtgaatgccagaccagattcgggggccgcctgcctgtgtccagggtggaagcagcactgccttactgggtccctctgtccctgagaccccgaaagcagcacccctgctggatgcatgctgctggcacaactgctggcggatctgcggtgatgagtgcctgttgtccaagttccagcagctccaggccccctaccaggaccagctaccggctcctgcagcgcgtctgctgcccctcggcctcctgaccctcctccaggccatcccgagggtcatcatggccattcgccagtgttttggggtttgaagttggaatcttcagctactgtcaagaacagccacaaaaatgtgtcacgatcaagatctttgagagtccaccaatcaggaggcgtctgtgacagtcgctgtcttctcagaacagaatccacacccaggattcaacccaaatgatttctcatcaggtgattcttggttgtagcaaagttcatgtgaatgtgggtgagtttctgttatgaatgtggtcaataaatgttatttgtgaaactctaaactggcca

SEQ ID NO: 408897 - DNA, 1152 bp, Homo sapiens
ggctagtcagcgggacgggcgggcgcgcgggcgctgttgggctcctctgagcggttgaggttggggctggggttgagctcgggttgggttcctcctggggcaggagggaaaggcgggagccagggcgtcagggcctgcggacgatgtgtgtgtgaaagggcgcgtcagccataagaagccatatgcgtgcgagccggtccccaccgtccccgcggcgttgtcaccatcatcatgaggccactggagcagcctcaggcgctgctgccggggggccgggcgcggggtgcgtcgggctctgcaggttggcactcacacccagcgcgcaggatggcaggaatagcacatttcaaacctacaagaaagaagtgtgcctcccccgtcattcgatgcaccctggcccctgggccatctgctgtgaatgccagaccagattcgggggccgcctgcctgtgtccagggtggaagcagcactgccttactgggtccctctgtccctgagaccccgaaagcagagtcaaaagacggttcaatttcctatcccccaaaccgccaagatgtgcccctgcctatgccaccgctttgggggccgcctcccgatgcctagggaccaggcagtgatgccctactgggtgccccaggtcctgaggtctcagcagcagatagtcaggaggcagcagagtttgaaaggcatccaagcacccctgctggatgcatgctgctggcacaactgctggcggatctgcggtgatgagtgcctgttgtccaagttccagcagctccaggccccctaccaggaccagctaccggctcctgcagcgcgtctgctgcccctcggcctcctgaccctcctccaggccatcccgagggtcatcatggccattcgccagtgttttggggtttgaagttggaatcttcagctactgtcaagaacagccacaaaaatgtgtcacgatcaagatctttgagagtccaccaatcaggaggcgtctgtgacagtcgctgtcttctcagaacagaatccacacccaggattcaacccaaatgatttctcatcaggtgattcttggttgtagcaaagttcatgtgaatgtgggtgagtttctgttatgaatgtggtcaataaatgttatttgtgaaactctaaactggcca

SEQ ID NO: 408898 - DNA, 1188 bp, Homo sapiens
ggctagtcagcgggacgggcgggcgcgcgggcgctgttgggctcctctgagcggttgaggttggggctggggttgagctcgggttgggttcctcctggggcaggagggaaaggcgggagccagggcgtcagggcctgcggacgatgtgtgtgtgaaagggcgcgtcagccataagaagccatatgcgtgcgagccggtccccaccgtccccgcggcgttgtcaccatcatcatgaggccactggagcagcctcaggcgctgctgccggggggccgggcgcggggtgcgtcgggctctgcaggttggcactcacacccagcgcgcaggatggcaggaatagcacatttcaaacctacaagaaagaagtgtgcctcccccgtcattcgatgcaccctggcccctgggccatctgctgtgaatgccagaccagattcgggggccgcctgcctgtgtccagggtggaagcagcactgccttactgggtccctctgtccctgagaccccgaaagcagcacccctgctggatgcatgctgctggcacaactgctggcggatctgcggtgatgagtgcctgttgtccaagttccagcagctccaggccccctaccaggaccagctaccggctcctgcagcgcgtctgctgcccctcggcctcctgaccctcctccaggccatcccgagggtcatcatggccattcgccagtgttttggggtttgaagttggaatcttcagctactgtcaagaacagccacaaaaatgtgtcacgatcaagatctttgagagtccaccaatcaggaggcgtctgtgacagtcgctgtcttctcagaacagaatccacacccaggattcaacccaaatgatttctcatcaggggggacttgtccccatgtccgtgtccctgggggagggcagctatttccgagtgtctcttcagggacagcagacccactggatgagggcccgaaaatggtttcagcacctgtgtcaggctctgcttttggggtgaactcaagataagacaaggtgagcagatcccatctcaccagtcagggaggaagcgccatcggagcagagacctgaagacaattccaggaaacctggcaatgaaaggtgagagagaagctgattatggccaggtctggcacagaaagcccctgtttgtgcaatcctgcattcttcctttttaa

SEQ ID NO: 408899 - DNA, 367 bp, Homo sapiens
atttctcatcaggtgattcttggttgtagcaaagttcatgtgaatgtgggtgagtttctgttatgaatgtggtcaataaatgttatttgtgaaactctaaactggccacctcttaaatgatgacctctgatttcccttcattaaggggggacttgtccccatgtccgtgtccctgggggagggcagctatttccgagtgtctcttcagggacagcagacccactggatgagggcccgaaaatggtttcagcacctgtgtcaggtgggtctccctttaagtagcataacattgtatatgtgaattgaattttaaaatctgagatctcttttatatgtcataaaattcactcttttagagtatacgatt

SEQ ID NO: 408900 - DNA, 417 bp, Homo sapiens
gattttttaaccatttcggacaattgagagtttagaatagtctagtactattttggttaaataaatatttagaacatcctagagtttattttgttttaagctgtaaaacatttttctttaaactgttttagaaagatacttccctacccaactcttaaaacaggtgttaataagcaggtgactaaatagtgaactgaggtgtgctgtaatagagcagttgttgctgaatgcacggaggtttcgtgctttcagacttcttggccttctaaaatatatatatacacacacacatatatgtatatgtatatatgtgtatatatatatatatacacacacatatatatatgttccttccactccaactttgtggcttttgcttattactaggtaagagtactaagattatttgctacatgc

SEQ ID NO: 408901 - DNA, 718 bp, Homo sapiens
gcgctctggctgggcacgaacgtagaggtcaggctagggctgacgatgctggctaagcgggggcgcacgtctgggaagtcgtcgtcgtagtcaccgatgtccgtgaccttccagaggtaatccacccgccttggcctcccaaagtgctgggattacaggtgtgagccaccatgcccagccagaaactgccacttttaaaccatcagatctcattgagaactccctcactatcacgagaaccgcatgagggaaaccacccccatgatctgatcacctcccaccaggtcctgccctcaacatgtggggattacaattcaagatgagatttgggtcaggaaacagagccaaaccatatcaagagcctctggtaaccactgttctactcaatacttctatgaggtgaacttctttggattccacatatgatcaagatcatgaggaaggaggagcaagtcttctttgtcatgctattaagaaaatacccagagtcacagcaccatgatctccttgtgaagcagaacaagtaatataaaactgatctaaagaggcctcccctctactcttatctgtctggtcgagtcatttgggtccaagtgggcaccattgtgggagggtgggaggactcatcactgggggcccaggcatcattggcatgtggcctcctgtgttagtttgttctcatgctgcaaataaagacaacttgagactggataattta

SEQ ID NO: 408902 - DNA, 632 bp, Homo sapiens
agcggcaggagctggttagccggatagaatgtaatccacccgccttggcctcccaaagtgctgggattacaggtgtgagccaccatgcccagccagaaactgccacttttaaaccatcagatctcattgagaactccctcactatcacgagaaccgcatgagggaaaccacccccatgatctgatcacctcccaccaggtcctgccctcaacatgtggggattacaattcaagatgagatttgggtcaggaaacagagccaaaccatatcaagagcctctggtaaccactgttctactcaatacttctatgaggtgaacttctttggattccacatatgatcaagatcatgaggaaggaggagcaagtcttctttgtcatgctattaagaaaatacccagagtcacagcaccatgatctccttgtgaagcagaacaagtaatataaaactgatctaaagaggcctcccctctactcttatctgtctggtcgagtcatttgggtccaagtgggcaccattgtgggagggtgggaggactcatcactgggggcccaggcatcattggcatgtggcctcctgtgttagtttgttctcatgctgcaaataaagacaacttgagactggataattta

SEQ ID NO: 408903 - DNA, 820 bp, Homo sapiens
gcgctctggctgggcacgaacgtagaggtcaggctagggctgacgatgctggctaagcgggggcgcacgtctgggaagtcgtcgtcgtagtcaccgatgtccgtgaccttccagaggtaatccacccgccttggcctcccaaagtgctgggattacaggtgtgagccaccatgcccagccagaaactgccacttttaaaccatcagatctcattgagaactccctcactatcacgagaaccgcatgagggaaaccacccccatgatctgatcacctcccaccaggtcctgccctcaacatgtggggattacaattcaagatgagatttgggtcaggaaacagagccaaaccatatcaagagcctctggtaaccactgttctactcaatacttctatgaggtgaacttctttggattccacatatgatcaagatcatgaggggtgatgaacatgatctagaattgattgtggtgttcttacacatctctgtgaacatactaaacaccactgaatggtacacttcaagtgggtgaattgtatggaaggaggagcaagtcttctttgtcatgctattaagaaaatacccagagtcacagcaccatgatctccttgtgaagcagaacaagtaatataaaactgatctaaagaggcctcccctctactcttatctgtctggtcgagtcatttgggtccaagtgggcaccattgtgggagggtgggaggactcatcactgggggcccaggcatcattggcatgtggcctcctgtgttagtttgttctcatgctgcaaataaagacaacttgagactggataattta

SEQ ID NO: 408904 - DNA, 278 bp, Homo sapiens
ggagttcaggctgggcaagatggtcaggtccatctctattaaagaaataaataaataaaaaattccacatggcccaaatttgtcacagtcaaactgagctcacttttctgtttgatcttctctcatgttcttgtctggagaggtggcctcgctgtctgtccagtgacccatagcaaagataaggcagctccctggactctccattctttctcccatcccttgcaacaggtgggttgccagatcctgtaactgacccatcagatccagcagccactgtc

SEQ ID NO: 408905 - DNA, 360 bp, Homo sapiens
aggaaaaaggggttccgatccagacccctagagaaggttcttggatctcatgcaggaagaaactcaagacatggtctcactctgtcacccaagctggagtgcagtggcgcaatgatagctcactgcaaccttgagctcctgggctcaggcaatcttcctgcctcagccttccaaagcactgggattccaggcacaaaccaccgtgcccagccagcgcttcacttctttgttgccttcaaggaaatacttcaattcaattctgtcatgtctcggacaatttaccacttaaatgtgtttaccaaaaaaggaattatacagctaaatccaagacacagagcatgtgtgaccaccaaaagcaac

SEQ ID NO: 408906 - DNA, 670 bp, Homo sapiens
aggaaaaaggggttccgatccagacccctagagaaggttcttggatctcatgcaggaagaaactcaagacatggtctcactctgtcacccaagctggagtgcagtggcgcaatgatagctcactgcaaccttgagctcctgggctcaggcaatcttcctgcctcagccttccaaagcactgggattccaggcacaaaccaccgtgcccagccagcgcttcacttctttgttgccttcaaggtaatgatataaagcaacaattcaataccaagttggtaaaataatttgtatttcaaacagaaagactgcctaaaaatattaccttttgctcctagcacccagacaaacaatgaataaagggaaataaggaaaccctggcagctgagaaggcctcctagtcaatagatccagtttctcccaagttcatactgcagatgaacttgtagttcatttaagtatctagatctctttccttcatgtagagaccttaatcaaagactcttctcaggattttatttcacagcctaagaaatgtttatttaatttaataaaatactctttttctttaaggttgggtccattaccaaatactaagtcatgttgaaaaaattatgtatatacatacatatgtctatatatatatatatatatatatatatatatatatatc

SEQ ID NO: 408907 - DNA, 382 bp, Homo sapiens
aataatgctgtgggttttcctcctccattcattgccaccttgccttgaaacttaatggggccacgtgtgtttccatgaatgtcattctctttggccaactcccccggcagccccaggagctccttttcaggaaaaggaagaaggtgtttgcttagcatctagtatacgagtccttgttggaaaggtgggattcttgtttctccttgggtctcttttaggctgagatgtggtcaaggaaggcctgtggtgtggctcgccttttttaatgctcgtctctggagacctgagttgctgctgactcccagcttgccccttctgtcccctggccatttctgtgtcggggtggctgagacactattgcattggccactttgtgttccca

SEQ ID NO: 408908 - DNA, 967 bp, Homo sapiens
caagaacttcggagctcagaacaggtgatactcactcctcctttggggagaggccgtgggcatggcttcacttttcagctggattataaaggatgtgaagttagcctgactgagcagaaggggagggaagacagcactccaggaaagtggaacgaacaacagagtccaaagggccctccagcctacccactcccaagtacctggaagaagctctccacgtgttcccttggggcctcctcccggagtgcagggtcatacaggttgaaggcccaattaagcctgtcatctacagttccccgaagaatcacggacaaaccagccacaaagtcctgggaaggaggcaggagggagctgtgtcctcgggtactcttcacccaactccttctctgggtttggcctggagatcctggccctgaactccaggaaacaggcttccctggcccacctcgcccagctcacctcaaaactgaccgagccatcatggttggtgtcaaaggcattgaagagaaaagtggcataggtgctggagtctgcagggtgagtgtggagaagttggcttccacacaggagaggacttcctccctctaaggagctccccataccccccatcaccttggcattcccagctcctccagaatccctccctccctcagcctagagaaggacaactgcttccccttgggccttgtcccctcacctccttgaggaaagaactgggagtaaatctgcttgaagttctcctcattgacaattccgctgggacattcctggaaggagagggcaccaggctgagggcagagacaaaatccccttccgttcaccgcccccaccctccatggcccaagactcccagggagggggataatcttcaagcctccagaggactcaccacgtggctcatgtgatgggagggaagacttctttcccagtgcacaaataaaaaacatggaacgaaactgacagtcta

SEQ ID NO: 408909 - DNA, 1049 bp, Homo sapiens
tcactgaccctcgtcccgcccccgccattcgccgcctcctcctgtcccgcagtcggcgtccagcggctctgcttgttcgtgtgtgtgtcgttgcaggccttattcatgggctcaccgctgaggttcgacgggcgggtggtactggtcaccggcgcgggggcaggattgggccgagcctatgccctggcttttgcagaaagaggagcgttagttgttgtgaatgatttgggaggggacttcaaaggagttggtaaaggctccttagctgctgataaggttgttgaagaaataagaaggagaggtggaaaagcagtggccaactatgattcagtggaagaaggagagaaggttgtgaagacagccctggatgcttttggaagaatagatgttgtggtcaacaatgctggaattctgagggatcattcctttgctaggataagtgatgaagactgggatataatccacagagttcatttgcggggttcattccaagtgacacgggcagcatgggaacacatgaagaaacagaagtatggaaggattattatgacttcatcagcttcaggaatatatggcaactttggccaggccaattatagtgctgcaaagttgggtcttctgggccttgcaaattctcttgcaattgaaggcaggaaaagcaacattcattgtaacaccattgctcctaatgcgggatcacggatgactcagacagttatgcctgaagatcttgtggaagccctgaagccagagtatgtggcacctcttgtcctttggctttgtcacgagagttgtgaggagaatggtggcttgtttgaggttggagcaggatggattggaaaattacgctgggagcggactcttggagctattgtaagacaaaagaatcacccaatgactcctgaggcagtcaaggctaactggaagaagatctgtgactttgagaatgccagcaagcctcagagtatccaagaatccactggccgtataatcgaagttctgagtacacaatagctccgcaagaggaagttcacgcaacttcatactaa

SEQ ID NO: 408910 - DNA, 1239 bp, Homo sapiens
ccctaccacacagtcgctctagccatggctaaaaggggccaaagtatagcttaggccatggcttcagaaggtgtaagccccaagccttggcagcttacacatggtattgagcctgagggtgcacagaagtcaagaattaaggtttaggaatgtctgcctagatttcagaagatgtatggaaactctgaatgtccagacagatgtttgctgcaggggtggggacctcatggagaacctctgctagagcagtacagaagagaaaatgtggggttgaggccccacacagagcccccactggggcactgcctagtggagctgtgagaagaggccaccgtcttccagacctcagaatggattgggccgagcctatgccctggcttttgcagaaagaggagcgttagttgttgtgaatgatttgggaggggacttcaaaggagttggtaaaggctccttagctgctgataaggttgttgaagaaataagaaggagaggtggaaaagcagtggccaactatgattcagtggaagaaggagagaaggttgtgaagacagccctggatgcttttggaagaatagatgttgtggtcaacaatgctggaattctgagggatcattcctttgctaggataagtgatgaagactgggatataatccacagagttcatttgcggggttcattccaagtgacacgggcagcatgggaacacatgaagaaacagaagtatggaaggattattatgacttcatcagcttcaggaatatatggcaactttggccaggccaattatagtgctgcaaagttgggtcttctgggccttgcaaattctcttgcaattgaaggcaggaaaagcaacattcattgtaacaccattgctcctaatgcgggatcacggatgactcagacagttatgcctgaagatcttgtggaagccctgaagccagagtatgtggcacctcttgtcctttggctttgtcacgagagttgtgaggagaatggtggcttgtttgaggttggagcaggatggattggaaaattacgctgggagcggactcttggagctattgtaagacaaaagaatcacccaatgactcctgaggcagtcaaggctaactggaagaagatctgtgactttgagaatgccagcaagcctcagagtatccaagaatccactggccgtataatcgaagttctgagtacacaatagctccgcaagaggaagttcacgcaacttcatactaa

SEQ ID NO: 408911 - DNA, 992 bp, Homo sapiens
tcactgaccctcgtcccgcccccgccattcgccgcctcctcctgtcccgcagtcggcgtccagcggctctgcttgttcgtgtgtgtgtcgttgcaggccttattcatgggctcaccgctgaggttcgacgggcgggtggtactggtcaccggcgcgggggcaggattgggccgagcctatgccctggcttttgcagaaagaggagcgttagttgttgtgaatgatttgggaggggacttcaaaggagttggtaaaggctccttagctgctgataaggttgttgaagaaataagaaggagaggtggaaaagcagtggccaactatgattcagtggaagaaggagagaaggttgtgaagacagccctggatgcttttggaagaatagatgttgtggtcaacaatgctggaattctgagggatcattcctttgctaggataagtgatgaagactgggatataatccacagagttcatttgcggggttcattccaagtgacacgggcagcatgggaacacatgaagaaacagaagtatggaaggattattatgacttcatcagcttcaggaatatatggcaactttggccaggccaattatagtgctgcaaagttgggtcttctgggccttgcaaattctcttgcaattgaaggcaggaaaagcaacattcattatcttgtggaagccctgaagccagagtatgtggcacctcttgtcctttggctttgtcacgagagttgtgaggagaatggtggcttgtttgaggttggagcaggatggattggaaaattacgctgggagcggactcttggagctattgtaagacaaaagaatcacccaatgactcctgaggcagtcaaggctaactggaagaagatctgtgactttgagaatgccagcaagcctcagagtatccaagaatccactggccgtataatcgaagttctgagtacacaatagctccgcaagaggaagttcacgcaacttcatactaa

SEQ ID NO: 408912 - DNA, 1077 bp, Homo sapiens
tcactgaccctcgtcccgcccccgccattcgccgcctcctcctgtcccgcagtcggcgtccagcggctctgcttgttcgtgtgtgtgtcgttgcaggccttattcatgggctcaccgctgaggttcgacgggcgggtggtactggtcaccggcgcgggggcaggattgggccgagcctatgccctggcttttgcagaaagaggagcgttagttgttgtgaatgatttgggaggggacttcaaaggagttggtaaaggctccttagctgctgataaggttgttgaagaaataagaaggagaggtggaaaagcagtggccaactatgattcagtggaagaaggagagaaggttgtgaagacagccctggatgcttttggaagaatagatgtaacttgtatctttttatattgtagatgttgtggtcaacaatgctggaattctgagggatcattcctttgctaggataagtgatgaagactgggatataatccacagagttcatttgcggggttcattccaagtgacacgggcagcatgggaacacatgaagaaacagaagtatggaaggattattatgacttcatcagcttcaggaatatatggcaactttggccaggccaattatagtgctgcaaagttgggtcttctgggccttgcaaattctcttgcaattgaaggcaggaaaagcaacattcattgtaacaccattgctcctaatgcgggatcacggatgactcagacagttatgcctgaagatcttgtggaagccctgaagccagagtatgtggcacctcttgtcctttggctttgtcacgagagttgtgaggagaatggtggcttgtttgaggttggagcaggatggattggaaaattacgctgggagcggactcttggagctattgtaagacaaaagaatcacccaatgactcctgaggcagtcaaggctaactggaagaagatctgtgactttgagaatgccagcaagcctcagagtatccaagaatccactggccgtataatcgaagttctgagtacacaatagctccgcaagaggaagttcacgcaacttcatactaa

SEQ ID NO: 408913 - DNA, 881 bp, Homo sapiens
cgcatctcttgaggaggaaagagccggaaacacctggtctctcaagcaggattgggccgagcctatgccctggcttttgcagaaagaggagcgttagttgttgtgaatgatttgggaggggacttcaaaggagttggtaaaggctccttagctgctgataaggttgttgaagaaataagaaggagaggtggagccctggatgcttttggaagaatagatgttgtggtcaacaatgctggaattctgagggatcattcctttgctaggataagtgatgaagactgggatataatccacagagttcatttgcggggttcattccaagtgacacgggcagcatgggaacacatgaagaaacagaagtatggaaggattattatgacttcatcagcttcaggaatatatggcaactttggccaggccaattatagtgctgcaaagttgggtcttctgggccttgcaaattctcttgcaattgaaggcaggaaaagcaacattcattgtaacaccattgctcctaatgcgggatcacggatgactcagacagttatgcctgaagatcttgtggaagccctgaagccagagtatgtggcacctcttgtcctttggctttgtcacgagagttgtgaggagaatggtggcttgtttgaggttggagcaggatggattggaaaattacgctgggagcggactcttggagctattgtaagacaaaagaatcacccaatgactcctgaggcagtcaaggctaactggaagaagatctgtgactttgagaatgccagcaagcctcagagtatccaagaatccactggccgtataatcgaagttctgagtacacaatagctccgcaagaggaagttcacgcaacttcatactaa

SEQ ID NO: 408914 - DNA, 743 bp, Homo sapiens
cgcgtcagaaacacttcatacttgtacctctgggatagggtcctggtgtcgctcacgtccaccagatgcctggaaaggggtcctcgggcaccgagcagcgacccaatgaggcctccctgctcctcctgcacagccgcaccgccacgaacaggagcaccgagaagaggaagaacgacgacaccaaggccaacgccaccaccaccaccttggtcaccaggtagcccggctcggcggcccgcccggggcatcagctcggtgcagggcgcggagccgttctgcagcgggaacagcacgaagagtgagctgtcgttggcgtccagcaccagcacgcgcaccagcgcctcgctgctcagcgccgtggagccgcggtctgaagcgcccacgcggaactcgaactcctgcagggcctcgtagtccagcgacctgagggcgaacagaatcgcggtcttgaatgctgaaaagagctgcaacggtctcaggagaattttcgcggatggggcttgtgaatgaagccatggtcagttccggagcgttatcgttgatatctaccacctgtattatgacagtgcattttccagaaagacctgccccatcagaggctttaatatccacctgatatgacacaattttttcaaaatctagttttctgattattttaatttctccccttcgttcattaagtgcaaatgtcttagaaatctcttcatcaccataaaaaatgagtagaatatctcaccattaat

SEQ ID NO: 408915 - DNA, 337 bp, Homo sapiens
tgttgatggagaccagggaggcgaggggcagaatcgcggtcttgaatgctgaaaagagctgcaacggtctcaggagaattttcgcggatggggcttgtgaatgaagccatggtcagttccggagcgttatcgttgatatctaccacctgtattatgacagtgcattttccagaaagacctgccccatcagaggctttaatatccacctgatatgacacaattttttcaaaatctagttttctgattattttaatttctccccttcgttcattaagtgcaaatgtcttagaaatctcttcatcaccataaaaaatgagtagaatatctcaccattaat

SEQ ID NO: 408916 - DNA, 469 bp, Homo sapiens
catttcatgggctttttccttttcctttttttgaagccttagcctgcagcgccaccatgcgttgtctttgcttcgaaacgaattgctacaattgatctattctctattctattaggagtttggaaattgggaggaaatgatgtaatcacaatatcacgcaatgaatcgcggtcttgaatgctgaaaagagctgcaacggtctcaggagaattttcgcggatggggcttgtgaatgaagccatggtcagttccggagcgttatcgttgatatctaccacctgtattatgacagtgcattttccagaaagacctgccccatcagaggctttaatatccacctgatatgacacaattttttcaaaatctagttttctgattattttaatttctccccttcgttcattaagtgcaaatgtcttagaaatctcttcatcaccataaaaaatgagtagaatatctcaccattaat

SEQ ID NO: 408917 - DNA, 508 bp, Homo sapiens
cgcgtcagaaacacttcatacttgtacctctgggatagggtcctggtgtcgctcacgtccaccagatgcctggaaaggggtcctcgggcaccgagcagcgacccaatgaggcctccctgctcctcctgcacagccgcaccgccacgaacaggagcaccgagaagaggaagaacgacgacaccaaggccaacgccaccaccacaatcgcggtcttgaatgctgaaaagagctgcaacggtctcaggagaattttcgcggatggggcttgtgaatgaagccatggtcagttccggagcgttatcgttgatatctaccacctgtattatgacagtgcattttccagaaagacctgccccatcagaggctttaatatccacctgatatgacacaattttttcaaaatctagttttctgattattttaatttctccccttcgttcattaagtgcaaatgtcttagaaatctcttcatcaccataaaaaatgagtagaatatctcaccattaat

SEQ ID NO: 408918 - DNA, 311 bp, Homo sapiens
attcaaagcccttttcttcctccagtctcctcgagccacccacatccccctgctcactgtcctttttccttccttctttttgtgtttttgaaacagagtctctgttgcccaggctggagtgcagtggtacaatctcagctcactgcaacctccacctcccaggttcaagtgattccctgcctcagccagctacctggggattacagggacccaccaccacgcccagctaatttttgtatttttagtaaagacggggtttcaccatgttggcgaggctggtctcgaactcctgacctcaagtgatccaccca

SEQ ID NO: 408919 - DNA, 1837 bp, Homo sapiens
ggagagatcgtccaggaggcggtgttgatgcggcaaagggcaacaggaagggcattaggacttgaaatcggagacgcacgcaggggagggagtcagtgtcggaacctggtaggccctgggagaactccggcttttcgtctgcgtgagctggagaagagccgaaggtttctgcgcacagcacggacctgcgtgcctcagctttaaggaaatcaccgtggccgccgctgtgaacgcagagaagggcgcgagcgtgggagcaggaacccaaggcggtgggaaacggtggggctttctgagtgtattggaaagtagagcccacagatctgctgcagaccagaaaggggcgcgagaaagagcggacagaggcagacgccggggctggcggcgatggagcagcagtcggaggacgcggaaggcctgcgagagtcgcccgcggcccagcgccggccttcgggtcccaccttgcgggtgatgttgtgcacgtaggggcacgtgttgcaggcgaagcggtggcagcgttgtccctcctccacgatcagcccgttcccgcagccggggcagaacagcagcatggtctcgaactccgcaggctccaactcccggcagctcccactgccgctcagcgccgatgcgccgcccgcctcgagctcacattggtcctggcagccttcccggcacaccaaccaaccaatagacagggcgattctgcgctcccggcctgctgcaggctgtctcgcacttgtcattggtcactgcagccgccccacccccccggcgcgccagtggctgggcggcctcgctggggcgggccgcagttcctgcgcgtgcgcgcttggcctccctagtgcgggctggcagtgcgggcagagcccggctgagaggggcggccctggaggagacggaggcggcgggtgggcccgaggcgcaagaggaagatgaggacgaagaagaggcgctgccgcactccgaggccatggacgtgttccaggagggtctggctatggtggtgcaggacccgctgctctgcgatctgccgatccaggttactctggaagaagtcaactcccaaatagccctagaatacggccaggcaatgacggtccgagtgtgcaagatggatggagaagtaatgcccgtggttgtagtgcagagtgccacagtcctggacctgaagaaggccatccagagatacgtgcagctcaagcaggagcgtgaagggggcattcagcacatcagctggtcctacgtgtggaggacgtaccatctgacctctgcaggagagaaactcacggaagacagaaagaagctccgagactacggcatccggaatcgagacgaggtttccttcatcaaaaagctgaggcaaaagtgagcctccagacaggacaaccctcttcatcactggtggctgagctttttcccagcaggaatgggtcctcgaatcatcgtgcctctttcacagaaaggacgttgtggtggcctcaccccaggcatgcccaacaggaactgtcagcataaacctgggggcctcaggactaggacagggtgagccagtgctccctcctttcatgtacttggcctgagaatgacctctccctaggtcaaatgccctagtcacatggcagacacggctggcactgttaataaactgttggtttagttgaaggacaaaaaaaaagggggcggtgaagttactctggggcgagtaggaccagtttggaaagggcatgtgggattaagagaaggggggtaaagtgcgaaaagcatggtttggagagattggggggagagagcgagaggaggggaaaggtgagaagggggaggtgtataagagagg

SEQ ID NO: 408920 - DNA, 345 bp, Homo sapiens
aaattttgcacacctgccttactcagtcccgaagcctggcctgggtcctgatgatcagggatatactcagcgtgaactgacaggcctctacccacccctgggggcaggtcctcatgtgagtttattctcttgcctgtttcttagcacctctttcccccagagactctgtccactatggacattaaaatgtgagtggaacatgagattggggctctgatgaattgggaaaccgtaacatacaggcaaccacccttccttgcccttcgtaaaatggagcaccactttttggccactatcggcttgttctttgttgttgctcaaggtggtaaagagagccagggttcc

SEQ ID NO: 408921 - DNA, 638 bp, Homo sapiens
ctgatgatcagggatatactcagcgtgaactgacaggcctctacccacccctgggggcaggtcctcatgtgagtttattctcttgcctgtttcttagcacctctttcccccagagactctgtccactatggacattaaaatgtgagtggaacatgagattggggctctgatgaattgggaaaccgtaacatacaggcaaccacccttccttgcccttcgtaaaatggagcaccactttttggccactatcggcttgttctttgttgttgctcaaggtggtaaagagagccagggttcccacttctgcccttggtcttttgtaggttactctggaagaagtcaactcccaaatagccctagaatacggccaggcaatgacggtccgagtgtgcaagatggatggagaagtaatgcgtaagtgctaccctcctcccttcaggttatgtggtccaggctttcacagcaggaagacctaacagtgctggtcagcctgctcagaaactcacaggccatgcccaggggtactggggcaaccacaaacctgccctgtgcacagaggtgttggttcctttcctgccatcggaggctgtggctttgggttctcaccatggatcttctcccatctgtgtccgtggttg

SEQ ID NO: 408922 - DNA, 856 bp, Homo sapiens
gaaacatcaagagaatgtattccctttccttcttctccctcttcctccttttgccccatccccctctgctctcctgtgctcccctttacttctccctgcatcaggatcctcagctctccccgatcattggtacaattgtttcagaaatcttcagttattttccctgttttccatcccgtttctcatttttatcctcattcatacctgcaactctggacttctaatgcacagctggctccaagctctactgtactacttctctgttagcatataacgggcagtggctttcttttctctgtttcatctgctttctgtcttgcagaaagcacccgttcatgaattcccacatacaccttcatttttttctgctgttgaaaacattttattcttttttgaagttctatactttttattttactcgtatctcaggatacgagtaaacattaacttagtctgccatcttgattctgaacaacttgcttccttctcctagaagattagatcatctctaaagtccctgtatataatattgtatgtttgtaagcatcattctttcagacaaatgtaacgtttcaatccaaatgttgatttacttattctgacacctcatgtcctcttttagctctgcacttttctgccctttattttttggttcacacttttttctaagtatatgggttcagatggccttttacatgattgaaaactgtaaaggaaaaaggtagtagtcaacagtacaatcatggctttaataaccctttattttatgtgacaccaaaaagaattgaaaaatacaaggattgcaatttttaaattatgacgtaggcagctttgaatacatttatgtgttttccct

SEQ ID NO: 408923 - DNA, 772 bp, Homo sapiens
gggtaattgcctgtgctctctggccctctgggtgggggatcattggtacaattgtttcagaaatcttcagttattttccctgttttccatcccgtttctcatttttatcctcattcatacctgcaactctggacttctaatgcacagctggctccaagctctactgtactacttctctgttagcatataacgggcagtggctttcttttctctgtttcatctgctttctgtcttgcagaaagcacccgttcatgaattcccacatacaccttcatttttttctgctgttgaaaacattttattcttttttgaagttctatactttttattttactcgtatctcaggatacgagtaaacattaacttagtctgccatcttgattctgaacaacttgcttccttctcctagaagattagatcatctctaaagtccctgtatataatattgtatgtttgtaagcatcattctttcagacaaatgtaacgtttcaatccaaatgttgatttacttattctgacacctcatgtcctcttttagctctgcacttttctgccctttattttttggttcacacttttttctaagtatatgggttcagatggccttttacatgattgaaaactgtaaaggaaaaaggtagtagtcaacagtacaatcatggctttaataaccctttattttatgtgacaccaaaaagaattgaaaaatacaaggattgcaatttttaaattatgacgtaggcagctttgaatacatttatgtgttttccct

SEQ ID NO: 408924 - DNA, 2724 bp, Homo sapiens
caaggaccccacgcctgtgtctctgtgacagagctcaaagggccctgggccttccctccctggctcggctgtgcttgggagggttccccagtccagaatccctaaggagcatggggcagctgatccatccctggtgtacaaactgctgactgcagacagatgctgagctacccaaaccaacacctagcctctccctgaagatcctcccaggctgagagagttctgggtgtcctaggaccaaggacactggcagacttccagaagggcccccaaagccctaacctgtccagccagagcatgcgtctcagcagagctgtcttcccaagcctttgatgacaaaccaatttccctcgatgatgtgcttctgagtgctctgctgaggaacaatgggaagtctgcccagcagaagaaaatctctgccaagcccaagcttgagttcctctgtccaaggccagggacctgtgaccatggaagcagagagaagcaaggccacagccgtggccctgggcagtttcccggcaggtggcccggccgagctgtcgctgagactcggggagccattgaccatcgtctctgaggatggagactggtggacggtgctgtctgaagtctcaggcagagagtataacatccccagcgtccacgtggccaaagtctcccatgggtggctgtatgagggcctgagcagggagaaagcagaggaactgctgttgttacctgggaaccctggaggggccttcctcatccgggagagccagaccaggagaggctcttactctctgtcagtccgcctcagccgccctgcatcctgggaccggatcagacactacaggatccactgccttgacaatggctggctgtacatctcaccgcgcctcaccttcccctcactccaggccctggtggaccattactctgagctggcggatgacatctgctgcctactcaaggagccctgtgtcctgcagagggctggcccgctccctggcaaggatatacccctacctgtgactgtgcagaggacaccactcaactggaaagagctggacagctccctcctgttttctgaagctgccacaggggaggagtctcttctcagtgagggtctccgggagtccctcagcttctacatcagcctgaatgacgaggctgtctctttggatgatgcctaggcccaaaggagaggccaaaagggaaaccaaggctgcacacctagaaccccaattcagcctcctgggcaccccagaggcaaggctgtgcactcagggagggagggtgggacacagaggtgcatctagggtcccacctgtacccttgctctttcctctcttagcccttagaagtcacctacttccttccagtgccatgatcccacctgcgacctctagtgcgagtgcagagaaggtgggaccagggccagggttccaaaaagagaataagcctcctggggggtctgacctagttagttcttgagtttggggtttccagtaccatctggatgccctgcctgttgagccccattctacatccccaccattaaccaggccccacccacaaggtagaaacaacccctagagtcaacgagaaagtcattttcagaaaatctacaagtctcgttgagaccaccaccatacctcagaaggtaggactgtggcctagaagggaaaggaaagctgagatgatgtcttaccgtagcagcagatcttggatggtccaggctctatgtgacctccagagcaaagagaaagacttcggacagtctaggtcctcaaatgtcccccattgaggacaacagccccagctctttttcttttttttgagacggagtcttgccctgttgcccatgctggagtgcaatggcacgatctcagctcactgcaacctccatctcctggattcaaacaattctcctgcctcagcctccagaatagctgggattacaggcgtacaccaccatgcctggctaatttttttgtatttttagtagacatggggtttcaccacattggccaggctggtgtcgaactcctgacctcaggtgatccacccaccttggcctcccaaagtgctgggattacaggtgtgagccacggcacccagcctagctctcagatctctatttcattttgtggcttaccattccctagcacactggccttgccatcttgtggccgaataaaaaataacacctcttaagtctagcacactgcagtgaggccaggcacctcagtgctgggcaggggcatcagaaggtgctaagccctctctccacaatgccaagacggagaccacagcctacaccaaatccagcccttgatttccctgctgcctccataaacagaaagaggtctgctggatccgctaagggatcagggagaggaagaaagagggatggggtgggaggcaccccctccagtgctcctactggttcccaagctacaggtggggtgggaaaggctttatcaggtatcatcaacaggttctcaattaaagatttgatttattcaagtatgtgaaaacattctacaatggaaactcttattagatgctgcatgtactgtgctatggaccacgcacatacagccatgctgtttcagaagacttgaaatgccattgatagtttaaaaactctacacccgatggagaatcgaggaagacgatttaatgtttcatctgaatccagaggtgcatcaaattaaatgacagctccacttggcaaataat

SEQ ID NO: 408925 - DNA, 2037 bp, Homo sapiens
caaggaccccacgcctgtgtctctgtgacagagctcaaagggccctgggccttccctccctggctcggctgtgcttgggagggttccccagtccagaatccctaaggagcatggggcagctgatccatccctggtgtacaaactgctgactgcagacagatgctgagctacccaaaccaacacctagcctctccctgaagatcctcccaggctgagagagttctgggtgtcctaggaccaaggacactggcagacttccagaagggcccccaaagccctaacctgtccagccagagcatgcgtctcagcagagctgtcttcccaagcctttgatgacaaaccaatttccctcgatgatgtgcttctgagtgctctgctgaggaacaatgggaagtctgcccagcagaagaaaatctctgccaagcccaagcttgagttcctctgtccaaggccagggacctgtgaccatggaagcagagagaagcaaggccacagccgtggccctgggcagtttcccggcaggtggcccggccgagctgtcgctgagactcggggagccattgaccatcgtctctgaggatggagactggtggacggtgctgtctgaagtctcaggcagagagtataacatccccagcgtccacgtggccaaagtctcccatgggtggctgtatgagggcctgagcagggagaaagcagaggaactgctgttgttacctgggaaccctggaggggccttcctcatccgggagagccagaccaggagaggctcttactctctgtcagtccgcctcagccgccctgcatcctgggaccggatcagacactacaggatccactgccttgacaatggctggctgtacatctcaccgcgcctcaccttcccctcactccaggccctggtggaccattactctgagctggcggatgacatctgctgcctactcaaggagccctgtgtcctgcagagggctggcccgctccctggcaaggatatacccctacctgtgactgtgcagaggacaccactcaactggaaagagctggacagctccctcctgttttctgaagctgccacaggggaggagtctcttctcagtgagggtctccgggagtccctcagcttctacatcagcctgaatgacgaggctgtctctttggatgatgcctaggcccaaaggagaggccaaaagggaaaccaaggctgcacacctagaaccccaattcagcctcctgggcaccccagaggcaaggctgtgcactcagggagggagggtgggacacagaggtgcatctagggtcccacctgtacccttgctctttcctctcttagcccttagaagtcacctacttccttccagtgccatgatcccacctgcgacctctagtgcgagtgcagagaaggtgggaccagggccagggttccaaaaagagaataagcctcctggggggtctgacctagttagttcttgagtttggggtttccagtaccatctggatgccctgcctgttgagccccattctacatccccaccattaaccaggccccacccacaaggtagaaacaacccctagagtcaacgagaaagtcaagacggagaccacagcctacaccaaatccagcccttgatttccctgctgcctccataaacagaaagaggtctgctggatccgctaagggatcagggagaggaagaaagagggatggggtgggaggcaccccctccagtgctcctactggttcccaagctacaggtggggtgggaaaggctttatcaggtatcatcaacaggttctcaattaaagatttgatttattcaagtatgtgaaaacattctacaatggaaactcttattagatgctgcatgtactgtgctatggaccacgcacatacagccatgctgtttcagaagacttgaaatgccattgatagtttaaaaactctacacccgatggagaatcgaggaagacgatttaatgtttcatctgaatccagaggtgcatcaaattaaatgacagctccacttggcaaataat

SEQ ID NO: 408926 - DNA, 744 bp, Homo sapiens
ccttgcagaaaacactgatgcccaacacactgattcgcggtccaggaaacacgggtcttccaagttccaaggggctggggttccccaacgatcaagttcctgtgctgtaatcaagagggtcctttggactggatagggagcacttgggagctgtacaccatcagtcataatggatggcagtgtaaaagatgatccaaatgaccatgaacaaggcaaaagaggtcataaacccttccttcgtgagctcccacgtgccaccatattcttcctcatcaatctgtaggtaattgctgaagtagaggtacaggactcctgcattgatcaggcagaatctgagatgctcctgaggagtggtgcaccagacccaggagtgccactgtagggctgcttctttgctttagtcatcacacacacacacagctccagagcagcaatggcctttcctgtaacaggaaaaaaagcctctatttaaaaagaaatgataccatgaaaatataagatacccaagacttaccctgctattcccaagaaccctcgtaatggcaaaactccccaaatgacacccaggaccacagcaatgatctgtcggaaccagtagatcacatctaaaaattcatccttatcctcccaggccgcgtcgctccgcagcaccttactccagacggagactttgagggccccgttggccagctgcggctgaggcggctcctccttccgccgcccgccgctcatcctcccgtcgcg

SEQ ID NO: 408927 - DNA, 399 bp, Homo sapiens
gaggtgcatcaaattaaatgacagctccacttggcaaataatagctgttacttgatggtatccaagaagaaatggttggtgatggataaattcagaaatgcttccccaaaggtgggtggtttttaaaaagtttcaggtcacaacccttgcagaaaacactgatgcccaacacactgattcgcggtccaggaaacacgggtcttccaagttccaaggggctggggttccccaacgatcaagttcctgtgctgtaatcaagagggtcctttggactggatagggagcacttgggagctgtacaccatcagtcataatggatggcagtgtaaaagatgatccaaatgacctagtgaggagacaagcactgttcataggtcacctggcttaacacaggccgat

SEQ ID NO: 408928 - DNA, 2558 bp, Homo sapiens
gcggccgctgggcgcagcgttcgggggttgcacggcccgcggcggcgacgaaaacaacgaccaggacgctcggcgcccctgtccgcagagtcgccactcccgcctcttctccggtctctagcgacgcgggcccgcggcttcctcctttcctgcccagttcccgcgggcctcggggttgcagcggctagaagcgccgaggagcgccaggaggacccggccggctgcgaggattcacgcgcccgccaccccgcccggcccgggcttcatgtgaaagagggacgggcctggccccaaggcccgcgcccgactcctcgcgcgcccctccggtccccgggggccctgcggcagcccccgacctggggccgcggtgacaggccgcgctggggcggaggggcgggctcggcgggggcggcccctccttgggcctgcggctctctacgtccctgcggagcagccggccataaagaatgctgatgggagaaccattttcctaattttcaaattgttgagctgtttgccataatggatgatcagcaagctttgaactcaatcatgcaagatttggctgtccttcataaggccagtcgaccagcattatccttgcaggaaaccagaaaagcaaaatcttcatcaccaaaaaaacagaatgatgtccgagtcaaatttgaacatagaggagaaaaaagaatccttcagttccccagaccagttaaactggaagatctgagatctaaagctaaaattgcctttggacagtctatggatctacattataccaataacgagttggtaattccattaactactcaagatgacttggacaaagctctggaactgctggatcgtagtattcatatgaagagcctcaagatattacttgtaataaatggaagtacacaggctactaatttagaaccattgccatcactagaagatttggataatacagtatttggagcagagaggaaaaaacggctatctataataggtcctactagtagagatagaagttctcctcccccgggttacattccagatgaattacaccaggttgcccggaatgggtcattcactagtatcaacagtgaaggagagttcattccagagagcatggaacaaatgctggatccattatctttaagcagccctgaaaattctggctcaggaagttgtccatcacttgatagtcctttggatggagagagctatccaaaatcacgaatgcctagggctcagagctacccagataatcatcaggaattttcagactatgataaccctatctttgagaaatttggaaaaggaggaacatatccaagaaggtatcatgtttcatatcatcatcaagagtataatgatggtcgtaaaacttttccaagagctagaaggacccaggggaaccagcttacggtctcctgtgagtttcagtcctactgatcattccttaagcactagtagtggaagcagtatctttaccccagagtatgatgatagtcgaataagaagaaggggaagtgacatagacaatcctactttgacagtaatggacatcagcccacccagccgttcacctcgagctccgaccaactggagattgggcaaactgcttggccaaggagcctttggaagggtctacctctgttatgatgttgatacaggaagagaattggctgttaagcaagttcaatttgaccccgatagtcctgagaccagcaaggaagtaaatgcacttgagtgtgaaattcagttgctgaaaaactttctacatgagcgaattgttcagtattatggctgtttgagggatccccaggaaaaaacactttccatatttatggaatatatgccagggggttcaattaaggaccaattaaaagcatatggcgctcttactgagaatggtactaggaaatacacccgtcagattctggagggtgtccattatttgcacagtaatatgattctccaccgcgacatcaaaggcgcaaatatccttcgagattcaacaggcaacgtcaaactaggagattttggggccagcaaacggcttcagaccatctgtctctcagggacaggaatgaagtctgtcacgggcacaccatactggatgagccctgaagtcatcagtggacaaggctatggaagaaaagcagacatctggagtgttgcatgtaccgtggtagaaatgctaactgaaaagccgccttgggctgaatttgaagcaatggctgccatctttaaaatcgccactcagccaacaaacccaaagctgccacctcatgtctcagactatactcgagatttcctcaaacggatttttgtagaggccaaactgagaccttcagctgatgaactcttaaggcacatgtttgtgcattatcactagcagccagtaacctctcctgtgcctctacctagctcccatctattcattcaccttctctctgactgcacttttcttttttataaaaaaagagagagggggagaaaaaagacaagagggaaagtatttctcttgattcttggttaaattgttaataataataatatcctaatttata

SEQ ID NO: 408929 - DNA, 2733 bp, Homo sapiens
cacccggctaatttttgtatttttttgtatagatggggtttcaccgtgttggacaggctggtctcgaactcctgggctcaagcaatccgcctgcctaggcctcccaaagtgctgggattatggcatgagcactgcacttggtcataaacacctttcttttatgtaactctatcctttccctttcctgtgtgctgttaatattatgtgaattatattattatatattgtatacccagcaacacagttataattattgcgttatgcagttttttttttaaaccaacatattagtttcctattgctgtttatatagagttagcctttggctgacacctgagaacttggatttcaggagagttcctgcctccaactgataatggtttgtacaaacactatggtttatgctgaatacctgcttttcttctgggagtctggaattttggtatgtgttaggcaagggggtgcctacatgatcaaccttcaatataaaacacctccccctagcgaaatgtgtaaagtattcatattgtatatttttcattagtattatttaaactgacttttttttttcttttcctggctccttttctgtttctttttattaatatgctgatctgttttatcttctcacggccataaagaatgctgatgggagaaccattttcctaattttcaaattgttgagctgtttgccataatggatgatcagcaagctttgaactcaatcatgcaagatttggctgtccttcataaggccagtcgaccagcattatccttgcaggaaaccagaaaagcaaaatcttcatcaccaaaaaaacagaatgatgtccgagtcaaatttgaacatagaggagaaaaaagaatccttcagttccccagaccagttaaactggaagatctgagatctaaagctaaaattgcctttggacagtctatggatctacattataccaataacgagttggtaattccattaactactcaagatgacttggacaaagctctggaactgctggatcgtagtattcatatgaagagcctcaagatattacttgtaataaatggaagtacacaggctactaatttagaaccattgccatcactagaagatttggataatacagtatttggagcagagaggaaaaaacggctatctataataggtcctactagtagagatagaagttctcctcccccgggttacattccagatgaattacaccaggttgcccggaatgggtcattcactagtatcaacagtgaaggagagttcattccagagagcatggaacaaatgctggatccattatctttaagcagccctgaaaattctggctcaggaagttgtccatcacttgatagtcctttggatggagagagctatccaaaatcacgaatgcctagggctcagagctacccagataatcatcaggaattttcagactatgataaccctatctttgagaaatttggaaaaggaggaacatatccaagaaggtatcatgtttcatatcatcatcaagagtataatgatggtcgtaaaacttttccaagagctagaaggacccaggggaaccagcttacggtctcctgtgagtttcagtcctactgatcattccttaagcactagtagtggaagcagtatctttaccccagagtatgatgatagtcgaataagaagaaggggaagtgacatagacaatcctactttgacagtaatggacatcagcccacccagccgttcacctcgagctccgaccaactggagattgggcaaactgcttggccaaggagcctttggaagggtctacctctgttatgatgttgatacaggaagagaattggctgttaagcaagttcaatttgaccccgatagtcctgagaccagcaaggaagtaaatgcacttgagtgtgaaattcagttgctgaaaaactttctacatgagcgaattgttcagtattatggctgtttgagggatccccaggaaaaaacactttccatatttatggaatatatgccagggggttcaattaaggaccaattaaaagcatatggcgctcttactgagaatggtactaggaaatacacccgtcagattctggagggtgtccattatttgcacagtaatatgattctccaccgcgacatcaaaggcgcaaatatccttcgagattcaacaggcaacgtcaaactaggagattttggggccagcaaacggcttcagaccatctgtctctcagggacaggaatgaagtctgtcacgggcacaccatactggatgagccctgaagtcatcagtggacaaggctatggaagaaaagcagacatctggagtgttgcatgtaccgtggtagaaatgctaactgaaaagccgccttgggctgaatttgaagcaatggctgccatctttaaaatcgccactcagccaacaaacccaaagctgccacctcatgtctcagactatactcgagatttcctcaaacggatttttgtagaggccaaactgagaccttcagctgatgaactcttaaggcacatgtttgtgcattatcactagcagccagtaacctctcctgtgcctctacctagctcccatctattcattcaccttctctctgactgcacttttcttttttataaaaaaagagagagggggagaaaaaagacaagagggaaagtatttctcttgattcttggttaaattgttaataataataatatcctaatttata

SEQ ID NO: 408930 - DNA, 1162 bp, Homo sapiens
gggacgccggggacacccggttgggctctgctgctcccttctgggttccgaggcccaagcccttggcagtgtttgtgagtggaagggaggtcacgctatcgtccgcggccccagcagccctgtgccctcgttggatcccgcgacgcggctcctttaagagcctcgcgggtcgcccgccgctaggtcgctccccggccatgcgggcgctgcgggccggcctgaccctggcgttgggcgcggggctgggtgcggtcgtcgagggctggcggcggcggcgggaggacgcgcgggcggcgccgggactgctgggccggctgcccgtgctgcccgtggcggcggcagccgagttgccccctgtgcccgggggaccccgcggcccgggcgagctggccaagtacgggctgccggggctggcgcagctcaagagccgcgagtcgtacgtgctgtgctacgacccgcgcacccgcggcgcgctctgggtggtggagcagctgcgacccgagcgtctccgcggcgacggcgaccggcgcgagtgcgacttccgcgaggacgactcggtgcacgcgtaccaccgtgccaccaacgccgactaccgcggcagtggcttcgaccgcggtcacctggccgccgccgccaaccaccgctggagccagaaggccatggacgacacgttctacctgagcaacgtcgcgccccaggtgccccacctcaaccagaatgcctggaacaacctggagaaatatagccgcagcttgacccgcagctaccaaaacgtctatgtctgcacagggccactcttcctgcccaggacagaggctgatgggaaatcctacgtaaagtaccaggtcatcggcaagaaccacgtggcagtgcccacacacttcttcaaggtgctgatcctggaggcagcaggtgggcaaattgagctccgcacctacgtgatgcccaacgcacctgtggatgaggccatcccactggagcgcttcctggtgcccatcgagagcattgagcgggcttcggggctgctctttgtgccaaacatcctggcgcgggcaggcagcctcaaggccatcacggcgggcagtaagtgagggtggagcccagtgagactgtgggtgtgtgcaggccggggagtattaaaggtggtgatttttggagacaa

SEQ ID NO: 408931 - DNA, 1088 bp, Homo sapiens
gcagcgtttattgtcgcccactctgcctgacccagtgttgggcataaggaaaacagagggaaagagttaaccaccctggagagagttccagcctcaaggaggagccaggcaggctacagaagtctcacagtgagggcgtggtcctgcaggttgacagaagttagaggacagatcagggaaggctgcctggaagaggtggctttgggttcatccaggccccctgcccacgtgtgcctgggtctgcccacaggacagaggctgatgggaaatcctacgtaaagtaccaggtcatcggcaagaaccacgtggcagtgcccacacacttcttcaaggtgctgatcctggaggcagcaggtgggcaaattgagctccgcacctacgtgatgcccaacgcacctgtggatgaggccatcccactggagcgcttcctggtgcccatcgagagcattgagcgggcttcggggctgctctttgtgccaaacatcctggcgcgggcaggcagcctcaaggccatcacggcgggcagtaagtgagggtggagcccagtgagactgtgggtgtgtgcaggccggggagtattaaaggtggtgatttttggagacaaaaaaaaaaaaaaaaaaaaaaaaaaaaaaaaaaaaaaaaaaaaaaaaaaaaaaaaaaaaaagaaaagaaaagaaaaaaaaaaacaaaaaaaagaaaaagagagaggggggagcgcgcgcgccgatagacacaccctccacagtgggagggcccgaacgcacaccgcagccgcgcaccctttagaggccacaccgggggcgcgcgccacaagcatgagagagagcggctatagcattatatgatacgaacaaagagcgaacgcgcgtgcgcaggcgcaatccaatcatctaaaacagacgccacaagatacaaagctcaggcatgagaaacgccatagggcgcctgagcgggcagtcgattgggcacaccttcaggcacagagcacaaaaagaggccaaatttcgtccatgacacccaatctaggagggacgataagacgcaactatctcggtgcgagcgaaaggagaagacataacaacgccacg

SEQ ID NO: 408932 - DNA, 729 bp, Homo sapiens
ggctgggtgtgaatcggccgaggcaggctctcccgccttcagtctctgctctgcttggagcaccgcggacctgggcaggaagagtggccctgtgcaggtccgcggtgcaccaggctctcccgccttcagtctctgctctgcttggagcacttccctccacccttctcgggagtttgaatctagatctgcctgacccagggcctccactcttgctcctgtgcagccctgcctctcaggtggaagcaactgagcacctctgggtgtgctccgtggtttttctggcctgcagagggctggggctgagaggcaacaggtccaggctgagcagctcactctggaatccacaggctcgggatggagtccaggcctcatcacctagttccttggtgctgtgggcaaatgacctgtgtccccctctgcaaaacctgtgacctcttggttgatgtcacatgcttccccagggcctggtccatggtaagggctcggcataggctggccaaggcggtggttggggcactgatcaaatttcattagcaggtgcctcctagggcctggtggaagggaggagactctgctgagggggagcccccgtccggtgtcctggcacctgtgctggtgctgggatatcacctgtcatggtccttgcccacttgttgctcacctctgtggggagagatggacagtcgttaagtctcccctcagacgaatgtgaatattcagaaggctcga

SEQ ID NO: 408933 - DNA, 1646 bp, Homo sapiens
gggacgccggggacacccggttgggctctgctgctcccttctgggttccgaggcccaagcccttggcagtgtttgtgagtggaagggaggtcacgctatcgtccgcggccccagcagccctgtgccctcgttggatcccgcgacgcggctcctttaagagcctcgcgggtcgcccgccgctaggtcgctccccggccatgcgggcgctgcgggccggcctgaccctggcgttgggcgcggggctgggtgcggtcgtcgagggctggcggcggcggcgggaggacgcgcgggcggcgccgggactgctgggccggctgcccgtgctgcccgtggcggcggcagccgagttgccccctgtgcccgggggaccccgcggcccgggcgagctggccaagtacgggctgccggggctggcgcagctcaagagccgcgagtcgtacgtgctgtgctacgacccgcgcacccgcggcgcgctctgggtggtggagcagctgcgacccgagcgtctccgcggcgacggcgaccggcgcgagtgcgacttccgcgaggacgactcggtgcacgcgtaccaccgtgccaccaacgccgactaccgcggcagtggcttcgaccgcggtcacctggccgccgccgccaaccaccgctggagccagaaggccatggacgacacgttctacctgagcaacgtcgcgccccaggtgccccacctcaaccagaatgcctggaacaacctggagaaatatagccgcagcttgacccgcagctaccaaaacgtctatgtctgcacagggccactcttcctgcccaggacagaggctgatgggaaatcctacgtaaagtaccaggtcatcggcaagaaccacgtggcagtgcccacacacttcttcaaggtgctgatcctggaggcagcaggtgggcaaattgagctccgcacctacgtgatgcccaacgcacctgtggatgaggccatcccactggagcgcttcctggtgcccatcgagagcattgagcgggcttcggggctgctctttgtgccaaacatcctggcgcgggcaggcagcctcaaggccatcacggcgggcagtaagtgagggtggagcccagtgagactgtgggtgtgtgcaggccggggagtattaaaggtggtgatttttggagacaaaaaaaaaaaaaaaaaaaaaaaaaaaaaaaaaaaaaaaaaaaaaaaaaaaaaaaaaaaaaagaaaagaaaagaaaaaaaaaaacaaaaaaaagaaaaagagagaggggggagcgcgcgcgccgatagacacaccctccacagtgggagggcccgaacgcacaccgcagccgcgcaccctttagaggccacaccgggggcgcgcgccacaagcatgagagagagcggctatagcattatatgatacgaacaaagagcgaacgcgcgtgcgcaggcgcaatccaatcatctaaaacagacgccacaagatacaaagctcaggcatgagaaacgccatagggcgcctgagcgggcagtcgattgggcacaccttcaggcacagagcacaaaaagaggccaaatttcgtccatgacacccaatctaggagggacgataagacgcaactatctcggtgcgagcgaaaggagaagacataacaacgccacg

SEQ ID NO: 408934 - DNA, 828 bp, Homo sapiens
ggctgggtgtgaatcggccgaggcaggctctcccgccttcagtctctgctctgcttggagcaccgcggacctgggcaggaagagtggccctgtgcaggtccgcggtgcaccaggctctcccgccttcagtctctgctctgcttggagcacttccctccacccttctcgggagtttgaatctagatctgcctgacccagggcctccactcttgctcctgtgcagccctgcctctcaggtggaagcaactgagcacctctgggtgtgctccgtggtttttctggcctgcagagggctggggctgagaggcaacaggtccaggctgagcagctcactctggaatccacaggctcgggatggagtccaggcctcatcacctagttccttggtgctgtgggcaaatgacctgtgtccccctctgcaaaacctgtgacctcttggttgatgtcacatgcttccccagggcctggtccatggacagaggctgatgggaaatcctacgtaaagtaccaggtcatcggcaagaaccacgtggcagtgcccacacacttcttcaaggtgctgatcctggaggcagcaggtgggcaaattgagctccgcacctacgtgatgcccaacgcacctgtggatgaggccatcccactggagcgcttcctggtgcccatcgagagcattgagcgggcttcggggctgctctttgtgccaaacatcctggcgcgggcaggcagcctcaaggccatcacggcgggcagtaagtgagggtggagcccagtgagactgtgggtgtgtgcaggccggggagtattaaaggtggtgatttttggagacaa

SEQ ID NO: 408935 - DNA, 432 bp, Homo sapiens
tgagagaagggcaagggagaagggagcgtagatgtttttcccaggagtccaccttgtacgtcattcctaatatgaacaccctatgtttattataaaaagaactctcatatactttatcttatttgttctagtctcacaaattggcgaggcctcaatcaagttgtagtccaggtgctttctttggagggaaagggctatgagcgcacatcttctaagtacacgacatcagcagtgtagtacgtgcaccatgccttacaagtgagacacaaaaaatttattggtagtaaacttcctataatagacattaccagcctaagacttcctgagaaagacaccctgtcaatcatctgatcagacctgtacttgcacagagctctgctcaagctatgagttcaataactgtttgttgcattatacttgactccaactttg

SEQ ID NO: 408936 - DNA, 4341 bp, Homo sapiens
  misc_feature (3766)..(3767): n is a, c, g, or t
  misc_feature (3991)..(3991): n is a, c, g, or t
  misc_feature (4017)..(4017): n is a, c, g, or t
  misc_feature (4070)..(4070): n is a, c, g, or t
  misc_feature (4077)..(4077): n is a, c, g, or t
  misc_feature (4176)..(4176): n is a, c, g, or t
  misc_feature (4281)..(4281): n is a, c, g, or t
cgtgaggcttggtaggactgcggacggtgagtggggatggactggagttgaagagctcgagatgaagggcttgagggcgtgtgttatttgttttcttcaagcatttggtcgagattaagaattaaaaatgtcatccaaacaagaaataatgagtgaccagcggtttagacgggttgcaaaggacccgagattttgggaaatgccagaaaaggatcgaaaagtcaaaattgacaagagatttcgagccatgtttcatgacaagaagttcaagttgaactatgccgtggataaaagagggcgccccattagccatagcactacagaggatttgaagcgtttttacgacctttcagattctgattccaatctctctggtgaagatagcaaagcattgagtcaaaagaaaataaagaagaaaaaaacccagactaaaaaagaaatcgattcaaaaaatctagttgagaaaaagaaagaaaccaagaaggctaatcacaagggttctgaaaataaaactgatttagataattctataggaattaaaaaaatgaaaacctcatgtaaatttaagatagattcaaacataagtccgaagaaggatagcaaagaatttacacaaaaaaataagaaagagaaaaaaaacattgttcaacatactacagactcttctctcgaagaaaaacaaaggacattagactcaggcacctctgaaattgtgaaatctcccagaatcgagtgttctaagacaagaagagaaatgcaatcagtggttcaactcataatgacaagagacagtgatggttatgaaaactcaacagatggtgaaatgtgtgacaaagatgctctggaggaagattcagaaagcgttagtgaaataggaagtgatgaggaatctgaaaatgaaattacaagtgttggtagagcttcaggtgatgacgatggaagtgaagatgatgaagaggaggatgaagatgaagaggaggatgaagatgaggatagtgaggatgatgataaaagtgacagtggccctgatcttgcaaggggtaaaggaaatatagaaactagttctgaagatgaagatgatacggcagatttgtttccagaagaatctggttttgagcatgcttggagagaattagataaagatgctcctcgtgctgatgagattacacgtcgattagcagtttgtaacatggactgggatagattaaaggcaaaagatttgctggctctgttcaattcatttaaacccaaaggaggtgtaatattttccgtcaagatatatccttcagaatttggaaaggagaggatgaaggaagagcaagttcaaggaccagtagagctattaagtattcctgaagatgccccagaaaaagactggacgtctagagaaaaattgagagattatcaattcaaacgactgaagtactattatgcagtagtagactgtgattctccggaaacagctagtaaaatttatgaggattgtgatggcctggaatttgaaagtagttgttctttcatagatctaaggtttataccagatgatattacttttgatgatgagcctaaggatgtagcctcagaagtgaatttaacagcatataaaccaaaatatttcacttctgctgcaatgggaacatcaacggtggaaatcacttgggatgagactgatcatgaaagaattacaatgctcaacaggaagtttaaaaaggaagagcttttggacatggattttcaagcctacttagcttcctctagtgaagatgaagaggagatagaagaggagctacaaggtgatgatggagtcaatgtagaagaagatgggaaaacaaagaaaagtcagaaggatgatgaagaacaaattgctaaatacaggcagctcttgcaggttattcaagaaaaagaaaagaaaggcaaagaaaatgatatggaaatggaaattaaatgggttccaggtcttaaagaaagtgcagaagagatggtcaaaaacaaattggaaggaaaggataaactgaccccttgggaacaatttttagagaagaagaaagagaaaaaaagactgaaaaggaaacagaaggctcttgctgaagaggccagtgaagaggaacttccctctgatgttgatttgaatgacccatactttgctgaagaagttaaacaaataggtataaataaaaaatcggtaaaatctgcaaaagatggcacatctccagaagaagaaattgaaatagaaagacaaaaggctgaaatggctttgcttatgatggatgaggacgaggacagtaagaaacacttcaattacaacaagattgtggagcaccagaatctgagcaaaaagaagaaaaagcagctcatgaaaaagaaggaattaatagaggatgactttgaggtaaatgttaacgatgcacggtttcaggcaatgtacacttcccacttgttcaatttggacccctcagatcccaatttcaagaaaacaaaagctatggaaaaaatccttgaggagaaggcccggcaaagagaacgaaaagaacaagaacttactcaggcaataaagaaaaaagagagtgagattgaaaaggaatcacaaaggaagtccattgatcctgctttgtcaatgttgattaaatctataaaaaccaaaacagagcagtttcaagcaagaaaaaagcaaaaagtcaaataactggatgttacttatttttgaactgaatacatcttttcctaaaatgtacaaaaatagtaggagggaatatttattgggaacaaagctatctttcaagaacatgaataaaatctttttctggacatagtaaaatttttctccataaataattgtacttaattgtggatgactgacaaatttttattgtatattcctacagatcagtcataattaaattacctgcattatagggtttataaaatttttatattttacaatgttcagttctaactagtggaaagttactctagctttttaaaaggctgtttacaattctgtgtaaaaatagagcagtatctactcaagtttgtgtaaatgttagggataatttgaaaaatatatatatttaatacattaatttctctggaagcaggaggcatgtttaaataactattaaaataatttatttttctagccataaaggatggaagtcaagaactttttgttgtttagtcatgttaagtatagtttatgaaattaacttgtaaataaaagtgtaaaatattttcattattttgtatagcactgatttattccattttatgcatctcaaagtactctctggaaaaatatctgaaaaccgattttaactttttaagaggacaactccatttaaaggcagttctagagttgcattgctcgtaaattgcatttgaaatattcatgagctctccagtggtttttctgtttggtagcaacagaaaagtcttctgtctgtccttcacatttttggaatactttagaaggatggatatgctgctgtagagtttaaggataccttaattcttcttaaaattaaaacacatctttaaggccttaacactcttggatctcatctggtctaaatattatagacaactgacagtcaaattagatatgctgtataagtaaatgtaaataaaaccagacttgtaacttggagcaaattataaatatggtaacttctgaaagacaacaggaatttgaccaggtttgtggttaaacttgacatttggggtattaaaaatcaaacctactgaccaggcaaggtggctctcacctgtnntcccagcactttgggaggctgaggcaggagaattgcttgaggccaggagttttgagaccaacctgggcaatatagtaagaccataggctgggtgtggtagcctacgcctgtaatccccccactttgggagactgaggcaggcacatcacttgaggtcaggagttcaagaccaggctggccaacacagtgagaccccccatctctaccgaaactacaaaaaattngccgggcgtgatggtgcatgcctgtngtcccagctactcaggaggctgaagcaggagaatcacttgaacttgggaggcngaggttncagtgagccgagattgagccactgcactccagcctgggcaacaggagaccctgtctcaaaatatatatatatacacgtctgtgtgtgtgtgcgcgcacncgtgcgtataacaagccaagtgtggtgatacatacctgtggtccttgctactcaggaggctgagatgggaggatcatatgagcccaggagtttgagtttacagtnagctgtgattgtatcactgcattccagcctgggtgacagagcaagaccctgtctctattt

SEQ ID NO: 408937 - DNA, 3232 bp, Homo sapiens
cgtgaggcttggtaggactgcggacggtgagtggggatggactggagttgaagagctcgagatgaagggcttgagggcgtgtgttatttgttttcttcaagcatttggtcgagattaagaattaaaaatgtcatccaaacaagaaataatgagtgaccagcggtttagacgggttgcaaaggacccgagattttgggaaatgccagaaaaggatcgaaaagtcaaaattgacaagagatttcgagccatgtttcatgacaagaagttcaagttgaactatgccgtggataaaagagggcgccccattagccatagcactacagaggatttgaagcgtttttacgacctttcagattctgattccaatctctctggtgaagatagcaaagcattgagtcaaaagaaaataaagaagaaaaaaacccagactaaaaaagaaatcgattcaaaaaatctagttgagaaaaagaaagaaaccaagaaggctaatcacaagggttctgaaaataaaactgatttagataattctataggaattaaaaaaatgaaaacctcatgtaaatttaagatagattcaaacataagtccgaagaaggatagcaaagaatttacacaaaaaaataagaaagagaaaaaaaacattgttcaacatactacagactcttctctcgaagaaaaacaaaggacattagactcaggcacctctgaaattgtgaaatctcccagaatcgagtgttctaagacaagaagagaaatgcaatcagtggttcaactcataatgacaagagacagtgatggttatgaaaactcaacagatggtgaaatgtgtgacaaagatgctctggaggaagattcagaaagcgttagtgaaataggaagtgatgaggaatctgaaaatgaaattacaagtgttggtagagcttcaggtgatgacgatggaagtgaagatgatgaagaggaggatgaagatgaagaggaggatgaagatgaggatagtgaggatgatgataaaagtgacagtggccctgatcttgcaaggggtaaaggaaatatagaaactagttctgaagatgaagatgatacggcagatttgtttccagaagaatctggttttgagcatgcttggagagaattagataaagatgctcctcgtgctgatgagattacacgtcgattagcagtttgtaacatggactgggatagattaaaggcaaaagatttgctggctctgttcaattcatttaaacccaaaggaggtgtaatattttccgtcaagatatatccttcagaatttggaaaggagaggatgaaggaagagcaagttcaaggaccagtagagctattaagtattcctgaagatgccccagaaaaagactggacgtctagagaaaaattgagagattatcaattcaaacgactgaagtactattatgcagtagtagactgtgattctccggaaacagctagtaaaatttatgaggattgtgatggcctggaatttgaaagtagttgttctttcatagatctaaggtttataccagatgatattacttttgatgatgagcctaaggatgtagcctcagaagtgaatttaacagcatataaaccaaaatatttcacttctgctgcaatgggaacatcaacggtggaaatcacttgggatgagactgatcatgaaagaattacaatgctcaacaggaagtttaaaaaggaagagcttttggacatggattttcaagcctacttagcttcctctagtgaagatgaagaggagatagaagaggagctacaaggtgatgatggagtcaatgtagaagaagatgggaaaacaaagaaaagtcagaaggatgatgaagaacaaattgctaaatacaggcagctcttgcaggttattcaagaaaaagaaaagaaaggcaaagaaaatgatatggaaatggaaattaaatgggttccaggtcttaaagaaagtgcagaagagatggtcaaaaacaaattggaaggaaaggataaactgaccccttgggaacaatttttagagaagaagaaagagaaaaaaagactgaaaaggaaacagaaggctcttgctgaagaggccagtgaagaggaacttccctctgatgttgatttgaatgacccatactttgctgaagaagttaaacaaataggtataaataaaaaatcggtaaaatctgcaaaagatggcacatctccagaagaagaaattgaaatagaaagacaaaaggctgaaatggctttgcttatgatggatgaggacgaggacagtaagaaacacttcaattacaacaagattgtggagcaccagaatctgagcaaaaagaagaaaaagcagctcatgaaaaagaaggaattaatagaggatgactttgaggtaaatgttaacgatgcacggtttcaggcaatgtacacttcccacttgttcaatttggacccctcagatcccaatttcaagaaaacaaaagctatggaaaaaatccttgaggagaaggcccggcaaagagaacgaaaagaacaagaacttactcaggcaataaagaaaaaagagagtgagattgaaaaggaatcacaaaggaagtccattgatcctgctttgtcaatgttgattaaatctataaaaaccaaaacagagcagtttcaagcaagaaaaaagcaaaaagtcaaataactggatgttacttatttttgaactgaatacatcttttcctaaaatgtacaaaaatagtaggagggaatatttattgggaacaaagctatctttcaagaacatgaataaaatctttttctggacatagtaaaatttttctccataaataattgtacttaattgtggatgactgacaaatttttattgtatattcctacagatcagtcataattaaattacctgcattatagggtttataaaatttttatattttacaatgttcagttctaactagtggaaagttactctagctttttaaaaggctgtttacaattctgtgtaaaaatagagcagtatctactcaagtttgtgtaaatgttagggataatttgaaaaatatatatatttaatacattaatttctctggaagcaggaggcatgtttaaataactattaaaataatttatttttctagccataaaggatggaagtcaagaactttttgttgtttagtcatgttaagtatagtttatgaaattaacttgtaaataaaagtgtaaaatattttca

SEQ ID NO: 408938 - DNA, 2727 bp, Homo sapiens
cgtgaggcttggtaggactgcggacggtgagtggggatggactggagttgaagagctcgagatgaagggcttgagggcgtgtgttatttgttttcttcaagcatttggtcgagattaagaattaaaaatgtcatccaaacaagaaataatgagtgaccagcggtttagacgggttgcaaaggacccgagattttgggaaatgccagaaaaggatcgaaaagtcaaaattgacaagagatttcgagccatgtttcatgacaagaagttcaagttgaactatgccgtggataaaagagggcgccccattagccatagcactacagaggatttgaagcgtttttacgacctttcagattctgattccaatctctctggtgaagatagcaaagcattgagtcaaaagaaaataaagaagaaaaaaacccagactaaaaaagaaatcgattcaaaaaatctagttgagaaaaagaaagaaaccaagaaggctaatcacaagggttctgaaaataaaactgatttagataattctataggaattaaaaaaatgaaaacctcatgtaaatttaagatagattcaaacataagtccgaagaaggatagcaaagaatttacacaaaaaaataagaaagagaaaaaaaacattgttcaacatactacagactcttctctcgaagaaaaacaaaggacattagactcaggcacctctgaaattgtgaaatctcccagaatcgagtgttctaagacaagaagagaaatgcaatcagtggttcaactcataatgacaagagacagtgatggttatgaaaactcaacagatggtgaaatgtgtgacaaagatgctctggaggaagattcagaaagcgttagtgaaataggaagtgatgaggaatctgaaaatgaaattacaagtgttggtagagcttcaggtgatgacgatggaagtgaagatgatgaagaggaggatgaagatgaagaggaggatgaagatgaggatagtgaggatgatgataaaagtgacagtggccctgatcttgcaaggggtaaaggaaatatagaaactagttctgaagatgaagatgatacggcagatttgtttccagaagaatctggttttgagcatgcttggagagaattagataaagatgctcctcgtgctgatgagattacacgtcgattagcagtttgtaacatggactgggatagattaaaggcaaaagatttgctggctctgttcaattcatttaaacccaaaggaggtgtaatattttccgtcaagatatatccttcagaatttggaaaggagaggatgaaggaagagcaagttcaaggaccagtagagctattaagtattcctgaagatgccccagaaaaagactggacgtctagagaaaaattgagagattatcaattcaaacgactgaagtactattatgcagtagtagactgtgattctccggaaacagctagtaaaatttatgaggattgtgatggcctggaatttgaaagtagttgttctttcatagatctaaggtttataccagatgatattacttttgatgatgagcctaaggatgtagcctcagaagtgaatttaacagcatataaaccaaaatatttcacttctgctgcaatgggaacatcaacggtggaaatcacttgggatgagactgatcatgaaagaattacaatgctcaacaggaagtttaaaaaggaagagcttttggacatggattttcaagcctacttagcttcctctagtgaagatgaagaggagatagaagaggagctacaaggtgatgatggagtcaatgtagaagaagatgggaaaacaaagaaaagtcagaaggatgatgaagaacaaattgctaaatacaggcagctcttgcaggttattcaagaaaaagaaaagaaaggcaaagaaaatgatatggaaatggaaattaaatgggttccaggtcttaaagaaagtgcagaagagatggtcaaaaacaaattggaaggaaaggataaactgaccccttgggaacaatttttagagaagaagaaagagaaaaaaagactgaaaaggaaacagaaggctcttgctgaagaggccagtgaagaggaacttccctctgatgttgatttgaatgacccatactttgctgaagaagttaaacaaataggtataaataaaaaatcggtaaaatctgcaaaagatggcacatctccagaagaagaaattgaaatagaaagacaaaaggctgaaatggctttgcttatgatggatgaggacgaggacagtaagaaacacttcaattacaacaagattgtggagcaccagaatctgagcaaaaagaagaaaaagcagctcatgaaaaagaaggaattaatagaggatgactttgaggtaaatgttaacgatgcacggtttcaggcaatgtacacttcccacttgttcaatttggacccctcagatcccaatttcaagaaaacaaaagctatggaaaaaatccttgaggagaaggcccggcaaagagaacgaaaagaacaagaacttactcagaatctaagcaaaagaagaaaaagcagctcatgaaaaagaaggaattaatagaggatgactttgaggtaaatgttaacgatgcacggtttcaggcaatgtacacttcccacttgttcaatttggacccctcagatcccaatttcaagaaaacaaagctatggaaaaaatccttgaggagaagg

SEQ ID NO: 408939 - DNA, 636 bp, Homo sapiens
tgagagaagggcaagggagaagggagcgtagatgtttttcccaggagtccaccttgtacgtcattcctaatatgaacaccctatgtttattataaaaagaactctcatatactttatcttatttgttctagtctcacaaattggcgaggcctcaatcaagttgtagtccaggtgctttctttggagggaaagggctatgagcgcacatcttctaagtacacgacatcagcagtgtagtacgtgcaccatgccttacaatatttgttttcttcaagcatttggtcgagattaagaattaaaaatgtcatccaaacaagaaataatgagtgaccagcggtttagacgggttgcaaaggacccgagattttgggaaatgccagaaaaggatcgaaaagtcaaaattgacaagagatttcgagccatgtttcatgacaagaagttcaagttgaactatgccgtggataaaagagggcgccccattagccatagcactacagaggatttgaagcgtttttacgacctttcagattctgattccaatctctctggtgaagatagcaaagcattgagtcaaaagaaaataaagaagaaaaaaacccagactaaaaaagaaatcgattcaaaaaatctagttga

SEQ ID NO: 408940 - DNA, 4283 bp, Homo sapiens
  misc_feature (3708)..(3709): n is a, c, g, or t
  misc_feature (3933)..(3933): n is a, c, g, or t
  misc_feature (3959)..(3959): n is a, c, g, or t
  misc_feature (4012)..(4012): n is a, c, g, or t
  misc_feature (4019)..(4019): n is a, c, g, or t
  misc_feature (4118)..(4118): n is a, c, g, or t
  misc_feature (4223)..(4223): n is a, c, g, or t
cgtgaggcttggtaggactgcggacgtatttgttttcttcaagcatttggtcgagattaagaattaaaaatgtcatccaaacaagaaataatgagtgaccagcggtttagacgggttgcaaaggacccgagattttgggaaatgccagaaaaggatcgaaaagtcaaaattgacaagagatttcgagccatgtttcatgacaagaagttcaagttgaactatgccgtggataaaagagggcgccccattagccatagcactacagaggatttgaagcgtttttacgacctttcagattctgattccaatctctctggtgaagatagcaaagcattgagtcaaaagaaaataaagaagaaaaaaacccagactaaaaaagaaatcgattcaaaaaatctagttgagaaaaagaaagaaaccaagaaggctaatcacaagggttctgaaaataaaactgatttagataattctataggaattaaaaaaatgaaaacctcatgtaaatttaagatagattcaaacataagtccgaagaaggatagcaaagaatttacacaaaaaaataagaaagagaaaaaaaacattgttcaacatactacagactcttctctcgaagaaaaacaaaggacattagactcaggcacctctgaaattgtgaaatctcccagaatcgagtgttctaagacaagaagagaaatgcaatcagtggttcaactcataatgacaagagacagtgatggttatgaaaactcaacagatggtgaaatgtgtgacaaagatgctctggaggaagattcagaaagcgttagtgaaataggaagtgatgaggaatctgaaaatgaaattacaagtgttggtagagcttcaggtgatgacgatggaagtgaagatgatgaagaggaggatgaagatgaagaggaggatgaagatgaggatagtgaggatgatgataaaagtgacagtggccctgatcttgcaaggggtaaaggaaatatagaaactagttctgaagatgaagatgatacggcagatttgtttccagaagaatctggttttgagcatgcttggagagaattagataaagatgctcctcgtgctgatgagattacacgtcgattagcagtttgtaacatggactgggatagattaaaggcaaaagatttgctggctctgttcaattcatttaaacccaaaggaggtgtaatattttccgtcaagatatatccttcagaatttggaaaggagaggatgaaggaagagcaagttcaaggaccagtagagctattaagtattcctgaagatgccccagaaaaagactggacgtctagagaaaaattgagagattatcaattcaaacgactgaagtactattatgcagtagtagactgtgattctccggaaacagctagtaaaatttatgaggattgtgatggcctggaatttgaaagtagttgttctttcatagatctaaggtttataccagatgatattacttttgatgatgagcctaaggatgtagcctcagaagtgaatttaacagcatataaaccaaaatatttcacttctgctgcaatgggaacatcaacggtggaaatcacttgggatgagactgatcatgaaagaattacaatgctcaacaggaagtttaaaaaggaagagcttttggacatggattttcaagcctacttagcttcctctagtgaagatgaagaggagatagaagaggagctacaaggtgatgatggagtcaatgtagaagaagatgggaaaacaaagaaaagtcagaaggatgatgaagaacaaattgctaaatacaggcagctcttgcaggttattcaagaaaaagaaaagaaaggcaaagaaaatgatatggaaatggaaattaaatgggttccaggtcttaaagaaagtgcagaagagatggtcaaaaacaaattggaaggaaaggataaactgaccccttgggaacaatttttagagaagaagaaagagaaaaaaagactgaaaaggaaacagaaggctcttgctgaagaggccagtgaagaggaacttccctctgatgttgatttgaatgacccatactttgctgaagaagttaaacaaataggtataaataaaaaatcggtaaaatctgcaaaagatggcacatctccagaagaagaaattgaaatagaaagacaaaaggctgaaatggctttgcttatgatggatgaggacgaggacagtaagaaacacttcaattacaacaagattgtggagcaccagaatctgagcaaaaagaagaaaaagcagctcatgaaaaagaaggaattaatagaggatgactttgaggtaaatgttaacgatgcacggtttcaggcaatgtacacttcccacttgttcaatttggacccctcagatcccaatttcaagaaaacaaaagctatggaaaaaatccttgaggagaaggcccggcaaagagaacgaaaagaacaagaacttactcaggcaataaagaaaaaagagagtgagattgaaaaggaatcacaaaggaagtccattgatcctgctttgtcaatgttgattaaatctataaaaaccaaaacagagcagtttcaagcaagaaaaaagcaaaaagtcaaataactggatgttacttatttttgaactgaatacatcttttcctaaaatgtacaaaaatagtaggagggaatatttattgggaacaaagctatctttcaagaacatgaataaaatctttttctggacatagtaaaatttttctccataaataattgtacttaattgtggatgactgacaaatttttattgtatattcctacagatcagtcataattaaattacctgcattatagggtttataaaatttttatattttacaatgttcagttctaactagtggaaagttactctagctttttaaaaggctgtttacaattctgtgtaaaaatagagcagtatctactcaagtttgtgtaaatgttagggataatttgaaaaatatatatatttaatacattaatttctctggaagcaggaggcatgtttaaataactattaaaataatttatttttctagccataaaggatggaagtcaagaactttttgttgtttagtcatgttaagtatagtttatgaaattaacttgtaaataaaagtgtaaaatattttcattattttgtatagcactgatttattccattttatgcatctcaaagtactctctggaaaaatatctgaaaaccgattttaactttttaagaggacaactccatttaaaggcagttctagagttgcattgctcgtaaattgcatttgaaatattcatgagctctccagtggtttttctgtttggtagcaacagaaaagtcttctgtctgtccttcacatttttggaatactttagaaggatggatatgctgctgtagagtttaaggataccttaattcttcttaaaattaaaacacatctttaaggccttaacactcttggatctcatctggtctaaatattatagacaactgacagtcaaattagatatgctgtataagtaaatgtaaataaaaccagacttgtaacttggagcaaattataaatatggtaacttctgaaagacaacaggaatttgaccaggtttgtggttaaacttgacatttggggtattaaaaatcaaacctactgaccaggcaaggtggctctcacctgtnntcccagcactttgggaggctgaggcaggagaattgcttgaggccaggagttttgagaccaacctgggcaatatagtaagaccataggctgggtgtggtagcctacgcctgtaatccccccactttgggagactgaggcaggcacatcacttgaggtcaggagttcaagaccaggctggccaacacagtgagaccccccatctctaccgaaactacaaaaaattngccgggcgtgatggtgcatgcctgtngtcccagctactcaggaggctgaagcaggagaatcacttgaacttgggaggcngaggttncagtgagccgagattgagccactgcactccagcctgggcaacaggagaccctgtctcaaaatatatatatatacacgtctgtgtgtgtgtgcgcgcacncgtgcgtataacaagccaagtgtggtgatacatacctgtggtccttgctactcaggaggctgagatgggaggatcatatgagcccaggagtttgagtttacagtnagctgtgattgtatcactgcattccagcctgggtgacagagcaagaccctgtctctattt

SEQ ID NO: 408941 - DNA, 4515 bp, Homo sapiens
  misc_feature (3940)..(3941): n is a, c, g, or t
  misc_feature (4165)..(4165): n is a, c, g, or t
  misc_feature (4191)..(4191): n is a, c, g, or t
  misc_feature (4244)..(4244): n is a, c, g, or t
  misc_feature (4251)..(4251): n is a, c, g, or t
  misc_feature (4350)..(4350): n is a, c, g, or t
  misc_feature (4455)..(4455): n is a, c, g, or t
tgagagaagggcaagggagaagggagcgtagatgtttttcccaggagtccaccttgtacgtcattcctaatatgaacaccctatgtttattataaaaagaactctcatatactttatcttatttgttctagtctcacaaattggcgaggcctcaatcaagttgtagtccaggtgctttctttggagggaaagggctatgagcgcacatcttctaagtacacgacatcagcagtgtagtacgtgcaccatgccttacaatatttgttttcttcaagcatttggtcgagattaagaattaaaaatgtcatccaaacaagaaataatgagtgaccagcggtttagacgggttgcaaaggacccgagattttgggaaatgccagaaaaggatcgaaaagtcaaaattgacaagagatttcgagccatgtttcatgacaagaagttcaagttgaactatgccgtggataaaagagggcgccccattagccatagcactacagaggatttgaagcgtttttacgacctttcagattctgattccaatctctctggtgaagatagcaaagcattgagtcaaaagaaaataaagaagaaaaaaacccagactaaaaaagaaatcgattcaaaaaatctagttgagaaaaagaaagaaaccaagaaggctaatcacaagggttctgaaaataaaactgatttagataattctataggaattaaaaaaatgaaaacctcatgtaaatttaagatagattcaaacataagtccgaagaaggatagcaaagaatttacacaaaaaaataagaaagagaaaaaaaacattgttcaacatactacagactcttctctcgaagaaaaacaaaggacattagactcaggcacctctgaaattgtgaaatctcccagaatcgagtgttctaagacaagaagagaaatgcaatcagtggttcaactcataatgacaagagacagtgatggttatgaaaactcaacagatggtgaaatgtgtgacaaagatgctctggaggaagattcagaaagcgttagtgaaataggaagtgatgaggaatctgaaaatgaaattacaagtgttggtagagcttcaggtgatgacgatggaagtgaagatgatgaagaggaggatgaagatgaagaggaggatgaagatgaggatagtgaggatgatgataaaagtgacagtggccctgatcttgcaaggggtaaaggaaatatagaaactagttctgaagatgaagatgatacggcagatttgtttccagaagaatctggttttgagcatgcttggagagaattagataaagatgctcctcgtgctgatgagattacacgtcgattagcagtttgtaacatggactgggatagattaaaggcaaaagatttgctggctctgttcaattcatttaaacccaaaggaggtgtaatattttccgtcaagatatatccttcagaatttggaaaggagaggatgaaggaagagcaagttcaaggaccagtagagctattaagtattcctgaagatgccccagaaaaagactggacgtctagagaaaaattgagagattatcaattcaaacgactgaagtactattatgcagtagtagactgtgattctccggaaacagctagtaaaatttatgaggattgtgatggcctggaatttgaaagtagttgttctttcatagatctaaggtttataccagatgatattacttttgatgatgagcctaaggatgtagcctcagaagtgaatttaacagcatataaaccaaaatatttcacttctgctgcaatgggaacatcaacggtggaaatcacttgggatgagactgatcatgaaagaattacaatgctcaacaggaagtttaaaaaggaagagcttttggacatggattttcaagcctacttagcttcctctagtgaagatgaagaggagatagaagaggagctacaaggtgatgatggagtcaatgtagaagaagatgggaaaacaaagaaaagtcagaaggatgatgaagaacaaattgctaaatacaggcagctcttgcaggttattcaagaaaaagaaaagaaaggcaaagaaaatgatatggaaatggaaattaaatgggttccaggtcttaaagaaagtgcagaagagatggtcaaaaacaaattggaaggaaaggataaactgaccccttgggaacaatttttagagaagaagaaagagaaaaaaagactgaaaaggaaacagaaggctcttgctgaagaggccagtgaagaggaacttccctctgatgttgatttgaatgacccatactttgctgaagaagttaaacaaataggtataaataaaaaatcggtaaaatctgcaaaagatggcacatctccagaagaagaaattgaaatagaaagacaaaaggctgaaatggctttgcttatgatggatgaggacgaggacagtaagaaacacttcaattacaacaagattgtggagcaccagaatctgagcaaaaagaagaaaaagcagctcatgaaaaagaaggaattaatagaggatgactttgaggtaaatgttaacgatgcacggtttcaggcaatgtacacttcccacttgttcaatttggacccctcagatcccaatttcaagaaaacaaaagctatggaaaaaatccttgaggagaaggcccggcaaagagaacgaaaagaacaagaacttactcaggcaataaagaaaaaagagagtgagattgaaaaggaatcacaaaggaagtccattgatcctgctttgtcaatgttgattaaatctataaaaaccaaaacagagcagtttcaagcaagaaaaaagcaaaaagtcaaataactggatgttacttatttttgaactgaatacatcttttcctaaaatgtacaaaaatagtaggagggaatatttattgggaacaaagctatctttcaagaacatgaataaaatctttttctggacatagtaaaatttttctccataaataattgtacttaattgtggatgactgacaaatttttattgtatattcctacagatcagtcataattaaattacctgcattatagggtttataaaatttttatattttacaatgttcagttctaactagtggaaagttactctagctttttaaaaggctgtttacaattctgtgtaaaaatagagcagtatctactcaagtttgtgtaaatgttagggataatttgaaaaatatatatatttaatacattaatttctctggaagcaggaggcatgtttaaataactattaaaataatttatttttctagccataaaggatggaagtcaagaactttttgttgtttagtcatgttaagtatagtttatgaaattaacttgtaaataaaagtgtaaaatattttcattattttgtatagcactgatttattccattttatgcatctcaaagtactctctggaaaaatatctgaaaaccgattttaactttttaagaggacaactccatttaaaggcagttctagagttgcattgctcgtaaattgcatttgaaatattcatgagctctccagtggtttttctgtttggtagcaacagaaaagtcttctgtctgtccttcacatttttggaatactttagaaggatggatatgctgctgtagagtttaaggataccttaattcttcttaaaattaaaacacatctttaaggccttaacactcttggatctcatctggtctaaatattatagacaactgacagtcaaattagatatgctgtataagtaaatgtaaataaaaccagacttgtaacttggagcaaattataaatatggtaacttctgaaagacaacaggaatttgaccaggtttgtggttaaacttgacatttggggtattaaaaatcaaacctactgaccaggcaaggtggctctcacctgtnntcccagcactttgggaggctgaggcaggagaattgcttgaggccaggagttttgagaccaacctgggcaatatagtaagaccataggctgggtgtggtagcctacgcctgtaatccccccactttgggagactgaggcaggcacatcacttgaggtcaggagttcaagaccaggctggccaacacagtgagaccccccatctctaccgaaactacaaaaaattngccgggcgtgatggtgcatgcctgtngtcccagctactcaggaggctgaagcaggagaatcacttgaacttgggaggcngaggttncagtgagccgagattgagccactgcactccagcctgggcaacaggagaccctgtctcaaaatatatatatatacacgtctgtgtgtgtgtgcgcgcacncgtgcgtataacaagccaagtgtggtgatacatacctgtggtccttgctactcaggaggctgagatgggaggatcatatgagcccaggagtttgagtttacagtnagctgtgattgtatcactgcattccagcctgggtgacagagcaagaccctgtctctattt

SEQ ID NO: 408942 - DNA, 2422 bp, Homo sapiens
  misc_feature (1847)..(1848): n is a, c, g, or t
  misc_feature (2072)..(2072): n is a, c, g, or t
  misc_feature (2098)..(2098): n is a, c, g, or t
  misc_feature (2151)..(2151): n is a, c, g, or t
  misc_feature (2158)..(2158): n is a, c, g, or t
  misc_feature (2257)..(2257): n is a, c, g, or t
  misc_feature (2362)..(2362): n is a, c, g, or t
tgaaagacatcttgattttggacttctggactccggaactgtgagagatgaagttatattaatttaagccaccaagtttgtggtaatttgttacagagccggaggaccccagtagggagagagtaccgatggagatggggctgaaaaggaaacagaaggctcttgctgaagaggccagtgaagaggaacttccctctgatgttgatttgaatgacccatactttgctgaagaagttaaacaaataggtataaataaaaaatcggtaaaatctgcaaaagatggcacatctccagaagaagaaattgaaatagaaagacaaaaggctgaaatggctttgcttatgatggatgaggacgaggacagtaagaaacacttcaattacaacaagattgtggagcaccagaatctgagcaaaaagaagaaaaagcagctcatgaaaaagaaggaattaatagaggatgactttgaggtaaatgttaacgatgcacggtttcaggcaatgtacacttcccacttgttcaatttggacccctcagatcccaatttcaagaaaacaaaagctatggaaaaaatccttgaggagaaggcccggcaaagagaacgaaaagaacaagaacttactcaggcaataaagaaaaaagagagtgagattgaaaaggaatcacaaaggaagtccattgatcctgctttgtcaatgttgattaaatctataaaaaccaaaacagagcagtttcaagcaagaaaaaagcaaaaagtcaaataactggatgttacttatttttgaactgaatacatcttttcctaaaatgtacaaaaatagtaggagggaatatttattgggaacaaagctatctttcaagaacatgaataaaatctttttctggacatagtaaaatttttctccataaataattgtacttaattgtggatgactgacaaatttttattgtatattcctacagatcagtcataattaaattacctgcattatagggtttataaaatttttatattttacaatgttcagttctaactagtggaaagttactctagctttttaaaaggctgtttacaattctgtgtaaaaatagagcagtatctactcaagtttgtgtaaatgttagggataatttgaaaaatatatatatttaatacattaatttctctggaagcaggaggcatgtttaaataactattaaaataatttatttttctagccataaaggatggaagtcaagaactttttgttgtttagtcatgttaagtatagtttatgaaattaacttgtaaataaaagtgtaaaatattttcattattttgtatagcactgatttattccattttatgcatctcaaagtactctctggaaaaatatctgaaaaccgattttaactttttaagaggacaactccatttaaaggcagttctagagttgcattgctcgtaaattgcatttgaaatattcatgagctctccagtggtttttctgtttggtagcaacagaaaagtcttctgtctgtccttcacatttttggaatactttagaaggatggatatgctgctgtagagtttaaggataccttaattcttcttaaaattaaaacacatctttaaggccttaacactcttggatctcatctggtctaaatattatagacaactgacagtcaaattagatatgctgtataagtaaatgtaaataaaaccagacttgtaacttggagcaaattataaatatggtaacttctgaaagacaacaggaatttgaccaggtttgtggttaaacttgacatttggggtattaaaaatcaaacctactgaccaggcaaggtggctctcacctgtnntcccagcactttgggaggctgaggcaggagaattgcttgaggccaggagttttgagaccaacctgggcaatatagtaagaccataggctgggtgtggtagcctacgcctgtaatccccccactttgggagactgaggcaggcacatcacttgaggtcaggagttcaagaccaggctggccaacacagtgagaccccccatctctaccgaaactacaaaaaattngccgggcgtgatggtgcatgcctgtngtcccagctactcaggaggctgaagcaggagaatcacttgaacttgggaggcngaggttncagtgagccgagattgagccactgcactccagcctgggcaacaggagaccctgtctcaaaatatatatatatacacgtctgtgtgtgtgtgcgcgcacncgtgcgtataacaagccaagtgtggtgatacatacctgtggtccttgctactcaggaggctgagatgggaggatcatatgagcccaggagtttgagtttacagtnagctgtgattgtatcactgcattccagcctgggtgacagagcaagaccctgtctctattt

SEQ ID NO: 408943 - DNA, 1492 bp, Homo sapiens
gcccggcgcacgcgcgtggcctcgcgcagggcggggagaggcggtggctgtgggcgtccggccccgaacctgtcagacctggggagccggcctccagcagcgggcgcggcgggcgcgagcacgaccccactctcctgcggccgcgggtggagcagcgcgagcccgcctcgctgagccggccgggggcggggagatgagttgcggccccgcggcagcgccccaggatggggagggacgcgcggcactgccctcgagaactggcgctccggtgaagtaggcgccgccggccgtccgcctcccccaagccgttccgcaccgcggccgctcagcctctgccatggccggctctggcgcgtggaagcgcctcaaatctatgctaaggaaggatgatgcgccgctgtttttaaatgacaccagcgcctttgacttctcggatgaggcgggggacgaggggctttctcggttcaacaaacttcgagttgtggtggccgatgacggttccgaagccccggaaaggcctgttaacggggcgcacccgaccctccaggccgacgatgattccttactggaccaagacttacctttgaccaacagtcagctgagtttgaaggtggactcctgtgacaactgcagcaaacagagagagatactgaagcagagaaaggtgaaagccaggttgaccattgctgccgttctgtacttgcttttcatgattggagaacttgtaggtgagttgtgttgccaactcactttccgtttacctttcctcgagagtctttgtcaagctgtagttacacaggctttgaggtttaacccatcttttcaggaagtttgtatttatcaagacactgatctcatgtgaaaaggccacacggttccaaagtgcagctcaatctaagtacaatataaactccccgagataactttgactttctcttctagttgttcaaccactgtcatctaccgtaaagttaaggacgttatcttcattgtatgtcatgtaacttcctctttttacaaaggtctggtaaaataccaggttaattttcgcaacgtttaaaatagtaaatgatcgtaaataacttaagatcatagaattttacagtatgaagggaccttactgaacacctgctccacctcctttttttttttacatgtaaggatttccagggcacaaaccagtggaataagtcgtgagggccacttagggagttaatggaagagccacatctacagtcccagcatttttttcctctacatttgacctaagtggtttcttttatacgatttccttttgtatttatagccaagagatttgcaaaattaattaccaactaacatgaaatttttgcctcgtaagaagggcctgaaatgaaccagaggactccgccaaagttctatgagcctggttttcttgttcattttttaattatacgaacaatccgttctcaatataagatacattcttagtttagaggttattttcaatcac

SEQ ID NO: 408944 - DNA, 1085 bp, Homo sapiens
gcccggcgcacgcgcgtggcctcgcgcagggcggggagaggcggtggctgtgggcgtccggccccgaacctgtcagacctggggagccggcctccagcagcgggcgcggcgggcgcgagcacgaccccactctcctgcggccgcgggtggagcagcgcgagcccgcctcgctgagccggccgggggcggggagatgagttgcggccccgcggcagcgccccaggatggggagggacgcgcggcactgccctcgagaactggcgctccggtgaagtaggcgccgccggccgtccgcctcccccaagccgttccgcaccgcggccgctcagcctctgccatggccggctctggcgcgtggaagcgcctcaaatctatgctaaggaaggatgatgcgccgctgtttttaaatgacaccagcgcctttgacttctcggatgaggcgggggacgaggggctttctcggttcaacaaacttcgagttgtggtggccgatgacggttccgaagccccggaaaggcctgttaacggggcgcacccgaccctccaggccgacgatgattccttactggaccaagacttacctttgaccaacagtcagctgagtttgaaggtggactcctgtgacaactgcagcaaacagagagagatactgaagcagagaaaggtgaaagccaggttgaccattgctgccgttctgtacttgcttttcatgattggagaacttgtaggtggatacattgcaaatagcctagcaatcatgacagatgcacttcatatgttaactgacctaagcgccatcatactcaccctgcttgctttgtggctatcatcaaaatcaccaaccaaaagattcacctttggatttcatcgcttaggtaggtagttggtgtttcttttgctttataatattttatagtaaaaccacaatgaactataaccctgattaactgaactcgttccagtgatatcttgtttgaacaaagcaaatgaaaatagataaacaaaatttattcagaaacatcttttccagggtacatttagcctagtcagctaaacagtttacacatataaaattatatgatgat

SEQ ID NO: 408945 - DNA, 2258 bp, Homo sapiens
  misc_feature (1084)..(1084): n is a, c, g, or t
gcccggcgcacgcgcgtggcctcgcgcagggcggggagaggcggtggctgtgggcgtccggccccgaacctgtcagacctggggagccggcctccagcagcgggcgcggcgggcgcgagcacgaccccactctcctgcggccgcgggtggagcagcgcgagcccgcctcgctgagccggccgggggcggggagatgagttgcggccccgcggcagcgccccaggatggggagggacgcgcggcactgcctctggcgcgtggaagcgcctcaaatctatgctaaggaaggatgatgcgccgctgtttttaaatgacaccagcgcctttgacttctcggatgaggcgggggacgaggggctttctcggttcaacaaacttcgagttgtggtggccgatgacggttccgaagccccggaaaggcctgttaacggggcgcacccgaccctccaggccgacgatgattccttactggaccaagacttacctttgaccaacagtcagctgagtttgaaggtggactcctgtgacaactgcagcaaacagagagagatactgaagcagagaaaggtgaaagccaggttgaccattgctgccgttctgtacttgcttttcatgattggagaacttgtaggtggatacattgcaaatagcctagcaatcatgacagatgcacttcatatgttaactgacctaagcgccatcatactcaccctgcttgctttgtggctatcatcaaaatcaccaaccaaaagattcacctttggatttcatcgcttagaggttttgtcagctatgattagtgtgctgttggtgtatatacttatgggattcctcttatatgaagctgtgcaaagaactatccatatgaactatgaaataaatggagatataatgctcatcaccgcagctgttggagttgcagttaatgtaataatggggtttctgttgaaccagtctggtcaccgtcactcccattcccactccctgccttcaaattcccctaccagaggttctgggtgtgaacgtaaccatgggcaggatagcctggcagtgagagctgcatttgtacatgctttgggagatntggtacagagtgttggtgtgctaatagctgcatacatcatacgattcaagccagaatacaagattgctgaccccatctgtacatacgtattttcattacttgtggcttttacaacatttcgaatcatatgggatacagtagttataatactagaaggtgtgccaagccatttgaatgtagactatatcaaagaagccttgatgaaaatagaagatgtatattcagtcgaagatttaaatatctggtctctcacttcaggaaaatctactgccatagttcacatacagctaattcctggaagttcatctaaatgggaggaagtacagtccaaagcaaaccatttattattgaacacatttggcatgtatagatgtactattcagcttcagagttacaggcaagaagtggacagaacttgtgcaaattgtcagagttctagtccctaattttatgtattgttttagcattgctgaattcactttatttatcctgcagtcacagacttgagagcaataaatgcaaacctaaatgagaaaatggaatccctgacagctgtgtccgtatcaagcatcagtctctcaaacagttgccccagcctgacagtgctagtctctgtttaatggtaaaaggagactttgccataattttcagatgaagatgtttcccaaacactgtttacagaatgagatgtgactcctacagatacctcatagaagacaatccaagatcatacttcattaacttgacagagtacgtgtcttaaaggaagcatcaagaattcaatatttgcatttaaaaatactttttaaggccattttatattaagccagtgctggaaaactgaattttttttattatgtataataatctcgacacccagcttctggaattgctgctttctttttacagaaattactacccaacagatttcaggaagtactagtagttatcccaaaagtggaataagcatgtattcctaagtgtttcagaaatgttttatttcacacataagtcttaatgttattgttatgattatactttataaacaaccttttccagatgctacagggttttgaatctcaaagttaacatttttcattatttgtaatcttagaaccaaatctttatttattgtggtcactgttattaaatgatttaggaaatactttcaata

SEQ ID NO: 408946 - DNA, 2355 bp, Homo sapiens
  misc_feature (1181)..(1181): n is a, c, g, or t
gcccggcgcacgcgcgtggcctcgcgcagggcggggagaggcggtggctgtgggcgtccggccccgaacctgtcagacctggggagccggcctccagcagcgggcgcggcgggcgcgagcacgaccccactctcctgcggccgcgggtggagcagcgcgagcccgcctcgctgagccggccgggggcggggagatgagttgcggccccgcggcagcgccccaggatggggagggacgcgcggcactgccctcgagaactggcgctccggtgaagtaggcgccgccggccgtccgcctcccccaagccgttccgcaccgcggccgctcagcctctgccatggccggctctggcgcgtggaagcgcctcaaatctatgctaaggaaggatgatgcgccgctgtttttaaatgacaccagcgcctttgacttctcggatgaggcgggggacgaggggctttctcggttcaacaaacttcgagttgtggtggccgatgacggttccgaagccccggaaaggcctgttaacggggcgcacccgaccctccaggccgacgatgattccttactggaccaagacttacctttgaccaacagtcagctgagtttgaaggtggactcctgtgacaactgcagcaaacagagagagatactgaagcagagaaaggtgaaagccaggttgaccattgctgccgttctgtacttgcttttcatgattggagaacttgtaggtggatacattgcaaatagcctagcaatcatgacagatgcacttcatatgttaactgacctaagcgccatcatactcaccctgcttgctttgtggctatcatcaaaatcaccaaccaaaagattcacctttggatttcatcgcttagaggttttgtcagctatgattagtgtgctgttggtgtatatacttatgggattcctcttatatgaagctgtgcaaagaactatccatatgaactatgaaataaatggagatataatgctcatcaccgcagctgttggagttgcagttaatgtaataatggggtttctgttgaaccagtctggtcaccgtcactcccattcccactccctgccttcaaattcccctaccagaggttctgggtgtgaacgtaaccatgggcaggatagcctggcagtgagagctgcatttgtacatgctttgggagatntggtacagagtgttggtgtgctaatagctgcatacatcatacgattcaagccagaatacaagattgctgaccccatctgtacatacgtattttcattacttgtggcttttacaacatttcgaatcatatgggatacagtagttataatactagaaggtgtgccaagccatttgaatgtagactatatcaaagaagccttgatgaaaatagaagatgtatattcagtcgaagatttaaatatctggtctctcacttcaggaaaatctactgccatagttcacatacagctaattcctggaagttcatctaaatgggaggaagtacagtccaaagcaaaccatttattattgaacacatttggcatgtatagatgtactattcagcttcagagttacaggcaagaagtggacagaacttgtgcaaattgtcagagttctagtccctaattttatgtattgttttagcattgctgaattcactttatttatcctgcagtcacagacttgagagcaataaatgcaaacctaaatgagaaaatggaatccctgacagctgtgtccgtatcaagcatcagtctctcaaacagttgccccagcctgacagtgctagtctctgtttaatggtaaaaggagactttgccataattttcagatgaagatgtttcccaaacactgtttacagaatgagatgtgactcctacagatacctcatagaagacaatccaagatcatacttcattaacttgacagagtacgtgtcttaaaggaagcatcaagaattcaatatttgcatttaaaaatactttttaaggccattttatattaagccagtgctggaaaactgaattttttttattatgtataataatctcgacacccagcttctggaattgctgctttctttttacagaaattactacccaacagatttcaggaagtactagtagttatcccaaaagtggaataagcatgtattcctaagtgtttcagaaatgttttatttcacacataagtcttaatgttattgttatgattatactttataaacaaccttttccagatgctacagggttttgaatctcaaagttaacatttttcattatttgtaatcttagaaccaaatctttatttattgtggtcactgttattaaatgatttaggaaatactttcaata

SEQ ID NO: 408947 - DNA, 306 bp, Homo sapiens
attaactggaaatgtgaaagagcttgttggatatacaggtcaagaatacaaagcgaatttgggccacagagaaacatttggtactttttagcacaagatgggggcaggtttgcttacaataagtgtacaatcagaagagaagaggacccaaggctataggttctaaagaactttaacatttagaagtcaaacataggaattcacaaaagataccaaccttctctggtcagctctaaatgggcatataataaactatcacggggactatgtaaagcttgcatagtgcttgtaatattcaaagtactc

SEQ ID NO: 408948 - DNA, 3139 bp, Homo sapiens
  misc_feature (1086)..(1086): n is a, c, g, or t
  misc_feature (1243)..(1243): n is a, c, g, or t
  misc_feature (1536)..(1536): n is a, c, g, or t
  misc_feature (1593)..(1593): n is a, c, g, or t
  misc_feature (1621)..(1621): n is a, c, g, or t
  misc_feature (1763)..(1763): n is a, c, g, or t
tgctgggtgagaccactggcaccataactctccccagcctcaactctggtttttttcctctgttctttccatgttccccttggaagtcgctgttggtcgtggcactgaggcccagatcatgccacctcctctaacaagtggctgagtggacaccccacacattctacccaagggccgtgagtggccaagatcggggctcagaagtctctgaatcttcacagctggtcacgttcagctcggtcacttcctgtaagattccaggcactgcatgcactgacatgggtgcgtgtgggcccactgggtcctgcctgggagccttccctggatgttcattttttgcaggtctgtgtttgtcttggagtaaggattattctcgcttgctggggtcatggtgttttggcctctcctggcctggactctcaaaaactcatcatccttcataggtctgaaggcttctacattcccaccagcaggtggaccatatgaactcaaaactagttgtggcagagggaccctgaagagatctacccctggattgccctttacagttcatgagttcccccaactggagtgcagacaagagcactgattgatggaccaggtagacttgaaaccaggaatagcacaaaagttatcaaagaggctcagccatggagattgcaagctggggatggaagtatgcctggaattgagctgttctcacacctggtacctgagttatacccctggtgtctgggtaccaaggtcactagccttgccacttttctatgttcctgatcccctactaaacagtccaccttttcgcctacttcccctgactcctgtaccctgtcccctctttctgcctagtttgaagacactggtcatcccataacatgtcctgggctaatacatatcctcaaatcgttcttgaaaatctgttcctcttccctcctccccctcccccccccctctttccacggtctccctctgatgccgagccgaagctggacggtactgctgccatctcggctcactgcaacctccctgcctgattctcttgcctcagcctgccgagtgcctgcgattgcaggcgcgtgccgccangcctgactggttttcgtattttttttggtggagacggggtttcgctgtgttggccgggctggtctccagctcctaaccacgagtgatccgccagcctcggcctcccgaggtgccgggattgcagacggagtctcgttcattcagtgctcaatggtgnccaggctggagtgcagtggcgtgatctcggctcgctacaacctccacctcccagcaacccgccttggcctcccaaagtgccgagattgcagcctctgcccggcggccaccccgtctgggaagtgaggagcgtctccgcctggccgcccatcatctgggatgtgaggagcccctctgcctggctgcccagtctggaaagtgaggagcgtctctgcccggccgccatcccatctaggaagtgaggagcgcctcttcccggccgccatcacatctgggaagtgaggagcgtctctncccggccgcccatcgtctgagatgtggggagcatctctgccctgccgccccgtccgngatgtgaggagcgtctctgcccggccgncccgtctgagaagtgaggagaccctctgcctggcaactgccccgtctgagaagtgaggagcccctccgcccggcagccgccccgtctgagaagtgaggagcccctccgcccagcagccaccccgtctgggaagtgaggagcntctccgcccggcagccgccccgtctgagaagtgaggagcctctccgcccagcagccacctcgtccgggagggaggtgggggggtcagccccccgcccggccagccgccctgtccggaagggaggtgggggggtcagccccccgcgcggccagccgacccgtccgggagggaggtgggggggtcagccccctgcccggccagccgccccgtccgggaggtgcggggcgcctctgcccggccgcccctactgggaagtgaggagcccctctgcccggccagccgccccatctgggagggaggtgggggggtcagccccccgccctgccagccgccctgtccgggagggaggtgggggggtcagccccccgcctggccagccaccccgtccgggaggtgaggggcgcctctgcccggccgcccctactgggaagtgaggagcccctctgcctggccagccgccccgtccaggagggaggtggggggggggtcagccccccgcctggcgagccgccctgtccgggaggtgaggggcgcctctgcccggccgcccctactgggaaatgaggagcccctctgcccggccaccaccccatctgggaggtgtacccaacagctcgttgagaacgggccatgatgacaatggcggttttgtggaatagaaaggggggaaagatggggaaaagattgagaaatcggatggttgccgtgtctgtgtagaaagaggtagacgtgggagacttttcattttgttctgtactaagaaaaattcttctgccttgggatcctgttgatctgtgaccttacccccaaccctgtgctctctgaaacatgtgctgtatccactcagggttgaatggattaagggcggtgcaagatgtgctttgttaaacagatgcttgaaggcagcatgctccttaagagtcatcaccactccctaatctcaagtacccagggacacaaacactgcggaaggccgcagggtcctctgcctaggaaaaccagagacctttgttcacttgtttatctgctgaccttccctcccctattgtcctgtgaccctgccaaatccccctctacgagaaacacccaagaatgatcaataaaaaaaaaagaaaaaaaaaaaatctgttcctctgtgagatgggcctgatctctcccacgggtggagcagaggagtagagggtccagggcctgagtctcccataggctaagtatttgccctgagtcataaagccagtgggaggcagtgctacagtttgattccaggaagtctcagaccaaagttctctcttaaccacttacctttcctgggcttaatagttagttcatttatgtttttcctggcactacttcattggacctcattttagtttctt

SEQ ID NO: 408949 - DNA, 3498 bp, Homo sapiens
  misc_feature (1445)..(1445): n is a, c, g, or t
  misc_feature (1602)..(1602): n is a, c, g, or t
  misc_feature (1895)..(1895): n is a, c, g, or t
  misc_feature (1952)..(1952): n is a, c, g, or t
  misc_feature (1980)..(1980): n is a, c, g, or t
  misc_feature (2122)..(2122): n is a, c, g, or t
tgctgggtgagaccactggcaccataactctccccagcctcaactctggtttttttcctctgttctttccatgttccccttggaagtcgctgttggtcgtggcactgaggcccagatcatgccacctcctctaacaagtggctgagtggacaccccacacattctacccaagggccgtgagtggccaagatcggggctcagaagtctctgaatcttcacagctggtcacgttcagctcggtcacttcctgtaagattccaggcactgcatgcactgacatgggtgcgtgtgggcccactgggtcctgcctgggagccttccctggatgttcattttttgcaggtctgtgtttgtcttggagtaaggattattctcgcttgctggggtcatggtgttttggcctctcctggcctggactctcaaaaactcatcatccttcataggtctgaaggcttctacattcccaccagcaggtggaccatatgaactcaaaactagttgtggcagagggaccctgaagagatctacccctggtgaatgcccccaggagtgggctgttctcacacctggtgcccagcctgtgccctcgcaggtcttggtgcctccactcagctcaattccagtcttctggccatgccccgctgtgtccctttctctctccttagtgcctagctgtgcaatgtttgcctctccttaacatgtcctcagctgaccccatatcctcagtccttgcaaccctgttcctcagtgacacctgtgtattctctccagtggagacacaggtgggacacccccaagctcatggtacatgcctgtcatcagtacccctggactgtcatggtgggtcagtctgccctaggctggactgaccaacctgttcattcccccacaggattgccctttacagttcatgagttcccccaactggagtgcagacaagagcactgattgatggaccaggtagacttgaaaccaggaatagcacaaaagttatcaaagaggctcagccatggagattgcaagctggggatggaagtatgcctggaattgagctgttctcacacctggtacctgagttatacccctggtgtctgggtaccaaggtcactagccttgccacttttctatgttcctgatcccctactaaacagtccaccttttcgcctacttcccctgactcctgtaccctgtcccctctttctgcctagtttgaagacactggtcatcccataacatgtcctgggctaatacatatcctcaaatcgttcttgaaaatctgttcctcttccctcctccccctcccccccccctctttccacggtctccctctgatgccgagccgaagctggacggtactgctgccatctcggctcactgcaacctccctgcctgattctcttgcctcagcctgccgagtgcctgcgattgcaggcgcgtgccgccangcctgactggttttcgtattttttttggtggagacggggtttcgctgtgttggccgggctggtctccagctcctaaccacgagtgatccgccagcctcggcctcccgaggtgccgggattgcagacggagtctcgttcattcagtgctcaatggtgnccaggctggagtgcagtggcgtgatctcggctcgctacaacctccacctcccagcaacccgccttggcctcccaaagtgccgagattgcagcctctgcccggcggccaccccgtctgggaagtgaggagcgtctccgcctggccgcccatcatctgggatgtgaggagcccctctgcctggctgcccagtctggaaagtgaggagcgtctctgcccggccgccatcccatctaggaagtgaggagcgcctcttcccggccgccatcacatctgggaagtgaggagcgtctctncccggccgcccatcgtctgagatgtggggagcatctctgccctgccgccccgtccgngatgtgaggagcgtctctgcccggccgncccgtctgagaagtgaggagaccctctgcctggcaactgccccgtctgagaagtgaggagcccctccgcccggcagccgccccgtctgagaagtgaggagcccctccgcccagcagccaccccgtctgggaagtgaggagcntctccgcccggcagccgccccgtctgagaagtgaggagcctctccgcccagcagccacctcgtccgggagggaggtgggggggtcagccccccgcccggccagccgccctgtccggaagggaggtgggggggtcagccccccgcgcggccagccgacccgtccgggagggaggtgggggggtcagccccctgcccggccagccgccccgtccgggaggtgcggggcgcctctgcccggccgcccctactgggaagtgaggagcccctctgcccggccagccgccccatctgggagggaggtgggggggtcagccccccgccctgccagccgccctgtccgggagggaggtgggggggtcagccccccgcctggccagccaccccgtccgggaggtgaggggcgcctctgcccggccgcccctactgggaagtgaggagcccctctgcctggccagccgccccgtccaggagggaggtggggggggggtcagccccccgcctggcgagccgccctgtccgggaggtgaggggcgcctctgcccggccgcccctactgggaaatgaggagcccctctgcccggccaccaccccatctgggaggtgtacccaacagctcgttgagaacgggccatgatgacaatggcggttttgtggaatagaaaggggggaaagatggggaaaagattgagaaatcggatggttgccgtgtctgtgtagaaagaggtagacgtgggagacttttcattttgttctgtactaagaaaaattcttctgccttgggatcctgttgatctgtgaccttacccccaaccctgtgctctctgaaacatgtgctgtatccactcagggttgaatggattaagggcggtgcaagatgtgctttgttaaacagatgcttgaaggcagcatgctccttaagagtcatcaccactccctaatctcaagtacccagggacacaaacactgcggaaggccgcagggtcctctgcctaggaaaaccagagacctttgttcacttgtttatctgctgaccttccctcccctattgtcctgtgaccctgccaaatccccctctacgagaaacacccaagaatgatcaataaaaaaaaaagaaaaaaaaaaaatctgttcctctgtgagatgggcctgatctctcccacgggtggagcagaggagtagagggtccagggcctgagtctcccataggctaagtatttgccctgagtcataaagccagtgggaggcagtgctacagtttgattccaggaagtctcagaccaaagttctctcttaaccacttacctttcctgggcttaatagttagttcatttatgtttttcctggcactacttcattggacctcattttagtttctt

SEQ ID NO: 408950 - DNA, 362 bp, Homo sapiens
cctttatttcttattctttttcctggcctcagtcctaggggaagtgaactgtgtacccaggtgtgtatctggcatttctctagcaggtttttaaataattttatctatcataattattttcatcaggacagaaatctttccatattctttatcaagatactctatcatgaaaattgtcaaatatatgcaaaaacaaagagaatgacccttcatataccattactcagatacactgagtaccaagattttgtcatactcagttcatctgtcgtctccctcttttttgtcaaagtaaaaatctcagatgtgtcatttcacccttatttactttaggttatttctcagaaaaatggagagttctc

SEQ ID NO: 408951 - DNA, 257 bp, Homo sapiens
atcccagcactttgggaggccgaggcgggcagatcacttgaggcagaaggtaacacagttggtgagtggcttcgccgggatttgaacccaggtgttccctggtcgactgagagaaggatgtgagagtgggctgggtggaggctggttggtgttgaataaggcagagggaggagccccagagatgctgagcaggctctggcttgctgctgttaattggccagggagccattctgtacccccagtggcttaggcctgat

SEQ ID NO: 408952 - DNA, 231 bp, Homo sapiens
tcaaaatagtgatttcagttactctcgtataaagtggagggcaggaacgatggacagctatcatcttaaaagcttattggagtcagacgatggttcctcacatctgctgacctgtaactatggaataaacaactctgatgaccatttgttcattatcatactggagtcatgttcctgaggaattccagggcagtaaaaatttagaagctaaatgtttaactttccagaatg

SEQ ID NO: 408953 - DNA, 1024 bp, Homo sapiens
tctcgcgctgcaggagacaggacacctcaggccccacccgcttgcagcagaggcagcctcgcctacccctcgccaacctcgagtgctccaccgggagaacagccgaggcttagcaagtccctgaatgcctgtggggcagagccagcagtgctgagctacccgagcagactctgcacagcagactgctccggtcagttgcattccgacacgatcccacaggccaacagaacccagacatgctgggctctcatcccctggttctgggcccttcacaggctggctctgttgcaaggggcagtgctgcctgaagtggccaagccaccagatcccacaccaaccctgggcagtgtcttccatgaggacagcagaagatgagcggagctcaggcagagcccggggccagatggcctgccaggcagtgtcccgggaacagcttccatttcccaaagccggcctcacccctcggatacactgtgggccagtaaggcctcagaacctgcagcccagcaaggctggctatgctttgaggcaagacccatgaggacccagtgagcctctcagaggggctgaaggggcccaacagggtggggctgagcctgagggatgggaacccaacaacagctccctacagggccaccatcagaagctgaggcccggggcacagatgggccaagcctcagagtcagcatctcctggcgggcatggccctgagcggaggccagaatctctaggacaccagctcctcgtcccggagggccatgtcaaagagaggtgtggaagaatgcgactgggacgggggcgaggcagatcgcaggtgaagggacagtttccggcacctgatggggcgtggagggaggcagaagccagactctctggcctgcccaccctgcgcctcagaaccagcccagctccaccaaccggcatggccacctcccccttgggacagcaggaacaagccaggcaacgctctacagagagcagagatgctgtccggggtggacagggaacactggatggctcccag

SEQ ID NO: 408954 - DNA, 1334 bp, Homo sapiens
gtcagggtcatctttctttttaaagaattaagccatattttgtgagggccagaacttgcattatttagtatatttcccccttcccccaatggaaagcaaagttaaaggtaaagtacatatttcaaaacaattttattgacctctttatacagaattttacttggaaaactttgggggctttgaatgcattacataatatttatattgtattgagcttttttattcctcacactatatttacattaataaattgattgagaagtttatagtaaagggaaacttacagaacacttttgtatcatttaaaagatgacctgaccaaaaactttacaggattcataaatcagggatcattttgctattgacttcacagtaatcagtagttttataggtaatattatagttaatttgcagcattttagtacttgtattatttatttttggtcagaaatagtaaattaaaatattttttgatagtttataggtaataatcaacccataacttttaaaagaaacaaaacatttctattattgagttaacatttgattatacaaactaggaaaggcagggaaattccccttctccccagtgattctattaagatgacctttatgttaaactttcaaagtactttatgaatttagttaccagttactatttattaattgacaattttctgaaaaatcccgtttcagcagacttaatgaaggtgaaagcaacccttatgtgctttctacttatttgaatgttcctcaagtattttatattaaaaaaaaaaaagaaggaaaagagaaaacagtgcctctgtttttagaaaactactgctcagtaaagttgtttaaaccatttctggtagctaatgacaattttatattaaattgtatactaactttagtgagactgatttttttagttgtttacagtacaaatacttgtatttgttttttaattgcagtatttccaatgtcgcagtaatttagtaaaactctgtggctgccttgattttgacagattttgttaatataaactgattgttaggcaattagttatatttatgcataaatcaattgcactataattcatgaattatttattacaatattttctaatgaattcatgtatctgtcttgtgttgtaaatgtactgtaattctgttcctactttgtgttgttatatatctaaatctgattgtatgaattttaattgttcagttaacgtgtttctaggttgtaatttgtagtaaagcacttcaatgcttttgcacttaaatttacaacactgttggtgtgtgattgatttactcattcagtaaaagaaaaaaagaaaagaaaag

SEQ ID NO: 408955 - DNA, 564 bp, Homo sapiens
ttcctgattactcacaggtgaagttcagagataattttagcccattccagaaattcttcagtttttttttaaatttagttatttctgtaaaataatgtccatttgaagatgtacttgtgaaaaatatgatttgattttggtgactcttgtgtccactccttgaacctacattctgataaaaagttaaaatccttatgtgacagagatggaaatgtaagtatgaggtggaggaaaatgtgttttccgtagccagggtggagtggaaccaccactatgtggaagtggaaactcccattccgtgtgatgaagaaatgcttgtggcatgcagggcagatggagtgtgaaatagcttcaggacaagaggtacccagggaccttgtttggcattctggggaaagaaaggactttaattggtctggcttttttccaaaaagttagacagagtcatctagcaagctgctgtcttctttttcattgccttcaacaacaagcactttataaagcaagtgacaagtttttcttttttgaaaccagagtttaagatttacatgaccagaaagttct

SEQ ID NO: 408956 - DNA, 618 bp, Homo sapiens
ttcctgattactcacaggtgaagttcagagataattttagcccattccagaaattcttcagtttttttttaaatttagttatttctgtaaaataatgtccatttgaagatgtacttgtgaaaaatatgatttgattttggtgactcttgtgtccactccttgaacctacattctgataaaaagttaaaatccttatgtgacagagatggaaatgtaagtatgaggtggaggaaaatgtgttttccgtagccagggtggagtggaaccaccactatgtggaagtggaaactcccattccgtgtgatgaagaaatgcttgtggcatgcagggcagatggagtgtgaaatagcttcaggacaagaggtacccagggaccttggtttaaaattgcaatttcagaaggaatgcaagcaaacttctggatttcagacagtttggcattctggggaaagaaaggactttaattggtctggcttttttccaaaaagttagacagagtcatctagcaagctgctgtcttctttttcattgccttcaacaacaagcactttataaagcaagtgacaagtttttcttttttgaaaccagagtttaagatttacatgaccagaaagttct

SEQ ID NO: 408957 - DNA, 675 bp, Homo sapiens
aaagatagaaagatggagataaaggaagagatggagagagatccagagccggggtgggtgataatccaagttggggagaaggagggatagaaactgaatctgctagaggctgggcacagtggctcagacctgtaatcccagcactttgggaggccgaggcaggcaaatcacttgagataaggagttcaagaccagcctggccaacatggtgaaaccccggctctactaaaaatacaaaaaaaattagccaggcactgtggcaggtgcctataatcccagctactcaggaggctgaggcaggagaatcacttgaacccgggaggcggaggttgcagttagagttaatcgagatcacaccactacactccagcctgggcaacagagcgagactccatctcaaaaaactgagtctgctagaggatgccacaaacagctgggggtaagattgctggcaggagtggggaagctgagcaggacagggacagtcacagcctatggtgctgcagaggccaggagtccgagcagtttctttgccctggactctgaagacacggctaggaccagtggaggggagggaccagggcaggtttaactgttatttgagggacagagtcactcgtgcagaaacaggcagccaggggtgatgcagggaactcaagttttggggtagtgggg

SEQ ID NO: 408958 - DNA, 328 bp, Homo sapiens
  misc_feature (289)..(289): n is a, c, g, or t
  misc_feature (310)..(310): n is a, c, g, or t
gtggaggttgccatgagccaagattgtgccactgcactccaccctgagtgacagaacaagactccatctcaaaaacaaaacaaaacaaaacaaaaaacagaaaatccaaaagaatctatagggaacttagaacaaatagagtagttcagcaaggattttagataaaagaacaagaaacaaaaattaatggcaattctttttactagaaaattaattaaaaatacattcaggccaggcacggtggctcacgcctgtaaccccagcactttggcttcccagagtgttgggnttacaggtgtgagccaccgtncccggccaaattcccttt

SEQ ID NO: 408959 - DNA, 347 bp, Homo sapiens
gacctctgagggttgtggttatgtgttgagaatgaagtctcatcaggaatgagtgagcttgtttcttcctctaacccctctccatggggtggaaagtaggggcagagcatgcagcagagaatctgttcttgtggcccagggatgtccagtgtctgatcagtactctcatcatctcttgtcaatgacagctcactctacggaacagtggtagtcaactggaaaagctgcctcgtgtcatttggatgccactttccccagtgccgcttgagtccatcatcatggccatagattccacccctgccccctgtttgtgtggcaggactgtttcctataaatcctatatgacc

SEQ ID NO: 408960 - DNA, 272 bp, Homo sapiens
atcatttgtagtacactcaagctaacctactctgtaatattatccttgatcttttgctcctttgaagaaagaccttcaaaatacctagtttttgtatcaattgttgattactctagtttttaacttttttggagcgcttatggtgagggttacatagctgagagctgctcagtgtttcaggggagcttcagccgtaggtgggaagcagttgaagcaaactgtaacaaagaagtcacttccatcagaaaataaaattcccaccagctgttaaa

SEQ ID NO: 408961 - DNA, 296 bp, Homo sapiens
taaatttcatgtgttcagaatgttaaagacaaaagccttcctgacaaaatgaaggcaactttgcaaatgtgagaccattcagtcagtgcccccatgggtgctcctgagagcagcatcgcgctgggataagtttttcctctttgctgtgtgaagagagggcatgtggagtctacggaaaaatactaccaagtgaggaagaggaacatcatcctgagcacttgaagaaagagcactctgatgaaaacaattcacaaatcagaagaaaggtttagaaaattgaggtcaggtggtggtgg

SEQ ID NO: 408962 - DNA, 196 bp, Homo sapiens
atacccaaggggctggggtttcggccaccctgtggcagagcttttagaagccagggcccttggctcggcagtgctggctcatagtaggtgcttagttcatgcctgtctccttggatgaaatctgaccatagacaccagtgcaaagcaggtgttcaacacaggagggtgtactgaacccgatctctctatcaccagg

SEQ ID NO: 408963 - DNA, 533 bp, Homo sapiens
gaaaaatagactcatgaatgtcaggtccatggagtgtgattagggctgcttaagaaaatagctgttaattcttatgctgcctgatggattgagagtggctgcctgaggctctgtgttgaggattctaaggctgtatctgggctcattaggaaagagtattcttctgattgactagcagtgtctctcacggatgcaggcttagagaagcacagcacatgtgccttggcaaaggcagtcctggatcatcccttaatgctaagtcccattggccccatttgttcaaagagagggtagaaaaggtgaaaggattaaactgagttggtgttatcagaagtattttagccatggaacctttttttaaaaaacaagatcttggaaatctaatgtagaaacaggtaaaagcagaaacacctgttgaagcagcgtttggggccaacttgtttggtgttgccccttatgcccccaagaccctgaggtacttccctttaacccctatggttctgggtaagattgaaaatcactggctcaggaca

SEQ ID NO: 408964 - DNA, 365 bp, Homo sapiens
tacttgtacatgtcttttggagcacacgtgtacacatttctttctgtatatactgggagtggaattgctggggtgtggtcatggatacacatctgttcaactttttagtaagtttaaattcttctgaacagttttccaaacaaatgaaccgtcttatactctcaccagcagtatatcaatgttctgctttctccacatctttgaaaatacttgacatcatcagtttaaagaatattttcattactctcataggtaatatagtggcatttgattgttgataattgtggtttaattttccattttctgattgctgcctatttgtatattcttgcaatttctcttcgctccttgctccgggcattgga

SEQ ID NO: 408965 - DNA, 297 bp, Homo sapiens
tttcaagcttccatatttgtgaaacagaaatcaaatatgcttttgagagcatactttaagcccaatggaaagaacatccaaacatgaaccactctttgcacatggcagcagaagacctcgctgcaagttctgctccctgtagaataccaacagagctaaatcagactctaaaggcatatgttgcctgatatcactttattatgggaattcattttgtgagtgttgggggttcacaggagccaaatcattcccttcttcccttctaggttagatccaactagaaacatacacagtact

SEQ ID NO: 408966 - DNA, 495 bp, Homo sapiens
caaaagaccttgcaaaagccggatggacaatgggataagggagaggaaggagtctaagattgcacatctttgtcagtcatatgcttggtggcatcttgagcagaactagagggaagagaagtgaagtttgggacaggagtgggaatgggtgtgaccttagacttggttaatttgaaatggtactaacatctccaggtgggagagttagcagaagattggaattgggccaattaggggaaaggggtaggctgaagctagagagagacagagagatgcccttttgaaggtcatcttcacagaggtaacaattgaagctattgaagcagctgagatcacagcagaaagccaggaacacaatcctagggaagacccacatttattgggtagaagtcagatgtggaaccactagaagaagcagacatacatttagaaatagtaacaaaagcatggtggtgtgatattaaggaagcctaggaaattcaaggtaaaaaaaaa

SEQ ID NO: 408967 - DNA, 470 bp, Homo sapiens
agtgctacctccacaaacagccaattaagaaataatattattcaaatgaaaccggctaatttttttgtatttttcagtagagacggggtttcaccgtgttagccaggatggtctcgatctcctgaccttgtgatccgcccacctcggcctcccagagtgctgggattacaggcgtgagccaccgcgcccatccgcaactgtagttttatattttgccacccatcacatccaacaaccaaactgaactgatttatcctttaaagaatctatatttacccacacccatagccattctagaaacagaatgggaatgggtgttctttacctcactaactgtactcattttgccacctaaggcatctcacactatattcaactaccagaattatacttgtatgtaacgccattcctccccctttaaccttttgtttcatttgatttctgtattaatcaacttcactgcagaaaca

SEQ ID NO: 408968 - DNA, 223 bp, Homo sapiens
ggaaatcctcaatttatatgacttcttaagttttgtttgttacacactttggtttctcatagtaataatgcagatgatgaattattctcagttaatagggttaaaaatgtattattgggtttccacttcttaaaatctgtattcacctcctttcccttctgatgccccagcaaaataaaatgtttaaaaatgagaaatgaagaagccagtaacagtaaatagg

SEQ ID NO: 408969 - DNA, 247 bp, Homo sapiens
caaagagtctgagatacaattagaactgggacctctggtgaagttaagttgaattgtaatcagttggctatacttgtcgtcttccctccctcacaccccaggattactgtatttctgagtcagcactccttttctatctcacctgctcaatttgatgcagagaacttgccaagcatccttttggattagcagcattgatgtgggtgtgttcagttctctgtctggggtgtgtcttttacaacttttt

SEQ ID NO: 408970 - DNA, 222 bp, Homo sapiens
gtgaagacaaaccagctgcatcaaactgcaggcacctcaggaatcagcagatcatgcagggcacaaagaggtgaaaccagtcaagtgtacagtggagacgatttctcaattttttttccttggaatactagcatcactcaaaaatgtcaatagtgtttggtgaacaaaataagctttttaaattaaatgtacagaaatccctgcttatcagaatgacacctt

SEQ ID NO: 408971 - DNA, 233 bp, Homo sapiens
agaatttactatacgtaacattgttttttacataaaaaaacatgatactcaaaatgtgttgaatgacttacacatttgcattttacatgtattatttcctatctcttagtgctttctgttggatgtttttacactaggaagtttctgtactataacagagcacatctacgaaacatttaatccgattcatttccttgcatgcctaatcgataaagagtaatgcataaaaacac

SEQ ID NO: 408972 - DNA, 319 bp, Homo sapiens
gtattttccctgccccagccctacaatcagctatttctcaaaggagtcttggttccttttattggatttagcaaccaagatttgggttctggatttagcaaccaagattgctacgggagtgtcattgcttcttttagcttacagaactagaaaatgtatgtatgtaggtataccaactcacatatgcgcacatctgtaattatgtatccacctgtacaattattaacctaaacatgaattccattagatatctgttagatgtctccaactgtaatctagtaccacaaagttcattcttgccttttctttttgcttatct

SEQ ID NO: 408973 - DNA, 254 bp, Homo sapiens
cagcctggcaatagaatgtccagggacacctcccactggcacctctgaccggctgcatgccatggagttagatgcttccgttctttttcctcagtttcctcacctggggaggagtttcctggtacattgtgaagatggttgagcatgggactgagctgcagtggccagtggagtaagttcttcaatgggagtggctgagcccagcactttggtggggtctgaatgaggccaatagaggaatatttagttcacaa

SEQ ID NO: 408974 - DNA, 426 bp, Homo sapiens
tgcacacgccgagtgaccagacccggccaacatcatcacttttgaatgaaatttttagtttggtgatgactttattatttgtatttgatccttgtccatttttctctagatctggtactaatttcatgtggaaaataaatcgttaggaggttttcattttgtacgttttggctgcaaacaaccacaacccagtctttaggttttcactgagggatttttgttttagcccaattattgtatgacatgtatctgctccagaggttcttataggtgaaatgagatttttatgtatctgtattcaaacacatagatagatagatagatagatagatagcgaaacatatagacatacctctgaaaatacaaccagccatataatgtaagcctgttgtgtgttaatgaatgatagggtaataatacattatg

SEQ ID NO: 408975 - DNA, 346 bp, Homo sapiens
cacactttacaagaaggaaacagaagtctagggaagtaggtaattaacattacccacaatccgtgggcaggaccgggatttgaattggcaatgtggctccagtgcctgggtgctccacattgggagatggtcccatcaggaggtcgtctcttgacatctccaacaagccatccctttgccatgttactaccattccaggtagcctgagtgcccccaagtgaccaaggaaaagcttacccttagagggtctttactcccaatgccccccaccttcccatcctctacctttttgttgtttaaaattcagctgacctgttagttgccacctgggaaggtctgaccactt

SEQ ID NO: 408976 - DNA, 242 bp, Homo sapiens
acaggtaatgagtcctagaatcaactttttttttttggatggagtcttgctctgtcgcccaggctggagtgcagtggcgcgatcttggctcactacaagctccgcctcctgggttcacgccattctcctgcctcagtctcccaagtagctgagggggaaggatcaattgagcctaggaggtcacggctgtggtgagtcgttatcagacactccactccaccctgggcaagagagtgagacct

SEQ ID NO: 408977 - DNA, 197 bp, Homo sapiens
aaagaatagaattgaggcatactgcgtcttaactacacagttttttgagagtgtttcacgtccatgtttgtacttatttaatgcccaagaatgccacaactatctcattttgtagttttgtacatggtaaatcttacagtttcatgagtttgtttaacatgtactcaatgaagtattcttaaaccatttattttatt

SEQ ID NO: 408978 - DNA, 247 bp, Homo sapiens
tgcatgcctagccatgggaaagcacagcctccaaaggataaggaaagctttttgagtaaatacaacatcctaaagtgacaatctttgaaacaaggccgttcacctgttgccaagtcctgtccttccaggaccgggtgtcacagcctggatgttaacagtcgcgttctcagacccccgcctctgtatctgtctcccggttcaccagcaaacacttctctgagaaaccacctgggtgcagggcagatgc

SEQ ID NO: 408979 - DNA, 759 bp, Homo sapiens
actatactttaggcataaaaaatatctgggcagagggaaccaaccatcccaaatttacacagaaagatttaattctttggtgttattatatccatcctcaccaaaatgaagcttaacgccaaaatatagaagtaagaagaagaaggaaatcacagtatagtctgtgggttaaattaattttgtcacaagaattcatttggaagatgcttctcatatatctacagagttgaccaaatcccctcccagtgaccttccatttagttggaatatctaagcagacataaatagtaacatcagggcacttcagaatcttcatccgatttatatcttcataggtccatgtttctattttcaaatgtcctttatttcaaagcagcatgtcactaaaaaaaagaaatgggcaatcatcattcctcaaaagatacgtgcatttggttgggcaaaatcatccaggctaccagttggataataaaagtcgaaatgtactatttgattttttcctatgtttccaagcaagtatttctcaccagacactgcccccatcatatcccctttcctcttctcgaattagctggttttcttagtgacaatctgaactcatgaggttgaattcaccattgcttacttcctggtagtccataaaaagtaccctagagaagtaagagcccacagggatagagtttgcacaataagattcctgaaagcctgcatgttcctgtaacattccatttacagaagactccagccaatccaatgtaa

SEQ ID NO: 408980 - DNA, 400 bp, Homo sapiens
aaagcatgttatttagaaataggctaaataccagaagaagctgctgtgtgagtcaaaagtgactccttccagaacttgggaatgggaggaggaaggggagagagacagctccagaggagtcagttacatggcttcctcccaggccactcctagagtcgtgcactaggtgtgccctagttacaaaccttgtcctgtcagtatttgactttttaaatgatgcatacgtattgctttgataaaaacagaaacaaagattgttctgaaattagtaacatccgtaacttcaaagatgattattacaggtgacaaaggtaatcaaaagttattttaaacttttgtctttaagcattgaaatgatattactgtctgtcacgacaatcttttcaatttggaattcttc

SEQ ID NO: 408981 - DNA, 336 bp, Homo sapiens
tttatttacaaagggccagataataaatattttaagtctgtcataactgctcactctgctgtcagagctcaaaagcagccataaactttagggtaagtaacaagtgggcatggtttgatgtggcctgaaggctttggcagcctctgctattgacagtaagttctgtagattttgtgaactggttgtgaaaggtttttctgaggagttacaactggagtggagaatgagcagttgaataaaaggagcaattgaataaaaggacaaattaggttgtgtatggaatgcttaggagacatcgaacaaatcagcctggctagtgtttagacacttcattcc

SEQ ID NO: 408982 - DNA, 250 bp, Homo sapiens
gagaaagccaacagtcatagtgcgggaggaggcacgcctgggatgcaatacccaacagtctcctccctgctttcctgcaatttgcaggtcattgtctttcttatttgtagctttttttttttttcttcagtagccggtaaacaatcgaacgccgggtagggaggtcagaggggatggggctgtgggagagattctactcaggctaggtgctttagatttggacctggctgtgtccctactttattaaaat

SEQ ID NO: 408983 - DNA, 569 bp, Homo sapiens
  misc_feature (62)..(62): n is a, c, g, or t
attattttctgggatctattatttggtatgttggaaatcaagtacaaagctacgtaaaaganttcttcatattgcaaaaacattaccgcaatactttgtaaaataagggctatagcataagaaaagatcacagtcccacaactcaagcaatcctcctgcgtcggactctcaaactgctggggtactgcacctggccctgtcactcatatatgtaatgatcatatctattaattcttcggctctttttaaagattaagttggaagaatttttaccaaacttgagttgaaaacagcattattgcccttgtgaatccacagaacatgcttccaaagaactgcccttcattcatctctgtcatgccgtttgcaaacttaagcttcgagggcctttctaagtctctcttctacacactttctttttgcttgttggcacttgtatgtcacagagtagcgaatgccttttatggctgagcagtttttcagactgttaccttttcatcactacacctcaacactagcatttataatacattccaagcagtcacttcaggttatgatggttttgtgct

SEQ ID NO: 408984 - DNA, 2221 bp, Homo sapiens
  misc_feature (1060)..(1060): n is a, c, g, or t
ctcttggaacgcctccctcttgccttccccttttggggacagatcccgaagttcgagcatccctcggataggccgggtgtcaggcctggtctctcaggcccgtccaggcccatcttgacgattccaagaccacccccttgagcaagaatgccatcccctctgggtcccccatgcctgcccgtcatggacccagagaccacccttgaggagcctgagactgcccgcctccgcttccgagggttctgctaccaggaggtggcaggtccccgagaagccctggcccggctgcgtgagctgtgttgccagtggctgcagcctgaggcacactccaaggagcagatgctggagatgctggtgctggagcagttcctgggcacactgcctcccgagatccaggcctgggtgcgcggtcagcggccaggcagtcctgaggaggccgctgccctagtcgaaggactgcagcatgaccctgggcaactgttgggctggatcacagcccatgtcctgaagcaggaggtgctccctgcagcccagaagacagaggaaccacttgggagcccccacccctcagggacagtggagtcccctggggaaggtccccaggacaccagaatagaggggtctgtccagctcagctgcagtgtgaaggaggagcccaatgtcgatggacaggaagtggcaccctccagccctccacttgcagcacagtcccctgaggggaaccatggacaccaagaaccagcctccacatccttccacccacccaggattcaggaggagtgggggctgctggaccggtcacagaaggaactgtactgggatgcgatgctggagaagtacggcacagtggtctccctgggtgaggaccagccagccccaccccgcccctctccctggggcctgcacccaccctgcagcaggcctagctgggcagggcctctgtgctaccagccctacccagctctcccaccttccagaggaacaccctgtcacctaccagaaccgaccccacccctccttcatgcaaaccccatgcctaactgtgccccccacccgggcngggttaccgccccaccagccagaggcacaggcccagtcagagctggggatgctgctcacggggacaggcgtctgcagaagcctgcgctcgggaaatgagagtgagggtccacctggctgcccagaggcccagccgccccagggcccagggccggcagcctgggagggcttgtctggggctgccactcctgcccccactgtgcgcccagggacaccgccagtgcccactcagcccacacctgcagagacgagactggagccggctgccacccccaggaagccctacacgtgcgagcagtgtggccgcggcttcgactggaagtcagtgttcgtcatccaccaccggacacacacgagtgggccaggtgtgcagtccccggggctagccaccggggaaagcacagagaagccaccacaaggggaggtggcctttccgcaccacccccgacgctcactcacaggcccccggagttacccgtgtgaggagtgcgggtgcagcttcagctggaagtcgcagctggtcatccaccgcaagagccacacaggccagcggcgtcacttctgcagtgactgtggccgcgccttcgactggaagtcgcagctggtcatccaccgcaagggccaccggccggaggttccatgagcagccagacagcacagtccctcggggcctcggtgttctcggggcctggatacagcctctggggcaccagcagaagactctggaggcagcaggggatgccagagtgaacaaggggtcccaagccagttccctgcccctggtctggtctcccccaaaagacctgggtgcaaggaaaaggagctgctctctctcttcttgcccctgcctcctagagggaggtctgggttcccttctatggctgaccagtgcctgtggggtgactgccaagcaccaggctccctccctccctgtgacatggcctgggctgacaacactccctctcctgggacctccttgcctcaggtgggtgttcaaaaactgtgccttcccactcgtctgtgcagaggctgggcctgaggtctcagtgtggagagcagcagaagacccaggaaagcacagttggcttccgtttctcctgctccctgtgtgtgttagaattttaacataaattccactttcataataagaaaaaaaaataag

SEQ ID NO: 408985 - DNA, 2373 bp, Homo sapiens
aggcgggcggatatgccctagcgttatctaggggctggcccggggaatggcgtgggggcggcggggccaagcaagcgccacctctgattgggcaaaaccccctcccctcacctgccaatagaaaccggcccactgtacagacgcgcaagtttataacccgggaagagctgctctcagagcggagggagaccatataaccctgggactctgccgtacctcctagaggaacagagcgcctctcaggcgtcagaggctgctgcaaatgcgggtcagcgggtcacggtcgcgcctgtcttgctgatgctcatgggaaatgtagttcaaagggcatgggcggtgccttcggtgcaggcgagagattggtcagcgcggcgtcgccggggcaacacccggctgaggcgccccgcgttgtgcggcgccacatccgggaagcggcctccaagcaaccgctccgggttgaggcccatcttgacgattccaagaccacccccttgagcaagaatgccatcccctctgggtcccccatgcctgcccgtcatggacccagagaccacccttgaggagcctgagactgcccgcctccgcttccgagggttctgctaccaggaggtggcaggtccccgagaagccctggcccggctgcgtgagctgtgttgccagtggctgcagcctgaggcacactccaaggagcagatgctggagatgctggtgctggagcagttcctgggcacactgcctcccgagatccaggcctgggtgcgcggtcagcggccaggcagtcctgaggaggccgctgccctagtcgaaggactgcagcatgaccctgggcaactgttgggctggatcacagcccatgtcctgaagcaggaggtgctccctgcagcccagaagacagaggaaccacttgggagcccccacccctcagggacagtggagtcccctggggaaggtccccaggacaccagaatagaggggtctgtccagctcagctgcagtgtgaaggaggagcccaatgtcgatggacaggaagtggcaccctccagccctccacttgcagcacagtcccctgaggggaaccatggacaccaagaaccagcctccacatccttccacccacccaggattcaggaggagtgggggctgctggaccggtcacagaaggaactgtactgggatgcgatgctggagaagtacggcacagtggtctccctggggttaccgccccaccagccagaggcacaggcccagtcagagctggggatgctgctcacggggacaggcgtctgcagaagcctgcgctcgggaaatgagagtgagggtccacctggctgcccagaggcccagccgccccagggcccagggccggcagcctgggagggcttgtctggggctgccactcctgcccccactgtgcgcccagggacaccgccagtgcccactcagcccacacctgcagagacgagactggagccggctgccacccccaggaagccctacacgtgcgagcagtgtggccgcggcttcgactggaagtcagtgttcgtcatccaccaccggacacacacgagtgggccaggtgtgcagtccccggggctagccaccggggaaagcacagagaagccaccacaaggggaggtggcctttccgcaccacccccgacgctcactcacaggcccccggagttacccgtgtgaggagtgcgggtgcagcttcagctggaagtcgcagctggtcatccaccgcaagagccacacaggccagcggcgtcacttctgcagtgactgtggccgcgccttcgactggaagtcgcagctggtcatccaccgcaagggccaccggccggaggttccatgagcagccagacagcacagtccctcggggcctcggtgttctcggggcctggatacagcctctggggcaccagcagaagactctggaggcagcaggggatgccagagtgaacaaggggtcccaagccagttccctgcccctggtctggtctcccccaaaagacctgggtgcaaggaaaaggagctgctctctctcttcttgcccctgcctcctagagggaggtctgggttcccttctatggctgaccagtgcctgtggggtgactgccaagcaccaggctccctccctccctgtgacatggcctgggctgacaacactccctctcctgggacctccttgcctcaggtgggtgttcaaaaactgtgccttcccactcgtctgtgcagaggctgggcctgaggtctcagtgtggagagcagcagaagacccaggaaagcacagttggcttccgtttctcctgctccctgtgtgtgttagaattttaacataaattccactttcataataagaaaaaaaaataag

SEQ ID NO: 408986 - DNA, 2019 bp, Homo sapiens
ctcttggaacgcctccctcttgccttccccttttggggacagatcccgaagttcgagcatccctcggataggccgggtgtcaggcctggtctctcaggcccgtccaggcccatcttgacgattccaagaccacccccttgagcaagaatgccatcccctctgggtcccccatgcctgcccgtcatggacccagagaccacccttgaggagcctgagactgcccgcctccgcttccgagggttctgctaccaggaggtggcaggtccccgagaagccctggcccggctgcgtgagctgtgttgccagtggctgcagcctgaggcacactccaaggagcagatgctggagatgctggtgctggagcagttcctgggcacactgcctcccgagatccaggcctgggtgcgcggtcagcggccaggcagtcctgaggaggccgctgccctagtcgaaggactgcagcatgaccctgggcaactgttgggctggatcacagcccatgtcctgaagcaggaggtgctccctgcagcccagaagacagaggaaccacttgggagcccccacccctcagggacagtggagtcccctggggaaggtccccaggacaccagaatagaggggtctgtccagctcagctgcagtgtgaaggaggagcccaatgtcgatggacaggaagtggcaccctccagccctccacttgcagcacagtcccctgaggggaaccatggacaccaagaaccagcctccacatccttccacccacccaggattcaggaggagtgggggctgctggaccggtcacagaaggaactgtactgggatgcgatgctggagaagtacggcacagtggtctccctggggttaccgccccaccagccagaggcacaggcccagtcagagctggggatgctgctcacggggacaggcgtctgcagaagcctgcgctcgggaaatgagagtgagggtccacctggctgcccagaggcccagccgccccagggcccagggccggcagcctgggagggcttgtctggggctgccactcctgcccccactgtgcgcccagggacaccgccagtgcccactcagcccacacctgcagagacgagactggagccggctgccacccccaggaagccctacacgtgcgagcagtgtggccgcggcttcgactggaagtcagtgttcgtcatccaccaccggacacacacgagtgggccaggtgtgcagtccccggggctagccaccggggaaagcacagagaagccaccacaaggggaggtggcctttccgcaccacccccgacgctcactcacaggcccccggagttacccgtgtgaggagtgcgggtgcagcttcagctggaagtcgcagctggtcatccaccgcaagagccacacaggccagcggcgtcacttctgcagtgactgtggccgcgccttcgactggaagtcgcagctggtcatccaccgcaagggccaccggccggaggttccatgagcagccagacagcacagtccctcggggcctcggtgttctcggggcctggatacagcctctggggcaccagcagaagactctggaggcagcaggggatgccagagtgaacaaggggtcccaagccagttccctgcccctggtctggtctcccccaaaagacctgggtgcaaggaaaaggagctgctctctctcttcttgcccctgcctcctagagggaggtctgggttcccttctatggctgaccagtgcctgtggggtgactgccaagcaccaggctccctccctccctgtgacatggcctgggctgacaacactccctctcctgggacctccttgcctcaggtgggtgttcaaaaactgtgccttcccactcgtctgtgcagaggctgggcctgaggtctcagtgtggagagcagcagaagacccaggaaagcacagttggcttccgtttctcctgctccctgtgtgtgttagaattttaacataaattccactttcataataagaaaaaaaaataag

SEQ ID NO: 408987 - DNA, 1193 bp, Homo sapiens
aggcgggcggatatgccctagcgttatctaggggctggcccggggaatggcgtgggggcggcggggccaagcaagcgccacctctgattgggcaaaaccccctcccctcacctgccaatagaaaccggcccactgtacagacgcgcaagtttataacccgggaagagctgctctcagagcggagggagaccatataaccctgggactctgccgtacctcctagaggaacagagcgcctctcaggcgtcagaggctgctgcaaatgcgggtcagcgggtcacggtcgcgcctgtcttgctgatgctcatgggaaatgtagttcaaagggcatgggcggtgccttcggtgcaggcgagagattggtcagcgcggcgtcgccggggcaacacccggctgaggcgccccgcgttgtgcggcgccacatccgggaagcggcctccaagcaaccgctccgggttgaggcccatcttgacgattccaagaccacccccttgagcaagaatgccatcccctctgggtcccccatgcctgcccgtcatggacccagagaccacccttgaggagcctgagactgcccgcctccgcttccgagggttctgctaccaggaggtggcaggtccccgagaagccctggcccggctgcgtgagctgtgttgccagtggctgcagcctgaggcacactccaaggagcagatgctggagatgctggtgctggagcagttcctgggcacactgcctcccgagatccaggcctgggtgcgcggtcagcggccaggcagtcctgaggaggccgctgccctagtcgaaggactgcagcatgaccctgggcaactgttgggctggatcacagcccatgtcctgaagcaggaggtgctccctgcagcccagaagacagaggaaccacttgggagcccccacccctcagggacagtggagtcccctggggaaggtccccaggacaccagaatagaggggtctgtccagctcagctgcagtgtgaaggaggagcccaatgtcgatggacaggaagtggcaccctccagccctccacttgcagcacagtcccctgaggggaaccatggacaccaagaaccagcctccacatccttccacccacccaggattcaggaggagtgggggcaggtggcacgggaccgaaaggacgtgcctgggattgcacgtggcgacagaag

SEQ ID NO: 408988 - DNA, 723 bp, Homo sapiens
agccaagtcactggggcggtggggacgatacttctcatttgtagcctttcaatttggtgctctgtctggctgttttgagagctaaactccccattgctcttctggaaggagagctcgctgtccagtactgcgcgggatgaccgagtgaacaggggactggagacgagatgtggctggagactgagagaagcagaggagtcacactccactcacctccacctcccaaagtgccgggatcacaggcttgtgccactgcgcccaaacataactgaaggttttacagacatgtctgtggcaccacagaacacgaacggtcccaatggaaaccccacgcccaatttcctcagggaactgctgtggcggaggcttgcaccccacgtggtggccctaggtacaacggattccggcgggcagagcgccttagatcccgagtctgcagcccagggcagagtgccaacttctcctcatcccttcgtacgccatagaatggaaagacactggggctcctctgttaggagcgtaggagggacaggctggacaaaagggctcccgaacagcaggttcggaggagagcaacccggccctgacccccgcccccaacaccgttcccgacctcgctccccaatatcccggctctgcaccaattcctcccgcaagccaaggaaccccgaggcactcctagtctctaaaccgtttatttctccccaccagaaggttggggtg

SEQ ID NO: 408989 - DNA, 728 bp, Homo sapiens
ggaaggggtgccccatcccaagatgggtgccacccttccagactccctggagcttctattctccttcctcttcctaatcttcaccccacccagccccattgctcttctggaaggagagctcgctgtccagtactgcgcgggatgaccgagtgaacaggggactggagacgagatgtggctggagactgagagaagcagaggagtcacactccactcacctccacctcccaaagtgccgggatcacaggcttgtgccactgcgcccaaacataactgaaggttttacagacatgtctgtggcaccacagaacacgaacggtcccaatggaaaccccacgcccaatttcctcagggaactgctgtggcggaggcttgcaccccacgtggtggccctaggtacaacggattccggcgggcagagcgccttagatcccgagtctgcagcccagggcagagtgccaacttctcctcatcccttcgtacgccatagaatggaaagacactggggctcctctgttaggagcgtaggagggacaggctggacaaaagggctcccgaacagcaggttcggaggagagcaacccggccctgacccccgcccccaacaccgttcccgacctcgctccccaatatcccggctctgcaccaattcctcccgcaagccaaggaaccccgaggcactcctagtctctaaaccgtttatttctccccaccagaaggttggggtg

SEQ ID NO: 408990 - DNA, 830 bp, Homo sapiens
  misc_feature (40)..(40): n is a, c, g, or t
atatatatatttagagtaatgtataaaattaaattaaaanaatattaatctagctgatctactggctgacctttgccgtgggccgctccttccgaggcttcggctacggcctgacgtttctgccactgctgtcgatgctgatgtggaacctctactacatgttcgtggtggagccggagcgcatgctcactgccaccgagagccgcctggactacccggaccacgcccgctcggcctccgactacaggccccgcccctggggctgagcctctccgccctcgccctcggagtagggggtagcggcttgggtctgacacatctttgaaccttgtggccaggcctggacttcgcccccaggcctaggaccgcgggcagccaaccagtcagaatgcctctcatttaggcctgcaagtcccatccaagggaaatgtgtggagatgcaagaaggcaacaccaaggggaccttatcaatagccctgtcccctgcccgcctccaaagtcccccaacaaagtatgaaggaagccccacctgggggtctccaggaagtcgaggctggcctctgaggttccacagaaaagcaagatgggggagtgaaggggccggctggaacttgatgctccaacctccagagtttcgaggcacagcaagacaggttcagtaatgtccttccctccagagagcgggccttaatttatggactggtactctgagtacttcttggggtgcagcagcagaaccaagccgccccctagcagcatgagccctggggcacccagggccactggcatgatgcccaggactaggggggacaagccgtccactggaggga

SEQ ID NO: 408991 - DNA, 2215 bp, Homo sapiens
gttgccagaactaactctgggcagcatggcgtctttccggcttctccaaacccttgcgaaaaactttattggcaaagctatcagagaacggacagtgtacccactgaggcggccaaagcttaactggatcagggcaggatgacatgaccttgtggtagatcccagaactgaggccccaggatgacagaacaggagaccctggccctactggaagtgaagaggtctgattccccagagaagagctcaccccaggccttggttcccaatggccggcagccagaaggggaaggtggggccgaatccccgggagctgagtccctcagagtggggtcttcagctggatctcccacagccatagagggggctgaggatggtctagacagcacagtaagtgaggctgccaccttgccctgggggactggccctcagcccagtgctccgttcccggatccccctggctggcgggacattgaaccagagccccctgagtcagaaccacttaccaagctagaggagctgcccgaagacgatgccaacctgctgcctgagaaagcggcccgtgccttcgtgcctattgacctacagtgcattgagcggcagccccaagaagaccttatcgtgcgctgtgaggcaggcgagggcgagtgccgaaccttcatgcccccccgggtcacccaccccgaccccactgagcgcaagtgggctgaggcagtggtgaggccgcctggctgttcctgtgggggctgcgggagctgtggagaccgtgagtggctaagggctgtggcctccgtgggagccgcactcattctcttcccttgcctactatacggggcatatgccttcctgccgtttgatgtcccacggctgcccaccatgagttcccgcctgatctacacactgcgctgcggggtctttgccaccttccccattgtgctggggatcctggtgtacgggctgagcctgttatgcttttctgcccttcggccctttggggagccacggcgggaggtggagatccaccggcgatatgtggcccagtcggtccagctctttattctctacttcttcaacctggccgtgctttccacttacctgccccaggataccctcaaactgctccctctgctcactggtctctttgccgtctcccggctgatctactggctgacctttgccgtgggccgctccttccgaggcttcggctacggcctgacgtttctgccactgctgtcgatgctgatgtggaacctctactacatgttcgtggtggagccggagcgcatgctcactgccaccgagagccgcctggactacccggaccacgcccgctcggcctccgactacaggccccgcccctggggctgagcctctccgccctcgccctcggagtagggggtagcggcttgggtctgacacatctttgaaccttgtggccaggcctggacttcgcccccaggcctaggaccgcggtgggtggaaccctgctactgccccaacagggactccaatcaatcggagttctccccttgccggagctgcccttcacctttggggcccgagacagtcataagggatggacttagttttcttgcagggaaaaaggtggacagccgtgtttcttaaggatgctgagggcatggggccaggaccaggggagaggcacagctccttcctgagcagcctctcaccactgccacaaggctccctaatgctggtctctgctccactccccggcttcccgtgaggcaggaggcagagccacagccaaggccctgaccacttctgtgccagttgtctaagcagagcgcctcagggacgctggaaatgccttaaggatagaggctgggcatcacatcaaatgggactgtggtgtttggtgaaaaccttcctgaggatctggattcaggaccctccatgactggcctatttactgtttacagctggccagtgcagagctgctgctcttttacctttttaggcccctgtaacttcccacctttaaactgcccagaaggcatgcctctcccacaggaagaggggagcagacagggaaatctgcctaccaagaggggtgtgtgtgtctttgtgcccacacgtggtggctggggagtgcctggatggtgcggtggttgatgttaacctagtgtgtgtgtgtgtgtgtgtgtgtgtgtgtgtgtgtgtgtgtgtgtaacaataaattactaccagtcaaaaa

SEQ ID NO: 408992 - DNA, 2166 bp, Homo sapiens
gagggagacagagagaaatacttgcagagccagcaggtagctgggcagctccttcccggacggacggatggacagacgctggggaccctccactccatatggaaagatgacatgaccttgtggtagatcccagaactgaggccccaggatgacagaacaggagaccctggccctactggaagtgaagaggtctgattccccagagaagagctcaccccaggccttggttcccaatggccggcagccagaaggggaaggtggggccgaatccccgggagctgagtccctcagagtggggtcttcagctggatctcccacagccatagagggggctgaggatggtctagacagcacagtaagtgaggctgccaccttgccctgggggactggccctcagcccagtgctccgttcccggatccccctggctggcgggacattgaaccagagccccctgagtcagaaccacttaccaagctagaggagctgcccgaagacgatgccaacctgctgcctgagaaagcggcccgtgccttcgtgcctattgacctacagtgcattgagcggcagccccaagaagaccttatcgtgcgctgtgaggcaggcgagggcgagtgccgaaccttcatgcccccccgggtcacccaccccgaccccactgagcgcaagtgggctgaggcagtggtgaggccgcctggctgttcctgtgggggctgcgggagctgtggagaccgtgagtggctaagggctgtggcctccgtgggagccgcactcattctcttcccttgcctactatacggggcatatgccttcctgccgtttgatgtcccacggctgcccaccatgagttcccgcctgatctacacactgcgctgcggggtctttgccaccttccccattgtgctggggatcctggtgtacgggctgagcctgttatgcttttctgcccttcggccctttggggagccacggcgggaggtggagatccaccggcgatatgtggcccagtcggtccagctctttattctctacttcttcaacctggccgtgctttccacttacctgccccaggataccctcaaactgctccctctgctcactggtctctttgccgtctcccggctgatctactggctgacctttgccgtgggccgctccttccgaggcttcggctacggcctgacgtttctgccactgctgtcgatgctgatgtggaacctctactacatgttcgtggtggagccggagcgcatgctcactgccaccgagagccgcctggactacccggaccacgcccgctcggcctccgactacaggccccgcccctggggctgagcctctccgccctcgccctcggagtagggggtagcggcttgggtctgacacatctttgaaccttgtggccaggcctggacttcgcccccaggcctaggaccgcggtgggtggaaccctgctactgccccaacagggactccaatcaatcggagttctccccttgccggagctgcccttcacctttggggcccgagacagtcataagggatggacttagttttcttgcagggaaaaaggtggacagccgtgtttcttaaggatgctgagggcatggggccaggaccaggggagaggcacagctccttcctgagcagcctctcaccactgccacaaggctccctaatgctggtctctgctccactccccggcttcccgtgaggcaggaggcagagccacagccaaggccctgaccacttctgtgccagttgtctaagcagagcgcctcagggacgctggaaatgccttaaggatagaggctgggcatcacatcaaatgggactgtggtgtttggtgaaaaccttcctgaggatctggattcaggaccctccatgactggcctatttactgtttacagctggccagtgcagagctgctgctcttttacctttttaggcccctgtaacttcccacctttaaactgcccagaaggcatgcctctcccacaggaagaggggagcagacagggaaatctgcctaccaagaggggtgtgtgtgtctttgtgcccacacgtggtggctggggagtgcctggatggtgcggtggttgatgttaacctagtgtgtgtgtgtgtgtgtgtgtgtgtgtgtgtaacaataaattactaccagtctt

SEQ ID NO: 408993 - DNA, 1929 bp, Homo sapiens
gttgccagaactaactctgggcagcatggcgtctttccggcttctccaaacccttgcgaaaaactttattggcaaagctatcagagaacggacagtgtacccactgaggcggccaaagcttaactggatcagggcaggatgacatgaccttgtggtagatcccagaactgaggccccaggatgacagaacaggagaccctggccctactggaagtgaagaggtctgattccccagagaagagctcaccccaggccttggttcccaatggccggcagccagaaggggaaggtggggccgaatccccgggagctgagtccctcagagtggggtcttcagctggatctcccacagccatagagggggctgaggatggtctagacagcacagtaagtgaggctgccaccttgccctgggggactggccctcagcccagtgctccgttcccggatccccctggctggcgggacattgaaccagagccccctgagtcagaaccacttaccaagctagaggagctgcccgaagacgatgccaacctgctgcctgagaaagcggcccgtgccttcgtgcctattgacctacagtgcattgagcggcagccccaagaagaccttatcgtgcgctgtgaggcaggcgagggcgagtgccgaaccttcatgcccccccgggtcacccaccccgaccccactgagcgcaagtgggctgaggcagtggtgaggccgcctggctgttcctgtgggggctgcgggagctgtggagaccgtgagtggctaagggctgtggcctccgtgggagccgcactcattctcttcccttgcctactatacggggcatatgccttcctgccgtttgatgtcccacggctgcccaccatgagttcccgcctgatctacacactgcgctgcggggtctttgccaccttccccattgtgctggggatcctggtgtacgggctgagcctgttatgcttttctgcccttcggccctttggggagccacggcgggaggtggagatccaccggcgatatgtggcccagtcggtccagctctttattctctacttcttcaacctggccgtgctttccacttacctgccccaggataccctcaaactgctccctctgctcactggtctctttgccgtctcccggctgatctactggctgacctttgccgtgggccgctccttccgaggcttcggctacggcctgacgtttctgccactgctgtcgatgctgatgtggaacctctactacatgttcgtggtggagccggagcgcatgctcactgccaccgagagccgcctggactacccggaccacgcccgctcggcctccgactacaggccccgcccctggggctgagcctctccgccctcgccctcggagtagggggtagcggcttgggtctgacacatctttgaaccttgtggccaggcctggacttcgcccccaggcctaggaccgcgggcagccaaccagtcagaatgcctctcatttaggcctgcaagtcccatccaagggaaatgtgtggagatgcaagaaggcaacaccaaggggaccttatcaatagccctgtcccctgcccgcctccaaagtcccccaacaaagtatgaaggaagccccacctgggggtctccaggaagtcgaggctggcctctgaggttccacagaaaagcaagatgggggagtgaaggggccggctggaacttgatgctccaacctccagagtttcgaggcacagcaagacaggttcagtaatgtccttccctccagagagcgggccttaatttatggactggtactctgagtacttcttggggtgcagcagcagaaccaagccgccccctagcagcatgagccctggggcacccagggccactggcatgatgcccaggactaggggggacaagccgtccactggaggga

SEQ ID NO: 408994 - DNA, 1130 bp, Homo sapiens
agcaggctggtacgccggtgtagatatgtcgaccagcgtcgtctttccggcttctccaaacccttgcgaaaaactttattggcaaagctatcagagaacggacagtgtacccactgaggcggccaaagcttaactggatcagggcaggatgacatgaccttgtggtagatcccagaactgaggccccaggatgacagaacaggagaccctggccctactggaagtgaagaggtctgattccccagagaagagctcaccccaggccttggttcccaatggccccgcccctggggctgagcctctccgccctcgccctcggagtagggggtagcggcttgggtctgacacatctttgaaccttgtggccaggcctggacttcgcccccaggcctaggaccgcggtgggtggaaccctgctactgccccaacagggactccaatcaatcggagttctccccttgccggagctgcccttcacctttggggcccgagacagtcataagggatggacttagttttcttgcagggaaaaaggtggacagccgtgtttcttaaggatgctgagggcatggggccaggaccaggggagaggcacagctccttcctgagcagcctctcaccactgccacaaggctccctaatgctggtctctgctccactccccggcttcccgtgaggcaggaggcagagccacagccaaggccctgaccacttctgtgccagttgtctaagcagagcgcctcagggacgctggaaatgccttaaggatagaggctgggcatcacatcaaatgggactgtggtgtttggtgaaaaccttcctgaggatctggattcaggaccctccatgactggcctatttactgtttacagctggccagtgcagagctgctgctcttttacctttttaggcccctgtaacttcccacctttaaactgcccagaaggcatgcctctcccacaggaagaggggagcagacagggaaatctgcctaccaagaggggtgtgtgtgtctttgtgcccacacgtggtggctggggagtgcctggatggtgcggtggttgatgttaacctagtgtgtgtgtgtgtgtgtgtgtgtgtgtgtgtaacaataaattactaccagtctt

SEQ ID NO: 408995 - DNA, 2198 bp, Homo sapiens
gttgccagaactaactctgggcagcatggcgtctttccggcttctccaaacccttgcgaaaaactttattggcaaagctatcagagaacggacagtgtacccactgaggcggccaaagcttaactggatcagggcaggatgacatgaccttgtggtagatcccagaactgaggccccaggatgacagaacaggagaccctggccctactggaagtgaagaggtctgattccccagagaagagctcaccccaggccttggttcccaatggccggcagccagaaggggaaggtggggccgaatccccgggagctgagtccctcagagtggggtcttcagctggatctcccacagccatagagggggctgaggatggtctagacagcacagtaagtgaggctgccaccttgccctgggggactggccctcagcccagtgctccgttcccggatccccctggctggcgggacattgaaccagagccccctgagtcagaaccacttaccaagctagaggagctgcccgaagacgatgccaacctgctgcctgagaaagcggcccgtgccttcgtgcctattgacctacagtgcattgagcggcagccccaagaagaccttatcgtgcgctgtgaggcaggcgagggcgagtgccgaaccttcatgcccccccgggtcacccaccccgaccccactgagcgcaagtgggctgaggcagtggtgaggccgcctggctgttcctgtgggggctgcgggagctgtggagaccgtgagtggctaagggctgtggcctccgtgggagccgcactcattctcttcccttgcctactatacggggcatatgccttcctgccgtttgatgtcccacggctgcccaccatgagttcccgcctgatctacacactgcgctgcggggtctttgccaccttccccattgtgctggggatcctggtgtacgggctgagcctgttatgcttttctgcccttcggccctttggggagccacggcgggaggtggagatccaccggcgatatgtggcccagtcggtccagctctttattctctacttcttcaacctggccgtgctttccacttacctgccccaggataccctcaaactgctccctctgctcactggtctctttgccgtctcccggctgatctactggctgacctttgccgtgggccgctccttccgaggcttcggctacggcctgacgtttctgccactgctgtcgatgctgatgtggaacctctactacatgttcgtggtggagccggagcgcatgctcactgccaccgagagccgcctggactacccggaccacgcccgctcggcctccgactacaggccccgcccctggggctgagcctctccgccctcgccctcggagtagggggtagcggcttgggtctgacacatctttgaaccttgtggccaggcctggacttcgcccccaggcctaggaccgcggtgggtggaaccctgctactgccccaacagggactccaatcaatcggagttctccccttgccggagctgcccttcacctttggggcccgagacagtcataagggatggacttagttttcttgcagggaaaaaggtggacagccgtgtttcttaaggatgctgagggcatggggccaggaccaggggagaggcacagctccttcctgagcagcctctcaccactgccacaaggctccctaatgctggtctctgctccactccccggcttcccgtgaggcaggaggcagagccacagccaaggccctgaccacttctgtgccagttgtctaagcagagcgcctcagggacgctggaaatgccttaaggatagaggctgggcatcacatcaaatgggactgtggtgtttggtgaaaaccttcctgaggatctggattcaggaccctccatgactggcctatttactgtttacagctggccagtgcagagctgctgctcttttacctttttaggcccctgtaacttcccacctttaaactgcccagaaggcatgcctctcccacaggaagaggggagcagacagggaaatctgcctaccaagaggggtgtgtgtgtctttgtgcccacacgtggtggctggggagtgcctggatggtgcggtggttgatgttaacctagtgtgtgtgtgtgtgtgtgtgtgtgtgtgtgtaacaataaattactaccagtctt

SEQ ID NO: 408996 - DNA, 2208 bp, Homo sapiens
agcaggctggtacgccggtgtagatatgtcgaccagcgtcgtctttccggcttctccaaacccttgcgaaaaactttattggcaaagctatcagagaacggacagtgtacccactgaggcggccaaagcttaactggatcagggcaggatgacatgaccttgtggtagatcccagaactgaggccccaggatgacagaacaggagaccctggccctactggaagtgaagaggtctgattccccagagaagagctcaccccaggccttggttcccaatggccggcagccagaaggggaaggtggggccgaatccccgggagctgagtccctcagagtggggtcttcagctggatctcccacagccatagagggggctgaggatggtctagacagcacagtaagtgaggctgccaccttgccctgggggactggccctcagcccagtgctccgttcccggatccccctggctggcgggacattgaaccagagccccctgagtcagaaccacttaccaagctagaggagctgcccgaagacgatgccaacctgctgcctgagaaagcggcccgtgccttcgtgcctattgacctacagtgcattgagcggcagccccaagaagaccttatcgtgcgctgtgaggcaggcgagggcgagtgccgaaccttcatgcccccccgggtcacccaccccgaccccactgagcgcaagtgggctgaggcagtggtgaggccgcctggctgttcctgtgggggctgcgggagctgtggagaccgtgagtggctaagggctgtggcctccgtgggagccgcactcattctcttcccttgcctactatacggggcatatgccttcctgccgtttgatgtcccacggctgcccaccatgagttcccgcctgatctacacactgcgctgcggggtctttgccaccttccccattgtgctggggatcctggtgtacgggctgagcctgttatgcttttctgcccttcggccctttggggagccacggcgggaggtggagatccaccggcgatatgtggcccagtcggtccagctctttattctctacttcttcaacctggccgtgctttccacttacctgccccaggataccctcaaactgctccctctgctcactggtctctttgccgtctcccggctgatctactggctgacctttgccgtgggccgctccttccgaggcttcggctacggcctgacgtttctgccactgctgtcgatgctgatgtggaacctctactacatgttcgtggtggagccggagcgcatgctcactgccaccgagagccgcctggactacccggaccacgcccgctcggcctccgactacaggccccgcccctggggctgagcctctccgccctcgccctcggagtagggggtagcggcttgggtctgacacatctttgaaccttgtggccaggcctggacttcgcccccaggcctaggaccgcggtgggtggaaccctgctactgccccaacagggactccaatcaatcggagttctccccttgccggagctgcccttcacctttggggcccgagacagtcataagggatggacttagttttcttgcagggaaaaaggtggacagccgtgtttcttaaggatgctgagggcatggggccaggaccaggggagaggcacagctccttcctgagcagcctctcaccactgccacaaggctccctaatgctggtctctgctccactccccggcttcccgtgaggcaggaggcagagccacagccaaggccctgaccacttctgtgccagttgtctaagcagagcgcctcagggacgctggaaatgccttaaggatagaggctgggcatcacatcaaatgggactgtggtgtttggtgaaaaccttcctgaggatctggattcaggaccctccatgactggcctatttactgtttacagctggccagtgcagagctgctgctcttttacctttttaggcccctgtaacttcccacctttaaactgcccagaaggcatgcctctcccacaggaagaggggagcagacagggaaatctgcctaccaagaggggtgtgtgtgtctttgtgcccacacgtggtggctggggagtgcctggatggtgcggtggttgatgttaacctagtgtgtgtgtgtgtgtgtgtgtgtgtgtgtgtaacaataaattactaccagtctt

SEQ ID NO: 408997 - DNA, 1098 bp, Homo sapiens
tatgtaacattatgatttacatattttatgtgtttattttttgcaaaccaggctgatctactggctgacctttgccgtgggccgctccttccgaggcttcggctacggcctgacgtttctgccactgctgtcgatgctgatgtggaacctctactacatgttcgtggtggagccggagcgcatgctcactgccaccgagagccgcctggactacccggaccacgcccgctcggcctccgactacaggccccgcccctggggctgagcctctccgccctcgccctcggagtagggggtagcggcttgggtctgacacatctttgaaccttgtggccaggcctggacttcgcccccaggcctaggaccgcggtgggtggaaccctgctactgccccaacagggactccaatcaatcggagttctccccttgccggagctgcccttcacctttggggcccgagacagtcataagggatggacttagttttcttgcagggaaaaaggtggacagccgtgtttcttaaggatgctgagggcatggggccaggaccaggggagaggcacagctccttcctgagcagcctctcaccactgccacaaggctccctaatgctggtctctgctccactccccggcttcccgtgaggcaggaggcagagccacagccaaggccctgaccacttctgtgccagttgtctaagcagagcgcctcagggacgctggaaatgccttaaggatagaggctgggcatcacatcaaatgggactgtggtgtttggtgaaaaccttcctgaggatctggattcaggaccctccatgactggcctatttactgtttacagctggccagtgcagagctgctgctcttttacctttttaggcccctgtaacttcccacctttaaactgcccagaaggcatgcctctcccacaggaagaggggagcagacagggaaatctgcctaccaagaggggtgtgtgtgtctttgtgcccacacgtggtggctggggagtgcctggatggtgcggtggttgatgttaacctagtgtgtgtgtgtgtgtgtgtgtgtgtgtgtgtaacaataaattactaccagtctt

SEQ ID NO: 408998 - DNA, 463 bp, Homo sapiens
ctgccacctacaagataaagagtaagcaagatagagacagcaggaatgagctctccgacggagggcatgaacagcaagtgcaaaggccctgcgactcgaaagagcatgaaagactgaggaagcggccagtgtggctccaacacagtggaggagtggggggatcctactgagatagaggccctggagctggctcctccacagctctcaggaatgacagtaaacacagacggccctgcatgtattccggctgtggcagccttcctcctgggctgcacatcaggctaacaagcccagccctcagcttcacagggattggagagctggtgaccctagtcaaggaagctggtgaccctggatcagttgcctcccctctctgtgcctaaatcccccaccccacttctgtcaattaggaggatgatgccttcttcaaagtgttgtcataaagattaaatccttattaaag

SEQ ID NO: 408999 - DNA, 564 bp, Homo sapiens
attgtgacccagtttctcgtcaaccagtaaaacatccagtaacacagccaatggaaataaatgaatgggtctctgtttatagtgaagattctttcgttctccagctccaggcttcatacggtaaaactctctgggaaggaaaggaactcagagtcccatgcagaaaattgttcagctggaggggtatcagaaagatggatttccaaagccaactgtttcctgtagtgtgtggatctctgcaagcagagcctcatctttcaatttcagctacatgaaagaggaagaaagggaaagatatatgtcatacgtgatatactttatgtggctttgaagacccctcttttgtggggctacggctaaagaacatagttccctgggatggaattggctcttcctatttccctacttcatgaaaactccagtagaagaccttagaaccttgtcctggttacatggatatgtttactttgtgaaaattcatcaagcactatgcacggtcatgatttgtacatttttttgtaagataacttcattaaaatttactttttttatttttaaaaaaaa

SEQ ID NO: 409000 - DNA, 851 bp, Homo sapiens
acccctaacgtaccttaaactgctgcaaaagaggcgtttctcgtggtgtcttgtgggagtggcggtgcgatccctctcagacttgtgagtccctgctggagtcagaagttttaggcgaatcccaggcgcgccaaggaaagtgctacaaaagccatccatcttgcaagcgttggtgccgaggcgcaacgctgagaacgcaaatactaaagggcgctgttctttcctcgtggagctcacagtccgctggggagaccgtgagatgacagcagagaaactagcgcgatcagtagtactcagcgcaaggacagcgagcagagaaggcaaacctagtgcttgctaaggaagacttcacagaggaggtagtgtcagggccgagactaggagaaggattctccaggcttcatacggtaaaactctctgggaaggaaaggaactcagagtcccatgcagaaaattgttcagctggaggggtatcagaaagatggatttccaaagccaactgtttcctgtagtgtgtggatctctgcaagcagagcctcatctttcaatttcagctacatgaaagaggaagaaagggaaagatatatgtcatacgtgatatactttatgtggctttgaagacccctcttttgtggggctacggctaaagaacatagttccctgggatggaattggctcttcctatttccctacttcatgaaaactccagtagaagaccttagaaccttgtcctggttacatggatatgtttactttgtgaaaattcatcaagcactatgcacggtcatgatttgtacatttttttgtaagataacttcattaaaatttactttttttatttttaaaaaaaa

SEQ ID NO: 409001 - DNA, 1051 bp, Homo sapiens
acccctaacgtaccttaaactgctgcaaaagaggcgtttctcgtggtgtcttgtgggagtggcggtgcgatccctctcagacttgtgagtccctgctggagtcagaagttttaggcgaatcccaggcgcgccaaggaaagtgctacaaaagccatccatcttgcaagcgttggtgccgaggcgcaacgctgagaacgcaaatactaaagggcgctgttctttcctcgtggagctcacagtccgctggggagaccgtgagatgacagcagagaaactagcgcgatcagtagtactcagcgcaaggacagcgagcagagaaggcaaacctagtgcttgctaaggaagacttcacagaggaggtagtgtcagggccgagactaggagaaggattgtaagtgactagattttactttatccttctcgttaaccaaaattaatttacctctcaccttttctcctgttgtcgtcccacccctatcgaggcagtcacaccttaaaaaaaaaaggaggggttattcctgcttttgccgtgctgtgatccagggcagaggtgaagtatgattttttttttttttatctgtagccctagaatatgacctcggtgatgagggtaacggtgtctccttggagccctagtggtttagatccatgaagatgcctgtgtttggtgagaaggtgtcaatagctccaccttcagcaaagacctctctgttcagctttttcgtttactgttagttccaaagggctagcatgctctttgccctaatacagtgacccagcatagcagtcttcctccagggccacctttgaaaatgatgccttaattcctgtatttcagttaactgaacctgtccagaaaccttagcacctgacttcctccaggagtgatccaataagctttcatcagaaaccctaataatgaccccactataccttaattttattgtatgtatatatatgccatataattattatagcaattacactatagttatttatataactaaatacctacatgtaactcagtatacgttaactccagaaccatgct

SEQ ID NO: 409002 - DNA, 1010 bp, Homo sapiens
acccctaacgtaccttaaactgctgcaaaagaggcgtttctcgtggtgtcttgtgggagtggcggtgcgatccctctcagacttgtgagtccctgctggagtcagaagttttaggcgaatcccaggcgcgccaaggaaagtgctacaaaagccatccatcttgcaagcgttggtgccgaggcgcaacgctgagaacgcaaatactaaagggcgctgttctttcctcgtggagctcacagtccgctggggagaccgtgagatgacagcagagaaactagcgcgatcagtagtactcagcgcaaggacagcgagcagagaaggcaaacctagtgcttgctaaggaagacttcacagaggaggtagtgtcagggccgagactaggagaaggattgtaagtgactagattttactttatccttctcgttaaccaaaattaatttacctctcaccttttctcctgttgtcgtcccacccctatcgaggcagtcacaccttaaaaaaaaaaggaggggttattcctgcttttgccgtgctgtgatccagggcagagctccaggcttcatacggtaaaactctctgggaaggaaaggaactcagagtcccatgcagaaaattgttcagctggaggggtatcagaaagatggatttccaaagccaactgtttcctgtagtgtgtggatctctgcaagcagagcctcatctttcaatttcagctacatgaaagaggaagaaagggaaagatatatgtcatacgtgatatactttatgtggctttgaagacccctcttttgtggggctacggctaaagaacatagttccctgggatggaattggctcttcctatttccctacttcatgaaaactccagtagaagaccttagaaccttgtcctggttacatggatatgtttactttgtgaaaattcatcaagcactatgcacggtcatgatttgtacatttttttgtaagataacttcattaaaatttactttttttatttttaaaaaaaa

SEQ ID NO: 409003 - DNA, 976 bp, Homo sapiens
acccctaacgtaccttaaactgctgcaaaagaggcgtttctcgtggtgtcttgtgggagtggcggtgcgatccctctcagacttgtgagtccctgctggagtcagaagttttaggcgaatcccaggcgcgccaaggaaagtgctacaaaagccatccatcttgcaagcgttggtgccgaggcgcaacgctgagaacgcaaatactaaagggcgctgttctttcctcgtggagctcacagtccgctggggagaccgtgagatgacagcagagaaactagcgcgatcagtagtactcagcgcaaggacagcgagcagagaaggcaaacctagtgcttgctaaggaagacttcacagaggaggtagtgtcagggccgagactaggagaaggattgtaagtgactagattttactttatccttctcgttaaccaaaattaatttacctctcaccttttctcctgttgtcgtcccacccctatcgaggcagtcacaccttaaaaaaaaaaggaggggttattcctgcttttgccgtgctgtgatccagggcagagctccaggcttcatacggtaaaactctctgggaaggaaaggaactcagagtcccatgcagaaaattgttcagctggaggggtatcagaaagatggatttccaaagccaactgtttcctgtagtgtgtggatctctgcaagcagagcctcatctttcaatttcagctacatgaaagaggaagaaagggaaagatatatgtcatacgtgatatactttatgtggctttgaagacccctcttttgtggggctacggctaaagaacatagttccctgggatggaattggctcttcctatttccctacttcatgaaaactccagtagaagaccttagaaccttgtcctggttacatggatatgtttacctttcacccccccatcaccggccccaaagctccaatgtcggagtctttctaggtcgcgaccggg

SEQ ID NO: 409004 - DNA, 214 bp, Homo sapiens
tcatgttgggcagaatggtctcaaactcctggcctcaagtgatccatctgcctcagcctcccaaagtgctgggatgacaggcataagccaccgcgcccagcctgagttttcttattcttattttatatacagtgtcaaaggttcttagttttacttaggaggagaaatagggaaaagtacatctgctccatcttcctggatgtggaagtccagt

SEQ ID NO: 409005 - DNA, 1196 bp, Homo sapiens
atagaacatttttgctcaaatcaaataatgatggtattgcaattctgcaaatgtttggagttactggcctaaaggtaagaggagcaagattagttgataagttgaatgaatagacagggcagagccagtatacctttggtgaactagtaagtttatttgcgtgggacattttttttctctttgcagtactggcatagctgggtgcagtggctcatgcctataatcccagcactttgggaggccgaggcgggcagatcacttgagcccaggagttagagaccagcctgggcaacatgatgaaaccccatctctacaaaaagtagaaaaattagccaggtgtggtggtgcacacctgtagtctaagctacttgggaggctgagataggaggattgcttgaggcagggaggtcaaggctgcagtgagctgagatcatgctactgcactccagtctgggtgacagggcaagattctgtctcaacaaacaaacaaacaaacaaactagtacagaatatttcattaaaatgtttatgtcatttgaattatgttaattatacttcctaaatggaataatggtatcttattattaaaccagaataataaatatgaacttgaatatatttaaatgctaggcaccattctatgaaaatctgtctgcttcatgtttattattgaaataatctaaattaattttagaacacttaaaatcgaaaacatctccaaagtgtagttcttctctttctaacagtatgatagttcatttgtttaagaaaactattcccattatttgggtattcaaacatgtttttacttaggagctctttttgcatggaatgtactagactatggtattggatgataatggaaagaagataatctccccattcgtaaaatcagaaatttatttgatcaataaaacttcttttctggaacacaactccttggatgtgtgagcctatcagacattaggagaataattttaataagcttttgaatggaagatttgatcactatgattagagacggagcagtgggagatgatagtgtcttggtgctagcaccaagctagcactaatagatgatggcacctatttatgacccaaattctaaatttcttttggtatttagagacatctcccaaatatgtatttccccatagtgattattctaactgacctttagcattctgtctgtccta

SEQ ID NO: 409006 - DNA, 328 bp, Homo sapiens
agggctcgtggggaaaaaacaagagatggtgcttccctaaggacagtgtccttattctggcaggaagatgacagggggaaccatggtggagagggaccatgcagacctgaagcagccagaactttccaccttgctcctttcttcatggtggggatttcctatgacacagcctgttgctttgtttactattatttatctgctatggtttatctataatgactactagtatttgtgtggtcagataatgggccattttgtttactctccatatttaaaaaacagtgttagaaatatataccccaaattaaaagggctattctgaaacagc

SEQ ID NO: 409007 - DNA, 401 bp, Homo sapiens
cggccgccctactcgtattcggcgctcatcgccatggccattcagagcgcgcccgagcgcaaactcactctcagccacatctaccagttcgtcgccgatagcttccccttctaccagcgcagcaaggccggctggcagaactccatccgccacaacctgtcgctcaacgactgcttcaagaaggtgccccgcgacgaggacgacccaggaaagggtaattattggactcttgatccgaactgcgagaaaatgtttgacaatgggaacttccgtcggaagcgaaagcgccgctctgaggccagcaatggctccacagtggctgctgggacatcaaagtccgaagaagggctctcctcaggattggggtctggagtgggtgggaagccagaagaagagagccc

SEQ ID NO: 409008 - DNA, 523 bp, Homo sapiens
cggccgccctactcgtattcggcgctcatcgccatggccattcagagcgcgcccgagcgcaaactcactctcagccacatctaccagttcgtcgccgatagcttccccttctaccagcgcagcaaggccggctggcagaactccatccgccacaacctgtcgctcaacgactgcttcaagaaggtgccccgcgacgaggacgacccaggtgagggccgctggcaggtgcttcccagccggggagggcggacgcgggtcgcaagggccggcgcaggggtcggtgtgcggctggaagatctgccaggagtcttcttgtccaggctgcgggtgggagcggatggaggaataaccacccaacccagaggacaaagggaaggagcaggagatcttcggaaggaagactcagtgagaaaggagcttgacctttacatccacattcgcagaggcgggccaattagagaaacgaaaaaaatctgtatcccagaacagaaggctacccctgggtggtgttccttaggccttt

SEQ ID NO: 409009 - DNA, 4282 bp, Homo sapiens
  misc_feature (1327)..(1327): n is a, c, g, or t
ttcatccttcgtccatctcgctttatccagaggacattcactgacattggcattaaatactatcgaaatgagtttaaaatgaaagtgccgatcatcatggtaaactctgtctctgaccttcacggctacatcgacaaaagccaactgacccgggaattaggggggactttggaatatcgccacggtcagtgggtaaatcaccgcactgccatcgaaaactttgccttgaccttgaagaccactgcccagatgctgcagacgtttgggtcctgcctggccacagcagagctgcccagaagcatgctatccacggaagaccttctcatgtcccacacaaggcagcgggacaagctgcaggatgagctgaaattacttggaaagcaggggaccacattgctgtcatgcatccaagaaccagcaaccaaatgtcccaacagcaaactcaatctcaaccaacttgagaatgtaactaccatggaaaggttattagttcaactggatgaaacagaaaaagcctttagtcacttttggtctgagcatcatctgaagcttaaccagtgcctacaactacagcattttgagcacgatttttgtaaggctaagcttgccctggataatttgctggaagagcaagcagagtttacaggcattggagacagcgtgatgcacgtggagcagattcttaaggaacacaaaaaactggaggaaaaaagccaggagcccctggaaaaggcccagctgctggcactggttggggaccagctcatccaaagccaccattatgcagcagatgccatcaggccccggtgtgtggagctcaggcacctctgtgacgatttcatcaatggaaacaagaaaaaatgggacattttaggaaagtccttagagtttcatagacagctggacaaggtcagccaatggtgtgaggcaggaatctacctcttggcttcccaagctgtagacaagtgccagtctcgagaaggggttgatatcgccttgaacgacattgcgacattcctgggcacagtcaaggagtacccgttgctcagccccaaggagttttacaacgagtttgagttgctgctcaccctcgatgcaaaggccaaagcccagaaagttttgcagaggctggatgatgtccaggaaatatttcacaagaggcaagtgagtctgatgaaactggcagccaaacagactcgtccagtgcaacctgtggccccacatcctgagtcttcaccaaaatgggtgtcatcaaaaaccagccagccctccacctcggtccctctagctcgtcctctgagaacgtctgaggaaccttatacggagncagagttgaactcccggggaaaggaagatgatgagactaaatttgaagtcaagagtgaagaaatctttgaaagccatcatgaaagggggaaccctgagctggagcagcaggccaggctcggagacctttccccccgcaggcgcattatacgtgacttgcttgagactgaagagatttacataaaagagattaaaagcataattgatggatatatcactccaatggattttatttggctaaagcatctaattccagatgttcttcagaataacaaggactttctctttgggaatattagagaactttacgaatttcacaacaggacttttctaaaagagttggaaaagtgtgctgagaaccctgaacttctggcacattgctttctcaagagaaaagaagatcttcagatatattttaaataccataagaatctgccccgagctagggcaatctggcaagagtgtcaagactgcgcctactttggggtatgccagcgccaactggatcacaatctccctctttttaagtatctcaaaggaccaagccagagacttataaaataccagatgctgttgaagggtctgctggatttcgagtctcctgaagatatggagatagacccaggtgaactaggaggctcggctaaggatgggccaaagagaaccaaagattcagcattctcaactgaactacaacaagctttggcagtgatagaggatttgatcaagtcctgtgagttggctgtggacctagcagcagtgactgaatgtccggacgatattggaaaactaggcaagctgttgctgcacggccctttcagcgtctggacaattcacaaggatcgttataaaatgaaggatttgattcgatttaaacccagccagaggcaaatctacctatttgaaaggggaatagtgttctgtaagatacgaatggagcctggggaccagggattatctcctcattacagcttcaagaaggccatgaagctgatgacactttcaattcgccagcttggaagggggagccatagaaagtttgagattgccagtcgaaatggacttgagaaatacatcctgcaggcagcttcaaaagaaatcagagactgttggttttcagaaataagtaaattattgatggaacaacaaaataatatcaaagaccaaggaaatccacagtttgaaatgagcacgagcaaaggcagtggagcaggatccggaccatggattaaaaatatggaaagagctaccactagcaaggaagacccggcctccagcacaggagggattaaaggctgctccagcagggagtttagctccatggacacctttgaagactgtgaaggcgcagaagacatggaaaaggagagcagtgctctgagtctcgcgggccttttccagtcggacgacagtcacgaaacctgttcctccaaatctgctttcctggagaggggagaaagcagccagggagaaaaagaagaacgcgatgaggaggaaacggcgacccgcagcaccgaggaggagcgcgctggggcgtccacgggccggctggctcctgcgggggcgacggctggtttccaggcgagggcgctgcgcccgaggacctccgcccaggagagctgacctccctgcggacgcccccgctcctcggctccagagcgcccgcattcccgggagaggcggtgtgggggcccgggccctgcccagctacgcagaaagcagccggagcctcggcggcggcagaaaggggacaaccagggcctcctccgaggagcccgaggggtgtcctgggtgcgcgcctagctccgcacgggggacctcggagctgctctaaggcgcctgcagaggcgagcagagcccgcagcccacgccttctcgaccgcgcacttcgacattcggagccgggcaattctttgctgcgtgggcttctctgtgctcccacggtaggatgtttagtagcacccctggcctctacccactaggtgccaggaatgcgccaccccatcctccaccccgcccccaaatcgtgacaatcaaaaatgcctgcagacacgcccgcatttctccagggcggggtgggaatcggttgagagccgcttagcccgagccttggaggagccggagccgctcaaacccggcgggggccgcagactgggagctcccggtccgcctcccagcatccctgcgagcgttcatggggtgttcgtgttagtgccaagattgcttcgttgtagagagagttcgttccaagttactttctgaggtattttatgtatcgatttattagtttttaaatgagttttgttagtttcagttgtattttatttttagttttattagttgattttcatttctttgtagctttctggttatttaattttatagtttcagttactggtttatagttactttattttcaaagttatttagttgttcattttcagttatttatatgtagttgttttgttttaggagttacagatgttcaaattaatttgcttggaatttatttatttatttatttatttttcgagacggagtctcgctctgtcgcccaggctggagtgcagtggtgtgatctcggctcactgcaaaccgcctcccgggttcacgccattctcctgcctcagcctcctgagtagctgggactacaggcgcccgccaccacgcccggctaattttttatttggatttttagtagagacggggtttccccgtgttagccaggatggtctcgatctcctgacctcgtgatccccctgcctcggcctcccaaagtgctgggattacaggcgtgagccaccgcgcccagccggaatttatttttaattatctttacaattattatctgagttatttaccttcatagttatttcactttatcttattggagtttttgagttatttatttttacagtaacttatttgactattaaacactcactggaagttcatg

SEQ ID NO: 409010 - DNA, 2776 bp, Homo sapiens
  misc_feature (2724)..(2724): n is a, c, g, or t
tatctttatgattttttattattctaaatgtggtacatattcactgtaaataatctaggaaaaaaataagacaaaaacttaagttgcctatcattttcccacttagaaagacaaccactttggcgtgttgcattttgatcttttttctctgtatagttactttatattgcttttcaggtcacatggtaaatggaaatgcagaggtattggcactggaaacttcttttcatataactcttcaggtagcataagggctccctgtctttctgttcaagtgtctcagtggagttcaaaagagcaaagaaaatgagtcttttttaaaaattgaataattagaactcatcacctatctaatgtcctcccagcatccagaaactcttgagtatcgctgtgctgagttacaaagctttgcattcttgcttccttacgaaagacaaacgccagtaaatgcaaatagggatcacctgggaatccaaagatgaaagttgtgtttttgttaaaagggacatgcccttctcccaggaaatgtaagggccaggtctaatgtcttattaatcaccctgtgttctggtaaccaattcggatgcaagaagagtggactagcaggtaaaccccaaaagccattgattacatttctctatggttagaccagcctaagagatatttagctataaggctgggtgggtgcagtgcctcacacctgtaatcccagcactttgggaggccgaggtgggaggattgcttgagcccaggagttcgagagcagcctcggcaacatggccaaaacctgtctcaaaaaaaggaaagaaagaaagagagagagacagagagaaagaaagaggaaggaaggaaggaaggaaggaaggaaggaaggaaggaaggaaggaagggaggaaggaaggaaaaattagcctggtgtggtggcatgcatctgtagtcccagctactcaggaggctaaggtggaagaatcacctgagcctggggtagacctctccaggctgcattaagccataattgcactactgcactccagcctgggtgacagagtgaaaccctgtcttaaattaaatatatatttagctgtctcctcctggagatgtagcaattactgttaatggaagagactcattttgctgaccgagtgacttccctgagaagtggacaggtatcagctggtttgggtttgtccccctcatagtgtaatttacagtggttagaccccttaaactcgatgccgtcccatgacaatttcccattgtctgggaatccttgtagacaccttacaagctcagacctgctgaggattacggtggctctgagttgtggtcaggcgaagtgcacagggcactgtttctttccaaaaggtcagccaatggtgtgaggcaggaatctacctcttggcttcccaagctgtagacaagtgccagtctcgagaaggggttgatatcgccttgaacgacattgcgacattcctgggcacagtcaaggagtacccgttgctcagccccaaggagttttacaacgagtttgagttgctgctcaccctcgatgcaaaggtaatgcttccgggttattttgatcctgtggttgggaaacggataggggagggagggactgtaccttcttcctgataaagtacacacagggtactgagcaggctgaattgagtgggctcactggttccgaagccctccggcggcctcttagactctcggcctgaacgtcctggcatactgagtcttcgtctgactcaaatcagtcatttctctattaatgcttatgagcattcctgatgtaccatgtgctgtgctgagtgctgaggataccatgatgattaaaaataggcatgcttccatccctcactgagcttacagtttgtgggagaggctgacattaacaaaataatcacacaaaaatgtgttacaagctgatataagtgctgtcaaggagggatgcagggtcaggcatgtgacagaggaacttgacctggactggggtcagagaaggctctcaggaagagtcacttgagcctggagaacgaatagacaagatgggagagcctttccagacaggaggaacagcatgtgcaaaggcttcagggctggagggagcctggcacagtgcagaccaaaaggtcagggtgctggaacctagagagcaatggaagtgtgttttgggtgaggttagagagaggcaggcaaggtaggctttgtgggccacatgagcgagtttggatttaagcagggagataacttgattggatttgcatttgagaagcatattcttccatgaagccagcagggttgtaggtagcacaccttcctctgagagccacatcatcaccttgtctgcacctctggtttaggagcttcttttaatcagcttccttgaaagagtccggaagaaagtgagttttaggcttttcttcttggaggcagaaacagagtgggaacgagggttctcagcagacttttcttagagagagagaaagctgcgtccgtttgccaatttgtttagtcatcctgtattctgggcagattaggacgtagccaccgctgtccataaatccctcctggttggaggaattgcatcaccatgttttctcaagttaggaaactgtatgaaatttcatactgtcctgatcagccacctaaaaaagtaaatagcaatttttaaaaatagattcacctgatttaacacccaggaggtctgtggaatcattnagtaatattaaaagggtttcattgtggtcctcttcaaaagtgaacatcagcc

SEQ ID NO: 409011 - DNA, 573 bp, Homo sapiens
ttctaatgtttcttgtaggctaagcttgccctggataatttgctggaagagcaagcagagtttacaggcattggagacagcgtgatgcacgtggagcagattcttaaggaacacaaaaaactggaggaaaaaagccaggagcccctggaaaaggcccagctgctggcactggttggggaccagctcatccaaagccaccattatgcagcagatgccatcaggccccggtgtgtggagctcaggcacctctgtgacgatttcatcaatggaaacaagaaaaaatgggacattttaggaaagtccttagagtttcatagacagctggacaaggtgagcaaaacacagccaagaacatgatgtctgcaagattttctgtgaagaagcttccatcatactcgtcctcccttccttgtgtgattgctgagaggcttgagtgctttatgtgaaaagatgttcgagaggcattaaaaactgtgcagatcctggggtgtagaagtatacctggcacgaaggtaaaaagtgctctggccatcccaccacatcccattaaagttaactgaagcccatttctat

SEQ ID NO: 409012 - DNA, 2752 bp, Homo sapiens
  misc_feature (2700)..(2700): n is a, c, g, or t
tatctttatgattttttattattctaaatgtggtacatattcactgtaaataatctaggaaaaaaataagacaaaaacttaagttgcctatcattttcccacttagaaagacaaccactttggcgtgttgcattttgatcttttttctctgtatagttactttatattgcttttcaggtcacatggtaaatggaaatgcagaggtattggcactggaaacttcttttcatataactcttcaggtagcataagggctccctgtctttctgttcaagtgtctcagtggagttcaaaagagcaaagaaaatgagtcttttttaaaaattgaataattagaactcatcacctatctaatgtcctcccagcatccagaaactcttgagtatcgctgtgctgagttacaaagctttgcattcttgcttccttacgaaagacaaacgccagtaaatgcaaatagggatcacctgggaatccaaagatgaaagttgtgtttttgttaaaagggacatgcccttctcccaggaaatgtaagggccaggtctaatgtcttattaatcaccctgtgttctggtaaccaattcggatgcaagaagagtggactagcaggtaaaccccaaaagccattgattacatttctctatggttagaccagcctaagagatatttagctataaggctgggtgggtgcagtgcctcacacctgtaatcccagcactttgggaggccgaggtgggaggattgcttgagcccaggagttcgagagcagcctcggcaacatggccaaaacctgtctcaaaaaaaggaaagaaagaaagagagagagacagagagaaagaaagaggaaggaaggaaggaaggaaggaagggaggaaggaaggaaaaattagcctggtgtggtggcatgcatctgtagtcccagctactcaggaggctaaggtggaagaatcacctgagcctggggtagacctctccaggctgcattaagccataattgcactactgcactccagcctgggtgacagagtgaaaccctgtcttaaattaaatatatatttagctgtctcctcctggagatgtagcaattactgttaatggaagagactcattttgctgaccgagtgacttccctgagaagtggacaggtatcagctggtttgggtttgtccccctcatagtgtaatttacagtggttagaccccttaaactcgatgccgtcccatgacaatttcccattgtctgggaatccttgtagacaccttacaagctcagacctgctgaggattacggtggctctgagttgtggtcaggcgaagtgcacagggcactgtttctttccaaaaggtcagccaatggtgtgaggcaggaatctacctcttggcttcccaagctgtagacaagtgccagtctcgagaaggggttgatatcgccttgaacgacattgcgacattcctgggcacagtcaaggagtacccgttgctcagccccaaggagttttacaacgagtttgagttgctgctcaccctcgatgcaaaggtaatgcttccgggttattttgatcctgtggttgggaaacggataggggagggagggactgtaccttcttcctgataaagtacacacagggtactgagcaggctgaattgagtgggctcactggttccgaagccctccggcggcctcttagactctcggcctgaacgtcctggcatactgagtcttcgtctgactcaaatcagtcatttctctattaatgcttatgagcattcctgatgtaccatgtgctgtgctgagtgctgaggataccatgatgattaaaaataggcatgcttccatccctcactgagcttacagtttgtgggagaggctgacattaacaaaataatcacacaaaaatgtgttacaagctgatataagtgctgtcaaggagggatgcagggtcaggcatgtgacagaggaacttgacctggactggggtcagagaaggctctcaggaagagtcacttgagcctggagaacgaatagacaagatgggagagcctttccagacaggaggaacagcatgtgcaaaggcttcagggctggagggagcctggcacagtgcagaccaaaaggtcagggtgctggaacctagagagcaatggaagtgtgttttgggtgaggttagagagaggcaggcaaggtaggctttgtgggccacatgagcgagtttggatttaagcagggagataacttgattggatttgcatttgagaagcatattcttccatgaagccagcagggttgtaggtagcacaccttcctctgagagccacatcatcaccttgtctgcacctctggtttaggagcttcttttaatcagcttccttgaaagagtccggaagaaagtgagttttaggcttttcttcttggaggcagaaacagagtgggaacgagggttctcagcagacttttcttagagagagagaaagctgcgtccgtttgccaatttgtttagtcatcctgtattctgggcagattaggacgtagccaccgctgtccataaatccctcctggttggaggaattgcatcaccatgttttctcaagttaggaaactgtatgaaatttcatactgtcctgatcagccacctaaaaaagtaaatagcaatttttaaaaatagattcacctgatttaacacccaggaggtctgtggaatcattnagtaatattaaaagggtttcattgtggtcctcttcaaaagtgaacatcagcc

SEQ ID NO: 409013 - DNA, 2678 bp, Homo sapiens
  misc_feature (1759)..(1759): n is a, c, g, or t
tatctttatgattttttattattctaaatgtggtacatattcactgtaaataatctaggaaaaaaataagacaaaaacttaagttgcctatcattttcccacttagaaagacaaccactttggcgtgttgcattttgatcttttttctctgtatagttactttatattgcttttcaggtcacatggtaaatggaaatgcagaggtattggcactggaaacttcttttcatataactcttcaggtagcataagggctccctgtctttctgttcaagtgtctcagtggagttcaaaagagcaaagaaaatgagtcttttttaaaaattgaataattagaactcatcacctatctaatgtcctcccagcatccagaaactcttgagtatcgctgtgctgagttacaaagctttgcattcttgcttccttacgaaagacaaacgccagtaaatgcaaatagggatcacctgggaatccaaagatgaaagttgtgtttttgttaaaagggacatgcccttctcccaggaaatgtaagggccaggtctaatgtcttattaatcaccctgtgttctggtaaccaattcggatgcaagaagagtggactagcaggtaaaccccaaaagccattgattacatttctctatggttagaccagcctaagagatatttagctataaggctgggtgggtgcagtgcctcacacctgtaatcccagcactttgggaggccgaggtgggaggattgcttgagcccaggagttcgagagcagcctcggcaacatggccaaaacctgtctcaaaaaaaggaaagaaagaaagagagagagacagagagaaagaaagaggaaggaaggaaggaaggaaggaagggaggaaggaaggaaaaattagcctggtgtggtggcatgcatctgtagtcccagctactcaggaggctaaggtggaagaatcacctgagcctggggtagacctctccaggctgcattaagccataattgcactactgcactccagcctgggtgacagagtgaaaccctgtcttaaattaaatatatatttagctgtctcctcctggagatgtagcaattactgttaatggaagagactcattttgctgaccgagtgacttccctgagaagtggacaggtatcagctggtttgggtttgtccccctcatagtgtaatttacagtggttagaccccttaaactcgatgccgtcccatgacaatttcccattgtctgggaatccttgtagacaccttacaagctcagacctgctgaggattacggtggctctgagttgtggtcaggcgaagtgcacagggcactgtttctttccaaaaggtcagccaatggtgtgaggcaggaatctacctcttggcttcccaagctgtagacaagtgccagtctcgagaaggggttgatatcgccttgaacgacattgcgacattcctgggcacagtcaaggagtacccgttgctcagccccaaggagttttacaacgagtttgagttgctgctcaccctcgatgcaaaggccaaagcccagaaagttttgcagaggctggatgatgtccaggaaatatttcacaagaggcaagtgagtctgatgaaactggcagccaaacagactcgtccagtgcaacctgtggccccacatcctgagtcttcaccaaaatgggtgtcatcaaaaaccagccagccctccacctcggtccctctagctcgtcctctgagaacgtctgaggaaccttatacggagncagagttgaactcccggggaaaggaagatgatgagactaaatttgaagtcaagagtgaagaaatctttgaaagccatcatgaaagggggaaccctgagctggagcagcaggccaggctcggagacctttccccccgcaggcgcattatacgtgacttgcttgagactgaagagatttacataaaagagattaaaagcataattgatggatatatcactccaatggattttatttggctaaagcatctaattccagatgttcttcagaataacaaggactttctctttgggaatattagagaactttacgaatttcacaacaggacttttctaaaagagttggaaaagtgtgctgagaaccctgaacttctggcacattgctttctcaagagaaaagaagatcttcagatatattttaaataccataagaatctgccccgagctagggcaatctggcaagagtgtcaagactgcgcctactttggggtaatgttgagaagacaaacttcttcctggaaaatgtttctatgcatcaagttgttaaagaaatcaaaagtgggactagggagaggaacttggcattgcgatttatgtttatttaaagtgtcccatactttgaaattacacatgaaaagttgtaatgggataggcctgtgaggagcacctatatctggtgagaaaaccagtgtcttcttctaagatgggttttaaaaatgaaactaagtaaaaaatgtcacactttgggctccctggaatgatgtctacaaaccgtctgtatccttcaggctccaaaaggcctgaatagactctggcagcccccaacttgaagataggtggcctctttttcagaaggacttgaaatgccccactgtcttctagtgaacttgctttctaaaagaaataaatggttctgcttccct

SEQ ID NO: 409014 - DNA, 1714 bp, Homo sapiens
  misc_feature (1662)..(1662): n is a, c, g, or t
agacagagtctcattctgttgcccaggctggagtgcagtggcacaatctcagcttactgcaacctccgcctcccaggttcaagctattctcctgcctcagcctcccgagtactggtttgggtttgtccccctcatagtgtaatttacagtggttagaccccttaaactcgatgccgtcccatgacaatttcccattgtctgggaatccttgtagacaccttacaagctcagacctgctgaggattacggtggctctgagttgtggtcaggcgaagtgcacagggcactgtttctttccaaaaggtcagccaatggtgtgaggcaggaatctacctcttggcttcccaagctgtagacaagtgccagtctcgagaaggggttgatatcgccttgaacgacattgcgacattcctgggcacagtcaaggagtacccgttgctcagccccaaggagttttacaacgagtttgagttgctgctcaccctcgatgcaaaggtaatgcttccgggttattttgatcctgtggttgggaaacggataggggagggagggactgtaccttcttcctgataaagtacacacagggtactgagcaggctgaattgagtgggctcactggttccgaagccctccggcggcctcttagactctcggcctgaacgtcctggcatactgagtcttcgtctgactcaaatcagtcatttctctattaatgcttatgagcattcctgatgtaccatgtgctgtgctgagtgctgaggataccatgatgattaaaaataggcatgcttccatccctcactgagcttacagtttgtgggagaggctgacattaacaaaataatcacacaaaaatgtgttacaagctgatataagtgctgtcaaggagggatgcagggtcaggcatgtgacagaggaacttgacctggactggggtcagagaaggctctcaggaagagtcacttgagcctggagaacgaatagacaagatgggagagcctttccagacaggaggaacagcatgtgcaaaggcttcagggctggagggagcctggcacagtgcagaccaaaaggtcagggtgctggaacctagagagcaatggaagtgtgttttgggtgaggttagagagaggcaggcaaggtaggctttgtgggccacatgagcgagtttggatttaagcagggagataacttgattggatttgcatttgagaagcatattcttccatgaagccagcagggttgtaggtagcacaccttcctctgagagccacatcatcaccttgtctgcacctctggtttaggagcttcttttaatcagcttccttgaaagagtccggaagaaagtgagttttaggcttttcttcttggaggcagaaacagagtgggaacgagggttctcagcagacttttcttagagagagagaaagctgcgtccgtttgccaatttgtttagtcatcctgtattctgggcagattaggacgtagccaccgctgtccataaatccctcctggttggaggaattgcatcaccatgttttctcaagttaggaaactgtatgaaatttcatactgtcctgatcagccacctaaaaaagtaaatagcaatttttaaaaatagattcacctgatttaacacccaggaggtctgtggaatcattnagtaatattaaaagggtttcattgtggtcctcttcaaaagtgaacatcagcc

SEQ ID NO: 409015 - DNA, 2317 bp, Homo sapiens
  misc_feature (1398)..(1398): n is a, c, g, or t
tttttcgtgtgactcaatcactttattttatagataaataaactgacgttcagtgtaaagaggtgacttatccaaagtcatttggtcaactagtggcagcattgagactaaaaccagcctctttttaatctccctatcagaatcaggtcctctataccatttccaaggtgaggtgattattcactaattttatcaactaaatctgttgtctttccatcaagacagcatgttggtgaatgttaatctctccatattgttacaattgtctgaccttccaggccatcgaaaactttgccttgaccttgaagaccactgcccagatgctgcagacgtttgggtcctgcctggccacagcagagctgcccagaagcatgctatccacggaagaccttctcatgtcccacacaaggcagcgggacaagctgcaggatgagctgaaattacttggaaagcaggggaccacattgctgtcatgcatccaagaaccagcaaccaaatgtcccaacagcaaactcaatctcaaccaacttgagaatgtaactaccatggaaaggttattagttcaactggatgaaacagaaaaagcctttagtcacttttggtctgagcatcatctgaagcttaaccagtgcctacaactacagcattttgagcacgatttttgtaaggctaagcttgccctggataatttgctggaagagcaagcagagtttacaggcattggagacagcgtgatgcacgtggagcagattcttaaggaacacaaaaaactggaggaaaaaagccaggagcccctggaaaaggcccagctgctggcactggttggggaccagctcatccaaagccaccattatgcagcagatgccatcaggccccggtgtgtggagctcaggcacctctgtgacgatttcatcaatggaaacaagaaaaaatgggacattttaggaaagtccttagagtttcatagacagctggacaaggtcagccaatggtgtgaggcaggaatctacctcttggcttcccaagctgtagacaagtgccagtctcgagaaggggttgatatcgccttgaacgacattgcgacattcctgggcacagtcaaggagtacccgttgctcagccccaaggagttttacaacgagtttgagttgctgctcaccctcgatgcaaaggccaaagcccagaaagttttgcagaggctggatgatgtccaggaaatatttcacaagaggcaagtgagtctgatgaaactggcagccaaacagactcgtccagtgcaacctgtggccccacatcctgagtcttcaccaaaatgggtgtcatcaaaaaccagccagccctccacctcggtccctctagctcgtcctctgagaacgtctgaggaaccttatacggagncagagttgaactcccggggaaaggaagatgatgagactaaatttgaagtcaagagtgaagaaatctttgaaagccatcatgaaagggggaaccctgagctggagcagcaggccaggctcggagacctttccccccgcaggcgcattatacgtgacttgcttgagactgaagagatttacataaaagagattaaaagcataattgatggatatatcactccaatggattttatttggctaaagcatctaattccagatgttcttcagaataacaaggactttctctttgggaatattagagaactttacgaatttcacaacaggacttttctaaaagagttggaaaagtgtgctgagaaccctgaacttctggcacattgctttctcaagagaaaagaagatcttcagatatattttaaataccataagaatctgccccgagctagggcaatctggcaagagtgtcaagactgcgcctactttggggtaatgttgagaagacaaacttcttcctggaaaatgtttctatgcatcaagttgttaaagaaatcaaaagtgggactagggagaggaacttggcattgcgatttatgtttatttaaagtgtcccatactttgaaattacacatgaaaagttgtaatgggataggcctgtgaggagcacctatatctggtgagaaaaccagtgtcttcttctaagatgggttttaaaaatgaaactaagtaaaaaatgtcacactttgggctccctggaatgatgtctacaaaccgtctgtatccttcaggctccaaaaggcctgaatagactctggcagcccccaacttgaagataggtggcctctttttcagaaggacttgaaatgccccactgtcttctagtgaacttgctttctaaaagaaataaatggttctgcttccct

SEQ ID NO: 409016 - DNA, 449 bp, Homo sapiens
caaaggcagtggagcaggatccggaccatggattaaaaatatggaaagagctaccactagcaaggaagacccggcctccagcacaggagggattaaaggtagggagggtcccatgggagagtggagcacagaagcagtggggtgatgccagctgcttagatgctaaggaagacatcacctagggcccagcccttctttagttaaatgagggagaaaaaagaaagcattttaccaccatgtggtttaaaatcaatttcctgctattcatttgtgtagaactaatggggcagaattaacatgaagggcaaatgtctcacattgagaagtacaggagcacccccttatccactgtttcactttccaggttttagttactcttagtcaactgctgtccaaatatcaaatggaaaaattacagaaataaacaatcgatgagttttaaatgatat

SEQ ID NO: 409017 - DNA, 492 bp, Homo sapiens
tttttcgtgtgactcaatcactttattttatagataaataaactgacgttcagtgtaaagaggtgacttatccaaagtcatttggtcaactagtggcagcattgagactaaaaccagcctctttttaatctccctatcagaatcaggtcctctataccatttccaaggtgaggtgattattcactaattttatcaactaaatctgttgtctttccatcaagacagcatgttggtgaatgttaatctctccatattgttacaattgtctgaccttccaggccatcgaaaactttgccttgaccttgaagaccactgcccagatgctgcagacgtttgggtcctgcctggccacagcagagctgcccagaagcatgctatccacggaagaccttctcatgtcccacacaaggcagcgggacaagctgcaggtgagcggtcagtgacctctcagaggccagtgtctgtgccagcaggtatgcctgcctctcggag

SEQ ID NO: 409018 - DNA, 1837 bp, Homo sapiens
  misc_feature (918)..(918): n is a, c, g, or t
agccataggcctatatggatgcctgtggaaatgaatgctaacctaacatcactttctcattctttcttgaaaggttattagttcaactggatgaaacagaaaaagcctttagtcacttttggtctgagcatcatctgaagcttaaccagtgcctacaactacagcattttgagcacgatttttgtaaggctaagcttgccctggataatttgctggaagagcaagcagagtttacaggcattggagacagcgtgatgcacgtggagcagattcttaaggaacacaaaaaactggaggaaaaaagccaggagcccctggaaaaggcccagctgctggcactggttggggaccagctcatccaaagccaccattatgcagcagatgccatcaggccccggtgtgtggagctcaggcacctctgtgacgatttcatcaatggaaacaagaaaaaatgggacattttaggaaagtccttagagtttcatagacagctggacaaggtcagccaatggtgtgaggcaggaatctacctcttggcttcccaagctgtagacaagtgccagtctcgagaaggggttgatatcgccttgaacgacattgcgacattcctgggcacagtcaaggagtacccgttgctcagccccaaggagttttacaacgagtttgagttgctgctcaccctcgatgcaaaggccaaagcccagaaagttttgcagaggctggatgatgtccaggaaatatttcacaagaggcaagtgagtctgatgaaactggcagccaaacagactcgtccagtgcaacctgtggccccacatcctgagtcttcaccaaaatgggtgtcatcaaaaaccagccagccctccacctcggtccctctagctcgtcctctgagaacgtctgaggaaccttatacggagncagagttgaactcccggggaaaggaagatgatgagactaaatttgaagtcaagagtgaagaaatctttgaaagccatcatgaaagggggaaccctgagctggagcagcaggccaggctcggagacctttccccccgcaggcgcattatacgtgacttgcttgagactgaagagatttacataaaagagattaaaagcataattgatggatatatcactccaatggattttatttggctaaagcatctaattccagatgttcttcagaataacaaggactttctctttgggaatattagagaactttacgaatttcacaacaggacttttctaaaagagttggaaaagtgtgctgagaaccctgaacttctggcacattgctttctcaagagaaaagaagatcttcagatatattttaaataccataagaatctgccccgagctagggcaatctggcaagagtgtcaagactgcgcctactttggggtaatgttgagaagacaaacttcttcctggaaaatgtttctatgcatcaagttgttaaagaaatcaaaagtgggactagggagaggaacttggcattgcgatttatgtttatttaaagtgtcccatactttgaaattacacatgaaaagttgtaatgggataggcctgtgaggagcacctatatctggtgagaaaaccagtgtcttcttctaagatgggttttaaaaatgaaactaagtaaaaaatgtcacactttgggctccctggaatgatgtctacaaaccgtctgtatccttcaggctccaaaaggcctgaatagactctggcagcccccaacttgaagataggtggcctctttttcagaaggacttgaaatgccccactgtcttctagtgaacttgctttctaaaagaaataaatggttctgcttccct

SEQ ID NO: 409019 - DNA, 1152 bp, Homo sapiens
ttcatccttcgtccatctcgctttatccagaggacattcactgacattggcattaaatactatcgaaatgagtttaaaatgaaagtgccgatcatcatggtaaactctgtctctgaccttcacggctacatcgacaaaagccaactgacccgggaattaggggggactttggaatatcgccacggtcagtgggtaaatcaccgcactgccatcgaaaactttgccttgaccttgaagaccactgcccagatgctgcagacgtttgggtcctgcctggccacagcagagctgcccagaagcatgctatccacggaagaccttctcatgtcccacacaaggcagcgggacaagctgcaggatgagctgaaattacttggaaagcaggggaccacattgctgtcatgcatccaagaaccagcaaccaaatgtcccaacagcaaactcaatctcaaccaacttgagaatgtaactaccatggaaaggttattagttcaactggatgaaacagaaaaagcctttagtcacttttggtctgagcatcatctgaagcttaaccagtgcctacaactacagcattttgagcacgatttttgtaaggctaagcttgccctggataatttgctggaagagcaagcagagtttacaggcattggagacagcgtgatgcacgtggagcagattcttaaggaacacaaaaaactggaggaaaaaagccaggagcccctggaaaaggcccagctgctggcactggttggggaccagctcatccaaagccaccattatgcagcagatgccatcaggccccggtgtgtggagctcaggcacctctgtgacgatttcatcaatggaaacaagaaaaaatgggacattttaggaaagtccttagagtttcatagacagctggacaaggtgagcaaaacacagccaagaacatgatgtctgcaagattttctgtgaagaagcttccatcatactcgtcctcccttccttgtgtgattgctgagaggcttgagtgctttatgtgaaaagatgttcgagaggcattaaaaactgtgcagatcctggggtgtagaagtatacctggcacgaaggtaaaaagtgctctggccatcccaccacatcccattaaagttaactgaagcccatttctat

SEQ ID NO: 409020 - DNA, 3266 bp, Homo sapiens
cagtatggccctcgccggccgccatccccgaaacttggcgagtgtcgcgtctgcagtgtgtggggttcgcggggcggcgggtagagttgagcatttttgtcatctgcaaataattttagccaggtggcaagtgtatggactgtggagtaagaagtacctgcctctgcctctgacttgggttctggcctataggaacaagacattttcagtaatggaagaaggagcttccaggctggggaagatcatcatttccagtggtagcttgacctgagatgatacctgaccaccacttctgggaaggcccagaatagacagaagagagagaacatactagagttgctagcccctaagagttgaacgaaatgggcaaggcccagctgaaataacaggaaacacatgaaaaatgccacgattgtaatgtctgtgaggagagagcaaggcagttcttcaggggaggggtcattgtcattcgaagatgtggctgtgggcttcaccagggaggagtggcagtttttggaccagtctcagaaggtcttgtacaaggaagtaatgttggagaactacatcaacctagtatcaatagggtatcgaggcaccaagccagattcgctcttcaagttggagcaaggagaacccccagggatagcagaaggagcagcccacagtcaaatctgtccagggttttgttatccagagtagaagatatgcaggaaaagattctgatgcatttggtggatatgggagatcatgcctccatatcaagtgtgacaaaactcttactggagttaaataccatagatgtgttaaacccagcagccctaaatcacagctcaatgacctacaaaaaatttgtgcaggagggaaaccacatgaatgcagtgtgtgcgggagagccttctccaggaaagcacagcttattcaacatcagagaactgaaagaggagagaaaccccatggatgtggtgaatgtgggaaaacattcatgaggaagattcagctcactgagcatcagagaactcacacaggagagaagccccatgaatgtagtgaatgtggaaaagccttctccagaaagtcacagctcatggtccatcagagaacccatacaggagagaaaccctacagatgcagcgaatgcggaaaagccttcagccggaagtgccggctcaatagacatcagcgatcacatactggagagaaactctatgggtgcagtgtgtgtgggaaagccttttctcagaaggcatacctcactgcacaccagagacttcacacaggagataagccttataaatgcagtgattgtggaagaaccttctattttaagtcagacctgaccagacatcagaggattcatacgggagagaaaccttatgaatgtagtgagtgtgaaaaagcctttagaagcaagtcgaagctcattcagcatcagcgtactcacactggagagagaccatattcatgcagagaatgtggcaaagcctttgcccacatgtcagtcctcattaaacatgagaaaactcacataagagagacagccataaattcactgacggtggagaaaccttcctcaaggagtcatacctccttatacatgagcgaactcatacaagagcaaaagactgtgaacacagtacctatagaaatgccttcctcaggaaccccgccattgttaaacaagagtgagcgcctagtgggcagaaatgtagtgattgtggaacaaccttttccaagaaatcaagcctttgtagttaatcaggaatttgaacagagaataagcctcacaaatgaagtgaatgtggccccatcagtaataaattatatcttgtatcttacagatattgtatcagaataaatcttctgataccagaaaggtgggaaaatctttagtaggaatcctccagccattatatcccagagagctcatttagggctgaaacactgtggaggcagtggttgtggaggacatttctgtgagaagtcaaacctgttaaacaccattgaaatcatgttgggtagaaatgcagctgttatgaggaagtctttacctggagatgatatctcaattggtatcaaaagaattcttacaggaatatttatgaaagattgtgatggtgcttttagcgctaaattgtgcctcgtgtgccaaagaaacatagacaactgtagaggcaatggatatggaaaacatttttcgtaaaatatgggagaatttgtagaaaagaaaaactcttgaaagtaagaaatgatggcaactcaccaaattaactcatgtatcatacttttatgtcttgagagtcttggagggacgtgtttaatgaaatcttgaaccccaggaatagtattatgtaatgaaaacctatgaatataacaaatatggaagtaaaattgtgttagtttcttatgagtgttgcaccaaactaacacaaatttaatggcttaaaacaacacaaaatcattatcttacagttctggaggactgaagtccaaatgcatctcacggggctacatcaagctgttgacagggctgcttttctttttggaggctctaggggagcgtctttctttgcccttccagcttctagaagctgcccaaattctgtggtttggggcctcctttcaaaaccagcaatggccaatcagtcttacatcactcaaacacttgagtgttctgtctccctcttccatgtttgaggacccttgtgattacactgtgaaaacccagataagccaggataatctccctatcttattatgaggcaagtatgttaagattttattctataatcagagaatcttatgctatgattgttatatgtgagcattatagatgctcttgaaatgttaaaatcacatcagcactggaaaataactcctaaatgtccaaaaagaacatgagatttatggtgcttgaaatgttgctaaacgtaaatttgtatctattctgaaattatataaattaacctacctggccaggcacagtggctcacacctgtaatctcagcactttgggaggccaaggcaggaagatcacttgagcccgcaagtttgagaccaccctgggcaacatagcgagactacctctacaaaaaaaaaaaaaaataataatagctggacatggtggtgtgtgcctatagtcccagctacttgggaggctgaggcaagatgattgcttgagtccaggagttctaggctgcagtgactgcagtgagctatgatcatgccactgcactacagcgtgggtgacagaataagactctgactct

SEQ ID NO: 409021 - DNA, 816 bp, Homo sapiens
cagtatggccctcgccggccgccatccccgaaacttggcgagtgtcgcgtctgcagtgtgtggggttcgcggggcggcgggtagaggcgagtgtttagagacttcgggtccctgactcgcctccagcagtggagacaggtcatcggtctggtctgcgtgggcttctgggaatgtttcaggggcagggagagcgcgcttttttttttctgttgttcgctagcgcgtgaggtccgtgttgcggggagctctcggggagtcctcgctcggagttcgtttcgcagtcgtgttggagttcccagagtctgggagcccatggtctccgcattggaaccagtgcttgggaggtcttcgttgcacagtagcgctagggcgtcgtggtggggaagcgaatcgtgtcagtgttggagactgctctgggcagttcgtgttcattgcttatcacatgcgtacttaaaaaggggtctgctggtccccttgcttccctgctgctgtatattctgtagaaaatgggttttcaggttcattgcgacccaagtaataacatccccatcattttaaatactcctccagaaaataactctggtttagtgtatttcatgtttaatgttgggatcaggtgtctaggtattggtataattttattcgtctttaataacatcttgtcaacttcgtattcccatattacatgctctttgagagttttttaaattgctgcagtttcatcaagtggttgctttaattctgggtagaattgatgtagatctagatacaacactttcaggaacatgtgatggatttctattaacccaatatttt

SEQ ID NO: 409022 - DNA, 460 bp, Homo sapiens
  misc_feature (15)..(15): n is a, c, g, or t
gcttctgtgtggganctatgtgtaactacatcaacctagtatcaatagggtatcgaggcaccaagccagattcgctcttcaagttggagcaaggagaacccccagggatagcagaaggagcagcccacagtcaaatctgtccagggagggaaaccacatgaatgcagtgtgtgcgggagagccttctccaggaaagcacagcttattcaacatcagagaactgaaagaggagagaaaccccatggatgtggtgaatgtgggaaaacattcatgaggaagattcagctcactgagcatcagagaactcacacaggagagaagccccatgaatgtagtgaatgtggaaaagccttctccagaaagtcacagctcatggtccatcagagaaccacacggccagcacaagaacccagaaagaaccacacgccagcaaagaaccacacgggttaccgagctcgaa

SEQ ID NO: 409023 - DNA, 809 bp, Homo sapiens
cagtatggccctcgccggccgccatccccgaaacttggcgagtgtcgcgtctgcagtgtgtggggttcgcggggcggcgggtagagttgagcatttttgtcatctgcaaataattttagccaggtggcaagtgtatggactgtggagtaagaagtacctgcctctgcctctgacttgggttctggcctataggaacaagacattttcagtaatggaagaaggagcttccaggctggggaagatcatcatttccagtggtagcttgacctgagatgatacctgaccaccacttctgggaaggcccagaatagacagaagagagagaacatactagagttgctagcccctaagagttgaacgaaatgggcaaggcccagctgaaataacaggaaacacatgaaaaatgccacgattgtaatgtctgtgaggagagagcaaggcagttcttcaggggaggggtcattgtcattcgaagatgtggctgtgggcttcaccagggaggagtggcagtttttggaccagtctcagaaggtcttgtacaaggaagtaatgttggagaactacatcaacctagtatcaatagggtatcgaggcaccaagccagattcgctcttcaagttggagcaaggagaacccccagggatagcagaaggagcagcccacagtcaaatctgtccagggtattcattcaggagaaggaccctacagatggagggaatgcaggaaagctaagaagaatcacacctcattgcagatctgcattaccgttggaaaacagcagccagaaccacaaatatcgggggatcctc

SEQ ID NO: 409024 - DNA, 1354 bp, Homo sapiens
cagtatggccctcgccggccgccatccccgaaacttggcgagtgtcgcgtctgcagtgtgtggggttcgcggggcggcgggtagagttgagcatttttgtcatctgcaaataattttagccaggtggcaagtgtatggactgtggagtaagaagtacctgcctctgcctctgacttgggttctggcctataggaacaagacattttcagtaatggaagaaggagcttccaggctggggaagatcatcatttccagtggtagcttgacctgagatgatacctgaccaccacttctgggaaggcccagaatagacagaagagagagaacatactagagttgctagcccctaagagttgaacgaaatgggcaaggcccagctgaaataacaggaaacacatgaaaaatgccacgattgtaatgtctgtgaggagagagcaaggcagttcttcaggggaggggtcattgtcattcgaagatgtggctgtgggcttcaccagggaggagtggcagtttttggaccagtctcagaaggtcttgtacaaggaagtaatgttggagaactacatcaacctagtatcaatagggtatcgaggcaccaagccagattcgctcttcaagttggagcaaggagaacccccagggatagcagaaggagcagcccacagtcaaatctgtccagggttttgttatccagagtagaagatatgcaggaaaagattctgatgcatttggtggatatgggagatcatgcctccatatcaagtgtgacaaaactcttactggagttaaataccatagatgtgttaaacccagcagccctaaatcacagctcaatgacctacaaaaaatttgtgcaggagggaaaccacatgaatgcagtgtgtgcgggagagccttctccaggaaagcacagcttattcaacatcagagaactgaaagaggagagaaaccccatggatgtggtgaatgtgggaaaacattcatgaggaagattcagctcactgagcatcagagaactcacacaggagagaagccccatgaatgtagtgaatgtggaaaagccttctccagaaagtcacagctcatggtccatcagagaacccatacaggagagaaaccctacagatgcagcgaatgcggaaaagccttcagccggaagtgccggctcaatagacatcagcgatcacatactggagagaaactctatgggtgcagtgtgtgtgggaaagccttttctcagaaggcatacctcactgcacaccagagacttcacacaggagataagccttataaatgcagtgattgtggaagaaccttctatggttgtccattctatggtggtgcggatcctgta

SEQ ID NO: 409025 - DNA, 2934 bp, Homo sapiens
ctcgctctagagtatccccatgccaataacctccacagagtgtgaggtacattactctgagactgagatcttataaaagccagccaaaaccatggcatttttgcaccttctgccacctccacaaaaaattatcatggatgttcatattgtgctttttcctaggagaaatttggggggtttaccatatgcagtggtacccagaaaaccaaaatgagcttaaacattttgaaagatgtcaacaaagttatgcccttggaaataagtttggtttatgtaagagcattgttcctttaatgtaaagacacaataagtttggctcgcattgtaaaagtttgaaatctcatttaggttttgttatccagagtagaagatatgcaggaaaagattctgatgcatttggtggatatgggagatcatgcctccatatcaagtgtgacaaaactcttactggagttaaataccatagatgtgttaaacccagcagccctaaatcacagctcaatgacctacaaaaaatttgtgcaggagggaaaccacatgaatgcagtgtgtgcgggagagccttctccaggaaagcacagcttattcaacatcagagaactgaaagaggagagaaaccccatggatgtggtgaatgtgggaaaacattcatgaggaagattcagctcactgagcatcagagaactcacacaggagagaagccccatgaatgtagtgaatgtggaaaagccttctccagaaagtcacagctcatggtccatcagagaacccatacaggagagaaaccctacagatgcagcgaatgcggaaaagccttcagccggaagtgccggctcaatagacatcagcgatcacatactggagagaaactctatgggtgcagtgtgtgtgggaaagccttttctcagaaggcatacctcactgcacaccagagacttcacacaggagataagccttataaatgcagtgattgtggaagaaccttctattttaagtcagacctgaccagacatcagaggattcatacgggagagaaaccttatgaatgtagtgagtgtgaaaaagcctttagaagcaagtcgaagctcattcagcatcagcgtactcacactggagagagaccatattcatgcagagaatgtggcaaagcctttgcccacatgtcagtcctcattaaacatgagaaaactcacataagagagacagccataaattcactgacggtggagaaaccttcctcaaggagtcatacctccttatacatgagcgaactcatacaagagcaaaagactgtgaacacagtacctatagaaatgccttcctcaggaaccccgccattgttaaacaagagtgagcgcctagtgggcagaaatgtagtgattgtggaacaaccttttccaagaaatcaagcctttgtagttaatcaggaatttgaacagagaataagcctcacaaatgaagtgaatgtggccccatcagtaataaattatatcttgtatcttacagatattgtatcagaataaatcttctgataccagaaaggtgggaaaatctttagtaggaatcctccagccattatatcccagagagctcatttagggctgaaacactgtggaggcagtggttgtggaggacatttctgtgagaagtcaaacctgttaaacaccattgaaatcatgttgggtagaaatgcagctgttatgaggaagtctttacctggagatgatatctcaattggtatcaaaagaattcttacaggaatatttatgaaagattgtgatggtgcttttagcgctaaattgtgcctcgtgtgccaaagaaacatagacaactgtagaggcaatggatatggaaaacatttttcgtaaaatatgggagaatttgtagaaaagaaaaactcttgaaagtaagaaatgatggcaactcaccaaattaactcatgtatcatacttttatgtcttgagagtcttggagggacgtgtttaatgaaatcttgaaccccaggaatagtattatgtaatgaaaacctatgaatataacaaatatggaagtaaaattgtgttagtttcttatgagtgttgcaccaaactaacacaaatttaatggcttaaaacaacacaaaatcattatcttacagttctggaggactgaagtccaaatgcatctcacggggctacatcaagctgttgacagggctgcttttctttttggaggctctaggggagcgtctttctttgcccttccagcttctagaagctgcccaaattctgtggtttggggcctcctttcaaaaccagcaatggccaatcagtcttacatcactcaaacacttgagtgttctgtctccctcttccatgtttgaggacccttgtgattacactgtgaaaacccagataagccaggataatctccctatcttattatgaggcaagtatgttaagattttattctataatcagagaatcttatgctatgattgttatatgtgagcattatagatgctcttgaaatgttaaaatcacatcagcactggaaaataactcctaaatgtccaaaaagaacatgagatttatggtgcttgaaatgttgctaaacgtaaatttgtatctattctgaaattatataaattaacctacctggccaggcacagtggctcacacctgtaatctcagcactttgggaggccaaggcaggaagatcacttgagcccgcaagtttgagaccaccctgggcaacatagcgagactacctctacaaaaaaaaaaaaaaataataatagctggacatggtggtgtgtgcctatagtcccagctacttgggaggctgaggcaagatgattgcttgagtccaggagttctaggctgcagtgactgcagtgagctatgatcatgccactgcactacagcgtgggtgacagaataagactctgactct

SEQ ID NO: 409026 - DNA, 3491 bp, Homo sapiens
cgatatttgtggttctggcccctctgctgcactgtgattatcaaggaggtccctccaccccctgccgaggagagtgaggaagaagatgatgatggtctgcctaagaaaaagtggccaacggtagacgcctcttattatggtgggagaggcgttggaggcattaaaagaatggaggttcgttggggagaaaagggctccacagaagaaggtgctaagttggaaaaggcaaagaatgcaagagtcaagatgccggagcaggaatatgaattccctgagccgcgaaatctcaacaacaatatgcgtcggccttcttccccccggaagtggtactctccaatcaagggaaaactcgatgccttgtgggtcctactgaggaaaggatatgatcgtgtgtctgtgatgcgtccacagccaggagacacggggcgccgcatcaacttcaccagggtcaagaacaaccagccagccaagtacccactcaacaacgccagaacctacaaatatctgaccaccacttctgggaaggcccagaatagacagaagagagagaacatactagagttgctagcccctaagagttgaacgaaatgggcaaggcccagctgaaataacaggaaacacatgaaaaatgccacgattgtaatgtctgtgaggagagagcaaggcagttcttcaggggaggggtcattgtcattcgaagatgtggctgtgggcttcaccagggaggagtggcagtttttggaccagtctcagaaggtcttgtacaaggaagtaatgttggagaactacatcaacctagtatcaatagggtatcgaggcaccaagccagattcgctcttcaagttggagcaaggagaacccccagggatagcagaaggagcagcccacagtcaaatctgtccagggttttgttatccagagtagaagatatgcaggaaaagattctgatgcatttggtggatatgggagatcatgcctccatatcaagtgtgacaaaactcttactggagttaaataccatagatgtgttaaacccagcagccctaaatcacagctcaatgacctacaaaaaatttgtgcaggagggaaaccacatgaatgcagtgtgtgcgggagagccttctccaggaaagcacagcttattcaacatcagagaactgaaagaggagagaaaccccatggatgtggtgaatgtgggaaaacattcatgaggaagattcagctcactgagcatcagagaactcacacaggagagaagccccatgaatgtagtgaatgtggaaaagccttctccagaaagtcacagctcatggtccatcagagaacccatacaggagagaaaccctacagatgcagcgaatgcggaaaagccttcagccggaagtgccggctcaatagacatcagcgatcacatactggagagaaactctatgggtgcagtgtgtgtgggaaagccttttctcagaaggcatacctcactgcacaccagagacttcacacaggagataagccttataaatgcagtgattgtggaagaaccttctattttaagtcagacctgaccagacatcagaggattcatacgggagagaaaccttatgaatgtagtgagtgtgaaaaagcctttagaagcaagtcgaagctcattcagcatcagcgtactcacactggagagagaccatattcatgcagagaatgtggcaaagcctttgcccacatgtcagtcctcattaaacatgagaaaactcacataagagagacagccataaattcactgacggtggagaaaccttcctcaaggagtcatacctccttatacatgagcgaactcatacaagagcaaaagactgtgaacacagtacctatagaaatgccttcctcaggaaccccgccattgttaaacaagagtgagcgcctagtgggcagaaatgtagtgattgtggaacaaccttttccaagaaatcaagcctttgtagttaatcaggaatttgaacagagaataagcctcacaaatgaagtgaatgtggccccatcagtaataaattatatcttgtatcttacagatattgtatcagaataaatcttctgataccagaaaggtgggaaaatctttagtaggaatcctccagccattatatcccagagagctcatttagggctgaaacactgtggaggcagtggttgtggaggacatttctgtgagaagtcaaacctgttaaacaccattgaaatcatgttgggtagaaatgcagctgttatgaggaagtctttacctggagatgatatctcaattggtatcaaaagaattcttacaggaatatttatgaaagattgtgatggtgcttttagcgctaaattgtgcctcgtgtgccaaagaaacatagacaactgtagaggcaatggatatggaaaacatttttcgtaaaatatgggagaatttgtagaaaagaaaaactcttgaaagtaagaaatgatggcaactcaccaaattaactcatgtatcatacttttatgtcttgagagtcttggagggacgtgtttaatgaaatcttgaaccccaggaatagtattatgtaatgaaaacctatgaatataacaaatatggaagtaaaattgtgttagtttcttatgagtgttgcaccaaactaacacaaatttaatggcttaaaacaacacaaaatcattatcttacagttctggaggactgaagtccaaatgcatctcacggggctacatcaagctgttgacagggctgcttttctttttggaggctctaggggagcgtctttctttgcccttccagcttctagaagctgcccaaattctgtggtttggggcctcctttcaaaaccagcaatggccaatcagtcttacatcactcaaacacttgagtgttctgtctccctcttccatgtttgaggacccttgtgattacactgtgaaaacccagataagccaggataatctccctatcttattatgaggcaagtatgttaagattttattctataatcagagaatcttatgctatgattgttatatgtgagcattatagatgctcttgaaatgttaaaatcacatcagcactggaaaataactcctaaatgtccaaaaagaacatgagatttatggtgcttgaaatgttgctaaacgtaaatttgtatctattctgaaattatataaattaacctacctggccaggcacagtggctcacacctgtaatctcagcactttgggaggccaaggcaggaagatcacttgagcccgcaagtttgagaccaccctgggcaacatagcgagactacctctacaaaaaaaaaaaaaaataataatagctggacatggtggtgtgtgcctatagtcccagctacttgggaggctgaggcaagatgattgcttgagtccaggagttctaggctgcagtgactgcagtgagctatgatcatgccactgcactacagcgtgggtgacagaataagactctgactct

SEQ ID NO: 409027 - DNA, 588 bp, Homo sapiens
  misc_feature (575)..(575): n is a, c, g, or t
atttgtaatttaaaaatttaaggaaaactaaacagagtgagactctgtctcaaaaaaaaaaaaaaaaaaaaaaaagagagagtcaattatgagtgcagtgattgtcaaaaaagtttattagaaaactagaagctttccatttagtaggcagcaccagtggatgtaatgaaaatgataaatcattctcaaattatatttgttacacattagggtattcattcaggagaaggaccctacagatggagggaatgcaggaaagctaagaagaatcacacctcattgcagatctgcattaccgttggaaaacagcagcctcagaaccacagtagccatgaagaccatcagccttcaaccaccacccttgtatcagaggagacaaataagcttggaaatcctcaaaaagcctcatcctcagagcaatgtcattatatatcttgtcttacagctccataaactcagcaagctatgctgcgccggattgagctacttggcattcgccttaaggagcgatacatcattgccggttacacgcggatggaaccctgcgtacactatcgctgagacatcctcgcagntggatacgaagcc

SEQ ID NO: 409028 - DNA, 655 bp, Homo sapiens
  misc_feature (642)..(642): n is a, c, g, or t
cttccttacaaagacaatgctcattgtacatcacagaactcacacgggagagagaccctatggctgtgatgagtgttctggcctataggaacaagacattttcagtaatggaagaaggagcttccaggctggggaagatcatcatttccagtggtagcttgacctgagatgatacctgaccaccacttctgggaaggcccagaatagacagaagagagagaacatactagagttgctagcccctaagagttgaacgaaatgggcaaggcccagctgaaataacaggaaacacatgaaaaatgccacgattgtaatgtctgtgaggagagagcaaggcagttcttcaggggagatctgcattaccgttggaaaacagcagcctcagaaccacagtagccatgaagaccatcagccttcaaccaccacccttgtatcagaggagacaaataagcttggaaatcctcaaaaagcctcatcctcagagcaatgtcattatatatcttgtcttacagctccataaactcagcaagctatgctgcgccggattgagctacttggcattcgccttaaggagcgatacatcattgccggttacacgcggatggaaccctgcgtacactatcgctgagacatcctcgcagntggatacgaagcc

SEQ ID NO: 409029 - DNA, 594 bp, Homo sapiens
gtttcactgtgttagccaggatagtcttaatctcccgactttgtgatctgcccacctcggcctcccaaagtactgagattacaggtgtgagccaccacgcccagccgtattattacatttttaaaatatgtcttagatcatatattatttgggagcttaattttttgcatttaagagactgccttggagatcattgataatcatgtgggtatgtatacatctacctcattgattttaacatttttgcagtatattatagcatggaggtgctgtaatttaaccctgtctgcttttgatagacatttagattattggtaagtttttcattatgagaaacaaaggaataatgaacagtcttattacatgttgtttcatatctatgctagtactgccttcgtgcttttagggtaggcagaattggtggaattccatggtcctttggtatgtgaaatagccatggtgtgcatacgttgtcatggagaaaaggatcaagacatgtccccgtccctcttctccgcatcatctattgttatccacctcagattgcattggaattgttattataggggtcattgtcattcgaagatgtggctg

SEQ ID NO: 409030 - DNA, 378 bp, Homo sapiens
gtcacttcattgtactcatgtcattacatataacttataaattgacgtcttttttctagttgagcatttttgtcatctgcaaataattttagccaggtggcaagtgtatggactgtggagtaagaagtacctgcctctgcctctgacttgggtacgttaatctctgagtcagtttccttatttgtggaaaaaagctgtcatagtttctttttcatggaatcattatgaagattaagtgagcaaatgttctttaagtatgttcaaagtgtagtactaggtacgtagtatggtctgaataaataattactgtgatttatcaagtttttatttctctttcctaagggcttttgaccattacaattattttcatttattttt

SEQ ID NO: 409031 - DNA, 779 bp, Homo sapiens
  misc_feature (766)..(766): n is a, c, g, or t
cagtatggccctcgccggccgccatccccgaaacttggcgagtgtcgcgtctgcagtgtgtggggttcgcggggcggcgggtagagttgagcatttttgtcatctgcaaataattttagccaggtggcaagtgtatggactgtggagtaagaagtacctgcctctgcctctgacttgggggtcattgtcattcgaagatgtggctgtgggcttcaccagggaggagtggcagtttttggaccagtctcagaaggtcttgtacaaggaagtaatgttggagaactacatcaacctagtatcaatagggtatcgaggcaccaagccagattcgctcttcaagttggagcaaggagaacccccagggatagcagaaggagcagcccacagtcaaatctgtccagggtattcattcaggagaaggaccctacagatggagggaatgcaggaaagctaagaagaatcacacctcattgcagatctgcattaccgttggaaaacagcagcctcagaaccacagtagccatgaagaccatcagccttcaaccaccacccttgtatcagaggagacaaataagcttggaaatcctcaaaaagcctcatcctcagagcaatgtcattatatatcttgtcttacagctccataaactcagcaagctatgctgcgccggattgagctacttggcattcgccttaaggagcgatacatcattgccggttacacgcggatggaaccctgcgtacactatcgctgagacatcctcgcagntggatacgaagcc

SEQ ID NO: 409032 - DNA, 3162 bp, Homo sapiens
cttccttacaaagacaatgctcattgtacatcacagaactcacacgggagagagaccctatggctgtgatgagtgttctggcctataggaacaagacattttcagtaatggaagaaggagcttccaggctggggaagatcatcatttccagtggtagcttgacctgagatgatacctgaccaccacttctgggaaggcccagaatagacagaagagagagaacatactagagttgctagcccctaagagttgaacgaaatgggcaaggcccagctgaaataacaggaaacacatgaaaaatgccacgattgtaatgtctgtgaggagagagcaaggcagttcttcaggggaggggtcattgtcattcgaagatgtggctgtgggcttcaccagggaggagtggcagtttttggaccagtctcagaaggtcttgtacaaggaagtaatgttggagaactacatcaacctagtatcaatagggtatcgaggcaccaagccagattcgctcttcaagttggagcaaggagaacccccagggatagcagaaggagcagcccacagtcaaatctgtccagggttttgttatccagagtagaagatatgcaggaaaagattctgatgcatttggtggatatgggagatcatgcctccatatcaagtgtgacaaaactcttactggagttaaataccatagatgtgttaaacccagcagccctaaatcacagctcaatgacctacaaaaaatttgtgcaggagggaaaccacatgaatgcagtgtgtgcgggagagccttctccaggaaagcacagcttattcaacatcagagaactgaaagaggagagaaaccccatggatgtggtgaatgtgggaaaacattcatgaggaagattcagctcactgagcatcagagaactcacacaggagagaagccccatgaatgtagtgaatgtggaaaagccttctccagaaagtcacagctcatggtccatcagagaacccatacaggagagaaaccctacagatgcagcgaatgcggaaaagccttcagccggaagtgccggctcaatagacatcagcgatcacatactggagagaaactctatgggtgcagtgtgtgtgggaaagccttttctcagaaggcatacctcactgcacaccagagacttcacacaggagataagccttataaatgcagtgattgtggaagaaccttctattttaagtcagacctgaccagacatcagaggattcatacgggagagaaaccttatgaatgtagtgagtgtgaaaaagcctttagaagcaagtcgaagctcattcagcatcagcgtactcacactggagagagaccatattcatgcagagaatgtggcaaagcctttgcccacatgtcagtcctcattaaacatgagaaaactcacataagagagacagccataaattcactgacggtggagaaaccttcctcaaggagtcatacctccttatacatgagcgaactcatacaagagcaaaagactgtgaacacagtacctatagaaatgccttcctcaggaaccccgccattgttaaacaagagtgagcgcctagtgggcagaaatgtagtgattgtggaacaaccttttccaagaaatcaagcctttgtagttaatcaggaatttgaacagagaataagcctcacaaatgaagtgaatgtggccccatcagtaataaattatatcttgtatcttacagatattgtatcagaataaatcttctgataccagaaaggtgggaaaatctttagtaggaatcctccagccattatatcccagagagctcatttagggctgaaacactgtggaggcagtggttgtggaggacatttctgtgagaagtcaaacctgttaaacaccattgaaatcatgttgggtagaaatgcagctgttatgaggaagtctttacctggagatgatatctcaattggtatcaaaagaattcttacaggaatatttatgaaagattgtgatggtgcttttagcgctaaattgtgcctcgtgtgccaaagaaacatagacaactgtagaggcaatggatatggaaaacatttttcgtaaaatatgggagaatttgtagaaaagaaaaactcttgaaagtaagaaatgatggcaactcaccaaattaactcatgtatcatacttttatgtcttgagagtcttggagggacgtgtttaatgaaatcttgaaccccaggaatagtattatgtaatgaaaacctatgaatataacaaatatggaagtaaaattgtgttagtttcttatgagtgttgcaccaaactaacacaaatttaatggcttaaaacaacacaaaatcattatcttacagttctggaggactgaagtccaaatgcatctcacggggctacatcaagctgttgacagggctgcttttctttttggaggctctaggggagcgtctttctttgcccttccagcttctagaagctgcccaaattctgtggtttggggcctcctttcaaaaccagcaatggccaatcagtcttacatcactcaaacacttgagtgttctgtctccctcttccatgtttgaggacccttgtgattacactgtgaaaacccagataagccaggataatctccctatcttattatgaggcaagtatgttaagattttattctataatcagagaatcttatgctatgattgttatatgtgagcattatagatgctcttgaaatgttaaaatcacatcagcactggaaaataactcctaaatgtccaaaaagaacatgagatttatggtgcttgaaatgttgctaaacgtaaatttgtatctattctgaaattatataaattaacctacctggccaggcacagtggctcacacctgtaatctcagcactttgggaggccaaggcaggaagatcacttgagcccgcaagtttgagaccaccctgggcaacatagcgagactacctctacaaaaaaaaaaaaaaataataatagctggacatggtggtgtgtgcctatagtcccagctacttgggaggctgaggcaagatgattgcttgagtccaggagttctaggctgcagtgactgcagtgagctatgatcatgccactgcactacagcgtgggtgacagaataagactctgactct

SEQ ID NO: 409033 - DNA, 1057 bp, Homo sapiens
  misc_feature (1044)..(1044): n is a, c, g, or t
cagtatggccctcgccggccgccatccccgaaacttggcgagtgtcgcgtctgcagtgtgtggggttcgcggggcggcgggtagagttgagcatttttgtcatctgcaaataattttagccaggtggcaagtgtatggactgtggagtaagaagtacctgcctctgcctctgacttgggttctggcctataggaacaagacattttcagtaatggaagaaggagcttccaggctggggaagatcatcatttccagtggtagcttgacctgagatgatacctgaccaccacttctgggaaggcccagaatagacagaagagagagaacatactagagttgctagcccctaagagttgaacgaaatgggcaaggcccagctgaaataacaggaaacacatgaaaaatgccacgattgtaatgtctgtgaggagagagcaaggcagttcttcaggggaggggtcattgtcattcgaagatgtggctgtgggcttcaccagggaggagtggcagtttttggaccagtctcagaaggtcttgtacaaggaagtaatgttggagaactacatcaacctagtatcaatagggtatcgaggcaccaagccagattcgctcttcaagttggagcaaggagaacccccagggatagcagaaggagcagcccacagtcaaatctgtccagggtattcattcaggagaaggaccctacagatggagggaatgcaggaaagctaagaagaatcacacctcattgcagatctgcattaccgttggaaaacagcagcctcagaaccacagtagccatgaagaccatcagccttcaaccaccacccttgtatcagaggagacaaataagcttggaaatcctcaaaaagcctcatcctcagagcaatgtcattatatatcttgtcttacagctccataaactcagcaagctatgctgcgccggattgagctacttggcattcgccttaaggagcgatacatcattgccggttacacgcggatggaaccctgcgtacactatcgctgagacatcctcgcagntggatacgaagcc

SEQ ID NO: 409034 - DNA, 400 bp, Homo sapiens
atctgcattaccgttggaaaacagcagcctcagaaccacagtagccatgaagaccatcagccttcaaccaccacccttgtatcagaggagacaaataagcttggaaatcctcaaaaagcctcatcctcagagcaatgtcattatatatcttgtcttacagctccatgatgtggttccattctttgtcctaactcattctctcacctgactcaaagctcactttgaaggaaaagtgcgatactagggcactggtcaaaaacgatcagcttcaattgtttaactttgtagtagcctaagcctgcagtaccgttagggagcaaacaagagctctgaaaaattgttaaacggacatctgaagaacaagatgttaatagggaactcttaaatactctgacatatt

SEQ ID NO: 409035 - DNA, 321 bp, Homo sapiens
ctgagtagctgggactacagttgcgcaccaccatgcccagctaatttttgtatttttagtagagacagggtttcaccatgttggccagggtggtctcaaaatccttacatcaggtggtctacccgcctcagcctccaaggtgctgggattacaggtgtgagccaccacaccagcttaaataattcttaaaattagtaatttttggtaaaattttttaatatattttgtataagtttatatctaggtattttatcatataaacatttaaatatatgaatatatatttatattttaaaatcacatatatatgactaaagcaga

SEQ ID NO: 409036 - DNA, 308 bp, Homo sapiens
aaggacattagtagaaaaactgatgtaatctaattaaaggctgtagtttatcacattgtacctatgtttaatttcttctgacaaatgtactgtggtcatgcaagattaacatcagaagtagctgggttaagcgcatacaggaactcttcatataatctttatgtgcttctatggatctaaaattttttcaaaattaaaagttttttaaaagtcaatctggccaggtgcagtggctcacacctataatcccagcactttgggaggccaaggcaggagaatcgcttgaacccaggaggcagaggttgcag

SEQ ID NO: 409037 - DNA, 369 bp, Homo sapiens
  misc_feature (276)..(276): n is a, c, g, or t
aaaagagaggtttgaccctactcagtttcaagactgtattattcaaggcttaactgaaaccggtactgatttggaagcagtatttctgtctggactagaggcactctgacatcaatttggaaattggaattaagaaaatacgtttttaaaatcgtaatacttatcagatttcactaatatttaaacagtggggatagcggcgccgcacatctcggatcagccccccaaaggccgccccgtccgccgaaggggatcatcttcagctgcccctgccgnctctaccatctgcaggagcgccttatcttgggcagatttgggctccagccaagcccctgtaggtagcagccggccctgttcctttggtttctt

SEQ ID NO: 409038 - DNA, 2070 bp, Homo sapiens
cggcgatgccccagacgcggctgcagttttcaaaccgcgactgcaagcttcggtagtcctctccgctgctgtcgccaggagtcacttcacgagaagccaggtcacaaccgtcggcccttgtctggaaaagtaaaagtggatcctgccacgttcggagctccctggcgcctcgcccggctggagctagagaactcgtcctgtggcggcccccggcgtggggcgggacagcggccccctggagggggcagtcccgggagaacctgcggcggccggagcggtaaaaataagtgactaaagaagcagacctgggaatcacctaacatgtcgaggaggagatttgattgccgaagtatttcaggcctactaactacaactcctcaaattccaataaaaatggaaaactttaataatttctatatacttacatctaaagagctagggagaggaaaatttgctgtggttagacaatgtatatcaaaatctactggccaagaatatgctgcaaaatttctaaaaaagagaagaagaggacaggattgtcgggcagaaattttacacgagattgctgtgcttgaattggcaaagtcttgtccccgtgttattaatcttcatgaggtctatgaaaatacaagtgaaatcattttgatattggaatatgctgcaggtggagaaattttcagcctgtgtttacctgagttggctgaaatggtttctgaaaatgatgttatcagactcattaaacaaatacttgaaggagtttattatctacatcagaataacattgtacaccttgatttaaagccacagaatatattactgagcagcatataccctctcggggacattaaaatagtagattttggaatgtctcgaaaaatagggcatgcgtgtgaacttcgggaaatcatgggaacaccagaatatttagctccagaaatcctgaactatgatcccattaccacagcaacagatatgtggaatattggtataatagcatatatgttgttaactcacacatcaccatttgtgggagaagataatcaagaaacatacctcaatatctctcaagttaatgtagattattcggaagaaactttttcatcagtttcacagctggccacagactttattcagagccttttagtaaaaaatccagagaaaagaccaacagcagagatatgcctttctcattcttggctacagcagtgggactttgaaaacttgtttcaccctgaagaaacttccagttcctctcaaactcaggatcattctgtaaggtcctctgaagacaagacttctaaatcctcctgtaatggaacctgtggtgatagagaagacaaagagaatatcccagaggatagcagcatggtttccaaaagatttcgtttcgatgactcattacccaatccccatgaacttgtttcagatttgctctgttagcacttttttctttgactcatttggactgaatttgaaattttatatccactccagtgagattatgatttgtagcttcatatatgacatgtttatattgtaaatgcacttttccatggaataatttagggaagtgttttaatgttaaattactagttgctagcatgttatgatttcatatcctgagatagctctgcagataagaaaatatttaaatatatgacaaaaagtaaaattgtacatgtgagtttacatgttaatgaaataattcaacttcaaatgaacttaccagaatgttttgcatatcaacaaaaaaagtggcttgagttttattatagttggtgtaaactgaacacagtgaagacattggaatttaataggttctctctctaaggtgactcttataccatgcctctatcaacataatttgtttaggaaagcagtatgaagtttaagccaaaataatttctactttatagatgctcaagagacattttacaattgaaaatgtctttcaattacaaatattttgaaacttcgtaagattttcattctctgtggtctgttatatgagagagatcctttaactagagcaaagagggagttagaaacctgatcagggatattctttac

SEQ ID NO: 409039 - DNA, 1783 bp, Homo sapiens
cggcgatgccccagacgcggctgcagttttcaaaccgcgactgcaagcttcggtagtcctctccgctgctgtcgccaggagtcacttcacgagaagccaggtcacaaccgtcggcccttgtctggaaaagtaaaagtggatcctgccacgttcggagctccctggcgcctcgcccggctggagctagagaactcgtcctgtggcggcccccggcgtggggcgggacagcggccccctggagggggcagtcccgggagaacctgcggcggccggagcggtaaaaataagtgactaaagaagcagacctgggaatcacctaacatgtcgaggaggagatttgattgccgaagtatttcaggcctactaactacaactcctcaaattccaataaaaatggaaaactttaataatttctatatacttacatctaaagagctagggagaggaaaatttgctgtggttagacaatgtatatcaaaatctactggccaagaatatgctgcaaaatttctaaaaaagagaagaagaggacaggattgtcgggcagaaattttacacgagattgctgtgcttgaattggcaaagtcttgtccccgtgttattaatcttcatgaggtctatgaaaatacaagtgaaatcattttgatattggaatatgctgcaggtggagaaattttcagcctgtgtttacctgagttggctgaaatggtttctgaaaatgatgttatcagactcattaaacaaatacttgaaggagtttattatctacatcagaataacattgtacaccttgatttaaagccacagaatatattactgagcagcatataccctctcggggacattaaaatagtagattttggaatgtctcgaaaaatagggcatgcgtgtgaacttcgggaaatcatgggaacaccagaatatttagctccagaaatcctgaactatgatcccattaccacagcaacagatatgtggaatattggtataatagcatatatgttgttaactcacacatcaccatttgtgggagaagataatcaagaaacatacctcaatatctctcaagttaatgtagattattcggaagaaactttttcatcagtttcacagctggccacagactttattcagagccttttagtaaaaaatccagagaaaagaccaacagcagagatatgcctttctcattcttggctacagcagtgggactttgaaaacttgtttcaccctgaagaaacttccagttcctctcaaactcaggatcattctgtaaggtcctctgaagacaagacttctaaatcctcctgtaatggaacctgtggtgatagagaagacaaagagaatatcccagaggatagcagcatggtttccaaaagatttcgtttcgatgactcattacccaatccccatgaacttgtttcagatttgctctgttagcacttttttctttgactcatttggactgaatttgaaattttatatccactccagtgagattatgatttgtagcttcatatatgacatgtttatattgtaaatgcacttttccatggaataatttagggaagtgttttaatgttaaattactagttgctagcatgttatgatttcatatcctgagatagctctgcagataagaaaatatttaaatatatgacaaaaagtaaaattgtacatgtgagtttacatgttaatgaaataattcaacttcaaatgaacttaccagaatgttttgcatatcaacaaaaaaaatggcctccttggcctcagaggggggact

SEQ ID NO: 409040 - DNA, 1677 bp, Homo sapiens
cggcgatgccccagacgcggctgcagttttcaaaccgcgactgcaagcttcggtagtcctctccgctgctgtcgccaggagtcacttcacgagaagccaggtcacaaccgtcggcccttgtctggaaaagtaaaagtggatcctgccacgttcggagctccctggcgcctcgcccggctggagctagagaactcgtcctgtggcggcccccggcgtggggcgggacagcggccccctggagggggcagtcccgggagaacctgcggcggccggagcggtaaaaataagtgactaaagaagcagacctgggaatcacctaacatgtcgaggaggagatttgattgccgaagtatttcaggcctactaactacaactcctcaaattccaataaaaatggaaaactttaataatttctatatacttacatctaaagagctagggagaggaaaatttgctgtggttagacaatgtatatcaaaatctactggccaagaatatgctgcaaaatttctaaaaaagagaagaagaggacaggattgtcgggcagaaattttacacgagattgctgtgcttgaattggcaaagtcttgtccccgtgttattaatcttcatgaggtctatgaaaatacaagtgaaatcattttgatattggaatatgctgcaggtggagaaattttcagcctgtgtttacctgagttggctgaaatggtttctgaaaatgatgttatcagactcattaaacaaatacttgaaggagtttattatctacatcagaataacattgtacaccttgatttaaagccacagaatatattactgagcagcatataccctctcggggacattaaaatagtagattttggaatgtctcgaaaaatagggcatgcgtgtgaacttcgggaaatcatgggaacaccagaatatttagctccagaaatcctgaactatgatcccattaccacagcaacagatatgtggaatattggtataatagcatatatgttgttaactcacacatcaccatttgtgggagaagataatcaagaaacatacctcaatatctctcaagttaatgtagattattcggaagaaactttttcatcagtttcacagctggccacagactttattcagagccttttagtaaaaaatccagagaaaagaccaacagcagagatatgcctttctcattcttggctacagcagtgggactttgaaaacttgtttcaccctgaagaaacttccagttcctctcaaactcaggatcattctgtaaggtcctctgaagacaagacttctaaatcctcctgtaatggaacctgtggtgatagagaagacaaagagaatatcccagaggatagcagcatggtttccaaaagatttcgtttcgatgactcattacccaatccccatgaacttgtttcagatttgctctgttagcacttttttctttgactcatttggactgaatttgaaattttatatccactccagtgagattatgatttgtagcttcatatatgacatgtttatattgtaaatgcacttttccatggaataatttagggaagtgttttaatgttaaattactagttgctagcatgttatgatttcatatcctgagatagctctgcagataagaaaatatttaaatatatgacaaaaagtaaaattgta

SEQ ID NO: 409041 - DNA, 1276 bp, Homo sapiens
ggacccggattagagaatatctggcagcataacctccgggacataaaagagggagattgtgggaagttccccgaaaaaataggggcatgcgtgtgaacttccggggaaatcagggggaacaccagaatatttagctccagaaatcctgaactatgatcccattaccacagcaacagatatgtggaatattggtataatagcatatatgttgttaactcacacatcaccatttgtgggagaagataatcaagaaacatacctcaatatctctcaagttaatgtagattattcggaagaaactttttcatcagtttcacagctggccacagactttattcagagccttttagtaaaaaatccagagaaaagaccaacagcagagatatgcctttctcattcttggctacagcagtgggactttgaaaacttgtttcaccctgaagaaacttccagttcctctcaaactcaggatcattctgtaaggtcctctgaagacaagacttctaaatcctcctgtaatggaacctgtggtgatagagaagacaaagagaatatcccagaggatagcagcatggtttccaaaagatttcgtttcgatgactcattacccaatccccatgaacttgtttcagatttgctctgttagcacttttttctttgactcatttggactgaatttgaaattttatatccactccagtgagattatgatttgtagcttcatatatgacatgtttatattgtaaatgcacttttccatggaataatttagggaagtgttttaatgttaaattactagttgctagcatgttatgatttcatatcctgagatagctctgcagataagaaaatatttaaatatatgacaaaaagtaaaattgtacatgtgagtttacatgttaatgaaataattcaacttcaaatgaacttaccagaatgttttgcatatcaacaaaaaaagtggcttgagttttattatagttggtgtaaactgaacacagtgaagacattggaatttaataggttctctctctaaggtgactcttataccatgcctctatcaacataatttgtttaggaaagcagtatgaagtttaagccaaaataatttctactttatagatgctcaagagacattttacaattgaaaatgtctttcaattacaaatattttgaaacttcgtaagattttcattctctgtggtctgttatatgagagagatcctttaactagagcaaagagggagttagaaacctgatcagggatattctttac

SEQ ID NO: 409042 - DNA, 954 bp, Homo sapiens
actacagtaggtgacgattggccggccaaaagacagaggctgaaaagaccaacagcagagatatgcctttctcattcttggctacagcagtgggactttgaaaacttgtttcaccctgaagaaacttccagttcctctcaaactcaggatcattctgtaaggtcctctgaagacaagacttctaaatcctcctgtaatggaacctgtggtgatagagaagacaaagagaatatcccagaggatagcagcatggtttccaaaagatttcgtttcgatgactcattacccaatccccatgaacttgtttcagatttgctctgttagcacttttttctttgactcatttggactgaatttgaaattttatatccactccagtgagattatgatttgtagcttcatatatgacatgtttatattgtaaatgcacttttccatggaataatttagggaagtgttttaatgttaaattactagttgctagcatgttatgatttcatatcctgagatagctctgcagataagaaaatatttaaatatatgacaaaaagtaaaattgtacatgtgagtttacatgttaatgaaataattcaacttcaaatgaacttaccagaatgttttgcatatcaacaaaaaaagtggcttgagttttattatagttggtgtaaactgaacacagtgaagacattggaatttaataggttctctctctaaggtgactcttataccatgcctctatcaacataatttgtttaggaaagcagtatgaagtttaagccaaaataatttctactttatagatgctcaagagacattttacaattgaaaatgtctttcaattacaaatattttgaaacttcgtaagattttcattctctgtggtctgttatatgagagagatcctttaactagagcaaagagggagttagaaacctgatcagggatattctttac

SEQ ID NO: 409043 - DNA, 1414 bp, Homo sapiens
ttccccgagttgaaggttgcctgcaagcttcggtagtcctctccgctgctgtcgccaggagtcacttcacgagaagccaggtcacaaccgtcggcccttgtctggaaaagtaaaagtggatcctgccacgttcggagccccttcgcggcgggcccgcgcgggtcccttccacagcaaggccacgcggtccccctagcctctcccgagtcccagctgcggcgtgggcgcgttcccatcgggactcgtggacgcgtcctgctcccagctgcctttcgtctagagaaagttcgtgttcatcttgtgggacgttttcagttactgcttgggaacagtgttttaaaaccagcgagagatcaagacgggctacagctgtttccgtgattttcagcgatctgatttttgctttgatgccttgtgacccacttagtgtgcacgactcatcctcaaactataccactactggatgccaacgatttttgacatttacccaggctctttgttttattgtagggaaaagcgtttcatttgaatttcctccgagggagaagtagagacaaagttgaaagaggctttatagcagctggtagctggcattagtttctgtctggactagaggcactctgacatcaatttggaaattggaattaagaaaatacgtttttaaaatcgtaatacttatcagatttcactaatatttaaacacatgaggactgtgtatcacattcaccgattgttttgtcgacgtaatgtttacatctgtggtgctaatgataagcagaaccttgccagggacgtttgacgtggtgtggccactttacgttttcaagtctatgagaatgtctgcgcggagacagcatagctctgtagaaatgagtggcagcgtatgtaacctggcattttgaacccaggagcacaattttattaaaggaaaataaacctaaagaaacaaaaaaacaaataaaaataaacaaaaaaaaaaaaaaaaagatacaaataaaaaccgacaacgcaacaaaataacataaaaaaacagacaagactaacaacataacaaataaacacacacacactcacagacacaccacagacacaatacaaagataaaacacaaagagagcaacaacaacattctaatataatcatattctaatcacatcaaatccatagtctgcgtcctcactttatctactctctaccatcaccgagcgggagagcgcaacacacataaagcgtgacgccggcagcgcgagcagcgccgatggcagttattatagaagagagacgagagccgcagcaagagaagagcatgcaaacagtagcagagaaatagatcaagcgagggctaagcggaggtgggaggacagatacaagtctaagaaatacatagcgagtgcagttccggcgacgcacactc

SEQ ID NO: 409044 - DNA, 428 bp, Homo sapiens
tattaacatttatatagttgtatgtcttttacttaacaggtacacaatatttaaaagtgtttaggtgaatgaattttcaagtctctgttctttgaattttattttagtgctgcaggtggagaaattttcagcctgtgtttacctgagttggctgaaatggtttctgaaaatgatgttatcagactcattaaacaaatacttgaaggagtttattatctacatcagaataacattgtacaccttgatttaaaggtaacgtaacgtgatttaaagtaatgcaacatctgtgttcttcttctgctcttagtatgcacagttgcaaactggtattaacaggaaacaatggttggttcctggtcttctagactgcactggtgtgctctttgcttacgtgtgcctatgtggccttaattttatattggcagaaa

SEQ ID NO: 409045 - DNA, 473 bp, Homo sapiens
gcgatgccccagacgcggctgcagttttcaaaccgcgactgcaagcttcggtagtcctctccgctgctgtcgccaggagtcacttcacgagaagccaggtcacaaccgtcggcccttgtctggaaaagtaaaagtggatcctgccacgttcggagctccctggcgcctcgcccggctggagctagagaactcgtcctgtggcggcccccggcgtggggcgggacagcggccccctggagggggcagtcccgggagaacctgcggcggccggagcggttagtgtcctgcgggattggcgggttggctcggggctgcgatggaaccagccgcctcggtacagagacctcatacgtgaggaaggaggacccgaggagggtttaggcggtacggtccggctgagaggggcttggactccgccgcccctgaggtggctgattgctgctggcgcctctccgctttgcggctggagtccg

SEQ ID NO: 409046 - DNA, 2050 bp, Homo sapiens
ttccccgagttgaaggttgcctgcaagcttcggtagtcctctccgctgctgtcgccaggagtcacttcacgagaagccaggtcacaaccgtcggcccttgtctggaaaagtaaaagtggatcctgccacgttcggagctccctggcgcctcgcccggctggagctagagaactcgtcctgtggcggcccccggcgtggggcgggacagcggccccctggagggggcagtcccgggagaacctgcggcggccggagcggtaaaaataagtgactaaagaagcagacctgggaatcacctaacatgtcgaggaggagatttgattgccgaagtatttcaggcctactaactacaactcctcaaattccaataaaaatggaaaactttaataatttctatatacttacatctaaagagctagggagaggaaaatttgctgtggttagacaatgtatatcaaaatctactggccaagaatatgctgcaaaatttctaaaaaagagaagaagaggacaggattgtcgggcagaaattttacacgagattgctgtgcttgaattggcaaagtcttgtccccgtgttattaatcttcatgaggtctatgaaaatacaagtgaaatcattttgatattggaatatgctgcaggtggagaaattttcagcctgtgtttacctgagttggctgaaatggtttctgaaaatgatgttatcagactcattaaacaaatacttgaaggagtttattatctacatcagaataacattgtacaccttgatttaaagccacagaatatattactgagcagcatataccctctcggggacattaaaatagtagattttggaatgtctcgaaaaatagggcatgcgtgtgaacttcgggaaatcatgggaacaccagaatatttagctccagaaatcctgaactatgatcccattaccacagcaacagatatgtggaatattggtataatagcatatatgttgttaactcacacatcaccatttgtgggagaagataatcaagaaacatacctcaatatctctcaagttaatgtagattattcggaagaaactttttcatcagtttcacagctggccacagactttattcagagccttttagtaaaaaatccagagaaaagaccaacagcagagatatgcctttctcattcttggctacagcagtgggactttgaaaacttgtttcaccctgaagaaacttccagttcctctcaaactcaggatcattctgtaaggtcctctgaagacaagacttctaaatcctcctgtaatggaacctgtggtgatagagaagacaaagagaatatcccagaggatagcagcatggtttccaaaagatttcgtttcgatgactcattacccaatccccatgaacttgtttcagatttgctctgttagcacttttttctttgactcatttggactgaatttgaaattttatatccactccagtgagattatgatttgtagcttcatatatgacatgtttatattgtaaatgcacttttccatggaataatttagggaagtgttttaatgttaaattactagttgctagcatgttatgatttcatatcctgagatagctctgcagataagaaaatatttaaatatatgacaaaaagtaaaattgtacatgtgagtttacatgttaatgaaataattcaacttcaaatgaacttaccagaatgttttgcatatcaacaaaaaaagtggcttgagttttattatagttggtgtaaactgaacacagtgaagacattggaatttaataggttctctctctaaggtgactcttataccatgcctctatcaacataatttgtttaggaaagcagtatgaagtttaagccaaaataatttctactttatagatgctcaagagacattttacaattgaaaatgtctttcaattacaaatattttgaaacttcgtaagattttcattctctgtggtctgttatatgagagagatcctttaactagagcaaagagggagttagaaacctgatcagggatattctttac

SEQ ID NO: 409047 - DNA, 1673 bp, Homo sapiens
cggcgatgccccagacgcggctgcagttttcaaaccgcgactgcaagcttcggtagtcctctccgctgctgtcgccaggagtcacttcacgagaagccaggtcacaaccgtcggcccttgtctggaaaagtaaaagtggatcctgccacgttcggagctccctggcgcctcgcccggctggagctagagaactcgtcctgtggcggcccccggcgtggggcgggacagcggccccctggagggggcagtcccgggagaacctgcggcggccggagcggtaaaaataagtgactaaagaagcagacctgggaatcacctaacatgtcgaggaggagatttgattgccgaagtatttcaggcctactaactacaactcctcaaattccaataaaaatggaaaactttaataatttctatatacttacatctaaagagctagggagaggaaaatttgctgtggttagacaatgtatatcaaaatctactggccaagaatatgctgcaaaatttctaaaaaagagaagaagaggacaggattgtcgggcagaaattttacacgagattgctgtgcttgaattggcaaagtcttgtccccgtgttattaatcttcatgaggtctatgaaaatacaagtgaaatcattttgatattggaatatgctgcaggtggagaaattttcagcctgtgtttacctgagttggctgaaatggtttctgaaaatgatgttatcagactcattaaacaaatacttgaaggagtttattatctacatcagaataacattgtacaccttgatttaaagccacagaatatattactgagcagcatataccctctcggggacattaaaatagtagattttggaatgtctcgaaaaatagggcatgcgtgtgaacttcgggaaatcatgggaacaccagaatatttagctccagaaatcctgaactatgatcccattaccacagcaacagatatgtggaatattggtataatagcatatatgttgttaactcacacatcaccatttgtgggagaagataatcaagaaacatacctcaatatctctcaagttaatgtagattattcggaagaaactttttcatcagtttcacagctggccacagactttattcagagccttttagtaaaaaatccagagaaaagaccaacagcagagatatgcctttctcattcttggctacagcagtgggactttgaaaacttgtttcaccctgaagaaacttccagttcctctcaaactcaggatcattctgtaaggtcctctgaagacaagacttctaaatcctcctgtaatggaacctgtggtgatagagaagacaaagagaatatcccagaggatagcagcatggtttccaaaagatttcgtttcgatgactcattacccaatccccatgaacttgtttcagatttgctctgttagcacttttttctttgactcatttggactgaatttgaaattttatatccactccagtgagattatgatttgtagcttcatatatgacatgtttatattgtaaatgcacttttccatggaataatttagggaagtgttttaatgttaaattactagttgctagcatgttatgatttcatatcctgagaccatgccactgcactccagcctgagagacagagcaaaactccatctca

SEQ ID NO: 409048 - DNA, 1241 bp, Homo sapiens
cggcgatgccccagacgcggctgcagttttcaaaccgcgactgcaagcttcggtagtcctctccgctgctgtcgccaggagtcacttcacgagaagccaggtcacaaccgtcggcccttgtctggaaaagtaaaagtggatcctgccacgttcggagctccctggcgcctcgcccggctggagctagagaactcgtcctgtggcggcccccggcgtggggcgggacagcggccccctggagggggcagtcccgggagaacctgcggcggccggagcggtaaaaataagtgactaaagaagcagacctgggaatcacctaacatgtcgaggaggagatttgattgccgaagtatttcaggcctactaactacaactcctcaaattccaataaaaatggaaaactttaataatttctatatacttacatctaaagagctagggagaggaaaatttgctgtggttagacaatgtatatcaaaatctactggccaagaatatgctgcaaaatttctaaaaaagagaagaagaggacaggattgtcgggcagaaattttacacgagattgctgtgcttgaattggcaaagtcttgtccccgtgttattaatcttcatgaggtctatgaaaatacaagtgaaatcattttgatattggaatatgctgcaggtggagaaattttcagcctgtgtttacctgagttggctgaaatggtttctgaaaatgatgttatcagactcattaaacaaatacttgaaggagtttattatctacatcagaataacattgtacaccttgatttaaagccacagaatatattactgagcagcatataccctctcggggacattaaaatagtagattttggaatgtctcgaaaaatagggcatgcgtgtgaacttcgggaaatcatgggaacaccagaatatttaggtaagaatttccttttattttctataccattttgaaatttattaagtaaatgatacctctgtagaactatattttagagcatgtaattcgattcagttaaaaggatttgattggttcaagtattttgatacattaaaacttggttaggttaagacacatttaaatgaaatgtattgaataaaagtatgaaacatttacagcaattcaggggacactgaatatgtaagtgtacaagttgaatgtttgtgtataaaggatttgtacataaggaaaaaagaaatgggtaagagggaagttagggaaaaagagaaaa

SEQ ID NO: 409049 - DNA, 1054 bp, Homo sapiens
ttccccgagttgaaggttgcctgcaagcttcggtagtcctctccgctgctgtcgccaggagtcacttcacgagaagccaggtcacaaccgtcggcccttgtctggaaaagtaaaagtggatcctgccacgttcggagctccctggcgcctcgcccggctggagctagagaactcgtcctgtggcggcccccggcgtggggcgggacagcggccccctggagggggcagtcccgggagaacctgcggcggccggagcggtaaaaataagtgactaaagaagcagacctgggaatcacctaacatgtcgaggaggagatttgattgccgaagtatttcaggcctactaactacaactcctcaaattccaataaaaatggaaaactttaataatttctatatacttacatctaaagagctagggagaggaaaatttgctgtggttagacaatgtatatcaaaatctactggccaagaatatgctgcaaaatttctaaaaaagagaagaagaggacaggattgtcgggcagaaattttacacgagattgctgtgcttgaattggcaaagtcttgtccccgtgttattaatcttcatgaggtctatgaaaatacaagtgaaatcattttgatattggaatagtaagtatatactaaatagtacctattttagttggtatgaaaagatgattaaaatgtcaagaataagaatgataaaggtgtgacaagaacttgtaaagattcctgttaataaaatgtaaaagggacctaatttatattcagatattttcataagactaaatgtatagcctcgggcacatacacaaaaactaacagcacagaataagcaaatgacaaatacaacatttgaggaatgtggagaaatgaatatacattattttcttaatggctaattgattgaatttttctggaacacaatctgatgggcagatagaattgaagtaatttgtatattttcttcatctatttgaaaaataccttcaagaaaataagaatagaaaggagaattgaagtaatttgtatattttcttcatctatt

SEQ ID NO: 409050 - DNA, 545 bp, Homo sapiens
ccacttaatcctcataacaaagcttcgatccaggtatcactgtccccagtttacaggccaagaaacaggctcagagggtgaaaccatgaactccaggtgaaactatagaactggccttgccaggttggcttgactccaaagacacagctctctggcgctcccatgggatgtcgccctctagtgagaaggtgctgaaatccaatctgggcacagaccactctatctggtccacgcttggccaagcttatggccagtgtgtatggagggcaacccatgagcgggtgcttcagcttaaactccagaggacactgtcctgggtggggagcctggaattgtgctgaagcctgagctgccctgagaaggagttctcagctgaaggttttctgttcatctgtttggcaaatgagtggtggagcctagttttgaacctagaaccagaaataacatttgacccagcaatcccattaccgggtatatatccaaaggaatataaatcattctattacaaagatacatgtgtgcatatgttcactgtagcaatagca

SEQ ID NO: 409051 - DNA, 979 bp, Homo sapiens
cacagacgtcgactccagcaaaaatgtcctgactgacttcaggagagaggaattattgctacgtgcctctttcccagtgaagaaaatctctgttggctgcgagcagagaagcggcggaaggattcccgactccgggaagccaggtgtcggaaggaggaagtacgcttgaagggggtccggctggccgactctgcactcgtccgttcgtggcccaccgtggtggtcaccaaattgagggcttcctggaaggacctcctcacggtgcccatccactgggtcatgtgggtctgggccactgtgagtttatctcccagctgtctctccctccctctctggaaggcaacactgatccaggatctcactctgttgcccaggctggactgcagtggcatgatcacagctcactgcagccttggcctcccaggctcaagcgatcctcccacctcagcctcctcggtagctaggactacaggtggagcaacaccgtcagtcagaaggcagcggatggcacagggcttccgcgtaaggcctgcatcgcctgagtcatggttttctcatcttgtatgaggcccacccccttcaaaaggttgtgacaaaaaaaacaactgagataatttgtgccgctggcacatagttaacactcaataaggccgggcgcagtggcttacacctctaatcccagcactttgggaggctgaggcaggtggatcacttgaggccaggagttcgataccagcctgaccaacatggtgaaaccccatctcaactaaaaatacaaaaattagccaggcatggtggtgtgcacctgtagtcccagctacttgggagcctgaggcaggagcatctcttgaacccgggaggtggaggttgcagtgagcggagatggcaccactgcactccagcctgggcgacagaacaagactctgtctcaaaacaacaacaacaacaaaataataaatggtgaccacaagggatgatc

SEQ ID NO: 409052 - DNA, 476 bp, Homo sapiens
ctcccccaagtcccaactcgctcacggtccctcggggctgatggcaacttcacgtgcctgccagcctacccacccctgtgccctcacagcaagcgcaccaggaaatgcggctgcacgtgtgtgcatgtgtgtgcactctgtgtgtgtgtgcgtgtatgtcggcgatctggcagccccgggaaggttagcactgctgggaaacggcttctgcctctaaggttacaggcagcgtcttgggacctctggtcggctgtcagtctgtctccctctcgtggtctgtttctctgttgatttctcagcctcgctctcctccctctccctgtgtctcaacttccacttgcttgtctctaagcttctctcctctctctctccttttcagctgtctctccctccctctctggaaggcaacactgatccaggtgagacagcctctgaggtcccccaggaaggactggggagggctgtatttcagtaca

SEQ ID NO: 409053 - DNA, 754 bp, Homo sapiens
tttttttgttttttttttttgagacggagtctcgctctgtcacccaggctggagtgcagtggcgcgatctcggctcactgcaagctccacttcccgggttcacgccattctcctgcctcagcctcctgagtagctgggactacaggcacccgccaccacgcctggctatttttgtatttttagtagagacggggtttcaccgtgttagccaggatggtctccatctcctgacctcgtgatccgcttgcctcagcctcccaaagtgctgggattataggcgttgagccaccacgcccggcccctccaaagtatgttttttaaactgcctgcagatcactaatcagtcaggagagaatgagagactgaagttatgctaataggcagcaacagtgcatgtttcagaggaagtctgacatcgcagctgtgtaaccagcagggatttccttctcttccttggggagaaaatcatcagaaaatactgggccagggctctggaattaaactgacacttgtaaaagagagagaaaaaaaaaacaatctaaagataggtctgatgctgctgccttgttttcatttttgcaataggacctggagggagaatggcaagcagctgattcatctccattgcctgtgaaacactgctactccacgtgtcacttctcactcaggggtcccctcctcactcctccctactcaagggtaacctccatcctgaattttgtgcttatcattccctttttttttctttatagtg

SEQ ID NO: 409054 - DNA, 274 bp, Homo sapiens
acaagctgtaatcaatcagctgggtataagatggggttttcaccctttccaagctgcatgagctccagccacccctaggaggagacaacatatcacgcatctcaagacctggagggagaatggcaagcagctgattcatctccattgcctgtgaaacactgctactccacgtgtcacttctcactcaggggtcccctcctcactcctccctactcaagggtaacctccatcctgaattttgtgcttatcattccctttttttttctttatagtg

SEQ ID NO: 409055 - DNA, 717 bp, Homo sapiens
cctttgtccccatggcttaggtgaggccaagctcaccacctcctggagggaaggagtaggtgtcggaccctggcctggccaaagtgttgcaactcccgcccaccgtgactggttttatggatggcaagtgaccctactgggtcagctggaaacaatcctaggacttgtgttaaaggagaagctctttctttggtgatgtcccttaaaggtacttgaaactgctgtcatcacgagagaatggtgccaacaagcagagaggtggtgagagagtcccagatcctgatgacagtttcaaacccccagatccagctctgcttgaagctagccctaccctgggcttttagtgatataagtcaatacacttccccttttgcttaacccggtttacatggatttctttcccttgcaactcaaatgagcctgaatgaaggaacaggtcactggttcagccttatagaaacccacaggcatcatttttaacctgagaaactttaaatccccaaggccaagaaatacccaaggctcactcctcccaaacccacatgccaacaacatacatgtcacacaagacagacgagatcactgtttctcacatgcaacaggcacgggtggtcccagagcagggaggctcatgcaggtgcagggacctgggtccaaacaccaaacggggaagaaaactccgaggtaggcaccttgacgccagctgatggcatacaa

SEQ ID NO: 409056 - DNA, 232 bp, Homo sapiens
cacccctcctttatacatttaaacaaaaaccaaaaccttgtcccatgtaaattggcttagaaaattatgacacagcactttgggaggccaaggcaggtggatcacctgaggtcaggagtttgagactagcctagccaacatggtgaaaccctgtctctgctaaaaatacaaaaattagccaggcatggtggcgcgcacctgtagtcccagctacttgggaggctgaggcagg

SEQ ID NO: 409057 - DNA, 232 bp, Homo sapiens
aaattgcatggtgccaccagaagcttttgcttgtacactttctcatatttgtacttttctcatatactatgaccaacaacattatcatcatttcccccattttgcagatgaggaagcggagtctcaaaacagctaggtgatttgcccaagatcacttggctatgaagtgacaatattaaaatcttctaaaatataactttgcttttgacacttcagagaaaacttccaaccg

SEQ ID NO: 409058 - DNA, 303 bp, Homo sapiens
cttaatccttcagaatttactgggtcttaagaatcctacagattctctccattccagaaaaattatacacacacagatacctatctaatgcttatcattaggcctctccttaggggaattaaccccacattaataaattttcacttaaaagaatgactattttcttcctgatggtcactcaaggagtataaggcatggctaaattttcatttgtttcattttaatggttccaaactaaatacttaaaatgtttctgatactttgagtcactctaagacatcaaatcattcatgagcattggat

SEQ ID NO: 409059 - DNA, 309 bp, Homo sapiens
ctactgcactccagcctggggaacagagtgagaccctgtctccaaaaaataaaaataaaatataaagtattctgaactcttggtccccgcaaattaccagctcagttatccacatactctcagtcttctcagcactcttcactcagagaatggggaattcttgttcatccaggatctaattttccctctctaggactcatcccaggccccactgaaccagcagtaagcacttataaacatacagacaagtgctagaattaataagaggtgaatacgggatcttaattgcaggggacactactatccagt

SEQ ID NO: 409060 - DNA, 309 bp, Homo sapiens
ggtgagcccagattgcgtcatagcactccagcctcggcaacaagagcaaaactccatctcaaaataaataaataaataaattaattaatttaaaaaagataatctggtaatcgctgctgaatttggggaggcactttcaaaggtaaaccaaggaaaggtgggactattgccagagtttcagtggccgcagttccttgtaacagataaatgatttagctatttcataattatatgtaagacaggttaacaggattgaacatgcgataataacatcttttagaaaagctctcaatttcttattttttattt

SEQ ID NO: 409061 - DNA, 751 bp, Homo sapiens
cgcgtacacacacacacacacacacacacacacacacacacacacacacacattcctgttcaagatttaggtcagttggtttgcattaaatgagattttggagaagaactgaatttcaaatcctaaaaattcgattcaaactccaattttgccagctcttacaaactatgtgaacttgggtgggtagcaatcaagttctctcatctacaaaatggagcaaataatctctccctgactgttatgcaggattgtgatggtttaaaatagaaaggccccgtgaccatgattactaaacaatagtgacatatgaaaataagtgaatgctaaaaaatgatccaataacaacttctctctgcatttatcaagtaaacttgtcactctaagaaagccgttttaaaagcctgtcaccttaagtttccactgaacctcagtgcacctcagtttcttcacttgtcatgtgaaaataatctccatccatttcatggaatttttgagattctcaaagcattcaactatattgtatgtcaactattattattggtgactacacagaagtatgtaaaatcctgtctctcacaatcccagccagttaaattcctactccccaaagagctcctatatacttatggagccttatcttgtcaaaacacaataatgaacacattgtgatgacttaatacatatgcctccttatcagttacagaacaatggcatagtaagaaaggccatactcatgatcctagctactttg

SEQ ID NO: 409062 - DNA, 271 bp, Homo sapiens
ctaaaaattaactaatatttttgatgaattaactgcctgatacacctgtattgtacattattttctacattttgactgcatattccttaatcttttataatattttctatacggaaaacagaaagataattcagccttttttctagcgcaaatgatggaaatttgttaaaaatccatagtttaggaagtttctttccactttacaacctgttattgacaatgacaggtgcattattaggattgccaaatttacaaaaatctctatcgaatt

SEQ ID NO: 409063 - DNA, 300 bp, Homo sapiens
cactgtgcctatggctcatctagcctgcttccctcatttttgtgacctgcctggttcccatggggaactgagtttgcaatccggggagcaatactggctgaattcatgttcatattgagagcattctgagtagctggcagggccacacagaccttagcgggaagacagggacaccactttccaggatgatccctgtgaaaactgccatgtttgcactgccctcctctgtgagacatggtttagctcaagtccttgctctggtaactttccaacatgtgactttgggcacatgtgaccttc

SEQ ID NO: 409064 - DNA, 299 bp, Homo sapiens
ggagaatccactccatgtttctttcttagtttctgggggttgcaagcaattcttagtgttccttgccttatagatatatcactccaatctctattactgtcttcacattgccttctcatctatgtctatgtctccaatctccctctgtttttcttataaggacacactgatcattagatctaggatccaccttaaatccaggatgatcttatctcaagatctttaatttaattatatctgcaaagaccctcttccaaataagttcacattcagagcttccagggtttaggagttggaca

SEQ ID NO: 409065 - DNA, 241 bp, Homo sapiens
ggagcccattcctttggccttggcttctcaaacagcgttataactgtccttcaagtgagcttgctaggcagaggaaaacttgttcttttctttttaacccttgccttgcctctttatttatttttaaatttctgcctcagggccatcatcacagcaaatgtgaggtttctcttctgcttctcctcttggtgttccctctccctgagttccgactcccatagctaccccaagctccctccct

SEQ ID NO: 409066 - DNA, 298 bp, Homo sapiens
ggaaaaacaaaacattagaaagatatgtttgaaaaaagcagatatatcctaaaagcaaaatttagttgtttgggattctgttttacattatccacacaactacttctttctatagatactgttaatacaatgatatatgactaaaccagaatattaaactatcagtgatgttcacaggtttcatcaaaataaggaaaacttccttgatatatttgttttctgaactatcattttgtcccctcataactaataaccctcaggaattatatctccctttgccaagagaaaaaacctgtct

SEQ ID NO: 409067 - DNA, 267 bp, Homo sapiens
tgtggagctggattttaagcagcaagaagacaaactccagccggttctaagaaaactccaccctattgaggaaactcaggtcataccttcgccttactctcaggagacttactcctcaactcccaagcaaaaatccaaaactgaatctaaaaagcacggaagatggaaactctggttcctttaacactcacggtgtctggagtctcgaggccgtctttagaacccactggagtttaagtcaatacttttccaaaatgaataggatcg

SEQ ID NO: 409068 - DNA, 3086 bp, Homo sapiens
  misc_feature (1412)..(1412): n is a, c, g, or t
  misc_feature (2250)..(2250): n is a, c, g, or t
  misc_feature (2311)..(2311): n is a, c, g, or t
  misc_feature (2881)..(2881): n is a, c, g, or t
tcgctcaggatgtcactctctttgatgagattgtcggcaaaatctgccaagccggggtgtgggtatttcccgggagaagtgctcttggagtcctgcctgccctcagccgtggggcagccgctgctctgggtgccgctgctcaagctgccctcgtcagagtccagcaaggttcccttgccagtctcaccggtccactcgttgctggaggaattcttcaggacttttaaagacctggatgaagctacagtgagaaaaacacatttcgctgtgatacagaaacaggttacacaatgtgtaatgtttgcctcaaagcttgtgtaagatttaacattaagattttattttatgatatgacttcagttagcaactatcctggtaattaggcaaaaatgtagctactgaaaacatggacatttttgacttaggtttacagttgtaagttaggcaattcagcatttttagattaccagagctcaattatgtagatagaactagacactagaaactactacatgggctaagattcttattttgccaaggagtaagttgaaaagttaattggtaataataaatctaggctcctttctttcactaaggtgctttgtaatttgatcatgaagatcacaccatattcctatgcatcttctcaccttgtggatttcccttgctgctcaattaaaagtagaaaatgcccctcccccccccctttttttttaaagacagtgtcttgctctgccacccaggctggagtgcagtggtgtgatctctgctcactgcaacctccgcctcctgggctcaagtgatcctcccatctcagcctcctgagtagttgggactataggtgcgcatgatccctggctaatttttatattttttttgtagagatggggttttgccatgttgcccaggttggtctcaaactcctgttctcaagagctcaagggatccacctgccttggcctcccaaagtgctgggattacaggcatgagccaccatgcccagcctagaaaatgctctttatctctcatatgagaactgtctctgctggaatttcaaaacaactttctgaaattttatgttataggtgtgtgtgtgtgtgtgtgtagttctgttctcttggattgaaagaaggaagggagttctcagttttggtgtttctacaaagtaataacagcatgttattttgatggccagtttattttgacaatggagaaaatagtaaatatgtggtagatctgaagaggtcacactgatttgacatgaaaaagcgaagttttacattttctaagcctaaaaacaagaaagataataacaaaatagttaatgtagaaataaggttctgaaaacttaagctgaaattttagaaacaagcagaaagaacaacgtgatttgaaatgcttacttggtgccntatcgattaagaacgagtataagaggccccttaacttagatggcattacatcccaatcaacccattgttaagttgataatatggaaagtcgagaatgcatttaatgtacctactaaccactgcggcttagcctagcctgccttcagtgtgctcagaacacttacattagcctatggttgggcagaacacaaggcctgttttataattaagtgttgagtatctcatgaaatgtattgaatgctgcactagaagcaaaaaacagaatggttgtctgggtactcgaagtacgatttctactgaatgtgtgtcactttcacaccacggtaaagtcgaaaaattgtaggttgaaccatcagaaggtggagaccctctgtgtaaggttcttgatcttcattcagcattgaccttcaggatgcctggcactgttctgagcactgggaatacagcagtgaggaaaacaaagtccctggacccatgcacatcttagtggaagaaacaaaatcgtacatttggactatgtcagcgggtaggaagacaagggactgggggttgggggtggctgtattttacagtagaacgtctgggagcaagaggcatgtttaggtttcttaaaaggagataaaggtacctcgatgacttacaaagtgaaaagtcacagctatgttacaagagcatatatccttttcagaagctcataatattttgttgaataaacacaaggctagcaaaattctcacctaatttggccgaaacaggaactcggttcttaagaggtaccaggcgatccttacacgttttctccagtggtaattcacactttatgtgacgcctgaagttntccctcagaatagaacgaatcaccttaacaatgttggttttgctttcactgtcactgggtngggggggagagaaaacagcagaagtgtccacagtgttcatcgtgcttccattccacgcccgcctgtgttcctgtgccttgcacctgctggaccaggctgccagccagccacccaacagcagtgccatgtggcctcccgtacagaaggagattttcctccatctgaactgccttcaccctctctctggagcccctctctggggaagaggagattcagtggatcctattcttcaacctcctttgcagttttgccctttccttggaaggaacaggagctggggtacttgaggtaaaagaggcctgccccaaatgtggtcattttctcgaaaacataagcacttctgacaaaagttaaacagaagcccagcaggtcactgcatgactcagcctgctggcctcttctgtcaccagatacctgtcaccaaaacaaggttactctggaaggatctctgaacattttccagagtcaaagatttttttctttttatatcacctacagtactacctaaccttaaggaattttctgctatattctaaatttgtaaaaacataaatttgtggatctttgttnttctaacacattttagggtatcaaggcagaaaggaaaatgttgaaaactattgatagggaaaataaggaaacaatgaaaggcatttggcaaagaaaaagctatccaccagcatttagtttctcccagaagtctgctaaggaacatcaaaacaacctctcttgtcctcattttccttgtctataaaataaaaggcaccaaaaatta

SEQ ID NO: 409069 - DNA, 877 bp, Homo sapiens
tcgctcaggatgtcactctctttgatgagattgtcggcaaaatctgccaagccggggtgtgggtatttcccgggagaagtgctcttggagtcctgcctgccctcagccgtggggcagccgctgctctgggtgccgctgctcaagctgccctcgtcagagtccagcaaggttcccttgccagtctcaccggtccactcgttgctggaggaattcttcaggacttttaaagacctggatgaagctacagtgagaaaaacacatttcgctgtgatacagaaacaggttacacaatgtgtaatgtttgcctcaaagcttgtgtaagatttaacattaagattttattttatgatatgacttcagttagcaactatcctggtaattaggcaaaaatgtagctactgaaaacatggacatttttgacttaggtttacagttgtaagttaggcaattcagcatttttagattaccagagctcaattatgtagatagaactagacactagaaactactacatgggctaagattcttattttgccaaggagtaagttgaaaagttaattggtaataataaatctaggctcctttctttcactaaggtgctttgtaatttgatcatgaagatcacaccatattcctatgcatcttctcaccttgtggatttcccttgctgctcaattaaaagtagaaaatgcccctcccccccccctttttttttaaagacagtgtcttgcactgcactccagcctaggcaacaaagtgagactccatctcaaaaaaaacaacatcaaaaaagccattaagcaatgttatccagaccctacaccatacccacaaaaatttcataaaggaaaataaaccagtgtttttcccactggcc

SEQ ID NO: 409070 - DNA, 289 bp, Homo sapiens
ccatgcctggccttgaatctgaaatttttatgtgcaaaatggaactgaaaaaagtcacaagaaattactgttttcaaatatgtaccatataccttctaaaatgatgcagcttgtacctgcctcttaattatgaatatcagatattagtaatattttttaaaataatgagtttattggagaagctttattcagttaaatcttctcaattcagaattttgttacctaacctgttttgcatttgccattaattttgattcaatgctctgtacttaatgatccccaaattcct

SEQ ID NO: 409071 - DNA, 299 bp, Homo sapiens
gttccattcgcctttcctcttctttcctggcccacgccgctccgaggcctcgcgaccgccgagcctgcagcctgccccgcggccaacatgagcttcttgtttggtagtcgctcatctaaaacttttaaaccaaagaagaacattccagagggttctcaccagtatgagctcttaaaacacgcagaagccacacttggcagtggcaaccttcggatggctgtcatgcttcctgaaggggaagatctcaatgaatgggttgcagttaacactgtggattttcttcaatcagatcaaccatg

SEQ ID NO: 409072 - DNA, 609 bp, Homo sapiens
tccatattaagagagaaactagaaaaaaaattttaaaagagaaaactatttgaagtaacagtttataggatggggtgtgtgtaataaatagaccatggaattaaaacccagcaagttgcataaactgtataaactagtgtgccaaatgtatatagcaaatcaaagtgctcactgtgggaatagtgagcatgtgagaagatgaaggatgattgatattataataaggtttgaaaaattgtatctaatttattactcgaaatacagtctagtgtccttgtttttaaaaagccagttacatttttttttcttttttcaagagacagggttggccgggtgtggtagctcacacctgtaatcctagcactttgggaggccgaggtggatggatcacttggtcaggagttggagaccagcctggccaacatgaagaaaccccatctctactaaaaatacaaaaattagctgggcgtggtggcacatccctgtggtcccagctattcaggaggctgaggcaggagaattgctgtaactcgggaggtggaggttgcagtgagtcgagatcatggcactgcactccagcctgcgcgatagagcaaggctccatctcaa

SEQ ID NO: 409073 - DNA, 298 bp, Homo sapiens
cagtgagccgagatcacgctattcattgcactccagcttgggcgaaagagcaaaactccgtctcaaaaacaaaacaaaagaatgccctatcctcgaatgggtttcatttaacctatattagtagcattttctcctgcaacaaacaaataaacaaaacacatgatggaaaagtagcccagtggggccctacgtcattggcagtctagaggttagcctgttcagttgtttgaaggaacaccttggcagatgattagttgttttctagggtagccaagactggtagcttccagtctgcctt

SEQ ID NO: 409074 - DNA, 315 bp, Homo sapiens
gtactgtgtatgaagatatgtgcagggcacgggcaaccttaagagatggcattgtaactctgtgctttgagtgcagtttctaggggagtaaatactctgatgctattctcctctcttcctccaatctcctgcagaggtgcttatttagcaaattcaaccttaaacctgagtgcatggaaactattgatgcagtgtccaaggtggagaaaggtcagagtggatccagaggagccaagagaagacgtccagcatggtgacctgggctcaagtcaaggtccttatttctctggtaagagcaaggatactaaaacatgt

SEQ ID NO: 409075 - DNA, 1484 bp, Homo sapiens
ggacccccttttaggaggcttgtgggcccctccatgcatggaaataaagggaaatcttgagttccttcaagggaattctaggcacctagctagcccaaagaagttaatgagcaacctgataagcaagaagtagctgaacacaatagccaaggaagtcagagtgagatgttttgttccctatagaaactaagggtaacatacatgtccccaacttttcagaaacctgaactctcaccagctttaaacctcagataaggggaaactgagaactgaactctgaccactgttcattgttctaagttgcttcctgaggggcctggaggaagtcatgtccaccggccagagctaacattcttttctgtggatcccaagtttagacagcttcaccgccttaatcataaatcaaaaaatctttgaaaccacctatgacctttgagtccacccccatcccagctttgagatgtcccacctttttaggtcaaaccaatgtatagcctctatgtattgatttatgactttgcctgtaacctctctttccctgcctttaaaaacccgtagctttaagccatctgggagttcgggtcttaagcatgatctgtgcaattctccttgcatggtgccctgcaataaaatgcctcactttctcttgctactagcctgatgtcaatggctttgtggcactgggtgagcagaccccagtttaattcagtaacaattttctgtctaccctgctagaaagtttccttccgtattctttgctagttctttcccatcttcccaaccttgcagtataccaaatctcatttctcacacttctttcctctttacactcatttaatgaacttgcccagttttggggggcaagaatgccgagaaaagatctattcctaaggcccacacagggcctgctgaggactgaggctgaattgaattagaacaacagagaacccctttacttctaccccgctaccagcctaccaagcagctagtaacaagcatccatttctaggggatgggcaaaggcctagaaagttagtcaccactgtgcaggtaggcaggacagctgtaagctgaggatgaagcatgaacacttgagttcttcagccccaacctacagtatagaataatgctagagtaggtgaaatctgtggtacattgaaagcaaccatagcaataaaacccaagcccaggtcaggtgcggtggctcaagcctgtaatctcagcactttgggaggctgaggcaggtggatcacctgaggtcaggagtttgagaccagcctgaccaacatggagaaaccccatgtctactaaaaatataaaattagtcgggtgtggtgttgcatgcctgtaatcccagctactcaggaggctgaagctggagaatcgcttgaacccaggagctggaggttgtggtgagccaagatcgcactattgcactccagtgtaggcaacaaaagcaaaactccatctcaaaaacaaaaaca

SEQ ID NO: 409076 - DNA, 774 bp, Homo sapiens
gggtcattgcttctaaagatatcctttacaatatacacagtggtctgactccaccagtggccactcatcaccttcatctgtaccttcataactgttccttccctcctcttacttagatgaattattcatactcttcctgttggaacccagccccacctcttaacactgaagctcatcctcttacctattcacagatagcatcggcagctccctccttcccttttccattagcatgtgatttctctcatcttaaaaaagaaattggcctcactctcctcttcagctgccactccatttctccactccctgtacagcaaaactcctctaactctgactgggcatgatcgctcacacctgtaatcccagcgctttaggaggccgaggtgagaggatcatttgaggccaggagtttgagacaagactggaaaacctaacaagaccttgtctctgtttaagtaaaagttttttaaaaaacaaaaatggccaggtgcggtggctcacacctgtaatcccagcactttgggaggctgaggcgggcagatcacgaggtcaggagtttgagaccagcctgaccaacatggagaaaccccatgtctactaaaaatataaaattagtcgggtgtggtgttgcatgcctgtaatcccagctactcaggaggctgaagctggagaatcgcttgaacccaggagctggaggttgtggtgagccaagatcgcactattgcactccagtgtaggcaacaaaagcaaaactccatctcaaaaacaaaaaca

SEQ ID NO: 409077 - DNA, 936 bp, Homo sapiens
  misc_feature (917)..(917): n is a, c, g, or t
tcccaaggacccagactgattatgagaacagcctcaccatgaagatgttcttattccagtttgtcaactactactcttcatgcttctacatagcattctttaagggcaaatttgtaggctatccaggagacccagtttattggttgggaaaatacagaaatgaagagtgtgacccaggtggctgtcttcttgaactgacaactcagctgacaataatcatgggaggaaaagcaatctggaataacatacaagaagtattattgccctggatcatgaatctaattgggcgatttcacagagtttctggatcagaaaagataaccccacgatgggaacaggactaccatctgcagcctatgggcaaactgggattattttatgaatatcttgaaatgattattcagtttgggttcgtcaccttatttgtggcctcttttccactggcccctctgttggctctcgtgaacaatatattggaaataagagtggacgcatggaaactgaccacccagtttagacgcctggtaccagagaaagcccaagacattggagcatggcagcccatcatgcaaggaatagcaattctggctgtggtgaccaatgccatgatcatagctttcacgtcggacatgatcccccgcctagtgtactactggtccttctccgtccctccctacggggaccacacttcctacaccatggaagggtacatcaacaacactctctccatcttcaaagtcgcagacttcaaaaacaaaagcaagggaaacccgtactctgacctgggtaaccataccacatgcaggtatcgtgatttccgatacccacctggacacccccaggagtataaacacaacatctactattggcatgtgattgcagccaagctggcttttatcattgtcatggagcacgtnatctaagatcctgtagagt

SEQ ID NO: 409078 - DNA, 249 bp, Homo sapiens
agaagtagcagagaagaaataaaagaaatcccctctcactctccaattctgttgttgcctccatgcgccaatccaaaccgaaagccagaaggaagaagagtgaggagtttgctacatcccagctccacatcactggaaatgggatttgaggcaaaactacctggtgtgtctggaagtgtctgtttctggaattccactcacaggggaaaattagcctgaaccagatggcttgaaacagtcctcatgggt

SEQ ID NO: 409079 - DNA, 204 bp, Homo sapiens
cagggtttcgccatgctggacaggctggtctcaaactcttggattcaagtgacccacctgcctcagcctcccaaagtgctgggattataggagtgagccaccatgcccagccaagcccgtttattttttaatgagagctgcacattgtatatagacagtttaatgtgatttgaggcctaaggatatctttctctaaagactttt

SEQ ID NO: 409080 - DNA, 562 bp, Homo sapiens
tgatcagtgacaaggtattgggatagtcattcagggagagagagtcagtgagggtgttagaggtagctgaaggagtggaagggagttagctagttgaaggaacactggaggactgtcggggatttgggggattaagtaaaaggtttataaggagagggtggaaagagtggttgatggctgatattctgatcatttatactagctactcagtctctactttttctagaagtccccagtaaccaaagcccaacacatttggtatcgttgattccttccattgtttgctttgctttgggttgcctaaggctgtggttatctctgagccacctaaattctcaccctcagctgaaatcactactgtctcttcatggctctcagtatatttcaatccttcttcaggaactggagcttttgagaataaggcaactttaggattgaccctaggacagaagctctgctctcaggatccttgtatgctcctgaatatgaattccatagtatgatatttggagctccccagatccttgtaggcatatgtgtgtgtgtgtatttgaggccaaaa

SEQ ID NO: 409081 - DNA, 305 bp, Homo sapiens
cttttggttgctagctcacatttacatactgtatgtcgaatctgaaaggaagctatgttcgaatagaaatggctctgctgagaagtgaatggtacagtatattttgtatagaaaaagcaattttcttgggaattaaaaggcctgttacgcagtccctgcccaaaaggctcaaaacaatcaccttttgtcattctgttttacacaagccaaattattcagctggcaaagtaaaaggggagggagataaaatacacggatgagggagattgtcatcccccaagaaacttggtagaacgcaaaggtct

SEQ ID NO: 409082 - DNA, 271 bp, Homo sapiens
ctcagctctgcatcaagtttgttgtttctatcttgtgctcacaagttctgttctgggaggcttttggggttagaccatcacaggtaaagacagaaggggaaatctacttttgcaccatttctaagatcaatttctaggcttgttttcagaacatttgccatccccctctgttctggtttgaataattgtcccctccaaaattcatgaagtttgattgtcattgtgatgatcttgagaggtggaacctttgagaggcgatgcagccacgagg

SEQ ID NO: 409083 - DNA, 210 bp, Homo sapiens
accaaataataataaggatggattactaccattgagagcaacaaaaattctgaaatttttaaagcaatgagagaataactttagtaagtataaatattccttgtaaaaaaaaacaagcttatatgaatatttaaatttttaagtttataaaaaagatctcttgatagtcatacttcatatgtttgccatctaagtggtttttcattataa

SEQ ID NO: 409084 - DNA, 624 bp, Homo sapiens
attgtctctagttgccaagccgtattttatacatacaagattatctatcagtcatactttcctagtttccttagcaggactttggtgtttccagatcttctcagtcatttttcactgtagtgactcgttgatttaatttattcacttaaaaattttgtttaatacattacagtttattctgtaatagatatttgtaataaattttctcaaccctaatattcattgttccatgagcattgtcaggttttggatggaagcaggatggccagcctgggtttgagaatcaaaagtgacccagcttctctgtccataaatctatacgtggctctgctggagcctctctgaacctatcctggttaagaggctgctcaatttgctaattgttctttgctcagtttcttaaaaaagttgactagcttcatttctgttaattcttccaagagtaccgtagagtacttgattttgtaatacactaagaactattattgtaaaaccctgagagatagtttatattggaaactaagccatttacacctaagtcactgaaatcaggttagaatgtttttctgacagaaaaaaaaaaaagtcgacgcggccgcgaatttagtagtagtgggcggccgc

SEQ ID NO: 409085 - DNA, 653 bp, Homo sapiens
attgtctctagttgccaagccgtattttatacatacaagattatctatcagtcatactttcctagtttccttagcaggactttggtgtttccagatcttctcagtcatttttcactgtagtgactcgttgatttaatttattcacttaaaaattttgtttaatacattacagtttattctgtaatagatatttgtaataaattttctcaaccctaatattcattgttccatgagcattgtcaggttttggatggaagcaggatggccagcctgggtttgagaatcaaaagtgacccagcttctctgtccataaatctatacgtggctctgctggagcctctctgaacctatcctggttaagaggctgctcaatttgctaattgttctttgctcagtttcttaaaaaagttgactagcttcatttctgttaattcttccaagagtaccgtagagtacttgattttgtaatacactaagaactattattgtaaaaccctgagagatagtttatattggaaactaagccatttacacctaagtcactgaaatcaggttagaatgtttttctgacagaaaaaaaaaaaaacaaaaacaaaaaaacacttttttatgtgtgtgtgagacagggtctcactctgtcacccaggctggag

SEQ ID NO: 409086 - DNA, 389 bp, Homo sapiens
gggattggtgcacttccagttgtacaaaggatagctgtattgtgttagatgtaattatgaccttattattggcttcagttgaagattatgtgtgatttcaggagatgtggatgggttcaagttgacaaagttgtgatggttaatattgagtgccaacttgattggattgaaggatgcaaagtattgttcctggatgtgtttgtgagggtgtttccaaaggagattaacatttgagtcagtggactgggagaggcagacccaccctcagcctgggtgggccctgtctaatcagctgccagtgtgaaaggaggcatggagagaacagacctgctgagtcttctggcctccatctttctcccatgctggaggcttcctgccctggaataaca

SEQ ID NO: 409087 - DNA, 382 bp, Homo sapiens
gggagagtccctggtaccccacatgattccgtatcaacccagtgaagcccacatttcaaagtcttggccttgtaggtgcctgactcccaaacgtcaatctctgaaacagatttttagttccatgtgagaaaaaaaactgaagtcagattgactcaggcacaaaaggggggagactgagttcacagaacttaaaacacccaagggtttcaggtatggcttgatctggggctccaaaggcatcttgggaaattgatcttccatccttggctctgctttaattagattctcccagttccaaatcccaccgtgcaatctcactggctagtttggcatcccagggcctccataaaccagttgctgtggcccagggaatggtggtctc

SEQ ID NO: 409088 - DNA, 328 bp, Homo sapiens
tgtgattgccgcccctgcactccagcctaggtgacagagttggaccctgtctcaaagaaaaagagaagaaaaagaaggtgacagctataagggatagagggtctaataaagtgggtgttttattttttggctgggacagaggctgatttataggcttagtttttttccctcctaagcatatgaagaaaaaccaatagaacgagtgatgtacatgtttgtggacgaataagttagaaacaggtttcctgtagaatgggccaggattaatacagttggaagtgtctaatttgcttctcctatctcagaatttcgaattaagaaatcatgg

SEQ ID NO: 409089 - DNA, 316 bp, Homo sapiens
gataaatgttcacaaaaactacacttggaagctttatttatttggcaaacattttttttctttgggaggctgaggtgggtgaatcacttgaggccaggagtttgagaactgcctggcaacatggcgaaaccctgtctctactaaaaatacaaaaattagtggggtgtggtggcacacgcctgtagtcccacctactcgggaggctgagccatgagagccgcttgaacctgggaggcggaggttgaagtgaatggagatcatgctactgcactccaacctgggggacagagcgagactgtgtctcagaaaaagacaa

SEQ ID NO: 409090 - DNA, 679 bp, Homo sapiens
agatcaagtaaccaccccgcacctgcagctgccaagctgggcacacagggcggcacccttctgggctgtccacctctacctcgaggctgatgctagtatgggtacagaagttgctatgtcttttctctcacacttgattttgtaagatggctagtagttacaaattaatttaaaaaatcattctgaaggcttcacaattatttgtcaaaaattgcttaagtataaaactcagaaaaaagctaggagttcaagaccagctgggcaacaaagtgagaccctgtctaggaagatagatagacagatgatagatagatagatagatagatagatagatagatagatagatagaaaaaaagatagatagatgatagaaagacaaagagagatgatagatagatgataggtagattagacagatagatgacagatagatagatagtggatagatgatagatgacagatcgatagatagatgataggtagatgataggtaggtagattagatagatgatgggtagatagatgacagacaatagatgatagatgataggtagatagatgatagatgacagatagatgatggatagattatataggtagatgataggtggatagatgatggatatatagattatatagattagatgattgatagatgataggtagatagatagatgat

SEQ ID NO: 409091 - DNA, 341 bp, Homo sapiens
ttccactcggagagcctacagctctctgccatctacccacctaagcttgggaatgtctttctctgcttgtgctctgtagccagctcacatgtcaccaggctgatgcacactcagctcagtggggctgcatttacctttcctagggattccccagcctgtggtgccctccccagtgtgggtagagaatagggtctgctgcctcctcttgcaggtatctcttctcggatgggaatgggcgcccccagctcccactggccacctttaagagatcagagggcaaccgggcactgtggctcatgcctgtaatctcagcactttgggaggccaaggtgggagaagcg

SEQ ID NO: 409092 - DNA, 307 bp, Homo sapiens
atccgaaagtcggggcctcgatgggtcattgcagaggagggcgggcatgcggttttctcctgctctggagatggagacccagcccccactgtctcctggatgaggcctcatggggcttggctgggcagggctgggagagtaagggtcctagaggatgggacactggagatccgctcagtgcagctacgggacagaggggcctatgtctgtgtggttagcaatgtcgctgggaatgactccctgaggacctggctggaagtcatccaggtggaaccaccaaacggcacactttctgaccccaacatca

SEQ ID NO: 409093 - DNA, 263 bp, Homo sapiens
ctcttttgatggtaaaaacacttaatagaagtacatctaaaaatcattcattgtctcagcatcctaagaaccagtcttcatttccccttgctgccttccagttcttatctatagcttttcctccatggcctgtgctgacctctgcacgtccctgttcctcctgccttgctgagtgttgttctttctgctcctcctgctaaggtttcccatctcccacagctgcagccttgtgtctcacccgccctgtgtctctcttcccaatt

SEQ ID NO: 409094 - DNA, 320 bp, Homo sapiens
gtccctatctgtaagatggaaatgaaaagagctgtcctgttgacctcacacaattcggcagcagggaggggtggctcagttggagggctttcaaatgatcagtgctctgcctgcacacagagggtttggtgcttcaagctgtaaccacatacccacatgtactatatgtccccaacttcatcaccaaagggggttgttcaccccttttacttgcatccatgtagagcaggtgaaaagatgacaagccaggtcccactatggaggaggagaagccccctgatggatgagtcatggaagggctgggatgtgaaatgaaggcc

SEQ ID NO: 409095 - DNA, 318 bp, Homo sapiens
ctcaaactcctgacctcaagtgatccacccaccttggcctcccaaagtgctaggattacaggtatgggccaccgcactcagcccaacatatgaatttgaggggaacataaacattcagtccacggcagtcagtgttcaaataggaagacccatgaccaatgtgatggattaggaagtctagagatggaaccgaatagatacaggaacttagatgtaaaggtggaatcttttattagtatgggaaaagatggactgatttaaaaaatagtgttgggacaactggttaaccatctagataaaaatataaatgaatctagt

SEQ ID NO: 409096 - DNA, 297 bp, Homo sapiens
ctggtgttggactgctgagtcatgctctgttgtcaggacagcaacagactttcccctgggtctgggctggcaagactggtgcttatgatgctgtcttatatttgcaataggcttttacagttttcaaagcccttttcatctgttgttccacagtcactacatgaggtcagctgggaagatatgaatgtatctttaaaagcatactgaagttcaaagaggttagaagactttcctgaaattatgtatctagtaaatggcagtactctgtactagtcagctattatggcaataatgctg

SEQ ID NO: 409097 - DNA, 288 bp, Homo sapiens
tgcatttaatggttttattaaacatgctttttttggtaacagatttatttaaacataattcacataccttaaaagtcacccacttaaactgtgcacacaactcgatggtttttagtgtattcataaagttgtgcaactatcaccacaatcaattttagaacattttcatcaccacaaaaagaaatccataccctttagcaatcatccccctgcagccccatcttcctatccctctagtctgagacaaccattaatctacttttgtctgtatagatttgcctatttcag

SEQ ID NO: 409098 - DNA, 235 bp, Homo sapiens
cttatttcatctccctgcgaggctcaggtcccaaactaagtgtgtgatccaggtggccaatcagagcactccatcctgcagcgacagtgattggtttgggaatgatcatgtgacccagtgttctgcgtgccccccgctcaactggcgttccagtgcccggcagctgacagccctgccctaacaggaaattaaggggctgacctggtgtgccttatatggaatccttctttcacct

SEQ ID NO: 409099 - DNA, 697 bp, Homo sapiens
cctgtaagaaaaaaaaaaaaaaaggctggggaacaagtacccacagagcaccctcagatagataggtagcccagcacccttaccctcaggtggtcctaccccttttccccaaggtccctggcaggcttgcaccatagctgcccaccgtagttacctgctcattgacagaccccacaggacttcctccctccctttccatctcccatttccctgtgagtgtttcctgggacgcctgccaggtgaactgtctgcatcaagtcctagcatcagggtcggcttcggagagcccagcctaggccaagtgagttcttctagtccacatcctcagtgtggcctcctgactagcagcagcatcacttaaaactggttagaaatgccgattctcaggccccgcctgctaaatcagattctgggatgcggccccgcgatctgtggctaagacctccaagtgacggatgcaaatgcaggttgcagttggaaaacgattggactgaaatcttaggagaaaccccagggagaggcagccacctgggggaggagacagactgaggtcggaggctcgcccccgctaggggtcccgggggtgcgtgatcatgaaccccagagggctgggctttgatttgagtgccgatccgttaatgaggacgggaggataaggttgccgacgcagcggaaggtaggggggaagcgactcgag

SEQ ID NO: 409100 - DNA, 498 bp, Homo sapiens
cctggcatgtattaagtgccgtgtaagtgtttcctaggattttgtgcctcactctcctggtttgcaaatggataatggtcgcgtgtatctccgtgttgttagaagatcacaggagctaagttgcttgctgtgtgtcgcttagggcctggtctgcagtcaaggttcattaaacaacacctgttcgtagcggccgttacctctgtatgcttctgcagcaggtgtttgttgagtatctgctttgttccagtatgtgcgtgcaagtgctgggtgcaggacatatagtgaaaaggtgacacagaagcttccccttcgcggtagctggaattcgtaggtaacacagagcagggtttctcatccttggccctagtgacactgtggacacagtcattccttgtagtgggggccgtcctgggtattgtaggatgtttaacatcatccttggcctctactcactagatgccggtagccccctcccaaaggtgtgacaaccaaaaatgt

SEQ ID NO: 409101 - DNA, 674 bp, Homo sapiens
tgaacaaggctgagaacgcagctgcactctcaggcccggcagcatttgggctctcttggcacaggattggagcagggtgagcctggcagagtgacaccccctggcatggtgccctgagacactcgggaggctcggggctgctccctgcactgtcctccactgtggagtttttctgacttgattggcagccccgttggctctgggtccttgggggacagcctgggctgggagagatgatcacagtggaggtgtttgttccctactgcactgatggctgcttcacccctcccttagctgtccaggtccagccctctcttgcccttagtgtggcaccaggccatggtggggagcatggatgtggagccagcggcctgggtgtgagtcctgctctgccacttactagccctgcaccctggcattttagcattccagacctcagcttcctcttgtgtgaaatggagatgctgacagtcacggtactgtgaggattaagtgaatgaatgtgcaaagtatccccagagcataggatagcacataccctccataggtatgtgctgtgattatgattgtccagcagagcccacctttaaacaagatacaatccttacaaatgccaagactgaggaggggttttcccaaaggatccactttgctacagtattgtgtgtttgttt

SEQ ID NO: 409102 - DNA, 390 bp, Homo sapiens
cttccaatagcctggctcattgctattctacaccagcccctctctgccctcaattcagcccctccactgcagtgtcagaattgagcctcaaaatgcagcctgctacagcctctgcaggggtctccatgcttccaagcctgcttgaaactttctttatggcaggcatggggaggggggagggcaggccgtgtgtggctgtcaccagacctggctgccttgggcctggctgctttgggccgagcctttgcatccctagtgggtcctcacggctgcccataaacccagcagggtaaaattcttcgttttgtcatactgagcagccagcatgcttaaccagcaggcagggaagggtctggcaagcccacctcccctgctgtgtgtgggatggag

SEQ ID NO: 409103 - DNA, 372 bp, Homo sapiens
cagttgtgttttaatgtatattaatgttactaatgtgttttcagttttattgatagtcttttcagtattattgataatcttgttatttttagtatgattctgtaaaaatgaattaatactaatttttcagatgtatcatctcttaaaatactgtaattgcaatttaataattgtattgaatgccatcaagtttttttaaaaagcttatgcagcattagaggaatttattttaatgcacatttatattcaacatagacattaattcagatttttacttgggataaaacaaattctagttttccctttgttttgaaattacttttaaaatatgtctttacagataaatataaaatatattaagcattttgaaca

SEQ ID NO: 409104 - DNA, 690 bp, Homo sapiens
ttcaacctacctcagatcaaaagtattcagggaaaaaaatgggtggttgtatctgtactgaacatgtacaggctttgttttgtcattaaacaatagagtataacaagtatttacatagtatttacattgtattaggtattataagtaacctagagatgattaaaatatgtgggaggatatgcttaggttatatgcaagtactataccattttatgtaaaagacttgaatatccatggatatttgtttctatggggggaatcctaggactaatctcccaccaataacgtagggacacctagggacaactgcattgggattcaggttgaaatagtgactgattttggtagctgcctaagcaagtgcgttgctcaaaacaccttttcccacttggggctggtctgttacaagcatatttagttaactagttccatcttacctgcgtttgatctgggagccatttagagggcaagcataaacttgggagtccatctctttcacattgtgttgaattggcataaaaatgaacaagtttttagaggtttagtttgtcgtgtagttatgagaggtttcacaggaaggtcggttatgtcacagtgttaaccttgagtcagtttagtaccttgcttttagaaaagtacaaactggtttgttcaaagggctctcagtctagttagtcagagttgggcagg

SEQ ID NO: 409105 - DNA, 1738 bp, Homo sapiens
acgcgcgcctgggtctcggcggggctgcgggaccgcgagtgagtgtggtcgctcctggttctgccagctcccctgagagcctgaacccgggcttgagagcctcgccaccccgggtgacatccctgccgtgggcttgggggctctgggtgtgattccgccggtccgggtcccgcagcgaccacctacccagcgcagtcaggggtggggctgggacccagagcgggaccccggctgccgagtccaggtgtcccgcgggcctcgatttggggagcagaaaacgccaggtcttcaagggtgtctgccaccaccatgcctgacccatttggcagcagcctcgtgtgtggtggtctggtgtggacggtggaagcgtgattctgctgagtgtcagtgtgaccactcgtgctcagccgtatctcagcaggaggacaggtgccggagcagctcgtgcagctaagcagccaactgcagaaacgtcaggcctgttgcagtctccaaggcaccatgaatgccatcgtggctctctgccacttctgcgagctccacggcccccgcactctcttctgcacggaggtgctgcacgccccacttcctcaaggggatgggaatgaggacagtcctggccagggtgagcaggcggaagaagaggaaggtggcattcagatgaacagtcggatgcgtgcgcacagccccgcagagggggccagcgtcgagtccagcagcccggggcccaaaaagtcggacatgtgcgagggctgccggtcacttgctgcagggcacccgggatatatcagccatgataaagagacctccattaaatacgtcagccaccagcaccccagccacccccagctcttcagcattgtccgccaggcctgtgtccggagcctgagctgtgaggtctgccctggccgtgaaggccccatcttcttcggagatgagcagcacggctttgtgttcagccacaccttcttcatcaaggacagcctggccaggggcttccagcgctggtacagcatcatcaccatcatgatggaccggatctacctcatcaactcctggcccttcctgctggggaaggtccggggaatcatcgatgagctccagggcaaggcgctcaaggtgtttgaggcagagcagtttggatgcccacagcgtgctcagaggatgaacacagccttcacgccattcctacaccagaggaacggcaacgccgcccgctcgctgacatcgctgacaagtgatgacaacctgtgggcgtgcctgcacacctcctttgcctggctcctgaaggcgtgtggcagccggctgaccgagaagctcctggaaggtgctccgaccgaggataccttggtccagatggagaagctcgctggtgaggcaggggtgctgttgccggggccttggcccggatggccgtggggcggtaccagctgtctgctctcctggcaggaatcgctgagggagggaaacgcggctctgaatcagcccagaacgagccttcgggaagctcaccctccgatctcggtgtgattgttgtgattgttgtgatttcctgtctcgtttgccttgaccgccatgtgaaagaatctgttccccagctaggtggggaaaattcacaggtgggctgtctgtagagagaactggctgattaaaggcttctcgtcccgattttgtgatagccaagtgcttggcctggtcgacggtctttgctcctttacaaataaagtgttctgtttca

SEQ ID NO: 409106 - DNA, 1379 bp, Homo sapiens
acgcgcgcctgggtctcggcggggctgcgggaccgcgagtgagtgtggtcgctcctggttctgccagctcccctgagagcctgaacccgggcttgagagcctcgccaccccgggtgacatccctgccgtgggcttgggggctctgggtgtgattccgccggtccgggtcccgcagcgaccacctacccagcgcagtcaggggtggggctgggacccagagcgggaccccggctgccgagtccaggtgtcccgcgggcctcgatttggggagcaggcggaagaagaggaaggtggcattcagatgaacagtcggatgcgtgcgcacagccccgcagagggggccagcgtcgagtccagcagcccggggcccaaaaagtcggacatgtgcgagggctgccggtcacttgctgcagggcacccgggatatatcagccatgataaagagacctccattaaatacgtcagccaccagcaccccagccacccccagctcttcagcattgtccgccaggcctgtgtccggagcctgagctgtgaggtctgccctggccgtgaaggccccatcttcttcggagatgagcagcacggctttgtgttcagccacaccttcttcatcaaggacagcctggccaggggcttccagcgctggtacagcatcatcaccatcatgatggaccggatctacctcatcaactcctggcccttcctgctggggaaggtccggggaatcatcgatgagctccagggcaaggcgctcaaggtgtttgaggcagagcagtttggatgcccacagcgtgctcagaggatgaacacagccttcacgccattcctacaccagaggaacggcaacgccgcccgctcgctgacatcgctgacaagtgatgacaacctgtgggcgtgcctgcacacctcctttgcctggctcctgaaggcgtgtggcagccggctgaccgagaagctcctggaaggtgctccgaccgaggataccttggtccagatggagaagctcgctggtgaggcaggggtgctgttgccggggccttggcccggatggccgtggggcggtaccagctgtctgctctcctggcaggaatcgctgagggagggaaacgcggctctgaatcagcccagaacgagccttcgggaagctcaccctccgatctcggtgtgattgttgtgattgttgtgatttcctgtctcgtttgccttgaccgccatgtgaaagaatctgttccccagctaggtggggaaaattcacaggtgggctgtctgtagagagaactggctgattaaaggcttctcgtcccgattttgtgatagccaagtgcttggcctggtcgacggtctttgctcctttacaaataaagtgttctgtttca

SEQ ID NO: 409107 - DNA, 1649 bp, Homo sapiens
acgcgcgcctgggtctcggcggggctgcgggaccgcgagtgagtgtggtcgctcctggttctgccagctcccctgagagcctgaacccgggcttgagagcctcgccaccccgggtgacatccctgccgtgggcttgggggctctgggtgtgattccgccggtccgggtcccgcagcgaccacctacccagcgcagtcaggggtggggctgggacccagagcgggaccccggctgccgagtccaggtgtcccgcgggcctcgatttggggagcagaaaacgccaggtcttcaagggtgtctgccaccaccatgcctgacccatttggcagcagcctcgtgtgtggtggtctggtgtggacggtggaagcgtgattctgctgagtgtcaggcctgttgcagtctccaaggcaccatgaatgccatcgtggctctctgccacttctgcgagctccacggcccccgcactctcttctgcacggaggtgctgcacgccccacttcctcaaggggatgggaatgaggacagtcctggccagggtgagcaggcggaagaagaggaaggtggcattcagatgaacagtcggatgcgtgcgcacagccccgcagagggggccagcgtcgagtccagcagcccggggcccaaaaagtcggacatgtgcgagggctgccggtcacttgctgcagggcacccgggatatatcagccatgataaagagacctccattaaatacgtcagccaccagcaccccagccacccccagctcttcagcattgtccgccaggcctgtgtccggagcctgagctgtgaggtctgccctggccgtgaaggccccatcttcttcggagatgagcagcacggctttgtgttcagccacaccttcttcatcaaggacagcctggccaggggcttccagcgctggtacagcatcatcaccatcatgatggaccggatctacctcatcaactcctggcccttcctgctggggaaggtccggggaatcatcgatgagctccagggcaaggcgctcaaggtgtttgaggcagagcagtttggatgcccacagcgtgctcagaggatgaacacagccttcacgccattcctacaccagaggaacggcaacgccgcccgctcgctgacatcgctgacaagtgatgacaacctgtgggcgtgcctgcacacctcctttgcctggctcctgaaggcgtgtggcagccggctgaccgagaagctcctggaaggtgctccgaccgaggataccttggtccagatggagaagctcgctggtgaggcaggggtgctgttgccggggccttggcccggatggccgtggggcggtaccagctgtctgctctcctggcaggaatcgctgagggagggaaacgcggctctgaatcagcccagaacgagccttcgggaagctcaccctccgatctcggtgtgattgttgtgattgttgtgatttcctgtctcgtttgccttgaccgccatgtgaaagaatctgttccccagctaggtggggaaaattcacaggtgggctgtctgtagagagaactggctgattaaaggcttctcgtcccgattttgtgatagccaagtgcttggcctggtcgacggtctttgctcctttacaaataaagtgttctgtttca

SEQ ID NO: 409108 - DNA, 1291 bp, Homo sapiens
acgcgcgcctgggtctcggcggggctgcgggaccgcgagtgagtgtggtcgctcctggttctgccagctcccctgagagcctgaacccgggcttgagagcctcgccaccccgggtgacatccctgccgtgggcttgggggctctgggtgtgattccgccggtccgggtcccgcagcgaccacctacccagcgcagtcaggggtggggctgggacccagagcgggaccccggctgccgagtccaggtgtcccgcgggcctcgatttggggagcagaaaacgccaggtcttcaagggtgtctgccaccaccatgcctgacccatttggcagcagcctcgtgtgtggtggtctggtgtggacggtggaagcgtgattctgctgagtgtcagtgtgaccactcgtgctcagccgtatctcagcaggaggacaggtgccggagcagctcgtgcagctaagcagccaactgcagaaacgtcaggcctgttgcagtctccaaggcaccatgaatgccatcgtggctctctgccacttctgcgagctccacggcccccgcactctcttctgcacggaggtgctgcacgccccacttcctcaaggggatgggaatgaggacagtcctggccagggtgagcaggcggaagaagaggaaggtggcattcagatgaacagtcggatgcgtgcgcacagccccgcagagggggccagcgtcgagtccagcagcccggggcccaaaaagtcggacatgtgcgagggctgccggtcacttgctgcagggcacccgggatatatcagccatgataaagagacctccattaaatacgtcagccaccagcaccccagccacccccagctcttcagcattgtccgccaggcctgtgtccggagcctgagctgtgaggtgagccttgtggccacagagcctgtctctgtgggagcccacatgctcccaggtgctctgggtgggctcggagccagcattgcacagggaggcaggcactggtcctctctcagggcggacccgcagatcagcacagcacagggtacaggacgcctcccttgtccagaattgcgggaggagtcatgttggacttgctgagcattttctgattgagtgctagcttttgcactttaagcaccgaacttttattatttgtcctttctttattattattggtttcttttttccttcttttgtgtcagggtctcgctctgtcgtccagactggagtgcagtgggccaggatcacaccactgcattccagcctgggtgacaagagcgagactccatctcaa

SEQ ID NO: 409109 - DNA, 1158 bp, Homo sapiens
acgcgcgcctgggtctcggcggggctgcgggaccgcgagtgagtgtggtcgctcctggttctgccagctcccctgagagcctgaacccgggcttgagagcctcgccaccccgggtgacatccctgccgtgggcttgggggctctgggtgtgattccgccggtccgggtcccgcagcgaccacctacccagcgcagtcaggggtggggctgggacccagagcgggaccccggctgccgagtccaggtgtcccgcgggcctcgatttggggagcagaaaacgccaggtcttcaagggtgtctgccaccaccatgcctgacccatttggcagcagcctcgtgtgtggtggtctggtgtggacggtggaagcgtgattctgctgagtgtcagtgtgaccactcgtgctcagccgtatctcagcaggaggacaggtgccggagcagctcgtgcagctaagcagccaactgcagaaacgtcaggcctgttgcagtctccaaggcaccatgaatgccatcgtggctctctgccacttctgcgagctccacggcccccgcactctcttctgcacggaggtgctgcacgccccacttcctcaaggggatgggaatgaggacagtcctggccagggtgagcaggcggaagaagaggaaggtggcattcagatgaacagtcggatgcgtgcgcacagccccgcagagggggccagcgtcgagtccagcagcccggggcccaaaaagtcggacatgtgcgagggctgccggtcacttgctgcagggcacccgggatatatcagccatgataaagagacctccattaaatacgtcagccaccagcaccccagccacccccagctcttcagcattgtccgccaggcctgtgtccggagcctgagctgtgaggtctgccctggccgtgaaggccccatcttcttcggagatgagcagcacggctttgtgttcagccacaccttcttcatcaaggacagcctggccaggggcttccagcgctggtacagcatcatcaccatcatgatggaccggatctacctcatcaactcctggcccttcctgctggggaaggtccggggaatcatcgatgagctccagggcaaggcgctcaagatgattcccggacttcccagcagaagggcaggagttgat

SEQ ID NO: 409110 - DNA, 780 bp, Homo sapiens
ggaatgattggactggtggcactttgtgtgctctgcatggagagagtatagtgggactgatcctccaggagtcaggtcctggagttggctgtgaacgagtaggggtccgagctgctggcagctttggcttaaagaggccatcccttccctttgcatttcaggtgtttgaggcagagcagtttggatgcccacagcgtgctcagaggatgaacacagccttcacgccattcctacaccagaggaacggcaacgccgcccgctcgctgacatcgctgacaagtgatgacaacctgtgggcgtgcctgcacacctcctttgcctggctcctgaaggcgtgtggcagccggctgaccgagaagctcctggaaggtgctccgaccgaggataccttggtccagatggagaagctcgctggtgaggcaggggtgctgttgccggggccttggcccggatggccgtggggcggtaccagctgtctgctctcctggcaggaatcgctgagggagggaaacgcggctctgaatcagcccagaacgagccttcgggaagctcaccctccgatctcggtgtgattgttgtgattgttgtgatttcctgtctcgtttgccttgaccgccatgtgaaagaatctgttccccagctaggtggggaaaattcacaggtgggctgtctgtagagagaactggctgattaaaggcttctcgtcccgattttgtgatagccaagtgcttggcctggtcgacggtctttgctcctttacaaataaagtgttctgtttca

SEQ ID NO: 409111 - DNA, 1181 bp, Homo sapiens
acgcgcgcctgggtctcggcggggctgcgggaccgcgagtgagtgtggtcgctcctggttctgccagctcccctgagagcctgaacccgggcttgagagcctcgccaccccgggtgacatccctgccgtgggcttgggggctctgggtgtgattccgccggtccgggtcccgcagcgaccacctacccagcgcagtcaggggtggggctgggacccagagcgggaccccggctgccgagtccaggtgtcccgcgggcctcgatttggggagcagaaaacgccaggtcttcaagggtgtctgccaccaccatgcctgacccatttggcagcagcctcgtgtgtggtggtctggtgtggacggtggaagcgtgattctgctgagtgtcagtgtgaccactcgtgctcagccgtatctcagcaggaggacaggtgccggagcagctcgtgcagctaagcagccaactgcagaaacgtcaggcctgttgcagtctccaaggcaccatgaatgccatcgtggctctctgccacttctgcgagctccacggcccccgcactcttctcctggcaggaatcgctgagggagggaaacgcggctctgaatcagcccagaacgagccttcgggaagctcaccctccgatctcggtgtgattgttgtgattgttgtgatttcctgtctcgtttgccttgaccgccatgtgaaagaatctgttccccagctaggtggggaaaattcacaggtgggctgtctgtagagagaactggctgattaaaggcttctcgtcccgattttgtgatagccaagtgcttggcctggtcgacggtctttgctcctttacaaataaagtgttctgtttcaaaaaaaaaaaaaaaaaaaaaaaaaactccggggcttttttggggggggggacaaagagggttttgaaagggcagggtcatagagcgtttcccgaacccattttcttgttcccaggggggaatcgccggccccccaaggggaggcaataatagaaaacccggtacgtagcttccgtcaccgagaaacgcaaacgaaaacccgctctgaacaccgcacaacccattctacacacacgctcaggaaccgacacacaaccaaccaacgcacccacaacagcaaactaacaacgtcaccacacgaaacgcagcacgggcgcgccaccgc

SEQ ID NO: 409112 - DNA, 888 bp, Homo sapiens
  misc_feature (765)..(765): n is a, c, g, or t
  misc_feature (781)..(782): n is a, c, g, or t
  misc_feature (789)..(789): n is a, c, g, or t
  misc_feature (792)..(792): n is a, c, g, or t
  misc_feature (812)..(812): n is a, c, g, or t
  misc_feature (815)..(816): n is a, c, g, or t
  misc_feature (825)..(825): n is a, c, g, or t
acgcgcgcctgggtctcggcggggctgcgggaccgcgagtgagtgtggtcgctcctggttctgccagctcccctgagagcctgaacccgggcttgagagcctcgccaccccgggtgacatccctgccgtgggcttgggggctctgggtgtgattccgccggtccgggtcccgcagcgaccacctacccagcgcagtcaggggtggggctgggacccagagcgggaccccggctgccgagtccaggtgtcccgcgggcctcgatttggggagcaggcggaagaagaggaaggtggcattcagatgaacagtcggatgcgtgcgcacagccccgcagagggggccagcgtcgagtccagcagcccggggcccaaaaagtcggacatgtgcgagggctgccggtcacttgctgcagggcacccgggatatatcagccatgataaagagacctccattaaatacgtcagccaccagcaccccagccacccccagctcttcagcattgtccgccaggcctgtgtccggagcctgagctgtgaggtctgccctggccgtgaaggccccatcttcttcggagatgagcagcacggctttgtgttcagccacaccttcttcatcaaggacagcctggccaggggcttccagcgctggtacagcatcatcaccatcatgatggaccggatctacctcatcaactcctggcccttcctgctggggaaggtccggggaatcatcgatgagctccagggcaaggcgctcaaggttgnggaagagttggtgccnngggtcanggntgaaaaggttagcatctaancanngaaggaagngcgtgtgaatgtgcaggtgaactgggggtggccttgggtgtgaggggggggggaatgaggggg

SEQ ID NO: 409113 - DNA, 1715 bp, Homo sapiens
acgcgcgcctgggtctcggcggggctgcgggaccgcgagtgagtgtggtcgctcctggttctgccagctcccctgagagcctgaacccgggcttgagagcctcgccaccccgggtgacatccctgccgtgggcttgggggctctgggtgtgattccgccggtccgggtcccgcagcgaccacctacccagcgcagtcaggggtggggctgggacccagagcgggaccccggctgccgagtccaggtgtcccgcgggcctcgatttggggagcagaaaacgccaggtcttcaagggtgtctgccaccaccatgcctgacccatttggcagcagcctcgtgtgtggtggtctggtgtggacggtggaagcgtgattctgctgagtgtcagtgtgaccactcgtgctcagccgtatctcagcaggaggacaggtgccggagcagctcgtgcagctaagcagccaactgcagaaacgtcaggcctgttgcagtctccaaggcaccatgaatgccatcgtggctctctgccacttctgcgagctccacggcccccgcactctcttctgcacggaggtgctgcacgccccacttcctcaaggggatgggaatgaggacagtcctggccagggtgagcaggcggaagaagaggaaggtggcattcagatgaacagtcggatgcgtgcgcacagccccgcagagggggccagcgtcgagtccagcagcccggggcccaaaaagtcggacatgtgcgagggctgccggtcacttgctgcagggcacccgggatatatcagccatgataaagagacctccattaaatacgtcagccaccagcaccccagccacccccagctcttcagcattgtccgccaggcctgtgtccggagcctgagctgtgaggtctgccctggccgtgaaggccccatcttcttcggagatgagcagcacggctttgtgttcagccacaccttcttcatcaaggacagcctggccaggggcttccagcgctggtacagcatcatcaccatcatgatggaccggatctacctcatcaactcctggcccttcctgctggggaaggtccggggaatcatcgatgagctccagggcaaggcgctcaaggtgtttgaggcagagcagtttggatgcccacagcgtgctcagaggatgaacacagccttcacgccattcctacaccagaggaacggcaacgccgcccgctcgctgacatcgctgacaagtgatgacaacctgtgggcgtgcctgcacacctcctttgcctggctcctgaaggcgtgtggcagccggctgaccgagaagctcctggaaggtgctccgaccgaggataccttggtccagatggagaagctcgctggtgaggcaggggtgctgttgccggggccttggcccggatggccgtggggcggtaccagctgtctgctctcctggcaggaatcgctgagggagggaaacgcggctctgaatcagcccagaacgagccttcgggaagctcaccctccgatctcggtgtgattgttgtgattgttgtgatttcctgtctcgtttgccttgaccgccatgtgaaagaatctgttcccctcctgttgggagcccccgtcgcctctctgttacaagagaacggctgattagcggctccgttccccaaatcctagtaaacattagacttttcctagtcccttccactctcccattaatta

SEQ ID NO: 409114 - DNA, 1938 bp, Homo sapiens
acgcgcgcctgggtctcggcggggctgcgggaccgcgagtgagtgtggtcgctcctggttctgccagctcccctgagagcctgaacccgggcttgagagcctcgccaccccgggtgacatccctgccgtgggcttgggggctctgggtgtgattccgccggtccgggtcccgcagcgaccacctacccagcgcagtcaggggtggggctgggacccagagcgggaccccggctgccgagtccaggtgtcccgcgggcctcgatttggggagcagaaaacgccaggtcttcaagggtgtctgccaccaccatgcctgacccatttggcagcagcctcgtgtgtggtggtctggtgtggacggtggaagcgtgattctgctgagtgtcagtgtgaccactcgtgctcagccgtatctcagcaggaggacaggtgccggagcagctcgtgcagctaagcagccaactgcagaaacgtcaggcctgttgcagtctccaaggcaccatgaatgccatcgtggctctctgccacttctgcgagctccacggcccccgcactctcttctgcacggaggtgctgcacgccccacttcctcaaggggatgggaatgaggacagtcctggccagggtgagcaggcggaagaagaggaaggtggcattcagatgaacagtcggatgcgtgcgcacagccccgcagagggggccagcgtcgagtccagcagcccggggcccaaaaagtcggacatgtgcgagggctgccggtcacttgctgcagggcacccgggatatatcagccatgataaagagacctccattaaatacgtcagccaccagcaccccagccacccccagctcttcagcattgtccgccaggcctgtgtccggagcctgagctgtgaggtctgccctggccgtgaaggccccatcttcttcggagatgagcagcacggctttgtgttcagccacaccttcttcatcaaggacagcctggccaggggcttccagcgctggtacagcatcatcaccatcatgatggaccggatctacctcatcaactcctggcccttcctgctggggaaggtccggggaatcatcgatgagctccagggcaaggcgctcaaggtgaattcagagatgaggtgccggggcggcagggggccctgcactgcatgagccgctctgtgctgaggttgaggcctggagaccgcgtggcgtcttcccctctgcttacagccagtgcactgtgtgaattgtagtctcttggcttcagagctggaggtcgtgaggagcctcccaggccatcccgcctgctttgctggtctctcttgtgcccgttgtcctggttctcgctcagctctggtttctttgctgcagtcagacccctggtgtctttgtttcctctggccttcatctcagggatgtctgttaatcccattgagttgcaccaccgaatgtaggcctccagctgtggagatgcagctcaggccaggccaggccaggtcgtgctctggtaacagcctcggatctcagcaccttcaagccatagggcctgtttcttactcatgatgtgtgcattgcaggagagtggggctctgcttgctgtggtcgtcctggcaggcaggcagagcggcagccatatgaaaatgcttcccctaggctgggcgcagtggctcacgcctgtaatcccagcactttgggaggccaaggcgggcagatcacctgaggtcgggagtttgagaccagcttgaccaacatggagaaaccccgtctcttccagaaatacaaaattagctgggcatggtggtgcatgcctgtaatcccagctacttgggaggctgaggcaggagaaacgcttgaacccatgaggcagaggttgtagtgagccgagatcacaccattgcactccagcctgggcgacagagtgagactccatctcaaaaa

SEQ ID NO: 409115 - DNA, 1163 bp, Homo sapiens
acgcgcgcctgggtctcggcggggctgcgggaccgcgagtgagtgtggtcgctcctggttctgccagctcccctgagagcctgaacccgggcttgagagcctcgccaccccgggtgacatccctgccgtgggcttgggggctctgggtgtgattccgccggtccgggtcccgcagcgaccacctacccagcgcagtcaggggtggggctgggacccagagcgggaccccggctgccgagtccaggtgtcccgcgggcctcgatttggggagcagaaaacgccaggtcttcaagggtgtctgccaccaccatgcctgacccatttggcagcagcctcgtgtgtggtggtctggtgtggacggtggaagcgtgattctgctgagtgtcagtgtgaccactcgtgctcagccgtatctcagcaggaggacaggtgccggagcagctcgtgcagctaagcagccaactgcagaaacgtcaggcctgttgcagtctccaaggcaccatgaatgccatcgtggctctctgccacttctgcgagctccacggcccccgcactctcttctgcacggaggtgctgcacgccccacttcctcaaggggatgggaatgaggacagtcctggccagggtgagcaggcggaagaagaggaaggtggcattcagatgaacagtcggatgcgtgcgcacagccccgcagagggggccagcgtcgagtccagcagcccggggcccaaaaagtcggacatgtgcgagggctgccggtcacttgctgcagggcacccgggatatatcagccatgataaagagacctccattaaatacgtcagccaccagcaccccagccacccccagctcttcagcattgtccgccaggcctgtgtccggagcctgagctgtgaggtgagccttgtggccacagagcctgtctctgtgggagcccacatgctcccaggtgctctgggtgggctcggagccagcattgcacagggaggcaggcactggtcctctctcagggcggacccgcagatcagcacagcacagggtacaggacgcctcccttgtccagaattgcgggaggagtcatgttggacttgctgagcattttctgattgagtgctagcttttgcatccagcctgggcgacagagtgagactccatctcaaaaa

SEQ ID NO: 409116 - DNA, 359 bp, Homo sapiens
tgtgaccactcgtgctcagccgtatctcagcaggaggacaggtgccggagcagctcgtgcagctaagcagccaactgcagaaacgtcaggtgggtggtgcattcgcaggcatgctgaagaagcagttccaggcatgggccgccggcagagaggctggctgcagcaccccccaccaccatgcacatcgtgctttgcttcttcctagagttagcggctttggcaggccatgccttgtttgtgttcacagcctgcctgtcaggagcgaagacagaacgtctgacttttggatccgtaacaggggtgggggctccccagaagagaagaggctttgggtcctggccagtgtccactactcagtc

SEQ ID NO: 409117 - DNA, 342 bp, Homo sapiens
tccagaactgtgagagaatatgtcgtgttaagccactcagggtggggtactttgttatggcacccctgggaaactgatacaactgctatgctatgggggtctctcaacaacccaacccttagggagtttacactcttggaggggtggacaatcatcacgagcctcatgagattcacaaaagaccctttcagtgccacgcttgcagggtgcaagttttatgcatatggtggccaccttccctgctggaagggtcaggactcagaaaagcagcacctttagaagatctttactattggggttttattatagggatttggccttttgcagtcgtaagagctggtt

SEQ ID NO: 409118 - DNA, 270 bp, Homo sapiens
ctcttaggggaggtgggcagaaccggggcatttgagttggaccttgaagaaggagtacaaattggcagtggccgtaaatggcattctaggctgaggggatggttaaccaaaggttgggaggggtgaaatagaacaagtcttctaggaactatacccagcctgagagccaggaggagagggtgctggtggagaaggcagggtggatggaggaattggcagatatgagatgaacaaagtaggttggatgcaaaacaccctggagacccaagg

SEQ ID NO: 409119 - DNA, 513 bp, Homo sapiens
ggcctgcgggtccagacgctgatcaggcctgatctgggctgagtcactttgcctctctgggctctcctgtccccgctgtgaagtgtatgtagaccctcctcttcctcatagggttattgtgaagatcagagtgtctggaaaaccctggaagggcggctggaggtatcagtcccccctgcccgttctctgggcctccattgccacattcatgaaattagaaaagctcgacctgaaaactccttctggccgggcatgggggctcacacctgtaatcccagcactggcaggctgaggccagtggatcatttgaggtcaggagttcaagaccagcctggccaacatggtgaaaccccatctccactaaaaatacaaaaattagctgggtggtagtggcacgcgactgtaatcccagctactcaggaggctgagacaggagaatcgcttgagcctgggaggtggtggttgtggtgagccgagattgtaccactacactccagtctgggcgacagtctc

SEQ ID NO: 409120 - DNA, 357 bp, Homo sapiens
tcttcaagttcagagggatttttatcttttcatatcatagtaggagaattaataaaaatgtttcatttttaagcattttttaattattcaggcaacagaataagtgttctgcatatattgtttcatttaattctttagttccaggaggtaggtgaagacatctctatgttgtagttaataaactaagggtctgtaattttaagagatttacccagaaatcacataagtcttaggtgttggagttaaaatttgaacctgagtttgtttgattctaaaacttgtgctccatgaagaagttactggctttatctattctctctctctctcttgttcttggtcactgactatcagtattta

SEQ ID NO: 409121 - DNA, 294 bp, Homo sapiens
attttttgaaccttgaaaacaaattagaattcaatttcctccatgtcacttttgcaagaatattcaagtgttttttgagtcatgataatattgatcaattatgaacactttagaatgggagaaaattaacaattatgtgtctttctcagtgagacccatcatctgatattctcacgattttgacaatgatggactgttgtcaaactctcattcattaaccctactcctactttctgggacacacagtagtagactgaggttcttcaaatatttgaagtccgtatctccatttcc

SEQ ID NO: 409122 - DNA, 1980 bp, Homo sapiens
  misc_feature (1)..(1): n is a, c, g, or t
  misc_feature (3)..(4): n is a, c, g, or t
ncnngggggcatttctgcattcgaagaagaatctgagagaaacctgacgcagggagcatgggtatctggacctcaggcactgatatcttcctaagtctttgggagatttacgtgtctccaagaagccccggatggatggactttatccagcatttgggagtttgctgtttggttgctcttatttcagtgggcctcctgtctgtggccgcctgctggtttctgccatcaatcatagcggccgctgcctcctggattatcacgtgtgttctgctgtgttgctccaagcatgcacgatgttttattcttcttgtctttctctcttgtggcctgcgtgaaggcaggaatgctttgattgcagctggcacagggatcgtcatcttgggacacgtagaaaatatttttcacaactttaaaggtctcctagatggtatgacttgcaacctaagggcaaagagcttttccatacattttccacttttgaaaaaatatattgaggcaattcagtggatttatggccttgccactccactaagtgtatttgatgaccttgtttcttggaaccagaccctggcagtctctcttttcagtcccagccatgtcctggaggcacagctaaatgacagcaaaggggaagtcctgagcgtcttgtaccagatggcaacaaccacagaggtgttgtcctccctgggtcagaagctacttgcctttgcagggctttcgctcgtcctgcttggcactggcctcttcatgaagcgatttttgggcccttgtggttggaagtatgaaaacatctacatcaccagacaatttgttcagtttgatgaaagggagagacatcaacagaggccctgtgtgctcccgctgaataaggaggaaaggaggaagtatgtcatcatcccgactttctggccgactcctaaagaaaggaaaaacctggggctgtttttcctccccatacttatccatctctgcatctgggtgctgtttgcagctgtagattatctgctgtatcggctcattttctcagtgagcaagcagtttcaaagcttgccagggtttgaggttcacttgaaactgcacggagagaaacaaggaactcaagatattatccatgattcttcctttaatatatctgtgtttgaacccaactgtatcccaaaaccaaaattccttctatctgagacctgggttcctctcagtgttattcttttgatattagtgatgctgggactgttgtcctctatccttatgcaacttaaaatcctggtgtcagcatctttctaccccagcgtggagaggaagcgcatccaatatctgcatgcaaagctgcttaaaaaaagatcaaagcagccgctgggagaagtcaaaagacggctgagtctctatcttacaaagattcatttctggcttccagtcctgaaaatgattaggaagaagcaaatggacatggcaagtgcagacaagtcatgagagaccccgactactcctcagccacatcgcaccaacaattctcttcaggtctaggatggcagtcactattcatgccggataatagagaactatgtgacgcagtcctctcaggagtctgagtttacagagccaacttgcagcacctggttatgcctcctttcatctcaaagccaaagagctgccaggtaaatggttatgtggtctatgttccaaacaaaccacatgatcttgcctgtgtcacaatgtaacaagactctagctgggtcccctggtgatgagtttcagcatagaataatgttcaaggaaaagaaaacgaaaacagtttaaatctctaccacagcctcacaagcaaatgctaaggggaacatacatgtaaaaagccagcaaactatcttcaaactcttccgtccttaatgtcttccatggctattgcccccacaatggtctcttttctccctgctcccttattaaagaactctttctgaaaccctttttttttttttttttttt

SEQ ID NO: 409123 - DNA, 2123 bp, Homo sapiens
  misc_feature (3)..(3): n is a, c, g, or t
cgncacgaggcgaagaagaatctgagagaaacctgctgctttcacagaggaaggcatttgctggctttcccaaggcaagaacaatgaaaacaaagtcatgaggagttctctctacctcaaatgaaggccgcagctcctgctcaagctattttggcagtctgagagaacagtacattctgaaccacattgacgcagggagcatgggtatctggacctcaggcactgatatcttcctaagtctttgggagatttacgtgtctccaagaagccccggatggatggactttatccagcatttgggagtttgctgtttggttgctcttatttcagtgggcctcctgtctgtggccgcctgctggtttctgccatcaatcatagcggccgctgcctcctggattatcacgtgtgttctgctgtgttgctccaagcatgcacgatgttttattcttcttgtctttctctcttgtggcctgcgtgaaggcaggaatgctttgattgcagctggcacagggatcgtcatcttgggacacgtagaaaatatttttcacaactttaaaggtctcctagatggtatgacttgcaacctaagggcaaagagcttttccatacattttccacttttgaaaaaatatattgaggcaattcagtggatttatggccttgccactccactaagtgtatttgatgaccttgtttcttggaaccagaccctggcagtctctcttttcagtcccagccatgtcctggaggcacagctaaatgacagcaaaggggaagtcctgagcgtcttgtaccagatggcaacaaccacagaggtgttgtcctccctgggtcagaagctacttgcctttgcagggctttcgctcgtcctgcttggcactggcctcttcatgaagcgatttttgggcccttgtggttggaagtatgaaaacatctacatcaccagacaatttgttcagtttgatgaaagggagagacatcaacagaggccctgtgtgctcccgctgaataaggaggaaaggaggaagtatgtcatcatcccgactttctggccgactcctaaagaaaggaaaaacctggggctgtttttcctccccatacttatccatctctgcatctgggtgctgtttgcagctgtagattatctgctgtatcggctcattttctcagtgagcaagcagtttcaaagcttgccagggtttgaggttcacttgaaactgcacggagagaaacaaggaactcaagatattatccatgattcttcctttaatatatctgtgtttgaacccaactgtatcccaaaaccaaaattccttctatctgagacctgggttcctctcagtgttattcttttgatattagtgatgctgggactgttgtcctctatccttatgcaacttaaaatcctggtgtcagcatctttctaccccagcgtggagaggaagcgcatccaatatctgcatgcaaagctgcttaaaaaaagatcaaagcagccgctgggagaagtcaaaagacggctgagtctctatcttacaaagattcatttctggcttccagtcctgaaaatgattaggaagaagcaaatggacatggcaagtgcagacaagtcatgagagaccccgactactcctcagccacatcgcaccaacaattctcttcaggtctaggatggcagtcactattcatgccggataatagagaactatgtgacgcagtcctctcaggagtctgagtttacagagccaacttgcagcacctggttatgcctcctttcatctcaaagccaaagagctgccaggtaaatggttatgtggtctatgttccaaacaaaccacatgatcttgcctgtgtcacaatgtaacaagactctagctgggtcccctggtgatgagtttcagcatagaataatgttcaaggaaaagaaaacgaaaacagtttaaatctctaccacagcctcacaagcaaatgctaaggggaacatacatgtaaaaagccagcaaactatcttcaaactcttccgtccttaatgtcttccatggctattgcccccacaatggtctcttttctccctgctcccttattaaagaactctttctgaaaccctttttttttttttttttttt

SEQ ID NO: 409124 - DNA, 1960 bp, Homo sapiens
  misc_feature (1)..(1): n is a, c, g, or t
  misc_feature (3)..(4): n is a, c, g, or t
ncnngggggcatttctgcattcgaagaagaatctgagagaaacctgacgcagggagcatgggtatctggacctcaggcactgatatcttcctaagtctttgggagatttacgtgtctccaagaagccccggatggatggactttatccagcatttgggagtttgctgtttggttgctcttatttcagtgggcctcctgtctgtggccgcctgctggtttctgccatcaatcatagcggccgctgcctcctggattatcacgtgtgttctgctgtgttgctccaagcatgcacgatgttttattcttcttgtctttctctcttgtggcctgcgtgaaggcaggaatgctttgattgcagctggcacagggatcgtcatcttgggacacgtagaaaatatttttcacaactttaaaggtctcctagatggtatgacttgcaacctaagggcaaagagcttttccatacattttccacttttgaaaaaatatattgaggcaattcagtggatttatggccttgccactccactaagtgtatttgatgaccttgtttcttggaaccagaccctggcagtctctcttttcagtcccagccatgtcctggaggcacagctaaatgacagcaaaggggaagtcctgagcgtcttgtaccagatggcaacaaccacagaggtgttgtcctccctgggtcagaagctacttgcctttgcagggctttcgctcgtcctgcttggcactggcctcttcatgaagcgatttttgggcccttgtggttggaagtatgaaaacatctacatcaccagacaatttgttcagtttgatgaaagggagagacatcaacagaggccctgtgtgctcccgctgaataaggaggaaaggaggaagtatgtcatcatcccgactttctggccgactcctaaagaaaggaaaaacctggggctgtttttcctccccatacttatccatctctgcatctgggtgctgtttgcagctgtagattatctgctgtatcggctcattttctcagtgagcaagcagtttcaaagcttgccagggtttgaggttcacttgaaactgcacggagagaaacaaggaactcaagatattatccatgattcttcctttaatatatctgtgtttgaacccaactgtatcccaaaaccaaaattccttctatctgagacctgggttcctctcagtgttattcttttgatattagtgatgctgggactgttgtcctctatccttatgcaacttaaaatcctggtgtcagcatctttctaccccagcgtggagaggaagcgcatccaatatctgcatgcaaagctgcttaaaaaaagatcaaagcagccgctgggagaagtcaaaagacggctgagtctctatcttacaaagattcatttctggcttccagtcctgaaaatgattaggaagaagcaaatggacatggcaagtgcagacaagtcatgagagaccccgactactcctcagccacatcgcaccaacaattctcttcaggtctaggatggcagtcactattcatgccggataatagagaactatgtgacgcagtcctctcaggagtctgagtttacagagccaacttgcagcacctggttatgcctcctttcatctcaaagccaaagagctgccaggtaaatggttatgtggtctatgttccaaacaaaccacatgatcttgcctgtgtcacaatgtaacaagactctagctgggtcccctggtgatgagtttcagcatagaataatgttcaaggaaaagaaaacgaaaacagtttaaatctctaccacagcctcacaagcaaatgctaaggggaacatacatgtaaaaagccagcaaactatcttcaaactcttccgtccttaatgtcttccatggctattgcccccacaatggtctcttttctccctgctcccttattaaagaactctttctgaaaccc

SEQ ID NO: 409125 - DNA, 428 bp, Homo sapiens
acggggtttcaccatgttggccaggatggcctccatctcctgacctcatgatctgcccgccttggcctcccaaagtgctgggattacaggtgtgaaccactgtgcctggcctagtgcctatagttttacaacaaaaggacagaaatcagaatcagctaaagggagagatgcataacacaaggtctcggagtgtcccaggcactaaccttctgtcatcctcaggaagacattaccatcttggcatagcaatgtgtgatgataacaatatgcagagaattaccaagcagggaagctcacccaagcctttggtgtccagagttattatttcagacctgattatatactgcccatgcagctacctttggtcttcacttccacaaggttagaattgatatggtgtgttccaaagcctctgttataaatcacat

SEQ ID NO: 409126 - DNA, 323 bp, Homo sapiens
ctctgactccctggttcaagcaattctcctgtctcagcctcctgagtaactgggactacaggcatgtgccaccatgtccagctaatttttgtatttttagaagagacggggtttcaccatgttggccaggatggcctccatctcctgacctcatgatctgcccgccttggcctcccaaagtgctgggattacaggtgtgaaccactgtgcctggcctagtgcctatagttttacaacaaaaggacagaaatcagaatcagctaaagggagagatgcataacacaaggtctcggagtgtcccaggcactaaccttctgtcatcc

SEQ ID NO: 409127 - DNA, 304 bp, Homo sapiens
agaaaatctaaatatcagagtgaggttggggagtgttccacctcaggaagaaatgctgagtaattgatttacagcccttttgtcaccggccagaccactaaattgtccattacccaagataaccattgcaaccagatatgccgacttgcatgccttgcccatcatgtgctaccagctcagcctgcaaaccttacccctgatgtcaattcccacactttgtctaattaaaaaaaagcactcctactggcttttttcagagagtcagctggagcgtccttgtactggggcacaagccccgaaataa

SEQ ID NO: 409128 - DNA, 325 bp, Homo sapiens
tttgtccaatcatatttctacccggttgtccatgcttcagtcgtgacggtccagtgaagtcctggaccgggtacagagagcttccagatagctgaacacgtggagggtcctggagggtggtgcacccagggagggtatgagagctctgcaccccttcccacatgccttgttctgtgcacctcttcatctgcattctttgtgctattctttataataaaccagtacacgtgttttcctgagttctgggcacagctttagcaaattaatcaaacctaagaagggggtcatgggaacactgacttgaagctggttggccagaagttct

SEQ ID NO: 409129 - DNA, 299 bp, Homo sapiens
tataaatcggtgttctggttatataattatgatactattacagatacttcctagtgtctccaacatagttgtaaaactctccagatactattttctattcaaatcagaagcatttttagtttcctttttttcctgtgaaaacattccttctaaaagcctctgacctcctgctgtagtccctactgattgctctttgaacttactgtgcacagctgtcatcctttacttctctcttgtttggagtctttgttttcttgagtctgtcttccttccttcctttttttttttttttttttttt

SEQ ID NO: 409130 - DNA, 261 bp, Homo sapiens
ctttggatcttatgtgggaagtaggctgaactgagtccaattgaggtatctgaataatccaggcatgagggtcatgattaccaatggtcagtgatttaatcagtcatttagaacatggtgtagcagtgaggtagtgagaagttttcagattctgcatttatttcaaaggtagagttggcctagaattttttctcgtattgattatggactatgtgacagaatgagtagggggaagatgattagtatttagcctgattcagt

SEQ ID NO: 409131 - DNA, 308 bp, Homo sapiens
gggtgacaaagtgagaccctgtctcaaaaagaaaagaaaaaagaaaaagaaaaaagaaagaaagtgccaaatatttttcaaagcagttgtttaccaccagcaatggataagcattccagttgccccacatcttccccaccacttaccattatcagtctttataatgtcagacgttctaacgggtatgtagtaatatctcattatggttgtagttttaatttccctgatgactaaagatgttgaacattgcattgatttatgggctgtttgcataccttcttttgctcattttaaattggatcatttgt

SEQ ID NO: 409132 - DNA, 268 bp, Homo sapiens
cattgaggtaatgtgatagtttacagcagagaaagtgatggagagagtgggactatttgggatacaccacaaatgaccaaatataaggcaattcatttttctaataggaaaaaaagtaaagatgggggaaggcagatgtaaatttaaaacacatacttaagtattaatagttcaataatttgataacatttaaaataacatgaatgtaagtttaatttatagatgtttcattttctgcacccgtattctctgataccgttttattgaa

SEQ ID NO: 409133 - DNA, 4368 bp, Homo sapiens
  misc_feature (121)..(121): n is a, c, g, or t
  misc_feature (898)..(898): n is a, c, g, or t
  misc_feature (907)..(907): n is a, c, g, or t
  misc_feature (1061)..(1061): n is a, c, g, or t
gccttctccatgacaggatggctttctccagttctaggatgctctttgttccatgttctgccttttgcttctaactaaaatctcaagctgcctgtttcaggaattgcaggtatcatcatgntaactacttaactggtccataggcttttcataaagatccacctgaaagattttcttgtaacattatttttcactgctgtagtttgtcatgtgctgagttgctctgtgccagtgctggctgtgcacctctctggtcttccctttagggcatacatcttataggtctggtatagttgcacaactgggattcgaggatggctctggttgctttacagggtgcaaacagcaagatagtctcagaggaggcctggccctaatgagtgacaactaagggagggcaagacactagggctgtttctaatcacaccataaacctgtcctgagttctcagtgattgggtgctgattccataggacatatatcatttctctcttttttttcttttctacacatgttctgatttttatttcatccatgacttccagcccttagctgctaccaatttctggcctccatgtgtcacctgttcctttccagtgcaacttctagagtgttctctaacactgacccacatgtaatatgttgtcagatgtgcacatgtttttaaatagtccttccacacctagtattcagttcccatgggtgtctactgggcctggacaccaataatcttctgtgcagtgtaccgaagtcctctcttctcatcaggggaggaagtcctgataaaagcttttggcagaatagtgagtcagagaccctacctgttctctctgagttgtgccccatctttgtgtctttcatctcataaggcctcccttgttctgtgacttgtagaggnttttttccncaaatttccaccagctctcatatcctaaaaacattttcttagactcattctttgacacacatttttgatgtaacttctcacaccatagtaaatctgtgttttctcagcatttctcttctttcaggttgctggtgtggagcagtagatgaggggncgccttctgcagagagcgtttctgtggaagaactgtcacagggcaggactccaaaggcagatacatccactgataagagtcacccctgtgagatttgtaccccagtcctgagagacattttacaaatgattgagctccaagcctcaccctgtggacagaaattgtacttgggtggagcatcaagagatttctggatgagttcaaaccttcaccagctccagaagcttgataatggagagaagctctttaaagtggatggggaccaggcctcatttatgatgaactgcaggttccatgtgtcaggaaaacccttcacgtttggggaagtcgggagggacttttcagccacctcaggacttctccagcatcaggtgactcccaccattgagagaccacacagcaggattagacacttgagagttcccactggacgaaagcctctcaaatacactgaatccaggaaatcttttagagagaaatctgtattcattcaacaccaaagagctgactctggagaaaggccttacaagtgcagtgaatgtgggaaatcctttagtcaaagttctggctttcttcgacacaggaaagcacacggtagaacaaggactcatgaatgtagtgaatgtgggaaatcatttagtcgcaaaactcacctaactcaacaccaaagagttcacactggagaaaggccttatgactgcagtgaatgtggcaaatcctttcgccaggtatctgtcctcattcaacatcaacgagttcacactggagaaaggccttatgagtgcagtgaatgtgggaaatcttttagccacagcactaacctctatcgtcacaggagtgcccacactagcacaaggccttatgagtgcagtgaatgtggaaaatcctttagccatagcactaacctctttcgacactggagagttcacactggagtaaggccttatgagtgtagtgaatgtgggaaagcatttagttgcaatatctaccttattcaccaccaaagatttcacactggagaaagaccttatgtgtgcagtgaatgtgggaaatcatttggccagaaatctgtcctcattcaacaccaaagagttcacactggagaaaggccttatgagtgcagtgaatgtgggaaagtttttagccaaagctctggcctctttcgacacagaagagctcacactaaaacaaagccttatgagtgcagtgaatgtgaaaaatcatttagttgcaaaactgacctcattcgacaccagacagttcacactggagaaaggccttatgagtgcagtgtatgtgggaaatcttttatccgaaaaacccacctcattcgacaccagactgttcacactaatgaaaggccttatgagtgcgatgaatgtgggaaatcctatagccaaagctctgccctccttcagcataggagagttcacactggagaaaggccttatgagtgcagagaatgtgggaaatcttttacccgcaaaaatcacctcattcaacacaagacagttcacactggagaaaggccttatgaatgcagtgaatgtggaaaatcctttagccaaagctctggcctcttaagacacagaagagttcatgtgcagtgaatgtgggaaattattttgtcacttttttttttttttttgagatggaattttgctcgtcacccaggctggagtgcaattgtgcaatctcagctcactgcaacctccgcctcctgggatcaagtgattctcctgccacagcctcctgagtacctgagattacaggcacccaccaccatgcccagctaatttttgtatttttaatagaaacaaggtttcaccatgttggtcaggctggtgttgaactcctgacctcaggtaatccacctgcttcagcctaccaaagtgctgggattacaggcgtgagccaccatgtccggcttgtgttgtgacatttaacacaagatttcccaaagaagaaaggccttatatatgctgtgaatgtgtttttgcttgttagtttgttttaacttggtatgacggcactggaggctagcctttgagaagagccttctctgatgtgactcatgtatccaaacatccatggatttcccataaatttgaggtatgtgggaagcatgtgtagctatgttgtactctctaaacctgcccagggaccttaccagattcgtgtcactgccagtttctgcggctgaagccttttcatcactacccgctgggagacccacagagtgtgcatcagtcaccaccccaacatgctcagggaggcagagttcttccattagttggaggaaagcacgagtagtctaagctcttaggggggtttctcatttcctcctgtggctacatagtgcatataactaccccagtgttggccccaggacctgatctgagttctgctggcagcttccagaggattgccttttttgaggacattgttgatctcaggcgatgcttgtgatgaagcattttttagcttccaccacttaccaggaactgcctgttaactggcttgtgcaatgataaaggccttttgtttaagtacctttaatcttgtaagttgtattaattgttgagtagtttggaaacataataggactctgtcagcttaaaagggtatataacatttgtggggattcaaattttgtttgcctcagaggggacagtatgctcacagaatatagattttgctccatttttggcctatttcgcattgtttccaaggccttctaggagacactgcagggctttctggctctgatttttgcctgcatgtgggctcagaggtcattctgcagagggggcagttgtggcaacttccattgtttctggagacaacacaaagtttttcttgttgagtgaggatatcacataatgccctgcaatgtttagaatcccttaatgaggtcctgtgaaggagctgtgtcccttgaaacacagaattcagtgagctagtgtccctagctataaaaccatggggctggagcgaaacataattggtaaagaaacgctgggttgaataatagggaatggaggagactgcagcaaattagatggactgttcctcatataaagtttcatccggccgggcgcagtggctcacacctttaatcctagcactttgggaggctgaggtgggtggatcacaaggtcgggagttcaataacagcctggccaaggtggtgaaaccctggaaggctgaggcagataattgcttgaacttgggaggcagaggttgcagtgagctcagatcacaccactgcactccagcctgggtgacagagcgagactgcgtctca

SEQ ID NO: 409134 - DNA, 1523 bp, Homo sapiens
  misc_feature (121)..(121): n is a, c, g, or t
  misc_feature (898)..(898): n is a, c, g, or t
  misc_feature (907)..(907): n is a, c, g, or t
  misc_feature (1061)..(1061): n is a, c, g, or t
gccttctccatgacaggatggctttctccagttctaggatgctctttgttccatgttctgccttttgcttctaactaaaatctcaagctgcctgtttcaggaattgcaggtatcatcatgntaactacttaactggtccataggcttttcataaagatccacctgaaagattttcttgtaacattatttttcactgctgtagtttgtcatgtgctgagttgctctgtgccagtgctggctgtgcacctctctggtcttccctttagggcatacatcttataggtctggtatagttgcacaactgggattcgaggatggctctggttgctttacagggtgcaaacagcaagatagtctcagaggaggcctggccctaatgagtgacaactaagggagggcaagacactagggctgtttctaatcacaccataaacctgtcctgagttctcagtgattgggtgctgattccataggacatatatcatttctctcttttttttcttttctacacatgttctgatttttatttcatccatgacttccagcccttagctgctaccaatttctggcctccatgtgtcacctgttcctttccagtgcaacttctagagtgttctctaacactgacccacatgtaatatgttgtcagatgtgcacatgtttttaaatagtccttccacacctagtattcagttcccatgggtgtctactgggcctggacaccaataatcttctgtgcagtgtaccgaagtcctctcttctcatcaggggaggaagtcctgataaaagcttttggcagaatagtgagtcagagaccctacctgttctctctgagttgtgccccatctttgtgtctttcatctcataaggcctcccttgttctgtgacttgtagaggnttttttccncaaatttccaccagctctcatatcctaaaaacattttcttagactcattctttgacacacatttttgatgtaacttctcacaccatagtaaatctgtgttttctcagcatttctcttctttcaggttgctggtgtggagcagtagatgaggggncgccttctgcagagagcgtttctgtggaagaactgtcacagggcaggactccaaaggcagatacatccactgataagagtcacccctgtgagatttgtaccccagtcctgagagacattttacaaatgattgagctccaagcctcaccctgtggacagaaattgtacttgggtggagcatcaagagatttctggatgagttcaaaccttcaccagctccagaagcttgataatggagagaagctctttaaagtggatggggaccaggcctcatttatgatgaactgcaggttccatgtgtcaggaaaacccttcacgtttggggaagtcgggagggacttttcagccacctcaggacttctccagcatcaggtgactcccaccattgagagaccacacagcaggattagacacttgagagttcccactggacgaaagcctctcaaatacactgaatccagga

SEQ ID NO: 409135 - DNA, 1892 bp, Homo sapiens
cttatcgtcgaagacctctttgatggcatcaggctgatcgtggggtcgtaatcttgtgttgaatgaggtgattttagcgggtaaaagatttcccacattctctgcactcaaaggccttatgaatgcagtgaatgtggaaaatcctttagccaaagctctggcctcttaagacacagaagagttcatgtgcagtgaatgtgggaaattattttgtcacttttttttttttttttgagatggaattttgctcgtcacccaggctggagtgcaattgtgcaatctcagctcactgcaacctccgcctcctgggatcaagtgattctcctgccacagcctcctgagtacctgagattacaggcacccaccaccatgcccagctaatttttgtatttttaatagaaacaaggtttcaccatgttggtcaggctggtgttgaactcctgacctcaggtaatccacctgcttcagcctaccaaagtgctgggattacaggcgtgagccaccatgtccggcttgtgttgtgacatttaacacaagatttcccaaagaagaaaggccttatatatgctgtgaatgtgtttttgcttgttagtttgttttaacttggtatgacggcactggaggctagcctttgagaagagccttctctgatgtgactcatgtatccaaacatccatggatttcccataaatttgaggtatgtgggaagcatgtgtagctatgttgtactctctaaacctgcccagggaccttaccagattcgtgtcactgccagtttctgcggctgaagccttttcatcactacccgctgggagacccacagagtgtgcatcagtcaccaccccaacatgctcagggaggcagagttcttccattagttggaggaaagcacgagtagtctaagctcttaggggggtttctcatttcctcctgtggctacatagtgcatataactaccccagtgttggccccaggacctgatctgagttctgctggcagcttccagaggattgccttttttgaggacattgttgatctcaggcgatgcttgtgatgaagcattttttagcttccaccacttaccaggaactgcctgttaactggcttgtgcaatgataaaggccttttgtttaagtacctttaatcttgtaagttgtattaattgttgagtagtttggaaacataataggactctgtcagcttaaaagggtatataacatttgtggggattcaaattttgtttgcctcagaggggacagtatgctcacagaatatagattttgctccatttttggcctatttcgcattgtttccaaggccttctaggagacactgcagggctttctggctctgatttttgcctgcatgtgggctcagaggtcattctgcagagggggcagttgtggcaacttccattgtttctggagacaacacaaagtttttcttgttgagtgaggatatcacataatgccctgcaatgtttagaatcccttaatgaggtcctgtgaaggagctgtgtcccttgaaacacagaattcagtgagctagtgtccctagctataaaaccatggggctggagcgaaacataattggtaaagaaacgctgggttgaataatagggaatggaggagactgcagcaaattagatggactgttcctcatataaagtttcatccggccgggcgcagtggctcacacctttaatcctagcactttgggaggctgaggtgggtggatcacaaggtcgggagttcaataacagcctggccaaggtggtgaaaccctggaaggctgaggcagataattgcttgaacttgggaggcagaggttgcagtgagctcagatcacaccactgcactccagcctgggtgacagagcgagactgcgtctca

SEQ ID NO: 409136 - DNA, 1192 bp, Homo sapiens
cttatcgtcgaagacctctttgatggcatcaggctgatcgtggggtcgtaatcttgtgttgaatgaggtgattttagcgggtaaaagatttcccacattctctgcactcaaaggccttatgaatgcagtgaatgtggaaaatcctttagccaaagctctggcctcttaagacacagaagagttcatgtgcagtgaatgtgggaaattattttgtcacttttttttttttttttgagatggaattttgctcgtcacccaggctggagtgcaattgtgcaatctcagctcactgcaacctccgcctcctgggatcaagtgattctcctgccacagcctcctgagtacctgagattacaggcacccaccaccatgcccagctaatttttgtatttttaatagaaacaaggtttcaccatgttggtcaggctggtgttgaactcctgacctcaggtaatccacctgcttcagcactttaggaggccgaggtgggtggataacccaaggtcaggagttcgagaccagcctggtcaacatggcgaaaccctgtctctactaaaagtacaaaaattgtaaaagtaaaaagtaaaagtaaaagctgggtgtggtggcaggcaccagtaatcctagctactcaggagacaggcagaagaatctcttgaacctgggaggtgagccgagatcgcaccattgcacttcggcctgggcaacaacagcgaaactctgtctcaaaaaaaaagtatccacaaatgttccagtgactatgactgcaagatcactgtgtgcagaaatctctagaaatgtgtgtcttgtagctcaagttattactagagacaacaagggttttgtggattcctgtagcctctctggcctgtttacttcaaggccattgctgcacagacaaaaaaaaaaaaggatgaagtcaagagagattcggttgtccttggtgcggcttttgtgatccagtagcaatcctcttaacgctgatggaaatggccttcattgctcacctgtatttcctgccactgaagcaggtctgcctctacgtggcctggggagctagatggtagagtcaatagagacttagtaaaccagactttttgaagtgtcaatgaccaagattgttattgcatccattaaaaaaaaatcaagttataattgatgtggaataaattatatatatttaaagtgtaaa

SEQ ID NO: 409137 - DNA, 699 bp, Homo sapiens
gagatggagtcttgctctgttccccaggctggagggcagtggtgagatctcagctccgtgcaatctcagctcactgcaacctccgcctcctgggatcaagtgattctcctgccacagcctcctgagtacctgagattacaggcacccaccaccatgcccagctaatttttgtatttttaatagaaacaaggtttcaccatgttggtcaggctggtgttgaactcctgacctcaggtaatccacctgcttcagcctaccaaagtgctgggattacaggcgtgagccaccatgtccggcttgtgttgtgacatttaacacaagatttcccaaagaagaaaggccttatatatgctgtgaatgtgtttttgcttgttagtttgttttaacttggtatgacggcactggaggctagcctttgagaagagccttctctgatgtgactcatgtatccaaacatccatggatttcccataaatttgaggtattattgagtgttttcaagaatgaaaagaggcctggcatggtggctcacatctgtaatcccaactttttgggaggctgaggtgggaggatcccttgagcccaagagtttgaggctgcagcaagctatgatcgtgccactacactccagcctgtgcaacacagtgagatcctgtctccaaaattaaataaataaataaaattacattttggagacta

SEQ ID NO: 409138 - DNA, 2007 bp, Homo sapiens
  misc_feature (121)..(121): n is a, c, g, or t
  misc_feature (898)..(898): n is a, c, g, or t
  misc_feature (907)..(907): n is a, c, g, or t
  misc_feature (1061)..(1061): n is a, c, g, or t
gccttctccatgacaggatggctttctccagttctaggatgctctttgttccatgttctgccttttgcttctaactaaaatctcaagctgcctgtttcaggaattgcaggtatcatcatgntaactacttaactggtccataggcttttcataaagatccacctgaaagattttcttgtaacattatttttcactgctgtagtttgtcatgtgctgagttgctctgtgccagtgctggctgtgcacctctctggtcttccctttagggcatacatcttataggtctggtatagttgcacaactgggattcgaggatggctctggttgctttacagggtgcaaacagcaagatagtctcagaggaggcctggccctaatgagtgacaactaagggagggcaagacactagggctgtttctaatcacaccataaacctgtcctgagttctcagtgattgggtgctgattccataggacatatatcatttctctcttttttttcttttctacacatgttctgatttttatttcatccatgacttccagcccttagctgctaccaatttctggcctccatgtgtcacctgttcctttccagtgcaacttctagagtgttctctaacactgacccacatgtaatatgttgtcagatgtgcacatgtttttaaatagtccttccacacctagtattcagttcccatgggtgtctactgggcctggacaccaataatcttctgtgcagtgtaccgaagtcctctcttctcatcaggggaggaagtcctgataaaagcttttggcagaatagtgagtcagagaccctacctgttctctctgagttgtgccccatctttgtgtctttcatctcataaggcctcccttgttctgtgacttgtagaggnttttttccncaaatttccaccagctctcatatcctaaaaacattttcttagactcattctttgacacacatttttgatgtaacttctcacaccatagtaaatctgtgttttctcagcatttctcttctttcaggttgctggtgtggagcagtagatgaggggncgccttctgcagagagcgtttctgtggaagaactgtcacagggcaggactccaaaggcagatacatccactgataagagtcacccctgtgagatttgtaccccagtcctgagagacattttacaaatgattgagctccaagcctcaccctgtggacagaaattgtacttgggtggagcatcaagagatttctggatgagttcaaaccttcaccagctccagaagcttgataatggagagaagctctttaaagtggatggggaccaggcctcatttatgatgaactgcaggttccatgtgtcaggaaaacccttcacgtttggggaagtcgggagggacttttcagccacctcaggacttctccagcatcaggtgactcccaccattgagagaccacacagcaggattagacacttgagagttcccactggacgaaagcctctcaaatacactgaatccaggaaatcttttagagagaaatctgtattcattcaacaccaaagagctgactctggagaaaggccttacaagtgcagtgaatgtgggaaatcctttagtcaaagttctggctttcttcgacacaggaaagcacacggtagaacaaggactcatgaatgtagtgaatgtgggaaatcatttagtcgcaaaactcacctaactcaacaccaaagagttcacactggagaaaggccttatgactgcagtgaatgtggcaaatcctttcgccaggtattattgagtgttttcaagaatgaaaagaggcctggcatggtggctcacatctgtaatcccaactttttgggaggctgaggtgggaggatcccttgagcccaagagtttgaggctgcagcaagctatgatcgtgccactacactccagcctgtgcaacacagtgagatcctgtctccaaaattaaataaataaataaaattacattttggagacta

SEQ ID NO: 409139 - DNA, 470 bp, Homo sapiens
ggatcgtccaccgctcccggcccgctccgcccagagtccgatggcggcggcactgagggccccgacccagattgccactagtacttacaggtccgtaagaagcacttgaagaccctacaaggcaggtttttgtagcctttgaggatgtggccatttacttctcccaggaggagtgggagctccttgatgagatgcagaggctcctgtaccgcgatgtgatgctggagaactttgcagttatggcatccctaggtattattgagtgttttcaagaatgaaaagaggcctggcatggtggctcacatctgtaatcccaactttttgggaggctgaggtgggaggatcccttgagcccaagagtttgaggctgcagcaagctatgatcgtgccactacactccagcctgtgcaacacagtgagatcctgtctccaaaattaaataaataaataaaattacattttggagacta

SEQ ID NO: 409140 - DNA, 469 bp, Homo sapiens
aggcgtgagccacctcacccaaccctaagtctaaattctaataatcacctatactcctttctctcagcagcctttgccagatggaaacttctctgaggtacctgccccaggacttggagtctaggggagggatgatggcaatgaaaggtttcttttctcctgtcacatcttgctccagacgtcatcttgtctcctgttacacttggatctcaggcatctatcctggcttgatgttggagtcccccaggtgcctcatagtcccctggacactggcagggtcacctttcttttctgaaattgcagggcagcttgatgtacattgtaatgaacccaatttatgatgcctggcaatgcatttactaagtgccatttatctttttgtgtgtggaacgcattcagtcttctaagcaatgcctggatgttcattcatgtctggacttcaggttaggcatgagggtgaggtaaagtc

SEQ ID NO: 409141 - DNA, 291 bp, Homo sapiens
atccttagatttaattgaccatctttgccatatgagagaagctctattttcttttagtgttacttccaaagaagccgctgtagaatatgatatgatatgtgcttttcttgatctagattggatacattgcatgtcaaagcatttctgtttaaatatttcagtcaatataatactatgtaatggcacaaaaggtaggtgtaagctttttccctcaacactcttatagttgaatttgtcaggtcaggaaaagaaatgaagtagaactctatgttcagagttcataagccactg

SEQ ID NO: 409142 - DNA, 321 bp, Homo sapiens
cccggggggcatggagcctcacaatccccttcctaatgggaaggctatccctgcccaaagagttccagtgtcatctgaccccttccctgatctggtctagctggaggagatgtcataaacccattcctcctctgccctgatcttctatgcccctggatgccagaggaaggattcttgggtgtaaccttctatggcctctggtccctgaacttgggcaaggagtgcctggcacctctcaggatgctttaaagtcagagtgcttccctgcagaggagacagatgttgggtctgagtcacacagcttgggatccccttctgact

SEQ ID NO: 409143 - DNA, 1015 bp, Homo sapiens
cccgggtttgaagaaaggttttcagggagatgtatctacgttaactttcccctatggggtgatagttaactgttgctccaaagatgacctgtgagttcctatttttgaatattatcgtgaactcgtggattaaaacaaactgtgtttcaatttattgcagttgttatccttttgttttgagacggagttttgctcttgttgcccaagctggagtgcaatggcacgatctcagctcactgcaacctccacctcctgagttcaagtgattctcctgcgcagcctccagagtagctgggattacaggcgcccaccaccatacctggctaatttttttgtatttttagtagaaaccgggtttcaccgtgttagccaggctggtctcaaactcctgaactcaggtgatcctcctgtctcggcctcccaaagtgctgggattacaggagtgagccactgcgtccagcctgttatccttctcgatgtttaaattttctatctttgtccagtggaaacctattcaaggtgacctccgagtagttttgacacgactcttaactagtcactgataccctccttgctttttggtatgacaacatgttcccttcttatcttgaacattttatgctccagatttggaattagcccattttgctaaggaattatagttcctttagttggggcatagtatttagagaccacaatctgagcactgaggattcctattgctactaacttactcataccttttaggccttttcagtgaacagacttagacgcatgtctttttttttttctttttttaaaacataaattacatagtaattcatactgatacttggcaattcaagttcaggactacaaggtttttacttaatatcattcttatatctgtctgtatcttctttttcccatgcccaaactgctgatgctcaacataatttttttatttgctttatcccatgatataaatacagcactcttagaataacaacactgccatcaatattactagaaatgc

SEQ ID NO: 409144 - DNA, 661 bp, Homo sapiens
caagatttaaaaagtagagtgaagtctccatctcttgttgggaggagctatgaaatatggtggcccgtttttttccactgtatcacagtgataaagttgaaggttcaaattgtgactgtgctacttgttgtgtaaccttggatgagtcatttaacttctccaaacctcaggaaaatggagaaaacagaacctacctaaagggttgtatgcagattaattaatacatacaaagcacttagaatagtacttaacatgtagtaggcacttaatacattttacctgttgcttagataaattggtagaggtttttatgattaccagcaacagaaaccagcctgacttggtttaagcttctaaaaatttattcattagaaggatctggctgggagcggtggctcatacctgtaatcccagcactttgggaggctgaggtgggcagatcacaaggtcagcagttttgagaccagcctggccaacatggtgaaaccccatctctactaaaaatacaaaattagctcggcgtggtgccgtgcgcctgtaatcccagctgctcgggaggctgaggtgaaagaattgcttgaacccaggaggcggaggttgcaatgagccgagatcgtgccactgcactccagcctaggtgacagagtgagactctgtctcg

SEQ ID NO: 409145 - DNA, 2057 bp, Homo sapiens
  misc_feature (973)..(973): n is a, c, g, or t
  misc_feature (1046)..(1046): n is a, c, g, or t
  misc_feature (1049)..(1049): n is a, c, g, or t
aaaaaaaaaagaaaaaaaaaagctaaatatagaaagccacctgctttctaattgtactggctgccatcttgtcttctttctactgacaagaaagtatcaataagaggtagtgattggtttgagggggaaacagtttttctagcagtttagtccttaatctgtggcttcttaagacctctgagttccatgttagaatattttaatgtattagtttctaggaaataggagtagctgaaaggagaggaggagtgaacattcttaagcatggagttatgttctaggctgcgattgacatatgcagtctaccactatgcaaggacgaatgaggtcagtgttgtaggaacatctggtggagtaaaggcatcccatcatctgtgaagtggagtccgcctgcctacccagaggttgctgtgaggattaagaaattacatatggaaagcaactggcaaagtgttttgcttatagaaagctctaatatgctaattgccttccccgtttctttatataatttataaggaaactaaaaaccagcgattaaaaccttagctttggtttctatatgtgtaaaatatagttcttatgtttgtctctcattaacctgtaagtttcttcaaatctgggagcatgtctaattgctgtgtatatatcttcagtcctgaagatgatagtagaaaacagttcttctttgaaggtttgttacatggatggatggatgattaacttgtgccagaacacacaggagtcaacagtgaaactgggccaaggacccatgtctcttactcttaacacagtgtttctttctagtcctgtgtttttctgtactatgtacctactatggatcatgccctgtgttttgcaatgaagacctctaactttatttccattccaaggagagggaggtttcagcacactcctggaacaaccagctttcttttcccttccgcctagtgctgcccccacctgcttagggctntcttttttggcttcaccaattgttgctctttggcatgaagagatgctttgtgagccagatgggtctctgaacngangtctttgatggagagtttaccacttgcacagccaagaaagggaagtcactagaaggacttctgtgtgggctggcctggctgctcagcatttcagactcctgttgtttacaagtcttctccagaagccctggaagaatgaactgtaaggcctggactatggaatggtacctgtgcaccagcaattcctgagcaagcagcacagtgagtagatgattcctggaaacctgagttcaggtgaaaatgagagagagcagtctccttgtccctgcctatgggcttcctcatggccagttctacctctgttctaaatatattcttcactgatgaaatttcaacttcatttattcttctgtccttgaggaaaagtggggaagagtaaagaggtcttttctctgcctcaaatttttatttgttcttatttgttgatacttatttgctggagatagcttagtggtttttttctctttctttttgagacagggtcttgctctggtgcccaggcttggagtacagtggtgcagtcatggctcactatagccttggcctcctaggctaaagcgattctcctgcctcagcctcctgaagtgctgagactacaggcatgagctgctaggcttgggttgattatttcaattaccatttgctatgtaacgaggctccaaaacttacaacagaaaccagcctgacttggtttaagcttctaaaaatttattcattagaaggatctggctgggagcggtggctcatacctgtaatcccagcactttgggaggctgaggtgggcagatcacaaggtcagcagttttgagaccagcctggccaacatggtgaaaccccatctctactaaaaatacaaaattagctcggcgtggtgccgtgcgcctgtaatcccagctgctcgggaggctgaggtgaaagaattgcttgaacccaggaggcggaggttgcaatgagccgagatcgtgccactgcactccagcctaggtgacagagtgagactctgtctcg

SEQ ID NO: 409146 - DNA, 272 bp, Homo sapiens
gactatgcacttctggggcgtcgctataggaacctatttataaaagacaagatacatatttatgaaatctttatctctggcatttttaaatgcaagagatattaagtatgaattgaataatatacatttcctgctttttcagacagatacagatgattaccatgccatcatctgtcctaaatggcatcatttagtgttgacttcaataaaatcctctctctgctgtgtcatgaaaggaactggactcaccttaatagtgctgttctaacgcg

SEQ ID NO: 409147 - DNA, 244 bp, Homo sapiens
taagaagctctgagaaggtatcgtatctggtgttaccaacaggtaaagattagggtttggaactaaatgtaagacataggcttgcacaatcttagggttagagggaacctgagaggtgttctaattggaattttcctaatatggccctgtcaagtggttatctagtttttgcttagttaccacgagtgacaaggagcttgctacttaacagaggcaacctgttccatttgggacaggctggcag

SEQ ID NO: 409148 - DNA, 499 bp, Homo sapiens
gagaaccaccctcctcctactctttttccacttcctcctctttctttccccagctgaggaagaacctcctctgccccttctggagcccgagcctggcctgtcttcgttggggctgataaattgcctctcccagggcctgctgggtgagtcaccatccctgctggcctccagcatgtccagccagccgggcaggatttctctgcttctggctggcagccaggaactgagtatgacaatgttgtactaaagaaaggcccaaagtgacagaggcagcagagggatggtccaccgccccttggcttctgctggtgactcctcctggccactgcatcagaggacaaaaggatgtcagcaattgcttgggctgcttggctatgcaagcctcctgcctgctgatggccacttcagggacagcctgggcccaggcacccagggggatggcggcagcttcctgcacctttcagatttcttggtggcattaaagcattttcagaacaat

SEQ ID NO: 409149 - DNA, 1746 bp, Homo sapiens
gagacgggataacacacggctaagaagagagaggcaagggcaggagtgaaggagagagctgaagcctggggctccgagatggtcagaggatgggagacggggcagtgaaacaaggcttcttgtatcttcagcagcagcagacgtttggaaagaaatggcgccgcttcggcgcctcactgtatggagggtcggactgcgccttggcccggctggagctgcaggagggcccggagaagcctcgtcggtgtgaggctgcccggaaggtcatccgcctcagtgactgcctgcgggtggccgaggccggcggagaggccagcagcccccgggacaccagtgccttcttcctggagaccaaggagcgcctgtacctcctggcggcccctgcagcggagcgcggcgactgggtgcaggccatctgcctcctggccttccccgggcagaggaaggagctctcggggccagagggaaagcagagccggccctgcatggaggaaaatgaattgtacagcagcgcagtcacagtcggcccccacaaggaatttgctgtgaccatgagacctacagaagccagtgagaggtgccacctgcgggggtcctataccctccgggctggggagagtgccctggagctgtggggtgggcccgagccagggacccagctgtacgactggccctacaggtttctgcggcgctttgggcgggacaaggccgtcgctgcgtctctggagagggcaactttgagttcgaaacccggcaaggcaatgagatcttcttggccctggaagaggccatctctgcccagaagaatgctgcacccgctacaccccaaccgcagccagccacaatccccgcgtcgctgccccggcctgatagcccctactctcggccgcatgactcactgccgccgccttcacccaccacaccggtgcctgctccacggcctcggggccaggagggggagtatgccgtgcccttcgatgcggtggcccgttccttggggaagaacttcaggggcatcttggcagtccctcctcagctcctggccgaccctctgtacgacagcattgaggagaccctgccccctcgacctgaccacatatacgatgagcccgagggagtggctgccctgtccctctatgacagcccgcaggagccccggggtgaggcatggaggaggcaggcgacagctgacagggaccctgctggcctccagcatgtccagccagccgggcaggatttctctgcttctggctggcagccaggaactgagtatgacaatgttgtactaaagaaaggcccaaagtgacagaggcagcagagggatggtccaccgccccttggcttctgctggtgactcctcctggccactgcatcagaagaacctcctctgccccttctggagcccgaggcctggcctgtcttcgttggggctgataaattgcctctcccagggcctgctgggtgagtcaccatcccaaagcaggaagggtgccctggagagaaccaccctcctcctactctttttccacttcctcctctttctttccccagctgaggaggaacctggggcatttagggcagaggacaaaaggatgtcagcaattgcttgggctgcttggctatgcaagcctcctgcctgctgatggccacttcagggacagcctgggcccaggcacccagggggatggcggcagcttcctgcacctttcagatttcttggtggcattaaagcattttcagaacaat

SEQ ID NO: 409150 - DNA, 1585 bp, Homo sapiens
atctccccgtctctgggtggctccctcccgcccccgcctcccacgcctatggcacagaaatggcgccgcttcggcgcctcactgtatggagggtcggactgcgccttggcccggctggagctgcaggagggcccggagaagcctcgtcggtgtgaggctgcccggaaggtcatccgcctcagtgactgcctgcgggtggccgaggccggcggagaggccagcagcccccgggacaccagtgccttcttcctggagaccaaggagcgcctgtacctcctggcggcccctgcagcggagcgcggcgactgggtgcaggccatctgcctcctggccttcccctcggcccccacaaggaatttgctgtgaccatgagacctacagaagccagtgagaggtgccacctgcgggggtcctataccctccgggctggggagagtgccctggagctgtggggtgggcccgagccagggacccagctgtacgactggccctacaggtttctgcggcgctttgggcgggacaaggtaaccttttcctttgaggcaggccgtcgctgcgtctctggagagggcaactttgagttcgaaacccggcaaggcaatgagatcttcttggccctggaagaggccatctctgcccagaagaatgctgcacccgctacaccccaaccgcagccagccacaatccccgcgtcgctgccccggcctgatagcccctactctcggccgcatgactcactgccgccgccttcacccaccacaccggtgcctgctccacggcctcggggccaggagggggagtatgccgtgcccttcgatgcggtggcccgttccttggggaagaacttcaggggcatcttggcagtccctcctcagctcctggccgaccctctgtacgacagcattgaggagaccctgccccctcgacctgaccacatatacgatgagcccgagggagtggctgccctgtccctctatgacagcccgcaggagccccggggtgaggcatggaggaggcaggcgacagctgacagggaccctgctggcctccagcatgtccagccagccgggcaggatttctctgcttctggctggcagccaggaactgagtatgacaatgttgtactaaagaaaggcccaaagtgacagaggcagcagagggatggtccaccgccccttggcttctgctggtgactcctcctggccactgcatcagaagaacctcctctgccccttctggagcccgaggcctggcctgtcttcgttggggctgataaattgcctctcccagggcctgctgggtgagtcaccatcccaaagcaggaagggtgccctggagagaaccaccctcctcctactctttttccacttcctcctctttctttccccagctgaggaggaacctggggcatttagggcagaggacaaaaggatgtcagcaattgcttgggctgcttggctatgcaagcctcctgcctgctgatggccacttcagggacagcctgggcccaggcacccagggggatggcggcagcttcctgcacctttcagatttcttggtggcattaaagcattttcagaacaat

SEQ ID NO: 409151 - DNA, 1236 bp, Homo sapiens
gagacgggataacacacggctaagaagagagaggcaagggcaggagtgaaggagagagctgaagcctggggctccgagatggtcagaggatgggagacggggcagtgaaacaaggcttcttgtatcttcagcagcagcagacgtttggaaagaaatggcgccgcttcggcgcctcactgtatggagggtcggactgcgccttggcccggctggagctgcaggagggcccggagaagcctcgtcggtgtgaggctgcccggaaggtcatccgcctcagtgactgcctgcgggtggccgaggccggcggagaggccagcagcccccgggacaccagtgccttcttcctggagaccaaggagcgcctgtacctcctggcggcccctgcagcggagcgcggcgactgggtgcaggccatctgcctcctggccttccccgggcagaggaaggagctctcggggccagagggaaagcagagccggccctgcatggaggaaaatgaattgtacagcagcgcagtcacagtcggcccccacaaggaatttgctgtgaccatgagacctacagaagccagtgagaggtgccacctgcgggggtcctataccctccgggctggggagagtgccctggagctgtggggtgggcccgagccagggacccagctgtacgactggccctacaggtttctgcggcgctttgggcgggacaaggtaaccttttcctttgaggcaggccgtcgctgcgtctctggagagggcaactttgagttcgaaacccggcaaggcaatgagatcttcttggccctggaagaggccatctctgcccagaagaatgctgcacccgctacaccccaaccgcagccagccacaatccccgcgtcgctgccccggcctgatagcccctactctcggccgcatgactcactgccgccgccttcacccaccacaccggtgcctgctccacggcctcggggccaggagggggagtatgccgtgcccttcgatgcggtggcccgttccttggggaagaacttcaggagggcccggagaagcctcgtcggtgtgaggctgcccggaaggtcatccgcctcagtgactgcctgcggggttggccgaggccggcggagaggccagcagcccccgggacaccagtgccttcttcctggagaccaggagcgcctgtactcctggcggcccctgcagcggagcgccgggactggggtgccggccatctggcttc

SEQ ID NO: 409152 - DNA, 853 bp, Homo sapiens
gagacgggataacacacggctaagaagagagaggcaagggcaggagtgaaggagagagctgaagcctggggctccgagatggtcagaggatgggagacggggcagtgaaacaaggcttcttgtatcttcagcagcagcagacgtttggaaaggtaggagtgaggctgggctggggttgggcagggggcctgggaggctgctagaattcctgggttggagagggagtttcatattcaaaacccttataggtctgactgtgcacccaccaagttagacccagagctcaactttgggagggctcttttcctacccgacgctgtctcctgaaccaggccccaaccaggtcccaaactgtgctccttactgagggctgtttgccctgggtgggggtgggggatgtgctgctttcatctcttgcctcttttgctctcttgctctatgttgacttcttttcaccggacaccttggaagggaatggaaggggcagctggagggacagtttaggatgacaatagaggttccttcccaaccccagtggggtgcatgtggctggtgttcagcttgggctggggcctctgggggcctggaccccagccggctgtccatcctctttccccttccctggcctccttgaaccaggaagtcctcgtcccctaaccaacactggggggcacacctgtctctctctcatggcccaacctatcaaggaatgaggcagcaaggttcaggagggtggagagaagttctccttcaggatttcgcacagaaggagaatgaggtctccagcccgggtcacacgccgccctcctcactccctcctctgggcctcggccactgccccgctttcctcccc

SEQ ID NO: 409153 - DNA, 1768 bp, Homo sapiens
gagacgggataacacacggctaagaagagagaggcaagggcaggagtgaaggagagagctgaagcctggggctccgagatggtcagaggatgggagacggggcagtgaaacaaggcttcttgtatcttcagcagcagcagacgtttggaaagaaatggcgccgcttcggcgcctcactgtatggagggtcggactgcgccttggcccggctggagctgcaggagggcccggagaagcctcgtcggtgtgaggctgcccggaaggtcatccgcctcagtgactgcctgcgggtggccgaggccggcggagaggccagcagcccccgggacaccagtgccttcttcctggagaccaaggagcgcctgtacctcctggcggcccctgcagcggagcgcggcgactgggtgcaggccatctgcctcctggccttccccgggcagaggaaggagctctcggggccagagggaaagcagagccggccctgcatggaggaaaatgaattgtacagcagcgcagtcacagtcggcccccacaaggaatttgctgtgaccatgagacctacagaagccagtgagaggtgccacctgcgggggtcctataccctccgggctggggagagtgccctggagctgtggggtgggcccgagccagggacccagctgtacgactggccctacaggtttctgcggcgctttgggcgggacaaggtaaccttttcctttgaggcaggccgtcgctgcgtctctggagagggcaactttgagttcgaaacccggcaaggcaatgagatcttcttggccctggaagaggccatctctgcccagaagaatgctgcacccgctacaccccaaccgcagccagccacaatccccgcgtcgctgccccggcctgatagcccctactctcggccgcatgactcactgccgccgccttcacccaccacaccggtgcctgctccacggcctcggggccaggagggggagtatgccgtgcccttcgatgcggtggcccgttccttggggaagaacttcaggggcatcttggcagtccctcctcagctcctggccgaccctctgtacgacagcattgaggagaccctgccccctcgacctgaccacatatacgatgagcccgagggagtggctgccctgtccctctatgacagcccgcaggagccccggggtgaggcatggaggaggcaggcgacagctgacagggaccctgctggcctccagcatgtccagccagccgggcaggatttctctgcttctggctggcagccaggaactgagtatgacaatgttgtactaaagaaaggcccaaagtgacagaggcagcagagggatggtccaccgccccttggcttctgctggtgactcctcctggccactgcatcagaagaacctcctctgccccttctggagcccgaggcctggcctgtcttcgttggggctgataaattgcctctcccagggcctgctgggtgagtcaccatcccaaagcaggaagggtgccctggagagaaccaccctcctcctactctttttccacttcctcctctttctttccccagctgaggaggaacctggggcatttagggcagaggacaaaaggatgtcagcaattgcttgggctgcttggctatgcaagcctcctgcctgctgatggccacttcagggacagcctgggcccaggcacccagggggatggcggcagcttcctgcacctttcagatttcttggtggcattaaagcattttcagaacaat

SEQ ID NO: 409154 - DNA, 1680 bp, Homo sapiens
gagacgggataacacacggctaagaagagagaggcaagggcaggagtgaaggagagagctgaagcctggggctccgagatggtcagaggatgggagacggggcagtgaaacaaggcttcttgtatcttcagcagcagcagacgtttggaaagaaatggcgccgcttcggcgcctcactgtatggagggtcggactgcgccttggcccggctggagctgcaggagggcccggagaagcctcgtcggtgtgaggctgcccggaaggtcatccgcctcagtgactgcctgcgggtggccgaggccggcggagaggccagcagcccccgggacaccagtgccttcttcctggagaccaaggagcgcctgtacctcctggcggcccctgcagcggagcgcggcgactgggtgcaggccatctgcctcctggccttcccctcggcccccacaaggaatttgctgtgaccatgagacctacagaagccagtgagaggtgccacctgcgggggtcctataccctccgggctggggagagtgccctggagctgtggggtgggcccgagccagggacccagctgtacgactggccctacaggtttctgcggcgctttgggcgggacaaggtaaccttttcctttgaggcaggccgtcgctgcgtctctggagagggcaactttgagttcgaaacccggcaaggcaatgagatcttcttggccctggaagaggccatctctgcccagaagaatgctgcacccgctacaccccaaccgcagccagccacaatccccgcgtcgctgccccggcctgatagcccctactctcggccgcatgactcactgccgccgccttcacccaccacaccggtgcctgctccacggcctcggggccaggagggggagtatgccgtgcccttcgatgcggtggcccgttccttggggaagaacttcaggggcatcttggcagtccctcctcagctcctggccgaccctctgtacgacagcattgaggagaccctgccccctcgacctgaccacatatacgatgagcccgagggagtggctgccctgtccctctatgacagcccgcaggagccccggggtgaggcatggaggaggcaggcgacagctgacagggaccctgctggcctccagcatgtccagccagccgggcaggatttctctgcttctggctggcagccaggaactgagtatgacaatgttgtactaaagaaaggcccaaagtgacagaggcagcagagggatggtccaccgccccttggcttctgctggtgactcctcctggccactgcatcagaagaacctcctctgccccttctggagcccgaggcctggcctgtcttcgttggggctgataaattgcctctcccagggcctgctgggtgagtcaccatcccaaagcaggaagggtgccctggagagaaccaccctcctcctactctttttccacttcctcctctttctttccccagctgaggaggaacctggggcatttagggcagaggacaaaaggatgtcagcaattgcttgggctgcttggctatgcaagcctcctgcctgctgatggccacttcagggacagcctgggcccaggcacccagggggatggcggcagcttcctgcacctttcagatttcttggtggcattaaagcattttcagaacaat

SEQ ID NO: 409155 - DNA, 496 bp, Homo sapiens
ggaaaatctcaagagacatataagagggtaaagtgtgcctaagtttatgtatttttgagttttaaaaatgtaattcaagtattctttatgaaccttcagatgatgacactctttcctttctgttccctttcccttgttttattaagatcgactttaactttctaatctgccatccttaactttttttttttttttttttttgagatagagtctcgctctgttacccaggctagagtgcagtggcgcgatctcggctcactgcaacctccgcctcccgggttaaagcgattctcctgcctcagcctcctgagtaggtgggattacaggcgcgtgtcaccacgcccagctagtttttgtatttttagtggagatggggtttcaccatgttggtcagactgatctcgaactcctgagctcgtgatccatctgtctcagcctcccaaagtgctgggattacaggtgtgagcctacccctggcctgctgactttaactttt

SEQ ID NO: 409156 - DNA, 833 bp, Homo sapiens
gaggaaccacacacttgggtctgagcagccagcagcttatcacatctggtgatcaatccttcaaaggttcctcctgaagtctgaatttttggaggtcaaatggattccacctgggaggggcttctgcttcaactcaggacatggggagaaggctgttcctcttccagggggaggcagttttcatggcattgagatgtcctctcacttattccccacccacccaccaagtcctttgtaagaggagtagggggagaggagagcgcctgcagcctcctgctcacattcctagacaccgactcactgagcccgtcgccgctggaacagcagagctgtgtgaaatgtcaagaggagttatgctcataggctccctggcctcagtctctttgtggcttgcatattcttccattagtactgtgttcatcacatggaaatcagagggtacaattaaaagataatttgctagtcccagacttaatttggggcccccttcttgcctgattgaattacaggggaacataatagatttttggtgagaaatagttgtctgtgtggctgggagaaagattgctcccagctctccagctgggcagccctttcagtatcccgtatgttatttccccacttccagcccacctcacctcctctgtggcccttgtgtgtcccctcggctaggatcctgacctcctgctcaagagtttaaactcaacttgagacccaaggaaaatagagagccctctgcaacctcataggggtgaaaaatgttgatgctgggagctatttagagacctaaccaaggcccagacagagagagtgacttgctaaaggccacatag

SEQ ID NO: 409157 - DNA, 252 bp, Homo sapiens
gtagttttaaaattactttgtatctattctaggtatcttttactctatcatagttaagacattgatgttatttattaatttgttcacattaaactcatgttctttcttcatttctgtaaaaatgtcaaccattttctttgcaatatttactgaataacgtactccttatttccttcattctgaaagtgtgatccatagagagatacctgtttcctcttctcattccatttcttgtgtgcattaattatgttt

SEQ ID NO: 409158 - DNA, 169 bp, Homo sapiens
attcccattctgctttgggattggtctctcatctactctcatcttcactctctcccaggcttattcactagtttgttttataaaaaaaaaagtccccacatacttgattcaatcacagacaatatattccctctatttctttggctggctttttccaaaagaactggtt

SEQ ID NO: 409159 - DNA, 647 bp, Homo sapiens
ggaacatcacgctactcaagggcgtggccgtcatcgtggtcgccatcatgggctcgggcatcttcgtgacgcccacgggcgtgctcaaggaggcaggctcgccggggctggcgctggtggtgtgggccgcgtgcggcgtcttctccatcgtgggcgcgctctgctacgcggagctgggcaccaccatctccaaatcgggcggcgactacgcctacatgctggacgtctacggctcgctgcccgccttcctcaagctctggatcgagctgctcatcatccggccttcatcgcagtacatcgtggccctggtcttcgccacctacctgctcaagccgctcttccccacctgcccggtgcccgaggaggcagccaagctcgtagcctgccactccgtgcgatggagtgtcactctgtcgcccaggctagagtgcagtggtgcaatctcggctcactgccagctccacctcctgggttcacgccattctcctgcctcagcctcccgagtagctgggattgcaggtgcccgccaccacgcctggctaattttttgtatttttagtagagatagggtttcaccgtgttagccaggatggtctcgatctcctgacctcgtgatccgcccgcctcggcctcccaaagtgctggga

SEQ ID NO: 409160 - DNA, 879 bp, Homo sapiens
catttctggctttcctggtttcatagccgcctattcgtctcgagatcctcccttgcgtcagttcccgctcctatctgctggtgtccttttcttgcttttcgtacccgtctggcaggctgagtttcatggtccatgtagatcccaccttgctagatgcctttgttcccgaatcctcgttattaaggtatatgttcatccagttaacccaagatctaggcatgttttccagtataagaggcataaatttagctcttgccaaaagcttcccatataatttccagcagcctgcctgatgatggcaggatctacttggatcctgcaattttttccacagatgttccctatatgcctctgctgcatgccgtgcgacagcggcggcgcggcgagcggagccgggaggcggggaagcagtggccgtgtgagcgtgaggagctgccgccaccgcctgttcctcgtcgtcctcctcctcgggggccccggcgacgtgggccgcgcagggccctggaagagacgtcgcctccccttcatccgcctctctctcaccgcgccgctcccgcctcctcgtcctgtgctgcgggctcaggcggaacccggaacggtcgtcctcttcccccgcccgccgccgcctcctcctcctcctccttctcggcttccttctcagccccgggccggagcggggtgttggcggcggccggttcgggtggcgactcgcgcttctctgggcggcggcgcttggccatatcgtgtcggggaaggtaatgagccgcagagccccggggtctcggctgagcggcggcggcggcaccaacggcaccaactattcgcggagctggaatgactggcaacccaggtgggtgaccggcccgggaccccgccccg

SEQ ID NO: 409161 - DNA, 1052 bp, Homo sapiens
ggaacatcacgctactcaagggcgtggccgtcatcgtggtcgccatcatgggctcgggcatcttcgtgacgcccacgggcgtgctcaaggaggcaggctcgccggggctggcgctggtggtgtgggccgcgtgcggcgtcttctccatcgtgggcgcgctctgctacgcggagctgggcaccaccatctccaaatcgggcggcgactacgcctacatgctggacgtctacggctcgctgcccgccttcctcaagctctggatcgagctgctcatcatccggccttcatcgcagtacatcgtggccctggtcttcgccacctacctgctcaagccgctcttccccacctgcccggtgcccgaggaggcagccaagctcgtagcctgccactccgtgccgtgagtacggggcgcgggccgggggttgggaggtcgtagtccctgggtccctgcatccttgcatcactacgcccctggctcccacatctctacatttttgcgttcctggaccgtcccggcagttctaggctaaggtcattggtcccagaaaccaagtgcgtttctttcattcattcttttacacttctccccacaggctgggaatatcttcagtgacgggacagcagggtccctgccctgcccttcggtgggcatttcattcccccacttaagcggttcaggcaagtgccagcctcccgttggccccgctgagcaatactcccagcctcttgcgtggcacccacgtggagtaactgagcaaccggtttattgttaaagctccgattgctgactggttggtgaaaacgaaattgcagttaaaaagaaaattattcatttctgctctccacaccagctcgtcaggaatcagtgacacgggctgactcataagaaaacagtagtaataaaatcgtgtgcgggtagtgactggtgctggtttaggctaagggatcccccctgagggttgcccagtagtgagagagcggagcttggctgcagattcagtcctgtgttacagtgattcgcgaatgggtacacagctcgattcgtatatgta

SEQ ID NO: 409162 - DNA, 952 bp, Homo sapiens
ggaacatcacgctactcaagggcgtggccgtcatcgtggtcgccatcatgggctcgggcatcttcgtgacgcccacgggcgtgctcaaggaggcaggctcgccggggctggcgctggtggtgtgggccgcgtgcggcgtcttctccatcgtgggcgcgctctgctacgcggagctgggcaccaccatctccaaatcgggcggcgactacgcctacatgctggacgtctacggctcgctgcccgccttcctcaagctctggatcgagctgctcatcatccggccttcatcgcagtacatcgtggccctggtcttcgccacctacctgctcaagccgctcttccccacctgcccggtgcccgaggaggcagccaagctcgtagcctgccactccgtgcgcacggcggggccgaccccgcctctcgctcccagcatgccgtgcgacagcggcggcgcggcgagcggagccgggaggcggggaagcagtggccgtgtgagcgtgaggagctgccgccaccgcctgttcctcgtcgtcctcctcctcgggggccccggcgacgtgggccgcgcagggccctggaagagacgtcgcctccccttcatccgcctctctctcaccgcgccgctcccgcctcctcgtcctgtgctgcgggctcaggcggaacccggaacggtcgtcctcttcccccgcccgccgccgcctcctcctcctcctccttctcggcttccttctcagccccgggccggagcggggtgttggcggcggccggttcgggtggcgactcgcgcttctctgggcggcggcgcttggccatatcgtgtcggggaaggtaatgagccgcagagccccggggtctcggctgagcggcggcggcggcaccaacggcaccaactattcgcggagctggaatgactggcaacccaggtgggtgaccggcccgggaccccgccccg

SEQ ID NO: 409163 - DNA, 586 bp, Homo sapiens
ggaacatcacgctactcaagggcgtggccgtcatcgtggtcgccatcatgggctcgggcatcttcgtgacgcccacgggcgtgctcaaggaggcaggctcgccggggctggcgctggtggtgtgggccgcgtgcggcgtcttctccatcgtgggcgcgctctgctacgcggagctgggcaccaccatctccaaatcgggcggcgactacgcctacatgctggacgtctacggctcgctgcccgccttcctcaagctctggatcgagctgctcatcatccggccttcatcgcagtacatcgtggccctggtcttcgccacctacctgctcaagccgctcttccccacctgcccggtgcccgaggaggcagccaagctcgtagcctgccactccgtgcaggcaattctgggtaaacgatcttcatttgcctataaagctgcacagctcacaggccttggaccgtttctgccccagccccagcattggcccccggggactgcctccaggagtcatttggagagcacagagaagcactggacccttccaagcaagggactctgtgtgactgcacaggttgcctgtctata

SEQ ID NO: 409164 - DNA, 404 bp, Homo sapiens
gaactgctgtgccaggtgcaccctgggggaccaggctgcctgggcttcctggaactggtgaagctgccgccacttcctctatgctctctccagcaggcaattctgggtaaacgatcttcatttgcctataaagctgcacagctcacaggccttggaccgtttctgccccagccccagcattggccctttggacagactctgaaaccgtgcgcagaacgcaccctgtcattacaaatgactcctggaggcagtccccgggggcctggcaggagcacctgtgtttctgtggggtctgaaaatgacagaccaatcgcttgaacccgggaggcggaagttgcagtgagccgagatcgagacattgccctccagcctgggcaacaagagcaaaactccatctcaaaaaa

SEQ ID NO: 409165 - DNA, 512 bp, Homo sapiens
ggaacatcacgctactcaagggcgtggccgtcatcgtggtcgccatcatgggctcgggcatcttcgtgacgcccacgggcgtgctcaaggaggcaggctcgccggggctggcgctggtggtgtgggccgcgtgcggcgtcttctccatcgtgggcgcgctctgctacgcggagctgggcaccaccatctccaaatcgggcggcgactacgcctacatgctggacgtctacggctcgctgcccgccttcctcaagctctggatcgagctgctcatcatccggccttcatcgcagtacatcgtggccctggtcttcgccacctacctgctcaagccgctcttccccacctgcccggtgcccgaggaggcagccaagctcgtagcctgccactccgtgctcatccccgaccagccccaaggtcttcccgctgagcctctgcagcacccagccagatgggaacgtggtcatcgcctgcctggtccagggcttcttcccccaggagtcactcagtgt

SEQ ID NO: 409166 - DNA, 706 bp, Homo sapiens
ggaacatcacgctactcaagggcgtggccgtcatcgtggtcgccatcatgggctcgggcatcttcgtgacgcccacgggcgtgctcaaggaggcaggctcgccggggctggcgctggtggtgtgggccgcgtgcggcgtcttctccatcgtgggcgcgctctgctacgcggagctgggcaccaccatctccaaatcgggcggcgactacgcctacatgctggacgtctacggctcgctgcccgccttcctcaagctctggatcgagctgctcatcatccggccttcatcgcagtacatcgtggccctggtcttcgccacctacctgctcaagccgctcttccccacctgcccggtgcccgaggaggcagccaagctcgtagcctgccactccgtgcaggcaattctgggtaaacgatcttcatttgcctataaagctgcacagctcacaggccttggaccgtttctgccccagccccagcattggccctttggacagactctgaaaccgtgcgcagaacgcaccctgtcattacaaatgactcctggaggcagtccccgggggcctggcaggagcacctgtgtttctgtggggtctgaaaatgacagaccaatcgcttgaacccgggaggcggaagttgcagtgagccgagatcgagacattgccctccagcctgggcaacaagagcaaaactccatctcaaaaaa

SEQ ID NO: 409167 - DNA, 756 bp, Homo sapiens
gaattaatggtccatagttttatctttggtttttacagaagttacctgcatttcagttactaagaaccaccacttcattcataaaaatgctctctgcatttctttctgtaattcataggcgttgtttatattagactattattatgggaaaatacactgctttaagaatttttaaacttggtaattttcagactcaaagtgtttgagattcttctgctgatagtttatttaaaaagaattacaaatttcagattgtggcctggtagggatgatacaaatacaaactgaatatacccacagtgattccttcctccacaaagtaaacctgtgattacacggagcccagtttgaagatctttattctagtttccgtttttcgcttatctcgcatgattttagatgtgtttaaagactacctggataaccaacttagaaatacaggctatatggcgtggtttcatgatgcggggattcacaggggaatcatggttgttgttgagggatgtgagccaaatgtgcagtaacagctgtcatagccgtagatagacgcagggctctctaaatttttactgaattaattaatggactgcagatccgagacctacgtaggaagtgaggtcaatgtaggtaggtgattcgaatcagttaacagtctttccagtggttatttggcaattctttttctttttcgttttctttttttgacacagagtctcacgctgtcgcccaggctggagtgcagtgacacaatcttgg

SEQ ID NO: 409168 - DNA, 1408 bp, Homo sapiens
cacagacctagtgatataggtggctctgtgacgagaagtatttgtaaaatgcctgtgaatgcatctatttaagacgtgtatgccccaaattgtatacatgagggtgcagatattgggaacatatggttccttgcaatgttgaacaaccccagaggaagggtttgactggggctgggtcccacaagtacctcctgaggctcatgggcatccctgaggatcctcaacccacccaaccaacttcccagaatacagaataggaaaatggttctgcagagagttgcattggagggctgaaggtggcctctcctgtggtccttttgtctctgatagagagcgagctggccaaaacggagagcacttatttggctgagatgcacagacaatctcccaaagagaaggccagcaagactacaacggtgcggaggaggaagcgtccccatgcccacctgcgagtccctcacctggaagaggtgatgagcccggtcaccacgcccacagatgaggatgtgggccacaggatcaaacatgtggcaggttccacacagacgcggcatatcccggaggacacccccaacggtttccacctgcagagcgtgtccaagctgctgctggttatcagctgtgttctggtgctgctggtcatccttaacatgatgctcttctacaaactctggatgttggaatacaccacgcagaccctcactgcctggcagggtctaaggctccaagaaaggttaccccagtctcagacagaatgggcccagctcttagagtcccaacaaaagtaccacgatactgagctccaaaaatggagggaaatcatcaaatcctcagtgatgctccttgaccagatgaaggactcgctcatcaaccttcagaacggcatcaggtcccgcgactacacgtcggaaagtgaagaaaagaggaatcgctatcattgacaaggcaggaacagggtggctgcaagaggcctgtgcaatacatgtacatagaccatataaatatatatatataaatatatatatatacagaatataaatatatatattatatacagattttaaaaaagagataatgcctatgtaccagggagaaggagcgggccctcccgcgccctgtgctggccggagcagcgttttcttatggtggagcagctgaggagggcaggaaccgcctctcagcaccgacctcccctgatctccctcctcccaccctctgttccccaccccttcccttgctggccattcttggcttttagaagggaaatgttgagccaaagttatgcctgcgaagaccctaaggtctcaaaaagaagtcttaagacggcattgcttaaggtgcttcattccctaatccccttttgatttgtttccaaaataaaagagaatcttttcttccctacaaaaag

SEQ ID NO: 409169 - DNA, 195 bp, Homo sapiens
gtgagatgccccaccttctctgcttgccctggtctttgggagcggggactccttcccttatgctgtgagaaagatcctcgtctctatcaccaccctccagacttctccctccaattcattcttcctccaggccatgcattgttctaaatggaaagccttccttgagtgggctgctagaaatgcaggtgtattcta

SEQ ID NO: 409170 - DNA, 347 bp, Homo sapiens
cttgctcctcagggtctccacagagctgcgctatcgaaaacagccctgggggttagtgaaaacgttcatcgagaagaacttctggagtgggctggaggactacttccgccatttagagagcgagctggccaaaacggagagcacttatttggctgagatgcacagacaatctcccaaagagaaggccagcaagactacaacggtgcggaggaggaagcgtccccatgcccacctgcgagtccctcacctggaagaggtgatgagcccggtcaccacgcccacagatgaggatgtgggccacaggatcaaacatgtggcaggtgtgtgccaggtggggacaggtcggg

SEQ ID NO: 409171 - DNA, 230 bp, Homo sapiens
atgagggctgaatacacctaccttattgttgggaggaataaataagatggtgaatgcaaagccctgcgacagtgcctggaacacagtaagcatggcagctcacagcttaccaagcacaaatttagtacggtggagaagcagttgtctttagaacactgtgcctcattattttgtttccctaaagtagaaagatttccttaagtaagacataaggcaaatattcaaaattt

SEQ ID NO: 409172 - DNA, 652 bp, Homo sapiens
  misc_feature (12)..(12): n is a, c, g, or t
  misc_feature (14)..(14): n is a, c, g, or t
  misc_feature (47)..(47): n is a, c, g, or t
ggaaaaaaaaananaaaaaaaagaagaaagatttgcaaaggagggcncctggaacactccatcaaagtactcgaactgatctccaccatctgggacacggaactgcacattgcgggcctcagactcctcaacaaccttccactgcccgactatgtgcatccacagctgcgacgggtgatgcctgccttgatggagatcctgcagtcagactacatcctggcacaggtgcaagccgtacgactgctgagctacctggcacagaagaatgaccttctctatgacattctcaactgccaggttcactccaacttcctaaacctgttccagcccacacagtcagggagtctcctgtatgaggtactggtgtttgctgagcggctgagtgagggccggaacgcaccccactaccacgtggtgaaatggcattacaacgaacagtccctgcatgaatccctctttggggaagagtcccgactggcagaccgactacttgccctggtcatccaccctgaggaagatgttcagatccaggcctgcaaggtcattgtcagcctgcagtatccccaggacttgagagcccggccctcctcctgccagcccagtcgttcctactttaaaaacacggaataaaattaaggagagccaataaatg

SEQ ID NO: 409173 - DNA, 1188 bp, Homo sapiens
agctctcacctgggcccagggcaacactgaagacatgggcaagagcatcccccaatacctggggcaactggacatccgcaaaagcgtagtcagcctggccacaggcgccggggcgatctacctgctctacaaggccatcaaggctggcataaaatgcaaaccacccctctgtagcaactcacccatctgcatcgcccgtgagtgtccgggccctggggagagggctctgccccaggaggcacctgctcccgaggcctctgctgtgggagggcccaaaggcctggcagtcgagcgagagcggcacgggcgggactcaggtgagctccggaggctcctcaactctttggagtgcaaacaggatgagtacgccaagagcatgatcctgcacagtatcactcgctgtgtgtacttgctggaggctgaggcctctgcttgtactacggatgacatcgtgttgctgggctacatgctggatgacaaggacaacagtgtcaaaacccaagctctgaatacacttaaagctttctctggcatcagaaaattcaggctcaaaatccaggaacactccatcaaagtactcgaactgatctccaccatctgggacacggaactgcacattgcgggcctcagactcctcaacaaccttccactgcccgactatgtgcatccacagctgcgacgggtgatgcctgccttgatggagatcctgcagtcagactacatcctggcacaggtgcaagccgtacgactgctgagctacctggcacagaagaatgaccttctctatgacattctcaactgccaggttcactccaacttcctaaacctgttccagcccacacagtcagggagtctcctgtatgaggtactggtgtttgctgagcggctgagtgagggccggaacgcaccccactaccacgtggtgaaatggcattacaacgaacagtccctgcatgaatccctctttggggaagagtcccgactggcagaccgactacttgccctggtcatccaccctgaggaagatgttcagatccaggcctgcaaggtcattgtcagcctgcagtatccccaggacttgagagcccggccctcctcctgccagcccagtcgttcctactttaaaaacacggaataaaattaaggagagccaataaatgagtataggagagaaacttgaaaaaaatt

SEQ ID NO: 409174 - DNA, 1315 bp, Homo sapiens
agctctcacctgggcccagggcaacactgaagacatgggcaagagcatcccccaatacctggggcaactggacatccgcaaaagcgtagtcagcctggccacaggcgccggggcgatctacctgctctacaaggccatcaaggctggcataaaatgcaaaccacccctctgtagcaactcacccatctgcatcgcccgtgagtgtccgggccctggggagagggctctgccccaggaggcacctgctcccgaggcctctgctgtgggagggcccaaaggcctggcagtcgagcgagagcggcacgggcgggactcaggtgagctccggaggctcctcaactctttggagtgcaaacaggatgagtacgccaagagcatgatcctgcacagtatcactcgctgtgtgtacttgctggaggctgaggcctctgcttgtactacggatgacatcgtgttgctgggctacatgctggatgacaaggacaacagtgtcaaaacccaagctctgaatacacttaaagctttctctggcatcagaaaattcaggctcaaaatccaggaacactccatcaaagtactcgaactgatctccaccatctgggacacggaactgcacattgcgggcctcagactcctcaacaaccttccactgcccgactatgtgcatccacagctgcgacgggtgatgcctgccttgatggagatcctgcagtcagactacatcctggcacaggtgcaagccgtacgactgctgagctacctggcacagaagaatgaccttctctatgacattctcaactgccaggttcactccaacttcctaaacctgttccagcccacacagtcagggagtctcctgtatgaggtactggtgtttgctgagcggctgagtgagggccggaacgcaccccactaccacgtggtgaaatggcattacaacgaacagtccctgcatgaatccctctttggggaagagtcccgactggcagaccgactacttgccctggtcatccaccctgaggaagatgttcagatccaggcctgcaaggtcattgtcagcctgcagtatccccaggacttgagagcccggccctcctcctgccagcccagtcgttcctactttaaaaacacggaataaaattaaggagagccaataaatgaaaaaataaatcctattaagtaagaatgttataatagctttgttggggaattgatagaggaaaataggagatccggcctcgttggcctaaggggtggagctttggggccgtttccttttagagagggtaaatcatgaacctggctcctgacctgc

SEQ ID NO: 409175 - DNA, 680 bp, Homo sapiens
  misc_feature (12)..(12): n is a, c, g, or t
  misc_feature (14)..(14): n is a, c, g, or t
  misc_feature (47)..(47): n is a, c, g, or t
ggaaaaaaaaananaaaaaaaagaagaaagatttgcaaaggagggcncctggaacactccatcaaagtactcgaactgatctccaccatctgggacacggaactgcacattgcgggcctcagactcctcaacaaccttccactgcccgactatgtgcatccacagctgcgacgggtgatgcctgccttgatggagatcctgcagtcagactacatcctggcacaggtgcaagccgtacgactgctgagctacctggcacagaagaatgaccttctctatgacattctcaactgccaggttcactccaacttcctaaacctgttccagcccacacagtcagggagtctcctgtatgaggtactggtgtttgctgagcggctgagtgagggccggaacgcaccccactaccacgtggtgaaatggcattacaacgaacagtccctgcatgaatccctctttggggaagagtcccgactggcagaccgactacttgccctggtcatccaccctgaggaagatgttcagatccaggcctgcaaggtcattgtcagcctgcagtatccccaggacttgagagcccggccctcctcctgccagcccagtcgttcctactttaaaaacacggaataaaattaaggagagccaataaatgagtataggagagaaacttgaaaaaaatt

SEQ ID NO: 409176 - DNA, 1107 bp, Homo sapiens
agctctcacctgggcccagggcaacactgaagacatgggcaagagcatcccccaatacctggggcaactggacatccgcaaaagcgtagtcagcctggccacaggcgccggggcgatctacctgctctacaaggccatcaaggctggcataaaatgcaaaccacccctctgtagcaactcacccatctgcatcgcccgcctggcagtcgagcgagagcggcacgggcgggactcaggtgagctccggaggctcctcaactctttggagtgcaaacaggatgagtacgccaagagcatgatcctgcacagtatcactcgctgtgtgtacttgctggaggctgaggcctctgcttgtactacggatgacatcgtgttgctgggctacatgctggatgacaaggacaacagtgtcaaaacccaagctctgaatacacttaaagctttctctggcatcagaaaattcaggctcaaaatccaggaacactccatcaaagtactcgaactgatctccaccatctgggacacggaactgcacattgcgggcctcagactcctcaacaaccttccactgcccgactatgtgcatccacagctgcgacgggtgatgcctgccttgatggagatcctgcagtcagactacatcctggcacaggtgcaagccgtacgactgctgagctacctggcacagaagaatgaccttctctatgacattctcaactgccaggttcactccaacttcctaaacctgttccagcccacacagtcagggagtctcctgtatgaggtactggtgtttgctgagcggctgagtgagggccggaacgcaccccactaccacgtggtgaaatggcattacaacgaacagtccctgcatgaatccctctttggggaagagtcccgactggcagaccgactacttgccctggtcatccaccctgaggaagatgttcagatccaggcctgcaaggtcattgtcagcctgcagtatccccaggacttgagagcccggccctcctcctgccagcccagtcgttcctactttaaaaacacggaataaaattaaggagagccaataaatgagtataggagagaaacttgaaaaaaatt

SEQ ID NO: 409177 - DNA, 1228 bp, Homo sapiens
agctctcacctgggcccagggcaacactgaagacatgggcaagagcatcccccaatacctggggcaactggacatccgcaaaagcgtagtcagcctggccacaggcgccggggcgatctacctgctctacaaggccatcaaggctggcataaaatgcaaaccacccctctgtagcaactcacccatctgcatcgcccgtgagtgtccgggccctggggagagggctctgccccaggaggcacctgctcccgaggcctctgctgtgggagggcccaaaggcctggcagtcgagcgagagcggcacgggcgggactcaggtgagctccggaggctcctcaactctttggagtgcaaacaggatgagtacgccaagagcatgatcctgcacagtatcactcgctgtgtgtacttgctggaggctgaggcctctgcttgtactacggatgacatcgtgttgctgggctacatgctggatgacaaggacaacagtgtcaaaacccaagctctgaatacacttaaagctttctctggcatcagaaaattcaggctcaaaatccaggaacactccatcaaagtactcgaactgatctccaccatctgggacacggaactgcacattgcgggcctcagactcctcaacaaccttccactgcccgactatgtgcatccacagctgcgacgggtgatgcctgccttgatggagatcctgcagtcagactacatcctggcacaggtgcaagccgtacgactgctgagctacctggcacagaagaatgaccttctctatgacattctcaactgccaggttcactccaacttcctaaacctgttccagcccacacagtcagggagtctcctgtatgaggtactggtgtttgctgagcggctgagtgagggccggaacgcaccccactaccacgtggtgaaatggcattacaacgaacagtccctgcatgaatccctctttggggaagagtcccgactggcagaccgactacttgccctggtcatccaccctgaggaagatgttcagatccaggcctgcaaggtcattgtcagcctgcagtatccccaggacttgagagcccggccctcctcctgccagcccagtcgttcctactttaaaaacacggaataaaattaaggagagccaataaatgaaatacataataaagtagctgcgcgcattaagtagggaagggacgagattcggccttgttggcctcaa

SEQ ID NO: 409178 - DNA, 711 bp, Homo sapiens
cacctaggtgggctggcaaccagccaccagtttccaactctttctccaacagggaagccgcaatgacacagccgactaggccctcggtcacctgtgaccagggatcctccacgatcggcgggaccgccgcccaggcgaccaccagttccagcgccacctcgggttcgaactaccagcgcgatagactcggccgccgcccagaaatcggcgtagggggtcagccgcagatctgctttccgcggccgaggtccgcgcagcagccggtgctgttcagcttaatgaattccagtgaagcagcgatgaaaaaaactttacccaagagccatttatctcgggtgattattcatgataaccgcatcacacaacgaatctatgagatggaggtgagcgctttagagaagaccaagaaaaagatcagccactactatgaacacctgaaaaaaaagttcatgacagagcagctcagaaagctcgggcgatggagagaggaatccgtgaacagcaaccggtacttaaccttcgggataccaccaccagtttaaactccagtctcccaagaaaggccaaccaccctagttctggcaaagggatctgccccagggtcacgatgacaccagtgtgacccgaggagaactagtaactacaacctacacaactgtagaacaataaacagaaaccagcagacagcggagcataataaatcctcagcaa

SEQ ID NO: 409179 - DNA, 113 bp, Homo sapiens
aaggaaacggagaaagcagaattcagctgtgttttaagatttattttatatataccttttgtcccttgtaaaaagaaaatttgaaaaagaagaagaaaaagaagaggagggtg

SEQ ID NO: 409180 - DNA, 1242 bp, Homo sapiens
ttctactcctccatagttaacttgctacgtacatgaagccagaatagactagttcatatatccaagagcagggctcctgaagggcatggactctagcttattacagacataccctggcatctagcacaatacctggcacataatagacagcagtctgcagcctggaagaggaccctcaccagaacctgaccatcttagcactgtgttttggacttccaggctccataactcctccatttagaaagggagcatgagaagcactgaaaagtaaggcactgtgatctacacggaaaccatatattgggctcacagctactgaatgagaccgactggtggagacagtttagtgaacctggtaaacactacacgtgaagagtggtgaaagggaacattgattactgaagtgccctggagagggaaagcactggtcaacatcacatggacaaatttcattgttttctaaagatggcctggaagtagtctttgccactgcttcctccacaaacagctcttcataacatgggctgcatgaaatcaaagcaaactttcccatttcctaccatatatgaaggtgagaagcagcatgagagtgaagaaccctttatgccagaagagagatgtctacctaggatggcttctccagttaatgtcaaagaggaagtgaaggaacctccagggaccaatattgtgatcttggaatatgcacaccgcctgtctcaggatatcttgtgtgatgccttgcagcaatgggcatgcaataacatcaagtaccatgacattccatacattgagagtgaggggccttgaggctgtaggatgacaacactttgactgtggaggtgctagtttgaataaatgtgacaaaagcaaaaactggtgtgaaaaagtacaaataactatctggatttaaaaatgtgtctacgataatgtcactattataagaacaactaggatgaaatgcattttaagtacttctatgttaacagcaatttctgtttagtcttagattttagtcatctgaagggctgaacagaggtcctgtgacacccaataatcagctgaatgtcacagcacttcttcctaagtaatggcatcaccaaagaaaatgctaaggaataaaaactgccccaaattccaatggttgaagtttatcctttaaaataacaatttttgtttgtttatacccaaaaaaagtccagatatgaaaagggcttttctaaaatttcttggcgagggaatggc

SEQ ID NO: 409181 - DNA, 688 bp, Homo sapiens
ctgccgcccgcccagacgccagcaagcccccctcccacgacagggctgctccgggagcttcggagacccgccccgggcctgagcgcaggctgcctccgggaccccacggctgtccggacgtgccatgggcgcgcagctgccgggcaacgtgttgtgtaagtgaacatctgggaggtaaacactacacgtgaagagtggtgaaagggaacattgattactgaagtgccctggagagggaaagcactggtcaacatcacatggacaaatttcattgttttctaaagatggcctggaagtagtctttgccactgcttcctccacaaacagctcttcataacatgggctgcatgaaatcaaagcaaactttcccatttcctaccatatatgaaggtgagaagcagcatgagagtgaagaaccctttatgccagaagagagatgtctacctaggatggcttctccagttaatgtcaaagaggaagtgaaggaacctccagggaccaatattgtgatcttggaatatgcacaccgcctgtctcaggatatcttgtgtgatgccttgcagcaatgggcatgcaataacatcaagtaccatgacattccatacattgagagtgaggggccttgaggctgtaggatgacaacactttgactgtggaggtgctagtttgaataaatgtgacaaaagca

SEQ ID NO: 409182 - DNA, 297 bp, Homo sapiens
gtgtctcaggttcatcctggactttccctgcttgagtcctggaatcgaccttttctccaaggagccttgttccttttagtggggaaaggtatttagaagctaagatcttggtgttggctgtgttcactacaattggtgtatctacttctccatcctccagcgtcctctggtgatcgagaatctgaagttccaggttttcataggccccagtgaccttgtcctcagaaggagaaagatcctctctcctttggtgttcccctcaactcccttaaataaaggactctattggtcctgccc

SEQ ID NO: 409183 - DNA, 2951 bp, Homo sapiens
ggcttacggtctccgggatacgggtgtacacagcagcggcgtcgcggcccgcagccccgcggcggcggaaaggtaaccgacccgccctggggtgctgcgtgcgctgcctgctcccgcctgaggaaaacactgcccatggcgcaaggccgggagcgcgacgaaggcccccactccgccggcggcgcgtccttgtccgtgagatgggtgcaaggattccctaagcagaatgttcattttgtcaacgacaacaccatttgctacccttgtgggaattatgtaatatttattaatattgaaaccaagaaaaagactgtactgcagtgtagtaatggaattgtgggcgtcatggcaactaacatcccctgtgaagttgtggctttttctgaccggaagctaaaacctctcatctacgtatacagctttccaggattgaccagaaggaccaaattgaaaggcaacattctcctggactacactttactttcattcagttactgtggcacctacctggctagttactcctctctcccagaatttgaactggccctttggaactgggaatcgagtatcattttgtgtaagaaatcacagcctggaatggatgtgaaccaaatgtcttttaaccccatgaactggcgccagctgtgcttatcaagtccaagtacagtgagcgtgtggaccattgaaagaagtaaccaggagcattgtttcagagcaaggtcggtgaaattacctctagaagatgggtcattttttaatgaaacggatgtcgttttcccccagtcgttgccgaaagatctcatctatggtcccgtgctgccactgtcagccattgccgggctggtaggcaaagaggcagagactttccggccgaaagatgatctatatcctttgcttcacccgactatgcattgctggactccaacaagtgacttgtacattggctgtgaagagggtcatcttttaatgattaatggagacaccttgcaagtgactgtacttaataagatagaagaggaatcgccattggaagacagaagaaattttatcagtccagtaaccttggtatatcagaaggagggcgtgctggcttctggaattgatggctttgtgtattcttttattattaaagatagaagttacatgatcgaggattttcttgagattgaaagacctgtagaacatatgacattttctcccaattatacagtgttgctgattcaaacagacaagggatctgtttatatctacacttttggtaaggagccaaccttaaataaagtcctagatgcttgtgatgggaaatttcaggcaattgactttatcacacctggaacccaatacttcatgacacttacatattcaggggaaatttgtgtttggtggctggaggattgtgcttgtgtaagcaagatttatctgaataccctagcaacggttctggcttgctgtccatcctccctctctgcagccgtgggcacggaggatggctcggtctacttcatcagcgtatatgataaggaatcccctcaggtcgtgcacaaggcctttctctcggaatcgtccgtgcagcacgtcgtgtaagtcctttctgcctccaggagcggctccgtgtcacacccgtctgttgaaaattctagtgaagccatcctttcttttaattttaagttttacgtgtttcatttgttttgaatgttaatatattcacacagttcaacactcaaaaggtacagagggctgtgtagtaaagtaccccccatacccaggtctgtccttgcaggcagcctggtaccaatttctcatgtctctcctgagatgttttatccatgaacaagcaaaacataataagcacttctttttacttgtatcaatggccatcatgtgtgtatagtgtgccaggcacttctgctgtattaactccatgaggtaaacactcttgttgtctctatttgacaggtgaggaagataaggcacaaggattttaaataacttgctcaatagtacacagatagtgaatggcaaatgttgggatttgaacccaggtagttgggctgcagagtcactgcctttgctcttaaaaggagaaaactatgtacaatgcctcatttcttttttcacttaatcgtatatcttggagaatgttttatatccacacataaagaccagcctgattatttgtatagccacatagtattccattatatgaatatactatcattttttaaaaacggtatattaatgaacatttagagtatttcaaaacttttgaagcaatacttttaagatgataatatagagacattagatttggacttgtaggtgctatcattattactgtttctttttaatttattatattattaggtattaataagaacagacatttgtattctgctttacagcttgagatcactgtagcttgtggcatgtgatcctcaaaacaccagtcagaaaggtgttattcttatccctattagacaaattagggaattcagggttagagaggtgaggaaaagcattgtccaagattacacattacacagctagcacactgaggagctggccctgccactgtggactgcccagctccaccaccctagctcagtggggaaggatggataacctccttccatttaccccctgcctttctgcactgtcatttttttgtgcctttcctttctcagatcctcttattctaatttacatcttcccactttttctaatttgataaagttgtagacatgtttcactacattcttcctcccactgccaggtaccagacacagggtaatgaaatgtcacacccaccactaatttgagaattgcttatttgcgcttgaaacatcaagaaagctctaccgacagacatgtttcattcacttatgatgaaccaactgcccatctttactgaatcttcttgactgtatttattaaagttgcaatttggaaat

SEQ ID NO: 409184 - DNA, 1701 bp, Homo sapiens
ggcttacggtctccgggatacgggtgtacacagcagcggcgtcgcggcccgcagccccgcggcggcggaaaggtaaccgacccgccctggggtgctgcgtgcgctgcctgctcccgcctgaggaaaacactgcccatggcgcaaggccgggagcgcgacgaaggcccccactccgccggcggcgcgtccttgtccgtgagatgggtgcaaggattccctaagcagaatgttcattttgtcaacgacaacaccatttgctacccttgtgggaattatgtaatatttattaatattgaaaccaagaaaaagactgtactgcagtgtagtaatggaattgtgggcgtcatggcaactaacatcccctgtgaagttgtggctttttctgaccggaagctaaaacctctcatctacgtatacagctttccaggattgaccagaaggaccaaattgaaaggcaacattctcctggactacactttactttcattcagttactgtggcacctacctggctagttactcctctctcccagaatttgaactggccctttggaactgggaatcgagtatcattttgtgtaagaaatcacagcctggaatggatgtgaaccaaatgtcttttaaccccatgaactggcgccagctgtgcttatcaagtccaagtacagtgagcgtgtggaccattgaaagaagtaaccaggagcattgtttcagagcaaggtcggtgaaattacctctagaagatgggtcattttttaatgaaacggatgtcgttttcccccagtcgttgccgaaagatctcatctatggtcccgtgctgccactgtcagccattgccgggctggtaggcaaagaggcagagactttccggccgaaagatgatctatatcctttgcttcacccgactatgcattgctggactccaacaagtgacttgtacattggctgtgaagagggtcatcttttaatgattaatggagacaccttgcaagtgactgtacttaataagatagaagaggaatcgccattggaagacagaagaaattttatcagtccagtaaccttggtatatcagaaggagggcgtgctggcttctggaattgatggctttgtgtattcttttattattaaagatagaagttacatgatcgaggattttcttgagattgaaagacctgtagaacatatgacattttctcccaattatacagtgttgctgattcaaacagacaagggatctgtttatatctacacttttggtaaggagccaaccttaaataaagtcctagatgcttgtgatgggaaatttcaggcaattgactttatcacacctggaacccaatacttcatgacacttacatattcaggggaaatttgtgtttggtggctggaggattgtgcttgtgtaagcaagatttatctgaataccctagcaacggttctggcttgctgtccatcctccctctctgcagccgtgggcacggaggatggctcggtctacttcatcagcgtatatgataaggaatcccctcaggtcgtgcacaaggcctttctctcggaatcgtccgtgcagcacgtcgtttatgatcagcaaggaatatttctgttagttggaacagcagaaggaaaagtctttattatcaatgccaactcctcaagctcatttcagattattggattcacaggtacaacatagaatgct

SEQ ID NO: 409185 - DNA, 1474 bp, Homo sapiens
ggcttacggtctccgggatacgggtgtacacagcagcggcgtcgcggcccgcagccccgcggcggcggaaaggtaaccgacccgccctggggtgctgcgtgcgctgcctgctcccgcctgaggaaaacactgcccatggcgcaaggccgggagcgcgacgaaggcccccactccgccggcggcgcgtccttgtccgtgagatgggtgcaaggattccctaagcagaatgttcattttgtcaacgacaacaccatttgctacccttgtgggaattatgtaatatttattaatattgaaaccaagaaaaagactgtactgcagtgtagtaatggaattgtgggcgtcatggcaactaacatcccctgtgaagttgtggctttttctgaccggaagctaaaacctctcatctacgtatacagctttccaggattgaccagaaggaccaaattgaaaggcaacattctcctggactacactttactttcattcagttactgtggcacctacctggctagttactcctctctcccagaatttgaactggccctttggaactgggaatcgagtatcattttgtgtaagaaatcacagcctggaatggatgtgaaccaaatgtcttttaaccccatgaactggcgccagctgtgcttatcaagtccaagtacagtgagcgtgtggaccattgaaagaagtaaccaggagcattgtttcagagcaaggtcggtgaaattacctctagaagatgggtcattttttaatgaaacggatgtcgttttcccccagtcgttgccgaaagatctcatctatggtcccgtgctgccactgtcagccattgccgggctggtaggcaaagaggcagagactttccggccgaaagatgatctatatcctttgcttcacccgactatgcattgctggactccaacaagtgacttgtacattggctgtgaagagggtcatcttttaatgattaatggagacaccttgcaagtgactgtacttaataagatagaagaggaatcgccattggaagacagaagaaattttatcagtccagtaaccttggtatatcagaaggagggcgtgctggcttctggaattgatggctttgtgtattcttttattattaaagatagaagttacatgatcgaggattttcttgagattgaaagacctgtagaacatatgacattttctcccaattatacagtgttgctgattcaaacagacaaggtatgttggatggtaatttcttgatatgtgattttcagatagtattattatcatcattacatgacaggaatgaggagcagagtatgctgcacagtggtactctacttgtcaagactctaggttgtaaatgaaaaaatacccaatttaaaaggcctaaattacaaagagctattggtttatttttgtgcatgtaactgaaagggcaaggagtgaatctgaataaaagagctatcatgatgcc

SEQ ID NO: 409186 - DNA, 1447 bp, Homo sapiens
ggcttacggtctccgggatacgggtgtacacagcagcggcgtcgcggcccgcagccccgcggcggcggaaaggtaaccgacccgccctggggtgctgcgtgcgctgcctgctcccgcctgaggaaaacactgcccatggcgcaaggccgggagcgcgacgaaggcccccactccgccggcggcgcgtccttgtccgtgaggcaacattctcctggactacactttactttcattcagttactgtggcacctacctggctagttactcctctctcccagaatttgaactggccctttggaactgggaatcgagtatcattttgtgtaagaaatcacagcctggaatggatgtgaaccaaatgtcttttaaccccatgaactggcgccagctgtgcttatcaagtccaagtacagtgagcgtgtggaccattgaaagaagtaaccaggagcattgtttcagagcaaggtcggtgaaattacctctagaagatgggtcattttttaatgaaacggatgtcgttttcccccagtcgttgccgaaagatctcatctatggtcccgtgctgccactgtcagccattgccgggctggtaggcaaagaggcagagactttccggccgaaagatgatctatatcctttgcttcacccgactatgcattgctggactccaacaagtgacttgtacattggctgtgaagagggtcatcttttaatgattaatggagacaccttgcaagtgactgtacttaataagatagaagaggaatcgccattggaagacagaagaaattttatcagtccagtaaccttggtatatcagaaggagggcgtgctggcttctggaattgatggctttgtgtattcttttattattaaagatagaagttacatgatcgaggattttcttgagattgaaagacctgtagaacatatgacattttctcccaattatacagtgttgctgattcaaacagacaagggatctgtttatatctacacttttggtaaggagccaaccttaaataaagtcctagatgcttgtgatgggaaatttcaggcaattgactttatcacacctggaacccaatacttcatgacacttacatattcaggggaaatttgtgtttggtggctggaggattgtgcttgtgtaagcaagatttatctgaataccctagcaacggttctggcttgctgtccatcctccctctctgcagccgtgggcacggaggatggctcggtctacttcatcagcgtatatgataaggaatcccctcaggtcgtgcacaaggcctttctctcggaatcgtccgtgcagcacgtcgtttatgatcagcaaggaatatttctgttagttggaacagcagaaggaaaagtctttattatcaatgccaactcctcaagctcatttcagattattggattcacaggtacaacatagaatgct

SEQ ID NO: 409187 - DNA, 1306 bp, Homo sapiens
ctcccccatcacacacaccaggccctgccaggacaaggcagctcctggaagctccaccaggacccacgtccaccaggcatctcgaacccttggcccccatggaccccctgaggcgctccccctctccctgcctgtcctcgcagccctccagccccagcaccccaccctgcgagatgcttggtcctgtgggcattgaggctgtgctggaccagctgaagatcaaggctatgaagatggggtttgagttcaacatcatggtggtggggcaaagcgggctgggcaagtccacgatggtgaacacgctgttcaagtccaaagtgtggaagtcaaacccaccgggcttgggggtgcccacaccccagacgctgcagctgcattcactgacccatgtcatagaggagaagggtgtgaagctgaagctgacggtgacggacacgcccggcttcggggaccagatcaacaatgacaactgctgggaccccatcctgggctacatcaacgagcaatacgagcagtacctgcaggaggagatcctcatcacccgccagcgccacatcccagacacccgggtgcactgctgcgtgtactttgtaccacccactgggcactgcctgcgggccctggacattgagttcctgcagcggctgtgccggactgtgaatgtggtgcccgtgattgccagggccgacagcctgaccatggaggagcgagaggccttcaggcgcaggatccagcagaacctgaggacccactgcatcgacgtctacccccagatgtgctttgacgaggacatcaatgacaaaatcctcaacagcaagttacgggaccgaatcccttttgccgtggtaggggctgaccaagagcacctggtgaacgggaggtgtgtcctgggccggaagaccaagtggggcatcattgaagtggagaacatggcgcactgtgaatttcctctcctgagagacctgcttatccgctcccacctccaagacctgaaggacataacccacaacatccactatgagaactaccgcgtcatcagactcaatgaaagccacctgctgccccgcgggcccggctgggtgaacctggccccggcctccccaggacagctgaccaccccccggaccttcaaggtctgcaggggggcccatgacgattctgatgatgagttctgaccaccggcggatcccggggctgctgggcttcctgagtccccagcggctctcaacacacacctatgtaccagagcatctattaaatgtgagccttgctttttatgaaaagctgtgctttgaaaacaaaaaca

SEQ ID NO: 409188 - DNA, 1092 bp, Homo sapiens
ctcccccatcacacacaccaggccctgccaggacaaggcagctcctggaagctccaccaggacccacgtccaccaggcatctcgaacccttggcccccatggaccccctgaggcgctccccctctccctgcctgtcctcgcagccctccagccccagcaccccaccctgcgagatgcttggtcctgtgggcattgaggctgtgctggaccagctgaagatcaaggctatgaagatggggtttgagttcaacatcatggtggtggggcaaagcgggctgggcaagtccacgatggtgaacacgctgttcaagtccaaagtgtggaagtcaaacccaccgggcttgggggtgcccacaccccagacgctgcagctgcattcactgacccatgtcatagaggagaagggtgtgaagctgaagctgacggtgacggacacgcccggcttcggggaccagatcaacaatgacaactgctgggaccccatcctgggctacatcaacgagcaatacgagcaatccagcagaacctgaggacccactgcatcgacgtctacccccagatgtgctttgacgaggacatcaatgacaaaatcctcaacagcaagttacgggaccgaatcccttttgccgtggtaggggctgaccaagagcacctggtgaacgggaggtgtgtcctgggccggaagaccaagtggggcatcattgaagtggagaacatggcgcactgtgaatttcctctcctgagagacctgcttatccgctcccacctccaagacctgaaggacataacccacaacatccactatgagaactaccgcgtcatcagactcaatgaaagccacctgctgccccgcgggcccggctgggtgaacctggccccggcctccccaggacagctgaccaccccccggaccttcaaggtctgcaggggggcccatgacgattctgatgatgagttctgaccaccggcggatcccggggctgctgggcttcctgagtccccagcggctctcaacacacacctatgtaccagagcatctattaaatgtgagccttgctttttatgaaaagctgtgctttgaaaacaaaaaca

SEQ ID NO: 409189 - DNA, 806 bp, Homo sapiens
cggcggttcaagactgatttttctatctcttcagtgcctctttcaacaatgaagatcaaaccaggttttgtgcaaatatctgctgagtgaactacttatttgaaaatacatcattggttaatattcccttttgctcactgaaatctcaaagactacagaccccgcacaagacattctgacattcccgtctttgaaatgaatgacagcaatgataaatatggctcacctccagagatacagatctcacaacttcatatttttaatataaattattaatctgaggtgtggtgcaattccattagatgaaagagatctacatattcagaagcacatgattcttcccccttccatgattccagtggccaatagaatggagtgtagtggcgtgatcttggctcacaacaacttctgcttcccacattcaagcgatcctcccaccttatactcctgagtagctggaaccacagacaaactacaataaagccatgccctgactggatgtgcctaacatttgtctggtgcttaaaggagttggctgcatgcatgggatggagaaggattcaacatttaatggcagttagaatcaaatttttaactcaagaaggcagaaggaatccacctaaataaatgttggaaagtcaccaaaaatagttctccaagtcagaagcggtgcaaaagctgcctcagctcttggtggattttcaatttctcccagccatctctgtttcgctaaaggtttctgaagacagtgggtatgtggcaaacttctgcaattctatattaagataaactgttagatcaataaa

SEQ ID NO: 409190 - DNA, 1344 bp, Homo sapiens
  misc_feature (751)..(751): n is a, c, g, or t
  misc_feature (753)..(753): n is a, c, g, or t
cggcggttcaagactgatttttctatctcttcagtgcctctttcaacaatgaagatcaaaccaggtactgaggtagtgggagtgctcatctagtttttggcttttagttttgtgcaaatatctgctgagtgaactacttatttgaaaatacatcattggttaatattcccttttgctcactgaaatctcaaagactacagaccccgcacaagacattctgacattcccgtctttgaaatgaatgacagcaatgataaatatggctcacctccagagatacagatctcacaacttcatatttttaatataaattattaatctgaggtgtggtgcaattccattagatgaaagagatctacatattcagaagcacatgattcttcccccttccatgattccagtggccaatagacaaactacaataaagccatgccctgactggatgtgcctaacatttgtctggtgcttaaaggagttggctgcatgcatgggatggagaaggattcaacatttaatggcagttagaatcaaatttttaactcaagaaggcagaaggaatccacctaaataaatgttggaaagtcaccaaaaatagttctccaagtcagaagcggtgcaaaagctgcctcagctcttggtggattttcaatttctcccagccatctctgtttcgctaaaggtttctgaagacagtggaatgctgttgaagacaccaccttgataaaacaaaaacatcagccaaattaaattnanaggagtttaattgagcaaagaattattcatgaatcaagcagtcttccaagccagagtaggctcaaatactccagcacagccacgtggtggaagatttatggacaaaagaagaaaagtaacatacagaaaatggaacatgaggggaagcttttttctcctccccatcctgatcactagtatgagaaggggtgctaatggaccagccttggccttgcagatgaagatgatgaaggaagaagatgtataaagaacctctgaaagagtcccagttttacatttcaaagtctttttccttctgttgtttattgtgttgggttggagtggaggatatttgatggagaattgattctgaaacttgccaaaatatggataatactttgctccttttccattgtgggttatcacaaagaagagtttcacttttagtcatctatttacagtctagaaacaggaacaaacccaaaccaagcagaaaaacagaaataaccaagatcaaaacggaactaaatgaaattgaaatgaaaaagtacaaagataaatgaaacaaaaacctggtttattgaaaagttaaataaaattgataattcaaaa

SEQ ID NO: 409191 - DNA, 876 bp, Homo sapiens
cggcggttcaagactgatttttctatctcttcagtgcctctttcaacaatgaagatcaaaccaggttttgtgcaaatatctgctgagtgaactacttatttgaaaatacatcattggttaatattcccttttgctcactgaaatctcaaagactacagaccccgcacaagacattctgacattcccgtctttgaaatgaatgacagcaatgataaatatggctcacctccagagatacagatctcacaacttcatatttttaatataaattattaatctgaggtgtggtgcaattccattagatgaaagagatctacatattcagaagcacatgattcttcccccttccatgattccagtggccaataggaattctaattggaacagacaaaaacccaatacatgtttaagcagtaaagtattcatcaggtcacaaaaagaggagcaagaggagctgactctttatgtcatatcttggccttgtaatttgattctttgccaacatgcatggtttttctccataggctgtgcattgggacaaactacaataaagccatgccctgactggatgtgcctaacatttgtctggtgcttaaaggagttggctgcatgcatgggatggagaaggattcaacatttaatggcagttagaatcaaatttttaactcaagaaggcagaaggaatccacctaaataaatgttggaaagtcaccaaaaatagttctccaagtcagaagcggtgcaaaagctgcctcagctcttggtggattttcaatttctcccagccatctctgtttcgctaaaggtttctgaagacagtgggtatgtggcaaacttctgcaattctatattaagataaactgttagatcaataaa

SEQ ID NO: 409192 - DNA, 1013 bp, Homo sapiens
  misc_feature (420)..(420): n is a, c, g, or t
  misc_feature (422)..(422): n is a, c, g, or t
cggcggttcaagactgatttttctatctcttcagtgcctctttcaacaatgaagatcaaaccaggttttgtgcaaatatctgctgagtgaactacttatttgaaaatacatcattggttaatattcccttttgctcactgaaatctcaaagactacagacaaactacaataaagccatgccctgactggatgtgcctaacatttgtctggtgcttaaaggagttggctgcatgcatggaaatgttggaaagtcaccaaaaatagttctccaagtcagaagcggtgcaaaagctgcctcagctcttggtggattttcaatttctcccagccatctctgtttcgctaaaggtttctgaagacagtggaatgctgttgaagacaccaccttgataaaacaaaaacatcagccaaattaaattnanaggagtttaattgagcaaagaattattcatgaatcaagcagtcttccaagccagagtaggctcaaatactccagcacagccacgtggtggaagatttatggacaaaagaagaaaagtaacatacagaaaatggaacatgaggggaagcttttttctcctccccatcctgatcactagtatgagaaggggtgctaatggaccagccttggccttgcagatgaagatgatgaaggaagaagatgtataaagaacctctgaaagagtcccagttttacatttcaaagtctttttccttctgttgtttattgtgttgggttggagtggaggatatttgatggagaattgattctgaaacttgccaaaatatggataatactttgctccttttccattgtgggttatcacaaagaagagtttcacttttagtcatctatttacagtctagaaacaggaacaaacccaaaccaagcagaaaaacagaaataaccaagatcaaaacggaactaaatgaaattgaaatgaaaaagtacaaagataaatgaaacaaaaacctggtttattgaaaagttaaataaaattgataattcaaaa

SEQ ID NO: 409193 - DNA, 708 bp, Homo sapiens
cggcggttcaagactgatttttctatctcttcagtgcctctttcaacaatgaagatcaaaccaggttttgtgcaaatatctgctgagtgaactacttatttgaaaatacatcattggttaatattcccttttgctcactgaaatctcaaagactacagaccccgcacaagacattctgacattcccgtctttgaaatgaatgacagcaatgataaatatggctcacctccagagatacagatctcacaacttcatatttttaatataaattattaatctgaggtgtggtgcaattccattagatgaaagagatctacatattcagaagcacatgattcttcccccttccatgattccagtggccaatagacaaactacaataaagccatgccctgactggatgtgcctaacatttgtctggtgcttaaaggagttggctgcatgcatgggatggagaaggattcaacatttaatggcagttagaatcaaatttttaactcaagaaggcagaaggaatccacctaaataaatgttggaaagtcaccaaaaatagttctccaagtcagaagcggtgcaaaagctgcctcagctcttggtggattttcaatttctcccagccatctctgtttcgctaaaggtttctgaagacagtgggtatgtggcaaacttctgcaattctatattaagataaactgttagatcaataaa

SEQ ID NO: 409194 - DNA, 557 bp, Homo sapiens
cggcggttcaagactgatttttctatctcttcagtgcctctttcaacaatgaagatcaaaccaggttttgtgcaaatatctgctgagtgaactacttatttgaaaatacatcattggttaatattcccttttgctcactgaaatctcaaagactacagaccccgcacaagacattctgacattcccgtctttgaaatgaatgacagcaatgataaatatggctcacctccagagatacagatctcacaacttcatatttttaatataaattattaatctgaggtgtggtgcaattccattagatgaaagagatctacatattcagaagcacatgattcttcccccttccatgattccagtggccaataggtaatcagaacttctctgttcagctaaaagacagaaaaagagcatatgaaagacgtattttcccagaagtgctcatcctgataactgtgtacagcactactgctcatattccattggccaatatttaggtagataacttcactaactacaaggtatgctgggaaataaagtccagatatgtgtgacat

SEQ ID NO: 409195 - DNA, 244 bp, Homo sapiens
ccattatggaaaattatatttatgttgaacataaataatcagatgtttgcttcactaatgatccagcttattttaaaattatgttactggatttaacgatgtgacctctgttctgcgactttgtgtattctggaggcttgttatgcatgtcaagggtatttccttttatttgttttaattttacctgccatttaaatcattgaatgacccttcataattgtattatgaaaccatataataagga

SEQ ID NO: 409196 - DNA, 712 bp, Homo sapiens
catcaagcaaagaacttgtaatacgctgaatgctgcatagaaggttttgaaactacttacctgctgtggaacacctgtataactttaaaatgcatcaatcaatctcgagagtatgatcatgcttcctgcttttaaggatctgaagttaactgcaactccaagtatacaagacttctttgggacccatggaagcatctctacatgctcatgtttgccagattcagtggcctcctgaaacctggccctagctaataagttaaaaagctctaagtaatcccgagctgcatttgaatctccaagatcacttgttcatgggttggtaatactttaaagagccatttgtttaactgctaatctggatcttatattctgagccccagcttttttctaaagcaaagaaaatacaaaataaaagtaagaccaaatgcctttgtaccatggagagagaaatgactcattggaatgcttctgtttttcatcacatcaaagatgcatcaacataaatcaaccattatatcatgcaccatgataaaaaagggggataaaagtccccaaaccactgccaattaaaccaacacagtgcctttgtattattcagaatttttatcttagccttattgaaagagcttttttagaacatatttaaacaattctgtcatatttcattcttgcatactcattaaaaaggaaaatatgagagatacaaatgaaa

SEQ ID NO: 409197 - DNA, 1679 bp, Homo sapiens
ggcagcggcgccgcgtccgctctcgcccgctctcgcccgctctcgcccgctcgccagccggctctcctcccgccgcagacccgcgcgccgcgctcgggggccatgcagcgcctggccatggacctgcggatgttgtcccgggagctctccctctacctggaacaccaagtccgggtggggttcttcggctcgggggtgggcttatcccttatcctgggcttcagcgtcgcttatgccttctactacctgagcagcattgccaagaaaccccagttagtgaccgggggtgagagtttcagccgcttccttcaagaccactgtcccgtggttacagaaacgtactacccgacggtctggtgctgggagggtcgaggacagaccctgcttagacctttcatcacttcgaagcccccggtgcagtacaggaatgaacttattaaaactgcagatggaggacagatttcactggactggtttgataatgataacagtacgtgttatatggatgccagcaccagacctactatcttattgttgcctggcctcacgggaacaagcaaggagtcatatatccttcatatgatccatcttagtgaagaattaggatacagatgtgtggtttttaacaacagaggagtggcgggggagaatctcttgacgccaaggacttattgttgtgctaacactgaagacttggagacagttattcaccatgtacacagcctgtacccttctgctcctttcctggcagcaggggtttcaatgggagggtaaggttttccctttctaaaataatctctgagagggaagctattttattggctgtctctttgagaggactataagctagctgtatggacactttttaaataaatgtctgattatgtttatcatattttattaaatgcggttgattgaatgaacgaaggaaggaaagaattaattcaggtgaattttaatatttttcttaactacgggtctctgtgactgcggattttgtgagcctgaaggtttgtctgaagcccatgaagtcgattgcatcactcaccggctgccatgttgaccttctgattcctgacgcactcccagccatccctggagctgcgttctgaagctgaacttgtagcatgactttcatcactccagttacagaaataatcacttattgctctctccagctgcagtggccttcaaaattatttttccccaggtggtattctgtttagttttgttttgttgctgggcaaatggaactactgtggagtgctctcctagaaactgaaattttgttaaccccctactccagctgttattttaagcatacggatattgtcatttgtgctgcttgcaattactttggggcttatttggaactttcctatttaggcttatttctactaattgtttttggggttttttttttgggttgttctagtgatggtgagcttaaggaaatccaaaatttttattatcgggaattttactaagcttttagattcctgaagccattgtccaaaactagttttttaaatcagcaaatactgaagatagaaaatgatattttttcataattttataattggtttatctgtcatttcagtttttagaacatcttgaacatgaatcacttgaaaatgaatagcatttttctatagccagtggctgtgaaaaagaaaaaa

SEQ ID NO: 409198 - DNA, 1709 bp, Homo sapiens
ggcagcggcgccgcgtccgctctcgcccgctctcgcccgctctcgcccgctcgccagccggctctcctcccgccgcagacccgcgcgccgcgctcgggggccatgcagcgcctggccatggacctgcggatgttgtcccgggagctctccctctacctggaacaccaagtccgggtggggttcttcggctcgggggtgggcttatcccttatcctgggcttcagcgtcgcttatgccttctactacctgagcagcattgccaagaaaccccagttagtgaccgggggtgagagtttcagccgcttccttcaagaccactgtcccgtggttacagaaacgtactacccgacggtctggtgctgggagggtcgaggacagaccctgcttagacctttcatcacttcgaagcccccggtgcagtacaggaatgaacttattaaaactgcagatggaggacagatttcactggactggtttgataatgataacagtacgtgttatatggatgccagcaccagacctactatcttattgttgcctggcctcacgggaacaagcaaggagtcatatatccttcatatgatccatcttagtgaagaattaggatacagatgtgtggtttttaacaacagaggagtggcgggggagaatctcttggtaagtaaatttaaatgacaacagtcttaaacgccaaggacttattgttgtgctaacactgaagacttggagacagttattcaccatgtacacagcctgtacccttctgctcctttcctggcagcaggggtttcaatgggagggtaaggttttccctttctaaaataatctctgagagggaagctattttattggctgtctctttgagaggactataagctagctgtatggacactttttaaataaatgtctgattatgtttatcatattttattaaatgcggttgattgaatgaacgaaggaaggaaagaattaattcaggtgaattttaatatttttcttaactacgggtctctgtgactgcggattttgtgagcctgaaggtttgtctgaagcccatgaagtcgattgcatcactcaccggctgccatgttgaccttctgattcctgacgcactcccagccatccctggagctgcgttctgaagctgaacttgtagcatgactttcatcactccagttacagaaataatcacttattgctctctccagctgcagtggccttcaaaattatttttccccaggtggtattctgtttagttttgttttgttgctgggcaaatggaactactgtggagtgctctcctagaaactgaaattttgttaaccccctactccagctgttattttaagcatacggatattgtcatttgtgctgcttgcaattactttggggcttatttggaactttcctatttaggcttatttctactaattgtttttggggttttttttttgggttgttctagtgatggtgagcttaaggaaatccaaaatttttattatcgggaattttactaagcttttagattcctgaagccattgtccaaaactagttttttaaatcagcaaatactgaagatagaaaatgatattttttcataattttataattggtttatctgtcatttcagtttttagaacatcttgaacatgaatcacttgaaaatgaatagcatttttctatagccagtggctgtgaaaaagaaaaaa

SEQ ID NO: 409199 - DNA, 1655 bp, Homo sapiens
ggcagcggcgccgcgtccgctctcgcccgctctcgcccgctctcgcccgctcgccagccggctctcctcccgccgcagacccgcgcgccgcgctcgggggccatgcagcgcctggccatggacctgcggatgttgtcccgggagctctccctctacctggaacaccaagtccgggtggggttcttcggctcgggggtgggcttatcccttatcctgggcttcagcgtcgcttatgccttctactacctgagcagcattgccaagaaaccccagttagtgaccgggggtgagagtttcagccgcttccttcaagaccactgtcccgtggttacagaaacgtactacccgacggtctggtgctgggagggtcgaggacagaccctgcttagacctttcatcacttcgaagcccccggtgcagtacaggaatgaacttattaaaactgcagatggaggacagatttcactggactggtttgataatgataacagtacgtgttatatggatgccagcaccagacctactatcttattgttgcctggcctcacgggaacaagcaaggagtcatatatccttcatatgatccatcttagtgaagaattaggatacagatgtgtggtttttaacaacagaggagtggcgggggagaatctcttggtaagtaaatttaaatgacaacagtcttaaacgccaaggacttattgttgtgctaacactgaagacttggagacagttattcaccatgtacacagcctgtacccttctgctcctttcctggcagcaggggtttcaatgggagggtaaggttttcccttttataagctagctgtatggacactttttaaataaatgtctgattatgtttatcatattttattaaatgcggttgattgaatgaacgaaggaaggaaagaattaattcaggtgaattttaatatttttcttaactacgggtctctgtgactgcggattttgtgagcctgaaggtttgtctgaagcccatgaagtcgattgcatcactcaccggctgccatgttgaccttctgattcctgacgcactcccagccatccctggagctgcgttctgaagctgaacttgtagcatgactttcatcactccagttacagaaataatcacttattgctctctccagctgcagtggccttcaaaattatttttccccaggtggtattctgtttagttttgttttgttgctgggcaaatggaactactgtggagtgctctcctagaaactgaaattttgttaaccccctactccagctgttattttaagcatacggatattgtcatttgtgctgcttgcaattactttggggcttatttggaactttcctatttaggcttatttctactaattgtttttggggttttttttttgggttgttctagtgatggtgagcttaaggaaatccaaaatttttattatcgggaattttactaagcttttagattcctgaagccattgtccaaaactagttttttaaatcagcaaatactgaagatagaaaatgatattttttcataattttataattggtttatctgtcatttcagtttttagaacatcttgaacatgaatcacttgaaaatgaatagcatttttctatagccagtggctgtgaaaaagaaaaaa

SEQ ID NO: 409200 - DNA, 1495 bp, Homo sapiens
agctgtgatcatgccactgcaatctagcctgagtgacagtgcaagactctgtctttccaaaacaaacaaaaaaaaaggttattttgtctttgagggtacaggttgttttttgtttaatagaaagcacagttctctgctttttttcctaaactgctctggttaagttggagacacgtttgagtatggtactttgtttaattgaaggtatttgtattggtcttgccccatctgcatcaagccttccttgcatgttcatggtctttttgttagtgccaactctaactgtgctgactttaaatggcatgtatgtgcgctgcaagacaggaaaatgataaattattaatactacagtatgtgcaaacaaaggttattttctcatatgtatgactccttgctcctgtttacatttctgcattttacaaatcattaacctcacattgtaatttttgtgctttacttgtcactacttccagacgccaaggacttattgttgtgctaacactgaagacttggagacagttattcaccatgtacacagcctgtacccttctgctcctttcctggcagcaggggtttcaatgggagggtaaggttttccctttctaaaataatctctgagagggaagctattttattggctgtctctttgagaggactataagctagctgtatggacactttttaaataaatgtctgattatgtttatcatattttattaaatgcggttgattgaatgaacgaaggaaggaaagaattaattcaggtgaattttaatatttttcttaactacgggtctctgtgactgcggattttgtgagcctgaaggtttgtctgaagcccatgaagtcgattgcatcactcaccggctgccatgttgaccttctgattcctgacgcactcccagccatccctggagctgcgttctgaagctgaacttgtagcatgactttcatcactccagttacagaaataatcacttattgctctctccagctgcagtggccttcaaaattatttttccccaggtggtattctgtttagttttgttttgttgctgggcaaatggaactactgtggagtgctctcctagaaactgaaattttgttaaccccctactccagctgttattttaagcatacggatattgtcatttgtgctgcttgcaattactttggggcttatttggaactttcctatttaggcttatttctactaattgtttttggggttttttttttgggttgttctagtgatggtgagcttaaggaaatccaaaatttttattatcgggaattttactaagcttttagattcctgaagccattgtccaaaactagttttttaaatcagcaaatactgaagatagaaaatgatattttttcataattttataattggtttatctgtcatttcagtttttagaacatcttgaacatgaatcacttgaaaatgaatagcatttttctatagccagtggctgtgaaaaagaaaaaa

SEQ ID NO: 409201 - DNA, 1023 bp, Homo sapiens
  misc_feature (954)..(954): n is a, c, g, or t
ggcagcggcgccgcgtccgctctcgcccgctctcgcccgctctcgcccgctcgccagccggctctcctcccgccgcagacccgcgcgccgcgctcgggggccatgcagcgcctggccatggacctgcggatgttgtcccgggagctctccctctacctggaacaccaagtccgggtggggttcttcggctcgggggtgggcttatcccttatcctgggcttcagcgtcgcttatgccttctactacctgagcagcattgccaagaaaccccagttagtgaccgggggtgagagtttcagccgcttccttcaagaccactgtcccgtggttacagaaacgtactacccgacggtctggtgctgggagggtcgaggacagaccctgcttagacctttcatcacttcgaagcccccggtgcagtacaggaatgaacttattaaaactgcagatggaggacagatttcactggactggtttgataatgataacagtacgtgttatatggatgccagcaccagacctactatcttattgttgcctggcctcacgggaacaagcaaggagtcatatatccttcatatgatccatcttagtgaagaattaggatacagatgtgtggtttttaacaacagaggagtggcgggggagaatctcttgacgccaaggacttattgttgtgctaacactgaagacttggagacagttattcaccatgtacacagcctgtacccttctgctcctttcctggcagcaggggtttcaatgggagggtaaggttttccctttaaattacttgggcaaaattgggtccaaaacgcctttgatggcagctgcaactttttccgttggttggaacaccttcgcttgctcagagtcattggaaaaaccactgaactggctactttttaattactatttgacaacctgccttcagtcttcagttaataagcaccngacatatggtaggtaaaacaaggtgatatggatcatgtctgaaggtaatcatcagagagtatgattaag

SEQ ID NO: 409202 - DNA, 769 bp, Homo sapiens
ggcagcggcgccgcgtccgctctcgcccgctctcgcccgctctcgcccgctcgccagccggctctcctcccgccgcagacccgcgcgccgcgctcgggggccatgcagcgcctggccatggacctgcggatgttgtcccgggagctctccctctacctggaacaccaagtccgggtggggttcttcggctcgggggtgggcttatcccttatcctgggcttcagcgtcgcttatgccttctactacctgagcagcattgccaagaaaccccagttagtgaccgggggtgagagtttcagccgcttccttcaagaccactgtcccgtggttacagaaacgtactacccgacggtctggtgctgggagggtcgaggacagaccctgcttagacctttcatcacttcgaagcccccggtgcagtacaggaatgaacttattaaaactgcagatggaggacagatttcactggactggtttgataatgataacagtacgtgttatatggatgccagcaccagacctactatcttattgttgcctggcctcacgggaacaagcaaggagtcatatatccttcatatgatccatcttagtgaagaattaggatacagatgtgtggtttttaacaacagaggagtggcgggggagaatctcttgtgacttaggcactggaggaaatgaagatcaacacgatttcgaaagcaaaagttgcagagtgttatggtcttactcaagtgccttgtaataaatagcttgacgtgaaggttca

SEQ ID NO: 409203 - DNA, 782 bp, Homo sapiens
aaaaaaggaggctttataccctactaagggcttctaaaacagtacctatgagatctacttgaaaggtaattccaacacctctgccacatttgaatctggctttatttattgcttagtctcttaacagtgtttcctttatgtatcttttctgtttctatatatgtctggtaagttttactcaaaaagtgaactgtgtagagtagactaatatagaaagcaaaaccaacatgtgttcccttttactaggctgaatgtgtgtgttttgagggagaaggttgaatcaatctagtcaggagttgatttggttttgggtcttgttcctcttagagttaatttcagtgcaccataggtttcctgctcatctagcattactttgtgtttcggattggactggttcagcagcttttctcagtatctgctgtatcctcacctttaagtttcccttcaaattccgttcagtcccccagaagacactgctttgacctgttactcaacaattgttagcctagttgggagtggggatgaggatggagaagcatactctgtcattctgatgaagctcagtcacaggttgacactgtttctgggtcttcatggctggaaccttcttaatgatcctgtccaaacttcaggtgtacatctaaatcctccacatatttttttcctcttttttgttttcccatctccaaagttcaattagttttaccagtgtcccaagggcaatgatattccttatcttttcctttgtagttttaggttttgttacacgggagagacgggga

SEQ ID NO: 409204 - DNA, 1316 bp, Homo sapiens
acacctgcccacggcagcctgcctcgccctcaagcgcctcaaagcttcctaagcgcttacattggtcttgggacagccgactttggcttctttgtttgtttgagggaccgcggaagtggcggggaatgtgcccccgcttgagaccgcttattgtgagccctcaacggaaatcctgcacggaaggcaaccgcctccccgctcgcgttagaaggcttcatttgctctgagttatcattgagaactaaatggagaagaaaagaactgaaggcctgaagatatgtcatctgtagaaaagatggacatctgaaatcatcaaacccttgagagaaacagccctcattcttttatgagacaacctggaagaaaacaggactctgaagatttgtctccatattctctggaaagatgtactctgtttgcaataagagggagccacatggtttattagatggttattaattgagcattctgtgcaaagaagtttgtgccttagttatattgaaaagaagaaaatctctccagtttcagaaacactggccttttggatactgaggagttggaaatggaaaggggattttaatgagtttctcggcaatgaggctagagaaaatattatccatctccccctgttctccaattcagcagctcggactcctgttttcatcacagtcctgttagataattacagccccaaaggcctcctgttccttctttctgtgttccctgaatcttctttcccagagccaggacctcttggaaattctcagcctctgttagttgcccgctctgggagcccgactcctcacatccgtcatctctttcttctcccccttcacctgctgtagtgtccccactgtctctctttacctcagctccttaccattcctttccctctacacccttttcctttggttcatagtcaggatgtgctagttgcattcaagccctttttgatactaagaattcagggggacaaatccaaaccctggagactactgtcttccccttagtgatgctaatgaatataattcctgatctgaaattacctgcactttatttggctccatctacttttctgccacttactccctgtataaccataggctacgtaccctacctctctctgggttttttttactcctcagttaaaaggaggattaaaatggcaatcacaacaccttgctacagatacgttaggaagattaaatgggataacatgcagggtgcctagccttcctggcatatagtaaatgtctataaaatataacaagtgtcatgtattattattaaattgtatctacctggtagaaaaaaaa

SEQ ID NO: 409205 - DNA, 662 bp, Homo sapiens
acacctgcccacggcagcctgcctcgccctcaagcgcctcaaagcttcctaagcgcttacattggtcttgggacagccgactttggcttctttgtttgtttgagggaccgcggaagtggcggggaatgtgcccccgcttgagaccgcttattgtgagccctcaacggaaatcctgcacggaaggcaaccgcctccccgctcgcgttagaaggcttcatttgctctgagttatcattgagaactaaatggagaagaaaagaactgaaggcctgaagatatgtcatctgtagaaaagatggacatctgaaatcatcaaacccttgagagaaacagccctcattcttttatgagacaacctggaagaaaacaggactctgaagatttgtctccatattctctggaaagatgtactctgtttgcaataagagggagccacatggtttattagatggttattaattgagcattctgtgcaaagaagtttgtgccttagatttagaattccaccctcagttggaatacagatgatccctaacaagtcacatgaaaaaatgaattgtggagccagaagagtgagttcttggagaactaagggccagagacctgtgagcaagatttgataattttataaaaattaaaagacgatttgaaatgttaaaagt

SEQ ID NO: 409206 - DNA, 184 bp, Homo sapiens
aaaggtgagctgaacttttctctgtctgaacatactttgggtttacaatgagacatttacgtatttgtataaatcggttatactctgagctaatgtgaacacaaacttggtataaatacagatgactccctctctgctgctgtgggaggttcaactgacacctggggctcagaccagtcttgtt

SEQ ID NO: 409207 - DNA, 851 bp, Homo sapiens
acacctgcccacggcagcctgcctcgccctcaagcgcctcaaagcttcctaagcgcttacattggtcttgggacagccgactttggcttctttgtttgtttgagggaccgcggaagtggcggggaatgtgcccccgcttgagaccgcttattgtgagccctcaacggaaatcctgcacggaaggcaaccgcctccccgctcgcgttagaaggcttcatttgctctgagttatcattgagaactaaatggagaagaaaagaactgaaggcctgaagatatgtcatctgtagaaaagccccatccttctgcaggtggcctcttctcaagctttcttggcaaatcaagagcttctgccttttggaggacatcctcttgacctcccacccatatcagctcttagaggacattccacaggaacattgccttcttgtcctccagtattttttatggaaacagaaattaggttatcttccttatgctctagatggacatctgaaatcatcaaacccttgagagaaacagccctcattcttttatgagacaacctggaagaaaacaggactctgaagatttgtctccatattctctggaaagatgtactctgtttgcaataagagggagccacatggtttattagatggttattaattgagcattctgtgcaaagaagtttgtgccttagatttagaattccaccctcagttggaatacagatgatccctaacaagtcacatgaaaaaatgaattgtggagccagaagagtgagttcttggagaactaagggccagagacctgtgagcaagatttgataattttataaaaattaaaagacgatttgaaatgttaaaagt

SEQ ID NO: 409208 - DNA, 112 bp, Homo sapiens
tcaattttaaggtaagagtaaatggaaatgaaatattggtataatattctataccaattgtgtgcctcaaattgtacattaaggaaacaagaaaaacaacttcagtgtatga

SEQ ID NO: 409209 - DNA, 2506 bp, Homo sapiens
acgcagtgggcgtcttgcacgtgcagccgtttaagtcgcgtgggcgcctgcgagggcttgggagagcaagccgcggagagaacttgaagccaccatgggagatgaagattgggaagcagaaatcaaccctcatatgtcttcctatgttcccatatttgagaaggataggtattctggagaaaatggagacaattttaacaggactccagcttcatcatcagaaatggatgatggaccttctcgaagagatcatttcatgaaaagtggatttgcctctgggcggaattttggaaacagagatgctggtgagtgtaataagcgagataatacatccacaatgggtggttttggagttggaaagagttttggaaacagaggtttttcaaacagcaggtttgaagatggtgatagctctggtttctggagagagtctagtaatgactgcgaagataatccaacacggaacagagggttttccaagagaggcggctatcgagatggaaataattcagaagcttcagggccatacagaagaggtggaagaggtagtttccgaggttgccgtggaggatttggtctaggaagtccaaataatgacttagacccagacgaatgtatgcagcgcactggtggcctttttggttctagaagaccagtattaagtggcacaggtaatggtgatacttctcaaagcagaagtggcagtggaagtgaacgaggtggttacaaaggtttaaatgaagaagtaataacaggctctggaaagaattcttggaagtcagaagcagaaggaggagaaagtagtgatactcaaggaccaaaagtgacctacataccccctcctccacctgaggatgaggactccatctttgcacattatcagacaggcataaacttcgacaaatacgacactattcttgtggaagtgtctggacatgatgcaccaccagcaattctgacttttgaagaagctaatctctgtcagacactgaataacaacattgctaaagctggttatactaagcttactcctgtgcaaaaatacagtattcctatcatacttgcaggacgagatttgatggcttgcgctcaaacagggtctgggaagactgcggcttttctcctaccaattttggctcatatgatgcatgatggaataactgccagtcgttttaaagagttgcaggaaccagagtgtattattgtagcaccaactcgagaattggtcaaccagatttatttggaagccagaaaattttcttttgggacttgtgtaagagctgttgttatatatgggggaacccagctgggacattcaattcgacaaatagtacaaggctgtaatatattatgtgctactcctggaagactgatggatatcataggcaaagaaaagattggtctcaaacagatcaaatacttagttttggatgaagctgatcgcatgttggatatgggttttggtccagaaatgaagaagttaatttcttgcccaggaatgccatcaaaggaacagcgccaaacccttatgttcagtgcaacttttccagaggaaattcaaaggttggctgcagagtttttaaagtcaaattatctgtttgttgctgttggacaagtgggtggagcatgtagagatgttcagcagaccgttctccaagttggccagttctcaaaaagagaaaagctcgttgaaattctgcgaaacataggggatgaaagaactatggtctttgttgaaactaagaaaaaagcagattttattgcaacttttctttgtcaagaaaaaatatcaactacaagtattcatggtgatcgggaacagagagagcgggagcaagctcttggagattttcgctttggaaagtgcccagttcttgttgctacttcagtagctgccagagggctggatattgaaaatgtgcaacatgttatcaattttgatcttccttctaccattgatgaatatgttcatcgaattgggcgtactggtcgttgtgggaatactggcagagcaatttccttttttgatcttgaatcggataaccatttagcacagcctctagtaaaagtattgacagatgctcaacaggatgttcctgcatggttggaagaaattgcctttagtacatacattcctggcttcagtggtagtacaagaggaaacgtgtttgcatcagttgataccagaaagggcaagagcactttgaacacagctgggttttcttcttcacaagctcccaatccagtagatgatgagtcatgggattaaagccaaaacatccttcaagtctgtggttttgatgcagagaagaaaatagttttgatttttgagtttttaacagaagtataaaacttaacattctcatagctcctgtccttgtattctcactcctacacttaaaaaaaaaatccttactgactagttatgtgagatgctaaaacttacaacattgcagttactgatacaaatggtgttaactgggaatattaaagcattctaaatgtc

SEQ ID NO: 409210 - DNA, 636 bp, Homo sapiens
acgcagtgggcgtcttgcacgtgcagccgtttaagtcgcgtgggcgcctgcgagggcttgggagagcaagccgcggagagaacttgaagccaccatgggagatgaagattgggaagcagaaatcaaccctcatatgtcttcctatgttcccatatttgagaaggataggtattctggagaaaatggagacaattttaacaggactccagcttcatcatcagaaatggatgatggaccttctcgaagagatcatttcatgaaaagtggatttgcctctgggcggaattttggaaacagagatgctggtgagtgtaataagcgagataatacatccacaatgggtggttttggagttggaaagagttttggaaacagaggtttttcaaacagcaggtttgaagatggtgatagctctggtttctggagagagtctagtaatgactgcgaagataatccaacacggaacagagggttttccaagagaggcggtaaggaccacattttggaacaatttgtacttaacacagagacactaaactggtaaaactgattttgaaggagctggatgaaaaacactgatcgtgaaaacctttgaagaaaaatactttggtatatgttttctgcttttaatatttg

SEQ ID NO: 409211 - DNA, 2823 bp, Homo sapiens
acgcagtgggcgtcttgcacgtgcagccgtttaagtcgcgtgggcgcctgcgagggcttgggagagcaagccgcggagagaacttgaagccaccatgggagatgaagattgggaagcagaaatcaaccctcatatgtcttcctatgttcccatatttgagaaggataggtattctggagaaaatggagacaattttaacaggactccagcttcatcatcagaaatggatgatggaccttctcgaagagatcatttcatgaaaagtggatttgcctctgggcggaattttggaaacagagatgctggtgagtgtaataagcgagataatacatccacaatgggtggttttggagttggaaagagttttggaaacagaggtttttcaaacagcaggtttgaagatggtgatagctctggtttctggagagagtctagtaatgactgcgaagataatccaacacggaacagagggttttccaagagaggcgataatgacttagacccagacgaatgtatgcagcgcactggtggcctttttggttctagaagaccagtattaagtggcacaggtaatggtgatacttctcaaagcagaagtggcagtggaagtgaacgaggtggttacaaaggtttaaatgaagaagtaataacaggctctggaaagaattcttggaagtcagaagcagaaggaggagaaagtagtgatactcaaggaccaaaagtgacctacataccccctcctccacctgaggatgaggactccatctttgcacattatcagacaggcataaacttcgacaaatacgacactattcttgtggaagtgtctggacatgatgcaccaccagcaattctgacttttgaagaagctaatctctgtcagacactgaataacaacattgctaaagctggttatactaagcttactcctgtgcaaaaatacagtattcctatcatacttgcaggacgagatttgatggcttgcgctcaaacagggtctgggaagactgcggcttttctcctaccaattttggctcatatgatgcatgatggaataactgccagtcgttttaaagagttgcaggaaccagagtgtattattgtagcaccaactcgagaattggtcaaccagatttatttggaagccagaaaattttcttttgggacttgtgtaagagctgttgttatatatgggggaacccagctgggacattcaattcgacaaatagtacaaggctgtaatatattatgtgctactcctggaagactgatggatatcataggcaaagaaaagattggtctcaaacagatcaaatacttagttttggatgaagctgatcgcatgttggatatgggttttggtccagaaatgaagaagttaatttcttgcccaggaatgccatcaaaggaacagcgccaaacccttatgttcagtgcaacttttccagaggaaattcaaaggttggctgcagagtttttaaagtcaaattatctgtttgttgctgttggacaagtgggtggagcatgtagagatgttcagcagaccgttctccaagttggccagttctcaaaaagagaaaagctcgttgaaattctgcgaaacataggggatgaaagaactatggtctttgttgaaactaagaaaaaagcagattttattgcaacttttctttgtcaagaaaaaatatcaactacaagtattcatggtgatcgggaacagagagagcgggagcaagctcttggagattttcgctttggaaagtgcccagttcttgttgctacttcagtagctgccagagggctggatattgaaaatgtgcaacatgttatcaattttgatcttccttctaccattgatgaatatgttcatcgaattgggcgtactggtcgttgtgggaatactggcagagcaatttccttttttgatcttgaatcggataaccatttagcacagcctctagtaaaagtattgacagatgctcaacaggatgttcctgcatggttggaagaaattgcctttagtacatacattcctggcttcagtggtagtacaagaggaaacgtgtttgcatcagttgataccagaaagggcaagagcactttgaacacagctgggttttcttcttcacaagctcccaatccagtagatgatgagtcatgggattaaagccaaaacatccttcaagtctgtggttttgatgcagagaagaaaatagttttgatttttgagtttttaacagaagtataaaacttaacattctcatagctcctgtccttgtattctcactcctacacttaaaaaaaaaatccttactgactagttatgtgagatgctaaaacttacaacattgcagttactgatacaaatggtgttaactgggaatattaaagcattctaaatgtcaaaaaaaaaaaaaaaaaaaagaaaaaaaaaaaaaaaaaaaaaaaaaaaaaaaaaaaaaaaaaaaaaagaaaaaaacaaaacagaagagaggcacgcacaaaagaaacaacatacacgacaaggagcggcagagcaccacacacaaacagaaacacagacgaaacagaagaacgcagagagcgagcaagaacacgggatcgacagagcgacacagagcgagcccagacacaccccgccaggaggaggaggagagcacacggcaggacgcgagagaaggacaaggaacggaggaagggcggaggcacgaggagcagagcagaaccaggcagcgcgccgagggagggggagaaaacagcaagagaaaggcgaaagaaaaaacaacgaagaggaacaagacagaaggagcacaaaacgcaagc

SEQ ID NO: 409212 - DNA, 2865 bp, Homo sapiens
acgcagtgggcgtcttgcacgtgcagccgtttaagtcgcgtgggcgcctgcgagggcttgggagagcaagccgcggagagaacttgaagccaccatgggagatgaagattgggaagcagaaatcaaccctcatatgtcttcctatgttcccatatttgagaaggataggtattctggagaaaatggagacaattttaacaggactccagcttcatcatcagaaatggatgatggaccttctcgaagagatcatttcatgaaaagtggatttgcctctgggcggaattttggaaacagagatgctggtgagtgtaataagcgagataatacatccacaatgggtggttttggagttggaaagagttttggaaacagaggtttttcaaacagcaggtttgaagatggtgatagctctggtttctggagaggctatcgagatggaaataattcagaagcttcagggccatacagaagaggtggaagaggtagtttccgaggttgccgtggaggatttggtctaggaagtccaaataatgacttagacccagacgaatgtatgcagcgcactggtggcctttttggttctagaagaccagtattaagtggcacaggtaatggtgatacttctcaaagcagaagtggcagtggaagtgaacgaggtggttacaaaggtttaaatgaagaagtaataacaggctctggaaagaattcttggaagtcagaagcagaaggaggagaaagtagtgatactcaaggaccaaaagtgacctacataccccctcctccacctgaggatgaggactccatctttgcacattatcagacaggcataaacttcgacaaatacgacactattcttgtggaagtgtctggacatgatgcaccaccagcaattctgacttttgaagaagctaatctctgtcagacactgaataacaacattgctaaagctggttatactaagcttactcctgtgcaaaaatacagtattcctatcatacttgcaggacgagatttgatggcttgcgctcaaacagggtctgggaagactgcggcttttctcctaccaattttggctcatatgatgcatgatggaataactgccagtcgttttaaagagttgcaggaaccagagtgtattattgtagcaccaactcgagaattggtcaaccagatttatttggaagccagaaaattttcttttgggacttgtgtaagagctgttgttatatatgggggaacccagctgggacattcaattcgacaaatagtacaaggctgtaatatattatgtgctactcctggaagactgatggatatcataggcaaagaaaagattggtctcaaacagatcaaatacttagttttggatgaagctgatcgcatgttggatatgggttttggtccagaaatgaagaagttaatttcttgcccaggaatgccatcaaaggaacagcgccaaacccttatgttcagtgcaacttttccagaggaaattcaaaggttggctgcagagtttttaaagtcaaattatctgtttgttgctgttggacaagtgggtggagcatgtagagatgttcagcagaccgttctccaagttggccagttctcaaaaagagaaaagctcgttgaaattctgcgaaacataggggatgaaagaactatggtctttgttgaaactaagaaaaaagcagattttattgcaacttttctttgtcaagaaaaaatatcaactacaagtattcatggtgatcgggaacagagagagcgggagcaagctcttggagattttcgctttggaaagtgcccagttcttgttgctacttcagtagctgccagagggctggatattgaaaatgtgcaacatgttatcaattttgatcttccttctaccattgatgaatatgttcatcgaattgggcgtactggtcgttgtgggaatactggcagagcaatttccttttttgatcttgaatcggataaccatttagcacagcctctagtaaaagtattgacagatgctcaacaggatgttcctgcatggttggaagaaattgcctttagtacatacattcctggcttcagtggtagtacaagaggaaacgtgtttgcatcagttgataccagaaagggcaagagcactttgaacacagctgggttttcttcttcacaagctcccaatccagtagatgatgagtcatgggattaaagccaaaacatccttcaagtctgtggttttgatgcagagaagaaaatagttttgatttttgagtttttaacagaagtataaaacttaacattctcatagctcctgtccttgtattctcactcctacacttaaaaaaaaaatccttactgactagttatgtgagatgctaaaacttacaacattgcagttactgatacaaatggtgttaactgggaatattaaagcattctaaatgtcaaaaaaaaaaaaaaaaaaaagaaaaaaaaaaaaaaaaaaaaaaaaaaaaaaaaaaaaaaaaaaaaaagaaaaaaacaaaacagaagagaggcacgcacaaaagaaacaacatacacgacaaggagcggcagagcaccacacacaaacagaaacacagacgaaacagaagaacgcagagagcgagcaagaacacgggatcgacagagcgacacagagcgagcccagacacaccccgccaggaggaggaggagagcacacggcaggacgcgagagaaggacaaggaacggaggaagggcggaggcacgaggagcagagcagaaccaggcagcgcgccgagggagggggagaaaacagcaagagaaaggcgaaagaaaaaacaacgaagaggaacaagacagaaggagcacaaaacgcaagc

SEQ ID NO: 409213 - DNA, 391 bp, Homo sapiens
atattaaagcattctaaatgtctttcttatttctggtatattctttagggggcttagacatgtttaatgtttaaatgccaagtcttactatagtgtttattgatcttataaaacaagcaaataggatatgatacacttttggttaaaaattactgggtctcatttttacttgagtctttaaaacagtagtgtgtcactataatgtgataatctttaagagaaagtagaatacttaagcctttcaaagtgattttgatttttagatcatcagatgtatgatgaaaatggttaaatgtttgtgatgggagctctgtactcaatggcataacaatgtttatttttataatatacaatctttccttgaaataaaggatgaaacacttttccctta

SEQ ID NO: 409214 - DNA, 2446 bp, Homo sapiens
acgcagtgggcgtcttgcacgtgcagccgtttaagtcgcgtgggcgcctgcgagggcttgggagagcaagccgcggagagaacttgaagccaccatgggagatgaagattgggaagcagaaatcaaccctcatatgtcttcctatgttcccatatttgagaaggataggtattctggagaaaatggagacaattttaacaggactccagcttcatcatcagaaatggatgatggaccttctcgaagagatcatttcatgaaaagtggatttgcctctgggcggaattttggaaacagagatgctggtgagtgtaataagcgagataatacatccacaatgggtggttttggagttggaaagagttttggaaacagaggtttttcaaacagcaggtttgaagatggtgatagctctggtttctggagagagtctagtaatgactgcgaagataatccaacacggaacagagggttttccaagagaggcggctatcgagatggaaataattcagaagcttcagggccatacagaagaggtggaagaggtagtttccgaggttgccgtggaggatttggtctaggaagtccaaataatgacttagacccagacgaatgtatgcagcgcactggtggcctttttggttctagaagaccagtattaagtggcacaggtaatggtgatacttctcaaagcagaagtggcagtggaagtgaacgaggtggttacaaaggtttaaatgaagaagtaataacaggctctggaaagaattcttggaagtcagaagcagaaggaggagaaagtagtgatactcaaggaccaaaagtgacctacataccccctcctccacctgaggatgaggactccatctttgcacattatcagacaggcataaacttcgacaaatacgacactattcttgtggaagtgtctggacatgatgcaccaccagcaattctgacttttgaagaagctaatctctgtcagacactgaataacaacattgctaaagctggttatactaagcttactcctgtgcaaaaatacagtattcctatcatacttgcaggacgagatttgatggcttgcgctcaaacagggtctgggaagactgcggcttttctcctaccaattttggctcatatgatgcatgatggaataactgccagtcgttttaaagagttgcaggaaccagagtgtattattgtagcaccaactcgagaattggtcaaccagatttatttggaagccagaaaattttcttttgggacttgtgtaagagctgttgttatatatgggggaacccagctgggacattcaattcgacaaatagtacaaggctgtaatatattatgtgctactcctggaagactgatggatatcataggcaaagaaaagattggtctcaaacagatcaaatacttagttttggatgaagctgatcgcatgttggatatgggttttggtccagaaatgaagaagttaatttcttgcccaggaatgccatcaaaggaacagcgccaaacccttatgttcagtgcaacttttccagaggaaattcaaaggttggctgcagagtttttaaagtcaaattatctgtttgttgctgttggacaagtgggtggagcatgtagagatgttcagcagaccgttctccaagttggccagttctcaaaaagagaaaagctcgttgaaattctgcgaaacataggggatgaaagaactatggtctttgttgaaactaagaaaaaagcagattttattgcaacttttctttgtcaagaaaaaatatcaactacaagtattcatggtgatcgggaacagagagagcgggagcaagctcttggagattttcgctttggaaagtgcccagttcttgttgctacttcagtagctgccagagggctggatattgaaaatgtgcaacatgttatcaattttgatcttccttctaccattgatgaatatgttcatcgaattgggcgtactggtcgttgtgggaatactggcagagcaatttccttttttgatcttgaatcggataaccatttagcacagcctctagtaaaagtattgacagatgctcaacaggatgttcctgcatggttggaagaaattgcctttagtacatacattcctggcttcagtggtagtacaagaggaaacgtgtttgcatcagttgataccagaaagggcaagagcactttgaacacagctgggttttcttcttcacaagctcccaatccagtagatgatgagtcatgggattaaagccaaaacatccttcaagtctgtggttttgatgcagagaagaaaatagttttgatttttgagtttttaacagaagtataaaacttaacattctcatagctcctgtccttgtattctcactcctacattactgatacaaatggtgttaactgggaatattaaagcattctaaatgtc

SEQ ID NO: 409215 - DNA, 2925 bp, Homo sapiens
acgcagtgggcgtcttgcacgtgcagccgtttaagtcgcgtgggcgcctgcgagggcttgggagagcaagccgcggagagaacttgaagccaccatgggagatgaagattgggaagcagaaatcaaccctcatatgtcttcctatgttcccatatttgagaaggataggtattctggagaaaatggagacaattttaacaggactccagcttcatcatcagaaatggatgatggaccttctcgaagagatcatttcatgaaaagtggatttgcctctgggcggaattttggaaacagagatgctggtgagtgtaataagcgagataatacatccacaatgggtggttttggagttggaaagagttttggaaacagaggtttttcaaacagcaggtttgaagatggtgatagctctggtttctggagagagtctagtaatgactgcgaagataatccaacacggaacagagggttttccaagagaggcggctatcgagatggaaataattcagaagcttcagggccatacagaagaggtggaagaggtagtttccgaggttgccgtggaggatttggtctaggaagtccaaataatgacttagacccagacgaatgtatgcagcgcactggtggcctttttggttctagaagaccagtattaagtggcacaggtaatggtgatacttctcaaagcagaagtggcagtggaagtgaacgaggtggttacaaaggtttaaatgaagaagtaataacaggctctggaaagaattcttggaagtcagaagcagaaggaggagaaagtagtgatactcaaggaccaaaagtgacctacataccccctcctccacctgaggatgaggactccatctttgcacattatcagacaggcataaacttcgacaaatacgacactattcttgtggaagtgtctggacatgatgcaccaccagcaattctgacttttgaagaagctaatctctgtcagacactgaataacaacattgctaaagctggttatactaagcttactcctgtgcaaaaatacagtattcctatcatacttgcaggacgagatttgatggcttgcgctcaaacagggtctgggaagactgcggcttttctcctaccaattttggctcatatgatgcatgatggaataactgccagtcgttttaaagagttgcaggaaccagagtgtattattgtagcaccaactcgagaattggtcaaccagatttatttggaagccagaaaattttcttttgggacttgtgtaagagctgttgttatatatgggggaacccagctgggacattcaattcgacaaatagtacaaggctgtaatatattatgtgctactcctggaagactgatggatatcataggcaaagaaaagattggtctcaaacagatcaaatacttagttttggatgaagctgatcgcatgttggatatgggttttggtccagaaatgaagaagttaatttcttgcccaggaatgccatcaaaggaacagcgccaaacccttatgttcagtgcaacttttccagaggaaattcaaaggttggctgcagagtttttaaagtcaaattatctgtttgttgctgttggacaagtgggtggagcatgtagagatgttcagcagaccgttctccaagttggccagttctcaaaaagagaaaagctcgttgaaattctgcgaaacataggggatgaaagaactatggtctttgttgaaactaagaaaaaagcagattttattgcaacttttctttgtcaagaaaaaatatcaactacaagtattcatggtgatcgggaacagagagagcgggagcaagctcttggagattttcgctttggaaagtgcccagttcttgttgctacttcagtagctgccagagggctggatattgaaaatgtgcaacatgttatcaattttgatcttccttctaccattgatgaatatgttcatcgaattgggcgtactggtcgttgtgggaatactggcagagcaatttccttttttgatcttgaatcggataaccatttagcacagcctctagtaaaagtattgacagatgctcaacaggatgttcctgcatggttggaagaaattgcctttagtacatacattcctggcttcagtggtagtacaagaggaaacgtgtttgcatcagttgataccagaaagggcaagagcactttgaacacagctgggttttcttcttcacaagctcccaatccagtagatgatgagtcatgggattaaagccaaaacatccttcaagtctgtggttttgatgcagagaagaaaatagttttgatttttgagtttttaacagaagtataaaacttaacattctcatagctcctgtccttgtattctcactcctacacttaaaaaaaaaatccttactgactagttatgtgagatgctaaaacttacaacattgcagttactgatacaaatggtgttaactgggaatattaaagcattctaaatgtcaaaaaaaaaaaaaaaaaaaagaaaaaaaaaaaaaaaaaaaaaaaaaaaaaaaaaaaaaaaaaaaaaagaaaaaaacaaaacagaagagaggcacgcacaaaagaaacaacatacacgacaaggagcggcagagcaccacacacaaacagaaacacagacgaaacagaagaacgcagagagcgagcaagaacacgggatcgacagagcgacacagagcgagcccagacacaccccgccaggaggaggaggagagcacacggcaggacgcgagagaaggacaaggaacggaggaagggcggaggcacgaggagcagagcagaaccaggcagcgcgccgagggagggggagaaaacagcaagagaaaggcgaaagaaaaaacaacgaagaggaacaagacagaaggagcacaaaacgcaagc

SEQ ID NO: 409216 - DNA, 2847 bp, Homo sapiens
acgcagtgggcgtcttgcacgtgcagccgtttaagtcgcgtgggcgcctgcgagggcttgggagagcaagccgcggagagaacttgaagccaccatgggagatgaagattgggaagcagaaatcaaccctcatatgtcttcctatgttcccatatttgagaaggataggtattctggagaaaatggagacaattttaacaggactccagcttcatcatcagaaatggatgatggaccttctcgaagagatcatttcatgaaaagtggatttgcctctgggcggaattttggaaacagaggtttttcaaacagcaggtttgaagatggtgatagctctggtttctggagagagtctagtaatgactgcgaagataatccaacacggaacagagggttttccaagagaggcggctatcgagatggaaataattcagaagcttcagggccatacagaagaggtggaagaggtagtttccgaggttgccgtggaggatttggtctaggaagtccaaataatgacttagacccagacgaatgtatgcagcgcactggtggcctttttggttctagaagaccagtattaagtggcacaggtaatggtgatacttctcaaagcagaagtggcagtggaagtgaacgaggtggttacaaaggtttaaatgaagaagtaataacaggctctggaaagaattcttggaagtcagaagcagaaggaggagaaagtagtgatactcaaggaccaaaagtgacctacataccccctcctccacctgaggatgaggactccatctttgcacattatcagacaggcataaacttcgacaaatacgacactattcttgtggaagtgtctggacatgatgcaccaccagcaattctgacttttgaagaagctaatctctgtcagacactgaataacaacattgctaaagctggttatactaagcttactcctgtgcaaaaatacagtattcctatcatacttgcaggacgagatttgatggcttgcgctcaaacagggtctgggaagactgcggcttttctcctaccaattttggctcatatgatgcatgatggaataactgccagtcgttttaaagagttgcaggaaccagagtgtattattgtagcaccaactcgagaattggtcaaccagatttatttggaagccagaaaattttcttttgggacttgtgtaagagctgttgttatatatgggggaacccagctgggacattcaattcgacaaatagtacaaggctgtaatatattatgtgctactcctggaagactgatggatatcataggcaaagaaaagattggtctcaaacagatcaaatacttagttttggatgaagctgatcgcatgttggatatgggttttggtccagaaatgaagaagttaatttcttgcccaggaatgccatcaaaggaacagcgccaaacccttatgttcagtgcaacttttccagaggaaattcaaaggttggctgcagagtttttaaagtcaaattatctgtttgttgctgttggacaagtgggtggagcatgtagagatgttcagcagaccgttctccaagttggccagttctcaaaaagagaaaagctcgttgaaattctgcgaaacataggggatgaaagaactatggtctttgttgaaactaagaaaaaagcagattttattgcaacttttctttgtcaagaaaaaatatcaactacaagtattcatggtgatcgggaacagagagagcgggagcaagctcttggagattttcgctttggaaagtgcccagttcttgttgctacttcagtagctgccagagggctggatattgaaaatgtgcaacatgttatcaattttgatcttccttctaccattgatgaatatgttcatcgaattgggcgtactggtcgttgtgggaatactggcagagcaatttccttttttgatcttgaatcggataaccatttagcacagcctctagtaaaagtattgacagatgctcaacaggatgttcctgcatggttggaagaaattgcctttagtacatacattcctggcttcagtggtagtacaagaggaaacgtgtttgcatcagttgataccagaaagggcaagagcactttgaacacagctgggttttcttcttcacaagctcccaatccagtagatgatgagtcatgggattaaagccaaaacatccttcaagtctgtggttttgatgcagagaagaaaatagttttgatttttgagtttttaacagaagtataaaacttaacattctcatagctcctgtccttgtattctcactcctacacttaaaaaaaaaatccttactgactagttatgtgagatgctaaaacttacaacattgcagttactgatacaaatggtgttaactgggaatattaaagcattctaaatgtcaaaaaaaaaaaaaaaaaaaagaaaaaaaaaaaaaaaaaaaaaaaaaaaaaaaaaaaaaaaaaaaaaagaaaaaaacaaaacagaagagaggcacgcacaaaagaaacaacatacacgacaaggagcggcagagcaccacacacaaacagaaacacagacgaaacagaagaacgcagagagcgagcaagaacacgggatcgacagagcgacacagagcgagcccagacacaccccgccaggaggaggaggagagcacacggcaggacgcgagagaaggacaaggaacggaggaagggcggaggcacgaggagcagagcagaaccaggcagcgcgccgagggagggggagaaaacagcaagagaaaggcgaaagaaaaaacaacgaagaggaacaagacagaaggagcacaaaacgcaagc

SEQ ID NO: 409217 - DNA, 481 bp, Homo sapiens
aatttaaccagttccctactggtggatgtctaggtttccccgatgttttgctattaaaaacacacatggtacacgtttttctagatcgggcagggtttgcccatctccacttcaagcagcacaaccaccatctgccagtgttggggtttactctacagtcagcaaacactgttggcacatccagtcagagaaactgaaaacagaaagcagaaatggcttacactggactaattttagaatttctaagtacatttaagtgatgactcatcccacttaaattcaaagctgtttgttgtgccatctggctcatcagaacatgaaagacttctcctgcaacctggaaaaaggccagagaggaagacgaatggaggagtcaaccccatgggaatgctgactgagtgttagctccccgtggacaggaatgtcactgcatgaataggctgcagtatgtctgggcctgtttttttttcataaaatgttc

SEQ ID NO: 409218 - DNA, 300 bp, Homo sapiens
catgcatccatttttattggcttgttcataaatgttaactatgctttgttctttagcgctgaaagtaagcactaatgctacccaacaggagtgaaatttttagaaggtgctcttatcaagaatagttggttaagaaaagaaaatctgggttcccagacctgggctcagatccaactctgcaacttagtagaaagtttcttaagctttctaaacctcagctgtttcatttctaaaaggggattgttctaagaattaaatataaacttcttacctcatttcttggtactcatttttttctgg

SEQ ID NO: 409219 - DNA, 283 bp, Homo sapiens
tttaattttaagaatatagtttgacatgaatatttatagggaaatacttagatttatggggaatattgtagggaaaaaatatttctaagcttgggtgtgatcaccgatccaactacataaaaatttgaaaagcacaaagaacattacatcttgggaaatgattgcagtaaatataaaaataaaaatgttgtaaagtattatatgaaaagaaaagcacaataccttagtgaatgagaagaactctaaaaagcacttgataaatgcatacacaaaatgaagaccg

SEQ ID NO: 409220 - DNA, 520 bp, Homo sapiens
caggcccctcttgattcaattttagtccatgcctttccatgtatttaaattatataagtgttggccaggtgtggtggctcacacctgtaatcccagcacttcgggaggctgaggcaggaggatcacttgagcccaggagttcgaaccaaccttgggcagcatagtgagaccccttctcttaataattttttttgaaaataattttttaaaaattacaaatatggaccagacacctgggaggattacctcacgcctgtaatcccagcactttgggaggctgaggtgggtggatcacctgaggtcaggagtttgagactatcctggccaacatggtgaaaccctgtctctactaaaaatacaaaaattagccagatgtggtggtgggtacctgtaatcccagctactcgggaggctgagacaggagaatcacttgaacctgggaggcggaggttgcagtgagctgagatcacgtcattgcactccagcctgggtgactacagtgagactccctctcaaaaaa

SEQ ID NO: 409221 - DNA, 968 bp, Homo sapiens
agcgggcgctgtcagaaccggattgggccgcggcggggacggaagcggcccctgggcccgaggggctggagccgggccggggcgatgtggagcgcgggccgcggcggggctgcctggccggtgctgttggggctgctgctggcgctgttagtgccgggcggtggtgccgccaagaccggtgcggagctcgtgacctgcgggtcggtgctgaagctgctcaatacgcaccaccgcgtgcggctgcactcgcacgacatcaaatacggatccggcagcggccagcaatcggtgaccggcgtagaggcgtcggacgacgccaatagctactggcggatccgcggcggctcggagggcgggtgcccgcgcgggtccccggtgcgctgcgggcaggcggtgaggctcacgcatgtgcttacgggcaagaacctgcacacgcaccacttcccgtcgccgctgtccaacaaccaggaggtgagtgcctttggggaagacggcgagggcgacgacctggacctatggacagtgcgctgctctggacagcactgggagcgtgaggctgctgtgcgcttccagcatgtgggcacctctgtgttcctgtcagtcacgggtgagcagtatggaagccccatccgtgggcagcatgaggtccacggcatgcccagtgccaacacgcacaatacgtggaaggccatggaaggcatcttcatcaagcctagtgtggagccctctgcaggtcacgatgaactctgagtgtgtggatggatgggtggatggagggtggcaggtggggcgtctgcagggccactcttggcagagactttgggtttgtaggggtcctcaagtgcctttgtgattaaagaatgttggtctatgattgcgtttcactgtgagcctgaggatgaccaggaggtgccagcccaggcccagttgatcatttcttccccagtgcaaaacctgtctccagccca

SEQ ID NO: 409222 - DNA, 907 bp, Homo sapiens
agcgggcgctgtcagaaccggattgggccgcggcggggacggaagcggcccctgggcccgaggggctggagccgggccggggcgatgtggagcgcgggccgcggcggggctgcctggccggtgctgttggggctgctgctggcgctgttagtgccgggcggtggtgccgccaagaccggtgcggagctcgtgacctgcgggtcggtgctgaagctgctcaatacgcaccaccgcgtgcggctgcactcgcacgacatcaaatacggatccggcagcggccagcaatcggtgaccggcgtagaggcgtcggacgacgccaatagctactggcggatccgcggcggctcggagggcgggtgcccgcgcgggtccccggtgcgctgcgggcaggcggtgaggctcacgcatgtgcttacgggcaagaacctgcacacgcaccacttcccgtcgccgctgtccaacaaccaggaggtgagtgcctttggggaagacggcgagggcgacgacctggacctatggacagtgcgctgctctggacagcactgggagcgtgaggctgctgtgcgcttccagcatgtgggcacctctgtgttcctgtcagtcacgggtgagcagtatggaagccccatccgtgggcagcatgaggtccacggcatgcccagtgccaacacgcacaatacgtggaaggccatggaagatggatgggtggatggagggtggcaggtggggcgtctgcagggccactcttggcagagactttgggtttgtaggggtcctcaagtgcctttgtgattaaagaatgttggtctatgattgcgtttcactgtgagcctgaggatgaccaggaggtgccagcccaggcccagttgatcatttcttccccagtgcaaaacctgtctccagccca

SEQ ID NO: 409223 - DNA, 305 bp, Homo sapiens
ttcaagcttctaacgatgtacggggacatggaaggcatcttcatcaagcctagtgtggagccctctgcaggtcacgatgaactctgagtgtgtggatggatgggtggatggagggtggcaggtggggcgtctgcagggccactcttggcagagactttgggtttgtaggggtcctcaagtgcctttgtgattaaagaatgttggtctatgattgcgtttcactgtgagcctgaggatgaccaggaggtgccagcccaggcccagttgatcatttcttccccagtgcaaaacctgtctccagccca

SEQ ID NO: 409224 - DNA, 1194 bp, Homo sapiens
agcgggcgctgtcagaaccggattgggccgcggcggggacggaagcggcccctgggcccgaggggctggagccgggccggggcgatgtggagcgcgggccgcggcggggctgcctggccggtgctgttggggctgctgctggcgctgttagtgccgggcggtggtgccgccaagaccggtgcggagctcgtgacctgcgggtcggtgctgaagctgctcaatacgcaccaccgcgtgcggctgcactcgcacgacatcaaatacggatccggcagcggccagcaatcggtgaccggcgtagaggcgtcggacgacgccaatagctactggcggatccgcggcggctcggagggcgggtgcccgcgcgggtccccggtgcgctgcgggcaggcggtgaggctcacgcatgtgcttacgggcaagaacctgcacacgcaccacttcccgtcgccgctgtccaacaaccaggaggtgagtgcctttggggaagacggcgagggcgacgacctggacctatggacagtgcgctgctctggacagcactgggagcgtgaggctgctgtgcgcttccagcatgtgggcacctctgtgttcctgtcagtcacgggtgagcagtatggaagccccatccgtgggcagcatgaggtccacggcatgcccagtgccaacacgcacaatacgtggaaggccatggaaggcatcttcatcaagcctagtgtggagccctctgcaggtcacgatgaactctgagtgtgtggatggatgggtggatggagggtggcaggtggggcgtctgcagggccactcttggcagagactttgggtttgtaggggtcctcaagtgcctttgtgattaaagaatgttgaaaaaaaaaaaaaaaaaaaaaaaaaaaaaatgttgtgtggggcgggctgtggggccgctggagaaagagtttttttagaaaccattgcgttggggcggcggcggggcccagtgggtcattgcagaaactggggccaaaggcgtggtggcccaagagaaacccggggccatgacatcaggtggcggggagtctcccccagcaatgtaaaaaaaccggccggggggggcacacgaggcgtgttctggaaacaaatcccaagagggcggccgaagcgggccatcacggggccctatacacgagggagcccaaggcgcgtccgatctcaatg

SEQ ID NO: 409225 - DNA, 583 bp, Homo sapiens
ctgccctcatctccagggccttgacctcactggactgtgactgtcctcaggacacctgcccctcctcacctaacggactgcagggctgagcatgtgtctgaggtcacactctctgcccactcacctccttggctgacatcggttgtgtttggtgctgacactctgatcccgaagccagggagccccaaggggctgcatgaccctggggtgccccacacagttcagccctgcctggcagggacgccagtactactgtaactgcagcaggagctgcccggcctgccttctggccccacgcccacaggcgtagtcgcatcttcatcaagcctagtgtggagccctctgcaggtcacgatgaactctgagtgtgtggatggatgggtggatggagggtggcaggtggggcgtctgcagggccactcttggcagagactttgggtttgtaggggtcctcaagtgcctttgtgattaaagaatgttggtctatgattgcgtttcactgtgagcctgaggatgaccaggaggtgccagcccaggcccagttgatcatttcttccccagtgcaaaacctgtctccagccca

SEQ ID NO: 409226 - DNA, 273 bp, Homo sapiens
caatcttgaaaaagaggaacaaagtcggaggagtcacagttccttatttattttatttattcatgtttttattgttattgagatggagtctcactctgtcgcccaggctggagtgcagtggtgcaagctcagctcagtacaacctccgcctcccaggttcaagtgattgttctgcctcagcctcccaagtagccgggattatatgcatgcgccaccacacctggctaatttttatatttttagtagagatagggtttcgccatgttgggtgtt

SEQ ID NO: 409227 - DNA, 156 bp, Homo sapiens
cgtggggggggtgtaagttggtggggaaagaggccagtggagtcagaaaggtggggccttgaaggcggctgagtttgggcatgatactgtagattttaggaaaggtgaaagagttagaagcaagggaaagggtaacttaagcagatctatgccttg

SEQ ID NO: 409228 - DNA, 296 bp, Homo sapiens
ccaagaggaaggcacaattccattcatgagggatccacctctgtggtccaaataccttccattagaccccatctccaacactgaggatcaagttttaccatgaggtttagggggacaaacagtccaaactatagcaagtgtgttgtctgttatcttctttaaaccattggttgtctacagtgaattgttcaatttccacacatttgtgaattttctggtttcccttcattactaatttttagtttcatttcattgtggtcagaaaagatatttcatatgatttcagtcttttaaaa

SEQ ID NO: 409229 - DNA, 260 bp, Homo sapiens
agagaatcaaagtcactctaagaactgaggaaagctttttgtatcatgcttttttaaacagctgagttatggacagaatctaatcttttctaatccgttataccttttgaaatgtacaaatctgtcattttaggagatttttttgaggattttcctttatggatatcaaccataatatgtactatataccttattttagttattactctgtgtacatatttcactctttcattattcaaaagcactgttgataaagtggt

SEQ ID NO: 409230 - DNA, 339 bp, Homo sapiens
aggaaaaataactttaagaaaaaactagaacctcgaaggagaaattttagatttttggtccatgttaatatgcatcagatttgtatcaaaatggtatggatggtcccctgacatgaaagtaggcaaaatggagactttattttctagactgaactatttctatactggaagaaaacgtgtattccaaggctactaagtgcttgaataaggactagtcatataaaatttgtctcacttttctcaactgtacattgtaagaatttacagagagacatcttgaagaccatcaacactagcggtttactttgtaatgaaaattggcatgagggggaagtaagg

SEQ ID NO: 409231 - DNA, 267 bp, Homo sapiens
gaaacctgaatattgagaaggaactagccatgcagaatatttgcaggagaactcttaaaaaggtggaagccaggtgcggctgtttctatgaaaaagaaaagcatgactcattggcccttaaatcacactaattgttttgtatttgatgcaagaaacaagatccatgttttgtttttggattcaataatgccatatcatggccagtaattttgtcagaatagtgctgtaatttcaggtggtgaacctatggactgaagaagcagtttt

SEQ ID NO: 409232 - DNA, 774 bp, Homo sapiens
gccagatgtggtggctcatgcctgcaatcccaggactttgggaggcccagctgggaggagaggagagcttgagcccaagagtttgaggccagcctgggcaacatagtggcactttgttctccacaaaaataattaataaagcaagtaagcattcctatcactaaaagtacttaaaaaaacaaatcaagcttaaacttacaatagggggtgggagaagtgaattaactttttattttcattagtgcgtgctcatgtgaaaggagcagttaggcaatggagtgttaccactgcagccaggcaggtctagtgtagattcgtccccaaaccatggtatttgccaggcagctctgagggtatgaacaaggcatgtgcattgtgtcctgttgtgtgtaatgcgtttgtatgaagcagattctgtcagaagatgatgttggctgagatgtgggccagctgtacttcactgcttcattacaagggtaaggctggccaggtgcgatggctcacgcctgtcatcccagcactttgggaggccaaggtgggtggatcacttgagttcaggagctcaagagcagcctggccaacatggcaaaaccctatctctactaaacatacaaaacaaaaaaaatagccgggtgtggtggagcacctgtaaacccagctgctcgggaggctgaggtgggcaaatcacatgaacccaggagttggaggttgcagtgagccaagatggcaccaccactgcactccagcctgagcaacagagtgagactccgtctc

SEQ ID NO: 409233 - DNA, 300 bp, Homo sapiens
cccttcacagaaggaaggtggaaaaagctcacgtgaacgttgctttcctgtccttggacttctgacattcctcgggccagccctcagcagtgagccaacccgcaagtcctgggatccagtgggaaggcagctgtcctcttggatgatcctggcaccatattggaaggagtccatctgtggaggccatcagagatttgatcacctcagctgttgttcagctcctccggggactgggggaattttcgtgccattggtgttgacaatgacataatcctagctctaagtcgtctaagtgtgttt

SEQ ID NO: 409234 - DNA, 156 bp, Homo sapiens
cataatcactattaacaaggttcctggcagcagcaaggaagatggtcagagtggggagagagtgccacttccctggccctaggtcagctccaaagcaacttaccctgcagactgatgtgccatttgtgtagtctggaagcctattcgcagtcattg

SEQ ID NO: 409235 - DNA, 283 bp, Homo sapiens
cccaaatagaaagtcaaagggcttaaataaaatatgtctaggctgatttcctgccctgacatagattttattaatctgttttttcttctttatctttcaacgtttctctcatatactttgcatattttcctcctgaagttttcggctttaacttcaaacttagctttttgagaaacaccgccatgtacaatattgatctttgtcttattagtcccttttatcaaagaaagaatgtaatttttgactaggtgttaatctgcagattaaaaaggatttcaaattt

SEQ ID NO: 409236 - DNA, 1887 bp, Homo sapiens
agaatatgaaatgttaatttattaaatgttgatactctatttgaaatttaatagtttctataatgtattataaaacttttccaagtatagttttttataaataataatttagtacattagttatagctgtgtttatatttacatttatctaagtcaactaaaaatacatgagccaaactgaaataaaataagaatgttttatgatggatctttgaaacatgatttcatttttttctttttctagagatacaatcttgcttgaccgtttgggacatcaatcttccacatgaagtgcaaaatttagaaaaacacattgaagtgagaaaagaattagctgaaaaaatgagacgaacatctgttgagtaagagagaaataggaattgtctttggataggaaaattattctctcctcttgtaaatatttattttaaaaatgttcacatggaaagggtactcacattttttgaaatagctcgtgtgtatgaaggaatgttattatttttaatttaaatatatgtaaaaatacttaccagtaaatgtgtattttaaagaactatttaaaacacaatgttatatttcttataaataccagttactttcgttcattaattaatgaaaataaatctgtgaagtacctaatttaagtactcatactaaaatttataaggccgataattttttgttttcttgtctgtaatggaggtaaactttattttaaattctgtgcttcagacaggactattgcttgttgatttttctagaaatctgcacggtataatgaaaatattaagacagtttcccatgtaatgtattccttcttagattgcatcgaaatgcactatcatatatgcttgtaaatattcaaatgaatttgcactaataaagtcctttgttggtatgtgaattctctttgttgctgttgcaaacagtgcatcttacacaacttcactcaattcaaaagaaaactccattaaaagtactaatgaaaaaacatgacatactgtcaaagtcctcatatctaggaaagacacagaaactctctttgtcacagaaactctctgtgtctttcctagacataatagagttgtttttcaactctatgtttgaatgtggataccctgaattttgtataattagtgtaaatacagtgttcagtccttcaagtgatatttttatttttttattcataccactagctacttgttttctaatctgcttcattctaatgcttatattcatcttttccctaaatttgtgatgctgcagatcctacatcattcagatagaaaccttttttttttcagaattatagaattccacagctcctaccaagaccatgaggataaatatctaacacttttcagttgctgaaggagaaaggagctttagttatgatggataaaaatatctgccaccctaggcttccaaattatacttaaattgtttacatagcttaccacaataggagtatcagggccaaatacctatgtaataatttgaggtcatttctgctttaggaaaagtactttcggtaaattctttggccctgaccagtattcattatttcagataattccctgtgataggacaactagtacatttaatattctcagaacttatggcattttactatgtgaaaactttaaatttatttatattaagggtaatcaaattcttaaagatgaaagattttctgtattttaaaggaagctatgctttaacttgttatgtaattaacaaaaaaatcatatataatagagctctttgttccagtgttatctctttcattgttactttgtatttgcaattttttttaccaaagacaaattaaaaaaatgaataccatatttaaatggaataataaaggttttttaaaaactttaaaaa

SEQ ID NO: 409237 - DNA, 705 bp, Homo sapiens
gtttgattttaaaataaagatcaattggaggatagcctacaaggtgctgcatgagctggcttcactgtacctctcctgcctccatcatctaccacattcctaccagatcttgcttgtctagatgaacatccagttcttctcaattactatgctatattttgcctcagggatttgcacatgctgtttatttctttgcttagttaacatagctttttttcatgcttatttaactcatatgctttgaaatgttagctcctgtgtcaaaacctctgagaagccaacactgattaggtcaaagttcccgctttgggttcccataacagctttcttgcatagttttgatcatggtcatatttttttttcattaatgctagtctcttcactagaatataaactccaagacggttgggttagtgtgtttttgtttaccccttttttcccaggatctagcctagggcctacatagaagacttttgatgcaaatttgttgaataaattagtgaatgatttgaaaagaaaatatgatattttgacatagtatcagtatatccatccatctaagtgtccatctaaatactcatatttgtactaaatactcatatttgtaccttaccatatccaaagaacttttcacacacattacctcgtttaacattgtaactttgggaagggtaatgtataaatactgagcctattttatagaaa

SEQ ID NO: 409238 - DNA, 619 bp, Homo sapiens
aggaagttgctgatagtagaatattgtgcttagccttggtgcatcttcctgttgaaaaggaaagctggattgtgtctgggacacagtctggtactctcctggtcatcaataccgaagatgggaaaaagagacataccctagaaaagatgactgattctgtcacttgtttgtattgcaattccttttccaagcaaaggtatggtagtgaatttgatcaatggggaaattacagatcttttaaacgactgaattgtgtgcataattgttattgcatcagcaaagattgttcatttttagcctattttcattggtttgcatatattaaagggaattgtggaaggtcacagagatatttgttgtttttctgaatacagatctagctgagacatttataaaataagtcaaccatttattcaggcctaccagccctgctcctggtattacctcaactgtggctctatctctttacttctcctcagatcaatgaatctttgtagggcctcttcaaggataaattctcattcattcattctttgaaaaaaaaaaaatatatatatatatatatatgaaacccattgtgtgccaggcttaaacataccagttatctaactaccaaatt

SEQ ID NO: 409239 - DNA, 403 bp, Homo sapiens
acaatttcatttgatcttccccaccactcaatacacaaccccattctacagatgtcttaagtgaagctgggagaggctaagtaaactttgcccatttcccctatcggcagagtcactattttcctcatctagggtcaaaaccaaggtcatccatgaccccccgctctccctcattcaggggcaagtcacaaacatccattagtcacaaatgcccatctcttcccccttttctgttttcactgctgccattctggggtagactgttaagcttaaaggagctgctcctttgaagatactaaatataggaaatgtcagtactccattgatgtgtttgagtgaatccacaaattcaacggaaagaaatgtaatgtggggaggagaagcagcaggcccgagctgacta

SEQ ID NO: 409240 - DNA, 2531 bp, Homo sapiens
aggaagttgctgatagtagaatattgtgcttagccttggtgcatcttcctgttgaaaaggaaagctggattgtgtctgggacacagtctggtactctcctggtcatcaataccgaagatgggaaaaagagacataccctagaaaagatgactgattctgtcacttgtttgtattgcaattccttttccaagcaaagcaaacaaaaaaattttcttttggttggaaccgctgatggcaagttagcaatttttgaagataagactgttaagcttaaaggagctgctcctttgaagatactaaatataggaaatgtcagtactccattgatgtgtttgagtgaatccacaaattcaacggaaagaaatgtaatgtggggaggatgtggcacaaagattttctccttttctaatgatttcaccattcagaaactcattgagacaagaacaagccaactgttttcttatgcagctttcagtgattccaacatcataacagtggtggtagacactgctctctatattgctaagcaaaatagccctgttgtggaagtgtgggataagaaaactgaaaaactctgtggactaatagactgcgtgcactttttaagggaggtaacggtaaaagaaaacaaggaatcaaaacacaaaatgtcttattctgggagagtgaaaaccctctgccttcagaagaacactgctctttggataggaactggaggaggccatattttactcctggatctttcaactcgtcgacttatacgtgtaatttacaacttttgtaattcggtcagagtcatgatgacagcacagctaggaagccttaaaaatgtcatgctggtattgggctacaaccggaaaaatactgaaggtacacaaaagcagaaagagatacaatcttgcttgaccgtttgggacatcaatcttccacatgaagtgcaaaatttagaaaaacacattgaagtgagaaaagaattagctgaaaaaatgagacgaacatctgttgagtaagagagaaataggaattgtctttggataggaaaattattctctcctcttgtaaatatttattttaaaaatgttcacatggaaagggtactcacattttttgaaatagctcgtgtgtatgaaggaatgttattatttttaatttaaatatatgtaaaaatacttaccagtaaatgtgtattttaaagaactatttaaaacacaatgttatatttcttataaataccagttactttcgttcattaattaatgaaaataaatctgtgaagtacctaatttaagtactcatactaaaatttataaggccgataattttttgttttcttgtctgtaatggaggtaaactttattttaaattctgtgcttcagacaggactattgcttgttgatttttctagaaatctgcacggtataatgaaaatattaagacagtttcccatgtaatgtattccttcttagattgcatcgaaatgcactatcatatatgcttgtaaatattcaaatgaatttgcactaataaagtcctttgttggtatgtgaattctctttgttgctgttgcaaacagtgcatcttacacaacttcactcaattcaaaagaaaactccattaaaagtactaatgaaaaaacatgacatactgtcaaagtcctcatatctaggaaagacacagaaactctctttgtcacagaaactctctgtgtctttcctagacataatagagttgtttttcaactctatgtttgaatgtggataccctgaattttgtataattagtgtaaatacagtgttcagtccttcaagtgatatttttatttttttattcataccactagctacttgttttctaatctgcttcattctaatgcttatattcatcttttccctaaatttgtgatgctgcagatcctacatcattcagatagaaaccttttttttttcagaattatagaattccacagctcctaccaagaccatgaggataaatatctaacacttttcagttgctgaaggagaaaggagctttagttatgatggataaaaatatctgccaccctaggcttccaaattatacttaaattgtttacatagcttaccacaataggagtatcagggccaaatacctatgtaataatttgaggtcatttctgctttaggaaaagtactttcggtaaattctttggccctgaccagtattcattatttcagataattccctgtgataggacaactagtacatttaatattctcagaacttatggcattttactatgtgaaaactttaaatttatttatattaagggtaatcaaattcttaaagatgaaagattttctgtattttaaaggaagctatgctttaacttgttatgtaattaacaaaaaaatcatatataatagagctctttgttccagtgttatctctttcattgttactttgtatttgcaattttttttaccaaagacaaattaaaaaaatgaataccatatttaaatggaataataaaggttttttaaaaactttaaaaa

SEQ ID NO: 409241 - DNA, 547 bp, Homo sapiens
aggaagttgctgatagtagaatattgtgcttagccttggtgcatcttcctgttgaaaaggaaagctggattgtgtctgggacacagtctggtactctcctggtcatcaataccgaagatgggaaaaagagacataccctagaaaagatgactgattctgtcacttgtttgtattgcaattccttttccaagcaaagcaaacaaaaaaattttcttttggttggaaccgctgatggcaagttagcaatttttgaagataagactgttaaggtaaatgttgaatgcattctacatctaaatttattttaagtcttttgttttatatatatctcacacccctcttatgggattataaactccctgagagcaagaatcataaattatgctgtatttgtattgcttcataaaatcttgaacacagtagatcctctgaaaatacttgctgattgactgtatattttatatgaatgaactaagaataaaatgataaatgacatctgattgataatattgggaatggaaataattcaatttgtacataactgagg

SEQ ID NO: 409242 - DNA, 525 bp, Homo sapiens
ctaaagtaaatactctaagaaaagggaggttaggaatttatagttgagaagtctatctaaagtttaataaagtggaggagaacattaaggccattttagtcaacatacatgttctttttgtaacaatttcaacatttttccttttagcaaacaaaaaaattttcttttggttggaaccgctgatggcaagttagcaatttttgaagataagactgttaaggtaaatgttgaatgcattctacatctaaatttattttaagtcttttgttttatatatatctcacacccctcttatgggattataaactccctgagagcaagaatcataaattatgctgtatttgtattgcttcataaaatcttgaacacagtagatcctctgaaaatacttgctgattgactgtatattttatatgaatgaactaagaataaaatgataaatgacatctgattgataatattgggaatggaaataattcaatttgtacataactgaggcagataattccttataaatatattgtg

SEQ ID NO: 409243 - DNA, 629 bp, Homo sapiens
tacatagaagacttttgatgcaaatttgttgaataaattagtgaatgatttgaaaagaaaatatgatattttgacatagtatcagtatatccatccatctaagtgtccatctaaatactcatatttgtactaaatactcatatttgtaccttaccatatccaaagaacttttcacacacattacctcgtttaacattgtaactttgggaagggtaatgtataaatactgagcctattttatagaaaggttaagctgttttctcagactcacataattaagaattgcagcaaggagtggatcacagattttgttattttttaaaaaaatgctggtctttattcaatataattgaagggtcacctagaaaatagaattgtgaattcagttccaaggtatttgtgtcttaaactatgaacaactttacttttttttcaggccagtttaatatatagttttaacagaaaacttacatattttgtttttgtaaaggaagccttaaaaatgtcatgctggtattgggctacaaccggaaaaatactgaaggtacacaaaagcagaaaggtaacatttagaaggatactgttttccaaacagggcaatgatgtgaatgatggtaacatattatgtg

SEQ ID NO: 409244 - DNA, 2513 bp, Homo sapiens
aggaagttgctgatagtagaatattgtgcttagccttggtgcatcttcctgttgaaaaggaaagctggattgtgtctgggacacagtctggtactctcctggtcatcaataccgaagatgggaaaaagagacataccctagaaaagatgactgattctgtcacttgtttgtattgcaattccttttccaagcaaagcaaacaaaaaaattttcttttggttggaaccgctgatggcaagttagcaatttttgaagataagactgttaagcttaaaggagctgctcctttgaagatactaaatataggaaatgtcagtactccattgatgtgtttgagtgaatccacaaattcaacggaaagaaatgtaatgtggggaggatgtggcacaaagattttctccttttctaatgatttcaccattcagaaactcattgagacaagaacaagccaactgttttcttatgcagctttcagtgattccaacatcataacagtggtggtagacactgctctctatattgctaagcaaaatagccctgttgtggaagtgtgggataagaaaactgaaaaactctgtggactaatagactgcgtgcactttttaagggaggtaacggtaaaagaaaacaaggaatcaaaacacaaaatgtcttattctgggagagtgaaaaccctctgccttcagaagaacactgctctttggataggaactggaggaggccatattttactcctggatctttcaactcgtcgacttatacgtgtaatttacaacttttgtaattcggtcagagtcatgatgacagcacagctaggaagccttaaaaatgtcatgctggtattgggctacaaccggaaaaatactgaagagatacaatcttgcttgaccgtttgggacatcaatcttccacatgaagtgcaaaatttagaaaaacacattgaagtgagaaaagaattagctgaaaaaatgagacgaacatctgttgagtaagagagaaataggaattgtctttggataggaaaattattctctcctcttgtaaatatttattttaaaaatgttcacatggaaagggtactcacattttttgaaatagctcgtgtgtatgaaggaatgttattatttttaatttaaatatatgtaaaaatacttaccagtaaatgtgtattttaaagaactatttaaaacacaatgttatatttcttataaataccagttactttcgttcattaattaatgaaaataaatctgtgaagtacctaatttaagtactcatactaaaatttataaggccgataattttttgttttcttgtctgtaatggaggtaaactttattttaaattctgtgcttcagacaggactattgcttgttgatttttctagaaatctgcacggtataatgaaaatattaagacagtttcccatgtaatgtattccttcttagattgcatcgaaatgcactatcatatatgcttgtaaatattcaaatgaatttgcactaataaagtcctttgttggtatgtgaattctctttgttgctgttgcaaacagtgcatcttacacaacttcactcaattcaaaagaaaactccattaaaagtactaatgaaaaaacatgacatactgtcaaagtcctcatatctaggaaagacacagaaactctctttgtcacagaaactctctgtgtctttcctagacataatagagttgtttttcaactctatgtttgaatgtggataccctgaattttgtataattagtgtaaatacagtgttcagtccttcaagtgatatttttatttttttattcataccactagctacttgttttctaatctgcttcattctaatgcttatattcatcttttccctaaatttgtgatgctgcagatcctacatcattcagatagaaaccttttttttttcagaattatagaattccacagctcctaccaagaccatgaggataaatatctaacacttttcagttgctgaaggagaaaggagctttagttatgatggataaaaatatctgccaccctaggcttccaaattatacttaaattgtttacatagcttaccacaataggagtatcagggccaaatacctatgtaataatttgaggtcatttctgctttaggaaaagtactttcggtaaattctttggccctgaccagtattcattatttcagataattccctgtgataggacaactagtacatttaatattctcagaacttatggcattttactatgtgaaaactttaaatttatttatattaagggtaatcaaattcttaaagatgaaagattttctgtattttaaaggaagctatgctttaacttgttatgtaattaacaaaaaaatcatatataatagagctctttgttccagtgttatctctttcattgttactttgtatttgcaattttttttaccaaagacaaattaaaaaaatgaataccatatttaaatggaataataaaggttttttaaaaactttaaaaa

SEQ ID NO: 409245 - DNA, 501 bp, Homo sapiens
agtttttgcattttccactctatttttaattccttggagctgtgacttgacttgggtgcaggtgtggtgaagtctagttagttgacttgggtacgggtgtggagaagtctagttcagttcttgagcatcctgaattagggaatctgtgctgttaactctagcagtgaggtgatgagcacatagtaaaccaatcacaatgtacctttttaaaaatacaattcagattgtttaaatgtagggagaaaaaagatttcttggtatgaaatgaatatattacactgtccttttttacttccatgttaatatgtcattattataaaaagataaaaatactagacaagttatgaacaaaattgataacatccatgagggcacctgtaatcccagctacttgggaggctgaggcaggagaattgtttgaacctgggaggcggaggttgcagtgagccaagatcacaccatcgcattccagcctgggcaacagggcaagaccctttctca

SEQ ID NO: 409246 - DNA, 1422 bp, Homo sapiens
gcacatgaaccttttttataaaaacaaggggctgggtgccattgctcatacctgtaatcctagcaccttggaagaccaaagcagaaggatcacttgaggccaggcgtttgagatcagcttgtgcaacctgatgagacccccatctgcaaaaaaataatttaaaaaattagctgggtgtggtggcacctgcctgtagtcctagctactcaggaggttcaggcaggaggatcccttgagcccaagggcagttcccttcaactgaccaatatcgagaaaactgacctctctgctcctcaggtgctgcagaagcagctgagtcagcctctttccccatcctgaccctgagtgatggagcacagccacgcttagagctccgggaaggacctgatatgttggatttttctctatgcctccctaacctagatcattttagaaccagggcactgtcatagggtgggcttaggggtcatggaagagctgtgctttagagataagggagcctcacactccctttcaagaggaattgcgccaagctccctcccaactcctttagggaatggaatctgcctgtcttctgggccagggtgcatgtgagcaggacaggccctagagctggaaagccttcctccacagtgggcaggggaaaagaaaactcacttttgctgggttcctactatttgccaagcataacaattccgtaaggtgtgattattattcccctttggtaaatgaaaagatggaggcttagggaatttaaagaacctgcctgaggtccagcttctagaatggtggacccgaatccagagatcattacacacctctgcctcgccaaagccttgtcacctggcccaatgagagccacttcgacttaatgccttgttaagttcctccctggaggtaagatcctactgcaagaatctcactctaaggcgcacgcgtgaaaggaaggcagggccaacagccataagccctaaagagaagagttagtattggccccacacacagggccagacaagcacacacgcggtaggttcataggaaatcagatatcggctgaatgagaagaggaccaccaggggaatattctctgcccttctgctgtctattatgagtctgactggcacagacatctgtcaaggaagaaggattctttgagcgtatttgtgtcagtcaactgcatatatggaccacaacagaaagcaccatggacgaggaaatcagctcgcctcggcagagaagctgtgcaactttggactaatcactgaacctccctggacctccgttttcacctctttccaataagagaccccattttccctgcctccctcccacagttgttggggagatcatgacagtgggtgaagaagggagatataagtgaaatttgaaaaaaataaatttagaagtatattatcattttga

SEQ ID NO: 409247 - DNA, 848 bp, Homo sapiens
  misc_feature (744)..(744): n is a, c, g, or t
  misc_feature (757)..(757): n is a, c, g, or t
  misc_feature (764)..(764): n is a, c, g, or t
  misc_feature (767)..(768): n is a, c, g, or t
  misc_feature (770)..(770): n is a, c, g, or t
gcacatgaaccttttttataaaaacaaggggctgggtgccattgctcatacctgtaatcctagcaccttggaagaccaaagcagaaggatcacttgaggccaggcgtttgagatcagcttgtgcaacctgatgagacccccatctgcaaaaaaataatttaaaaaattagctgggtgtggtggcacctgcctgtagtcctagctactcaggaggttcaggcaggaggatcccttgagcccaagggcagttcccttcaactgaccaatatcgagaaaactgacctctctgctcctcaggtgctgcagaagcagctgagtcagcctctttccccatcctgaccctgagtgatggagcacagccacgcttagagctccgggaaggacctgatatgttggatttttctctatgcctccctaacctagatcattttagaaccagggcactgtcatagggtgggcttaggggtcatggaagagctgtgctttagagataagggagcctcacactccctttcaagaggaattgcgccaagctccctcccaactcctttagggaatggaatctgcctgtcttctgggccagggtgcatgtgagcaggacaggccctagagctggaaagccttcctccacagtgggcaggggaaaagaaaactcacttttgctgggttcctactatttgccaagcataacaattccgtaaggtgtgattattattcccctttggtaaatgaaaagatggggtnggattaagaccgnggggccnttnnangggggcgaccaagaataactttctctccaattgtttgcgccaggagcctaagcgggtcccgggagcggagacccaggg

SEQ ID NO: 409248 - DNA, 1170 bp, Homo sapiens
tcctgtggaggaagcggcgagggcgagccgcggggtctcggcgcctctgtatgcttgcacttaacgagaacccagagcgaacacgacccacatttctctttttgttttaagaggaaatataggagttacagcatagaattacaatatctggacattagaaataacaggtcccggtcacggtatggcaccgcgcgacacacttggtccctgaggcctggatgccgctcagcaaacgttcgcggaatagggttgggtttactgtcccccaccgagccggttgctcattcattcagcataattgaatacctcctgtgtgccaggcactgaatcaagtgtcggagacaatgtcctgccctcaagctcctggccggttacttgacaaccttccgggacctcaacgctatgtgcctactgtgtgaaagcaaagtgccaggtggaggacacaaagatggcgagcgacacaggatagtccttaacaattaagcgtgactaattttaataacaaatgagaatatgatgtgacatccgttccaaatcctgtcgttccaagtaacttcttaagcatctttcacgatacagcctctgcttgaaaggaattaaaacaggtacaagcatggaaggagacgttgctatcatatttcaagaataagaaaatgctgttttgtgtggttgtgcagcaggcaatgaaatgagcttacattcaagcttccgtgttttactgaaacaacagtcacagatgcagtagatgttaaaggttgaaagacgagtgcagtaaaagcattatgaggacaagaagaaaacgtaaatatttgtgttgtttcattctttgttgtggtggcagaaacagccccctctttctaaggtaactccaatataatgatctctcccagctttgaaatactccatgtctgtttcattttccagaaatatggaaaaatgaatatataataaaaaaccctatttctcatttattgtctattttagatctttatgtggaaaagcacttactctcttcccagagcactgtttttaaagtaggtatatttgccataacctatgctcgtctctacaaaaggatcacaccaccgtgtccaccattaaaggggaaattctttaatggtggacacagtggtgtccctgaatcctcatcctcaagtgtttcaatcttcc

SEQ ID NO: 409249 - DNA, 290 bp, Homo sapiens
atcgcttgaacctgggcagcagagattgtggtgagcggagattgcaccactgccctccagcctgggttgcaacagagcaagactccatctcaaataaataaataaataaagcctgtacttacgctttatatttaatgttgacaacgtaccaggttttgagacctcaggcatattatactttacatgtttagagttatatctgagtagctacagtaatgaattcctagtaatacagtttttagtgtacatcattaaaattgctttcatcaggactggagtgtagctgtatt

SEQ ID NO: 409250 - DNA, 585 bp, Homo sapiens
gtcaggatgaaagagttcttggctttaactcccagaaattctggtaacgtcatgtatagtgacggccgcatgtctaacaggtggccaggtaagtcttttggggtggtctgtgaatcacagtttgggagacattgacttttagggagtttgttctgaattcactagataatagagatataatacagagctttgaaagctggtgtcttgatgacagagccgtggcaatggggagggttgaggaggtggctgttgggcctgtctcctggtgagagttgaaagggcctgaactcaagcagaggcctcagaaccgaaaggtggtggaaggatgcagcaagaggcgccacacaggagtactctgcgccctggcagggtctgaatacacgtgggagtggtgagagggagaactttaagtccaggttttgtgcctcagtgacttagtgtggccatatcattagaaatgtgttgaggccgggcacagtggctcatgtctgtaatcccagcactttgagaggctgaggcaggaggatggcttgaggccaggagtttaaaaccagcctggacaacatagtgagagcctgtctctac

SEQ ID NO: 409251 - DNA, 2190 bp, Homo sapiens
gagcttaggtaaattgaactaatgacatctggatgaatacacaacttttctagaacagttttcacaccacacagcacctatggttcagtttaagggcaggacctagagatgacagacaaggctcaaactaaacacattctcttaagatttggttacacgtttttctagggcattctctctgaatgccctagaaacatgtaaccaaatcttgagtctcaggaaatgcaaactgaaagccactggtatttagaatgcacagcaataatgattcaccttcatcccagctgcagcaactgcatccctccaactgggcatttgcagaaaagaggcaagactaagcatggagatcatccttgtgctcagtagttcctccttcagggaaaaacattaaactttcctctgctttctcccacctgttccaaccacttatcaaagttatgtcagctttggttataaaaccatctgggggtgagcttcaaatattatatgtgaataaaatattaagcacctgtgtgataaaacaattttagcttgaatacttaaagaatcagattttcttatgtactatctgcaaatgtatccatctgttcatagagtgctatctctataaagaattagaaatatctaaaatctacagatgtcagagttgaaaggaatctgggagatacctggcttcctgtagctgcacatcacagacatgaaagtgaggctcaaaggagctcactagcttggtccgggtctcacaactggatcatagcagatacagggcttgtactagctgcttagtcccagtgcacttagcattccaccctttctctgacacttgaaaactgactaaacaaaggaaatgaaaacatacttttaaagggttaagattaggtaggagaaaagagttggtatggaaggatcaagagtaacaaaatcaaatctagaaggaactgctaccttccaggttatgctaattactttttcaaaaacagtcctcttagaccttattgtcagattattctctgtggggaacaacaacaaaaaaagatttctaccacagtatatctacagatgaccgaaaccaagtgccttcctgagaaattctagtcctgccctgcacagttctctgtgctccaaatgttttttattctctctccttccacttgtattttctagattattcctttcccattggcccttttccagtttacaagctgttcaaatctaccttcatagaagctgccacttctccaagattctgcttccctttcctcattcattctacaaatatttattgaacaccggcaatataccaaacattctacaaccaagctccttgaaaaagtctatattaactgctctttccttcttctcatctctccacttctctgtaaactgccaaattgctaaagacaattgattctcaatccttttatgcatttacaaggttgactacttcctcaaattctctcctgtcagctttcaaaacatcccctgctcctgattcttctttctcagtgactctttttcataggcttctcttcattcatctgccacttaagagttggtattccccgagggttgtatcatggctctcttctcgctcaacatgttctacctgggccttcctaatcactcccatgctttagcgattccctgtgagtcagccaatgaaagatgagattggcttttgaagcacattaattctttaagacctctggtaaggtgacccagagaatgtcacattcagagttagccagtcttcccttggagaaggcacacaagaagcaaggaggtgacaagcagtgattattttaatgttctcttcctactctatagggccatccccctccctttagaaatgtaaagcggggaaataaagatggatctaccaatccataccagtatgctttccttttattggtgtgggtgtgccccttgaagagacgaccatcactgtgtcaagacaggccaataccacttccatgactccactcccctgagaccttccactatactttctgtgtcatcctgacacctgtagataatcaaatggtaggataggatattaatcactgtagcttaaagctaagtttctcccaaggctgacattcattccctgttctacttaccacctcagctcatagcgagacacttttgtcagaggaggttgtacaatgagcaccacacaaaaaaaaaaaa

SEQ ID NO: 409252 - DNA, 1934 bp, Homo sapiens
cttaatagcataaatgaaaacaaagtcatccagatggggagagtttttcttgaaatgtccctagcgaggaatggtccccagacaaccaaaagtcaaatctttgaactgggagatatttatagaataatttcttagataagaggcaagttttccatcatttattttctttaattatctctttttgacaccatcttagtggaatttgctctacgtttgcagtttgccgtgcaacagttgatcggaagtagggagaggggaggggacgctcagggagaaggttctgtcgggcgtcttctgggcttccttctgtgttaacgtgtcactcaatcccagaagtgcaacttgaggtcctagtaaaggtatcagaaaatgaggaggagaaatcggcttacagtctaagctgagatcatgtaggtcatcatccttcctagacactgatcagaatgaaattaagaaaatgaccactttgttcactttcattggtcacctagaagggaacgaactggctctggacttagggagtgtgtcactatgggggcagccacaggggacacagcaactcctctcctggcttctttccagaccataaatctaacagctaaagctactcaagttcaaagccatggccttgctccttataaccatatgaaagacaagacacattgaccaatgatacaagtaacccaagtgatttgcatttatggaaaaaggctattactcctgagaaagagttgccattttatataaaagaaaagaagataggaaaaagaaaagcacacaagttttatttggaatgaaggcaattcacaggtcacaaaataattcatgctgaaagggcctgcagagttcttgcactgtgatgtcttcgagccatctttattgtcatgctgcatgcacgtatagaaaatggaataggtccattctatgtagccatttttgattttctgaaccacctaactacttgtacccacctgcaatgtgtaattcatggggcagtgccctccttacacaaccgcacacgctcacaggcaccaactcacagggattctccttgtccacgctacctgtgagcccaaagtgacagccccacaaaggagcttccacaacttcccaaaccgtctctgctccttgctttcttccacctgctccccagaggccccaggaaggagttggccctgatgagaacggtgctccatgggtgaccgcgaatccggcttagccctcactccggtcccacgtgtggcccagtccattctcagctcattcccctggaaagcaagatcatggtcttcagaggcctcccgcttctaacatttcctaactcagtggttgccactctcctgtgaccagcccttcttcccacctcactgtgaaaaattcccagaagccaggatcacgactcacttgtcttcacataatggatatttacttaatatttattatcaatttccccacctccaaccctgtccctggcacacacttggcatcatttatccaataggggactgggaattttggtgaagtgaatcaaggctattcagggtcaagagagagattaacttgaatgggccaatttgctagataattaatgtcttaaaaaccaaaaccagagagaagcccacagccctgtcctctgtggcttgaaaaagaaacccagcatcagaggaatgagcgatgatgccccctggggcgcccacttctgtttgtcaggagggatggtcggaggggcagctcacctggcgaggtgatggctctgcatttcccacgaacatatatgtgacatgtacataaatataaatacttatgtttataaatgttgaatggttccttctagctgtggctgagtagacgttggtgtttctaacttctttcagtgtgttagagattgattacatgctagctataaaaagtaaaataaatattttaccatgcta

SEQ ID NO: 409253 - DNA, 2588 bp, Homo sapiens
cttaatagcataaatgaaaacaaagtcatccagatggggagagtttttcttgaaatgtccctagcgaggaatggtccccagacaaccaaaagtcaaatctttgaactgggagatatttatagaataatttcttagataagaggcaagttttccatcatttattttctttaattatctctttttgacaccatcttagtggaatttgctctacgtttgcagtttgccgtgcaacagttgatcggaagtagggagaggggaggggacgctcagggagaaggttctgtcgggcgtcttctgggcttccttctgtgttaacgtgtcactcaatcccagaagtgcaacttgaggtcctagtaaaggtatcagaaaatgaggaggagaaatcggcttacagtctaagctgagatcatgtaggtcatcatccttcctagacactgatcagaatgaaattaagaaaatgaccactttgttcactttcattggtcacctagaagggaacgaactggctctggacttagggagtgtgtcactatgggggcagccacaggggacacagcaactcctctcctggcttctttccagaccataaatctaacagctaaagctactcaagttcaaagccatggccttgctccttataaccatatgaaagacaagacacattgaccaatgatacaagtaacccaagtgatttgcatttatggaaaaaggctattactcctgagaaagagttgccattttatataaaagaaaagaagataggaaaaagaaaagcacacaagttttatttggaatgaaggcaattcacaggtcacaaaataattcatgctgaaagggcctgcagagttcttgcactgtgatgtcttcgagccatctttattgtcatgctgcatgcacgtatagaaaatggaataggtccattctatgtagccatttttgattttctgaaccacctaactacttgtacccacctgcaatgtgtaattcatggggcagtgccctccttacacaaccgcacacgctcacaggcaccaactcacagggattctccttgtccacgctacctgtgagcccaaagtgacagccccacaaaggagcttccacaacttcccaaaccgtctctgctccttgctttcttccacctgctccccagaggccccaggaaggagttggccctgatgagaacggtgctccatgggtgaccgcgaatccggcttagccctcactccggtcccacgtgtggcccagtccattctcagctcattcccctggaaagcaagatcatggtcttcagaggcctcccgcttctaacatttcctaactcagtggttgccactctcctgtgaccagcccttcttcccacctcactgtgaaaaattcccagaagccaggatcacgactcacttgtcttcacataatggatatttacttaatatttattatcaatttccccacctccaaccctgtccctggcacacacttggcatcatttatccaataggggactgggaattttggtgaagtgaatcaaggctattcagggtcaagagagagattaacttgaatgggccaatttgctagataattaatgtcttaaaaaccaaaaccagagagaagcccacagccctgtcctctgtggcttgaaaaagaaacccagcatcagaggaatgagcgatgatgccccctggggcgcccacttctgtttgtcaggagggatggtcggaggggcagctcacctggcgaggtgatggctctgcatttcccacgaacatatatgtgacatgtacataaatataaatacttatgtttataaatgttgaatggttccttctagctgtggctgagtagacgttggtgtttctaacttctttcagtgtgttagagattgattacatgctagctataaaaagtaaaataaatattttaccatgctattaaagcttggaccattatcaaacacacacaaacacacactcattctgctgtttaaaaattcatctgcgttcgttctcccaggagtgctccagggaaccacaggcttcccggcacttgaaggctgaactgagcgtgagtgccctggtccccaggaagcaggcggatgctgcaggaaggtggcagacagcctgcatccaggagggccccaggaagtggggatgctgcaggaaggcggcacaaagcctgcatccgggagggccccaggaagcagggggatgctgcaggaaggtggcagacagactgcatccaggagggcacagtgacctgtcactccgttctgcagaaattggcccagcagttgcgttatgcccaaccaaaagatgctcgttccagctttcaaatgtgatgatttcagcctgtgaggacaatgccatgtccccaccctaagccagcaaaatgcgaaatctctgttctggcccagaatggcacaagggaggagtctttgcagagttccacgccaccccccagcttactgcggccttcaccggctctgtctaggattgccagctgtggttccaagtgaggagcaaacccattttatgagccatgttcctgcggagacctgatgggccaggccttctgtggctttgaaa

SEQ ID NO: 409254 - DNA, 301 bp, Homo sapiens
tagcaattaatagaacactcatttattttctcacagattcaggaatcttggcagatctcagctcagtcctctgtttcaaagttcctcacaaggctgcatagaagatgttgtcagggttgtggtcctgtgtgaaggcttgactggtgaatgatttgttcctaagctcattcatatgattggcaggattcagttcctccagagtgattggactgagggccttcattcttggatgtttgttgtccagaacccacccttggttccttgatcatggacctctcagtagggcagctcataaaagtcc

SEQ ID NO: 409255 - DNA, 490 bp, Homo sapiens
ggctcaagcaatccacctgcctcggcctcccaaagtgctaggaatacaggtcattaatcacctattttatgtaaaagaaggaacaagggatgtttcagccagagatacatgacgttgtttaagtataagtcaccaattgtagagagaaagagagtatcttctgccttctaagcaaatagacttcaaaatagctccgtctttacatattgacaatatgtgattcaggaatcttggcagatctcagctcagtcctctgtttcaaagttcctcacaaggctgcatagaagatgttgtcagggttgtggtcctgtgtgaaggcttgactgatgacacttccatcagaatgcagccttcacaatttactatcgtcttgactcattcacctccctcattagacactgagcttgcaggaaggaggaagcatttctgtttactattgttttctcgcatgtaccacagcttctggcaaatataagtatgtaacacacaa

SEQ ID NO: 409256 - DNA, 443 bp, Homo sapiens
tttgatgacttcaacagaatcctaattggtctttctgccttctctcctgttttgtgataatcatggcattcccatgtttggaacatttcactgactacctcttcaggaggagattgaaactccttgtcatgtgtttcaaggttatttaccttttcactcccactaaaatgtacttagactgaactcctttgttcctggaacagagacacttaaaagacttggagacttctccctgaacacagtttaatttaaccaattcttcatttggcttgtatttagatgacacttccatcagaatgcagccttcacaatttactatcgtcttgactcattcacctccctcattagacactgagcttgcaggaaggaggaagcatttctgtttactattgttttctcgcatgtaccacagcttctggcaaatataagtatgtaacacacaa

SEQ ID NO: 409257 - DNA, 331 bp, Homo sapiens
taggctcagtagagctttcagcctagtttttattttgtgttccacaactagggtaattgtgctaaaatttagctgttacttgaagaaaagtttctttttgttttccatatccagttaagttccaagtgaaatttttctgactggttatcaagaaatttcaaaattgatgaagaagtatagcattttgctcatctcactgaatttcaagtcttaataagcaatgagttataatctgtcactgtctgtttattttgatgctagaattgtgaatatataatttatgttaatatatttttataatgtcatcaccatgattactaatatatataac

SEQ ID NO: 409258 - DNA, 346 bp, Homo sapiens
attcacaagtcctcttgttgctttaaaatgtatctcaattttgatatgttcaaaactgagcttacctctttctgcctctgcaaacctgctcactctctagtattttccaccttgaagaatggtcctgtcatgaattcagttgtcccagccagaaactcatccttaactctggtcttctccctatccctcccttctacttaattaagtcttgtcgactctacttcctaaaagatcatccactgtttccccaacctgcgtatttacctttcttaccttctttcctttagttggctactcattcatcttttattcatgttgttgtcaaagtaaaacttctaaaacttaa

SEQ ID NO: 409259 - DNA, 219 bp, Homo sapiens
ggagctaactttcctgtttggcagacacaggaaatcaccgagatcaggttcttggtccagaccatgacataagagaaaagattttcttcagacctttgcattgcccccagtgataccctgagttttccattttgggtggctggagaacagggtgtgtggtgacagatggggttgagcggagagcctggaatctgtcatcgtctttagtaaaattgcctt

SEQ ID NO: 409260 - DNA, 490 bp, Homo sapiens
aagaaggtcaaccttaatacattcagaacctcaaagcaaaaaaaaaaaaaaaaaagtccacaggataatcccatgcctcaaacctgttagttacatgcccaatccagcaaactagtttgttctcaagctttacagtaaaagcttttgacaatgttctggtacagaagggctgcctccaagtccacgagatgccattagcagataaattatattggcctcaaacacaaaccctatttcaactatctcaaattaaatctgatgcctataagctctaattttttgccaataagtacaaaaatgacaaatgaaaatttctatagtggatttacgcattagcagtcaaaaaaagcttgcttgtcagcaagttcatccagactccagatctcatgtgtccttcatgctctctacccagccagagacctcatatctcatgcccaggtctttcctcaggctctgacctgaagcctcccttgcagggagggccagagct

SEQ ID NO: 409261 - DNA, 530 bp, Homo sapiens
aagaaggtcaaccttaatacattcagaacctcaaagcaaaaaaaaaaaaaaaaaagtccacaggataatcccatgcctcaaacctgttagttacatgcccaatccagcaaactagtttgttctcaagctttacagtaaaagcttttgacaatgttctggtacagaagggctgcctccaagtccacgagatgccattagcagataaattatattggcctcaaacacaaaccctatttcaactatctcaaattaaatctgatgcctataagctctaattttttgccaataagtacaaaaatgacaaatgaaaatttctatagtggatttacgcattagcagtcaaaaaaagcttgcttgtcagcaagttcatccagactccagatctcatgtgtccttcatgctctctacctgcacacacaccttcacatgcacaccttcacatgcacacgcagacctccatatgcacatgcacaccacatgcgcacacacacctccacatgcacacggggtaccgagcctcgaatccgcaa

SEQ ID NO: 409262 - DNA, 3086 bp, Homo sapiens
acttgcttgctggttttgcttgcatctgatgagtagaaattcagcctattctttgttttggaaatacaaaagatataataatgatatatgaagaagatgctgaggaatgggctctgtacttgacagaagtatttttacatgttgtgaaaagggaagccatcctgttatatcgcttggagaatttctcttttcggcatttggagttgctgaacttaacgtcttacaaatgtaaacttttgatattatcaaatagcctgcttagagacctaactccaaagaaatgtcagtttctggaaaagatacttcattcaccaaaaagtgtagttactttgctttgtggagtgaagagttcagatcagctctatgaattactaaatatctctcaaagcagatgggagatctcaactgaacaggaacttgaagactacatctctgtaatccagagtatcatattcaaagattctgaagactactttgaggtcaacattccaacagacctacgagcaaaacattctggggaaataagtgagagaaaggaaattgaagaactatcagaagcttcaagaaacaccataccactagcagtggtgcttcccactgaaattccatgtgagaatcctggtgaaatattcataattttgagagatgaagtaattggtgatactgtagaggttgaatttacatcaagtaataagcgcattagaacacggccagccctttggaataagaaagtctggtgcatgaaagctttagagtttcctgctggttcagtccatgtcaatgtctactgtgatggaatcgttaaagctacaaccaaaattaagtactacccaacagcaaaggcaaaggaatgcctattcagaatggcagattcaggagagagtttgtgccagaatagcattgaagaacttgatggtgtccttacatccatattcaaacatgagataccatattatgagttccagtctcttcaaactgaaatttgttctcaaaacaaatatactcatttcaaagaacttccaactcttctccactgtgcagcaaaatttggcttaaagaacctggctattcatttgcttcaatgttcaggagcaacctgggcatctaagatgaaaaatatggagggttcagaccccgcacatattgctgaaaggcatggtcacaaagaactcaagaaaatcttcgaagacttttcaatccaagaaattgacataaataatgagcaagaaaatgattatgaagaggatattgcctcattttccacatatattccttccacacagaacccagcatttcatcatgaaagcaggaagacatacgggcagagtgcagatggagctgaggcaaatgaaatggaaggggaaggaaaacagaatggatcaggcatggagaccaaacacagcccactagaggttggcagtgagagttctgaagaccagtatgatgacttgtatgtgttcattcctggtgctgatccagaaaataattcacaagagccactcatgagcagcagacctcctctccccccgccgcgacctgtagctaatgccttccaactggaaagacctcacttcaccttaccagggacaatggtggaaggccaaatggaaagaagtcaaaactggggtcatcctggtgttagacaagaaacaggagatgaacccaaaggagaaaaagagaagaaagaagaggaaaaagagcaggaggaggaagaagacccatatacttttgctgagattgatgacagtgaatatgacatgatattggccaatctgagtataaagaaaaaaactgggagtcggtctttcattataaatagacctcctgcccccacaccccgacccacaagtatacctccaaaagaggaaactacaccttacatagctcaagtgtttcaacaaaagacagccagaagacaatctgatgatgacaagttccgtggtcttcctaagaaacaagacagagctcggatagagagtccagccttttctactctcaggggctgtctaactgatggtcaggaagaactcatcctcctgcaggagaaagtaaagaatgggaaaatgtctatggatgaagctctggagaaatttaaacactggcagatgggaaaaagtggcctggaaatgattcagcaggagaaattacgacaactacgagactgcattattgggaaaaggccagaagaagaaaatgtctataataaactcaccattgtgcaccatccaggtggtaaggaaactgcccacaatgaaaataagttttataatgtacacttcagcaataagcttcctgctcgaccccaagttgaaaaggaatttggtttctgttgcaagaaagatcattaaagaaggttattataatgaaactcacgaatctacggacattttgctttcagggtgaagcaagcttgaatttggattgcctgctctctttaaagcgaattcatactatgacagcagaaacaaaacttcagatttcagaatttgttattggcaaaatttattctcattatacctgcttcatatgggtatattactattaaaacagaataccatagagtaattgcattatttgaaaattctctcattttacaatgcacttcaccaatgaaacagctaatttccattttgaaaattaaaagaaaacagcacagagaagttaaatgcggtgtagcaaagttatggggtctgcttgagggcactaacctcaacagattattcctcctctccttagaataaccatgaaaatacaaatttacttagcacatttttgctttttaagtagctggttcattttctgaatttctcacattcagagttccagtcattattgttacatcatgtttgcagaaaccttgtcttatttagtgtctatttgcatataaccctgaaaacattattatttgaaaacttttctatatctcaaattaatatacattttcataacctacctttgtattaagacttgcaattttatcaatctattatttcttagaaacaatttactagcttagaatagaaagcaatgttatcgtcatataattttcatgtacaaatgccacaaataaattgaatgtttaaagc

SEQ ID NO: 409263 - DNA, 3248 bp, Homo sapiens
tgagacctggccgcagcctccgcgggtggcaagcgggctggggagagccgagggccaaaggaagagaaaatcgcggggagtctctggccgggagagtccaggtagcgctcggcgggcagcagtgcgcaggcccctcggcttcaaccgccacaatgctgccagcagcgccaggcaaggggcttgggagcccggaccccgccccctgcggcccagcgcccccaggaaatacaaaagatataataatgatatatgaagaagatgctgaggaatgggctctgtacttgacagaagtatttttacatgttgtgaaaagggaagccatcctgttatatcgcttggagaatttctcttttcggcatttggagttgctgaacttaacgtcttacaaatgtaaacttttgatattatcaaatagcctgcttagagacctaactccaaagaaatgtcagtttctggaaaagatacttcattcaccaaaaagtgtagttactttgctttgtggagtgaagagttcagatcagctctatgaattactaaatatctctcaaagcagatgggagatctcaactgaacaggaacttgaagactacatctctgtaatccagagtatcatattcaaagattctgaagactactttgaggtcaacattccaacagacctacgagcaaaacattctggggaaataagtgagagaaaggaaattgaagaactatcagaagcttcaagaaacaccataccactagcagtggtgcttcccactgaaattccatgtgagaatcctggtgaaatattcataattttgagagatgaagtaattggtgatactgtagaggttgaatttacatcaagtaataagcgcattagaacacggccagccctttggaataagaaagtctggtgcatgaaagctttagagtttcctgctggttcagtccatgtcaatgtctactgtgatggaatcgttaaagctacaaccaaaattaagtactacccaacagcaaaggcaaaggaatgcctattcagaatggcagattcaggagagagtttgtgccagaatagcattgaagaacttgatggtgtccttacatccatattcaaacatgagataccatattatgagttccagtctcttcaaactgaaatttgttctcaaaacaaatatactcatttcaaagaacttccaactcttctccactgtgcagcaaaatttggcttaaagaacctggctattcatttgcttcaatgttcaggagcaacctgggcatctaagatgaaaaatatggagggttcagaccccgcacatattgctgaaaggcatggtcacaaagaactcaagaaaatcttcgaagacttttcaatccaagaaattgacataaataatgagcaagaaaatgattatgaagaggatattgcctcattttccacatatattccttccacacagaacccagcatttcatcatgaaagcaggaagacatacgggcagagtgcagatggagctgaggcaaatgaaatggaaggggaaggaaaacagaatggatcaggcatggagaccaaacacagcccactagaggttggcagtgagagttctgaagaccagtatgatgacttgtatgtgttcattcctggtgctgatccagaaaataattcacaagagccactcatgagcagcagacctcctctccccccgccgcgacctgtagctaatgccttccaactggaaagacctcacttcaccttaccagggacaatggtggaaggccaaatggaaagaagtcaaaactggggtcatcctggtgttagacaagaaacaggagatgaacccaaaggagaaaaagagaagaaagaagaggaaaaagagcaggaggaggaagaagacccatatacttttgctgagattgatgacagtgaatatgacatgatattggccaatctgagtataaagaaaaaaactgggagtcggtctttcattataaatagacctcctgcccccacaccccgacccacaagtatacctccaaaagaggaaactacaccttacatagctcaagtgtttcaacaaaagacagccagaagacaatctgatgatgacaagttccgtggtcttcctaagaaacaagacagagctcggatagagagtccagccttttctactctcaggggctgtctaactgatggtcaggaagaactcatcctcctgcaggagaaagtaaagaatgggaaaatgtctatggatgaagctctggagaaatttaaacactggcagatgggaaaaagtggcctggaaatgattcagcaggagaaattacgacaactacgagactgcattattgggaaaaggccagaagaagaaaatgtctataataaactcaccattgtgcaccatccaggtggtaaggaaactgcccacaatgaaaataagttttataatgtacacttcagcaataagcttcctgctcgaccccaagttgaaaaggaatttggtttctgttgcaagaaagatcattaaagaaggttattataatgaaactcacgaatctacggacattttgctttcagggtgaagcaagcttgaatttggattgcctgctctctttaaagcgaattcatactatgacagcagaaacaaaacttcagatttcagaatttgttattggcaaaatttattctcattatacctgcttcatatgggtatattactattaaaacagaataccatagagtaattgcattatttgaaaattctctcattttacaatgcacttcaccaatgaaacagctaatttccattttgaaaattaaaagaaaacagcacagagaagttaaatgcggtgtagcaaagttatggggtctgcttgagggcactaacctcaacagattattcctcctctccttagaataaccatgaaaatacaaatttacttagcacatttttgctttttaagtagctggttcattttctgaatttctcacattcagagttccagtcattattgttacatcatgtttgcagaaaccttgtcttatttagtgtctatttgcatataaccctgaaaacattattatttgaaaacttttctatatctcaaattaatatacattttcataacctacctttgtattaagacttgcaattttatcaatctattatttcttagaaacaatttactagcttagaatagaaagcaatgttatcgtcatataattttcatgtacaaatgccacaaataaattgaatgtttaaagc

SEQ ID NO: 409264 - DNA, 3171 bp, Homo sapiens
acttgcttgctggttttgcttgcatctgatgagtagaaattcagcctattctttgttttggaaatacaaaagatataataatgatatatgaagaagatgctgaggaatgggctctgtacttgacagaagtatttttacatgttgtgaaaagggaagccatcctgttatatcgcttggagaatttctcttttcggcatttggagttgctgaacttaacgtcttacaaatgtaaacttttgatattatcaaatagcctgcttagagacctaactccaaagaaatgtcagtttctggaaaagatacttcattcaccaaaaagtgtagttactttgctttgtggagtgaagagttcagatcagctctatgaattactaaatatctctcaaagcagatgggagatctcaactgaacaggaacttgaagactacatctctgtaatccagagtatcatattcaaagattctgaagactactttgaggtcaacattccaacagacctacgagcaaaacattctggggaaataagtgagagaaaggaaattgaagaactatcagaagcttcaagaaacaccataccactagcagtggtgcttcccactgaaattccatgtgagaatcctggtgaaatattcataattttgagagatgaagtaattggtgatactgtagaggttgaatttacatcaagtaataagcgcattagaacacggccagccctttggaataagaaagtctggtgcatgaaagctttagagtttcctgctggttcagtccatgtcaatgtctactgtgatggaatcgttaaagctacaaccaaaattaagtactacccaacagcaaaggcaaaggaatgcctattcagaatggcagattcaggagagagtttgtgccagaatagcattgaagaacttgatggtgtccttacatccatattcaaacatgagataccatattatgagttccagtctcttcaaactgaaatttgttctcaaaacaaatatactcatttcaaagaacttccaactcttctccactgtgcagcaaaatttggcttaaagaacctggctattcatttgcttcaatgttcaggagcaacctgggcatctaagatgaaaaatatggagggttcagaccccgcacatattgctgaaaggcatggtcacaaagaactcaagaaaatcttcgaagacttttcaatccaagaaattgacataaataatgagcaagaaaatgattatgaagaggatattgcctcattttccacatatattccttccacacagaacccagcatttcatcatgaaagcaggaagacatacgggcagagtgcagatggagctgaggcaaatgaaatggaaggggaaggaaaacagaatggatcaggcatggagaccaaacacagcccactagaggttggcagtgagagttctgaagaccagtatgatgacttgtatgtgttcattcctggtgctgatccagaaaataattcacaagagccactcatgagcagcagacctcctctccccccgccgcgacctgtagctaatgccttccaactggaaagacctcacttcaccttaccagggacaatggtggaaggccaaatggaaagaagtcaaaactggggtcatcctggtgttagacaagaaacaggagatgaacccaaaggagaaaaagagaagaaagaagaggaaaaagagcaggaggaggaagaagacccatatacttttgctgagattgatgacagtgaatatgacatgatattggccaatctgagtataaagaaaaaaactgggagtcggtctttcattataaatagacctcctgcccccacaccccgacccacaagtatacctccaaaagaggaaactacaccttacatagctcaagtgtttcaacaaaagacagccagaagacaatctgatgatgacaagttccgtggtcttcctaagaaacaagacagagctcggatagagagtccagccttttctactctcaggggctgtctaactgatggtcaggaagaactcatcctcctgcaggagaaagtaaagaatgggaaaatgtctatggatgaagctctggagaaatttaaacactggcagatgggaaaaagtggcctggaaatgattcagcaggagaaattacgacaactacgagactgcattattgggaaaaggccagaagaagaaaatgtctataataaactcaccattgtgcaccatccaggtggtaaggaaactgcccacaatgaaaataagttttataatgtacacttcagcaataagcttcctgctcgaccccaagttgaaaaggaatttggtttctgttgcaagaaagatcattaaagaaggttattataatgaaactcacgaatctacggacattttgctttcagggtgaagcaagcttgaatttggattgcctgctctctttaaagcgaattcatactatgacagcagaaacaaaacttcagatttcagaatttgttattggcaaaatttattctcattatacctgcttcatatgggtatattactattaaaacagaataccatagagtaattgcattatttgaaaattctctcattttacaatgcacttcaccaatgaaacagctaatttccattttgaaaattaaaagaaaacagcacagagaagttaaatgcggtgtagcaaagttatggggtctgcttgagggcactaacctcaacagattattcctcctctccttagaataaccatgaaaatacaaatttacttagcacatttttgctttttaagtagctggttcattttctgaatttctcacattcagagttccagtcattattgttacatcatgtttgcagaaaccttgtcttatttagtgtctatttgcatataaccctgaaaacattattatttgaaaacttttctatatctcaaattaatatacattttcataacctacctttgtattaagacttgcaattttatcaatctattatttcttagaaacaatttactagcttagaatagaaagcaatgttatcgtcatataattttcatgtacaaatgccacaaataaattgaatgtttaaagctatgtctgagtttttaaagtaaatttataagaattagccaataaaattgcttctcggccttttggctaagatcaagtggagtatt

SEQ ID NO: 409265 - DNA, 3414 bp, Homo sapiens
tgagacctggccgcagcctccgcgggtggcaagcgggctggggagagccgagggccaaaggaagagaaaatcgcggggagtctctggccgggagagtccaggtagcgctcggcgggcagcagtgcgcaggcccctcggcttcaaccgccacaatgctgccagcagcgccaggcaaggggcttgggagcccggaccccgccccctgcggcccagcgcccccaggaaatacaaaagatataataatgatatatgaagaagatgctgaggaatgggctctgtacttgacagaagtatttttacatgttgtgaaaagggaagccatcctgttatatcgcttggagaatttctcttttcggcatttggagttgctgaacttaacgtcttacaaatgtaaacttttgatattatcaaatagcctgcttagagacctaactccaaagaaatgtcagtttctggaaaagatacttcattcaccaaaaagtgtagttactttgctttgtggagtgaagagttcagatcagctctatgaattactaaatatctctcaaagcagatgggagatctcaactgaacaggaacttgaagactacatctctgtaatccagagtatcatattcaaagattctgaagactactttgaggtcaacattccaacagacctacgagcaaaacattctggggaaataagtgagagaaaggaaattgaagaactatcagaagcttcaagaaacaccataccactagcagtggtgcttcccactgaaattccatgtgagaatcctggtgaaatattcataattttgagagatgaagtaattggtgatactgtagaggttgaatttacatcaagtaataagcgcattagaacacggccagccctttggaataagaaagtctggtgcatgaaagctttagagtttcctgctggttcagtccatgtcaatgtctactgtgatggaatcgttaaagctacaaccaaaattaagtactacccaacagcaaaggcaaaggaatgcctattcagaatggcagattcaggagagagtttgtgccagaatagcattgaagaacttgatggtgtccttacatccatattcaaacatgagataccatattatgagttccagtctcttcaaactgaaatttgttctcaaaacaaatatactcatttcaaagaacttccaactcttctccactgtgcagcaaaatttggcttaaagaacctggctattcatttgcttcaatgttcaggagcaacctgggcatctaagatgaaaaatatggagggttcagaccccgcacatattgctgaaaggcatggtcacaaagaactcaagaaaatcttcgaagacttttcaatccaagaaattgacataaataatgagcaagaaaatgattatgaagaggatattgcctcattttccacatatattccttccacacagaacccagcatttcatcatgaaagcaggaagacatacgggcagagtgcagatggagctgaggcaaatgaaatggaaggggaaggaaaacagaatggatcaggcatggagaccaaacacagcccactagaggttggcagtgagagttctgaagaccagtatgatgacttgtatgtgttcattcctggtgctgatccagaaaataattcacaagagccactcatgagcagcagacctcctctccccccgccgcgacctgtagctaatgccttccaactggaaagacctcacttcaccttaccagggggtgacatataaattattctcctggagtcacgagctcttctctaatactgtttcctacggcacttgactaagccaccttgggaagctcaaaaaagtgacagatggacaccaataatgttgcatgtaacagaagagtaaacaccatgtaaatatttcataaacagggacaatggtggaaggccaaatggaaagaagtcaaaactggggtcatcctggtgttagacaagaaacaggagatgaacccaaaggagaaaaagagaagaaagaagaggaaaaagagcaggaggaggaagaagacccatatacttttgctgagattgatgacagtgaatatgacatgatattggccaatctgagtataaagaaaaaaactgggagtcggtctttcattataaatagacctcctgcccccacaccccgacccacaagtatacctccaaaagaggaaactacaccttacatagctcaagtgtttcaacaaaagacagccagaagacaatctgatgatgacaagttccgtggtcttcctaagaaacaagacagagctcggatagagagtccagccttttctactctcaggggctgtctaactgatggtcaggaagaactcatcctcctgcaggagaaagtaaagaatgggaaaatgtctatggatgaagctctggagaaatttaaacactggcagatgggaaaaagtggcctggaaatgattcagcaggagaaattacgacaactacgagactgcattattgggaaaaggccagaagaagaaaatgtctataataaactcaccattgtgcaccatccaggtggtaaggaaactgcccacaatgaaaataagttttataatgtacacttcagcaataagcttcctgctcgaccccaagttgaaaaggaatttggtttctgttgcaagaaagatcattaaagaaggttattataatgaaactcacgaatctacggacattttgctttcagggtgaagcaagcttgaatttggattgcctgctctctttaaagcgaattcatactatgacagcagaaacaaaacttcagatttcagaatttgttattggcaaaatttattctcattatacctgcttcatatgggtatattactattaaaacagaataccatagagtaattgcattatttgaaaattctctcattttacaatgcacttcaccaatgaaacagctaatttccattttgaaaattaaaagaaaacagcacagagaagttaaatgcggtgtagcaaagttatggggtctgcttgagggcactaacctcaacagattattcctcctctccttagaataaccatgaaaatacaaatttacttagcacatttttgctttttaagtagctggttcattttctgaatttctcacattcagagttccagtcattattgttacatcatgtttgcagaaaccttgtcttatttagtgtctatttgcatataaccctgaaaacattattatttgaaaacttttctatatctcaaattaatatacattttcataacctacctttgtattaagacttgcaattttatcaatctattatttcttagaaacaatttactagcttagaatagaaagcaatgttatcgtcatataattttcatgtacaaatgccacaaataaattgaatgtttaaagc

SEQ ID NO: 409266 - DNA, 553 bp, Homo sapiens
gagtgaagtaactgactggacatcccaaagttaggtggtcctgagagccaggtgctgacagctgcctcaccttaagagtctcctttcgttatggcatctggaaagatctcacatggcaggcctgcttctagttccttcttcctagtgtgtctgaggaaatccaatctctcccactccagcccgcctactcattgaacatggctgctatctctgtcttctggaaacacggctccaatcctgcaacaactctatacaagagctcccagtggttcttaaccttggctgagcaacagacccatttgggaagatttttaaaaatctagcttatgagatacctcagatcaatcaatccctggcagtgggtctgctaaacatcagatacagacaaacaactgcatagatctccaactagattgaagaacaggaccctccagagagcttccaagaagacaccaacctaggcatgggtttatgttcctgacaaagaataaggattgttatgaagaatgttctattttgaattgtgaaaataattatttaaagctgtacaaaa

SEQ ID NO: 409267 - DNA, 822 bp, Homo sapiens
gtggaacaatcgtgcggtcagctccacctgccacaacccttcctgaaagatccaggcccacagaaaagccaggatcctgtctttaaagactgctctgctctcccacctcatcctgtgtccaataaccgcaccttccaacagcgtttctaaccctgttctctccaagcgtggcctgcagcacctctccaggcctctgtgctgacagctgcctcaccttaagagtctcctttcgttatggcatctggaaagatctcacatggcaggcctgcttctagttccttcttcctagtgtgtctgaggaaatccaatctctcccactccagcccgcctactcattgaacatggctgctatctctgtcttctggaaacacggctccaatcctgcaacaactctatacaagagctcccagtgaaagctttcactagaccttgatggcactatggtcattatcttgtcaaaactgtggtggatttgaagagctagtgatgaagaatggaggtttcctgtcctagaaataaccaaaggcccaggcttggaggtggcagaaaaagtggcacttaaggttaaatttcctggataaaatcagatcagccgtgtaatcaccctgctacaataaaaggagctcagtgtgctttatggcaaccacaccagtcaagggctctctctggcaccaagggagccataagggccccctgccaagtggagctgagggatgctcgaggccagggtctggaccttctcactataaaaagaatagtgaagtatacagatatttacctactgagttatgtttgggctgataaaaatgctcagatgtcctt

SEQ ID NO: 409268 - DNA, 455 bp, Homo sapiens
gtggaacaatcgtgcggtcagctccacctgccacaacccttcctgaaagatccaggcccacagaaaagccaggatcctgtctttaaagactgctctgctctcccacctcatcctgtgtccaataaccgcaccttccaacagcgtttctaaccctgttctctccaagcgtggcctgcagcacctctccaggcctctgtgagtagacaccatctttctccaccttgttcttacccaagcccacatatttattcccagaatcctagccttcatttctgttgtcattattttttagctggcaggaagagagggaaggaagataaggtaggaaaaggcaaaagaaaagcatttttcccatttgcctcagtcaaatgattgcattaaacagctcttcaagccgagttgacattttcttcccaaaaatctccaattgaatttttctccctgggtcaactcat

SEQ ID NO: 409269 - DNA, 1162 bp, Homo sapiens
gtggaacaatcgtgcggtcagctccacctgccacaacccttcctgaaagatccaggcccacagaaaagccaggatcctgtctttaaagactgctctgctctcccacctcatcctgtgtccaataaccgcaccttccaacagcgtttctaaccctgttctctccaagcgtggcctgcagcacctctccaggcctctgtgctgacagctgcctcaccttaagagtctcctttcgttatggcatctggaaagatctcacatggcaggcctgcttctagttccttcttcctagtgtgtctgaggaaatccaatctctcccactccagcccgcctactcattgaacatggctgctatctctgtcttctggaaacacggctccaatcctgcaacaactctatacaagagctcccagtgaaagctttcactagaccttgatggcactatggtcattatcttgtcaaaactgtggtggatttgaagagctagtgatgaagaatggaggtttcctgtcctagaaataaccaaaggcccaggcttggaggtggcagaaaaagtggcacttaagttactagcccagtatttggaatttgccaaagctatattcctcagaatttacttcaagagctcctttgtatcggcggagaatgaagaacggagaagaggaggaggaggttgaaagaaacttaagagatgtggcaactaattgcaacgtgtagattgtatttagctcatgattcacacaaactagatatttgttattaaagaattatggttgtttttggtgtgatattagtattgtgctcacatttcttaagaatctatctttagagataggtgctgaaattcttgcagatgaaatgacattatcatctgagatgtgcttcaaaaacagttaaaggagatatcgataagatggccttgaattcacaattgctgaagatgggtataggccacatggagttttattataatcttttctctccttttatattgtttgtagttttccattataagttaaaatgaagaaaataagtcaaccaacatgaagcggtcagtgagattcttacggacatcccagctttgcctcttatccgcctgacatagtcatggaactagaaagacaagcacaatttgccaagcatcagagtggcatcttgaaactgc

SEQ ID NO: 409270 - DNA, 1167 bp, Homo sapiens
aatgactcttcccctcatcagctatgtgacaagaagtcactaaacttttctatatctcggcttctttattaataaaatgagaggtgggattaggttacctccaaggttttaacattctttgatcttatacaaatgccagtgaagaagcatttttatttttaataacactttcctcttcagatggccaagttattgtgattgaaggcattccaggaaacaggaaacagtggcggcatgaagctccaggaactttaatgagtgttttggcagcagcacatctaacgagtagctcattttctgccgatgaagaatttgcaatgggaacattaaaacaatggctacccaaagaagaagatgaagggaaggtagaaatggtctctggcattgaagtagatgaggaacaactagaaccaagatctgatgatgatgatacaaattttgaagaatctgaagatgagttgagagatgaagtagtagaatacttagaaaaactcgctactttcaaaggggaagaaaaaacagaagaggcctccagtacctctaaggactctagaaagtcaagagaaagagaggggataagtatgcagaaatctgaagaattaagggagggcttggagaatatttctactacatctaatgaccacatttgtattactgatgaagaccaaggaacatcaacaaccagtcaaaatatacaagtgtgattattgtactttttcttaagtaataagttagtgtctattacctatagtatttatttgggtacaagtcataaatgctcatttactgtaagggttttctagtaatctcaaggatttattaatttttctttcaatttaggaagtagaacttttgaatatagccattaatatttttactttaaagtttctattaagaaatcttaggccgggcagtctcatcactttgggaggccaaggcaggcagatcatgaggtcaggagtttgagaccagtccaaccaacatggtgaaaccccgtctctactaaaaatacaaaattagctgggcatggtggtgcatgcctgtaatcccagttacttgggaggctgaggcaggagaatcacctgaacccaggagatggaagttgcaagtgagccgagattgtgccactgcactccagcctgggcaacaagagcgaaactctgtctc

SEQ ID NO: 409271 - DNA, 1098 bp, Homo sapiens
ggctttagaatttcaccatatgaattttgggagagaggagcacagttcagcccataactaacacacgacggaatgaagttgataatagtgagaccttgttggtacaagactatgtaacataacctgcgcttctcaacaaagaattgcttttctgacttctgcactcaatagcaagacaaatctctcctctgccttctccttatcagactactcaacatgaaggcaataagaatgaagacctctatgtataattgacttccacttaataaataaggttacttggtacactggtcgacaaaaccttgaaatgttgatgtttaagggctgttgattgctggcagcaaagaagtccaactgtgctggtacccgagatagcgtctccacattttcttccaggatcatcacctttgttctaaatagctcccacatagtgtgaacagaagtcatatgttttagattttctgccttggcacccaggaaaccagtatgattgagtaaacatattaaacttcctctgcatttccagcctgaacagatgttgagtacaagctgatccacctacgttcaacctgagagagtccacatccacagactgtttcatttccctttttcaatttacatagaggcatagattcttgctggcatatacaaatgcgccatttaaggcaatcaaaaatggttccacatctcatctgatttccacaattgttgctgtaacgatggactactgaggagagagacaatttctctggcacatcttcccacgttttagcaacatgttcatggagagccaatattcagtaattacagcccaattcctcacaatttcacaattcgctaacaatatgcattttcacaatgtaaagctgattttcctttaaccaaatcaaacatgaaaagatagctgcatgcaatgggcaatctagatcattagaagattgatgtaaaattagaggacactgagactggaatagattgcaaacttcagggagctcagaaaacttgtaaactctacattttgaggaaatatgttgtcgatgcttttgcaactctatgcagtaacttaacaaataaagccttaaagtaacttaactacga

SEQ ID NO: 409272 - DNA, 407 bp, Homo sapiens
gtctgagaatatttctaggagcatttcaccagtagaaaacaaaaattctaacaacagttaagctaatgaataaaggctgtggcattgatccacaatgaagacagctaaagccctgaagcagccttttctgaagtgtggacttctgattagagtctttcacttgcaccagtgttcattctcaatgaggggacttcaggtagtaactaagcatcatacggtgtagcttaaatggaacacacatgcaaacatacacacttgtgagtgtgtgtgcccatgctgtagtattttaaactatgggcaacataacagtagtatttaccagggtccagtcacttgagacttcccttctggaattctgtcatacacccccacctcctgcaataaaatagtagcatcggcaaaaaaaa

SEQ ID NO: 409273 - DNA, 487 bp, Homo sapiens
gcactccagcctgggtgacagagcgagactccatctcaaaaaaaaacccaaaaaacctgtggcttctgccttgtcgtctgtccctgggattactccctctgggagaaagcaggtgtcatgtcaaggggacacccaaacagctctgtggagagttcagtgccatgaggaactaagatctcctcccacagccgtgcagccgtgtcgggaacttgagggtgaatccccaagcacagtgaaatcttcggatgacagcagccccagcagcatcttgattgccgcctcgtgagtgatcctaaaacagaaactttcagctaatttgcctcctcatttctgacccacacaaactgagattcaaaaacgtgttgcttgtgttaagccctcaagttctggggtaatttgttacacaacaatagcaggaagaaaaggagaagtatcactctttttgctgcacaaatgtgaaaactcacaataaagagaagggagaaag

SEQ ID NO: 409274 - DNA, 590 bp, Homo sapiens
tgattttggccaaagcataagaaaggaagaggtggacctcctctatatataatatgtgaagcaaataagataactggattatagctaaaagagtagcaagacatagacagagtctgtctacataacagtttttaaaagaagcacaaagacaggctggacatggtggcccacacctgtaatcccaatactttgggaggacaaggtaggaggatcacttgaggccaagagtttgagaccagccttgggcagcatattgaggccccatctctacaataaacaaacagatttttaaaatttagctaggaatgtagtggggtgtgcctgtagtctcagcctcctaaagaattgggattatagtcatgagccactgtgaccggctacaattttcaagtctacaatatattattattgactgtagaaaccatattgtacaatagctcttcataacttactcctcctgtctaatggaaactttgtaccctttgaccatcatctcctccccattctcccaccaatccccaatctggtgtgaattttctgaattgatacctatattgatccagggttaaataaacaaagtataatactat

SEQ ID NO: 409275 - DNA, 808 bp, Homo sapiens
cgtagtccgactagcagcagccgctgctccccggtggttcagagccgcgcgagctgagcgtttcgcctacaaaagcatcttcggatcggtttcccaccgccgaatgttgcttgagccaatgtgactggctctaggaggaaataaatcacatctgtcaaaagagcctcgagtcgaaggataggagaaacctcgaatttggtgggtgctgaccaaggcaccatgcaaggggttaactttgctttagggggtgacctggctggctgctgcagttgccgttaacagccaccgaatggatgagactccagatccacctcctcctgcgttcctcaaaacaggaagatggagaactacggagagctacttcccagaggggccgatggcaagcactcccttcaaggaaactggggaagttgcccgattttgatcgtttccatccaaacacccaccagacaatatatacatacacatttctaaattaacagcattggcaaaaactgaaaatacttgtatttaaagttgatgacagtatgaaaacaagaaatccgtccgggcgcggtgggtcacgcctgtaaccccagcactgatcacaaggtcaggagttcgagactagcctggctaacatggtgaaacccccttctctacaaaaattggctgggcgtagtggcgcgtgcctgtattcccagctacttgggaggctgaggcaggagaatagcttgagcccgggaggtggaggttgccgtgagcagaaatggcaccactgcactccagcctgggcgacagagtaagactctgtccccgcccccctcca

SEQ ID NO: 409276 - DNA, 514 bp, Homo sapiens
ctgaatgttctcccaaggggtactgtaaaggggacatgagagaagggatgatacagctcgataaccggtttccttcaccttccttcaggcccagcctgcagcctgcaagcaccggatgagtggacgtggctgagcagccatgagaaagatgtggggctctccggtgactgtagacccagcataaatcaacagttcaaggtgctcatccccaaagccatggtgagaccttagctgctgtaataaaagtgtagtgccaaagtaagggcaatgacagtcttgcttggttttatgctggagctcaactctgggccacactcttttgtgggggtgggtggtaattatcttttttaaacaagacactggctatatacagtcaagtgtgcaaggcttaagtatacaactcatgtaattttcccacatttatatacctatgtagacattcaaatgaagatactaaacatttccagcccccaagaaaacttccttaaattccctcctgggaatctggcagaga

SEQ ID NO: 409277 - DNA, 1301 bp, Homo sapiens
aactttttcattttctcagactaaaaactctgtccctattaaacactaactcccctttctctcctcccccagcccctggcaaccacattctcctttctgtctatgcgaattggactactccgggggccaccgatgactggagtcatgctgtgttgtctctttgcgactggaatcctgtctctttaacatccttggatctgtccctcctctcccttctcacggcactgcctcttatgatctcagtgagtacagtggtctccaaactagtcccctgcctcagttctccctccttcctatcctcactcaactcagcctccaaatgatcttggtgaaaatcagtcctcatgctactcccaagctgaaaactccaactgcttcccaagctccaactcctaagctccaactgcttcccaagttccaactgcttcccatggatggatagagagcatgtctttaaagcgcacctcaccacacaggctcccggcacccctggttgggataatgcccccctctgctcccacacctctgtaggaagctctaaagaagcagcgctgcccctgcctagcggaggagactgggactccccacatctctctgtgttcccagattgagccgggcaagatcacatctgacatctgcacatctcagcgcccagcccctgcctggctcagagtgaagtgtcttccaatccattgaaatttctagtcccggggtctcgaggacactagggccactgtgcaatggcagaaggagcattgccatagaagtcagggggcctggttacaagtcctgactttagttgaggacctgccatatgaccttgagcaaactgctgtacttctctggatctcagtttctacaacctaattcactgggcccagcctgcagcctgcaagcaccggatgagtggacgtggctgagcagccatgagaaagatgtggggctctccggtgactgtagacccagcataaatcaacagttcaaggtgctcatccccaaagccatggtgagaccttagctgctgtaataaaagtgtagtgccaaagtaagggcaatgacagtcttgcttggttttatgctggagctcaactctgggccacactcttttgtgggggtgggtggtaattatcttttttaaacaagacactggctatatacagtcaagtgtgcaaggcttaagtatacaactcatgtaattttcccacatttatatacctatgtagacattcaaatgaagatactaaacatttccagcccccaagaaaacttccttaaattccctcctgggaatctggcagaga

SEQ ID NO: 409278 - DNA, 377 bp, Homo sapiens
ctcacggcatctggcacatggtactacataagcatgtgctgaactagatgaagaaagaagacagtggtgaaaagatctgagccacagcagaagccccaagtcgcctagaggcaatcaaagcgagagtgggatgtcatgatgtgacaatgagttatgacccatgagccctccttcctacaatgctcagtaatctcaaagctgaaacagcactatgccagagatgaaaaatcgacatttctgtctggatcctaagatctgaaagtggaaaagtaatacaaggcagtgaggagtctagaaaataggtctcctcaaaatgggtaaaggatctggaaatgttgaatctggagaagaaaaatctaagggaagaaacaaaaaat

SEQ ID NO: 409279 - DNA, 315 bp, Homo sapiens
cacaattaaataaccatcaacctgccctcactgtgcctgaacttaaaagtcaataacacctgagcatcaataggctattgactatgcaattttactttataccatatatgggtatctgatgttcctgggaaactaactgcaaatgtggtgtaaataaagactaatcatttcaactccattaaatgtagggaagctacaagagcagatttaaaacgttgtgaactgcaaaatgagatggcacccctctacatttacgttagtagagggcttctgtttagagtaatcatagatctggttatttagatactttcccaa

SEQ ID NO: 409280 - DNA, 1061 bp, Homo sapiens
ccccataccgcgaactttgtagctggtgccttcggaatatgatggcaaatcaccttgtaaagcctgataatagaaattgcaagaggccaagagaattggagtctccagtgccagatagtccacagctgtcctctcttggaaaatcagattcatctttctctgaaatttccggactattttataaagatgaagccttggagaaagatttaaatgatgtgagcaaggaaattaatctaatgttgtctacctatgcaaagcttttaagtgagagagcagcagtagatgcatcttacattgatgagatagatgaactcttcaaagaagccaatgctattgaaaactttctaatacaaaaaagagagttcctgcgacagaggtttacagtgattgcaaacacattacacagataaaatatatacttgaaataagctgagaatttaacctattattgttataatgaaagaatgacatttatgctttgaaagctctcgagttgttaaagaaaatgtatatctcgaatagagaaggggaaactccttgaatttctaggtttaaaaaggaacttttaaattccttaatgttaatattaatgttcatgttaatgtcctaagctggccattaacatgaactacgtcacttttcttttgagggtcaaatatttagtgcattttatagaagtgtaaattatttaaatcttatgtggattcttttattttttccttaaacttcttagtgtttctgaaacttctaaaaaaggattcagttaatttataatgtttaataatattatacttttaggatattttgtttaaatatcagatagttttggagataattttgaaattttttttatggtcaggattataaaagaagattaaaaccttagaggtgatttttccagtttcttagaatataatgacataactgtgtgctatttccatttgattattttcactattagttattatgtatgactaataaaagctctcggcttaaaattattttcttgtggtaaaagtagtaaaataaaaaccagaaattactcaccagaaaaaaaatga

SEQ ID NO: 409281 - DNA, 1158 bp, Homo sapiens
ttcactccctcgcgttcgctgacgaggaaggtccccataccgcgaagtacattggccttggggtggggctggagggatgggcgcctgtgagaatgtgacggactgtgacacaaggaaggctggtgccttcggaatatgatggcaaatcaccttgtaaagcctgataatagaaattgcaagaggccaagagaattggagtctccagtgccagatagtccacagctgtcctctcttggaaaatcagattcatctttctctgaaatttccggactattttataaagatgaagccttggagaaagatttaaatgatgtgagcaaggaaattaatctaatgttgtctacctatgcaaagcttttaagtgagagagcagcagtagatgcatcttacattgatgagatagatgaactcttcaaagaagccaatgctattgaaaactttctaatacaaaaaagagagttcctgcgacagaggtttacagtgattgcaaacacattacacagataaaatatatacttgaaataagctgagaatttaacctattattgttataatgaaagaatgacatttatgctttgaaagctctcgagttgttaaagaaaatgtatatctcgaatagagaaggggaaactccttgaatttctaggtttaaaaaggaacttttaaattccttaatgttaatattaatgttcatgttaatgtcctaagctggccattaacatgaactacgtcacttttcttttgagggtcaaatatttagtgcattttatagaagtgtaaattatttaaatcttatgtggattcttttattttttccttaaacttcttagtgtttctgaaacttctaaaaaaggattcagttaatttataatgtttaataatattatacttttaggatattttgtttaaatatcagatagttttggagataattttgaaattttttttatggtcaggattataaaagaagattaaaaccttagaggtgatttttccagtttcttagaatataatgacataactgtgtgctatttccatttgattattttcactattagttattatgtatgactaataaaagctctcggcttaaaattattttcttgtggtaaaagtagtaaaataaaaaccagaaattactcaccagaaaaaaaatga

SEQ ID NO: 409282 - DNA, 467 bp, Homo sapiens
tcaggtgggaggcagaagaaatagacaaactcctaaggccttttcccatcaaagtctgctttgttcaaaggtccatttccctttattagcctgcactcttaggctatggctgtaaacagaataaacagtacaactgaggctactatccaagtagttcatttctaaaactcctgctttcattgcaaatgtctcagtgctttttgccctaaattatacatatactatcataattttatattacatttcattttccatgtatagatagacagacttatgttaactaaggagttcatctaagattataacgtattctaaaaacaaaaaaagattataatgtattctgtttgctatgcttggtaatgaagaacaaggcattgaattacaaagttcctaaagtcattgacatggcaagatgaattccattctggtcagtaaaaagagagtttatttttctaaggtcctgaaaa

SEQ ID NO: 409283 - DNA, 512 bp, Homo sapiens
gggtaaaattgaatccatttcaccaataaattaagtaattaatcctttaaaacagatgctagatgttgtaccagcataattatatccagtgtacttacacagtcttgaatacattaagaaaatactgtttgtttagaagagtttcaaaacatttgagagggaggaaggcactcttccattgacccttagtgtgtgctttagttccatttggggttgactgttttgtgttgctgcgtgatgcctctagtacaaggccaaggcctccatgcctcatgcgtcctgctcccctcctctgccatccctcttccagcattaaccagtccatgtttgttaatcaaccacctccatataccacatccagcaaagctccctgagtgactcacagtcacaaacaaccagggcacggatctttcctctgtgtgcttccaggttcttctgaggacaacctgagtttagtatgcctaccacgaagtgaagatgatgactgtgatgatgatgatgatgatgcccag

SEQ ID NO: 409284 - DNA, 3224 bp, Homo sapiens
caacgctcagcgaaattgactgccccactgtcatctgcctctcaatttggtactctgtaactctgtgaccaccaagaagcctttttccgtcccccacaaagctctttttggaaaattccctacgggagctgaattttaagcccatttactttataggaagaaacagaaaggcagcatgtcagctgaaacaccaatcacattgaatatcgatcctcaggatctgcaggtccaaacattcaccgtggagaagctactggagcctctcataatccaggttaccacacttgtaaactgtccccagaacccttccagcaggaaaaaaggacgttcgaaaagagccagtgtccttctagcttctgtggaggaagcaacttggaatttattagacaagggagagaagattgcccaggaagctacagttttaaaggatgagcttacggcttcacttgaggaagttcgcaaagaaagtgaagctctgaaagtatcagctgagagatttacagatgacccctgttttctcccaaaaagggaggctgtggttcaagctgcccgtgccttgctggctgcggtgacgagactccttatccttgcggacatgattgatgtcatgtgcctcttgcaacatgtgtcagcttttcaaaggacatttgagtctctcaaaaatgttgccaacaaatctgacctccagaaaacctaccagaagcttggaaaggagctggaaaatttggattatttagccttcaaacgtcagcaggacttaaaatctccaaatcagagagatgaaattgcaggagcccgagcttcactgaaggagaactctcccctcttgcattcaatttgttcagcttgtttggagcattctgatgttgcttccctcaaagcaagcaaggacacagtttgtgaagaaattcagaatgctctcaatgtaatttcaaatgcttcacaagggatccagaatatgacaaccccaccagaacctcaggcagcaaccctgggaagtgcccttgatgagctggagaatttaattgtcctgaatccactcacagtaactgaggaggaaatacgaccatcactagagaaacgccttgaagccattatcagtggggctgctctgctggcggattcttcatgtacgagggacttacaccgagagcggattatcgcagaatgcaacgccattcgccaggctcttcaggatctgctttcagagtacatgaacaacgctggaaaaaaagaaaggagtaataccctgaatattgctttagacaacatgtgtaagaagacaagagaccttcgcagacagctccgcaaggctattatagatcatgtgtcagactctttcctggatacgacagtccctcttttggttctcattgaagctgctaagaatggccgggaaaaggaaataaaagaatatgctgcgatatttcatgaacacaccagcaggcttgtagaggtggcaaatcttgcttgttccatgtcaacaaatgaagatggaattaaaattgtcaaaattgcagccaatcatttggaaaccttgtgtccacagattattaatgctgcacttgctttggctgcaagacccaaaagtcaagcggtcaaaaacaccatggaaatgtacaagcgtacatgggagaatcatatacatgtcctcactgaagccgtagatgacattacaagcattgatgacttccttgctgtatctgaaagccatatcttggaagatgtcaacaagtgtatcatagccttaagagaccaggatgctgataatttagaccgtgctgcgggtgctatcagaggccgggcagcaagagttgctcacatcgtcacgggtgaaatggacagttacgagccaggggcttacacggaaggtgtaatgagaaatgttaacttccttacaagtactgtaattcctgaatttgtaacacaagtgaatgttgccttggaagccttaagcaaaagctcattgaatgtgttggatgataatcaatttgtggacatctcaaagaagatctatgatacaattcatgatatcagatgttcagtcatgatgattcggaccccagaggaactggaggatgtttctgaccttgaagaggaacacgaggtccgcagtcacaccagcattcagaccgaagggaaaactgatagggctaagatgactcaactgcctgaggcagaaaaagaaaagattgctgagcaagttgctgatttcaagaaagtaaagagtaagctggatgctgagattgagatatgggatgatacaagcaacgacatcattgttctggccaagaacatgtgtatgatcatgatggagatgacagacttcactaggggcaaaggaccactaaagcatacaactgatgtgatctatgcagcgaaaatgatatcagaatcaggatcaaggatggatgtccttgctcggcagattgctaatcagtgcccagatccatcttgtaaacaggacttgttggcctacctggaacagattaagttctactcccaccaactgaaaatctgcagtcaagttaaagctgagatccagaacctgggaggagagctcatcatgtcagctttggacagtgtcacatccctgatccaagcagccaaaaatttaatgaatgctgtagtgcaaacagtgaaaatgtcttacattgcctcaaccaagatcatccgaatccagagtcctgctgggccccggcacccagttgtgatgtggagaatgaaggctcctgcaaaaaaacccttgattaaaagagagaagccagaggaaacgtgtgcagctgtcagacgaggctcagcaaagaaaaaaatccatccattgcaagtcatgagtgaatttagaggaagacaaatctactgaaaccactattctacatatagtgcctatatgacaaaatcctgcctaaccacactgctttattttacacttaagaagttctgtaatttcactaagttttggtgtttaactcacaaataacataaaatattgggcgctaaatcaacaaaagcaatatatatttgggatcatatcactgtcatttctgtatggtcagcacctaatagttaaggaatatttgcttgttgaatgaatgaaattatcacgtgtcattcagcgtttcccatcatagagattatctactattcgttaccaaataaacacagttgttagcgacaagttacgcccttcttattacggtgactagttaactatgggtatttaa

SEQ ID NO: 409285 - DNA, 3211 bp, Homo sapiens
caacgctcagcgaaattgactgccccactgtcatctgcctctcaatttggtactctgtaactctgtgaccaccaagaagcctttttccgtcccccacaaagctctttttggaaaattccctacgggagctgaattttaagcccatttactttataggaagaaacagaaaggcagcatgtcagctgaaacaccaatcacattgaatatcgatcctcaggatctgcaggtccaaacattcaccgtggagaagctactggagcctctcataatccaggttaccacacttgtaaactgtccccagaacccttccagcaggaaaaaaggacgttcgaaaagagccagtgtccttctagcttctgtggaggaagcaacttggaatttattagacaagggagagaagattgcccaggaagctacagttttaaaggatgagcttacggcttcacttgaggaagttcgcaaagaaagtgaagctctgaaagtatcagctgagagatttacagatgacccctgttttctcccaaaaagggaggctgtggttcaagctgcccgtgccttgctggctgcggtgacgagactccttatccttgcggacatgattgatgtcatgtgcctcttgcaacatgtgtcagcttttcaaaggacatttgagtctctcaaaaatgttgccaacaaatctgacctccagaaaacctaccagaagcttggaaaggagctggaaaatttggattatttagccttcaaacgtcagcaggacttaaaatctccaaatcagagagatgaaattgcaggagcccgagcttcactgaaggagaactctcccctcttgcattcaatttgttcagcttgtttggagcattctgatgttgcttccctcaaagcaagcaaggacacagtttgtgaagaaattcagaatgctctcaatgtaatttcaaatgcttcacaagggatccagaatatgacaaccccaccagaacctcaggcagcaaccctgggaagtgcccttgatgagctggagaatttaattgtcctgaatccactcacagtaactgaggaggaaatacgaccatcactagagaaacgccttgaagccattatcagtggggctgctctgctggcggattcttcatgtacgagggacttacaccgagagcggattatcgcagaatgcaacgccattcgccaggctcttcaggatctgctttcagagtacatgaacaacgctggaaaaaaagaaaggagtaataccctgaatattgctttagacaacatgtgtaagaagacaagagaccttcgcagacagctccgcaaggctattatagatcatgtgtcagactctttcctggatacgacagtccctcttttggttctcattgaagctgctaagaatggccgggaaaaggaaataaaagaatatgctgcgatatttcatgaacacaccagcaggcttgtagaggtggcaaatcttgcttgttccatgtcaacaaatgaagatggaattaaaattgtcaaaattgcagccaatcatttggaaaccttgtgtccacagattattaatgctgcacttgctttggctgcaagacccaaaagtcaagcggtcaaaaacaccatggaaatgtacaagcgtacatgggagaatcatatacatgtcctcactgaagccgtagatgacattacaagcattgatgacttccttgctgtatctgaaagccatatcttggaagatgtcaacaagtgtatcatagccttaagagaccaggatgctgataatttagaccgtgctgcgggtgctatcagaggccgggcagcaagagttgctcacatcgtcacgggtgaaatggacagttacgagccaggggcttacacggaaggtgtaatgagaaatgttaacttccttacaagtactgtaattcctgaatttgtaacacaagtgaatgttgccttggaagccttaagcaaaagctcattgaatgtgttggatgataatcaatttgtggacatctcaaagaagatctatgatacaattcatgatatcagatgttcagtcatgatgattcggaccccagaggaactggaggatgtttctgaccttgaagaggaacacgaggtccgcagtcacaccagcattcagaccgaagggaaaactgatagggctaagatgactcaactgcctgaggcagaaaaagaaaagattgctgagcaagttgctgatttcaagaaagtaaagagtaagctggatgctgagattgagatatgggatgatacaagcaacgacatcattgttctggccaagaacatgtgtatgatcatgatggagatgacagacttcactaggggcaaaggaccactaaagcatacaactgatgtgatctatgcagcgaaaatgatatcagaatcaggatcaaggatggatgtccttgctcggcagattgctaatcagtgcccagatccatcttgtaaacaggacttgttggcctacctggaacagattaagttctactcccaccaactgaaaatctgcagtcaagttaaagctgagatccagaacctgggaggagagctcatcatgtcagctttggacagtgtcacatccctgatccaagcagccaaaaatttaatgaatgctgtagtgcaaacagtgaaaatgtcttacattgcctcaaccaagatcatccgaatccagagtcctgctgggccccggcacccagttgtgatgtggagaatgaaggctcctgcaaaaaaacccttgattaaaagagagaagccagaggaaacgtgtgcagctgtcagacgaggctcagcaaagaaaaaaatccatccattgcaagtcatgagtgaatttagaggaagacaaatctactgaaaccactattctacatatagtgcctatatgacaaaatcctgcctaaccacactgctttattttacacttaagaagttctgtaatttcactaagttttggtgtttaactcacaaataacataaaatattgggcgctaaatcaacaaaagcaatatatatttgggatcatatcactgtcatttctgtatggtcagcacctaatagttaaggaatatttgcttgttgaatgaatgaaattatcacgtgtcattcagcgtttcccatcatagagattatctactattcgttaccaaataaacacagtcggcaagatttttttttttttttttatttatgtctgtattttata

SEQ ID NO: 409286 - DNA, 3542 bp, Homo sapiens
caacgctcagcgaaattgactgccccactgtcatctgcctctcaatttggtactctgtaactctgtgaccaccaagaagcctttttccgtcccccacaaagctctttttggaaaattccctacgggagctgaattttaagcccatttactttataggaagaaacagaaaggcagcatgtcagctgaaacaccaatcacattgaatatcgatcctcaggatctgcaggtccaaacattcaccgtggagaagctactggagcctctcataatccaggttaccacacttgtaaactgtccccagaacccttccagcaggaaaaaaggacgttcgaaaagagccagtgtccttctagcttctgtggaggaagcaacttggaatttattagacaagggagagaagattgcccaggaagctacagttttaaaggatgagcttacggcttcacttgaggaagttcgcaaagaaagtgaagctctgaaagtatcagctgagagatttacagatgacccctgttttctcccaaaaagggaggctgtggttcaagctgcccgtgccttgctggctgcggtgacgagactccttatccttgcggacatgattgatgtcatgtgcctcttgcaacatgtgtcagcttttcaaaggacatttgagtctctcaaaaatgttgccaacaaatctgacctccagaaaacctaccagaagcttggaaaggagctggaaaatttggattatttagccttcaaacgtcagcaggacttaaaatctccaaatcagagagatgaaattgcaggagcccgagcttcactgaaggagaactctcccctcttgcattcaatttgttcagcttgtttggagcattctgatgttgcttccctcaaagcaagcaaggacacagtttgtgaagaaattcagaatgctctcaatgtaatttcaaatgcttcacaagggatccagaatatgacaaccccaccagaacctcaggcagcaaccctgggaagtgcccttgatgagctggagaatttaattgtcctgaatccactcacagtaactgaggaggaaatacgaccatcactagagaaacgccttgaagccattatcagtggggctgctctgctggcggattcttcatgtacgagggacttacaccgagagcggattatcgcagaatgcaacgccattcgccaggctcttcaggatctgctttcagagtacatgaacaacgctggaaaaaaagaaaggagtaataccctgaatattgctttagacaacatgtgtaagaagacaagagaccttcgcagacagctccgcaaggctattatagatcatgtgtcagactctttcctggatacgacagtccctcttttggttctcattgaagctgctaagaatggccgggaaaaggaaataaaagaatatgctgcgatatttcatgaacacaccagcaggcttgtagaggtggcaaatcttgcttgttccatgtcaacaaatgaagatggaattaaaattgtcaaaattgcagccaatcatttggaaaccttgtgtccacagattattaatgctgcacttgctttggctgcaagacccaaaagtcaagcggtcaaaaacaccatggaaatgtacaagcgtacatgggagaatcatatacatgtcctcactgaagccgtagatgacattacaagcattgatgacttccttgctgtatctgaaagccatatcttggaagatgtcaacaagtgtatcatagccttaagagaccaggatgctgataatttagaccgtgctgcgggtgctatcagaggccgggcagcaagagttgctcacatcgtcacgggtgaaatggacagttacgagccaggggcttacacggaaggtgtaatgagaaatgttaacttccttacaagtactgtaattcctgaatttgtaacacaagtgaatgttgccttggaagccttaagcaaaagctcattgaatgtgttggatgataatcaatttgtggacatctcaaagaagatctatgatacaattcatgatatcagatgttcagtcatgatgattcggaccccagaggaactggaggatgtttctgaccttgaagaggaacacgaggtccgcagtcacaccagcattcagaccgaagggaaaactgatagggctaagatgactcaactgcctgaggcagaaaaagaaaagattgctgagcaagttgctgatttcaagaaagtaaagagtaagctggatgctgagattgagatatgggatgatacaagcaacgacatcattgttctggccaagaacatgtgtatgatcatgatggagatgacagacttcactaggggcaaaggaccactaaagcatacaactgatgtgatctatgcagcgaaaatgatatcagaatcaggatcaaggatggatgtccttgctcggcagattgctaatcagtgcccagatccatcttgtaaacaggacttgttggcctacctggaacagattaagttctactcccaccaactgaaaatctgcagtcaagttaaagctgagatccagaacctgggaggagagctcatcatgtcagctttggacagtgtcacatccctgatccaagcagccaaaaatttaatgaatgctgtagtgcaaacagtgaaaatgtcttacattgcctcaaccaagatcatccgaatccagagtcctgctgggccccggcacccagttgtgatgtggagaatgaaggctcctgcaaaaaaacccttgattaaaagagagaagccagaggaaacgtgtgcagctgtcagacgaggctcagcaaagaaaaaaatccatccattgcaagtcatgagtgaatttagaggaagacaaatctactgaaaccactattctacatatagtgcctatatgacaaaatcctgcctaaccacactgctttattttacacttaagaagttctgtaatttcactaagttttggtgtttaactcacaaataacataaaatattgggcgctaaatcaacaaaagcaatatatatttgggatcatatcactgtcatttctgtatggtcagcacctaatagttaaggaatatttgcttgttgaatgaatgaaattatcacgtgtcattcagcgtttcccatcatagagattatctactattcgttaccaaataaacacagtgtaaaagggggggcctcctagggccccttttttttttagaaatatgttgaggggccctatctccccccctttttggagaatttaaaccccaaaaaaagaggggcccaaaggggggttttaaaaaagaaaaaaaaggttttttaaaaaaattttttccccctttaaacccccccgctttttttttggattaaggcgggccccccccgggggaagatgggttttcccccaaaaaaaccaccttttaatctctagatagctgtactcattgtcaacttattaggctaatatccattataaactaatcaaatttgaatagttaggctacttgctggattttgaaggtcaaccttgtttattaataaaatgctttcttaac

SEQ ID NO: 409287 - DNA, 3204 bp, Homo sapiens
caacgctcagcgaaattgactgccccactgtcatctgcctctcaatttggtactctgtaactctgtgaccaccaagaagcctttttccgtcccccacaaagctctttttggaaaattccctacgggagctgaattttaagcccatttactttataggaagaaacagaaaggcagcatgtcagctgaaacaccaatcacattgaatatcgatcctcaggatctgcaggtccaaacattcaccgtggagaagctactggagcctctcataatccaggttaccacacttgtaaactgtccccagaacccttccagcaggaaaaaaggacgttcgaaaagagccagtgtccttctagcttctgtggaggaagcaacttggaatttattagacaagggagagaagattgcccaggaagctacagttttaaaggatgagcttacggcttcacttgaggaagttcgcaaagaaagtgaagctctgaaagtatcagctgagagatttacagatgacccctgttttctcccaaaaagggaggctgtggttcaagctgcccgtgccttgctggctgcggtgacgagactccttatccttgcggacatgattgatgtcatgtgcctcttgcaacatgtgtcagcttttcaaaggacatttgagtctctcaaaaatgttgccaacaaatctgacctccagaaaacctaccagaagcttggaaaggagctggaaaatttggattatttagccttcaaacgtcagcaggacttaaaatctccaaatcagagagatgaaattgcaggagcccgagcttcactgaaggagaactctcccctcttgcattcaatttgttcagcttgtttggagcattctgatgttgcttccctcaaagcaagcaaggacacagtttgtgaagaaattcagaatgctctcaatgtaatttcaaatgcttcacaagggatccagaatatgacaaccccaccagaacctcaggcagcaaccctgggaagtgcccttgatgagctggagaatttaattgtcctgaatccactcacagtaactgaggaggaaatacgaccatcactagagaaacgccttgaagccattatcagtggggctgctctgctggcggattcttcatgtacgagggacttacaccgagagcggattatcgcagaatgcaacgccattcgccaggctcttcaggatctgctttcagagtacatgaacaacgctggaaaaaaagaaaggagtaataccctgaatattgctttagacaacatgtgtaagaagacaagagaccttcgcagacagctccgcaaggctattatagatcatgtgtcagactctttcctggatacgacagtccctcttttggttctcattgaagctgctaagaatggccgggaaaaggaaataaaagaatatgctgcgatatttcatgaacacaccagcaggcttgtagaggtggcaaatcttgcttgttccatgtcaacaaatgaagatggaattaaaattgtcaaaattgcagccaatcatttggaaaccttgtgtccacagattattaatgctgcacttgctttggctgcaagacccaaaagtcaagcggtcaaaaacaccatggaaatgtacaagcgtacatgggagaatcatatacatgtcctcactgaagccgtagatgacattacaagcattgatgacttccttgctgtatctgaaagccatatcttggaagatgtcaacaagtgtatcatagccttaagagaccaggatgctgataatttagaccgtgctgcgggtgctatcagaggccgggcagcaagagttgctcacatcgtcacgggtgaaatggacagttacgagccaggggcttacacggaaggtgtaatgagaaatgttaacttccttacaagtactgtaattcctgaatttgtaacacaagtgaatgttgccttggaagccttaagcaaaagctcattgaatgtgttggatgataatcaatttgtggacatctcaaagaagatctatgatacaattcatgatatcagatgttcagtcatgatgattcggaccccagaggaactggaggatgtttctgaccttgaagaggaacacgaggtccgcagtcacaccagcattcagaccgaagggaaaactgatagggctaagatgactcaactgcctgaggcagaaaaagaaaagattgctgagcaagttgctgatttcaagaaagtaaagagtaagctggatgctgagattgagatatgggatgatacaagcaacgacatcattgttctggccaagaacatgtgtatgatcatgatggagatgacagacttcactaggggcaaaggaccactaaagcatacaactgatgtgatctatgcagcgaaaatgatatcagaatcaggatcaaggatggatgtccttgctcggcagattgctaatcagtgcccagatccatcttgtaaacaggacttgttggcctacctggaacagattaagttctactcccaccaactgaaaatctgcagtcaagttaaagctgagatccagaacctgggaggagagctcatcatgtcagctttggacagtgtcacatccctgatccaagcagccaaaaatttaatgaatgctgtagtgcaaacagtgaaaatgtcttacattgcctcaaccaagatcatccgaatccagagtcctgctgggccccggcacccagttgtgatgtggagaatgaaggctcctgcaaaaaaacccttgattaaaagagagaagccagaggaaacgtgtgcagctgtcagacgaggctcagcaaagaaaaaaatccatccattgcaagtcatgagtgaatttagaggaagacaaatctactgaaaccactattctacatatagtgcctatatgacaaaatcctgcctaaccacactgctttattttacacttaagaagttctgtaatttcactaagttttggtgtttaactcacaaataacataaaatattgggcgctaaatcaacaaaagcaatatatatttgggatcatatcactgtcatttctgtatggtcagcacctaatagttaaggaatatttgcttgttgaatgaatgaaattatcacgtgtcattcagcgtttcccatcatagagattatctactattcgttaccaaataaacacagtaaataaaaaatacaaatggccctcgttggccctcacgt

SEQ ID NO: 409288 - DNA, 910 bp, Homo sapiens
  misc_feature (121)..(121): n is a, c, g, or t
  misc_feature (123)..(123): n is a, c, g, or t
actggaagtccagataatttttggcaaatagagcatatcacaaataaagtgcttcaacagccagtgtattgaaccacaagttctgaacctaagtgcggatgacttttttatttacccccgntncagtgcccagatccatcttgtaaacaggacttgttggcctacctggaacagattaagttctactcccaccaactgaaaatctgcagtcaagttaaagctgagatccagaacctgggaggagagctcatcatgtcagctttggacagtgtcacatccctgatccaagcagccaaaaatttaatgaatgctgtagtgcaaacagtgaaaatgtcttacattgcctcaaccaagatcatccgaatccagagtcctgctgggccccggcacccagttgtgatgtggagaatgaaggctcctgcaaaaaaacccttgattaaaagagagaagccagaggaaacgtgtgcagctgtcagacgaggctcagcaaagaaaaaaatccatccattgcaagtcatgagtgaatttagaggaagacaaatctactgaaaccactattctacatatagtgcctatatgacaaaatcctgcctaaccacactgctttattttacacttaagaagttctgtaatttcactaagttttggtgtttaactcacaaataacataaaatattgggcgctaaatcaacaaaagcaatatatatttgggatcatatcactgtcatttctgtatggtcagcacctaatagttaaggaatatttgcttgttgaatgaatgaaattatcacgtgtcattcagcgtttcccatcatagagattatctactattcgttaccaaataaacacagttgttagcgacaagttacgcccttcttattacggtgactagttaactatgggtatttaa

SEQ ID NO: 409289 - DNA, 1229 bp, Homo sapiens
atataagcaggaaagcttatttataacttgaagggcctcattatctgactgagtagtctgtctcttttttgatagattttcttttccatctttgtggtcagactaatacaccttctgtctacttccaatttactgtaaactgggtcatggaattcaggctaagatgactcaactgcctgaggcagaaaaagaaaagattgctgagcaagttgctgatttcaagaaagtaaagagtaagctggatgctgagattgagatatgggatgatacaagcaacgacatcattgttctggccaagaacatgtgtatgatcatgatggagatgacagacttcactaggggcaaaggaccactaaagcatacaactgatgtgatctatgcagcgaaaatgatatcagaatcaggatcaaggatggatgtccttgctcggcagattgctaatcagtgcccagatccatcttgtaaacaggacttgttggcctacctggaacagattaagttctactcccaccaactgaaaatctgcagtcaagttaaagctgagatccagaacctgggaggagagctcatcatgtcagctttggacagtgtcacatccctgatccaagcagccaaaaatttaatgaatgctgtagtgcaaacagtgaaaatgtcttacattgcctcaaccaagatcatccgaatccagagtcctgctgggccccggcacccagttgtgatgtggagaatgaaggctcctgcaaaaaaacccttgattaaaagagagaagccagaggaaacgtgtgcagctgtcagacgaggctcagcaaagaaaaaaatccatccattgcaagtcatgagtgaatttagaggaagacaaatctactgaaaccactattctacatatagtgcctatatgacaaaatcctgcctaaccacactgctttattttacacttaagaagttctgtaatttcactaagttttggtgtttaactcacaaataacataaaatattgggcgctaaatcaacaaaagcaatatatatttgggatcatatcactgtcatttctgtatggtcagcacctaatagttaaggaatatttgcttgttgaatgaatgaaattatcacgtgtcattcagcgtttcccatcatagagattatctactattcgttaccaaataaacacagttgttagcgacaagttacgcccttcttattacggtgactagttaactatgggtatttaa

SEQ ID NO: 409290 - DNA, 3202 bp, Homo sapiens
agcgggcttttcaggctgtttgcttacagatgcatcataagccaaattgtgagccatgatagtggcactgaatttctaaatacaagaaattgcttagacaattggtttagtatctgtatatgggcaatactctgtcctgcagtagaaggcagcatgtcagctgaaacaccaatcacattgaatatcgatcctcaggatctgcaggtccaaacattcaccgtggagaagctactggagcctctcataatccaggttaccacacttgtaaactgtccccagaacccttccagcaggaaaaaaggacgttcgaaaagagccagtgtccttctagcttctgtggaggaagcaacttggaatttattagacaagggagagaagattgcccaggaagctacagttttaaaggatgagcttacggcttcacttgaggaagttcgcaaagaaagtgaagctctgaaagtatcagctgagagatttacagatgacccctgttttctcccaaaaagggaggctgtggttcaagctgcccgtgccttgctggctgcggtgacgagactccttatccttgcggacatgattgatgtcatgtgcctcttgcaacatgtgtcagcttttcaaaggacatttgagtctctcaaaaatgttgccaacaaatctgacctccagaaaacctaccagaagcttggaaaggagctggaaaatttggattatttagccttcaaacgtcagcaggacttaaaatctccaaatcagagagatgaaattgcaggagcccgagcttcactgaaggagaactctcccctcttgcattcaatttgttcagcttgtttggagcattctgatgttgcttccctcaaagcaagcaaggacacagtttgtgaagaaattcagaatgctctcaatgtaatttcaaatgcttcacaagggatccagaatatgacaaccccaccagaacctcaggcagcaaccctgggaagtgcccttgatgagctggagaatttaattgtcctgaatccactcacagtaactgaggaggaaatacgaccatcactagagaaacgccttgaagccattatcagtggggctgctctgctggcggattcttcatgtacgagggacttacaccgagagcggattatcgcagaatgcaacgccattcgccaggctcttcaggatctgctttcagagtacatgaacaacgctggaaaaaaagaaaggagtaataccctgaatattgctttagacaacatgtgtaagaagacaagagaccttcgcagacagctccgcaaggctattatagatcatgtgtcagactctttcctggatacgacagtccctcttttggttctcattgaagctgctaagaatggccgggaaaaggaaataaaagaatatgctgcgatatttcatgaacacaccagcaggcttgtagaggtggcaaatcttgcttgttccatgtcaacaaatgaagatggaattaaaattgtcaaaattgcagccaatcatttggaaaccttgtgtccacagattattaatgctgcacttgctttggctgcaagacccaaaagtcaagcggtcaaaaacaccatggaaatgtacaagcgtacatgggagaatcatatacatgtcctcactgaagccgtagatgacattacaagcattgatgacttccttgctgtatctgaaagccatatcttggaagatgtcaacaagtgtatcatagccttaagagaccaggatgctgataatttagaccgtgctgcgggtgctatcagaggccgggcagcaagagttgctcacatcgtcacgggtgaaatggacagttacgagccaggggcttacacggaaggtgtaatgagaaatgttaacttccttacaagtactgtaattcctgaatttgtaacacaagtgaatgttgccttggaagccttaagcaaaagctcattgaatgtgttggatgataatcaatttgtggacatctcaaagaagatctatgatacaattcatgatatcagatgttcagtcatgatgattcggaccccagaggaactggaggatgtttctgaccttgaagaggaacacgaggtccgcagtcacaccagcattcagaccgaagggaaaactgatagggctaagatgactcaactgcctgaggcagaaaaagaaaagattgctgagcaagttgctgatttcaagaaagtaaagagtaagctggatgctgagattgagatatgggatgatacaagcaacgacatcattgttctggccaagaacatgtgtatgatcatgatggagatgacagacttcactaggggcaaaggaccactaaagcatacaactgatgtgatctatgcagcgaaaatgatatcagaatcaggatcaaggatggatgtccttgctcggcagattgctaatcagtgcccagatccatcttgtaaacaggacttgttggcctacctggaacagattaagttctactcccaccaactgaaaatctgcagtcaagttaaagctgagatccagaacctgggaggagagctcatcatgtcagctttggacagtgtcacatccctgatccaagcagccaaaaatttaatgaatgctgtagtgcaaacagtgaaaatgtcttacattgcctcaaccaagatcatccgaatccagagtcctgctgggccccggcacccagttgtgatgtggagaatgaaggctcctgcaaaaaaacccttgattaaaagagagaagccagaggaaacgtgtgcagctgtcagacgaggctcagcaaagaaaaaaatccatccattgcaagtcatgagtgaatttagaggaagacaaatctactgaaaccactattctacatatagtgcctatatgacaaaatcctgcctaaccacactgctttattttacacttaagaagttctgtaatttcactaagttttggtgtttaactcacaaataacataaaatattgggcgctaaatcaacaaaagcaatatatatttgggatcatatcactgtcatttctgtatggtcagcacctaatagttaaggaatatttgcttgttgaatgaatgaaattatcacgtgtcattcagcgtttcccatcatagagattatctactattcgttaccaaataaacacagttgttagcgacaagttacgcccttcttattacggtgactagttaactatgggtatttaa

SEQ ID NO: 409291 - DNA, 663 bp, Homo sapiens
  misc_feature (24)..(24): n is a, c, g, or t
  misc_feature (53)..(53): n is a, c, g, or t
tcgatatagaaaaaggggaagaanccttgctggagacgatctcttaattctcncaccgctacagctggacgagtgtcagccaaaaatttaatgaatgctgtagtgcaaacagtgaaaatgtcttacattgcctcaaccaagatcatccgaatccagagtcccagttgtgatgtggagaatgaaggctcctgcaaaaaaacccttgattaaaagagagaagccagaggaaacgtgtgcagctaaagaaaaaaatccatccattgcaagtcatgagtgaatttagaggaagacaaatctactgaaaccactattctacatatagtgcctatatgacaaaatcctgcctaaccacactgctttattttacacttaagaagttctgtaatttcactaagttttggtgtttaactcacaaataacataaaatattgggcgctaaatcaacaaaagcaatatatatttgggatcatatcactgtcatttctgtatggtcagcacctaatagttaaggaatatttgcttgttgaatgaatgaaattatcacgtgtcattcagcgtttcccatcatagagattatctactattcgttaccaaataaacacagttgttagcgacaagttacgcccttcttattacggtgactagttaactatgggtatttaa

SEQ ID NO: 409292 - DNA, 3210 bp, Homo sapiens
caacgctcagcgaaattgactgccccactgtcatctgcctctcaatttggtactctgtaactctgtgaccaccaagaagcctttttccgtcccccacaaagctctttttggaaaattccctacgggagctgaattttaagcccatttactttataggaagaaacagaaaggcagcatgtcagctgaaacaccaatcacattgaatatcgatcctcaggatctgcaggtccaaacattcaccgtggagaagctactggagcctctcataatccaggttaccacacttgtaaactgtccccagaacccttccagcaggaaaaaaggacgttcgaaaagagccagtgtccttctagcttctgtggaggaagcaacttggaatttattagacaagggagagaagattgcccaggaagctacagttttaaaggatgagcttacggcttcacttgaggaagttcgcaaagaaagtgaagctctgaaagtatcagctgagagatttacagatgacccctgttttctcccaaaaagggaggctgtggttcaagctgcccgtgccttgctggctgcggtgacgagactccttatccttgcggacatgattgatgtcatgtgcctcttgcaacatgtgtcagcttttcaaaggacatttgagtctctcaaaaatgttgccaacaaatctgacctccagaaaacctaccagaagcttggaaaggagctggaaaatttggattatttagccttcaaacgtcagcaggacttaaaatctccaaatcagagagatgaaattgcaggagcccgagcttcactgaaggagaactctcccctcttgcattcaatttgttcagcttgtttggagcattctgatgttgcttccctcaaagcaagcaaggacacagtttgtgaagaaattcagaatgctctcaatgtaatttcaaatgcttcacaagggatccagaatatgacaaccccaccagaacctcaggcagcaaccctgggaagtgcccttgatgagctggagaatttaattgtcctgaatccactcacagtaactgaggaggaaatacgaccatcactagagaaacgccttgaagccattatcagtggggctgctctgctggcggattcttcatgtacgagggacttacaccgagagcggattatcgcagaatgcaacgccattcgccaggctcttcaggatctgctttcagagtacatgaacaacgctggaaaaaaagaaaggagtaataccctgaatattgctttagacaacatgtgtaagaagacaagagaccttcgcagacagctccgcaaggctattatagatcatgtgtcagactctttcctggatacgacagtccctcttttggttctcattgaagctgctaagaatggccgggaaaaggaaataaaagaatatgctgcgatatttcatgaacacaccagcaggcttgtagaggtggcaaatcttgcttgttccatgtcaacaaatgaagatggaattaaaattgtcaaaattgcagccaatcatttggaaaccttgtgtccacagattattaatgctgcacttgctttggctgcaagacccaaaagtcaagcggtcaaaaacaccatggaaatgtacaagcgtacatgggagaatcatatacatgtcctcactgaagccgtagatgacattacaagcattgatgacttccttgctgtatctgaaagccatatcttggaagatgtcaacaagtgtatcatagccttaagagaccaggatgctgataatttagaccgtgctgcgggtgctatcagaggccgggcagcaagagttgctcacatcgtcacgggtgaaatggacagttacgagccaggggcttacacggaaggtgtaatgagaaatgttaacttccttacaagtactgtaattcctgaatttgtaacacaagtgaatgttgccttggaagccttaagcaaaagctcattgaatgtgttggatgataatcaatttgtggacatctcaaagaagatctatgatacaattcatgatatcagatgttcagtcatgatgattcggaccccagaggaactggaggatgtttctgaccttgaagaggaacacgaggtccgcagtcacaccagcattcagaccgaagggaaaactgatagggctaagatgactcaactgcctgaggcagaaaaagaaaagattgctgagcaagttgctgatttcaagaaagtaaagagtaagctggatgctgagattgagatatgggatgatacaagcaacgacatcattgttctggccaagaacatgtgtatgatcatgatggagatgacagacttcactaggggcaaaggaccactaaagcatacaactgatgtgatctatgcagcgaaaatgatatcagaatcaggatcaaggatggatgtccttgctcggcagattgctaatcagtgcccagatccatcttgtaaacaggacttgttggcctacctggaacagattaagttctactcccaccaactgaaaatctgcagtcaagttaaagctgagatccagaacctgggaggagagctcatcatgtcagctttggacagtgtcacatccctgatccaagcagccaaaaatttaatgaatgctgtagtgcaaacagtgaaaatgtcttacattgcctcaaccaagatcatccgaatccagagtcctgctgggccccggcacccagttgtgatgtggagaatgaaggctcctgcaaaaaaacccttgattaaaagagagaagccagaggaaacgtgtgcagctgtcagacgaggctcagcaaagaaaaaaatccatccattgcaagtcatgagtgaatttagaggaagacaaatctactgaaaccactattctacatatagtgcctatatgacaaaatcctgcctaaccacactgctttattttacacttaagaagttctgtaatttcactaagttttggtgtttaactcacaaataacataaaatattgggcgctaaatcaacaaaagcaatatatatttgggatcatatcactgtcatttctgtatggtcagcacctaatagttaaggaatatttgcttgttgaatgaatgaaattatcacgtgtcattcagcgtttcccatcatagagattatctactattcgttaccaaataaacacagatcggccgtttttgttttttcgacatgcgaattaaagtattagaa

SEQ ID NO: 409293 - DNA, 3218 bp, Homo sapiens
  misc_feature (3181)..(3181): n is a, c, g, or t
caacgctcagcgaaattgactgccccactgtcatctgcctctcaatttggtactctgtaactctgtgaccaccaagaagcctttttccgtcccccacaaagctctttttggaaaattccctacgggagctgaattttaagcccatttactttataggaagaaacagaaaggcagcatgtcagctgaaacaccaatcacattgaatatcgatcctcaggatctgcaggtccaaacattcaccgtggagaagctactggagcctctcataatccaggttaccacacttgtaaactgtccccagaacccttccagcaggaaaaaaggacgttcgaaaagagccagtgtccttctagcttctgtggaggaagcaacttggaatttattagacaagggagagaagattgcccaggaagctacagttttaaaggatgagcttacggcttcacttgaggaagttcgcaaagaaagtgaagctctgaaagtatcagctgagagatttacagatgacccctgttttctcccaaaaagggaggctgtggttcaagctgcccgtgccttgctggctgcggtgacgagactccttatccttgcggacatgattgatgtcatgtgcctcttgcaacatgtgtcagcttttcaaaggacatttgagtctctcaaaaatgttgccaacaaatctgacctccagaaaacctaccagaagcttggaaaggagctggaaaatttggattatttagccttcaaacgtcagcaggacttaaaatctccaaatcagagagatgaaattgcaggagcccgagcttcactgaaggagaactctcccctcttgcattcaatttgttcagcttgtttggagcattctgatgttgcttccctcaaagcaagcaaggacacagtttgtgaagaaattcagaatgctctcaatgtaatttcaaatgcttcacaagggatccagaatatgacaaccccaccagaacctcaggcagcaaccctgggaagtgcccttgatgagctggagaatttaattgtcctgaatccactcacagtaactgaggaggaaatacgaccatcactagagaaacgccttgaagccattatcagtggggctgctctgctggcggattcttcatgtacgagggacttacaccgagagcggattatcgcagaatgcaacgccattcgccaggctcttcaggatctgctttcagagtacatgaacaacgctggaaaaaaagaaaggagtaataccctgaatattgctttagacaacatgtgtaagaagacaagagaccttcgcagacagctccgcaaggctattatagatcatgtgtcagactctttcctggatacgacagtccctcttttggttctcattgaagctgctaagaatggccgggaaaaggaaataaaagaatatgctgcgatatttcatgaacacaccagcaggcttgtagaggtggcaaatcttgcttgttccatgtcaacaaatgaagatggaattaaaattgtcaaaattgcagccaatcatttggaaaccttgtgtccacagattattaatgctgcacttgctttggctgcaagacccaaaagtcaagcggtcaaaaacaccatggaaatgtacaagcgtacatgggagaatcatatacatgtcctcactgaagccgtagatgacattacaagcattgatgacttccttgctgtatctgaaagccatatcttggaagatgtcaacaagtgtatcatagccttaagagaccaggatgctgataatttagaccgtgctgcgggtgctatcagaggccgggcagcaagagttgctcacatcgtcacgggtgaaatggacagttacgagccaggggcttacacggaaggtgtaatgagaaatgttaacttccttacaagtactgtaattcctgaatttgtaacacaagtgaatgttgccttggaagccttaagcaaaagctcattgaatgtgttggatgataatcaatttgtggacatctcaaagaagatctatgatacaattcatgatatcagatgttcagtcatgatgattcggaccccagaggaactggaggatgtttctgaccttgaagaggaacacgaggtccgcagtcacaccagcattcagaccgaagggaaaactgatagggctaagatgactcaactgcctgaggcagaaaaagaaaagattgctgagcaagttgctgatttcaagaaagtaaagagtaagctggatgctgagattgagatatgggatgatacaagcaacgacatcattgttctggccaagaacatgtgtatgatcatgatggagatgacagacttcactaggggcaaaggaccactaaagcatacaactgatgtgatctatgcagcgaaaatgatatcagaatcaggatcaaggatggatgtccttgctcggcagattgctaatcagtgcccagatccatcttgtaaacaggacttgttggcctacctggaacagattaagttctactcccaccaactgaaaatctgcagtcaagttaaagctgagatccagaacctgggaggagagctcatcatgtcagctttggacagtgtcacatccctgatccaagcagccaaaaatttaatgaatgctgtagtgcaaacagtgaaaatgtcttacattgcctcaaccaagatcatccgaatccagagtcctgctgggccccggcacccagttgtgatgtggagaatgaaggctcctgcaaaaaaacccttgattaaaagagagaagccagaggaaacgtgtgcagctgtcagacgaggctcagcaaagaaaaaaatccatccattgcaagtcatgagtgaatttagaggaagacaaatctactgaaaccactattctacatatagtgcctatatgacaaaatcctgcctaaccacactgctttattttacacttaagaagttctgtaatttcactaagttttggtgtttaactcacaaataacataaaatattgggcgctaaatcaacaaaagcaatatatatttgggatcatatcactgtcatttctgtatggtcagcacctaatagttaaggaatatttgcttgttgaatgaatgaaattatcacgtgtcattcagcgtttcccatcatagagattatctactattcgttaccaaataaacacagtttcgcccgaaagcgngccttcttttttcttcccgcccctcccgccctgatta

SEQ ID NO: 409294 - DNA, 3276 bp, Homo sapiens
agcgggcttttcaggctgtttgcttacagatgcatcataagccaaattgtgagccatgatagtggcactgaatttctaaatacaagaaattgcttagacaattggtttagtatctgtatatgggcaatactctgtcctgcagtagctgaatcgctgagaaaagagaccatgtttctacttttagaaggagaatgaaatcaacgcaaaggagagagaaacaaggcagcatgtcagctgaaacaccaatcacattgaatatcgatcctcaggatctgcaggtccaaacattcaccgtggagaagctactggagcctctcataatccaggttaccacacttgtaaactgtccccagaacccttccagcaggaaaaaaggacgttcgaaaagagccagtgtccttctagcttctgtggaggaagcaacttggaatttattagacaagggagagaagattgcccaggaagctacagttttaaaggatgagcttacggcttcacttgaggaagttcgcaaagaaagtgaagctctgaaagtatcagctgagagatttacagatgacccctgttttctcccaaaaagggaggctgtggttcaagctgcccgtgccttgctggctgcggtgacgagactccttatccttgcggacatgattgatgtcatgtgcctcttgcaacatgtgtcagcttttcaaaggacatttgagtctctcaaaaatgttgccaacaaatctgacctccagaaaacctaccagaagcttggaaaggagctggaaaatttggattatttagccttcaaacgtcagcaggacttaaaatctccaaatcagagagatgaaattgcaggagcccgagcttcactgaaggagaactctcccctcttgcattcaatttgttcagcttgtttggagcattctgatgttgcttccctcaaagcaagcaaggacacagtttgtgaagaaattcagaatgctctcaatgtaatttcaaatgcttcacaagggatccagaatatgacaaccccaccagaacctcaggcagcaaccctgggaagtgcccttgatgagctggagaatttaattgtcctgaatccactcacagtaactgaggaggaaatacgaccatcactagagaaacgccttgaagccattatcagtggggctgctctgctggcggattcttcatgtacgagggacttacaccgagagcggattatcgcagaatgcaacgccattcgccaggctcttcaggatctgctttcagagtacatgaacaacgctggaaaaaaagaaaggagtaataccctgaatattgctttagacaacatgtgtaagaagacaagagaccttcgcagacagctccgcaaggctattatagatcatgtgtcagactctttcctggatacgacagtccctcttttggttctcattgaagctgctaagaatggccgggaaaaggaaataaaagaatatgctgcgatatttcatgaacacaccagcaggcttgtagaggtggcaaatcttgcttgttccatgtcaacaaatgaagatggaattaaaattgtcaaaattgcagccaatcatttggaaaccttgtgtccacagattattaatgctgcacttgctttggctgcaagacccaaaagtcaagcggtcaaaaacaccatggaaatgtacaagcgtacatgggagaatcatatacatgtcctcactgaagccgtagatgacattacaagcattgatgacttccttgctgtatctgaaagccatatcttggaagatgtcaacaagtgtatcatagccttaagagaccaggatgctgataatttagaccgtgctgcgggtgctatcagaggccgggcagcaagagttgctcacatcgtcacgggtgaaatggacagttacgagccaggggcttacacggaaggtgtaatgagaaatgttaacttccttacaagtactgtaattcctgaatttgtaacacaagtgaatgttgccttggaagccttaagcaaaagctcattgaatgtgttggatgataatcaatttgtggacatctcaaagaagatctatgatacaattcatgatatcagatgttcagtcatgatgattcggaccccagaggaactggaggatgtttctgaccttgaagaggaacacgaggtccgcagtcacaccagcattcagaccgaagggaaaactgatagggctaagatgactcaactgcctgaggcagaaaaagaaaagattgctgagcaagttgctgatttcaagaaagtaaagagtaagctggatgctgagattgagatatgggatgatacaagcaacgacatcattgttctggccaagaacatgtgtatgatcatgatggagatgacagacttcactaggggcaaaggaccactaaagcatacaactgatgtgatctatgcagcgaaaatgatatcagaatcaggatcaaggatggatgtccttgctcggcagattgctaatcagtgcccagatccatcttgtaaacaggacttgttggcctacctggaacagattaagttctactcccaccaactgaaaatctgcagtcaagttaaagctgagatccagaacctgggaggagagctcatcatgtcagctttggacagtgtcacatccctgatccaagcagccaaaaatttaatgaatgctgtagtgcaaacagtgaaaatgtcttacattgcctcaaccaagatcatccgaatccagagtcctgctgggccccggcacccagttgtgatgtggagaatgaaggctcctgcaaaaaaacccttgattaaaagagagaagccagaggaaacgtgtgcagctgtcagacgaggctcagcaaagaaaaaaatccatccattgcaagtcatgagtgaatttagaggaagacaaatctactgaaaccactattctacatatagtgcctatatgacaaaatcctgcctaaccacactgctttattttacacttaagaagttctgtaatttcactaagttttggtgtttaactcacaaataacataaaatattgggcgctaaatcaacaaaagcaatatatatttgggatcatatcactgtcatttctgtatggtcagcacctaatagttaaggaatatttgcttgttgaatgaatgaaattatcacgtgtcattcagcgtttcccatcatagagattatctactattcgttaccaaataaacacagttgttagcgacaagttacgcccttcttattacggtgactagttaactatgggtatttaa

SEQ ID NO: 409295 - DNA, 826 bp, Homo sapiens
  misc_feature (24)..(24): n is a, c, g, or t
  misc_feature (28)..(28): n is a, c, g, or t
gttctaaggtacagtgactctctnatanaaccaccgatccagtgcccagatccatcttgtaaacaggacttgttggcctacctggaacagattaagttctactcccaccaactgaaaatctgcagtcaagttaaagctgagatccagaacctgggaggagagctcatcatgtcagctttggacagtgtcacatccctgatccaagcagccaaaaatttaatgaatgctgtagtgcaaacagtgaaaatgtcttacattgcctcaaccaagatcatccgaatccagagtcctgctgggccccggcacccagttgtgatgtggagaatgaaggctcctgcaaaaaaacccttgattaaaagagagaagccagaggaaacgtgtgcagctgtcagacgaggctcagcaaagaaaaaaatccatccattgcaagtcatgagtgaatttagaggaagacaaatctactgaaaccactattctacatatagtgcctatatgacaaaatcctgcctaaccacactgctttattttacacttaagaagttctgtaatttcactaagttttggtgtttaactcacaaataacataaaatattgggcgctaaatcaacaaaagcaatatatatttgggatcatatcactgtcatttctgtatggtcagcacctaatagttaaggaatatttgcttgttgaatgaatgaaattatcacgtgtcattcagcgtttcccatcatagagattatctactattcgttaccaaataaacacagttgttagcgacaagttacgcccttcttattacggtgactagttaactatgggtatttaa

SEQ ID NO: 409296 - DNA, 1615 bp, Homo sapiens
agcgggcttttcaggctgtttgcttacagatgcatcataagccaaattgtgagccatgatagtggcactgaatttctaaatacaagaaattgcttagacaattggtttagtatctgtatatgggcaatactctgtcctgcagtagctgaatcgctgagaaaagagaccatgtttctacttttagaaggagaatgaaatcaacgcaaaggagagagaaacaaggcagcatgtcagctgaaacaccaatcacattgaatatcgatcctcaggatctgcaggtccaaacattcaccgtggagaagctactggagcctctcataatccaggttaccacacttgtaaactgtccccagaacccttccagcaggaaaaaaggacgttcgaaaagagccagtgtccttctagcttctgtggaggaagcaacttggaatttattagacaagggagagaagattgcccaggaagctacagttttaaaggatgagcttacggcttcacttgaggaagttcgcaaagaaagtgaagctctgaaagtatcagctgagagatttacagatgacccctgttttctcccaaaaagggaggctgtggttcaagctgcccgtgccttgctggctgcggtgacgagactccttatccttgcggacatgattgatgtcatgtgcctcttgcaacatgtgtcagcttttcaaaggacatttgagtctctcaaaaatgttgccaacaaatctgacctccagaaaacctaccagaagcttggaaaggagctggaaaatttggattatttagccttcaaacgtcagcaggacttaaaatctccaaatcagagagatgaaattgcaggagcccgagcttcactgaaggagaactctcccctcttgcattcaatttgttcagcttgtttggagcattctgatgttgcttccctcaaagcaagcaaggacacagtttgtgaagaaattcagaatgctctcaatgtaatttcaaatgcttcacaagggatccagaatatgacaaccccaccagaacctcaggcagcaaccctgggaagtgcccttgatgagctggagaatttaattgtcctgaatccactcacagtaactgaggaggaaatacgaccatcactagagaaacgccttgaagccattatcagtggggctgctctgctggcggattcttcatgtacgagggacttacaccgagagcggattatcgcagaatgcaacgccattcgccaggctcttcaggatctgctttcagagtacatgaacaacgctggaaaaaaagaaaggagtaataccctgaatattgctttagacaacatgtgtaagaagacaagagaccttcgcagacagctccgcaaggctattatagatcatgtgtcagactctttcctggatacgacagtccctcttttggttctcattgaagctgctaagaatggccgggaaaaggaaataaaagaatatgctgcgatatttcatgaacacaccagcaggcttgtagaggtaagcatgctagaactgtaactcactaaagtccaggagaatgaggctcccattctccatttatggttgaattgtacctaaataaaaacttttgacaccgtgttcca

SEQ ID NO: 409297 - DNA, 433 bp, Homo sapiens
gtcggccaggacctcgccctggggtgactgagggcagggacactggctttgtgtgactgtgagaaggaggcacctgtgggctctggaggggtgatctctccaggatcaagacgcccaaggccagtgcattaagaatacagaaaataggctgggtgcggtggctcacgcctataatcccagcactttgggaggctgaagtgggcagatcacctgaggtcaagagatcgagaccatcctggccaacatggtgaaaccctctctccactaaaaatacaaaaattagccaggaatggtggcgggcgcctgtagtcccagctacttgggaggctgaggcaggagaatcgcttgaacccgggaggtggaggctgcagtgagccaggatcgcgccactgcactccagcctgggcaacaagagcgaaactccatctcaaaa

SEQ ID NO: 409298 - DNA, 917 bp, Homo sapiens
ctggcacctatccacagcctgaaccttggagaacacctccctttcatatgacttctgcaaagggcgtgtttcagctcacagggacaaagagtcactgcaccagagaaccagaaagagttacagacacggctcacaggcttaagcgtcttgctgtaggtcatacggcaggttaatgacaacactggggcaagaacacaggttacgctcgtcctggggaaggctcccacaccaagctacacacttctgcaatgctgttccagatgtgaaaatccgctaagacaaataggtcacaaaaacaccatgggagacgatgatgtcttttcctttttgttatcttgataaagcttcatacatgggacaaaaggaggaactagcccaccaagcaggtttaaagggagtgtcggacacaaaaatgacatgccccatattgcagtctagaaggaacaacacggtgaattgtctactgcagaacacttcactctgtctcgattactacatggtgaattgaagttccagtagagagggagttgagctgatactgaggagataaatacccatcactgtatacatctacttcttggaatttgcaagggaaccagtcaacagatttttcaagccttataagtttatctgcctgagaagttcaccagctacataacatcctggactctggagcccaagagatgtgtagtttccattttggagccattttctttgataaataagtagtgaggctgccattcttgtcaaagttgaggaccacaaccttactcatgaaactgaaagattgtttgttatgaggagttctgtttgagccatacaagcaatatatcctttttaaagaaatgtatccggaatcttaggtgttcattgctccaagccatgtgcagaataaaaagaaaacaaaaaacaaaaaa

SEQ ID NO: 409299 - DNA, 1612 bp, Homo sapiens
aaccagggagccacacaggctccttggagtaagagtgtgagaaactggatgaagacagctgtattcttttggaagcgttcgagattggtctgtctctaccaactaaaaacttctagcttaagtgcagagatttaaggagatcaacaaaaactcagtctagacatattatgaggctgggagggtatcaacagacttgagttcttgtcagcaagatcacctgcttttaatattgtcctcagggtctgagcacatctggaagtgaggtcaatcaagttagaccccaaaaacttttgtgacaacagtgaagaggggaaaataaacacaccacaaacatgaacctcaaccccccgacatctgctcttcagatcgagggcaaaggcagccatattatggctagaaatgtaagctgctttctagtcaggcacacccctcatcccagaagagtctgccacatcaaaggcttgaataacattccaatctgtactgtgaatgatgatgagaatgcatttggaacattgtgggaagttggccagtctaactacttagagaagaacaggataccatttgccaattgcagttaccccccgagcactgcagtccagaagagccctgtaagaggaatgtcgccagccccaaacggtgccaaagtgcctccacggcctcattctgagcccagtagaaaaattaaagagtgcttcaaaacttccagtgagaatcccttagtaattaaaaaggaagaaattaaggccaaaagaccaccatcacctccaaaggcatgctctactcctggctcctgttcttcagggatgacaagtaccaagaatgatgtgaaagcaaacaccatttgcataccaaactatctggatcaggaaataaaaatcctggcaaagctctgtagcattttgcatactgattctctggcagaagttttacagtggctgcttcatgcaacttcaaaagaaaaagagtgggtctcagctttgattcattctgagcttgccgagataaacctgttaactcatcacagaagaaacacctcaatggaaccagcagcagagactgggaagccacccacagttaaatcaccacccacagttaaattgcccccaaattttactgcaaaatcaaaagtgctgaccagagatacagaaggggatcaaccaaccagagtgtcaagtcaaggatctgaagaaaacaaggaagtaccaaaagaggctgagcacaagcctccactacttataagaagaaataatatgaaaatacctgttgcagaatatttcagcaaaccaaattctcctcccaggcctaacactcaggagagtggatcagcaaaaccagtgtcagcaaggagtatacaagaatacaacctctgtccccaaagagcatgttatccttcaacacaccggaggtagaagttctagactgggtgaattctttcatgaatatgagcttcacatttacatcatcaaattatttttcaaatgaatatttttggtattgaggaatcaagtggtcctctttatggtggcacatgtaaatctaaaaatacctgtatgtaatgctacaaataaatattactggaaatgatatttccatttgtagttaatacgat

SEQ ID NO: 409300 - DNA, 1530 bp, Homo sapiens
aaccagggagccacacaggctccttggagtaagagtgtgagaaactggatgaagacagctgtattcttttggaagcgttcgagattggtctgtctctaccaactaaaaacttctagcttaagtgcagagatttaaggagatcaacaaaaactcagtctagacatattatgaggctgggagggtatcaacagacttgagttcttgtcagcaagatcacctgcttttaatattgtcctcagggtctgagcacatctggaagtgaggtcaatcaagttagaccccaaaaacttttgtgacaacagtgaagaggggaaaataaacacaccacaaacatgaacctcaaccccccgacatctgctcttcagatcgagggcaaaggcagccatattatggctagaaatgtaagctgctttctagtcaggcacacccctcatcccagaagagtctgccacatcaaaggcttgaataacattccaatctgtactgtgaatgatgatgagaatgcatttggaacattgtgggaagttggccagtctaactacttagagaagaacaggataccatttgccaattgcagttaccccccgagcactgcagtccagaagagccctgtaagaggaatgtcgccagccccaaacggtgccaaagtgcctccacggcctcattctgagcccagtagaaaaattaaagagtgcttcaaaacttccagtgagaatcccttagtaattaaaaaggaagaaattaaggccaaaagaccaccatcacctccaaaggcatgctctactcctggctcctgttcttcagggatgacaagtaccaagaatgatgtgaaagcaaacaccatttgcataccaaactatctggatcaggaaataaaaaaaaagagtgggtctcagctttgattcattctgagcttgccgagataaacctgttaactcatcacagaagaaacacctcaatggaaccagcagcagagactgggaagccacccacagttaaatcaccacccacagttaaattgcccccaaattttactgcaaaatcaaaagtgctgaccagagatacagaaggggatcaaccaaccagagtgtcaagtcaaggatctgaagaaaacaaggaagtaccaaaagaggctgagcacaagcctccactacttataagaagaaataatatgaaaatacctgttgcagaatatttcagcaaaccaaattctcctcccaggcctaacactcaggagagtggatcagcaaaaccagtgtcagcaaggagtatacaagaatacaacctctgtccccaaagagcatgttatccttcaacacaccggaggtagaagttctagactgggtgaattctttcatgaatatgagcttcacatttacatcatcaaattatttttcaaatgaatatttttggtattgaggaatcaagtggtcctctttatggtggcacatgtaaatctaaaaatacctgtatgtaatgctacaaataaatattactggaaatgatatttccatttgtagttaatacgat

SEQ ID NO: 409301 - DNA, 291 bp, Homo sapiens
ataatgacaaaagtagctctcatatctcctgataccaccattgctcctactgctcattcaaaatattcatttcaagacaggcttctccccaggaacctggactctgcaggttaataacaggatctctgtagcatcaccacctttacttcctttgtccaacctagctaaatctggtgtaattctagcctgtctctctcattttttgatatcttggatccatatcagccatgtccaatagaacttcatgtgataatgggaagattctatatctaagctgactaataaagtagc

SEQ ID NO: 409302 - DNA, 471 bp, Homo sapiens
ttccagcttgttctgaagatagcctgtttttaagatgctcactgagacacaaagatgaagaagaagaagatgatgatgacatccacataacagctcggatagaaagtgacttgacgctggagagtctaagtgatgaagagattcatccagggtgaagcccttctgtggagctgaccagggtgctgacccaaagggcaggccagcgcgtgctgcagggtccccagctttgcccctggaggtctcaatcctctctacattctgaggaaaactcttggtcccagcagagagaaaaagtccaaggctgcttcccacccaccgccagcactaggtttggcctgtaccatccaggacccagtgcttctgggcctggcatttctcctttggcaagagagtgagaagagacgtgactgtgctccacgagcagaaagtgccattcccacttgaaataaagagactgagtgcatttaatca

SEQ ID NO: 409303 - DNA, 218 bp, Homo sapiens
ctcacctggggcagcgtaggtgtgcatgacattgtgctccaccagcacctgggccaccgaggggtctggaaccgggaaggactcgttgtacggaggctggaactggtggagggcctgctccccatccccaaaggtccacctgccggggcggtgggacgcaccatggcagcgtcctcgggcagcatgaagcagagcagaaggcagaggtgaaggtggag

SEQ ID NO: 409304 - DNA, 189 bp, Homo sapiens
ggttgtgatgagccaagattgcaccattgcactctggtctgggcaacaagagcaaaactccatctcaaaagaaaaaaaaaagtgtgtagcacctcaccccccctctctcggtcctgctcctgccatgtaagacgcctactcccaatttgccttccgccatgagtaaaagctccctgggcctccccagaa

SEQ ID NO: 409305 - DNA, 180 bp, Homo sapiens
agacaggaactcagctataatttctttaagctattttattaatagttcttcacccaaatttcaatataggttttgaaagtctcatcttgccaatagtgaaagtagtttcagttttaaatgggcacttttaaaaacctttttaaaaacttaaatcatcaggggaggggaatttcaaataca

SEQ ID NO: 409306 - DNA, 494 bp, Homo sapiens
cacccgagcgccggcccgcgccacgcccccgcgaggcgtcctctcctgcttggccttggtcttagggctgactgacagtaaggactccttagatgaagcccgacagaaaattttcgacatccgggaagagtacagaaacaaattgctggaagctgagcacctaaagctggaaactctggctgctcaggaagcagccatgaagctggagacagaaaagatgaccccagctcctgacacacagaaaaaaaagaaaggaaagaaaaagtaaccaggggatgtccaatactaccctgcttctggagagaaaaaatctatttgtaatgatctttaactgcctgctgttaagatattaggccaaatgaaaatagaaatttctctttcttagaaatattttaatgctaacttgttagttttcctcagaaagctagtatttgaagccatttgagtttaagatgctctaatttcaataaaatagcttccaaatatttaataaa

SEQ ID NO: 409307 - DNA, 1572 bp, Homo sapiens
atcacactgccgaaattccaacggcatcgcactgtgcggcctcttctgaggttcctctctcattgggcagggatgtgttcttcctcggtctcatcattgcatctctagcactagtgggagatgtcaataagtgtttaatgaatgaatgcatgaacatgccacaccagtgacctcagcttatggtgaaagacacgaggagttaattaacttaggaagcccagactcccacactattagtgagggacaaaaatcttcagtaacttccaaaacaacaaggaaaggcaaagaaaagtcttctgagaaagaaaagacagccaaagaaaaacaagcacctcgctttgagcctcagatatccactgttcaccctcaacaagaagacccaaataaaccctactggattttgaggttggtcactgaacacaatgaatcagaattatttgaagtgaaaaaggatacagaaagggcagatgaaatccgagccatgaaacaagcctgggagacaactgagccaggaagagcaatcaaggcttctcaggctcgtttgcattaccttagcgggttcattaagaaaacatctgatgctgagagtccgcctatatctgaaagccaaactaaaccaaaagaagaagtagaaacagctgcacgtggcgtaaaagaaccaaactcaaagaattctgcaggttcagagagcaaagagatgacacaaacaggatcagggagtgcggtgtggaagaagtggcaattgaccaaaggcttgagggatgtggcaaaatccacgagtagcgaaagtggaggagtgtcttcaccagggaaagaagagcgcgagcagagcacacggaaggaaaacattcaaacaggacctcgtacacgatctccaacaattttggaaacatctccacgacttattcgaaaagcactagaatttatggatttaagtcaatatgttcggaaaacagatacagatcctctgctgcaaacagatgaattgaatcagcagcaggcaatgcaaaaggcggaagaaattcatcagtttcgacagcataggaccagagtccttagcattcgaaacattgaccaagaagagcggttgaagttaaaggatgaagtcctggatatgtataaggaaatgcaggactccttagatgaagcccgacagaaaattttcgacatccgggaagagtacagaaacaaattgctggaagctgagcacctaaagctggaaactctggctgctcaggaagcagccatgaagctggagacagaaaagatgaccccagctcctgacacacagaaaaaaaagaaaggaaagaaaaagtaaccaggggatgtccaatactaccctgcttctggagagaaaaaatctatttgtaatgatctttaactgcctgctgttaagatattaggccaaatgaaaatagaaatttctctttcttagaaatattttaatgctaacttgttagttttcctcagaaagctagtatttgaagccatttgagtttaagatgctctaatttcaataaaatagcttccaaatatttaataaaatatgtttgacactctaaaaaaaaaaaa

SEQ ID NO: 409308 - DNA, 1604 bp, Homo sapiens
atcacactgccgaaattccaacggcatcgcactgtgcggcctcttctgaggttcctctctcattgggcagggatgtgttcttcctcggtctcatcattgcatctctagcactagtgggagatgtcaataagtgtttaatgaatgaatgcatgaacatgccacaccagtgacctcagcttatggtgaaagacacgaggagttaattaacttaggaagcccagactcccacactattagtgagggacaaaaatcttcagtaacttccaaaacaacaaggaaaggcaaagaaaagtcttctgagaaagaaaagacagccaaagaaaaacaagcacctcgctttgagcctcagatatccactgttcaccctcaacaagaagacccaaataaaccctactggattttgaggttggtcactgaacacaatgaatcagaattatttgaagtgaaaaaggatacagaaagggcagatgaaatccgagccatgaaacaagcctgggagacaactgagccaggaagagcaatcaaggcttctcaggctcgtttgcattaccttagcgggttcattaagaaaacatctgatgctgagagtccgcctatatctgaaagccaaactaaaccaaaagaagaagtagaaacagctgcacgtggcgtaaaagaaccaaactcaaagaattctgcaggttcagagagcaaagagatgacacaaacaggatcagggagtgcggtgtggaagaagtggcaattgaccaaaggcttgagggatgtggcaaaatccacgagtagcgaaagtggaggagtgtcttcaccagggaaagaagagcgcgagcagagcacacggaaggaaaacattcaaacaggacctcgtacacgatctccaacaattttggaaacatctccacgacttattcgaaaagcactagaatttatggatttaagtcaatatgttcggaaaacagatacagatcctctgctgcaaacagatgaattgaatcagcagcaggcaatgcaaaaggcggaagaaattcatcagtttcgacagcataggaccagagtccttagcattcgaaacattgaccaagaagagcggttgaagttaaaggatgaagtcctggatatgtataaggaaatgcaggactccttagatgaagcccgacagaaaattttcgacatccgggaagagtacagaaacaaattgctggaagctgagcacctaaagctggaaactctggctgctcaggaagcagccatgaagctggagacagaaaagatgaccccagctcctgacacacagaaaaaaaagaaaggaaagaaaaagtaaccaggggatgtccaatactaccctgcttctggagagaaaaaatctatttgtaatgatctttaactgcctgctgttaagatattaggccaaatgaaaatagaaatttctctttcttagaaatattttaatgctaacttgttagttttcctcagaaagctagtatttgaagccatttgagtttaagatgctctaatttcaataaaatagcttccaaatatttaataaagttggggcgcccgaacgcccgccctcccccctacgggcgcccgacaacgtcgcggagaac

SEQ ID NO: 409309 - DNA, 2543 bp, Homo sapiens
  misc_feature (1088)..(1088): n is a, c, g, or t
  misc_feature (1310)..(1310): n is a, c, g, or t
  misc_feature (1781)..(1781): n is a, c, g, or t
ggcagcggcttccggccgcggcggacacttccctgggcgggactgtctcgtggcacccggtggaaccgaggagaacgtggagcgccgggagcggcgaatatggacgactacagcctggatgagttccgtcggcgctggcaggaggagctggcgcaggcccaggcgccgaagaagcggcgacggcccgaggctgccgagaggcgggctcggcggccggagaatgaaatgaatgatgtgcctttctttgatatccaactgccttacgaattggcaatcaatatatttcagtatctggacaggaaagaactaggaagatgggcacagatgaacaaacagactttggattgggtgatgctcatcagagtgatggattaaacttggaaagagagatagtcagccagaccacagcaacacaggaaaagtcacaggaagaacttccaacaacaaataatagtgtttctaaagaaatatggttagattttgaagatttctgtgtatgctttcaaaatatatatattttccacaagccaagttcatattgccttaactttcaaaaatcagaatttaagttctcagaagaacgagtgtcctactatctatttgtggatagtctaaaacctattgaactactggtttgcttttctgcattggtacgctggggggagtatggagccttaacaaaagacagtcctcccatagagcctggacttctcacagctgaaacgttttcttggaaatccctgaaaccaggcagtcttgttctgaagattcacacatatgctaccaaggctacagtggttcgtctgcctgttgggagacacatgctactcttcaacgcatactccccagtaggacactccatacacatctgcagcatggtgtcatttgtcattggggatgaacacgttgtactgcccaactttgaaccagagagctgccgatttacggaacagtctctgttgattatgaaagctattggaaatgtgattgctaatttcaaagataagggtaaactctctgcagctttgaaggatctgcaaacagctcactaccctgtccccttccatgataaagaactaactgcacancacttcagggtttttcatctttccttatggcgtttaatgaaaaaagttcaaataacaaaacctcctccaaacttcaaatttgcattccgggctatggttttggacttggagttactcaattcctccttggaagaggtttctttagtggaatggctggacgttaaatattgtatgcccacaagtgataaagagtattctgctgaggaagtagcagcagcaatnaaaattcaagccatgtggagaggaacttacgttagattgcttatgaaagccagaataccagacacaaaagaaaatatcagtgttgcagatactcttcaaaaagtttgggctgtattggaaatgaatttagaacagtatgcagtttctctcttaagactaatgtttaaaagcaagtgcaagtctttggaatcttatccatgctatcaagatgaagaaactaagattgcttttgcagattatactgtgacttatcaagaacagccaccaaattcttggtttatagtattcagagaaacatttttggttcatcaagacatgattttggttcccaaagtatatactacacttccaatctgtatcctacacattgttaataatgacacaatggagcaagtgccaaaggtgttccaaaaagtggtgccttatctttataccaagaataagaagggatacacttttgtggcggaagcntttacaggcgacacatatgtagcagcctcacgatggaaactgcgtctcatcggttcttctgctccactgccatgcctctctcgagactctccatgcaattcctttgccataaaggaaatccgagattactacatacccaatgataagaaaattttattcaggtattcggttaaagttctaacaccacaacctgctacaatacaggtacgcacatccaaaccagatgcattcatcaagctgcaggtcctagaaaatgaagaaactatggtgagctccactggaaaaggccaagctataatcccagcatttcacttcttgaagagtgagaaaggtttgagctcccagtgtaagtgtacctttatgaacaggatagttagattcataaatggatatttatgttttcatgacactttaaaaatgaaaataaagtagcaagtaaccacttaaattatgaaacttcatagtacagtaaaatattacaagtatagcatttgcatgtcaaattaggctccgaaaatcattataggtttattttaaagccttttcatcttggagaaaaatttactttcctattatatgagccttcttaataagaagtcaaatttttattattttgaaagaatatttttacttttttaaattcgtaattcattattttcagaaaatattgtacttactaaaattaacaaaaactaaagttactacttgcaatatattattctcaatgagttattaaataaataaaataattttggaaataat

SEQ ID NO: 409310 - DNA, 3374 bp, Homo sapiens
  misc_feature (1088)..(1088): n is a, c, g, or t
  misc_feature (1310)..(1310): n is a, c, g, or t
  misc_feature (1781)..(1781): n is a, c, g, or t
ggcagcggcttccggccgcggcggacacttccctgggcgggactgtctcgtggcacccggtggaaccgaggagaacgtggagcgccgggagcggcgaatatggacgactacagcctggatgagttccgtcggcgctggcaggaggagctggcgcaggcccaggcgccgaagaagcggcgacggcccgaggctgccgagaggcgggctcggcggccggagaatgaaatgaatgatgtgcctttctttgatatccaactgccttacgaattggcaatcaatatatttcagtatctggacaggaaagaactaggaagatgggcacagatgaacaaacagactttggattgggtgatgctcatcagagtgatggattaaacttggaaagagagatagtcagccagaccacagcaacacaggaaaagtcacaggaagaacttccaacaacaaataatagtgtttctaaagaaatatggttagattttgaagatttctgtgtatgctttcaaaatatatatattttccacaagccaagttcatattgccttaactttcaaaaatcagaatttaagttctcagaagaacgagtgtcctactatctatttgtggatagtctaaaacctattgaactactggtttgcttttctgcattggtacgctggggggagtatggagccttaacaaaagacagtcctcccatagagcctggacttctcacagctgaaacgttttcttggaaatccctgaaaccaggcagtcttgttctgaagattcacacatatgctaccaaggctacagtggttcgtctgcctgttgggagacacatgctactcttcaacgcatactccccagtaggacactccatacacatctgcagcatggtgtcatttgtcattggggatgaacacgttgtactgcccaactttgaaccagagagctgccgatttacggaacagtctctgttgattatgaaagctattggaaatgtgattgctaatttcaaagataagggtaaactctctgcagctttgaaggatctgcaaacagctcactaccctgtccccttccatgataaagaactaactgcacancacttcagggtttttcatctttccttatggcgtttaatgaaaaaagttcaaataacaaaacctcctccaaacttcaaatttgcattccgggctatggttttggacttggagttactcaattcctccttggaagaggtttctttagtggaatggctggacgttaaatattgtatgcccacaagtgataaagagtattctgctgaggaagtagcagcagcaatnaaaattcaagccatgtggagaggaacttacgttagattgcttatgaaagccagaataccagacacaaaagaaaatatcagtgttgcagatactcttcaaaaagtttgggctgtattggaaatgaatttagaacagtatgcagtttctctcttaagactaatgtttaaaagcaagtgcaagtctttggaatcttatccatgctatcaagatgaagaaactaagattgcttttgcagattatactgtgacttatcaagaacagccaccaaattcttggtttatagtattcagagaaacatttttggttcatcaagacatgattttggttcccaaagtatatactacacttccaatctgtatcctacacattgttaataatgacacaatggagcaagtgccaaaggtgttccaaaaagtggtgccttatctttataccaagaataagaagggatacacttttgtggcggaagcntttacaggcgacacatatgtagcagcctcacgatggaaactgcgtctcatcggttcttctgctccactgccatgcctctctcgagactctccatgcaattcctttgccataaaggaaatccgagattactacatacccaatgataagaaaattttattcaggtattcggttaaagttctaacaccacaacctgctacaatacaggtacgcacatccaaaccagatgcattcatcaagctgcaggtcctagaaaatgaagaaactatggtgagctccactggaaaaggccaagctataatcccagcatttcacttcttgaagagtgagaaaggtttgagctcccagtcttatggtgaaagacacgaggagttaattaacttaggaagcccagactcccacactattagtgagggacaaaaatcttcagtaacttccaaaacaacaaggaaaggcaaagaaaagtcttctgagaaagaaaagacagccaaagaaaaacaagcacctcgctttgagcctcagatatccactgttcaccctcaacaagaagacccaaataaaccctactggattttgaggcttctcaggctcgtttgcattaccttagcgggttcattaagaaaacatctgatgctgagagtccgcctatatctgaaagccaaactaaaccaaaagaagaagtagaaacagctgcacgtggcgtaaaagaaccaaactcaaagaattctgcaggttcagagagcaaagagatgacacaaacaggatcagggagtgcggtgtggaagaagtggcaattgaccaaaggcttgagggatgtggcaaaatccacgagtagcgaaagtggaggagtgtcttcaccagggaaagaagagcgcgagcagagcacacggaaggaaaacattcaaacaggacctcgtacacgatctccaacaattttggaaacatctccacgacttattcgaaaagcactagaatttatggatttaagtcaatatgttcggaaaacagatacagatcctctgctgcaaacagatgaattgaatcagcagcaggcaatgcaaaaggcggaagaaattcatcagtttcgacagcataggaccagagtccttagcattcgaaacattgaccaagaagagcggttgaagttaaaggatgaagtcctggatatgtataaggaaatgcaggactccttagatgaagcccgacagaaaattttcgacatccgggaagagtacagaaacaaattgctggaagctgagcacctaaagctggaaactctggctgctcaggaagcagccatgaagctggagacagaaaagatgaccccagctcctgacacacagaaaaaaaagaaaggaaagaaaaagtaaccaggggatgtccaatactaccctgcttctggagagaaaaaatctatttgtaatgatctttaactgcctgctgttaagatattaggccaaatgaaaatagaaatttctctttcttagaaatattttaatgctaacttgttagttttcctcagaaagctagtatttgaagccatttgagtttaagatgctctaatttcaataaaatagcttccaaatatttaataaa

SEQ ID NO: 409311 - DNA, 3523 bp, Homo sapiens
  misc_feature (1088)..(1088): n is a, c, g, or t
  misc_feature (1310)..(1310): n is a, c, g, or t
  misc_feature (1781)..(1781): n is a, c, g, or t
ggcagcggcttccggccgcggcggacacttccctgggcgggactgtctcgtggcacccggtggaaccgaggagaacgtggagcgccgggagcggcgaatatggacgactacagcctggatgagttccgtcggcgctggcaggaggagctggcgcaggcccaggcgccgaagaagcggcgacggcccgaggctgccgagaggcgggctcggcggccggagaatgaaatgaatgatgtgcctttctttgatatccaactgccttacgaattggcaatcaatatatttcagtatctggacaggaaagaactaggaagatgggcacagatgaacaaacagactttggattgggtgatgctcatcagagtgatggattaaacttggaaagagagatagtcagccagaccacagcaacacaggaaaagtcacaggaagaacttccaacaacaaataatagtgtttctaaagaaatatggttagattttgaagatttctgtgtatgctttcaaaatatatatattttccacaagccaagttcatattgccttaactttcaaaaatcagaatttaagttctcagaagaacgagtgtcctactatctatttgtggatagtctaaaacctattgaactactggtttgcttttctgcattggtacgctggggggagtatggagccttaacaaaagacagtcctcccatagagcctggacttctcacagctgaaacgttttcttggaaatccctgaaaccaggcagtcttgttctgaagattcacacatatgctaccaaggctacagtggttcgtctgcctgttgggagacacatgctactcttcaacgcatactccccagtaggacactccatacacatctgcagcatggtgtcatttgtcattggggatgaacacgttgtactgcccaactttgaaccagagagctgccgatttacggaacagtctctgttgattatgaaagctattggaaatgtgattgctaatttcaaagataagggtaaactctctgcagctttgaaggatctgcaaacagctcactaccctgtccccttccatgataaagaactaactgcacancacttcagggtttttcatctttccttatggcgtttaatgaaaaaagttcaaataacaaaacctcctccaaacttcaaatttgcattccgggctatggttttggacttggagttactcaattcctccttggaagaggtttctttagtggaatggctggacgttaaatattgtatgcccacaagtgataaagagtattctgctgaggaagtagcagcagcaatnaaaattcaagccatgtggagaggaacttacgttagattgcttatgaaagccagaataccagacacaaaagaaaatatcagtgttgcagatactcttcaaaaagtttgggctgtattggaaatgaatttagaacagtatgcagtttctctcttaagactaatgtttaaaagcaagtgcaagtctttggaatcttatccatgctatcaagatgaagaaactaagattgcttttgcagattatactgtgacttatcaagaacagccaccaaattcttggtttatagtattcagagaaacatttttggttcatcaagacatgattttggttcccaaagtatatactacacttccaatctgtatcctacacattgttaataatgacacaatggagcaagtgccaaaggtgttccaaaaagtggtgccttatctttataccaagaataagaagggatacacttttgtggcggaagcntttacaggcgacacatatgtagcagcctcacgatggaaactgcgtctcatcggttcttctgctccactgccatgcctctctcgagactctccatgcaattcctttgccataaaggaaatccgagattactacatacccaatgataagaaaattttattcaggtattcggttaaagttctaacaccacaacctgctacaatacaggtacgcacatccaaaccagatgcattcatcaagctgcaggtcctagaaaatgaagaaactatggtgagctccactggaaaaggccaagctataatcccagcatttcacttcttgaagagtgagaaaggtttgagctcccagtcttatggtgaaagacacgaggagttaattaacttaggaagcccagactcccacactattagtgagggacaaaaatcttcagtaacttccaaaacaacaaggaaaggcaaagaaaagtcttctgagaaagaaaagacagccaaagaaaaacaagcacctcgctttgagcctcagatatccactgttcaccctcaacaagaagacccaaataaaccctactggattttgaggttggtcactgaacacaatgaatcagaattatttgaagtgaaaaaggatacagaaagggcagatgaaatccgagccatgaaacaagcctgggagacaactgagccaggaagagcaatcaaggcttctcaggctcgtttgcattaccttagcgggttcattaagaaaacatctgatgctgagagtccgcctatatctgaaagccaaactaaaccaaaagaagaagtagaaacagctgcacgtggcgtaaaagaaccaaactcaaagaattctgcaggttcagagagcaaagagatgacacaaacaggatcagggagtgcggtgtggaagaagtggcaattgaccaaaggcttgagggatgtggcaaaatccacgagtagcgaaagtggaggagtgtcttcaccagggaaagaagagcgcgagcagagcacacggaaggaaaacattcaaacaggacctcgtacacgatctccaacaattttggaaacatctccacgacttattcgaaaagcactagaatttatggatttaagtcaatatgttcggaaaacagatacagatcctctgctgcaaacagatgaattgaatcagcagcaggcaatgcaaaaggcggaagaaattcatcagtttcgacagcataggaccagagtccttagcattcgaaacattgaccaagaagagcggttgaagttaaaggatgaagtcctggatatgtataaggaaatgcaggactccttagatgaagcccgacagaaaattttcgacatccgggaagagtacagaaacaaattgctggaagctgagcacctaaagctggaaactctggctgctcaggaagcagccatgaagctggagacagaaaagatgaccccagctcctgacacacagaaaaaaaagaaaggaaagaaaaagtaaccaggggatgtccaatactaccctgcttctggagagaaaaaatctatttgtaatgatctttaactgcctgctgttaagatattaggccaaatgaaaatagaaatttctctttcttagaaatattttaatgctaacttgttagttttcctcagaaagctagtatttgaagccatttgagtttaagatgctctaatttcaataaaatagcttccaaatatttaataaaatatgtttgacactctaaaaaaaaaaaa

SEQ ID NO: 409312 - DNA, 498 bp, Homo sapiens
  misc_feature (9)..(9): n is a, c, g, or t
  misc_feature (27)..(27): n is a, c, g, or t
tttaccggntctccgcccccccgctancccttaaccctaccccccccccccccctctagactccttagatgaagcccgacagaaaattttcgacatccgggaagagtacagaaacaaattgctggaagctgagcacctaaagctggaaactctggctgctcaggaagcagccatgaagctggagacagaaaagatgaccccagctcctgacacacagaaaaaaaagaaaggaaagaaaaagtaaccaggggatgtccaatactaccctgcttctggagagaaaaaatctatttgtaatgatctttaactgcctgctgttaagatattaggccaaatgaaaatagaaatttctctttcttagaaatattttaatgctaacttgttagttttcctcagaaagctagtatttgaagccatttgagtttaagatgctctaatttcaataaaatagcttccaaatatttaataaaatatgtttgacactctaaaaaaaaaaaa

SEQ ID NO: 409313 - DNA, 272 bp, Homo sapiens
aatggggagagtttagaacaccatggatatcgtggaaatggcactgatggggagagtttagaacaccgtggatatcatggaaatggcacccacagcgagagtttagaacaccatggatatcatggaaatggcactgacagggagagtttagaacaccgtggatatcatggaaatggatttcagaaaggcttttgtatgttagttttcagccaagtcaagaagtgagatgcatccacatctggctgcatgcttgtaattagaatctgactttc

SEQ ID NO: 409314 - DNA, 359 bp, Homo sapiens
taaattccagcaatggtagacatcactcttctcttaatgggagtgtttgaagaataaggctatctagttagagtgtgtgagtacttctctgctcacaacacatttgccaccttaagctctacttatggccatcaatgtgctgaacaatttgaaaagttttgataagaatatctttgaatatataactaaagagaaagccttcatttttatcaaagatgattttcaactgctgctcagttgagagtcataacctttaccttcatctaggtcaaacccacgtcagaacccagcagataccacatctctaattaagaaaatattgaaaaaaggttctagtaattttccctctacctgtctca

SEQ ID NO: 409315 - DNA, 842 bp, Homo sapiens
gccaaaagtaagcatttagccctggggccagagggaagacaggcctgaggagggggcaaaaaggtcatgaaggggaaacagaatcaggggccacagcctattttctgccccctcagccccctttcttccccgactctctccctactgtgtctgagctaggatgacagacttacagccccaagagtgaacccagtgggaatgggtccctccccctagcaacttcctgtggctgctgtaacaggtcaccacaagctgggggtattggaacaacacagatctcttctcttcccattctggaggccggaagtctgaaatcagtttcactgggccagaaccaaggtatggacagggccactctccctctgctccctccggaagctgcagggaaaatcccctgcctttgctgaattccagagctttgttcctttcactgtttgcattcctagtctctggcccttccaccaccttcaaagctgactgcataccatccccttctcccctctctggaggaacatggccctctgcctccctcatataagggcacctgtggttagatcactgggctgactcatatactccaggataatcaccccttctccagatcctcaacttaatcacatctgcaaagtcccttttgccatataaggtaacattcacaggttccagggattcaaacatggacatcttgaggctgtcccttatccaacctattcagagcctccaacattactggcattgagttcttgtgctccctttactctctttaaaaatggatcctctattaatgaccatatcattagaagctttggttgtaagcaacggtaatcctgactcaaacttac

SEQ ID NO: 409316 - DNA, 435 bp, Homo sapiens
caaagtctgtattagtcagggttctctataggtacagaacaaatgggatacatgtatatataaaagggagtttattagggagaattggttcacacaattacaaggcaaaggtcccatgataggctgtatgcaagctggagaagagagaagctggtagtggctcagtccaagtctgaaaacctcaaaaccaaggaagccaatgatgcaaccttcagtctgtgaccaaaggctcgagatatcccaggaagctgctggttcaagtcccagagtccaaaggctgaagaacctataatctgatgtccaagggcaggagaagcataaacaagcatccagcatgggaagaagaaagagaaccagaagactcagcaagcaaggttatcccaccttcttccacctgctttgttctagccacactggcagccaatcggatggtgc

SEQ ID NO: 409317 - DNA, 946 bp, Homo sapiens
cacacatcttagtttcttccccatcatctccactagcctgtctctctgctccttcaagaacctgctcaaaagagcacctcctctgggaagccctccctgcttcagcaatgctgagctgcctgtggttccctcttcactttgctcatctcctctgtgccctgcacacactgggccttctgctaattaactccacctcatcctttaaggctggcctcagatgttgcctcctccaggcagccttcccaggtttttccagacagggttagagcctgtcctctgggtgcctggagcaccctgtgcttttcatactcattgctacttgttattctgttctgggtcaacgtctgtctccccactagagtgcgtgttccctggaagttggagctttgtctttcttccacctagcctcagagctagtgtcgaccagccatgcaataggagttcaatttcaatgtctgtttgtttccttcatttctcccagcacaggaaagcacatagcccatctgtggaagaaaattccagaagaccctgcagtgctgtagaccttgctcccttctccaacctttacaccttgaccaatacttaccctcccatcaccatgcgccaaacacactgagacatttttctctttgagtctatgaacacactcagctctttccagccacagggcctttgcatgtgcagcttcccctgtttgaagtctttcactcagctttttagcctggctgagccttgtcaggactttcaagaagtctcagctcaaatgtcacccctcaatctaagctaagctctcttttgtttggggccccagcattttgtatattttcttcacagagcacctcacagtgtataattatctcacatattggttcacacacatctcttttcctccgataccctcactagaatgtaagcaacacgaggtcagggaaggcttcttacctgc

SEQ ID NO: 409318 - DNA, 214 bp, Homo sapiens
ggccgcacccaagagcctggcacaccaggatttgctcaatacgtattttccaagtgaatgagtgaatggattggagggaagggcccaggcatccttccctccaatccctgcccaagttggaagggctgaaatctccagccccatcctaagcccctctctcccagcagagacccgaagagacagatcccaccagtggaagggagtccccggcaag

SEQ ID NO: 409319 - DNA, 1038 bp, Homo sapiens
gtcccccactattaataaggtcattgtcagctgagttggggaggtggcgtgggtagatacaattaatttagattttttaaaaggcttttgagaatattcggagaacctaatatattttgagacctgacatttattttaaacgtgaaaagcaatttacaaaattgcacatactctataaatacacttctgttataaaaatagacacgtacggccgggcgcggtggctcacgcctgtaatcccagcactttgggaggccgaggcgggcggatcacgaggtcaggagatcgagaccatcccggctaaaacggtgaaaccccgtctctactaaaaatacaaaaaattagccgggcgtagtggcgggcacctgtagtcccagctacttgggaggctgaggcaggagaatggcgtgaacccgggaggcggagcttgcagtgagccgagagcccgccactgcactccagcctgggcgacagagcgagactccgtctcaaaaaaaaaaaaaaaaaaaaaaaaaaaaaaaaagacacgtacacagacaaatgttctgacagaaatacactgagatatctacagtgcttgtctctggataggatagggtataatttaattgtttatagttaagttaatgaacttggccagacagacctgggatcaaatcccgcctctatcatgaattggctgtgaggtgtgacattgaaaaagtgatttagcctttgttcccctccaggtccttatctgtaaggtggcagttacaataatacccacctcccagggttatatgtcaatgggttaggcacagacctaggaactcagcaaatggactactatgaagtattagctttttactgtttctggttttctgatttttgtctcctgttgtgaacatacgttgcttttgtaatatgaaaaataaaaaataaaagttaaatttgttttgtttgtaagaatcagttgaggacagatgggactatttgcatggattggtgtcatgtttgaagtcagttaccagagggtttctttcaacagagtataccaaa

SEQ ID NO: 409320 - DNA, 618 bp, Homo sapiens
aaaaatataataaaaaataaataaaaaaatataaaataataattaaaataaaaaaataaaaaaaaaaaaaaaaaaaaaaaaaaaaaaaaaaaaaaaaaaaaaagacacgtacacagacaaatgttctgacagaaatacactgagatatctacagtgcttgtctctggataggatagggtataatttaattgtttatagttaagttaatgaacttggccagacagacctgggatcaaatcccgcctctatcatgaattggctgtgaggtgtgacattgaaaaagtgatttagcctttgttcccctccaggtccttatctgtaaggtggcagttacaataatacccacctcccagggttatatgtcaatgggttaggcacagacctaggaactcagcaaatggactactatgaagtattagctttttactgtttctggttttctgatttttgtctcctgttgtgaacatacgttgcttttgtaatatgaaaaataaaaaataaaagttaaatttgttttgtttgtaagaatcagttgaggacagatgggactatttgcatggattggtgtcatgtttgaagtcagttaccagagggtttctttcaacagagtataccaaa

SEQ ID NO: 409321 - DNA, 661 bp, Homo sapiens
cagtacctagacctgggtatgaaggccaagcaaaagctttggttctgggcaggatctgcagtcacatttctagattaccagctcatccaggacttgagagaccaagacccaggagaaaaggaaacctcagagaggtcttaattttcatccagaccaccttcagcccacttctactgaccacaagcttttggatcctgccctgggtctctgagcacagcagaatacaggagaatccctttcttctggagacatgatgccttatcttccctcccaaaggaccatctctgcttcaattccactgccagccacatccttgctaccaccctcttactacttcctattccagccaaactgtattagtttttaatttatttcactcagttattcttattacagtttaaatatagaaaatacaaaatatggatatttattttatttcttattatacaagcatatccatgttatctttgatattgctacttggtccacacaggtggataaggtaccatatttaccatctgaccctttatagaaaaagttagctgacccctcgtctaaactatgaagacagaaacatctgtttttttccttattgtagtcccacaacaggtgcaaatgtgtcctaaatgaatatcattaagtgaataaatgatggaaaaat

SEQ ID NO: 409322 - DNA, 759 bp, Homo sapiens
caatgaatgagagttcctattgtttcacctgctcgccatcatttggtgttttcagagtttgaaatttgggccattataatggagtatctgtctcttggcttcctgagaatctgtcgtgattaaatagtgaatgaaagaaactgaatggaattttctgtaccattgtgcccagaattggttccttccggtgggttctttgtctcgctgacttcaagaatgaagctgtggatcctcgtgagaacagagaaaaactgttttctgaaaagcaattctgcaaaaacattgacattaacaaaaaacacacctgcttggaaaagaggataacatgttggacaatggttaaattatatttactttgatatgtctctggaggttaaatcaatacctgtatgaagcttgaagttcacatttattatggagggcacttgtaaaagtgtatctgaagcctgtaagaggcagaaggactcagtcatatgctgccttctgtgcctgatgttttcttttgactctagggagagacgtgaacatacagtctgttattgtagtttatgcacaaagactcaaataagaaagatgtgggtgtatgtataagaaaaggtttagaaagcttggcatattttctatgaatgttaagaacttgtattactgtaattctgtaagtctaaatgcaatcgaaggacacaaacatctctatgtataatgagattaactgaaacataattgaacaaaactggaaataaagaaaaatctatcaaataa

SEQ ID NO: 409323 - DNA, 1042 bp, Homo sapiens
attatcttatcaaatttaaagaaagaggctatatataagaaaacagtacatattctatatgagaaaggcagggcttgctcttgctcaaggcctgtttctaggccatgagacatctttctataaattagaaaaatggttctttttatggatggatccagctctgcaactagaaatcttaatgaatagatagcgctttatgtgcaggaaaatggtactggatgcatgacttgaagtacagcacacaagcttcattccatctcctttactccccttggtcaggaacctgaattttctgtaccattgtgcccagaattggttccttccggtgggttctttgtctcgctgacttcaagaatgaagctgtggatcctcgtgaccaccttcagcccacttctactgaccacaagcttttggatcctgccctgggtctctgagcacagcagaatacaggagaatccctttcttctggagacatgatgccttatcttccctcccaaaggaccatctctgcttcaattccactgccagccacatccttgctaccaccctcttactacttcctattccagccaaactgtattagtttttaatttatttcactcagttattcttattacagtttaaatatagaaaatacaaaatatggatatttattttatttcttattatacaagcatatccatgttatctttgatattgctacttggtccacacaggtggataaggtaccatatttaccatctgaccctttatagaaaaagttagctgacccctcgtctaaactatgaagacagaaacatctgtttttttccttattgtagtcccacaacaggtgcaaatgtgtcctaaatgaatatcattaagtgaataaatgatggaaaaatatgtattttcctgtattgtctaataaccagatatattcttattctttatctgtcacctatttatcctaatttcaactaacttatcttttccatgaatcattctcaactaacttcaattgggactgatttcatgaacagacttcaatcattttaacatt

SEQ ID NO: 409324 - DNA, 904 bp, Homo sapiens
caatgaatgagagttcctattgtttcacctgctcgccatcatttggtgttttcagagtttgaaatttgggccattataatggagtatctgtctcttggcttcctgagaatctgtcgtgattaaatagtgaatgaaagaaactgaatggaattttctgtaccattgtgcccagaattggttccttccggtgggttctttgtctcgctgacttcaagaatgaagctgtggatcctcgtgaccaccttcagcccacttctactgaccacaagcttttggatcctgccctgggtctctgagcacagcagaatacaggagaatccctttcttctggagacatgatgccttatcttccctcccaaaggaccatctctgcttcaattccactgccagccacatccttgctaccaccctcttactacttcctattccagccaaactgtattagtttttaatttatttcactcagttattcttattacagtttaaatatagaaaatacaaaatatggatatttattttatttcttattatacaagcatatccatgttatctttgatattgctacttggtccacacaggtggataaggtaccatatttaccatctgaccctttatagaaaaagttagctgacccctcgtctaaactatgaagacagaaacatctgtttttttccttattgtagtcccacaacaggtgcaaatgtgtcctaaatgaatatcattaagtgaataaatgatggaaaaatatgtattttcctgtattgtctaataaccagatatattcttattctttatctgtcacctatttatcctaatttcaactaacttatcttttccatgaatcattctcaactaacttcaattgggactgatttcatgaacagacttcaatcattttaacatt

SEQ ID NO: 409325 - DNA, 509 bp, Homo sapiens
aaaagctgctataaacaccattgtgcagtgtttgtgtgcacatacaatttcaagtcatatgagtaaatatcaagtagcatgattgctggtttgcacggtaaaagtatatttagttttgcaagaaattaccaaaatgtcttccaaaatggctgtaccattttttgttcccaacagcaatgaatgagagttcctattgtttcacctgctcgccatcatttggtgttttcagagtttgaaatttgggccattataatgggtatgtagtgatatcttaatattgttttaatttgcatttccctaatgatgtatgatattgtatatgtttatttgtcaacttggactttctttggtgagatatctgtttagatcttttgtctattttttaaaatatcaggttgttcctttcttcttattgagttttgagagtttttgtatattttggataacagacctttatcagatatatcttttacaaatagtttccctcagtttgtcaagccttcattttt

SEQ ID NO: 409326 - DNA, 345 bp, Homo sapiens
atggctctgctccatccccctagaaagccccccaagagcccctgatgccctcggggaaaggcgtctgaccctacttgctcctctgccactccagctccattggatacaggctgcacgtttacggtgatggaaggcctctgggggttcccaactgaccctaaatctgatgcgggggaggtaactccaggttaagtagaaagaacactggccaggattttaaagacctggattccagtcctggctctgctggtgtgtggccgggggcaaataagcatcacttttcccatctgtataacagatagattaaaactcatgatcctctggggctctcaaagctccacattc

SEQ ID NO: 409327 - DNA, 1397 bp, Homo sapiens
ttaaaaagacatgcatctacaggggcaaacagaagagaatatgacaacaagactttgaaagctggatagaaggactagtggcaaatgactaagacctggaaaagctgaaccctaaaaaaggcagtaagaaaagcctagaagcaacctacactgcacctcagtaaggttgatggtttgcccacaaagaaattttggaattctacttctctaaggacaaatacacacagatgcatatacaaggatatttactggagcattgtttataacagaaaaataccaaaaacatcctgaaatgattgaatacaaggaattggttaaataatttatatctactcaaccagtagaataccataaaatggtgacatagaaatgaagacaggttacctgattgatggctcccaacatctcagccctactggccactcgtgctgcacactggctaagaaactttatactcttctccagcttcttaatgatttcctgtgcctggttgtcatcttcacacagaggtgttaaagactgtatagaaaacagcatattaaaagatatctaacacaagcattcagcgagtgattctgacactgactaagttgcaaatgtggatgacattctaatctcagttatttcggtggaagatgaaaagaagcagcaaagatcaataatgaatgatactgatatattattatcttttttgggtactgggtagatatacgcaggtgatcacaaatcttttatgtctattcttgatcccttttttctttacttcccaaatttgccacatctttcttctacagctaataggatgggctgcaattaattggtaatggtaaagagattatgcttacaaaagaggtgaatgtatcatataaggagcataggttggaattttaagaaacgtaaccaaacatattggaattaaaaatgtctctgacggtatgactgggctggctaggtgaatatacattcattgccttatgaattttcctctcaatcctgtgccctttacacaatatgatgcccttcctgatgaacatccttctcaccagagtacagacaggattaagtgaataacagatttggaagcagacatgacactgctcattacctgtgtgattgtgagcaaatttctaaaactttcccaaatctaaagcaacatgaattataagagatacaacgattttgtatatcattaagaaagaaaaggctgtcaataaaaccattaggcaccaccgactgtaaattgcatcataattttagaaatgttcaaaaaaaatcaacctttctgatttgctgtttccttatctgtccagtggggacaatcacgtatcctctccagaaatactgtcatatgataggtaagagatgcacaactgcctgttgcacattcgtgctcaatg

SEQ ID NO: 409328 - DNA, 537 bp, Homo sapiens
ttaaaaagacatgcatctacaggggcaaacagaagagaatatgacaacaagactttgaaagctggatagaaggactagtggcaaatgactaagacctggaaaagctgaaccctaaaaaaggcagtaagaaaagcctagaagcaacctacactgcacctcagtaaggttgatggtgggtatgtgaacagaagaaatggttgaaagtctgtgtaaaaaaaaaaaaaaaagattaggtccagagactccttccttactgtggccagcacagcaattttccctccactattttggtgaaagactacatacagttggatatctagagagagttaacttgaggttctgtggattgggaaagaacagatagttgatgatggatctatcatgctgaaaacaacagatttaagcaacaacttatatgcatattgaatattgagatccagccttattcctccttccagcctccaaacactggcagccagagttacaccctcaaggcaggcagttggaaggtttttctctggggattctaatattcta

SEQ ID NO: 409329 - DNA, 1246 bp, Homo sapiens
agcaacacattcaggcaaagggatgcgagaaaactcctagttataactatgcaccaaatatggataaacactggattatgcagtacacaggaccaatgctgcccatccacatggaatttacaaacattctacagcgcaaaaggctccagactttgatgtcagtggatgattctgtggagaggctgtataacatgctcgtggagacgggggagctggagaatacttacatcatttacaccgccgaccatggttaccatattgggcagtttggactggtcaaggggaaatccatgccatatgactttgatattcgtgtgcctttttttattcgtggtccaagtgtagaaccaggatcaatgtttcgaacaaacaagaaggccaaaatttggcgtgatacattcctagtggaaagagggtaattattggttcctggggtgcttctgggaaccagtcctagtgggcagctttccctgctgagtattttttttctccttatttttgtttactaagcatgcagatttcgtaaacctagtcacaagattgaatggtttgctgcttattctgtagtggtcaatagagtaataattgctggatcagaattgtaaagaataaccctcaagttggttaattggtacaaaaacacagttagatagaagttatagaatttgatagtatagttgggacattatcgttaacaataatttatgtatatcttaaaatagctagaagtgaagaattgcaaagttcccaacacaaggaaaagataaatgagatgatgaatatcccaattatcttgatttgatcattacacattgtagactggtatccatatatcacacgtacccccaaaatatgtataattgtgatatatcaatttttaaaataccaaaaaagcaagagaatgacgactccacattccccaaaaagaataaattctcataagcttggaccaaagcctttatcatgggtgtagatttactgttgcatttctcagtgctggtttctaatcagaccagtggattgagtttctctaccatcctccccacgttcttctctaagctgcctccaagcctcacccggcacccttcttcctacttcctacttcttttccttgtgtgcctttcctagttttaaatagataaatgtatgccattgtaattatttccattgtcacttctgggtttccccttttggttcattaatacccattgccttgtttttctctgtacataaattaggagagaga

SEQ ID NO: 409330 - DNA, 370 bp, Homo sapiens
tactactactactaaattcgcggccgcgtcgacgataaattatgttttctttaagtgtttatggtaaactcttttaaagaaaatttaatatgttatagctgaatctttttggtaactttaaatctttatcatagactctgtacatatgttcaaattagctgcttgcctgatgtgtgtatcatcggtgggatgacagaacaaacatatttatgatcatgaataatgtgctttgtaaaaagatttcaagttattaggaagcatactctgttttttaatcatgtataatattccatgatacttttatagaacaattctggcttcaggaaagtctagaagcaatatttcttcaaataaaaggtgtttaaacttt

SEQ ID NO: 409331 - DNA, 105 bp, Homo sapiens
tcaagcttctaacgatgtacggggacatgatacttttatagaacaattctggcttcaggaaagtctagaagcaatatttcttcaaataaaaggtgtttaaacttt

SEQ ID NO: 409332 - DNA, 5696 bp, Homo sapiens
ggagttctcagacctccagtttcagccctgccctcagcctccaatccgtaagagacacccagccccagcaattggattgggcagcccgtcttgacacaccactgtgctgagtgcttgaggacgtgtttcaacagatggttggggttagtgtgtgtcatcacattcgagtggggattaagagaaggaaggctgccttgctggagctgtgtggtcttctccaagtgagagtcgcaggcaatagaactactttgcttttggaggaaaaggaggaattcattttcagcagacacaagaaaagcagtttttttttcagggattcttcacttctcttgaacaaggaactcactcagagactaacacaaaggaagtaatttcttacctggtcattatttagtctacaataagttcatccttcttcagtgtgaccagtaaattcttcccatactcttgaagagagcataattggaatggagaggtgctgacggccacccaccatcatctaaagaagataaacttggcaaatgacatgcaggttcttcaaggcagaataattgcagaaaatcttcaaaggaccctatctgcagatgttctgaatacctctgagaatagagattgattattcaaccaggatacctaattcaagaactccagaaatcaggagacggagacattttgtcagttttgcaacattggaccaaatacaatgaagtattcttgctgtgctctggttttggctgtcctgggcacagaattgctgggaagcctctgttcgactgtcagatccccgaggttcagaggacggatacagcaggaacgaaaaaacatccgacccaacattattcttgtgcttaccgatgatcaagatgtggagctggggtccctgcaagtcatgaacaaaacgagaaagattatggaacatgggggggccaccttcatcaatgcctttgtgactacacccatgtgctgcccgtcacggtcctccatgctcaccgggaagtatgtgcacaatcacaatgtctacaccaacaacgagaactgctcttccccctcgtggcaggccatgcatgagcctcggacttttgctgtatatcttaacaacactggctacagaacagccttttttggaaaatacctcaatgaatataatggcagctacatcccccctgggtggcgagaatggcttggattaatcaagaattctcgcttctataattacactgtttgtcgcaatggcatcaaagaaaagcatggatttgattatgcaaaggactacttcacagacttaatcactaacgagagcattaattacttcaaaatgtctaagagaatgtatccccataggcccgttatgatggtgatcagccacgctgcgccccacggccccgaggactcagccccacagttttctaaactgtaccccaatgcttcccaacacataactcctagttataactatgcaccaaatatggataaacactggattatgcagtacacaggaccaatgctgcccatccacatggaatttacaaacattctacagcgcaaaaggctccagactttgatgtcagtggatgattctgtggagaggctgtataacatgctcgtggagacgggggagctggagaatacttacatcatttacaccgccgaccatggttaccatattgggcagtttggactggtcaaggggaaatccatgccatatgactttgatattcgtgtgcctttttttattcgtggtccaagtgtagaaccaggatcaatagtcccacagatcgttctcaacattgacttggcccccacgatcctggatattgctgggctcgacacacctcctgatgtggacggcaagtctgtcctcaaacttctggacccagaaaagccaggtaacaggtttcgaacaaacaagaaggccaaaatttggcgtgatacattcctagtggaaagaggcaaatttctacgtaagaaggaagaatccagcaagaatatccaacagtcaaatcacttgcccaaatatgaacgggtcaaagaactatgccagcaggccaggtaccagacagcctgtgaacaaccggggcagaagtggcaatgcattgaggatacatctggcaagcttcgaattcacaagtgtaaaggacccagtgacctgctcacagtccggcagagcacgcggaacctctacgctcgcggcttccatgacaaagacaaagagtgcagttgtagggagtctggttaccgtgccagcagaagccaaagaaagagtcaacggcaattcttgagaaaccaggggactccaaagtacaagcccagatttgtccatactcggcagacacgttccttgtccgtcgaatttgaaggtgaaatatatgacataaatctggaagaagaagaagaattgcaagtgttgcaaccaagaaacattgctaagcgtcatgatgaaggccacaaggggccaagagatctccaggcttccagtggtggcaacaggggcaggatgctggcagatagcagcaacgccgtgggcccacctaccactgtccgagtgacacacaagtgttttattcttcccaatgactctatccattgtgagagagaactgtaccaatcggccagagcgtggaaggaccataaggcatacattgacaaagagattgaagctctgcaagataaaattaagaatttaagagaagtgagaggacatctgaagagaaggaagcctgaggaatgtagctgcagtaaacaaagctattacaataaagagaaaggtgtaaaaaagcaagagaaattaaagagccatcttcacccattcaaggaggctgctcaggaagtagatagcaaactgcaacttttcaaggagaacaaccgtaggaggaagaaggagaggaaggagaagagacggcagaggaagggggaagagtgcagcctgcctggcctcacttgcttcacgcatgacaacaaccactggcagacagccccgttctggaacctgggatctttctgtgcttgcacgagttctaacaataacacctactggtgtttgcgtacagttaatgagacgcataattttcttttctgtgagtttgctactggctttttggagtattttgatatgaatacagatccttatcagctcacaaatacagtgcacacggtagaacgaggcattttgaatcagctacacgtacaactaatggagctcagaagctgtcaaggatataagcagtgcaacccaagacctaagaatcttgatgttggaaataaagatggaggaagctatgacctacacagaggacagttatgggatggatgggaaggttaatcagccccgtctcactgcagacatcaactggcaaggcctagaggagctacacagtgtgaatgaaaacatctatgagtacagacaaaactacagacttagtctggtggactggactaattacttgaaggatttagatagagtatttgcactgctgaagagtcactatgagcaaaataaaacaaataagactcaaactgctcaaagtgacgggttcttggttgtctctgctgagcacgctgtgtcaatggagatggcctctgctgactcagatgaagacccaaggcataaggttgggaaaacacctcatttgaccttgccagctgaccttcaaaccctgcatttgaaccgaccaacattaagtccagagagtaaacttgaatggaataacgacattccagaagttaatcatttgaattctgaacactggagaaaaaccgaaaaatggacggggcatgaagagactaatcatctggaaaccgatttcagtggcgatggcatgacagagctagagctcgggcccagccccaggctgcagcccattcgcaggcacccgaaagaacttccccagtatggtggtcctggaaaggacatttttgaagatcaactatatcttcctgtgcattccgatggaatttcagttcatcagatgttcaccatggccaccgcagaacaccgaagtaattccagcatagcggggaagatgttgaccaaggtggagaagaatcacgaaaaggagaagtcacagcacctagaaggcagcgcctcctcttcactctcctctgattagatgaaactgttaccttaccctaaacacagtatttctttttaacttttttatttgtaaactaataaaggtaatcacagccaccaacattccaagctaccctgggtacctttgtgcagtagaagctagtgagcatgtgagcaagcggtgtgcacacggagactcatcgttataatttactatctgccaagagtagaaagaaaggctggggatatttgggttggcttggttttgattttttgcttgtttgtttgttttgtactaaaacagtattatcttttgaatatcgtagggacataagtatatacatgttatccaatcaagatggctagaatggtgcctttctgagtgtctaaaacttgacacccctggtaaatctttcaacacacttccactgcctgcgtaatgaagttttgattcatttttaaccactggaatttttcaatgccgtcattttcagttagatgattttgcactttgagattaaaatgccatgtctatttgattagtcttatttttttatttttacaggcttatcagtctcactgttggctgtcattgtgacaaagtcaaataaacccccaaggacgacacacagtatggatcacatattgtttgacattaagcttttgccagaaaatgttgcatgtgttttacctcgacttgctaaaatcgattagcagaaaggcatggctaataatgttggtggtgaaaataaataaataagtaaacaaaatgaagattgcctgctctctctgtgcctagcctcaaagcgttcatcatacatcatacctttaagattgctatattttgggttattttcttgacaggagaaaaagatctaaagatcttttattttcatcttttttggttttcttggcatgactaagaagcttaaatgttgataaaatatgactagttttgaatttacaccaagaacttctcaataaaagaaaatcatgaatgctccacaatttcaacataccacaagagaagttaatttcttaacattgtgttctatgattatttgtaagaccttcaccaagttctgatatcttttaaagacatagttcaaaattgcttttgaaaatctgtattcttgaaaatatccttgttgtgtattaggtttttaaataccagctaaaggattacctcactgagtcatcagtaccctcctattcagctccccaagatgatgtgtttttgcttaccctaagagaggttttcttcttatttttagataattcaagtgcttagataaattatgttttctttaagtgtttatggtaaactcttttaaagaaaatttaatatgttatagctgaatctttttggtaactttaaatctttatcatagactctgtacatatgttcaaattagctgcttgcctgatgtgtgtatcatcggtgggatgacagaacaaacatatttatgatcatgaataatgtgctttgtaaaaagatttcaagttattaggaagcatactctgttttttaatcatgtataatattccatgatacttttatagaacaattctggcttcaggaaagtctagaagcaatatttcttcaaataaaaggtgtttaaacttt

SEQ ID NO: 409333 - DNA, 4337 bp, Homo sapiens
ggccattccaatggaacagacagggtaaggaccaatctggactgtgttatcttttccaggtgcaagtatgtgctatggaactcctagttataactatgcaccaaatatggataaacactggattatgcagtacacaggaccaatgctgcccatccacatggaatttacaaacattctacagcgcaaaaggctccagactttgatgtcagtggatgattctgtggagaggctgtataacatgctcgtggagacgggggagctggagaatacttacatcatttacaccgccgaccatggttaccatattgggcagtttggactggtcaaggggaaatccatgccatatgactttgatattcgtgtgcctttttttattcgtggtccaagtgtagaaccaggatcaatagtcccacagatcgttctcaacattgacttggcccccacgatcctggatattgctgggctcgacacacctcctgatgtggacggcaagtctgtcctcaaacttctggacccagaaaagccaggtaacaggtttcgaacaaacaagaaggccaaaatttggcgtgatacattcctagtggaaagaggcaaatttctacgtaagaaggaagaatccagcaagaatatccaacagtcaaatcacttgcccaaatatgaacgggtcaaagaactatgccagcaggccaggtaccagacagcctgtgaacaaccggggcagaagtggcaatgcattgaggatacatctggcaagcttcgaattcacaagtgtaaaggacccagtgacctgctcacagtccggcagagcacgcggaacctctacgctcgcggcttccatgacaaagacaaagagtgcagttgtagggagtctggttaccgtgccagcagaagccaaagaaagagtcaacggcaattcttgagaaaccaggggactccaaagtacaagcccagatttgtccatactcggcagacacgttccttgtccgtcgaatttgaaggtgaaatatatgacataaatctggaagaagaagaagaattgcaagtgttgcaaccaagaaacattgctaagcgtcatgatgaaggccacaaggggccaagagatctccaggcttccagtggtggcaacaggggcaggatgctggcagatagcagcaacgccgtgggcccacctaccactgtccgagtgacacacaagtgttttattcttcccaatgactctatccattgtgagagagaactgtaccaatcggccagagcgtggaaggaccataaggcatacattgacaaagagattgaagctctgcaagataaaattaagaatttaagagaagtgagaggacatctgaagagaaggaagcctgaggaatgtagctgcagtaaacaaagctattacaataaagagaaaggtgtaaaaaagcaagagaaattaaagagccatcttcacccattcaaggaggctgctcaggaagtagatagcaaactgcaacttttcaaggagaacaaccgtaggaggaagaaggagaggaaggagaagagacggcagaggaagggggaagagtgcagcctgcctggcctcacttgcttcacgcatgacaacaaccactggcagacagccccgttctggaacctgggatctttctgtgcttgcacgagttctaacaataacacctactggtgtttgcgtacagttaatgagacgcataattttcttttctgtgagtttgctactggctttttggagtattttgatatgaatacagatccttatcagctcacaaatacagtgcacacggtagaacgaggcattttgaatcagctacacgtacaactaatggagctcagaagctgtcaaggatataagcagtgcaacccaagacctaagaatcttgatgttggaaataaagatggaggaagctatgacctacacagaggacagttatgggatggatgggaaggttaatcagccccgtctcactgcagacatcaactggcaaggcctagaggagctacacagtgtgaatgaaaacatctatgagtacagacaaaactacagacttagtctggtggactggactaattacttgaaggatttagatagagtatttgcactgctgaagagtcactatgagcaaaataaaacaaataagactcaaactgctcaaagtgacgggttcttggttgtctctgctgagcacgctgtgtcaatggagatggcctctgctgactcagatgaagacccaaggcataaggttgggaaaacacctcatttgaccttgccagctgaccttcaaaccctgcatttgaaccgaccaacattaagtccagagagtaaacttgaatggaataacgacattccagaagttaatcatttgaattctgaacactggagaaaaaccgaaaaatggacggggcatgaagagactaatcatctggaaaccgatttcagtggcgatggcatgacagagctagagctcgggcccagccccaggctgcagcccattcgcaggcacccgaaagaacttccccagtatggtggtcctggaaaggacatttttgaagatcaactatatcttcctgtgcattccgatggaatttcagttcatcagatgttcaccatggccaccgcagaacaccgaagtaattccagcatagcggggaagatgttgaccaaggtggagaagaatcacgaaaaggagaagtcacagcacctagaaggcagcgcctcctcttcactctcctctgattagatgaaactgttaccttaccctaaacacagtatttctttttaacttttttatttgtaaactaataaaggtaatcacagccaccaacattccaagctaccctgggtacctttgtgcagtagaagctagtgagcatgtgagcaagcggtgtgcacacggagactcatcgttataatttactatctgccaagagtagaaagaaaggctggggatatttgggttggcttggttttgattttttgcttgtttgtttgttttgtactaaaacagtattatcttttgaatatcgtagggacataagtatatacatgttatccaatcaagatggctagaatggtgcctttctgagtgtctaaaacttgacacccctggtaaatctttcaacacacttccactgcctgcgtaatgaagttttgattcatttttaaccactggaatttttcaatgccgtcattttcagttagatgattttgcactttgagattaaaatgccatgtctatttgattagtcttatttttttatttttacaggcttatcagtctcactgttggctgtcattgtgacaaagtcaaataaacccccaaggacgacacacagtatggatcacatattgtttgacattaagcttttgccagaaaatgttgcatgtgttttacctcgacttgctaaaatcgattagcagaaaggcatggctaataatgttggtggtgaaaataaataaataagtaaacaaaatgaagattgcctgctctctctgtgcctagcctcaaagcgttcatcatacatcatacctttaagattgctatattttgggttattttcttgacaggagaaaaagatctaaagatcttttattttcatcttttttggttttcttggcatgactaagaagcttaaatgttgataaaatatgactagttttgaatttacaccaagaacttctcaataaaagaaaatcatgaatgctccacaatttcaacataccacaagagaagttaatttcttaacattgtgttctatgattatttgtaagaccttcaccaagttctgatatcttttaaagacatagttcaaaattgcttttgaaaatctgtattcttgaaaatatccttgttgtgtattaggtttttaaataccagctaaaggattacctcactgagtcatcagtaccctcctattcagctccccaagatgatgtgtttttgcttaccctaagagaggttttcttcttatttttagataattcaagtgcttagataaattatgttttctttaagtgtttatggtaaactcttttaaagaaaatttaatatgttatagctgaatctttttggtaactttaaatctttatcatagactctgtacatatgttcaaattagctgcttgcctgatgtgtgtatcatcggtgggatgacagaacaaacatatttatgatcatgaataatgtgctttgtaaaaagatttcaagttattaggaagcatactctgttttttaatcatgtataatattccatgatacttttatagaacaattctggcttcaggaaagtctagaagcaatatttcttcaaataaaaggtgtttaaacttt

SEQ ID NO: 409334 - DNA, 2115 bp, Homo sapiens
  misc_feature (51)..(51): n is a, c, g, or t
tgtggtactgctggagtacagtggtgcagtctcagctcactgcaactccgncctctcgggttcaagcgattctcctgcctcagcctcccgagaagctggaattacaggcatgcgccaccacgcccagctaattttgtatttttagtaaagatggtgtttctccatgttggtcaggctggtctcgaactcccgacctcaggtgatccgcccacctcggcctcccaaagtgctggcatgacagagctagagctcgggcccagccccaggctgcagcccattcgcaggcacccgaaagaacttccccagtatggtggtcctggaaaggacatttttgaagatcaactatatcttcctgtgcattccgatggaatttcagttcatcagatgttcaccatggccaccgcagaacaccgaagtaattccagcatagcggggaagatgttgaccaaggtggagaagaatcacgaaaaggagaagtcacagcacctagaaggcagcgcctcctcttcactctcctctgattagatgaaactgttaccttaccctaaacacagtatttctttttaacttttttatttgtaaactaataaaggtaatcacagccaccaacattccaagctaccctgggtacctttgtgcagtagaagctagtgagcatgtgagcaagcggtgtgcacacggagactcatcgttataatttactatctgccaagagtagaaagaaaggctggggatatttgggttggcttggttttgattttttgcttgtttgtttgttttgtactaaaacagtattatcttttgaatatcgtagggacataagtatatacatgttatccaatcaagatggctagaatggtgcctttctgagtgtctaaaacttgacacccctggtaaatctttcaacacacttccactgcctgcgtaatgaagttttgattcatttttaaccactggaatttttcaatgccgtcattttcagttagatgattttgcactttgagattaaaatgccatgtctatttgattagtcttatttttttatttttacaggcttatcagtctcactgttggctgtcattgtgacaaagtcaaataaacccccaaggacgacacacagtatggatcacatattgtttgacattaagcttttgccagaaaatgttgcatgtgttttacctcgacttgctaaaatcgattagcagaaaggcatggctaataatgttggtggtgaaaataaataaataagtaaacaaaatgaagattgcctgctctctctgtgcctagcctcaaagcgttcatcatacatcatacctttaagattgctatattttgggttattttcttgacaggagaaaaagatctaaagatcttttattttcatcttttttggttttcttggcatgactaagaagcttaaatgttgataaaatatgactagttttgaatttacaccaagaacttctcaataaaagaaaatcatgaatgctccacaatttcaacataccacaagagaagttaatttcttaacattgtgttctatgattatttgtaagaccttcaccaagttctgatatcttttaaagacatagttcaaaattgcttttgaaaatctgtattcttgaaaatatccttgttgtgtattaggtttttaaataccagctaaaggattacctcactgagtcatcagtaccctcctattcagctccccaagatgatgtgtttttgcttaccctaagagaggttttcttcttatttttagataattcaagtgcttagataaattatgttttctttaagtgtttatggtaaactcttttaaagaaaatttaatatgttatagctgaatctttttggtaactttaaatctttatcatagactctgtacatatgttcaaattagctgcttgcctgatgtgtgtatcatcggtgggatgacagaacaaacatatttatgatcatgaataatgtgctttgtaaaaagatttcaagttattaggaagcatactctgttttttaatcatgtataatattccatgatacttttatagaacaattctggcttcaggaaagtctagaagcaatatttcttcaaataaaaggtgtttaaacttt

SEQ ID NO: 409335 - DNA, 1704 bp, Homo sapiens
ttgaggatcccctgctcttccgtgcccatgttgaccaaggtggagaagaatcacgaaaaggagaagtcacagcacctagaaggcagcgcctcctcttcactctcctctgattagatgaaactgttaccttaccctaaacacagtatttctttttaacttttttatttgtaaactaataaaggtaatcacagccaccaacattccaagctaccctgggtacctttgtgcagtagaagctagtgagcatgtgagcaagcggtgtgcacacggagactcatcgttataatttactatctgccaagagtagaaagaaaggctggggatatttgggttggcttggttttgattttttgcttgtttgtttgttttgtactaaaacagtattatcttttgaatatcgtagggacataagtatatacatgttatccaatcaagatggctagaatggtgcctttctgagtgtctaaaacttgacacccctggtaaatctttcaacacacttccactgcctgcgtaatgaagttttgattcatttttaaccactggaatttttcaatgccgtcattttcagttagatgattttgcactttgagattaaaatgccatgtctatttgattagtcttatttttttatttttacaggcttatcagtctcactgttggctgtcattgtgacaaagtcaaataaacccccaaggacgacacacagtatggatcacatattgtttgacattaagcttttgccagaaaatgttgcatgtgttttacctcgacttgctaaaatcgattagcagaaaggcatggctaataatgttggtggtgaaaataaataaataagtaaacaaaatgaagattgcctgctctctctgtgcctagcctcaaagcgttcatcatacatcatacctttaagattgctatattttgggttattttcttgacaggagaaaaagatctaaagatcttttattttcatcttttttggttttcttggcatgactaagaagcttaaatgttgataaaatatgactagttttgaatttacaccaagaacttctcaataaaagaaaatcatgaatgctccacaatttcaacataccacaagagaagttaatttcttaacattgtgttctatgattatttgtaagaccttcaccaagttctgatatcttttaaagacatagttcaaaattgcttttgaaaatctgtattcttgaaaatatccttgttgtgtattaggtttttaaataccagctaaaggattacctcactgagtcatcagtaccctcctattcagctccccaagatgatgtgtttttgcttaccctaagagaggttttcttcttatttttagataattcaagtgcttagataaattatgttttctttaagtgtttatggtaaactcttttaaagaaaatttaatatgttatagctgaatctttttggtaactttaaatctttatcatagactctgtacatatgttcaaattagctgcttgcctgatgtgtgtatcatcggtgggatgacagaacaaacatatttatgatcatgaataatgtgctttgtaaaaagatttcaagttattaggaagcatactctgttttttaatcatgtataatattccatgatacttttatagaacaattctggcttcaggaaagtctagaagcaatatttcttcaaataaaaggtgtttaaacttt

SEQ ID NO: 409336 - DNA, 1655 bp, Homo sapiens
agtgcgatccccgggctgcaggaattcggcaatgttgaccaaggtggagaagaatcacgaaaaggagaagtcacagcacctagaaggcagcgcctcctcttcactctcctctgattagatgaaactgttaccttaccctaaacacagtatttctttttaacttttttatttgtaaactaataaaggtaatcacagccaccaacattccaagctaccctgggtacctttgtgcagtagaagctagtgagcatgtgagcaagcggtgtgcacacggagactcatcgttataatttactatctgccaagagtagaaagaaaggctggggatatttgggttggcttggttttgattttttgcttgtttgtttgttttgtactaaaacagtattatcttttgaatatcgtagggacataagtatatacatgttatccaatcaagatggctagaatggtgcctttctgagtgtctaaaattttgattcatttttaaccactggaatttttcaatgccgtcattttcagttagatgattttgcactttgagattaaaatgccatgtctatttgattagtcttatttttttatttttacaggcttatcagtctcactgttggctgtcattgtgacaaagtcaaataaacccccaaggacgacacacagtatggatcacatattgtttgacattaagcttttgccagaaaatgttgcatgtgttttacctcgacttgctaaaatcgattagcagaaaggcatggctaataatgttggtggtgaaaataaataaataagtaaacaaaatgaagattgcctgctctctctgtgcctagcctcaaagcgttcatcatacatcatacctttaagattgctatattttgggttattttcttgacaggagaaaaagatctaaagatcttttattttcatcttttttggttttcttggcatgactaagaagcttaaatgttgataaaatatgactagttttgaatttacaccaagaacttctcaataaaagaaaatcatgaatgctccacaatttcaacataccacaagagaagttaatttcttaacattgtgttctatgattatttgtaagaccttcaccaagttctgatatcttttaaagacatagttcaaaattgcttttgaaaatctgtattcttgaaaatatccttgttgtgtattaggtttttaaataccagctaaaggattacctcactgagtcatcagtaccctcctattcagctccccaagatgatgtgtttttgcttaccctaagagaggttttcttcttatttttagataattcaagtgcttagataaattatgttttctttaagtgtttatggtaaactcttttaaagaaaatttaatatgttatagctgaatctttttggtaactttaaatctttatcatagactctgtacatatgttcaaattagctgcttgcctgatgtgtgtatcatcggtgggatgacagaacaaacatatttatgatcatgaataatgtgctttgtaaaaagatttcaagttattaggaagcatactctgttttttaatcatgtataatattccatgatacttttatagaacaattctggcttcaggaaagtctagaagcaatatttcttcaaataaaaggtgtttaaacttt

SEQ ID NO: 409337 - DNA, 2781 bp, Homo sapiens
ggagttctcagacctccagtttcagccctgccctcagcctccaatccgtaagagacacccagccccagcaattggattgggcagcccgtcttgacacaccactgtgctgagtgcttgaggacgtgtttcaacagatggttggggttagtgtgtgtcatcacattcgagtggggattaagagaaggaaggctgccttgctggagctgtgtggtcttctccaagtgagagtcgcaggcaatagaactactttgcttttggaggaaaaggaggaattcattttcagcagacacaagaaaagcagtttttttttcagggattcttcacttctcttgaacaaggaactcactcagagactaacacaaaggaagtaatttcttacctggtcattatttagtctacaataagttcatccttcttcagtgtgaccagtaaattcttcccatactcttgaagagagcataattggaatggagaggtgctgacggccacccaccatcatctaaagaagataaacttggcaaatgacatgcaggttcttcaaggcagaataattgcagaaaatcttcaaaggaccctatctgcagatgttctgaatacctctgagaatagagattgattattcaaccaggatacctaattcaagaactccagaaatcaggagacggagacattttgtcagttttgcaacattggaccaaatacaatgaagtattcttgctgtgctctggttttggctgtcctgggcacagaattgctgggaagcctctgttcgactgtcagatccccgaggttcagaggacggatacagcaggaacgaaaaaacatccgacccaacattattcttgtgcttaccgatgatcaagatgtggagctggggtccctgcaagtcatgaacaaaacgagaaagattatggaacatgggggggccaccttcatcaatgcctttgtgactacacccatgtgctgcccgtcacggtcctccatgctcaccgggaagtatgtgcacaatcacaatgtctacaccaacaacgagaactgctcttccccctcgtggcaggccatgcatgagcctcggacttttgctgtatatcttaacaacactggctacagaacagccttttttggaaaatacctcaatgaatataatggcagctacatcccccctgggtggcgagaatggcttggattaatcaagaattctcgcttctataattacactgtttgtcgcaatggcatcaaagaaaagcatggatttgattatgcaaaggactacttcacagacttaatcactaacgagagcattaattacttcaaaatgtctaagagaatgtatccccataggcccgttatgatggtgatcagccacgctgcgccccacggccccgaggactcagccccacagttttctaaactgtaccccaatgcttcccaacacataactcctagttataactatgcaccaaatatggataaacactggattatgcagtacacaggaccaatgctgcccatccacatggaatttacaaacattctacagcgcaaaaggctccagactttgatgtcagtggatgattctgtggagaggctgtataacatgctcgtggagacgggggagctggagaatacttacatcatttacaccgccgaccatggttaccatattgggcagtttggactggtcaaggggaaatccatgccatatgactttgatattcgtgtgcctttttttattcgtggtccaagtgtagaaccaggatcaatagtcccacagatcgttctcaacattgacttggcccccacgatcctggatattgctgggctcgacacacctcctgatgtggacggcaagtctgtcctcaaacttctggacccagaaaagccaggtaacaggtttcgaacaaacaagaaggccaaaatttggcgtgatacattcctagtggaaagagggtaattattggttcctggggtgcttctgggaaccagtcctagtgggcagctttccctgctgagtattttttttctccttatttttgtttactaagcatgcagatttcgtaaacctagtcacaagattgaatggtttgctgcttattctgtagtggtcaatagagtaataattgctggatcagaattgtaaagaataaccctcaagttggttaattggtacaaaaacacagttagatagaagttatagaatttgatagtatagttgggacattatcgttaacaataatttatgtatatcttaaaatagctagaagtgaagaattgcaaagttcccaacacaaggaaaagataaatgagatgatgaatatcccaattatcttgatttgatcattacacattgtagactggtatccatatatcacacgtacccccaaaatatgtataattgtgatatatcaatttttaaaataccaaaaaagcaagagaatgacgactccacattccccaaaaagaataaattctcataagcttggaccaaagcctttatcatgggtgtagatttactgttgcatttctcagtgctggtttctaatcagaccagtggattgagtttctctaccatcctccccacgttcttctctaagctgcctccaagcctcacccggcacccttcttcctacttcctacttcttttccttgtgtgcctttcctagttttaaatagataaatgtatgccattgtaattatttccattgtcacttctgggtttccccttttggttcattaatacccattgccttgtttttctctgtacataaattaggagagaga

SEQ ID NO: 409338 - DNA, 2724 bp, Homo sapiens
  misc_feature (2652)..(2653): n is a, c, g, or t
  misc_feature (2655)..(2655): n is a, c, g, or t
  misc_feature (2657)..(2658): n is a, c, g, or t
  misc_feature (2660)..(2660): n is a, c, g, or t
  misc_feature (2665)..(2665): n is a, c, g, or t
  misc_feature (2677)..(2677): n is a, c, g, or t
  misc_feature (2687)..(2687): n is a, c, g, or t
ggagttctcagacctccagtttcagccctgccctcagcctccaatccgtaagagacacccagccccagcaattggattgggcagcccgtcttgacacaccactgtgctgagtgcttgaggacgtgtttcaacagatggttggggttagtgtgtgtcatcacattcgagtggggattaagagaaggaaggctgccttgctggagctgtgtggtcttctccaagtgagagtcgcaggcaatagaactactttgcttttggaggaaaaggaggaattcattttcagcagacacaagaaaagcagtttttttttcagggattcttcacttctcttgaacaaggaactcactcagagactaacacaaaggaagtaatttcttacctggtcattatttagtctacaataagttcatccttcttcagtgtgaccagtaaattcttcccatactcttgaagagagcataattggaatggagaggtgctgacggccacccaccatcatctaaagaagataaacttggcaaatgacatgcaggttcttcaaggcagaataattgcagaaaatcttcaaaggaccctatctgcagatgttctgaatacctctgagaatagagattgattattcaaccaggatacctaattcaagaactccagaaatcaggagacggagacattttgtcagttttgcaacattggaccaaatacaatgaagtattcttgctgtgctctggttttggctgtcctgggcacagaattgctgggaagcctctgttcgactgtcagatccccgaggttcagaggacggatacagcaggaacgaaaaaacatccgacccaacattattcttgtgcttaccgatgatcaagatgtggagctggggtccctgcaagtcatgaacaaaacgagaaagattatggaacatgggggggccaccttcatcaatgcctttgtgactacacccatgtgctgcccgtcacggtcctccatgctcaccgggaagtatgtgcacaatcacaatgtctacaccaacaacgagaactgctcttccccctcgtggcaggccatgcatgagcctcggacttttgctgtatatcttaacaacactggctacagaacagccttttttggaaaatacctcaatgaatataatggcagctacatcccccctgggtggcgagaatggcttggattaatcaagaattctcgcttctataattacactgtttgtcgcaatggcatcaaagaaaagcatggatttgattatgcaaaggactacttcacagacttaatcactaacgagagcattaattacttcaaaatgtctaagagaatgtatccccataggcccgttatgatggtgatcagccacgctgcgccccacggccccgaggactcagccccacagttttctaaactgtaccccaatgcttcccaacacataactcctagttataactatgcaccaaatatggataaacactggattatgcagtacacaggaccaatgctgcccatccacatggaatttacaaacattctacagcgcaaaaggctccagactttgatgtcagtggatgattctgtggagaggctgtataacatgctcgtggagacgggggagctggagaatacttacatcatttacaccgccgaccatggttaccatattgggcagtttggactggtcaaggggaaatccatgccatatgactttgatattcgtgtgcctttttttattcgtggtccaagtgtagaaccaggatcaatagtcccacagatcgttctcaacattgacttggcccccacgatcctggatattgctgggctcgacacacctcctgatgtggacggcaagtctgtcctcaaacttctggacccagaaaagccaggtaacaggtttcgaacaaacaagaaggccaaaatttggcgtgatacattcctagtggaaagaggcaaatttctacgtaagaaggaagaatccagcaagaatatccaacagtcaaatcacttgcccaaatatgaacgggtcaaagaactatgccagcaggccaggtaccagacagcctgtgaacaaccggggcagaagtggcaatgcattgaggatacatctggcaagcttcgaattcacaagtgtaaaggacccagtgacctgctcacagtccggcagagcacgcggaacctctacgctcgcggcttccatgacaaagacaaagagtgcagttgtagggagtctggttaccgtgccagcagaagccaaagaaagagtcaacggcaattcttgagaaaccaggggactccaaagtacaagcccagatttgtccatactcggcagacacgttccttgtccgtcgaatttgaaggtgaaatatatgacataaatctggaagaagaagaagaattgcaagtgttgcaaccaagaaacattgctaagcgtcatgatgaaggccacaaggggccaagagatctccaggcttccagtggtggcaacaggggcaggatgctggcagatagcagcaacgccgtgggcccacctaccactgtccgagtgacacacaagtgttttattcttcccaatgactctatccattgtgagagagaactgtaccaatcggccagagcgtggaaggaccataaggcatacattgacaaagaganngnanntntgcangataaaattaanaatttaaaanaagtgaggggattatgaagctttgccataaatgcaag

SEQ ID NO: 409339 - DNA, 348 bp, Homo sapiens
ggatctcagccatcaccgtgtgcccctttacagagtcccacagatcgttctcaacattgacttggcccccacgatcctggatattgctgggctcgacacacctcctgatgtggacggcaagtctgtcctcaaacttctggacccagaaaagccaggtaacaggtgtgtcattgttcctcctctcagccagccccaaatacactgagctccagctggtgcccagagccagccagcagctgaagacatggaggcagaatatgccttgcccacaaggatcaccccaagctgagcatttctcagctgcttgtgaatagcatattgatggagatgcactcatggtctgtggga

SEQ ID NO: 409340 - DNA, 5582 bp, Homo sapiens
ggccaggagcgagggcagcgaggatcagaggccaggccttcccggctgccggcgctcctcggaggtcagggcagatgaggaacatgactctcccccttcggaggaggaaggaagtcccgctgccaccttatctctgctcctctgcctcctccctgttcccagagctttttctctagagaagattttgaaggcggcttttggattcttcacttctcttgaacaaggaactcactcagagactaacacaaaggaagtaatttcttacctggtcattatttagtctacaataagttcatccttcttcagtgtgaccagtaaattcttcccatactcttgaagagagcataattggaatggagaggtgctgacggccacccaccatcatctaaagaagataaacttggcaaatgacatgcaggttcttcaaggcagaataattgcagaaaatcttcaaaggaccctatctgcagatgttctgaatacctctgagaatagagattgattattcaaccaggatacctaattcaagaactccagaaatcaggagacggagacattttgtcagttttgcaacattggaccaaatacaatgaagtattcttgctgtgctctggttttggctgtcctgggcacagaattgctgggaagcctctgttcgactgtcagatccccgaggttcagaggacggatacagcaggaacgaaaaaacatccgacccaacattattcttgtgcttaccgatgatcaagatgtggagctggggtccctgcaagtcatgaacaaaacgagaaagattatggaacatgggggggccaccttcatcaatgcctttgtgactacacccatgtgctgcccgtcacggtcctccatgctcaccgggaagtatgtgcacaatcacaatgtctacaccaacaacgagaactgctcttccccctcgtggcaggccatgcatgagcctcggacttttgctgtatatcttaacaacactggctacagaacagccttttttggaaaatacctcaatgaatataatggcagctacatcccccctgggtggcgagaatggcttggattaatcaagaattctcgcttctataattacactgtttgtcgcaatggcatcaaagaaaagcatggatttgattatgcaaaggactacttcacagacttaatcactaacgagagcattaattacttcaaaatgtctaagagaatgtatccccataggcccgttatgatggtgatcagccacgctgcgccccacggccccgaggactcagccccacagttttctaaactgtaccccaatgcttcccaacacataactcctagttataactatgcaccaaatatggataaacactggattatgcagtacacaggaccaatgctgcccatccacatggaatttacaaacattctacagcgcaaaaggctccagactttgatgtcagtggatgattctgtggagaggctgtataacatgctcgtggagacgggggagctggagaatacttacatcatttacaccgccgaccatggttaccatattgggcagtttggactggtcaaggggaaatccatgccatatgactttgatattcgtgtgcctttttttattcgtggtccaagtgtagaaccaggatcaatagtcccacagatcgttctcaacattgacttggcccccacgatcctggatattgctgggctcgacacacctcctgatgtggacggcaagtctgtcctcaaacttctggacccagaaaagccaggtaacaggtttcgaacaaacaagaaggccaaaatttggcgtgatacattcctagtggaaagaggcaaatttctacgtaagaaggaagaatccagcaagaatatccaacagtcaaatcacttgcccaaatatgaacgggtcaaagaactatgccagcaggccaggtaccagacagcctgtgaacaaccggggcagaagtggcaatgcattgaggatacatctggcaagcttcgaattcacaagtgtaaaggacccagtgacctgctcacagtccggcagagcacgcggaacctctacgctcgcggcttccatgacaaagacaaagagtgcagttgtagggagtctggttaccgtgccagcagaagccaaagaaagagtcaacggcaattcttgagaaaccaggggactccaaagtacaagcccagatttgtccatactcggcagacacgttccttgtccgtcgaatttgaaggtgaaatatatgacataaatctggaagaagaagaagaattgcaagtgttgcaaccaagaaacattgctaagcgtcatgatgaaggccacaaggggccaagagatctccaggcttccagtggtggcaacaggggcaggatgctggcagatagcagcaacgccgtgggcccacctaccactgtccgagtgacacacaagtgttttattcttcccaatgactctatccattgtgagagagaactgtaccaatcggccagagcgtggaaggaccataaggcatacattgacaaagagattgaagctctgcaagataaaattaagaatttaagagaagtgagaggacatctgaagagaaggaagcctgaggaatgtagctgcagtaaacaaagctattacaataaagagaaaggtgtaaaaaagcaagagaaattaaagagccatcttcacccattcaaggaggctgctcaggaagtagatagcaaactgcaacttttcaaggagaacaaccgtaggaggaagaaggagaggaaggagaagagacggcagaggaagggggaagagtgcagcctgcctggcctcacttgcttcacgcatgacaacaaccactggcagacagccccgttctggaacctgggatctttctgtgcttgcacgagttctaacaataacacctactggtgtttgcgtacagttaatgagacgcataattttcttttctgtgagtttgctactggctttttggagtattttgatatgaatacagatccttatcagctcacaaatacagtgcacacggtagaacgaggcattttgaatcagctacacgtacaactaatggagctcagaagctgtcaaggatataagcagtgcaacccaagacctaagaatcttgatgttggaaataaagatggaggaagctatgacctacacagaggacagttatgggatggatgggaaggttaatcagccccgtctcactgcagacatcaactggcaaggcctagaggagctacacagtgtgaatgaaaacatctatgagtacagacaaaactacagacttagtctggtggactggactaattacttgaaggatttagatagagtatttgcactgctgaagagtcactatgagcaaaataaaacaaataagactcaaactgctcaaagtgacgggttcttggttgtctctgctgagcacgctgtgtcaatggagatggcctctgctgactcagatgaagacccaaggcataaggttgggaaaacacctcatttgaccttgccagctgaccttcaaaccctgcatttgaaccgaccaacattaagtccagagagtaaacttgaatggaataacgacattccagaagttaatcatttgaattctgaacactggagaaaaaccgaaaaatggacggggcatgaagagactaatcatctggaaaccgatttcagtggcgatggcatgacagagctagagctcgggcccagccccaggctgcagcccattcgcaggcacccgaaagaacttccccagtatggtggtcctggaaaggacatttttgaagatcaactatatcttcctgtgcattccgatggaatttcagttcatcagatgttcaccatggccaccgcagaacaccgaagtaattccagcatagcggggaagatgttgaccaaggtggagaagaatcacgaaaaggagaagtcacagcacctagaaggcagcgcctcctcttcactctcctctgattagatgaaactgttaccttaccctaaacacagtatttctttttaacttttttatttgtaaactaataaaggtaatcacagccaccaacattccaagctaccctgggtacctttgtgcagtagaagctagtgagcatgtgagcaagcggtgtgcacacggagactcatcgttataatttactatctgccaagagtagaaagaaaggctggggatatttgggttggcttggttttgattttttgcttgtttgtttgttttgtactaaaacagtattatcttttgaatatcgtagggacataagtatatacatgttatccaatcaagatggctagaatggtgcctttctgagtgtctaaaacttgacacccctggtaaatctttcaacacacttccactgcctgcgtaatgaagttttgattcatttttaaccactggaatttttcaatgccgtcattttcagttagatgattttgcactttgagattaaaatgccatgtctatttgattagtcttatttttttatttttacaggcttatcagtctcactgttggctgtcattgtgacaaagtcaaataaacccccaaggacgacacacagtatggatcacatattgtttgacattaagcttttgccagaaaatgttgcatgtgttttacctcgacttgctaaaatcgattagcagaaaggcatggctaataatgttggtggtgaaaataaataaataagtaaacaaaatgaagattgcctgctctctctgtgcctagcctcaaagcgttcatcatacatcatacctttaagattgctatattttgggttattttcttgacaggagaaaaagatctaaagatcttttattttcatcttttttggttttcttggcatgactaagaagcttaaatgttgataaaatatgactagttttgaatttacaccaagaacttctcaataaaagaaaatcatgaatgctccacaatttcaacataccacaagagaagttaatttcttaacattgtgttctatgattatttgtaagaccttcaccaagttctgatatcttttaaagacatagttcaaaattgcttttgaaaatctgtattcttgaaaatatccttgttgtgtattaggtttttaaataccagctaaaggattacctcactgagtcatcagtaccctcctattcagctccccaagatgatgtgtttttgcttaccctaagagaggttttcttcttatttttagataattcaagtgcttagataaattatgttttctttaagtgtttatggtaaactcttttaaagaaaatttaatatgttatagctgaatctttttggtaactttaaatctttatcatagactctgtacatatgttcaaattagctgcttgcctgatgtgtgtatcatcggtgggatgacagaacaaacatatttatgatcatgaataatgtgctttgtaaaaagatttcaagttattaggaagcatactctgttttttaatcatgtataatattccatgatacttttatagaacaattctggcttcaggaaagtctagaagcaatatttcttcaaataaaaggtgtttaaacttt

SEQ ID NO: 409341 - DNA, 4198 bp, Homo sapiens
ggctgcatcttgcctggtgatgtggtcagaatacaggggtgcaggcatctctccagcctgaccctggcaagagtcagttaatcttgctcagtgccattgctgtgatcacacacccacccttgccacacaactacccatgcctaggagaccagatgagagggtgagaagagttgaaggccaatgagtcactgctgtagaaaaagcagccctaagtgccaccttcccctggcattggatctcagccatcaccgtgtgcccctttacagagtcccacagatcgttctcaacattgacttggcccccacgatcctggatattgctgggctcgacacacctcctgatgtggacggcaagtctgtcctcaaacttctggacccagaaaagccaggtaacaggtttcgaacaaacaagaaggccaaaatttggcgtgatacattcctagtggaaagaggcaaatttctacgtaagaaggaagaatccagcaagaatatccaacagtcaaatcacttgcccaaatatgaacgggtcaaagaactatgccagcaggccaggtaccagacagcctgtgaacaaccggggcagaagtggcaatgcattgaggatacatctggcaagcttcgaattcacaagtgtaaaggacccagtgacctgctcacagtccggcagagcacgcggaacctctacgctcgcggcttccatgacaaagacaaagagtgcagttgtagggagtctggttaccgtgccagcagaagccaaagaaagagtcaacggcaattcttgagaaaccaggggactccaaagtacaagcccagatttgtccatactcggcagacacgttccttgtccgtcgaatttgaaggtgaaatatatgacataaatctggaagaagaagaagaattgcaagtgttgcaaccaagaaacattgctaagcgtcatgatgaaggccacaaggggccaagagatctccaggcttccagtggtggcaacaggggcaggatgctggcagatagcagcaacgccgtgggcccacctaccactgtccgagtgacacacaagtgttttattcttcccaatgactctatccattgtgagagagaactgtaccaatcggccagagcgtggaaggaccataaggcatacattgacaaagagattgaagctctgcaagataaaattaagaatttaagagaagtgagaggacatctgaagagaaggaagcctgaggaatgtagctgcagtaaacaaagctattacaataaagagaaaggtgtaaaaaagcaagagaaattaaagagccatcttcacccattcaaggaggctgctcaggaagtagatagcaaactgcaacttttcaaggagaacaaccgtaggaggaagaaggagaggaaggagaagagacggcagaggaagggggaagagtgcagcctgcctggcctcacttgcttcacgcatgacaacaaccactggcagacagccccgttctggaacctgggatctttctgtgcttgcacgagttctaacaataacacctactggtgtttgcgtacagttaatgagacgcataattttcttttctgtgagtttgctactggctttttggagtattttgatatgaatacagatccttatcagctcacaaatacagtgcacacggtagaacgaggcattttgaatcagctacacgtacaactaatggagctcagaagctgtcaaggatataagcagtgcaacccaagacctaagaatcttgatgttggaaataaagatggaggaagctatgacctacacagaggacagttatgggatggatgggaaggttaatcagccccgtctcactgcagacatcaactggcaaggcctagaggagctacacagtgtgaatgaaaacatctatgagtacagacaaaactacagacttagtctggtggactggactaattacttgaaggatttagatagagtatttgcactgctgaagagtcactatgagcaaaataaaacaaataagactcaaactgctcaaagtgacgggttcttggttgtctctgctgagcacgctgtgtcaatggagatggcctctgctgactcagatgaagacccaaggcataaggttgggaaaacacctcatttgaccttgccagctgaccttcaaaccctgcatttgaaccgaccaacattaagtccagagagtaaacttgaatggaataacgacattccagaagttaatcatttgaattctgaacactggagaaaaaccgaaaaatggacggggcatgaagagactaatcatctggaaaccgatttcagtggcgatggcatgacagagctagagctcgggcccagccccaggctgcagcccattcgcaggcacccgaaagaacttccccagtatggtggtcctggaaaggacatttttgaagatcaactatatcttcctgtgcattccgatggaatttcagttcatcagatgttcaccatggccaccgcagaacaccgaagtaattccagcatagcggggaagatgttgaccaaggtggagaagaatcacgaaaaggagaagtcacagcacctagaaggcagcgcctcctcttcactctcctctgattagatgaaactgttaccttaccctaaacacagtatttctttttaacttttttatttgtaaactaataaaggtaatcacagccaccaacattccaagctaccctgggtacctttgtgcagtagaagctagtgagcatgtgagcaagcggtgtgcacacggagactcatcgttataatttactatctgccaagagtagaaagaaaggctggggatatttgggttggcttggttttgattttttgcttgtttgtttgttttgtactaaaacagtattatcttttgaatatcgtagggacataagtatatacatgttatccaatcaagatggctagaatggtgcctttctgagtgtctaaaacttgacacccctggtaaatctttcaacacacttccactgcctgcgtaatgaagttttgattcatttttaaccactggaatttttcaatgccgtcattttcagttagatgattttgcactttgagattaaaatgccatgtctatttgattagtcttatttttttatttttacaggcttatcagtctcactgttggctgtcattgtgacaaagtcaaataaacccccaaggacgacacacagtatggatcacatattgtttgacattaagcttttgccagaaaatgttgcatgtgttttacctcgacttgctaaaatcgattagcagaaaggcatggctaataatgttggtggtgaaaataaataaataagtaaacaaaatgaagattgcctgctctctctgtgcctagcctcaaagcgttcatcatacatcatacctttaagattgctatattttgggttattttcttgacaggagaaaaagatctaaagatcttttattttcatcttttttggttttcttggcatgactaagaagcttaaatgttgataaaatatgactagttttgaatttacaccaagaacttctcaataaaagaaaatcatgaatgctccacaatttcaacataccacaagagaagttaatttcttaacattgtgttctatgattatttgtaagaccttcaccaagttctgatatcttttaaagacatagttcaaaattgcttttgaaaatctgtattcttgaaaatatccttgttgtgtattaggtttttaaataccagctaaaggattacctcactgagtcatcagtaccctcctattcagctccccaagatgatgtgtttttgcttaccctaagagaggttttcttcttatttttagataattcaagtgcttagataaattatgttttctttaagtgtttatggtaaactcttttaaagaaaatttaatatgttatagctgaatctttttggtaactttaaatctttatcatagactctgtacatatgttcaaattagctgcttgcctgatgtgtgtatcatcggtgggatgacagaacaaacatatttatgatcatgaataatgtgctttgtaaaaagatttcaagttattaggaagcatactctgttttttaatcatgtataatattccatgatacttttatagaacaattctggcttcaggaaagtctagaagcaatatttcttcaaataaaaggtgtttaaacttt

SEQ ID NO: 409342 - DNA, 4836 bp, Homo sapiens
ggagttctcagacctccagtttcagccctgccctcagcctccaatccgtaagagacacccagccccagcaattggattgggcagcccgtcttgacacaccactgtgctgagtgcttgaggacgtgtttcaacagatggttggggttagtgtgtgtcatcacattcgagtggggattaagagaaggaaggctgccttgctggagctgtgtggtcttctccaagtgagagtcgcaggcaatagaactactttgcttttggaggaaaaggaggaattcattttcagcagacacaagaaaagcagtttttttttcagggattcttcacttctcttgaacaaggaactcactcagagactaacacaaaggaagtaatttcttacctggtcattatttagtctacaataagttcatccttcttcagtgtgaccagtaaattcttcccatactcttgaagagagcataattggaatggagaggtgctgacggccacccaccatcatctaaagaagataaacttggcaaatgacatgcaggttcttcaaggcagaataattgcagaaaatcttcaaaggaccctatctgcagatgttctgaatacctctgagaatagagattgattattcaaccaggatacctaattcaagaactccagaaatcaggagacggagacattttgtcagttttgcaacattggaccaaatacaatgaagtattcttgctgtgctctggttttggctgtcctgggcacagaattgctgggaagcctctgttcgactgtcagatccccgaggttcagaggacggatacagcaggaacgaaaaaacatccgacccaacattattcttgtgcttaccgatgatcaagatgtggagctggggtccctgcaagtcatgaacaaaacgagaaagattatggaacatgggggggccaccttcatcaatgcctttgtgactacacccatgtgctgcccgtcacggtcctccatgctcaccgggaagtatgtgcacaatcacaatgtctacaccaacaacgagaactgctcttccccctcgtggcaggccatgcatgagcctcggacttttgctgtatatcttaacaacactggctacagaacagccttttttggaaaatacctcaatgaatataatggcagctacatcccccctgggtggcgagaatggcttggattaatcaagaattctcgcttctataattacactgtttgtcgcaatggcatcaaagaaaagcatggatttgattatgcaaaggactacttcacagacttaatcactaacgagagcattaattacttcaaaatgtctaagagaatgtatccccataggcccgttatgatggtgatcagccacgctgcgccccacggccccgaggactcagccccacagttttctaaactgtaccccaatgcttcccaacacataactcctagttataactatgcaccaaatatggataaacactggattatgcagtacacaggaccaatgctgcccatccacatggaatttacaaacattctacagcgcaaaaggctccagactttgatgtcagtggatgattctgtggagaggctgtataacatgctcgtggagacgggggagctggagaatacttacatcatttacaccgccgaccatggttaccatattgggcagtttggactggtcaaggggaaatccatgccatatgactttgatattcgtgtgcctttttttattcgtggtccaagtgtagaaccaggatcaatagtcccacagatcgttctcaacattgacttggcccccacgatcctggatattgctgggctcgacacacctcctgatgtggacggcaagtctgtcctcaaacttctggacccagaaaagccaggtaacaggtttcgaacaaacaagaaggccaaaatttggcgtgatacattcctagtggaaagaggcaaatttctacgtaagaaggaagaatccagcaagaatatccaacagtcaaatcacttgcccaaatatgaacgggtcaaagaactatgccagcaggccaggtaccagacagcctgtgaacaaccggggcagaagtggcaatgcattgaggatacatctggcaagcttcgaattcacaagtgtaaaggacccagtgacctgctcacagtccggcagagcacgcggaacctctacgctcgcggcttccatgacaaagacaaagagtgcagttgtagggagtctggttaccgtgccagcagaagccaaagaaagagtcaacggcaattcttgagaaaccaggggactccaaagtacaagcccagatttgtccatactcggcagacacgttccttgtccgtcgaatttgaaggtgaaatatatgacataaatctggaagaagaagaagaattgcaagtgttgcaaccaagaaacattgctaagcgtcatgatgaaggccacaaggggccaagagatctccaggcttccagtggtggcaacaggggcaggatgctggcagatagcagcaacgccgtgggcccacctaccactgtccgagtgacacacaagtgttttattcttcccaatgactctatccattgtgagagagaactgtaccaatcggccagagcgtggaaggaccataaggcatacattgacaaagagattgaagctctgcaagataaaattaagaatttaagagaagtgagaggacatctgaagagaaggaagcctgaggaatgtagctgcagtaaacaaagctattacaataaagagaaaggtgtaaaaaagcaagagaaattaaagagccatcttcacccattcaaggaggctgctcaggaagtagatagcaaactgcaacttttcaaggagaacaaccgtaggaggaagaaggagaggaaggagaagagacggcagaggaagggggaagagtgcagcctgcctggcctcacttgcttcacgcatgacaacaaccactggcagacagccccgttctggaacctgggatctttctgtgcttgcacgagttctaacaataacacctactggtgtttgcgtacagttaatgagacgcataattttcttttctgtgagtttgctactggctttttggagtattttgatatgaatacagatccttatcagctcacaaatacagtgcacacggtagaacgaggcattttgaatcagctacacgtacaactaatggagctcagaagctgtcaaggatataagcagtgcaacccaagacctaagaatcttgatgttggaaataaagatggaggaagctatgacctacacagaggacagttatgggatggatgggaaggttaatcagccccgtctcactgcagacatcaactggcaaggcctagaggagctacacagtgtgaatgaaaacatctatgagtacagacaaaactacagacttagtctggtggactggactaattacttgaaggatttagatagagtatttgcactgctgaagagtcactatgagcaaaataaaacaaataagactcaaactgctcaaagtgacgggttcttggttgtctctgctgagcacgctgtgtcaatggagatggcctctgctgactcagatgaagacccaaggcataaggttgggaaaacacctcatttgaccttgccagctgaccttcaaaccctgcatttgaaccgaccaacattaagtccagagagtaaacttgaatggaataacgacattccagaagttaatcatttgaattctgaacactggagaaaaaccgaaaaatggacggggcatgaagagactaatcatctggaaaccgatttcagtggcgatggcatgacagagctagagctcgggcccagccccaggctgcagcccattcgcaggcacccgaaagaacttccccagtatggtggtcctggaaaggacatttttgaagatcaactatatcttcctgtgcattccgatggaatttcagttcatcagatgttcaccatggccaccgcagaacaccgaagtaattccagcatagcggggaagatgttgaccaaggtggagaagaatcacgaaaaggagaagtcacagcacctagaaggcagcgcctcctcttcactctcctctgattagatgaaactgttaccttaccctaaacacagtatttctttttaacttttttatttgtaaactaataaaggtaatcacagccaccaacattccaagctaccctgggtacctttgtgcagtagaagctagtgagcatgtgagcaagcggtgtgcacacggagactcatcgttataatttactatctgccaagagtagaaagaaaggctggggatatttgggttggcttggttttgattttttgcttgtttgtttgttttgtactaaaacagtattatcttttgaatatcgtagggacataagtatatacatgttatccaatcaagatggctagaatggtgcctttctgagtgtctaaaacttgacacccctggtaaatctttcaacacacttccactgcctgcgtaatgaagttttgattcatttttaaccactggaatttttcaatgccgtcattttcagttagatgattttgcactttgagattaaaatgccatgtctatttgattagtcttatttttttatttttacaggcttatcagtctcactgttggctgtcattgtgacaaagtcaaataaacccccaaggacgacacacagtatggatcacatattgtttgacattaagcttttgccagaaaatgttgcatgtgttttacctcgacttgctaaaatcgattagcagaaaggcatggctaataatgttggtggtgaaaataaataaataagtaaaca

SEQ ID NO: 409343 - DNA, 4191 bp, Homo sapiens
ggagttctcagacctccagtttcagccctgccctcagcctccaatccgtaagagacacccagccccagcaattggattgggcagcccgtcttgacacaccactgtgctgagtgcttgaggacgtgtttcaacagatggttggggttagtgtgtgtcatcacattcgagtggggattaagagaaggaaggctgccttgctggagctgtgtggtcttctccaagtgagagtcgcaggcaatagaactactttgcttttggaggaaaaggaggaattcattttcagcagacacaagaaaagcagtttttttttcagggattcttcacttctcttgaacaaggaactcactcagagactaacacaaaggaagtaatttcttacctggtcattatttagtctacaataagttcatccttcttcagtgtgaccagtaaattcttcccatactcttgaagagagcataattggaatggagaggtgctgacggccacccaccatcatctaaagaagataaacttggcaaatgacatgcaggttcttcaaggcagaataattgcagaaaatcttcaaaggaccctatctgcagatgttctgaatacctctgagaatagagattgattattcaaccaggatacctaattcaagaactccagaaatcaggagacggagacattttgtcagttttgcaacattggaccaaatacaatgaagtattcttgctgtgctctggttttggctgtcctgggcacagaattgctgggaagcctctgttcgactgtcagatccccgaggttcagaggacggatacagcaggaacgaaaaaacatccgacccaacattattcttgtgcttaccgatgatcaagatgtggagctggggtccctgcaagtcatgaacaaaacgagaaagattatggaacatgggggggccaccttcatcaatgcctttgtgactacacccatgtgctgcccgtcacggtcctccatgctcaccgggaagtatgtgcacaatcacaatgtctacaccaacaacgagaactgctcttccccctcgtggcaggccatgcatgagcctcggacttttgctgtatatcttaacaacactggctacagaacagccttttttggaaaatacctcaatgaatataatggcagctacatcccccctgggtggcgagaatggcttggattaatcaagaattctcgcttctataattacactgtttgtcgcaatggcatcaaagaaaagcatggatttgattatgcaaaggactacttcacagacttaatcactaacgagagcattaattacttcaaaatgtctaagagaatgtatccccataggcccgttatgatggtgatcagccacgctgcgccccacggccccgaggactcagccccacagttttctaaactgtaccccaatgcttcccaacacataactcctagttataactatgcaccaaatatggataaacactggattatgcagtacacaggaccaatgctgcccatccacatggaatttacaaacattctacagcgcaaaaggctccagactttgatgtcagtggatgattctgtggagaggctgtataacatgctcgtggagacgggggagctggagaatacttacatcatttacaccgccgaccatggttaccatattgggcagtttggactggtcaaggggaaatccatgccatatgactttgatattcgtgtgcctttttttattcgtggtccaagtgtagaaccaggatcaatagtcccacagatcgttctcaacattgacttggcccccacgatcctggatattgctgggctcgacacacctcctgatgtggacggcaagtctgtcctcaaacttctggacccagaaaagccaggtaacaggtttcgaacaaacaagaaggccaaaatttggcgtgatacattcctagtggaaagaggcaaatttctacgtaagaaggaagaatccagcaagaatatccaacagtcaaatcacttgcccaaatatgaacgggtcaaagaactatgccagcaggccaggtaccagacagcctgtgaacaaccggggcagaagtggcaatgcattgaggatacatctggcaagcttcgaattcacaagtgtaaaggacccagtgacctgctcacagtccggcagagcacgcggaacctctacgctcgcggcttccatgacaaagacaaagagtgcagttgtagggagtctggttaccgtgccagcagaagccaaagaaagagtcaacggcaattcttgagaaaccaggggactccaaagtacaagcccagatttgtccatactcggcagacacgttccttgtccgtcgaatttgaaggtgaaatatatgacataaatctggaagaagaagaagaattgcaagtgttgcaaccaagaaacattgctaagcgtcatgatgaaggccacaaggggccaagagatctccaggcttccagtggtggcaacaggggcaggatgctggcagatagcagcaacgccgtgggcccacctaccactgtccgagtgacacacaagtgttttattcttcccaatgactctatccattgtgagagagaactgtaccaatcggccagagcgtggaaggaccataaggcatacattgacaaagagattgaagctctgcaagataaaattaagaatttaagagaagtgagaggacatctgaagagaaggaagcctgaggaatgtagctgcagtaaacaaagctattacaataaagagaaaggtgtaaaaaagcaagagaaattaaagagccatcttcacccattcaaggaggctgctcaggaagtagatagcaaactgcaacttttcaaggagaacaaccgtaggaggaagaaggagaggaaggagaagagacggcagaggaagggggaagagtgcagcctgcctggcctcacttgcttcacgcatgacaacaaccactggcagacagccccgttctggaacctgggatctttctgtgcttgcacgagttctaacaataacacctactggtgtttgcgtacagttaatgagacgcataattttcttttctgtgagtttgctactggctttttggagtattttgatatgaatacagatccttatcagctcacaaatacagtgcacacggtagaacgaggcattttgaatcagctacacgtacaactaatggagctcagaagctgtcaaggatataagcagtgcaacccaagacctaagaatcttgatgttggaaataaagatggaggaagctatgacctacacagaggacagttatgggatggatgggaaggttaatcagccccgtctcactgcagacatcaactggcaaggcctagaggagctacacagtgtgaatgaaaacatctatgagtacagacaaaactacagacttagtctggtggactggactaattacttgaaggatttagatagagtatttgcactgctgaagagtcactatgagcaaaataaaacaaataagactcaaactgctcaaagtgacgggttcttggttgtctctgctgagcacgctgtgtcaatggagatggcctctgctgactcagatgaagacccaaggcataaggttgggaaaacacctcatttgaccttgccagctgaccttcaaaccctgcatttgaaccgaccaacattaagtccagagagtaaacttgaatggaataacgacattccagaagttaatcatttgaattctgaacactggagaaaaaccgaaaaatggacggggcatgaagagactaatcatctggaaaccgatttcagtggcgatggcatgacagagctagagctcgggcccagccccaggctgcagcccattcgcaggcacccgaaagaacttccccagtatggtggtcctggaaaggacatttttgaagatcaactatatcttcctgtgcattccgatggaatttcagttcatcagatgttcaccatggccaccgcagaacaccgaagtaattccagcatagcggggaagatgttgaccaaggtggagaagaatcacgaaaaggagaagtcacagcacctagaaggcagcgcctcctcttcactctcctctgattagatgaaactgttaccttaccctaaacacagtatttctttttaacttttttatttgtaaactaataaaggtaatcacagccaccaac

SEQ ID NO: 409344 - DNA, 2739 bp, Homo sapiens
  misc_feature (2652)..(2653): n is a, c, g, or t
  misc_feature (2655)..(2655): n is a, c, g, or t
  misc_feature (2657)..(2658): n is a, c, g, or t
  misc_feature (2660)..(2660): n is a, c, g, or t
  misc_feature (2665)..(2665): n is a, c, g, or t
  misc_feature (2677)..(2677): n is a, c, g, or t
  misc_feature (2687)..(2687): n is a, c, g, or t
  misc_feature (2710)..(2710): n is a, c, g, or t
  misc_feature (2725)..(2725): n is a, c, g, or t
ggagttctcagacctccagtttcagccctgccctcagcctccaatccgtaagagacacccagccccagcaattggattgggcagcccgtcttgacacaccactgtgctgagtgcttgaggacgtgtttcaacagatggttggggttagtgtgtgtcatcacattcgagtggggattaagagaaggaaggctgccttgctggagctgtgtggtcttctccaagtgagagtcgcaggcaatagaactactttgcttttggaggaaaaggaggaattcattttcagcagacacaagaaaagcagtttttttttcagggattcttcacttctcttgaacaaggaactcactcagagactaacacaaaggaagtaatttcttacctggtcattatttagtctacaataagttcatccttcttcagtgtgaccagtaaattcttcccatactcttgaagagagcataattggaatggagaggtgctgacggccacccaccatcatctaaagaagataaacttggcaaatgacatgcaggttcttcaaggcagaataattgcagaaaatcttcaaaggaccctatctgcagatgttctgaatacctctgagaatagagattgattattcaaccaggatacctaattcaagaactccagaaatcaggagacggagacattttgtcagttttgcaacattggaccaaatacaatgaagtattcttgctgtgctctggttttggctgtcctgggcacagaattgctgggaagcctctgttcgactgtcagatccccgaggttcagaggacggatacagcaggaacgaaaaaacatccgacccaacattattcttgtgcttaccgatgatcaagatgtggagctggggtccctgcaagtcatgaacaaaacgagaaagattatggaacatgggggggccaccttcatcaatgcctttgtgactacacccatgtgctgcccgtcacggtcctccatgctcaccgggaagtatgtgcacaatcacaatgtctacaccaacaacgagaactgctcttccccctcgtggcaggccatgcatgagcctcggacttttgctgtatatcttaacaacactggctacagaacagccttttttggaaaatacctcaatgaatataatggcagctacatcccccctgggtggcgagaatggcttggattaatcaagaattctcgcttctataattacactgtttgtcgcaatggcatcaaagaaaagcatggatttgattatgcaaaggactacttcacagacttaatcactaacgagagcattaattacttcaaaatgtctaagagaatgtatccccataggcccgttatgatggtgatcagccacgctgcgccccacggccccgaggactcagccccacagttttctaaactgtaccccaatgcttcccaacacataactcctagttataactatgcaccaaatatggataaacactggattatgcagtacacaggaccaatgctgcccatccacatggaatttacaaacattctacagcgcaaaaggctccagactttgatgtcagtggatgattctgtggagaggctgtataacatgctcgtggagacgggggagctggagaatacttacatcatttacaccgccgaccatggttaccatattgggcagtttggactggtcaaggggaaatccatgccatatgactttgatattcgtgtgcctttttttattcgtggtccaagtgtagaaccaggatcaatagtcccacagatcgttctcaacattgacttggcccccacgatcctggatattgctgggctcgacacacctcctgatgtggacggcaagtctgtcctcaaacttctggacccagaaaagccaggtaacaggtttcgaacaaacaagaaggccaaaatttggcgtgatacattcctagtggaaagaggcaaatttctacgtaagaaggaagaatccagcaagaatatccaacagtcaaatcacttgcccaaatatgaacgggtcaaagaactatgccagcaggccaggtaccagacagcctgtgaacaaccggggcagaagtggcaatgcattgaggatacatctggcaagcttcgaattcacaagtgtaaaggacccagtgacctgctcacagtccggcagagcacgcggaacctctacgctcgcggcttccatgacaaagacaaagagtgcagttgtagggagtctggttaccgtgccagcagaagccaaagaaagagtcaacggcaattcttgagaaaccaggggactccaaagtacaagcccagatttgtccatactcggcagacacgttccttgtccgtcgaatttgaaggtgaaatatatgacataaatctggaagaagaagaagaattgcaagtgttgcaaccaagaaacattgctaagcgtcatgatgaaggccacaaggggccaagagatctccaggcttccagtggtggcaacaggggcaggatgctggcagatagcagcaacgccgtgggcccacctaccactgtccgagtgacacacaagtgttttattcttcccaatgactctatccattgtgagagagaactgtaccaatcggccagagcgtggaaggaccataaggcatacattgacaaagaganngnanntntgcangataaaattaanaatttaaaanaagtgagcttggacctttggacngggatccttttaatngacttgaggcttcc

SEQ ID NO: 409345 - DNA, 408 bp, Homo sapiens
aaaaaagaaaaaagaaaaaaactaaggcagcagctcttaataaataacacctggagcagaatcggtaaactgctttcacgttggcttttgcagaagtggcaatgcattgaggatacatctggcaagcttcgaattcacaagtgtaaaggacccagtgacctgctcacagtccggcagagcacgcggaacctctacgctcgcggcttccatgacaaagacaaagagtgcagttgtagggagtctggttaccgtgccagcagaagccaaagaaagagtcaacggcaattcttgagaaaccaggggactccaagtaagccacgcttttgtgaccatctcaatggtggcctaggcctgtgggaataaacaatagagagacgaaagggttgctccttctacattttagatatt

SEQ ID NO: 409346 - DNA, 467 bp, Homo sapiens
attcccaaagtacaggcctgaaccactgtgcctgccgagatcttacagatactatctctaaggactatctcctcaccaccaacttgccatgtgttgacccaaagtaggggaagggttagagagagggtcaaaaagtccgtcaactaccgccttccatgtgaaccaagaggacattgatgtgagtagaaaaaagaatgaagaaagcctgtttaatctatgggcaccatcaaaagaattaaatttgtattacagaatttctacaaggagaagagaaacaaaatgacagaaagcttatttaaaatatagaggctgaaaacttcccaaatctagggaacaatgtaaacatccaggtatataaagctcaaaagtcttcaattcattcaccctaaagaagacctcaccaaaacatagtatgattgacctgtcaaaaatcaaagacactcagaaataaagccacaaacctacaa

SEQ ID NO: 409347 - DNA, 439 bp, Homo sapiens
atgcctcatcacaggatgcctggataaggaaagtgcaacccaaattaagttcagcagggtgaagtaaagttcatgaatccagaagatggactgacaaaacctttccaaccagttggttcccattcccctccaccatccgaccctaaggctacagatcaactatatacaacatcatagaaagtgggtctacaacaaaggatgacagtccgagagtcttgcagaagagactatgccagacactcttgactactgatacctcaagaaactgactcatggacacaaactttggagtataagcgacatcccttaagcaacaggctagactacaccaaaggattcagtcgagatttctgggaccctttgtgaagcagacaacccaagatctagtggaacacaatgtaatgactgaatgaattaatgaaagaaatctaactctaaa

SEQ ID NO: 409348 - DNA, 497 bp, Homo sapiens
cttgcagccaatgaggactgtttcagataagcatattttcattttcactgggagtctgttctttcttagtatctcatacacagtagtatctgggtcttcaaaacaggctgtgtcgttcttattccagcttgagcctggatccaggtgtttggagaatttgggttttcagcagctttttactgaagcatttggccttctaagtgcattgctatatgtcaccagtggtagcttgagtttttttgtcttgtgatttctttcccaaagctataaaagtggcctgtaatcaatagtaaagtcttgtcaatagcatgtttctgaattcattttaggaatagtttgtatcaaggaatcattttcccacttctttggttcaatgttctcttgtttcaagtcaaggaaacagaatgataccagtaagaaagcaaacactccctagcggttcagtctcatattgaaatgactctgctgttgaaaatgccagtgtggctctataggaa

SEQ ID NO: 409349 - DNA, 431 bp, Homo sapiens
gtcttggctcactgcaacctctgcctcctgggttcaagcgattcccctgccttagcctcccaagtagctaagactacaggcatgcgccaccatgcctggctaatatatatatatattttttgtagttttagtagagacggggtttcaccacgttggccaggctggtctcgaactccagacctcaaatgatctgcccgccttggcttcccaaagtgctgggattacaggcattagccactgtgcctggccaacaatatatattaaataagcacacatacaacaaaagtaggtgttggtaagcttacaaaaatgtgaccagtagcttgctgaaacctaactttttatttgttcatggaactttctagaccgtaactacactgaataatgagaatctgctgtaatctttttaggtgctgtagatgagccattgg

SEQ ID NO: 409350 - DNA, 357 bp, Homo sapiens
aagttgcgaaaggtttatgtgaaaaaataataataaaataaaataaataaaagtgaactgtagctagaaagtccaataacaaatcttttgggaagatctttgtgctatactacatctctcttgtatcttttaatctcttttctgctgaggcaggcagatcacgaggtcaggagatcgagaccatcctggctaacacagtgaaaccccatctctactaaaaatacaaaaaattagccgggcgtggtggcagccgcctatagtcccagctactcaggaagctgaggcaggagaatggcgtgaacccgggaggcagagcttgcagtgagctgagattgtgccactgcactccagcctggg

SEQ ID NO: 409351 - DNA, 388 bp, Homo sapiens
cacagggggcagggacaccctgggggagagacccacgggggacaccccgtggaacccaggtagtgcctcattgagtcttcacctcaccccgtgagatgaggccacacatgagcttcccaatccacccaagagaaaacagtcccaggcaggtgggagacaggctgagacacccagagagcagacagcaagctggggttccaatcctaggattagtgtccatttccagaacccctgctgttcctaccacagtggccccaagttctccaggcacaagtctcctatggtcacctgttacagtgccacagggtggtcagtgctctgataaaaccatggcctgcaccaggaaggacaatgctgacccgagccacatctctgatggccatttgtc

SEQ ID NO: 409352 - DNA, 1201 bp, Homo sapiens
agacttggggacagagagcgtcagtggcaccctcagttcactccagcaatgtaatccccgtgacggctttgacatgtttgcccagacgagaggaaactccttggctgagcagcgcaagacggtaacctatgaggatcctcaggctgtcggaggacttgcttctgcactagacaatcgaaaacagagttcagaagggaagggtgatgatctggaggagggtgtcacaagtgaagagtttgataaattccttgaagaaagagccaaagctgctgaaatggttcccgacctcccctcgccccccatggaggctcctgccccagcctcaaacccttctggccggaagaagccagagcggtcagaggatgccctcttcgccctgtgagcagctctgtggtttgcctccccagatggcgggtccccgctcgcaccccgtggacaccgggcactggccactcctacatccccagctccacacggcctgcacacctgtgtttccatggaaatgccaccgtgtctgctcccaggcctcccactagtcaggaccagcttcagccacttcttttctctgagtggtgggacaactgcagccagagactctctcccctcccaccatgggcccctctgcccatgtttcctcccaggaagagcgggcagagtggcccagccccaggcagtgcttcctgagcagaccacccggactgtctttcctccacccgcccatggagaaagagcacgcccggccccgccctgtgctcacctctgcctggctcagtgaccttctcaggcattctgccctcctgggcccctctctccctgaaggggctttgtggcatctctggaagagcagggtgtgctgcactcatgggcctggtctcactccttggacttgtcaccttgtgacatttggcttatcagcatttgagaaggctctgctgggtctccatggtgggggtctctcaccttcttgaccctctctccatcattcagctgccagcccaggcttcacacccaagctggctcagcagccgagcctggcaccgagggtccctgcaggctccctgggcagggagagggccaaggacaattgggagggcagcaggcagcccgcagatggtggccatgtggcacgctgctgagacgacactaccaataaaccaaactgccacgcacacactgcaggctcacacccgcaaaactggtc

SEQ ID NO: 409353 - DNA, 455 bp, Homo sapiens
aaggaccataggatagaagtgattacaggccactaccccatccctccatgaccactggaggaaaatgaactctgcttgtgctgcttcttcatctccagggtaacctatgaggatcctcaggctgtcggaggacttgcttctgcactagacaatcgaaaacagagttcagaaggggtaggtctttaaccctgtttttctgcctggagtcttctggagggaaagtcaggtggtttggcaaagctggctgggtaattcagcagaaactggcttgcacagggggcagggacaccctgggggagagacccacgggggacaccccgtggaacccaggtagtgcctcattgagtcttcacctcaccccgtgagatgaggccacacatgagcttcccaatccacccaagagaaaacagtcccaggcaggtgggagacaggctgagacacccagagagcagaca

SEQ ID NO: 409354 - DNA, 1261 bp, Homo sapiens
agacttggggacagagagcgtcagtggcaccctcagttcactccagcaatgtaatccccgtgacggctttgacatgtttgcccagacgagaggaaactccttggctgagcagcgcaagacggtaacctatgaggatcctcaggctgtcggaggacttgcttctgcactagacaatcgaaaacagagttcagaagggatccccgttgcgcagccatctgtcatggacgacattgaggtgtggctcaggaccgacctgaagggtgatgatctggaggagggtgtcacaagtgaagagtttgataaattccttgaagaaagagccaaagctgctgaaatggttcccgacctcccctcgccccccatggaggctcctgccccagcctcaaacccttctggccggaagaagccagagcggtcagaggatgccctcttcgccctgtgagcagctctgtggtttgcctccccagatggcgggtccccgctcgcaccccgtggacaccgggcactggccactcctacatccccagctccacacggcctgcacacctgtgtttccatggaaatgccaccgtgtctgctcccaggcctcccactagtcaggaccagcttcagccacttcttttctctgagtggtgggacaactgcagccagagactctctcccctcccaccatgggcccctctgcccatgtttcctcccaggaagagcgggcagagtggcccagccccaggcagtgcttcctgagcagaccacccggactgtctttcctccacccgcccatggagaaagagcacgcccggccccgccctgtgctcacctctgcctggctcagtgaccttctcaggcattctgccctcctgggcccctctctccctgaaggggctttgtggcatctctggaagagcagggtgtgctgcactcatgggcctggtctcactccttggacttgtcaccttgtgacatttggcttatcagcatttgagaaggctctgctgggtctccatggtgggggtctctcaccttcttgaccctctctccatcattcagctgccagcccaggcttcacacccaagctggctcagcagccgagcctggcaccgagggtccctgcaggctccctgggcagggagagggccaaggacaattgggagggcagcaggcagcccgcagatggtggccatgtggcacgctgctgagacgacactaccaataaaccaaactgccacgcacacactgcaggctcacacccgcaaaactggtc

SEQ ID NO: 409355 - DNA, 871 bp, Homo sapiens
agacttggggacagagagcgtcagtggcaccctcagttcactccagcaatgtaatccccgtgacggctttgacatgtttgcccagacgagaggaaactccttggctgagcagcgcaagacggtaacctatgaggatcctcaggctgtcggaggacttgcttctgcactagacaatcgaaaacagagttcagaagggatccccgttgcgcagccatctgtcatggacgacattgaggtgtggctcaggaccgacctgaagggtgatgatctggaggagggtgtcacaagtgaagagtttgataaattccttgaagaaagagccaaagctgctgaaatggttcccgacctcccctcgccccccatggaggctcctgccccagcctcaaacccttctggccggaagaagccagagcggtcagaggatgccctcttcgccctgtgagcagctctgtggtttgcctccccagatggcgggtccccgctcgcaccccgtggacaccgggcactggccactcctacatccccagctccacacggcctgcacacctgtgtttccatggaaatgccaccgtgtctgctcccaggcctcccactagtcaggaccagcttcagccacttcttttctctgagtggtgggacaactgcagccagagactctctcccctcccaccatgggcccctctgcccatgtttcctcccaggaagagcgggcagagtggcccagctccctgggcagggagagggccaaggacaattgggagggcagcaggcagcccgcagatggtggccatgtggcacgctgctgagacgacactaccaataaaccaaactgccacgcacacactgcaggctcacacccgcaaaactggtc

SEQ ID NO: 409356 - DNA, 356 bp, Homo sapiens
cactcgttgttctacccccagcctttaaagtatggccttctgaaaacctgaccctgggagacctgggagcctcaactttgtgcagactccaaatgagactcaccatgatgcgccagaaatctcacacctctaatccacaaaagggagaagcttcatggtttaaatgccattgtctctaagagactgaaatcactggatctgtggcaaaccagggcagggtggcctttgccacaatgtacctggactgaatttgtggagatcaatttggtgttggactttgtgatggttttaatattcctcccttcccttgagtgtggactggatttatagtagtaaatctcttctaatgactaaaa

SEQ ID NO: 409357 - DNA, 493 bp, Homo sapiens
gagagaatgcaccagattccttctgaacgccgcctgccgcgtgcacggctacaactctatttccagccatgctgtggcaagcagttccgggcgggcttcagctccctttgcaccaccagcacctcgcctcctgtcagcatgaggcagttttcattttctgcccaggggttccgcagcgccccaacacaaggttggcagaagcgggctcagccggaggacttgtggagggaagttgcttccactgagccagcctcaatctggggtgcacaggcgccaccaggtgaatgcttctgccaggccgtcatctgacccataaggtccctctgtgcactgcttggaaggtcctggcaggctgagccccagccacccacggcagtgacctaataatgcaccgttatcttggctcttctgctctctcttgtttcccactcctgttcgtccctcatttctggtccctagaatgacttccaaaataaactccctgtacacaaac

SEQ ID NO: 409358 - DNA, 921 bp, Homo sapiens
gtggacattgcctccatgtttcagcagcagagctacgatatcttttcggccttgcttggctgcttcatgcattgctgaccatcgcttgacacagggctggtctaggctagtgttatgtttgatcagagtcgacaccatgtcataggagccctttttcacagcttgaaaatgattgttaaaaacaacattaagggattctgaatagcaaatctcaaagaagaccatagattcaagaacaaactgaggaagtgccatgaataatccattttcctataaaacctaagaagacttggcatgggttccacaacaaaggtgctgattaagctacagaagccccaagtatttagctggccacagaccatccaggtagacaataaatgtcctggcctccgttgccccaaggtgtggtggcattgtgacaaaatctgaactaatgggacatgagtggaagggccgtgtgcactgtcccggtcatctttttaaattgaagatgcttgcctagggcttcctctttagtccttcctgctgcctggaaaatggcgacgttgggagcaactttggaagcacactgtaatgttgatacagccaccctcacaaccctgggccattctgcaatgtgtgagagagaaatgacttctttctctttaaaaaaaaaaaaaaaaacacaacaaaaatcctgcacacatgcaagcactgatcagcactagtcagaccaaacaagaaagagggggggggggcgccaacaaaagtttaccccgcgggggggcccaatacagcggcggacacgcttttgtggacgaaggggccccaaagaaggccccattataagagaggcgagggcgggcgttaaacacgtcggcgtgagacaccgcgtgggaccttgtggagagacccttccggggggcaacttgggcacccccg

SEQ ID NO: 409359 - DNA, 592 bp, Homo sapiens
gtggacattgcctccatgtttcagcagcagagctacgatatcttttcggccttgcttggctgcttcatgcattgctgaccatcgcttgacacagggctggtctaggctagtgttatgtttgatcagagtcgacaccatgtcataggagccctttttcacagcttgaaaatgattgttaaaaacaacagaagaagagacagatttggatctcactcgtagagtttatggcctagagaagaagcctatgctgccttctatttaaagagagactcaaagtctgggcctgtactgggaaacgtagaagaagatatgaggccacatggaacattctggggtaaccaggaggcagaacgcagaaaggatctaaagccaaggcaaggaaagcagctcccaatgtggtaatgggaggatgaagacgaactttgcctacttcatttgggagcaggcaagccatccctgcaggagatgcccgtttttctccctctccttgtctaaagtagaacctgttgacaaatgcctctctctgaattgcccaactgtcactggcagctctaattacagtgaattacctcatgctagctggtgttattgc

SEQ ID NO: 409360 - DNA, 641 bp, Homo sapiens
gtggacattgcctccatgtttcagcagcagagctacgatatcttttcggccttgcttggctgcttcatgcattgctgaccatcgcttgacacagggctggtctaggctagtgttatgtttgatcagagtcgacaccatgtcataggagccctttttcacagcttgaaaatgattgttaaaaacaacattaagggattctgaatagcaaatctcaaagaagaccatagattcaagaacaaactgaggaagtgccatgaataatccattttcctataaaacctaagaagacttggcatgggttccacaacaaaggtgctgattaaggtaacccaggaaaagtccctattccccagatgtgtggctgatgaggatgtatatgagcacctccaggatattaacttcatggagactttagtcctctctcgaccttaccacttagtttttaaaatatattacttcctaatattaattctatttcaactctgataactcagtgatagagttcctttcctacactttagatattgctagcatagagaatgaaaccaacatggaactttgaaatgcatgtaaatgtttactgctctgttgtaggccttaagcattaaagaaaaatttaaatgaggccaaaagaaaacaag

SEQ ID NO: 409361 - DNA, 1541 bp, Homo sapiens
ggcgtggactttgctccagcagcctgtcccagtgaggacagggacacagtactcggccacaccatggggcgcccactgcacctcgtcctgctcagtgcctccctggctggcctcctgctgctcggggaaagtctgttcatccgcagggagcaggccaacaacatcctggcgagggtcacgagggccaattcctttcttgaagagatgaagaaaggacacctcgaaagagagtgcatggaagagacctgctcatacgaagaggcccgcgaggtctttgaggacagcgacaagacgaatgaattctggaataaatacaaagatggcgaccagtgtgagaccagtccttgccagaaccagggcaaatgtaaagacggcctcggggaatacacctgcacctgtttagaaggattcgaaggcaaaaactgtgaattattcacacggaagctctgcagcctggacaacggggactgtgaccagttctgccacgaggaacagaactctgtggtgtgctcctgcgcccgcgggtacaccctggctgacaacggcaaggcctgcattcccacagggccctacccctgtgggaaacagaccctggaacgcaggaagaggtcagtggcccaggccaccagcagcagcggggaggcccctgacagcatcacatggaagccatatgatgcagccgacctggaccccaccgagaaccccttcgacctgcttgacttcaaccagacgcagcctgagaggggcgacaacaacctcaccaggatcgtgggaggccaggaatgcaaggacggggagtgtccctggcaggccctgctcatcaatgaggaaaacgagggtttctgtggtggaactattctgagcgagttctacatcctaacggcagcccactgtctctaccaagccaagagattcaaggtgagggtaggggaccggaacacggagcaggaggagggcggtgaggcggtgcacgaggtggaggtggtcatcaagcacaaccggttcacaaaggagacctatgacttcgacatcgccgtgctccggctcaagacccccatcaccttccgcatgaacgtggcgcctgcctgcctccccgagcgtgactgggccgagtccacgctgatgacgcagaagacggggattgtgagcggcttcgggcgcacccacgagaagggccggcagtccaccaggctcaagatgctggaggtgccctacgtggaccgcaacagctgcaagctgtccagcagcttcatcatcacccagaacatgttctgtgccggctacgacaccaagcaggaggatgcctgccagggggacagcgggggcccgcacgtcacccgcttcaaggacacctacttcgtgacaggcatcgtcagctggggagagggctgtgcccgtaaggggaagtacgggatctacaccaaggtcaccgccttcctcaagtggatcgacaggtccatgaaaaccaggggcttgcccaaggccaagagccatgccccggaggtcataacgtcctctccattaaagtgagatcccactca

SEQ ID NO: 409362 - DNA, 1895 bp, Homo sapiens
ggcgtggactttgctccagcagcctgtcccagtgaggacagggacacagtactcggccacaccatggggcgcccactgcacctcgtcctgctcagtgcctccctggctggcctcctgctgctcggggaaagtctgttcatccgcagggagcaggccaacaacatcctggcgagggtcacgagggccaattcctttcttgaagagatgaagaaaggacacctcgaaagagagtgcatggaagagacctgctcatacgaagaggcccgcgaggtctttgaggacagcgacaagacgaatgaattctggaataaatacaaagatggcgaccagtgtgagaccagtccttgccagaaccagggcaaatgtaaagacggcctcggggaatacacctgcacctgtttagaaggattcgaaggcaaaaactgtgaattattcacacggaagctctgcagcctggacaacggggactgtgaccagttctgccacgaggaacagaactctgtggtgtgctcctgcgcccgcgggtacaccctggctgacaacggcaaggcctgcattcccacagggccctacccctgtgggaaacagaccctggaacgcaggaagaggtcagtggcccaggccaccagcagcagcggggaggcccctgacagcatcacatggaagccatatgatgcagccgacctggaccccaccgagaaccccttcgacctgcttgacttcaaccagacgcagcctgagaggggcgacaacaacctcaccaggatcgtgggaggccaggaatgcaaggacggggagtgtccctggcaggccctgctcatcaatgaggaaaacgagggtttctgtggtggaactattctgagcgagttctacatcctaacggcagcccactgtctctaccaagccaagagattcaaggtgagggtaggggaccggaacacggagcaggaggagggcggtgaggcggtgcacgaggtggaggtggtcatcaagcacaaccggttcacaaaggagacctatgacttcgacatcgccgtgctccggctcaagacccccatcaccttccgcatgaacgtggcgcctgcctgcctccccgagcgtgactgggccgagtccacgctgatgacgcagaagacggggattgtgagcggcttcgggcgcacccacgagaagggccggcagtccaccaggctcaagatgctggaggtgccctacgtggaccgcaacagctgcaagctgtccagcagcttcatcatcacccagaacatgttctgtgccggctacgacaccaagcaggaggatgcctgccagggggacagcgggggcccgcacgtcacccgcttcaaggacacctacttcgtgacaggcatcgtcagctggggagagggctgtgcccgtaaggggaagtacgggatctacaccaaggtcaccgccttcctcaagtggatcgacaggtccatgaaaaccaggggcttgcccaaggccaagagccatgccccggaggtcataacgtcctctccattaaagtgagatcccactcaaggcctggtttgtctctcgattgccgccttgccctggcttctcccgccctgttgaggtgggaaggtgaagtgtctgtctggaacaccagcttccgcccttcccagctaggctggggattcctccagggaatattctagtctgtgggggcaggatggaggctccagggatgatactgtgccatgactgccatgggcattcctttccccagataccttcctgcatctgggtcacgcccagaggcagatgggagcctgtgcaggccccgtggcgtcgggaggggcccacacgttggcgcagcctccccaagaccccccacttggcctggtctctcttgttcctcttgggaattggac

SEQ ID NO: 409363 - DNA, 590 bp, Homo sapiens
ggcgtggactttgctccagcagcctgtcccagtgaggacagggacacagtactcggccacaccatggggcgcccactgcacctcgtcctgctcagtgcctccctggctggcctcctgctgctcggggaaagtctgttcatccgcagggagcaggccaacaacatcctggcgagggtcacgagggccaattcctttcttgaagagatgaagaaaggacacctcgaaagagagtgcatggaagagacctgctcatacgaagaggcccgcgaggtctttgaggacagcgacaagacgaatgaattctggaataaatacaaagatggcgaccagtgtgagaccagtccttgccagaaccagggcaaatgtaaagacggcctcggggaatacacctgcacctgtttagaaggattcgaaggcaaaaactgtgaattatagggctgtgcccgtaaggggaagtacgggatctacaccaaggtcaccgccttcctcaagtggatcgacaggtccatgaaaaccaggggcttgcccaaggccaagagccatgccccggaggtcataacgtcctctccattaaagtgagatcccactca

SEQ ID NO: 409364 - DNA, 582 bp, Homo sapiens
cagtggttccctgggcagcaaggctgacaggcacttttatttgctgctttgcacttccctctatttttcaaattttcaaaagtgatcacgtgccatttttaatttaaaaaaatatatataacttccttaaaaagcaacggatgtgcgagagcatgtccctggctgagctgagcacagtcccactcgtctgtcccaggggaccggaacacggagcaggaggagggcggtgaggcggtgcacgaggtggaggtggtcatcaagcacaaccggttcacaaaggagacctatgacttcgacatcgccgtgctccggctcaagacccccatcaccttccgcatgaacgtggcgcctgcctgcctccccgagcgtgactgggccgagtccacgctgatgacgcagaagacggggattgtgagcggcttcgggcgcacccacgagaagggccggcagtccaccaggctcaagatgctggaggtgccctacgtggaccgcaacagctgcaagctgtccagcagcttcatcatcacccagaacatgttctgtgccggctacgacaccaagcaggaggatgcctgccagggg

SEQ ID NO: 409365 - DNA, 1744 bp, Homo sapiens
gctaaataccaaatgtatgaaacctcagttatgtgtgagcatgggctgattagtcattagtccatcgagatgtcttatttaaggggaaagagtgggcgattttaggtgagatggtcctgaagtaagaaccagatgcctgtaaagttcatcaatagaagcccccacggtttatgggcccggagcgagaagagggatccctgccaagcgggttgctggtttcacgcggcatggtagttaagctcgtgatctagtggtggtgatatgcatgttgactggaattattcacacggaagctctgcagcctggacaacggggactgtgaccagttctgccacgaggaacagaactctgtggtgtgctcctgcgcccgcgggtacaccctggctgacaacggcaaggcctgcattcccacagggccctacccctgtgggaaacagaccctggaacgcaggaagaggtcagtggcccaggccaccagcagcagcggggaggcccctgacagcatcacatggaagccatatgatgcagccgacctggaccccaccgagaaccccttcgacctgcttgacttcaaccagacgcagcctgagaggggcgacaacaacctcaccaggatcgtgggaggccaggaatgcaaggacggggagtgtccctggcaggccctgctcatcaatgaggaaaacgagggtttctgtggtggaactattctgagcgagttctacatcctaacggcagcccactgtctctaccaagccaagagattcaaggtgagggtaggggaccggaacacggagcaggaggagggcggtgaggcggtgcacgaggtggaggtggtcatcaagcacaaccggttcacaaaggagacctatgacttcgacatcgccgtgctccggctcaagacccccatcaccttccgcatgaacgtggcgcctgcctgcctccccgagcgtgactgggccgagtccacgctgatgacgcagaagacggggattgtgagcggcttcgggcgcacccacgagaagggccggcagtccaccaggctcaagatgctggaggtgccctacgtggaccgcaacagctgcaagctgtccagcagcttcatcatcacccagaacatgttctgtgccggctacgacaccaagcaggaggatgcctgccagggggacagcgggggcccgcacgtcacccgcttcaaggacacctacttcgtgacaggcatcgtcagctggggagagggctgtgcccgtaaggggaagtacgggatctacaccaaggtcaccgccttcctcaagtggatcgacaggtccatgaaaaccaggggcttgcccaaggccaagagccatgccccggaggtcataacgtcctctccattaaagtgagatcccactcaaggcctggtttgtctctcgattgccgccttgccctggcttctcccgccctgttgaggtgggaaggtgaagtgtctgtctggaacaccagcttccgcccttcccagctaggctggggattcctccagggaatattctagtctgtgggggcaggatggaggctccagggatgatactgtgccatgactgccatgggcattcctttccccagataccttcctgcatctgggtcacgcccagaggcagatgggagcctgtgcaggccccgtggcgtcgggaggggcccacacgttggcgcagcctccccaagaccccccacttggcctggtctctcttgttcctcttgggaattggac

SEQ ID NO: 409366 - DNA, 506 bp, Homo sapiens
tgatttgggggcttagaattttatttttggtttacaagagagtgatccgccttttgtgatctggatatggcaagggacatggcagtcagggagcataggtgagggggagcctgggtgagggtgaccagagcttttaaccctgtcctccctgccttccagtgttcatccgcagggagcaggccaacaacatcctggcgagggtcacgagggccaattcctttcttgaagagatgaagaaaggacacctcgaaagagagtgcatggaagagacctgctcatacgaagaggcccgcgaggtctttgaggacagcgacaagacggtaagggctggggatagcctggctgttggtaaggagctcaggccacagcgccctcgctggccctgctgctccgtccatccaggggggcggcctggaggaaggggcagcgtgcgcgaaggctttcaggggcggggcccagcaaatcgaggcctcggcggagtcctgcccacagggacatcagtgccg

SEQ ID NO: 409367 - DNA, 101 bp, Homo sapiens
atgggagacaactccaaaaatagtctgctgtgtgacctcatcaccaaacagcttgcttctctgaggaccatgtcaaaggcatcttcactggccacatacag

SEQ ID NO: 409368 - DNA, 481 bp, Homo sapiens
aacagggccaatccctactgcagctgccgaggacggccgtcaagtctgtctccacgctcatggtctctgccctgcagagcggctggcagatgtgcagctggaagtcatcagtgagttctgcctcagtcagctcccaagtgaggacgcagtcacctttgaagactccggaggctgagttgctgtgggaggtgtacctggtgctgtgggccgttcggaaacacctgcgccggctgtaccgcaggcaggagaggcacagacggcaccacgtccgatgccatgctgccccccgacccaacccggctcagtccctgaaactggatgcccaaagtcccctctagggggaaccccagacccttagagagtcctgacctcactcttacctggggtcccatatcagccccttcattccatgtattccagttgtaaaacaagtatcaaaatattgggaaataaatatcagatagttctgaaaaaaaaaaaa

SEQ ID NO: 409369 - DNA, 498 bp, Homo sapiens
aacgaaaaaagaaataagtataaatctgacaaaatatgtttaatgtctgatatggttcggttgtgtcccctcccaaatctcatcttgaattgtagttcccataatccccacgtgtcatgggagggaccaggtggagataattgaatcatggggggcgatttcccccatcctgttcttgtgatagtgagttagttttcacgagatctgatggttttataagaagtttcccccttcgctggacactcactctgtctcctgctgccctgtgaagagattccttctgccatgattgtaagtttcctgaggcctccccagccatgtggaactgtgagtcaattaaacctctttactttataaactgcccagtctcgggtatgtctttatcagcagtgtgagaaaggaccaatacaatatctatgtgaggagaactacaaacctcgaaataaagaatgaaataaatgaagagagaatctatgttcgttgaaggaagatgaatgt

SEQ ID NO: 409370 - DNA, 687 bp, Homo sapiens
aatttccttaaaaatagccatgaaaatgtacaaagttgtttttccatcttgccatttttaattcagtgcaaaacctctacttgattttatcttgctatttatatcacccatgcaagtatcacactacatattttgaaataataggattacaggcgtgagccaccgcgcccggcctggagtctctaatttatctcttcaaggaacctacccaaatttcttctttactccacatttcttcagcatgtatgtttttaatctgcttcaggcattttattcttcttgataattttcatgtttctcaaaggtgttctgttccaacagattaactatactattttcaagggcaaatagttatcctttatgacatttctgttttcctaacacctaacagaaatgtgctcttccatggaatagatatttaatacattatttatttgtaacatttttagttattttttaaaaaatagatgatttatttacaagtcaggaaatcctagtaaaaatgctcccatccttgtcttcaatctactactcagtttctaatgctcctcctgtagataaccactgttagttttttatcctctgttgttagtatccttccagtgttacttatgaatatataagtaaatacacatatgtatcatattcctttttttaagtaaaagttaataaattatatataaatat

SEQ ID NO: 409371 - DNA, 1220 bp, Homo sapiens
gagagttcatattaaaaaacagaattcttcttggaactctttaaagaaatgagaagctttgaaaacatcaggccctccatcctactaggcaaccttggactagagcaaagcgctctgctctttggccaggcacataccctctcctcgacacaccccactcagctcgcttgaaccctgcaggctactgagcttgcatcacctaatcttcaaaacttgcctccataccacaccacaatacactggcgcctagaaatccagggtaaagaaccttttaggatcattcccccaggtgcctcatttctgggtagaaaaatgaggtcctagcatagtagctctttcactgtttcacttcctaagtgaacttgcagaattgatgccaagaacagttttccctccattttctagtgtggagcacttgtcttttttgttgtccccatctgagcaacccagaatgatttataaacagcctttctgtttttatctctgcttccctgtggcataattgcagctaagtggcagggcacagcagttacaccgtgagtcaaggaacagaaccaggagagggacccttgtcagccctttaacttctggctttatccgggttccagcactctccagctatcctctgttatgtgtgactggaatccattcttattgacaatggagacagcagtggggggattggctattggatcagataaggttttacctctacatggaatttgagtccaaaggtaaatatattaaacatatagataagaagaaaagaaaaacgttatttaagtatctgatcagctctgcaccccagggacctccacttttgcccaggtttgagaatttgatctatagaattacctgcattctttcccgctcatccatccaatcagccacctttctcccttcaaagaagtgtcttcatttttttccttcttttgttatttttattgactgcccatcactgttattaaatccttccctctttttttgaatgaagcagcagagccttttattttgttttccttgttttgttttttgtttttgtgtttcagaaatgacagggctgtatcacagagttatttgagacggtcagttagggtaatgtttatcatttttggacagtgtgttcacacaaccttgtccaactaacaggatagcaaagaaaaaagagcagggacttaggggacagactggcagatctctattagaattctttccaagct

SEQ ID NO: 409372 - DNA, 487 bp, Homo sapiens
agtcggcccgggttgatagaagataagaagaaaagaaaaacgttatttaagtatctgatcagctctgcaccccagggacctccacttttgcccaggtttgagaatttgatctatagaattacctgcattctttcccgctcatccatccaatcagccacctttctcccttcaaagaagtgtcttcatttttttccttcttttgttatttttattgactgcccatcactgttattaaatccttccctctttttttgaatgaagcagcagagccttttattttgttttccttgttttgttttttgtttttgtgtttcagaaatgacagggctgtatcacagagttatttgagacggtcagttagggtaatgtttatcatttttggacagtgtgttcacacaaccttgtccaactaacaggatagcaaagaaaaaagagcagggacttaggggacagactggcagatctctattagaattctttccaagct

SEQ ID NO: 409373 - DNA, 438 bp, Homo sapiens
tgtgactgcaattccccagatatgatgtgacttcccacagatgtcttccaaagcccttccctgtacctggtatattcactcctacattccctggaaaattctatcctccctcccctaggaaactattacttgtccttcaagtgtcatctccccaggaagaccttctctgactcttctactactcccctctagtaacactaacacacacacacacacacacacacatacaggctccattacaccatcacagacctttacggtaggacctcaattgcacagtaattacttgtttatgcctctgcctccccccattagattatgagcacgtgaaagcagagattgttagttcactttggcagccccagtgcctagcctggcacttggttgttaataaggccttgctgaatgaaagaattaaatcattaaaaatcgcaagat

SEQ ID NO: 409374 - DNA, 473 bp, Homo sapiens
tctcctacagtatttatacatctgttcactattgttgccaggtattcttcaaaaagttctgcgcagtttctgagagaaagaggaaaatatgagtgacatacagaggttggaactcttacacattgctgatgagactgtagagtggcacaactctggaaaactcattggcagtttcttaccttatctcccggcaattccattcctaggtatttacctgagaaaagtaggagtgaggagaatgtgtcctcaaaaaacctgtgaaagaataatcacagcagccttacatataatagccaaaacctggaaacaacccaaatgcccacaaaaggagattagataaacaaattgtggtatattcatacaatagatactacccagaaataaaaaggtatgaactgcagctataaaaaacaacatgaatgaatttctaaaacactctgttgagaaaaataaatcagacacaaaaagtacaa

SEQ ID NO: 409375 - DNA, 407 bp, Homo sapiens
ttaatatacctgcctatccctttcacctcacaacagactgactgtcttgctccaacccttagcagttcccaatgtcatcatcaaggaccatcctcaccagcagtgccacaatattcaatgttcaaggcattatgtagacacaaggctgcatggttaggaagtagtaactgctcaaacaatattaaataaagaaatgtatgaatgacctgcatgacttaacctgaaatcactgagagaaaagaagccagaaactatgcttctggattgccctgatcacaactagaagttcctgccagagtgcagtgctttgaaatcacgtatggggttacaacctcagaaaacaagactcaggcttggtgtggctcaagcctgtaatcccagcactttgggaggccaaagagggcacg

SEQ ID NO: 409376 - DNA, 419 bp, Homo sapiens
tcaggttaaccctcctcaccaaggaaaaatcaggctacactttctttctctaccctcttctgaaaagaaatgaagcccggttaaccctctccacacccaaaagaaaagggaagaggcccgctaagcctggagagccacacacaggcaaagaaaagagcctggctaatctttctctcaggcaaacaaagcaggagggcttgggttaactaccctcacccccaggcagatggaaagaggagagcccaggaatagcccttctccactgaggggttgacaagggcgggtgtgagccgggaaagcaggggtctcacatgccttctccccaccatgtctgggtctagcacagggcctggcacacacctcgagcgctctataaacaccgactgaatggaggggtcagcttccatgcaggatatggg

SEQ ID NO: 409377 - DNA, 2823 bp, Homo sapiens
gccactttggaaccactttaaaccacacttaagacataaagtccctgctcagtccatccagaaaagcttacatagggatttttcattgtttctgcttttcctcatgatctcactggaagaattatggtggtttcccattatgagtcctcagatatttggaatatgagttaagttcatgagtggagagagggccaacattaaaggactagatgtgactcagggcataggtgagaagaactttaaatggagggctagtccttttgtttcaatagctatgtctggccatctcataaaaagcattcctgtgaagttaaacccctaacttgtgaatgccccatcgttagggaagcaggagtataagagagccagaggatgccattttaagtatagttccattttgagactagcaaagcacattccttgtcggtcatggcccatagtcatggggtgtttatagttgaggaaacagcctaaagatacctacagggacactcctacaacagtgcagagtccagatgtcccaatacccgtaacaatatatgctttgaagataatagctatgttttgatgtacttacacactggaatgtccaggttagtttaaatgaatactgtaataattttttttattctgcctgctcacccacacatagacccagcttagcttagttttttcatagataagacccctatataagaaaaacttaaagccagtgcattcctcctcttgttttctgagggcctcctgctcactaatggtgtagcttctaataaacttgcatctttcactgcactctgcgacacatcttaaattccttcctgaacaagatccaagaaccctcttggggtctggatcgagaccccttttccagtgacaccctgacttgcattgttagcagaaaggttagaggcactggaatagagactgaggaacagaaatcaggggtgtgaggtagagagaatcataggcataagcaagtctgatttaaacaaatatgccagacacttgagaaagaaaatgaagcagagagagagagcaataaggagaaactaaaacacattacatgcaatactcaacccactcccttccactagctcttagctgccttctgtccctttcctatttaaaataatgcagtgtttacaatcagtaatttttgctgttgggatttatctggtcaagggcacattttagaatatgaactttggagaagaaaagccagtttactctgatgcagaagctgtttaagattcagggtgtgctatgatgtgaatgtctgtcccccgcccccgccacagaattcatatgctgaaaccgaatccccagtgtgacaatattaagaggtgaggcctttgaggaaatgttaagttatgaggctggagttcttatgaatggattgatgtccttataaaagaggcccaagcttgtttgctccttttgccatgtgaggttatggaagaaggtgtcgtgtatgaagggagacaaagtttcaggtttgtgttttggtggaagtttaggttcaaatgagtcccatattgatgattaggtttcaacataggaattttggggggatacaaatattcagaccacagcaaaagccattggtagacacatcggcccttgggactatgaggaattttagattttaatgagctcattataaatcccactaatttatcttgaccaagggataaagatggatacccaggaatctccacagataagactagagctacactaggccactatcttattacacgacagcacaacatacaaaataaattgtagatgctgctaaatttgtagattaaatgcctgtatcaagaaagaactatctcaaatcaatgacagattcaaccttaaaaacttgaaaaaagacaattgaaactcaaaacaagaaggaaatagtaaagatcagagagaaattaatgatgtggaaaacagaatagcaatagagaaaaacgagtaaaaccaatacagattttttgagatcaataaaagggatataactctgtggatctagcaaaaaaaaaaaatgtgagaaaaaacaaattaccgataagttacagatgagatgacatcactagatactacatagtttatttatttatttattcatttattcatttaattatttatttttacaccccacctggagtgcattggccccatcatggctcactgaagtcttgaactcctgggctcaagcagttcactcgcttcagcctccaaggtagtttggaatatgggagtgcaccaccacaaccagcttttacagattctaaaacagtaataaggaattttatgaataatcttccaatacatttcacagttgccagtttgaaaataaacacataaaattgaacaaataagttagacaacataaatattaatggagaaaatcccatagaatctgtgaaaaaaatctggaataaatgaatttataaaatttacagggtaaataataattttttaaaaaaattatacttctgtatacaatgatcaatttgaaactgaaatttaaaagcactttttacaagagcatacaacatatacttgagacacataagatgtgcaagatatgtacattgaaaactacaaaagattgctgaggaaaattaaagatctaaataaaaggagagatacacaatgtttatggattagaacactcaatattgttaatgtgctaattcttctcaaattgataaacatatattcaatgcaatccaatcaaaatcccacgatgcttttattagaaaataacaagtgaattctaaaattgatatgaaaatacaaagcacttagaatagcaaaaaaaaaaga

SEQ ID NO: 409378 - DNA, 2769 bp, Homo sapiens
gccactttggaaccactttaaaccacacttaagacataaagtccctgctcagtccatccagaaaagcttacatagggatttttcattgtttctgcttttcctcatgatctcactggaagaattatggtggtttcccattatgagtcctcagatatttggaatatgagttaagttcatgagtggagagagggccaacattaaaggactagatgtgactcagggcataggtgagaagaactttaaatggagggctagtccttttgtttcaatagctatgtctggccatctcataaaaagcattcctgtgaagttaaacccctaacttgtgaatgccccatcgttagggaagcaggagtataagagagccagaggatgccattttaagtatagttccattttgagactagcaaagcacattccttgtcggtcatggcccatagtcatggggtgtttatagttgaggaaacagcctaaagatacctacagggacactcctacaacagtgcagagtccagatgtcccaatacccgtaacaatatatgctttgaagataatagctatgttttgatgtacttacacactggaatgtccaggttagtttaaatgaatactgtaataattttttttattctgcctgctcacccacacatagacccagcttagcttagttttttcatagataagacccctatataagataatggtgtagcttctaataaacttgcatctttcactgcactctgcgacacatcttaaattccttcctgaacaagatccaagaaccctcttggggtctggatcgagaccccttttccagtgacaccctgacttgcattgttagcagaaaggttagaggcactggaatagagactgaggaacagaaatcaggggtgtgaggtagagagaatcataggcataagcaagtctgatttaaacaaatatgccagacacttgagaaagaaaatgaagcagagagagagagcaataaggagaaactaaaacacattacatgcaatactcaacccactcccttccactagctcttagctgccttctgtccctttcctatttaaaataatgcagtgtttacaatcagtaatttttgctgttgggatttatctggtcaagggcacattttagaatatgaactttggagaagaaaagccagtttactctgatgcagaagctgtttaagattcagggtgtgctatgatgtgaatgtctgtcccccgcccccgccacagaattcatatgctgaaaccgaatccccagtgtgacaatattaagaggtgaggcctttgaggaaatgttaagttatgaggctggagttcttatgaatggattgatgtccttataaaagaggcccaagcttgtttgctccttttgccatgtgaggttatggaagaaggtgtcgtgtatgaagggagacaaagtttcaggtttgtgttttggtggaagtttaggttcaaatgagtcccatattgatgattaggtttcaacataggaattttggggggatacaaatattcagaccacagcaaaagccattggtagacacatcggcccttgggactatgaggaattttagattttaatgagctcattataaatcccactaatttatcttgaccaagggataaagatggatacccaggaatctccacagataagactagagctacactaggccactatcttattacacgacagcacaacatacaaaataaattgtagatgctgctaaatttgtagattaaatgcctgtatcaagaaagaactatctcaaatcaatgacagattcaaccttaaaaacttgaaaaaagacaattgaaactcaaaacaagaaggaaatagtaaagatcagagagaaattaatgatgtggaaaacagaatagcaatagagaaaaacgagtaaaaccaatacagattttttgagatcaataaaagggatataactctgtggatctagcaaaaaaaaaaaatgtgagaaaaaacaaattaccgataagttacagatgagatgacatcactagatactacatagtttatttatttatttattcatttattcatttaattatttatttttacaccccacctggagtgcattggccccatcatggctcactgaagtcttgaactcctgggctcaagcagttcactcgcttcagcctccaaggtagtttggaatatgggagtgcaccaccacaaccagcttttacagattctaaaacagtaataaggaattttatgaataatcttccaatacatttcacagttgccagtttgaaaataaacacataaaattgaacaaataagttagacaacataaatattaatggagaaaatcccatagaatctgtgaaaaaaatctggaataaatgaatttataaaatttacagggtaaataataattttttaaaaaaattatacttctgtatacaatgatcaatttgaaactgaaatttaaaagcactttttacaagagcatacaacatatacttgagacacataagatgtgcaagatatgtacattgaaaactacaaaagattgctgaggaaaattaaagatctaaataaaaggagagatacacaatgtttatggattagaacactcaatattgttaatgtgctaattcttctcaaattgataaacatatattcaatgcaatccaatcaaaatcccacgatgcttttattagaaaataacaagtgaattctaaaattgatatgaaaatacaaagcacttagaatagcaaaaaaaaaaga

SEQ ID NO: 409379 - DNA, 418 bp, Homo sapiens
ttctacaaaaaatgaaagtaaatgaaattgctagtattgtatatccaaaaatatgccatattgacaatgtcatacgatttgacctaacaaacccattcattgtgtatgttacttaaatctgcaatttgaactgataattcagaagaggaaggatcttttttctaatttttttgtctccaaatgttaagtcacaaaaacaaggaactattagtaacatagtattgtgagctaaaatatgtgctatatatatatatcatgagaaaccctttaaaaggttttcttttcagcaagtggattgttacagagcatttaaaataatttagaattatgtttaaaatttatctgatgacaagttctttccttttgattattttattcctttagatttgattaattctgtccaatacttgtttaacct

SEQ ID NO: 409380 - DNA, 671 bp, Homo sapiens
gttgtactgtgaagcctttattattagagacatatcagattccccaatttcaagtcataacataaatttcaagtcataacatatgtaaaatacataacatgtggtttccattaataaaatattttgtatagaaatagcaaaatatttttacacaaagtattgggtctgtcatcacttccatttgcaagggatgaagactgccaatattaagtcaggtttacaagagcatcttgggttgtaatagggaagcaataaagaggtcaagggaacagttataaaataaatgaatagaatatgttttcccaggtgccacttggggaaaaacactttgatagatcctaggaaataagaaacttaaatagatattttcaaggctaaaaaagctactgatggaggaataaatataatcatcaaacacagctattagaaaatcatattggaggctgggccaaggtgggcagatcacctgaggttgggagtttgagaccagcctgaccaacacagagaaaccccgtctctattaaaaatacaaaattagccaggtgtggtagcgcatgcttgtaatcccagcttgggaggttgagacaggagaatcgcttgaacccaggggcagaggttgcagtgagccgagatcaaaacagcctgggcaacaagagtgaaactccgtctca

SEQ ID NO: 409381 - DNA, 814 bp, Homo sapiens
tgtttattcccacctattttaaacttggtgccatgtcttggttactaagagacatgttggtcatcatcatgtctcttagtaaccaagacatccagcattttaaatactaagaaagaacttttcaggtcatttacttttgagtccagacagcttttaaatttttccattttgaaaaagtatttacatctagaatttagggctgcaggaccaagaagctttgttgatttcagtctgtaagggaaatgggttcctttgagctgaggcagtttctcctctctttggaggaggaccttctcaaaaacaaaactctccaccactgtcagttaccaggaggacctgggtcagttgtgtgttgggaagttacttgagaccagttcctttcctgagcacctaggtttttgtttgggggtgagggaggtggtggttatttttggatggtgactggaggcaagactgagactgagccttgctaaggtggctgcacagagaggaagacaagaagacagcagtggtgtcatgagaaggtctggtctcttggatcttagcaaactcagaagtgttttgtagcaaggctgcttggtataagtccaagaatggtggctacctggaggaatgggatagggtgtgttcttttcaaaggtattcagaagtcaaaattattttagatctgtgcttggtctcacaagacatggtgaattaggcccaactacttccatttagagccctgccttagactccctaaaggccctgcagctctgatctttcatgatttggtagtaatttaaaactcaaaccaaaagctaaaagctaaaaa

SEQ ID NO: 409382 - DNA, 563 bp, Homo sapiens
gaattaccccaccagctttcttgattttccagcttgcaggtggcagataatgagacttctcagcctccataatcatataatgagaatgaagacttttatgatgagccacttctactaaatgaataacagagtttcgttcttgttgcccaggctggagtgcaaaggcatggtctcagctcactgcaacctccacctggagtttaagccattctcctgcctcagcctcccaagtagctgggattacacatgtccaccactacgcccagttcatgaaacatggttagagagaagcgacttctctaaacaacccagctagtcagtgacagactagaacttcagcttcgtcatgtctggtggcaaacttcacgttcttaaacatgaagcttggatggaaaattttgaccagctaccgaaaatgacaactgtaatttcaccactggtactttattcttccacatggctccagagaatgaagaaaacgtttgcagtattccttcattgttacttctttactatattttggtgcaatacagtcatatacagatatattatttgaatgaaaa

SEQ ID NO: 409383 - DNA, 480 bp, Homo sapiens
aggccaacatccacatgaaatgtgtccatctgtttaagcatacgtgccaggcagctaaacttacagaacgaccagtcaggccccctcaggatatcttgcaggtggcagataatgagacttctcagcctccataatcatataatgagaatgaagacttttatgatgagccacttctactaaatgaatagagcagttttacaagcaccacatctgccacacacaggtagcaaataccactggaaggtccaagatccaggggcccacatctgctaagggctttcatgccgtgtcatcccatgaggaaagacagaggcaaggagagtcagatccagagaaaagtgacacatctagatacaaattctaggatcttcccgcctttcagtatcatcactgcttttccactttgacactatatgaacttctaggtttcatatgaaacattctgtattattttcagaaataaaagaagcttcatacaaa

SEQ ID NO: 409384 - DNA, 472 bp, Homo sapiens
aggccaacatccacatgaaatgtgtccatctgtttaagcatacgtgccaggcagctaaacttacagaacgaccagtcaggccccctcaggatatcttgcaggtggcagataatgagacttctcagcctccataatcatataatgagaatgaagacttttatgatgagccacttctactaaatgaatattaaacggcaaactctctgcatgactggagagggtaaagggccagaggagcagttttacaagcaccacatctgccacacacaggtagcaaataccactggaaggtccaagatccaggggcccacatctgctaagggctttcatgccgtgtcatcccatgaggaaagacagagggatcctgttctctgcaaatgcaaacagttcttttattacaaggctttttcaaggggaagagaaaactcatttggcagataaggttaaccttttaaaaaatcaagtgtgttaa

SEQ ID NO: 409385 - DNA, 1124 bp, Homo sapiens
aaacagggatctccagaacactggtggtggacacagctttcctgtcagcacacaaaagacctgttcctcttccaaaagacctctctttaccaccaccaccctcatcactcagaaaccctactgtttgttagacaggtggttgaggggacatgtcagaccctatcctcatggcaaggttaatatgttggtgttcttgacaagtaccaggctttctcagccacaaccagtggattcattcaaaatctaggtacctttatttgcctcccttcctgaacctaatgaagtgccagagtgagtgtacactttcttttctctcatctctcataaatctcttctgtcttcctttaaaaaaaacaaaagtagtagttcagaaacatccgcagaagcaggctttttagtttcttggctctctttgtcatgtccagaggcaggctgttctgtaaaatagactgccagacctcttattgcccattctcctttcttctcagcccctcacccctctttagcaattcctagagggtttaaaggactacagagctgtatggaatgaaaggtgatttctagttcagagtggatagaagaactaaagagattgtgatgggtgctctaggcagggaaaactgaacaaaaaggcagaaatgattcaggggaaaatcgggcctagaatttacactgggttgactagttatgatgggaagagaagtacttttttttagtatgcacgtagaagaatagaagatggttggagtgttaaatatgttccctagagaagggttctttgaagaaacactgcaattttgggtgttctctttcttgtttgcatatggccttacttatgtggaagattaatactgtgttataatattttctctttctgtttactgggaagattcagctgtacagattttcttttactttcaaatagaaatatttggaataatatcagtctttcttttttgtacattatgtggatatggatattcatggcagttttcagcctgttcttgtttctgttaaaaccgtatctttaacattttaatttgaataacttggtcttatctgatgcggaagactggaaactattgtgttcatgggtaaataaactacaaaatatttatggcttt

SEQ ID NO: 409386 - DNA, 359 bp, Homo sapiens
accttgatgacttaggaattaacgaatggatggatgatggatcctctgtatttccttttatgaggaagagattaatttgtacttattccaataaacccacaacagatttgtatttaggggcattcattcagtttcaaggagctgcaacagttgaatattcagtgctgtttttgtgataatatttgacattgaagattatattaaaattgatgttggtgtttgtacaggcatttttgaacattaatcaaacaatgacgggaaatattgctacaagttatgaaattaagtagttgaggaatgatacaaccaaagtaagcaatagaaactctagtttttgtctagtgggggtgggggtttgg

SEQ ID NO: 409387 - DNA, 226 bp, Homo sapiens
ttaaaccggtggaaacctgcctgaatacttcacccaacccctccatcaccctctattatgcaagctgcaacatttcaagccaactcccttatttctctggtgagccctgtcaacactgaggtaatagaactggaaaaactcatcacttcaaaaggacagtcaaatatcagaatttatttcatttggtaaaaattctatcattgccaaataaagctaatgcaaatat

SEQ ID NO: 409388 - DNA, 215 bp, Homo sapiens
agcataacagatagcctagacactatggatggaagcttggaatatcatcggatagagtggcaccatcagaggaattcctgggaagtgaaggcatgagaatttgaacagaagagacaccctactacctgtacttcctacacaagacccagtgaccacaggctcccagagagaaaatatgatcccgtgaagaaagactccaagatttatctttccat

SEQ ID NO: 409389 - DNA, 320 bp, Homo sapiens
atgtggaccctgagaccagggaggttgcgtggcatcattacatcagaaggtggttgtgctcaccccgcatcaaggttgctaagctgctgtgatggaatcctggagctgctgaaggacacctcatctctttgtgggaagcatctgcttgaggattaagggaatgcagaaaaaaagtggagtagagagatggaggaagatgactttcgaggacattgtgtgagcacctggatctaactgtgcctgaagcaaaactcaaaccctggactctcaatgtattggctctcagttccaagacccaataaattccttcttagcttaga

SEQ ID NO: 409390 - DNA, 444 bp, Homo sapiens
ctgtactccagcctgagtgagtgaggctccatttcaaaaaaaaaaagaaaagaaacatttacgatctattctccctgaagtctgctacctggaggcttcatcttcatctgcatgacaaaacactggtctctgcaaccccttattgtaactcagactttcctttctattgataactctttcaaccaattgccaatcagaaaatctttgaatctgcctgtgacttcaaagccccacctccccaccgcaaccccttccgattgtcccacctttctggaccaaaccaatgtatatcttacatgtattgatgcctatgtcttcctaaaatgtataaaaccaagttgtggccctactacctcgggcacatgttctcaggacctcctgagagtggtgttacaggccattggtcactcatatttgcctcagaataaatttcttaaaacgtga

SEQ ID NO: 409391 - DNA, 1330 bp, Homo sapiens
tgcgtgcagacctcggaggaggagtgctcgtccacgctggcagtgtgggtgaagtggcccatccatcccagcgccccagagcttgcgggccacaagagacagtttggctctgtctgccaccaggatcccagggtgtgtgatgagccctcctccgaagaccctcatgagtggccagaagacatcaccaagtggccgatctgcaccaaaaacagcgctgggaaccacaccaaccatccccacatggactgtgtcatcacaggacggccctgctgcattggcaccaagggcaggtgtgagatcacctcccgggagtactgtgacttcatgaggggctacttccatgaggaggccacgctctgctctcaggtgcactgcatggatgatgtgtgtgggctcctgccttttctcaaccccgaggtgcctgaccagttctaccgcctgtggctatccctcttcctgcacgccgggatcttgcactgcctggtgtccatctgcttccagatgactgtcctgcgggacctggagaagctggcaggctggcaccgcatagccatcatctacctgctgagtggtgtcaccggcaacctggccagtgccatcttcctgccataccgagcagaggtgggtcctgctggctcccagttcggcatcctggcctgcctcttcgtggagctcttccagagctggcagatcctggcgcggccctggcgtgccttcttcaagctgctggctgtggtgctcttcctcttcacctttgggctgctgccgtggattgacaactttgcccacatctcagggttcatcagtggcctcttcctctccttcgccttcttgccctacatcagctttggcaagttcgacctgtaccggaaacgctgccagatcatcatctttcaggtggtcttcctgggcctcctggctggcctggtggtcctcttctacgtctatcctgtccgctgtgagtggtgtgagttcctcacctgcatccccttcactgacaagttctgtgagaagtacgaactggacgctcagctccactgagctggctgcgggctccagcggccgtgtgctccagcaggccagagccagacacgacctccctgagcctcacaggcttacaggagtcacctgctccatgtggggactggcctgtttcctgaacacagacctctttcttgtgccttgttcacttctgttgaacccctcgtactgccgggcatttattatactacttcctgtcataaccttctaacttgtttcttgacgaccacctcatgtggccaataaatggactgggagcgttttagctgccattaacttgaaaaaaaat

SEQ ID NO: 409392 - DNA, 454 bp, Homo sapiens
tgcgtgcagacctcggaggaggagtgctcgtccacgctggcagtgtgggtgaagtggcccatccatcccagcgccccagagcttgcgggccacaagagacagtttggctctgtctgccaccaggatcccagggtgtgtgatgagccctcctccgaagaccctcatgagtggccagaagacatcaccaagtggccggtgagctgcagtgggggggttgttagggagccctccgtgtcatgtgggagagaatgccacaccccacccactggtgataccagagattcccatcatgggaccacctcacgttttcagaggctgtgcacctgccctttgtacagcctgtccatcaaccagcgcctgcccctctgagcaagtagatcaagagaactagatggagacttgaaaggtcaagtgacattattccagtttgatagagactcagtgtggtggcctg

SEQ ID NO: 409393 - DNA, 518 bp, Homo sapiens
agttaatggcagctaaaacgctcccagtccatttattggccacatgaggtggtcgtcaagaaacaagttagaaggttatgacaggaagtagtataataaatgcctggctggcctggtggtcctcttctacgtctatcctgtccgctgtgagtggtgtgagttcctcacctgcatccccttcactgacaagttctgtgagaagtacgaactggacgctcagctccactgagctggctgcgggctccagcggccgtgtgctccagcaggccagagccagacacgacctccctgagcctcacaggcttacaggagtcacctgctccatgtggggactggcctgtttcctgaacacagacctctttcttgtgccttgttcacttctgttgaacccctcgtactgccgggcatttattatactacttcctgtcataaccttctaacttgtttcttgacgaccacctcatgtggccaataaatggactgggagcgttttagctgccattaacttgaaaaaaaat

SEQ ID NO: 409394 - DNA, 1451 bp, Homo sapiens
tgcgtgcagacctcggaggaggagtgctcgtccacgctggcagtgtgggtgaagtggcccatccatcccagcgccccagagcttgcgggccacaagagacagtttggctctgtctgccaccaggatcccagggtgtgtgatgagccctcctccgaagaccctcatgagtggccagaagacatcaccaagtggccgatctgcaccaaaaacagcgctgggaaccacaccaaccatccccacatggactgtgtcatcacaggacggccctgctgcattggcaccaagggcaggtgtgagatcacctcccgggagtactgtgacttcatgaggggctacttccatgaggaggccacgctctgctctcaggtgcactgcatggatgatgtgtgtgggctcctgccttttctcaaccccgaggtgcctgaccagttctaccgcctgtggctatccctcttcctgcacgccgggcaagtgacactgtgggccgggtcgggggtctcagggccctcaggattggctggctgggggtggcagaaaggtcacttccctgctgaatgtctcccgacccccgcctgctactgactacaggatcttgcactgcctggtgtccatctgcttccagatgactgtcctgcgggacctggagaagctggcaggctggcaccgcatagccatcatctacctgctgagtggtgtcaccggcaacctggccagtgccatcttcctgccataccgagcagaggtgggtcctgctggctcccagttcggcatcctggcctgcctcttcgtggagctcttccagagctggcagatcctggcgcggccctggcgtgccttcttcaagctgctggctgtggtgctcttcctcttcacctttgggctgctgccgtggattgacaactttgcccacatctcagggttcatcagtggcctcttcctctccttcgccttcttgccctacatcagctttggcaagttcgacctgtaccggaaacgctgccagatcatcatctttcaggtggtcttcctgggcctcctggctggcctggtggtcctcttctacgtctatcctgtccgctgtgagtggtgtgagttcctcacctgcatccccttcactgacaagttctgtgagaagtacgaactggacgctcagctccactgagctggctgcgggctccagcggccgtgtgctccagcaggccagagccagacacgacctccctgagcctcacaggcttacaggagtcacctgctccatgtggggactggcctgtttcctgaacacagacctctttcttgtgccttgttcacttctgttgaacccctcgtactgccgggcatttattatactacttcctgtcataaccttctaacttgtttcttgacgaccacctcatgtggccaataaatggactgggagcgttttagctgccattaacttgaaaaaaaat

SEQ ID NO: 409395 - DNA, 1254 bp, Homo sapiens
  misc_feature (35)..(35): n is a, c, g, or t
  misc_feature (56)..(56): n is a, c, g, or t
agcgtcatcgtatgcgtagagaggtttggggaatntgagggcatgtgcggtttgtnttctaggcgtaggatgagggttagccgcgcaggtgcggtgaagggaggatggcggagttggtaccttttgcggttcccatcgagagtgacaaaaccttgctagtgtgggagctgagctccggacccacggccgaggctttgcatgtgagccggggccaggatggagggagggatggagaaagctgcccacccgctgactgggagttccggagtcctgcctcagaccctcacctgcctgagcctccgctgaaggactcttaattataaaggggatcccaactgacaactgacgacccccaacagatttttagagtcccggagaggtatctctccaccttcagaacgttttaccttccagtgcttcttaaagtttaggattttaagaggaaaacctgttgattaagtgggaagtgttttgaatcgcatccttcgcgaagagaggtttggggaatatgagggcatgtgcggttttgttttctgggcgtgagatttcatgcatttacttgtcccacccccacagcattctctgttcacagcattttctcagtttggccttctgtattcagtccgggtcttcccaaatgctgcagtggcccatcctggtttctatgccgtcattaagttttattctgcaagggctgcccacagagcccaaaaggcatgcgaccggaagcagctttttcagaaatctccagtcaaggttcgtcttggcaccagacataaggcagttcaacatcaagcccttgccctgaacagttccaaatgccaagaactggcgaattactactttggtttcaatgggtgttccaaaaggatcatcaagcttcaggagctttctgaccttgaagaaagggaaaatgaagatagcatggtgccacttccgaagcaaagcctgaagttcttctgtgctttagaagtggtgttgccatcctgtgattgcaggagtcctggcattggcttggtggaggagcctatggataaggtggaggaaggaccattatcattccttatgaaaaggaagacagcccagaagcttgctattcagaaggctttgtcagatgcattccagaaactgttgattgttgttctaggtaagactgtcttgatcatccttgaagtacttcagtttcagtaagcaaataaactcattttgaaaagttaattgaataaaaatattgatatctaaagcaaaaaaaaa

SEQ ID NO: 409396 - DNA, 878 bp, Homo sapiens
  misc_feature (35)..(35): n is a, c, g, or t
  misc_feature (56)..(56): n is a, c, g, or t
agcgtcatcgtatgcgtagagaggtttggggaatntgagggcatgtgcggtttgtnttctaggcgtaggatgagggttagccgcgcaggtgcggtgaagggaggatggcggagttggtaccttttgcggttcccatcgagagtgacaaaaccttgctagtgtgggagctgagctccggacccacggccgaggctttgcatcattctctgttcacagcattttctcagtttggccttctgtattcagtccgggtcttcccaaatgctgcagtggcccatcctggtttctatgccgtcattaagttttattctgcaagggctgcccacagagcccaaaaggcatgcgaccggaagcagctttttcagaaatctccagtcaaggttcgtcttggcaccagacataaggcagttcaacatcaagcccttgccctgaacagttccaaatgccaagaactggcgaattactactttggtttcaatgggtgttccaaaaggatcatcaagcttcaggagctttctgaccttgaagaaagggaaaatgaagatagcatggtgccacttccgaagcaaagcctgaagttcttctgtgctttagaagtggtgttgccatcctgtgattgcaggagtcctggcattggcttggtggaggagcctatggataaggtggaggaaggaccattatcattccttatgaaaaggaagacagcccagaagcttgctattcagaaggctttgtcagatgcattccagaaactgttgattgttgttctaggtaagactgtcttgatcatccttgaagtacttcagtttcagtaagcaaataaactcattttgaaaagttaattgaataaaaatattgatatctaaagcaaaaaaaaa

SEQ ID NO: 409397 - DNA, 1085 bp, Homo sapiens
  misc_feature (35)..(35): n is a, c, g, or t
  misc_feature (56)..(56): n is a, c, g, or t
agcgtcatcgtatgcgtagagaggtttggggaatntgagggcatgtgcggtttgtnttctaggcgtaggatgagggttagccgcgcaggtgcggtgaagggaggatggcggagttggtaccttttgcggttcccatcgagagtgacaaaaccttgctagtgtgggagctgagctccggacccacggccgaggctttgcatgtgagccggggccaggatggagggagggatggagaaagctgcccacccgctgactgggagttccggagtcctgcctcagaccctcacctgcctgagcctccgctgaaggactcttaattataaaggggatcccaactgacaactgacgacccccaacagatttttagagtcccggagaggtatctctccaccttcagaacgttttaccttccagtgcttcttaaagtttaggattttaagaggaaaacctgttgattaagtgggaagtgttttgaatcgcatccttcgcgaagagaggtttggggaatatgagggcatgtgcggttttgttttctgggcgtgagatttcatgcatttacttgtcccacccccacagcattctctgttcacagcattttctcagtttggccttctgtattcagtccgggtcttcccaaatgctgcagtggcccatcctggtttctatgccgtcattaagttttattctgcaagggctgcccacagagcccaaaaggcatgcgaccggaagcagctttttcagaaatctccagtcaaggttcgtcttggcaccagacataaggcagttcaacatcaagcccttgccctgaacagttccaaatgccaagaactggcgaattactactttggtttcaatgggtgttccaaaaggatcatcaaggaccattatcattccttatgaaaaggaagacagcccagaagcttgctattcagaaggctttgtcagatgcattccagaaactgttgattgttgttctaggtaagactgtcttgatcatccttgaagtacttcagtttcagtaagcaaataaactcattttgaaaagttaattgaataaaaatattgatatctaaagcaaaaaaaaa

SEQ ID NO: 409398 - DNA, 183 bp, Homo sapiens
agtaactttcagtgttaggtatttgaaataatgcagcctgtcatatgtactctggttaccagaatgaaaaaacaaaaagagatacatacatagtaaggaaacatgaaattggaggaattgatccccatgtgtattgcagcttcatataccagtagtctctaataagtcattgctttaataaaa

SEQ ID NO: 409399 - DNA, 370 bp, Homo sapiens
caaacattgtggaagagatttcagtttgagggctagtgtctgaattatggactccttaccctactccaccacttaaaacattttagagacttttgtgaaattaacaggtcatataattaataattgttgttttatgtacatttattgaaaggccatattgaggctccattgattttttttcctgcatatttatcagtatcgaattagaaaattgaaccttcagtgttactagatggaaatctaccaaaaagtagcaaggtttacgaatggtgggatttattggtgattaaacatttttttcctgtattttataagtttcacattacatttacaatgagaaaaaaatgtaaatgtagaattaaagtcttgt

SEQ ID NO: 409400 - DNA, 387 bp, Homo sapiens
ggttaatactaagcaaccctctacatctacattatctctgcagttttcatacctggaaaataatatgagattttcatgctgttttcttattatcatgccttaaattccatattattgtggtttgagcgttcaggtttgatcctgtagattgatattcaattatgttgttaactactgtgatacattttccaagccagtttacctctccaaattttaatgtaccctacagtattaatttggaagggttcagatgctcagcaaaaaactgccttatagaaaaagtggacaataatcttatctgtatctatgttagacacacataccaacatctctaataatataataccaatctacagagaatttattttccaaggatgagtagcgtat

SEQ ID NO: 409401 - DNA, 494 bp, Homo sapiens
tggcccaggtcccagtaactccattgtcagaaacagaccccatcccttctagtggtgctgctgccttttggacacagaatccagctcacagtcccctgtgtggtccccttttggccatcctgtggcttgggtagtaagaggtaagcatttggctgaggcaagttgttcattcagaataaattcacagctgcttaaattttgtcaacaggccgagcgtgttggctcatgcctgtaatcccagcactttggaaggccgaggcaggcggatcacgaggtcaggagttcaagaccagcctaaccaacatagtgaaaccccatctctactaaaaatacaaaaattagcagggtgtggtggcgcacgcctgtaattccagctactcgggagactgggacaggagaatcgcttgaacccgggaggcggaggttgcagtgagccgagatcgcacggctgcactccagcctgggcaacagggcaagactccaactcaaaaaaa

SEQ ID NO: 409402 - DNA, 298 bp, Homo sapiens
aaaaaactaaaaaataaaaaactctaaagctatcatcatacttgatgagagactagacgctttcaccctaagattagaacaaaggaaatgtatcccctctccccactactattcagcattgtattggaagttttagctagaagaataagataagaagaggaagtaaaggtgtattgattaacaaaagcaaaacacttgtctctttacagatgacatgattgtctatgtagaaaatcccagagtcttgacaaaagtacttctggaactgttaagtgattacagtaaggatgcagattac

SEQ ID NO: 409403 - DNA, 290 bp, Homo sapiens
gagtatgctgtttgctcaggtctctcttcttcctataaaaccaccacttctgctcccatgataacacagtccattaatctgtgcatggattgattcattcatgacagcagagctctcatgatccaatgacctcttaaaggccccacttctcaatatggccacaccggggatcaagtttccaaatgagttttgttggggatattcaaaccagaggagtattgtattttattttcaatttccatgtattaattgctagtatatagaaataaagtagtttttgtatgttaatt

SEQ ID NO: 409404 - DNA, 692 bp, Homo sapiens
ctccaaaaaaaaaaaaaaaaaaggatttcagattttcaaattagaggtgatcaagctgtaataataactacaataagagatgctagatattgaatatttactgtgcgaaatcctgctttctcttcaagacccattttgtctaggaagccttctctgactccatggactaagtgttgcatccttttattccccaccccttatagctctctggttttctttgtatcacagcacttgtcacactccaagagtcttactatcatttccctcctcaactggtaataagtgcctgggggggtcaggaatgatgatttatttatccttgcatccctagggaatagcacagtgcctggctcctaacaggctatcatgctataaatgcttacaaaagaaatgaatgaacgatacctggagccatagtggagctggctagcctcctgaggcctataggaactgaaaggaaaagctgagtcctggcataatatcaaggtttggatgaaaggcccatcactctgaatcattctagcacaaattataggctttaaaaatggtttgtgaatgttaacggttttgagtttactgcactgtaagatatcttaaatttcgctcccttccctgggcccctactctttctgattgtatgttggtttgttcactcaagtgaggaagaaaggcagtttgaaaataaaccacaa

SEQ ID NO: 409405 - DNA, 93 bp, Homo sapiens
ggggcccctaggaatgcgtagaagtgtgctgaggggcggtgcccaacctggcagctggaagcatcaccagctcccattcccacaagtgagcgg

SEQ ID NO: 409406 - DNA, 448 bp, Homo sapiens
caggtgactccagccagcctcaccccaaagctccccattgcacagatgagccttctctcccatcatccacccaccagccccctgtccagccccactttcttcaattcattgatcgcagcacagcatagggaagaacatgatttattgaatcttttccatcctaaagtattaattatcaatagctgcaatataccctgacttcataggaaaacctgcacctcattctaatcaccttgttctgagcgtctcactttccttcttaggtcttgaccttaagatttcaactttactttctagccgctgcctgatcaacgtggagtgaagtgaaatgatttccccctgtatttggaagctgtacttctaaaactctgtcctagaatcacatcactctcttttaccaaccagattattgcattgcattggctcactagtaatgtatttctaccaa

SEQ ID NO: 409407 - DNA, 3238 bp, Homo sapiens
  misc_feature (872)..(872): n is a, c, g, or t
aggatggacgtggtagaggtcgcgggtagttggtgggcacaagagcgagaggacatcattatgaaatacgaaaagatcatgaaggagaagggcaagaggtcatctgaacacatccagcagatggacctggacgtaagcgggacattaaggaggcatatattcttcagggatcgatacggaaccaagagacagcaatcaaatatatgactgatggatgtttactgaaacatattctgggagacccaagtcttaccaaattcagagtcattattttggatgaagcccatgaaagaactctaactacagatatcttatttggtctattgaagaagctatttcaggagaagtctgctaataggaaggagcatttaaaagtggtgattgtgaaagtcaccatggatatccatttgaatgaaatggctggagacatcttggtttttctgactgatcaacagaggaggatatttttgccaccaccacctggaattagaaaatgtgtcatatccaccaatatttctgcaacgtctttgacaatagatggaatcagatatgtggtagatggtggctttgtgaagcagttaaatcacaaccccagattagggttggacatcctggaggtggttccaatttcaaagagcgaggcattacagcgaagtggccgagctggcaggacttcttcaggaaaatgctttcggatctatagtaaagatttttggaaccagtgtatgcctgaccatgtgatccctgaaattaagagaactagtttgacatctgtagttctgaccttaaagtgccttgccatacacgatgtcataaggtttccctatttggatccacctaatgagagacttattttagaagctcttaaacanctttaccagtgtgatgctattgacaggagtggccatgtcaccagattgggtttgtctatggtggagtttcctttgcctccacatctgacatgtgcagtaataaaagctgcttccctggattgtgaagatttactacttccaatagcagcaatgttgtctgtggaaaacgtcttcattagacctgttgatccagagtaccagaaggaagcagaacagagacatcgagaattggcagctaaagctggaggatttaatgactttgcaactttagctgtcatctttgaacaatgcaaatcaagtggagctccagcttcatggtgccaaaaacactggattcattggaggtgcttattttctgcatttcgtgtggaagctcaacttcgagaactaatcaggaagcttaaacagcaaagtgatttcccaaaagagacctttgaaggccctaaacatgaagtactacgaagatgtctttgtgcgggctatttcaaaaatgtagctcgaagatctgttgggagaacgttttgcacaatggatggtcgtggaagcccagttcacattcatccttcctcagcacttcatgaacaggaaaccaaacttgaatggatcatttttcatggggtattggttaccaccaaagtctacgcaagaattgtatgcccaatccgttatgaatgggtaagagacttgttacccaagttgcatgaatttaatgcacatgatttgagcagtgtggcccgacgtgaagtgatgaagatctactacttccaatagcagcaatgttgtttgtggaaaacgtcttcattagacctgttgatccagagtaccagaaggaagcagaacagagacatcgagaattggcagctaaagctggaggatttaatgactttgcaactttagctgtcatctttgaacaatgcaaatcaagtggagctccagcttcatggtgccaaaaacactggattcattggaggtgcttattttctgcatttcgtgtgagaagatgcaagaaggagatggacaaataaggaaaatgtaaagcagctaaaggatggaatatcgaaagacgtcttaaagaaaatgcaaagaagaaatgatgacaaatccatatttgatgcacgggctcgtttccttgagagaaagcagcagaggacccaggaccacagtgacacacgaaaggaaacaggctaaggtggtgaaccctccaattcaggaagtgggaaaaggagccaggaaatgtgcttctactttgccagttatttcagacagcactaccaagaggaggtggtcagcacttgttattggcctatgaactaaaagcaaatcaaagctcataaatcaaagctcatcagttcccataaatgcagttgtcaaagaaaagatttggttgccatagtcataagcaatgatacatgaaaccaatgaaagacagtacatgtaataatattttcctcagtacaattttgctggccttaactggtatcaaacgctgtcattgagatgttttcaaagaacattgagttgtatttaatcagcgtgtactccatttgcattgaagcattaaaaattatttttcttaaaatctctttaaggccttcttgttgctgttagaatagtgctatatatcaggtatgtgaccatttatttcagaaggctgaacataagaggtttctactcagcaatacttagatgtctaactgtttaattgctacagagctttatagatatttagagaaaagacttaatcaattagtaaataaaattgcctatgcaggattctttcttgaattaatattaatccttaaattgatttttctgggattatacaaattcctctttatataaaagtatattgtttaaaacagtagctatagccattaaccaaaggacagatgatatatatatatatgatatatatatatatataagttcttttttagctgtacctacgtacttatatcagcaccatgtatgtaggtgtgatagtactttcaaacagcgcctccacctggcctactctgttatttccacctgtttgggtagggccatttaacttccattatgccaaacttgggatgggattttcgaagcagacaacactatttcatcgtgtttcaaattggaaccttgaggctagttagtatcacactcaggccacactcagcacttgcccactcttgtttactgccttgtattctagttatttgtgtatttgtctccctcactagattatacgctccttgtgggcagggactgtgtcttttttcatctttgtatctttcatgcacctagcatagtgctttgcacatagtagtcactcagtgtttgttaaataaagctattagtgtcattaaaattcaaaagacagt

SEQ ID NO: 409408 - DNA, 1520 bp, Homo sapiens
  misc_feature (872)..(872): n is a, c, g, or t
aggatggacgtggtagaggtcgcgggtagttggtgggcacaagagcgagaggacatcattatgaaatacgaaaagatcatgaaggagaagggcaagaggtcatctgaacacatccagcagatggacctggacgtaagcgggacattaaggaggcatatattcttcagggatcgatacggaaccaagagacagcaatcaaatatatgactgatggatgtttactgaaacatattctgggagacccaagtcttaccaaattcagagtcattattttggatgaagcccatgaaagaactctaactacagatatcttatttggtctattgaagaagctatttcaggagaagtctgctaataggaaggagcatttaaaagtggtgattgtgaaagtcaccatggatatccatttgaatgaaatggctggagacatcttggtttttctgactgatcaacagaggaggatatttttgccaccaccacctggaattagaaaatgtgtcatatccaccaatatttctgcaacgtctttgacaatagatggaatcagatatgtggtagatggtggctttgtgaagcagttaaatcacaaccccagattagggttggacatcctggaggtggttccaatttcaaagagcgaggcattacagcgaagtggccgagctggcaggacttcttcaggaaaatgctttcggatctatagtaaagatttttggaaccagtgtatgcctgaccatgtgatccctgaaattaagagaactagtttgacatctgtagttctgaccttaaagtgccttgccatacacgatgtcataaggtttccctatttggatccacctaatgagagacttattttagaagctcttaaacanctttaccagtgtgatgctattgacaggagtggccatgtcaccagattgggtttgtctatggtggagtttcctttgcctccacatctgacatgtgcagtaataaaagctgcttccctggattgtgaagatttactacttccaatagcagcaatgttgtctgtggaaaacgtcttcattagacctgttgatccagagtaccagaaggaagcagaacagagacatcgagaattggcagctaaagctggaggatttaatgactttgcaactttagctgtcatctttgaacaatgcaaatcaagtggagctccagcttcatggtgccaaaaacactggattcattggaggtgcttattttctgcatttcgtgtggaagctcaacttcgagaactaatcaggaagcttaaacagtggcttccggaagttcctggtccacaacgtcaaggagctggaagtgctgctgatgtgcaacaaatcttactgtgccgagatcactcaccatgtttcctccaagaaccgcaaagccatcgtggaaagagctgcccaactggccatcaaagtcaccaaccccaatgccaggctgcgcagcaaagaaaatgagtagacagctcgtgtgcatgttttctgtttaaataaaagtaaaaactgcca

SEQ ID NO: 409409 - DNA, 105 bp, Homo sapiens
gtacaagtcggtctgcttcttggagggaggcctcttccagtgtgccctggtcaaagggtcctgggctccctaggagcacagggcagggacgggtggccaatgccc

SEQ ID NO: 409410 - DNA, 473 bp, Homo sapiens
tctgaccaacacagcaaaaccccgtctctactaaaaatgcaaaacttagccaggagtggtggcacatgcctgtaatcccagctacttgggaagctgagtcaggaaaatcacttgaacccaggaggcagaggttgcagtgagccaaaatcacaccactgcactccagcctgggtcacaaagtaagactccgttgcaaaaatataaaaataaaaacaaagcacatgttgcccagtggcttccggaagttcctggtccacaacgtcaaggagctggaagtgctgctgatgtgcaacaaatcttactgtgccgagatcactcaccatgtttcctccaagaaccgcaaagccatcgtggaaagagctgcccaactggccatcaaagtcaccaaccccaatgccaggctgcgcagcaaagaaaatgagtagacagctcgtgtgcatgttttctgtttaaataaaagtaaaaactgccaa

SEQ ID NO: 409411 - DNA, 434 bp, Homo sapiens
caagtcttcttttattttccagaaacttaacttgctttgattcttcttagatatgtggtagatggtggctttgtgaagcagttaaatcacaaccccagattagggttggacatcctggaggtggttccaatttcaaagtaagtctctatgtcaaatctttttattcaaagaacaactgattaggtaatttctagctgttttggggagacaaagtaaattacctgagaaacccacagaacattttggggaatttttgggtttttttccttttgtaggagcgaggcattacagcgaagtggccgagctggcaggacttcttcaggaaaatgctttcggatctatagtaaagatttttggaaccagtgtatgcctgaccatgtgatccctgaaattaagagaactagtttgacatctgtagttctgaccttaaagtg

SEQ ID NO: 409412 - DNA, 312 bp, Homo sapiens
ttcccagctggggagggagggagtgtcaggggctcccctggtgagagatggatcttggaagggataatagctacaattcaaggtagaagtttgcgaatgctaaataggatggtagaggaagcttgaagaacttggacgtctgatcgttggaaagaaacgtgtcttctgtagttctgcgtttagatgccagagaactgagttccagcttggtggcagtgtgacgttgggctacttcgtgaacagtgatgaacctgtttcctggttttaaaagagaatgattattataaggattaaagtctgtcaagtgcttgt

SEQ ID NO: 409413 - DNA, 1466 bp, Homo sapiens
  misc_feature (1)..(1): n is a, c, g, or t
  misc_feature (3)..(3): n is a, c, g, or t
  misc_feature (5)..(5): n is a, c, g, or t
  misc_feature (7)..(9): n is a, c, g, or t
nantncnnnatgcactcaagcagagaagaaatccacaagtactcaccagcctcctggtctgcagagaagacagaatcaatatgagcacagcaggaaaagtaatcaaatgcaaagcagctgtgctatgggagttaaagaaacccttttccattgaggaggtagaggttgcacctcctaaggctcatgaagttcgcattaagatggtggctgcaggaatctgtcgttcagatgagcatgtggttagtggcaacctggtgaccccccttcctgtgattttaggccatgaggcagccggcatcgtggaaagtgttggagaaggggtgactacagtcaaaccaggtgataaagtcatcccgctctttactcctcagtgtggaaaatgcagaatttgtaaaaacccagaaagcaactactgcttgaaaaatgatctaggcaatcctcgggggaccctgcaggatggcaccaggaggttcacctgcagcgggaagcccatccaccacttcgtcggcgtcagcaccttctcccagtacacagtggtggatgagaatgcagtggccaaaattgatgcagcctcgcccctggagaaagtctgcctcattggctgtggattttcgactggttatgggtctgcagtcaaagttgccaaggtcaccccagggtctacctgtgctgtgtttggcctgggaggggtcggcctatctgttgttatgggctgtaaagcagctggagcagccagaatcattgctgtggacatcaacaaggacaaatttgcaaaggctaaagagttgggtgccactgaatgcatcaaccctcaagactacaagaaacccattcaggaagtgctaaaggaaatgactgatggaggtgtggatttttcgtttgaagtcatcggtcggcttgacaccatgatggcttccctgttatgttgtcatgaggcatgtggcacaagtgtcattgtaggggtacctcctgattcccagaacctctcaataaaccctatgctgctactgactggacgcacgtggaaaggagctatttttggaggctttaagagtaaagaatctgtccccaaacttgtggctgactttatggctaagaagttttcactggatgcattaataacaaatattttaccttttgaaaaaataaatgaaggatttgacctgcttcgctctggaaagagtatccgtaccgtcctgacgttttgaaacaatacagatgccttcccttgtagcagttttcagcctcctctaccctacatgatctggagcaacagctaggaaatatcattaattctgctcttcagagatgttaaaaataaattacacgtgggagctttccaaagaaatggaaattgatgggaaattatttgtcaagcaaatgtttaaaatccaaatgagaactaaataaagtgttgaacatcaactggggaattgaagccaataaaccttccttcttaaccattc

SEQ ID NO: 409414 - DNA, 463 bp, Homo sapiens
accaaaaaacatgaacttcccttcacttgacttgacccaaatgcatagggatgggaatggagtggctgagaacacagagagattttcactaagtcacctcaaatgctccttggactatcacatggaagcatgtgggttgtctaaatgttaacacaatgtctcttctttcctattgcagtatccgtaccgtcctgacgttttgaaacaatacagatgccttcccttgtagcagttttcagcctcctctaccctacatgatctggagcaacagctaggaaatatcattaattctgctcttcagagatgttaaaaataaattacacgtgggagctttccaaagaaatggaaattgatgggaaattatttgtcaagcaaatgtttaaaatccaaatgagaactaaataaagtgttgaacatcaactggggaattgaagccaataaaccttccttcttaaccattcaa

SEQ ID NO: 409415 - DNA, 867 bp, Homo sapiens
ccctagattctaatgttataaacgtcaaacatcactgcccaacataaataagactcgagacttattaacataaataagtatcttgccttcttgaatgctagttaaatgcttagatttacctaactgcctaatgaatcaggttatttgttaataagattatttttcaaattatttaagacctttatgccccttccaattacttgtgatttgtaggcctgtaggattgttgcatctaatctgactggcaacagaaaatgtcatcaaatactataatatccattttgttttcttttgcactaatacaacagaacatatcatttttgttttaaacaatggttaatatattaatagggtttgttccacacttactatttatagtttttataatcaagcattgggtattaaaagagaatcctttcaacccttcatcttcgtatgcttatacaataaattgcagtgagtgttttctttgtgcttggattgatactagacacctcaagaaagtcacataaccctcaagaagtttcaacccagggaataagtttggcacctcccatgagaaaacagtttcaacggtgaacctgccagtatttacttccttatttaagattgcttttagagtttgtttaaaatagaagaagttgtggagaggggatactattgtaatgcagccctaacatggagggtgggtgttgcaaaaactgtcattggtgactaaatcttctacatacattgcaaaattctcagtggacaatgactgccccttttaaaacactgtaactcaaaatatcatatttatgaccaaatttttatgaagacaatagacaatctggaaatgaaataaagccgcagcggagccccacctgg

SEQ ID NO: 409416 - DNA, 403 bp, Homo sapiens
tgaaaaaaggaaaagatatttagattggggagaaaacaaacttcacatcaagtcctgtatttcctttaaaatgtaatacagatgaaggaaatatccatttttaggctcagggcagcagaaagtaaggaagtcctcactttaataggattctcacccaccccaaggtgtcttgcgcgtctttgacagtttacagcaatggtttctatttaaacagccttttctctgatcctgcattcagacacgcccactctaagaatctttccctttgcaccagtttgttgatgggagtggattcattgctcacatgtgtcgccatgcaaatcacttacaaactcttggatttcagagtatttttctaatgtttttaactcatacccccttctgatagacaaacaaataaata

SEQ ID NO: 409417 - DNA, 300 bp, Homo sapiens
atcctccactttcctgctagcaccttgctgcctgtaaggtagagaggtctgagcatgaaaatcctccaggtatccctggctgccctcacttgctgctggtcatcaccttccgtgtcacatttctgctcaaaacagtcaatattcagctgctgtccctggagtggctgccattgcaacacaggaatgtccctcttgtttaatgttttatgatgaaatgttggggctttaaagagttgaaaagctaagagccgtagtaaattagccatcctggaaaatagaaatgaagcctcaggtataatc

SEQ ID NO: 409418 - DNA, 410 bp, Homo sapiens
atcataaatcacatggtacatttcctaggtccttttaagactctaatgattaaccccatcctcactcccactgtaaaactcttaaaagagttttcaaattataccacaattactattaaatacctatacgtaggcaggcccatctctgtctcagaattttttttgagtatcaggataatagttattgatcaaaaggaggcctggggtccaaaatggaggacaattggaaaaacagcagaccagtatttcagcaaaaggtgcaaaacagaatggaagcactgtactaataggtagtggggtgactatgcatggtgtctcatcccagcactttgggaggcctaggcgggaggatcacttgagtccaggagtttgagaccagcctgggcaacaaaacaacaccccatctctat

SEQ ID NO: 409419 - DNA, 405 bp, Homo sapiens
tgaggcaaggtctcactctgttgcccaggcttgagtgcagtgacgcagtcatgggtaactgtagctctacttttcaggcccaagtgatcctcccacctcaggttcctgagtagctgagactacagaggtacaccactgtgcctagctaatttttaagattttttgagatggctagtaatttaatttttatttttgtagagacagagtctccgtatgttgcccaagctggtctcaaactccttggcccaagcaatcctactgccttggctgcccaaagtgcttggattacaggcacgaagcaccctgcctggcctgccaaaacaattttaactaaatgctattttatagctttcaaatccatttggaagaaaatattgggacttttaaagatgttaattgttgggt

SEQ ID NO: 409420 - DNA, 482 bp, Homo sapiens
caatttctttgcacctcagagctttcataattttgtgacttttctatcatgttcttatcttactccagctaccacgctgtcatgttttttaggttaaggtgtactttttactcctgttttggcttttcaagctatgtcatacctgcctcccagaggtacttggaaaatattggcttgacagcacatgcttatcccaaggcggaattcatctctacagtcttcacatgccccactccagccgtgtggtagcacgccttgcttgtgaccctgggatagagatggggatgttaagtaggttcctctcaaccccagcactaatttgagaggaaaaactattaaggataccgttcctttctcccttcctgtacttaaattgatgttgaaggaaattactagaatattttctccccaaaattttaaaacacaaatgctaaaaaatgtcagtctcttcattctcctgacctcagtgttttcacaggtaa

SEQ ID NO: 409421 - DNA, 253 bp, Homo sapiens
atctttttaccttttgtctgactcagaaaacatatggattaaaatagtttctcttcatgaaaataactgcataaatgggccatcttcaacttaagatagtttttaaaaaatcaaaacttcacttccaatttaattttttgaaatcaagaatgtatttcccatagaaataataatgcaaatggtaggaaatcccttccaagctaactcatgaagacattcttaaccaataaatgactgaaataatgaaaactca

SEQ ID NO: 409422 - DNA, 217 bp, Homo sapiens
cttactgcctaactcctcggaaccctcggaggttgcgcataaacaattttttcttccagaacggcccccctctccgccctgggggagccgggaggatgtgcagccccagtcctcctgctcggcggagcctcgcgcgcgcagagcctagcgcgattcgcgccctcattactactacaaagcgcgggccagaccaatcccctttctaatgcaccatttt

SEQ ID NO: 409423 - DNA, 917 bp, Homo sapiens
aatgatgacaagagtaataccttcctagtgaagatgacttttatttcaggactatattaagtttcccaacttctgtcatgatatagtccaaagagaacctggaccacgcagacatcaaacagaacatgacgctgacccattctatcagtgacgttgtgctgattgcacaggacagatgagaggctcgtatactagaagtcttgataacttgttttctagtttcacatgtccacagatgaagaaaaattgtgccccagcaaggattatacccagagcctcatccattcatacctgatttagatacttagatgatgagtaatagaaaaggtggttatcaaacctgggtcaaagttgaatcacctgaggatcttttagaacatacacagccagctggacctgccctcagctacctcatctctctctgtgacctaatgacagaaaagcacatgattctcttcacctgacttcatatatgggtccatgtcatatgatacttcaaaatctgtgattccatgaagccaagagtagctcttcaacaggaaatgaatgagtgcttcagcttctgatcccattagtaagaaaatacagtcttatgagcaatgatggagctgcatctcttaggggcatttgattcccaagagaccaaagagcaaagagaatgtcaatttaaaaaaatcaaatgtttccatgacttagctatttaactgctttaaaatgaatgaatgctgcttcaagttctttcaaataccccacatcttggcaacaacgaaaggaattaacatgaagaaaatttacaatctttcatcacatcgaacaatgtcccacatttgaaaagttcacagcacagatttctggttactgaaagaaaggaaagaccttctttggatttgaataaacagatggactttcttctcctt

SEQ ID NO: 409424 - DNA, 722 bp, Homo sapiens
ttgttatagtaaccacacagacgcacgcagcttcgcgtgtgtgccgaggaattcacgggcagtacataaactggactccctgcttcattcggagtaacaaaaacacatacagaatttaatctacggccccacctgcaatttctgcaagatcggcttgacttcttcctcttcatcagccatcatctcccggccactccacccccaactttataaccacagagacgcacgccctctctcaccgcggaaccacagcgacatctggcgttctggaggcttttctgccccagaagggctttgcttcaaaccgacttaaccatttatttccacagagatgctctacaatcacttacaacatccagaaggatatataagaaaggatgactgtctctgcagagggaaacacagaaactggggaactgtgggtgagcgaagaaaattttcactgcctgcccttttgaattttcttgccatctatatgtatcacctattcaaatataaacatttttaaataaaaaattatttgcttctacatagtctctggaaagagacacaagacactggcaagactatcgcttacaaagagcagaagtgagtggctggagcaaaaatgagtgaccagggaactggggtagacttttcactctatgccttttttgtaactttaaagtttgtaccttgtgaatatattaaacttctgaataaatcttttaaagtgtcatgta

SEQ ID NO: 409425 - DNA, 399 bp, Homo sapiens
gttatttattggatgtgataccaaaggcacagacagcaaaaggaaaaatgataaattggactacatgaaaattttaaaatattttgcatcattcaacagagtgaaagaatcattcaacagagtgaaaatgtaatccacagaatgggagaatatatttgcaaattatttatttgataagggatagatatctagaatatatagagaattcataaaacttaacaataaaacaacctcattcaaaaatggacaaaagacttgagtacacatttctccagtaagatatacaaatggccaagaagcacatgaaaatatactcagcatcactaatcatgaggaaaatgcaaatcaaaaccacaatgagataccacctcacatccatgaggatagccactatacaaa

SEQ ID NO: 409426 - DNA, 370 bp, Homo sapiens
gatctccatgacctctatggttccttagactgcactttgagaactattgacgtacagggaaaaatgctcttggtgttccagttaagcacagaataaaatctggactgtgtcagtttgtaaagatcttatgtctacttggtcatcagccaagaagggattccgaagatagaagaggaggcatcaacaccgtgaacatcatggctgagttattttgtgagagggataagcctaaagtaaaaaccttggatttgcctctgtccttgaacatgctatctggaaagagttttcttaaaagtattgttgtgaacacatccattttcccagtatagttgaatgcagggtttaataaatggaatgaatctagttttag

SEQ ID NO: 409427 - DNA, 284 bp, Homo sapiens
ctaatttaccagcttctcttgcatctgggtttgtccaaagtttggggccaatgagatgtgaatggaagttgcatgtattatttctagtttgtgccctaaaaaagaatatgtatgtgttacccttgccctcttatcctctccactggctggggtgcagatgtgatggcaggaattggggcaactactttggacccagaggcagaagccctgtgatgaggatggcagaactgctctattagccctggactgttacatgaaagataaataaacttgtatcttattca

SEQ ID NO: 409428 - DNA, 1079 bp, Homo sapiens
ggcggcacgaggggggtctgggcgcctggaggaagccagagctttggcgcaagcggcctgcgcgctgtgccaggaaagcgcttggagaaaatgtccggccccgcgacctgggacaggaagtgatggagcacggacttagtttgcctttcagttcttgtataaatagttttgagggttgtctctgaattttcactcagttgtctaccaagatgttgaatggacccagagccaaggacgtggtcttttatcagtggcacctgagactttcttccctgtggacgcaaatccattattcagcactctgggcacagctacagatctgatcagctatccattctccaaactatctcatcctctgtcccatttttctgtctctcttgtccacaaggcatatacctgagagttttcaaattcctcagagaaatttagatattctgtggctttggcattcacctaatgtgttaatctacaaaccttttttacagtgtggattttttttcatgatgtgaattcaagtggtttctaatggtctcttcataaagttgtaaaccaaaagtaaaattctaaggccccaccccatctgaatggaccccttctctgggccagggcactccaaattaacctgaaaaccgttcaggccacgacatgaagtgggggcgggtgggacatggctgactatgccctcctcccttttggaattcagggaaagccaacacagaccttaagtctaatgagaaacaccatctattctctctgaagcctgctaccccaaggcttcttctgctgataaaactttggtctccacaacctcttataacccagacattcctttctattggtaataactctcaactaattgccaatcagaacatttttaaatctacctataacccagaagcccccactttgagttgtcctgcctttctggactgaaccaatgtatatcttgaatagatttgattgatgtctcacgaccctctaaaatgcataaaaccaagttgcaccccagccacctcctgaggtctgtgtcatgggcgtggccactctatttggctcagaataaatctcttcaagtattt

SEQ ID NO: 409429 - DNA, 544 bp, Homo sapiens
tttaaattgaatccaaattttattaaggagttcaagttacatacttcaaatttctagaatggaatggaatcattttggaactggaaaaatggcaaaaacactgacatcccttaaaacttcaattttataaagaaaattcttctgcaaatcaactcagaatttcatatccagccaaataagtttcacaagtaaaggagaaataaaatcctttacagacaagcaaatgctgagggattttgttaccaccaggcctgccttacaagagctcctgaaggaagcactaaataaggaaagaaaaaactggtaccagccactgcaaaaacacaccaaaaaataaagaccattgacactatgaagaaactgcatcaactaatgtgcaaaataaccagctagcatcatgatgacacataacaatattaaccttaaatgtaaatgggcaaaatgcccaattaaaagacacagactggcaatttggataacgagtcaagacctattggtgtgctgtattcaggagacccatttcatgtgcaaagacacacatagg

SEQ ID NO: 409430 - DNA, 1030 bp, Homo sapiens
ccgagcaaggcttggggcacagaaggagccgcctgagtcttggccattgtctcactcttgctgcccgaggtcacaccagtagtagatgtcagagcaggaccggacccagatctgtccagggctgggctcggcgcctttcctttctgcccaggtgtgctggagggagatttccataggctgggtacaagatagacatatcaggggataaagaagactcctcgcctggtgtcagagatattcctgaggcctcccgaggctgggccaaccattgctgcattccagacccagcccacagcatcaccctggacatgctggcctcgccctgcttgtgccctcaactctcccctcctggcctccacctccccagatattgaagtccagccacaggtgctagagtgcctgggaaccagcctctgggtaggatgcctgaaggagggatcgttaaatgcagggacactagggggccggggctggagctatggggcctgggtaggggataaagcacctctctgggagcccagaaccccaagtggacctgctgagctaaggagaaagaagccagagagggcccaggggagtgggagccttggtctgctggccagtgtgggcgaggtacatctttgtatccccatttcacggatgagggactgaggctccaagagactaagtgatttgcccaagatctcacagcaggaagtgatggaactgggattcaaacacaagtcgtttccagctttgatgtctgctttattcctctcctagccccatagctgggacctatcccaatcccaggcccatccctaccaccatagcccctattttttttttattcctttatccatggatctttaatttgaggaaataaagttaaacttgccaaatagcagcagcatcgaaccacattgaatctgttcttcattatttacaagattctcttatctcttccaattcttatcagtgttcacatgtcatttctaccagttatgatcaagttcgcttgtgttttaggtttaccctcatttgtaattct

SEQ ID NO: 409431 - DNA, 453 bp, Homo sapiens
aaagctaaaccttaaagatgaatagcccctaaccacatgtgttgcaaatagccttcctgacctccatatgctgtacatgacatcagaatgagtcaggcaattgattgtgaattcctcaaagttttcctttttttaaactattatttttaattttaaaaagcaaatggaaaatctgtattttgatgagcttagggtgttatttttttgaaagtcagctgaaggatggttagacagcacagcgaagactgctgaatgcactgaccccccctggaatgtgatttttgttcctttttatttcaatgtgggcttttgtttttgtttttgttttggtagatcttcagtttgaatgtttggaggaatgaacatcgttgttttgtgctgaaggaaagatcttgatggtgtttctttccccaataattgacttagatattaaaatttggtgctttcaagaaa

SEQ ID NO: 409432 - DNA, 418 bp, Homo sapiens
ctatttctgtagaaaatggcattgcgatattgatggggagtgcattgaatctgtagaccactttcggtagtgtggaaattttgacaatactaattctaatccatgaacaatggatgcctttctattcatctgtgtcttctttaatttccttcagtaatgaaatttagaattttcattgtacaagtatttaacctcttttgttaagtttattcctattttattatttgtgttgctataatgaattattttcttaatttctgtagtttgttattattgtatagaaatgctattgattggctgggcatggtggctcacacctgtaatctcagcactttgggaggtcaaggtgggtggatcacttgagcccaggagttcgagaccaggctggctaacatggtgaaaccccatctctaccaaa

SEQ ID NO: 409433 - DNA, 520 bp, Homo sapiens
tttctactggtacttggtcaaagtgtcttgttcccttatgtgttggtcatcttagaatgtgtgtatgacgttcacctcaccccagctactatgtccctaatctcctcagagaactttgaggatggaggacataacttcaacgggctgctattcctgtcaggatgccatttcacattgttgttccaagtccagttggaaaactactcaaagaggtctgaaactgggacccactcttgtcaatacctgtcccactcttggaaagtactgaagtgtgcttgagggttgtgggggcagtggggatggaggagcggtaaggtaagagacttctgggagacttcttcccacttcatcacaaacaccaaaccatggtcccacccaaaggcatcagcatcacctcctgagcaaccatagaagaggagactttcaaccaagcttgcctggacaaggcaaggatgaaatcaggcttcagaggttgcaaaactgtcacctggcagagtaacattcagtctgttaatgtatt

SEQ ID NO: 409434 - DNA, 143 bp, Homo sapiens
cgcccaggcacggcgcaggctcaccacgcagggaacacgcctctcgcccaggcacggcgcaggctcaccacgcagggaacacgcctctcgcccaggcacggcgcaggctcaccacgcagggaacacgcctctcgcccacagcg

SEQ ID NO: 409435 - DNA, 473 bp, Homo sapiens
actgattcccaggactctttctagacctcctgaatcaagagctctatatttttagaacaagcctccaaagacactcttatgtacaccattgggctaggtcagtagttctcaatttggctgtacattcaaatcaatttctgggttcctcccaggggttctgatttaactgggttgggatgggctcctatgttttagaacttcccaggtgattcaaatgtacagtcaaggcacatttggcgaaacactggactaggtgatttctaaattctttccagatgtaaaattctgcccccagcagcatttttttagttcagcaaatatttattgacttgtctcctcctttcagggctctgggtcagccagggtgtgagggtcaagaaaagactgggctcaaataggcggccttgagttcgtatcctgactcattcatgctgactaccaggataacctttgagaagtccccaaaccaagag

SEQ ID NO: 409436 - DNA, 390 bp, Homo sapiens
gcaaggctgaggtgaacctctggccttccagttgaggtacaggggtcctttgctggccccagatgtggacagtatcctctcgaatgcccaccactgggaacccttaagtccctcaaggtcttggtctgtcacccaggctggagtgcagtggtccagtcatggctcactgcagcctcaacctcctaaactcaagtgatcctctcgcctcagcttccctagtagctgggactgaagtcttgcttcaccctacccagctaatttaaaaaaaaatttttttgtagagacagcatcttgccatgttgcccaggctggtctcgaactcctggattcatactatcctcccacctcggcctcccaaagtattgagattacaagcatgaaccattgcat

SEQ ID NO: 409437 - DNA, 384 bp, Homo sapiens
gaagggtgggactgggagagctgcgccctgcggtccccacccggcctctccccgggggtgtggccgccgtctgttcggtcacagccaggctgcggcctaagttgaggtacaggggtcctttgctggccccagatgtggacagtatcctctcgaatgcccaccactgggaacccttaagtccctcaagatctttcctcagcctcggccagtcctatctcagcagtagtggccggtgttaagtatggtgcctagaaaattacagactattccagaccaggaaggaaagttgacttcatcttcagatactcaggctccagcctggagacatctcatctctcctctgtcactccttccccattattaaagtttgtggatgttccttag

SEQ ID NO: 409438 - DNA, 493 bp, Homo sapiens
cgggaatataaaccagcgtcctcaaggcaaaaattgccattgaaaagaaaaaagaaaagctgaaagctcaatgtttactttaggaacaaggatctaatggggtcagcgattttagctgtggaacaccaataaagaaatatagacatagaaaagcaagtcctgaaatttatggtatatctataaagacaaagcgaaccagagacttcagctaattctactactacaggcagcaaatctggatggttttgcccttggtttttctatcttataaaaactacagtagcaggtttagaagaaattgaatggaatcatttttttttctttgcctttataaacaaaagggtgcttggcaggggaaaaggtagctgggaaaatattccgtaacagagagaactcctgtattgtgatatatccttccttcagtttttggacatagaaaaaggtaactatagaaaaaaggcagaacgtaaattaaagttgttttagaaaatgc

SEQ ID NO: 409439 - DNA, 414 bp, Homo sapiens
ctcgctttcaccatattctattcatcaatgcaaatttgaggggatgggacttagactccacccgtgtatgggaaagtgacaaggtctctttatagaagagcatatagtcagaagttattattgtggccatctttggagaataatatgtgatacattactgggtatatacccaaatgagtataaatcatgctgctataaagacacatgcacacatatgtttattgcggcactattaaattcaaaaaagacttggaaccaacccaaatgtccaacaatgatagactggattaagaaaacgtgccacatgtccgccaccgaatactgcgcagccataaccaatgatgagttcatatcctttgtagggacatggatgaaattggaaaccatctctcagtaaactaacagtcaagagcc

SEQ ID NO: 409440 - DNA, 904 bp, Homo sapiens
ggtcccacgaaactgggtctcttcacagacagacccacagttcgcgagcatggctcagcgctgccccgcttctcccagcgccccttcccgacctttgaacgccttcaccgccctaggaaagcgagatcttgtcagagaaccttccggcgcctgtttcctggcagtggggcatagtccaacagctggctcccccaagatagccagcggccattacgcgcttgggtcgggggagatggagtcgcatttagccgcacagcagcctggaacctgaagttttcggccgctgagcgttctgggtgattgcgtagtgcgagggccaacgaaaccttctgggaagtgtagtccagcaagccgctcacttttcgtgaggcgtcacatcctgctgcttcaccctctggtgcacgggaggaccaactatttcagtcgaaggtgctcagagtaatgctcatgaacacttgtggaccagagatgagctgccttcccaaaacgtagaataatgactccaaagatatccacatcctaatccctgggacctatgaatatgttaccttacatggtaaaagggattttgcagatgtgagtaaatgaagactcttgatatgaggagattaccttggattatccatgtggacccgaggatatctatgagggaaagagggatgcaggagagtcagagtcggaaaaaggaatgttcaaggaaagcagaggtcagagtgatgtgaagatcctggctttgaagatggactgcaagtggtttgtaaaaactggaaagggcaaagaaattaattctcccctagaacctgcagaagaaacacagaccttgactttagcccagtaagacccatttgggacctctgacctccagaactgtaagataataaattagtgttgttttaagccaata

SEQ ID NO: 409441 - DNA, 870 bp, Homo sapiens
ggtcccacgaaactgggtctcttcacagacagacccacagttcgcgagcatggctcagcgctgccccgcttctcccagcgccccttcccgacctttgaacgccttcaccgccctaggaaagcgagatcttgtcagagaaccttccggcgcctgtttcctggcagtggggcatagtccaacagctggctcccccaagatagccagcggccattacgcgcttgggtcgggggagatggagtcgcatttagccgcacagcagcctggaacctgaagttttcggccgctgagcgttctgggtgattgcgtagtgcgagggccaacgaaaccttctgggaagtgtagtccagcaagccgctcacttttcgtgaggcgtcacatcctgctgcttcaccctctggtgcacgggaggaccaactatttcagtcgaaggtgctcagagtaatgctcatgaacacttgtggaccagagatgagctgccttcccaaaacataacttgaaggtcatgatgttctgttttctagttatgctgacgactcaaatcagacacgagtgaaatttggtgccatgactcagatcgggggacttcccttgggagatcaatcccctgtcctcctgctctttgctgcgtgagaaagatccacctatgacctcgggtcctcagaccaaccaacccaaggaacatctcaccaattttaaactcggatccttagctttaggggctgaaaacttgattgctccccgatcacctcagaagctcctgggaccatcacagaccacttgggttactcttaccgggaagggtaagtccttcccctcttaactcttaacgaggctacccatccaaataccttctttcaagggcggtacccg

SEQ ID NO: 409442 - DNA, 510 bp, Homo sapiens
ctcatgggcatctgttttgggagcttcatttcctcatctgctttgacactttaatcttggacattgtagtgaaatgcttcacattgtcacacattctaatctcagagaccactccaaatctttttgaattttcttggccattggaattagtactctggaatcagtacattaagaatggttttttaaaaactatcagctagaatttccacattttagaagaaatggtcagtataaatttggagaagcagtttctagctagtagtagctgtgcagaaaaacagttttattgataagtatctgatttggatttaggatccagctaggatgaaaaattcaattgaggtctggccagatagacataaattttatttttcctttatattctgtgtccaaaagacaaattgtcatgagttattatttttttcctgaagtatccgtttgtttctcagctttggaattagaggtgtagaaaataaacgggactcaacagcctaagattttgtttaaaaa

SEQ ID NO: 409443 - DNA, 118 bp, Homo sapiens
ttgtacacagggtatttctagaagcagaaatagactgggaagatgcacaaccaaggggttacaggcatcgcccgtgctcacctgtattttgtaatcagaaataaattgcttttaaaga

SEQ ID NO: 409444 - DNA, 4643 bp, Homo sapiens
ggaaagtccaccttccccatcaaggccagcctgggaacatggagtggcagcggccgcagcaaatgagagagccaacgcgcggaaagtttgctcaatgggcgatgtccgagataggctgtcactcaggtggcagcggcagaggccgggctgagacgtggccaggggaacacggctggctgtccaggccgtcggggcggcagtagggtccctagcacgtccttgccttcttgggagctccaagcggcgggagaggcaggcgtcagtggctgcgcctccatgcctgcgcgcggggcgggacgctgatggagcgcgccatcagcccggggctgctggtacgggcgctgctgctgctgctgctgctggggctcgcggcaaggacggtggccgcggggcgcgcccgtggcctcccagcgccgacggcggaggcggcgttcggcctcggggcggccgctgctcccacctcagcgacgcgagtaccggcggcgggcgccgtggctgcggccgaggtgactgtggaggacgctgaggcgctgccggcagccgcgggagagcaggagcctcggggtccggaaccagacgatgagacagagttgcgaccgcgcggcaggtcattagtaattatcagcactttagatgggagaattgctgccttggatcctgaaaatcatggtaaaaagcagtgggatttggatgtgggatccggttccttggtgtcatccagccttagcaaaccagaggtatttgggaataagatgatcattccttccctggatggagccctcttccagtgggaccgagaccgtgaaagcatggaaacagttcctttcacagttgaatcacttcttgaatcttcttataaatttggagatgatgttgttttggttggaggaaaatctctgactacatatggactcagtgcatatagtggaaaggtgaggtatatctgttcagctctgggttgtcgccaatgggatagtgacgaaatggaacaagaggaagacatcctgcttctacagcgtacccaaaaaactgttagagctgtcggacctcgcagtggcaatgagaagtggaatttcagtgttggccactttgaacttcggtatattccagacatggaaacgagagccggatttattgaaagcacctttaagcccaatgagaacacagaagagtctaaaattatttcagatgtggaagaacaggaagctgccataatggacatagtgataaaggtttcggttgctgactggaaagttatggcattcagtaagaagggaggacatctggaatgggagtaccagttttgtactccaattgcatctgcctggttacttaaggatgggaaagtcattcccatcagtctttttgatgatacaagttatacatctaatgatgatgttttagaagatgaagaagacattgtagaagctgccagaggagccacagaaaacagtgtttacttgggaatgtatagaggccagctgtatctgcagtcatcagtcagaatttcagaaaagtttccttcaagtcccaaggctttggaatctgtcactaatgaaaacgcaattattcctttaccaacaatcaaatggaaacccttaattcattctccttccagaactcctgtcttggtaggatctgatgaatttgacaaatgtctcagtaatgataagttttctcatgaagaatatagtaatggtgcactttcaatcttgcagtatccatatgataatggttattatctaccatactacaagagggagaggaacaaacgaagcacacagattacagtcagattcctcgacaacccacattacaacaagaatatccgcaaaaaggatcctgttcttcttttacactggtggaaagaaatagttgcaacgattttgttttgtatcatagcaacaacgtttattgtgcgcaggcttttccatcctcatcctcacaggcaaaggaaggagtctgaaactcagtgtcaaactgaaaataaatatgattctgtaagtggtgaagccaatgacagtagctggaatgacataaaaaactctggatatatatcacgatatctaactgattttgagccaattcagtgcctgggacgtggtggctttggagttgtttttgaagctaaaaacaaagtagatgactgcaattatgctatcaagaggatccgtctccccaatagggaattggctcgggaaaaggtaatgcgagaagttaaagccttagccaagcttgaacacccgggcattgttagatatttcaatgcctggctcgaagcaccaccagagaagtggcaagaaaagatggatgaaatttggctgaaagatgaaagcacagactggccactcagctctcctagcccaatggatgcaccatcagttaaaatacgcagaatggatcctttctctacaaaagaacatattgaaatcatagctccttcaccacaaagaagcaggtctttttcagtagggatttcctgtgaccagacaagttcatctgagagccagttctcaccactggaattctcaggaatggaccatgaggacatcagtgagtcagtggatgcagcatacaacctccaggacagttgccttacagactgtgatgtggaagatgggactatggatggcaatgatgaggggcactcctttgaactttgtccttctgaagcttctccttatgtaaggtcaagggagagaacctcctcttcaatagtatttgaagattctggctgtgataatgcttccagtaaagaagagccgaaaactaatcgattgcatattggcaaccattgtgctaataaactaactgctttcaagcccaccagtagcaaatcttcttctgaagctacattgtctatttctcctccaagaccaaccactttaagtttagatctcactaaaaacaccacagaaaaactccagcccagttcaccaaaggtgtatctttacattcaaatgcagctgtgcagaaaagaaaacctcaaagactggatgaatggacgatgtaccatagaggagagagagaggagcgtgtgtctgcacatcttcctgcagatcgcagaggcagtggagtttcttcacagtaaaggactgatgcacagggacctcaagccatccaacatattctttacaatggatgatgtggtcaaggttggagactttgggttagtgactgcaatggaccaggatgaggaagagcagacggttctgaccccaatgccagcttatgccagacacacaggacaagtagggaccaaactgtatatgagcccagagcagattcatggaaacagctattctcataaagtggacatcttttctttaggcctgattctatttgaattgctgtatccattcagcactcagatggagagagtcaggaccttaactgatgtaagaaatctcaaatttccaccattatttactcagaaatatccttgtgagtacgtgatggttcaagacatgctctctccatcccccatggaacgacctgaagctataaacatcattgaaaatgctgtatttgaggacttggactttccaggaaaaacagtgctcagacagaggtctcgctccttgagttcatcgggaacaaaacattcaagacagtccaacaactcccatagccctttgccaagcaattagccttaagttgtgctagcaaccctaataggtgatgcagataatagcctacttcttagaatatgcctgtccaaaattgcagacttgaaaagtttgttcttcgctcaatttttttgtggactactttttttatatcaaatttaagctggatttgggggcataacctaatttgagccaactcctgagttttgctatacttaaggaaagggctatctttgttctttgttagtctcttgaaactggctgctggccaagctttatagccctcaccatttgcctaaggaggtagcagcaatccctaatatatatatatagtgagaactaaaatggatatatttttataatgcagaagaaggaaagtccccctgtgtggtaactgtattgttctagaaatatgctttctagagatatgatgattttgaaactgatttctagaaaaagctgactccatttttgtccctggcgggtaaattaggaatctgcactattttggaggacaagtagcacaaactgtataacggtttatgtccgtagttttatagtcctatttgtagcattcaatagctttattccttagatggttctagggtgggtttacagctttttgtacttttacctccaataaagggaaaatgaagctttttatgtaaattggttgaaaggtctagttttgggaggaaaaaagccgtagtaagaaatggatcatatatattacaactaacttcttcaactatggactttttaagcctaatgaaatcttaagtgtcttatatgtaatcctgtaggttggtacttcccccaaactgattataggtaacagtttaatcatctcacttgctaacatgtttttatttttcactgtaaatatgtttatgttttatttataaaaattctgaaatcaatccatttgggttggtggtgtacagaacacacttaagtgtgttaacttgtgacttctttcaagtctaaatcatttaataaaactttttttaaatt

SEQ ID NO: 409445 - DNA, 1942 bp, Homo sapiens
cggccgctcagcgccagcagcacgtgcatctccgcgtgcagggggccgggccagggtgaggggctggggctgcgcaatggcatcaggctctagctgccttcaggcaagtccatcgaggcagaggacacaggtcaggctgcggaggccgctgaggacacgtcaccggtggggtggtccaggcctctgccacgtgttctgaccccaagcccaaggcgtcgatgtctgagggaaaggccctggctcccggacagaggaccgaagggtctcgggtgcccccacctgctcattggctttgccctgccctgcggcctctgtgttctgccttgccctttgatgaagtcacaaaccagagggaggaggccaggcctgcaggggctgcttcggagggctggccacgcgggcagctgcaacctgggcatgtacgtctgtgtggcaggggggcttctggactgggggctcggcaccgacccaggaaggggagctgtgagcagggacatctggccctagtctcagagcaacatccctcgaaatgccatctggccctggaaggtgcaagggaggcaggatgagtctgctcatgctaccgcgggccgcccagcaaggaagcaggctgcccgccaggctggcacgcgcctcttgcagtggagggtttgctcttcaggaacggacagagaacctccagactccctcggctgcacgctgggggcgagcccaggcagccacaggagtcctccaagccagatgagcccgccctgcggcactgccagcacttgggacgccagactcccttcaggcggcgggccccaagggcactgcgacagctcagcacccaccacagatcagcaacaggacaacccgagcgcggagacacagacgggaagcgtgtggggtcctgggataggcccaactcaatgatttcccctccctggggctaaggtctcagccgtgagggggctctggggaggggaggtcagagtagcctggagagctctccctaaggagggccgtgggatccatgggatctgcaggggaatcgccggggctggccctaaggctctccagccagcgccagggaggcaggggctccaaaccagcaggctgctcagggtggtcctcggacagcagccatgccctcccagggagcttgccagacacacagacctttcccagcctccagaccagaacctgcattttttaggagctttctgggggaccctcatctgtgacctgcctccagggatactttctcgctctacagacaccactgatgtgaagacgcaggagacaggacaaccccccgtgaagggtcctgtccacccaccactgaggcctggcccgactttctacaagaccctgctgggggggaagtgcccctcggagtaaaggaaatacagccccactcctgggaagacagcactcatttccatcagaggccacgccccccactcacacgccaggagaaagccacacctgcagaagcctgctccccacccaatgccagcccctcctctggggaggctctgggactggagcaactgggactctcctggctgctgaccccggagccaggctctctgcttgtcctgcactacctcgccacgtctgcacaggggcctgacaagcgctactgtctccgggctacagaggacactggagctcagagctggacaaccggcccaggcccaggccgcacacggcgcagcaggccgtctgccgcactctgggggaggtcaccctggggctgctgacctgctctgtccctcgccccagcaccgtggcaatctaacaggaaggggcagggccagctccctctggaactcgggcagcgtcaaagataaggtgtcttcaaaaagctcatggaaaacgtgcgttgtgacgaaacttgcatggctttcaagtttttttgccccaaaataaactgatactaacttgtcaaaaaatg

SEQ ID NO: 409446 - DNA, 1620 bp, Homo sapiens
cggccgctcagcgccagcagcacgtgcatctccgcgtgcagggggccgggccagggtgaggggctggggctgcgcaatggcatcaggctctagctgccttcaggcaagtccatcgaggcagaggacacaggtcaggctgcggaggccgctgaggacacgtcaccggtggggtggtccaggcctctgccacgtgttctgaccccaagcccaaggcgtcgatgtctgagggaaaggccctggctcccggacagaggaccgaagggtctcgggtgcccccacctgctcattggctttgccctgccctgcggcctctgtgttctgccttgccctttgatgaagtcacaaaccagagggaggaggccaggcctgcaggggctgcttcggagggctggccacgcgggcagctgcaacctgggcatgtacgtctgtgtggcaggggggcttctggactgggggctcggcaccgacccaggaaggggagctgtgagcagggacatctggccctagtctcagagcaacatccctcgaaatgccatctggccctggaaggtgcaagggaggcaggatgagtctgctcatgctaccgcgggccgcccagcaaggaagcaggctgcccgccaggctggcacgcgcctcttgcagtggagggtttgctcttcaggaacggacagagaacctccagactccctcggctgcacgctgggggcgagcccaggcagccacaggagtcctccaagccagatgagcccgccctgcggcactgccagcacttgggacgccagactcccttcaggcggcgggccccaagggcactgcgacagctcagcacccaccacagatcagcaacaggacaacccgagcgcggagacacagacgggaagcgtgtggggtcctgggataggcccaactcaatgatttcccctccctggggctaagacaccactgatgtgaagacgcaggagacaggacaaccccccgtgaagggtcctgtccacccaccactgaggcctggcccgactttctacaagaccctgctgggggggaagtgcccctcggagtaaaggaaatacagccccactcctgggaagacagcactcatttccatcagaggccacgccccccactcacacgccaggagaaagccacacctgcagaagcctgctccccacccaatgccagcccctcctctggggaggctctgggactggagcaactgggactctcctggctgctgaccccggagccaggctctctgcttgtcctgcactacctcgccacgtctgcacaggggcctgacaagcgctactgtctccgggctacagaggacactggagctcagagctggacaaccggcccaggcccaggccgcacacggcgcagcaggccgtctgccgcactctgggggaggtcaccctggggctgctgacctgctctgtccctcgccccagcaccgtggcaatctaacaggaaggggcagggccagctccctctggaactcgggcagcgtcaaagataaggtgtcttcaaaaagctcatggaaaacgtgcgttgtgacgaaacttgcatggctttcaagtttttttgccccaaaataaactgatactaacttgtcaaaaaatg

SEQ ID NO: 409447 - DNA, 1927 bp, Homo sapiens
cggccgctcagcgccagcagcacgtgcatctccgcgtgcagggggccgggccagggtgaggggctggggctgcgcaatggcatcaggctctagctgccttcaggcaagtccatcgaggcagaggacacaggtcaggctgcggaggccgctgaggacacgtcaccggtggggtggtccaggcctctgccacgtgttctgaccccaagcccaaggcgtcgatgtctgagggaaaggccctggctcccggacagaggaccgaagggtctcgggtgcccccacctgctcattggctttgccctgccctgcggcctctgtgttctgccttgccctttgatgaagtcacaaaccagagggaggaggccaggcctgcaggggctgcttcggagggctggccacgcgggcagctgcaacctgggcatgtacgtctgtgtggcaggggggcttctggactgggggctcggcaccgacccaggaaggggagctgtgagcagggacatctggccctagtctcagagcaacatccctcgaaatgccatctggccctggaaggtgcaagggaggcaggatgagtctgctcatgctaccgcgggccgcccagcaaggaagcaggctgcccgccaggctggcacgcgcctcttgcagtggagggtttgctcttcaggaacggacagagaacctccagactccctcggctgcacgctgggggcgagcccaggcagccacaggagtcctccaagccagatgagcccgccctgcggcactgccagcacttgggacgccagactcccttcaggcggcgggccccaagggcactgcgacagctcagcacccaccacagatcagcaacaggacaacccgagcgcggagacacagacgggaagcgtgtggggtcctgggataggcccaactcaatgatttcccctccctggggctaaggtctcagccgtgagggggctctggggaggggaggtcagagtagcctggagagctctccctaaggagggccgtgggatccatgggatctgcaggggaatcgccggggctggccctaaggctctccagccagcgccagggaggcaggggctccaaaccagcaggctgctcagggtggtcctcggacagcagccatgccctcccagggagcttgccagacacacagacctttcccagcctccagaccagaacctgcattttttaggagctttctgggggaccctcatctgtgacctgcctccagggatactttctcgctctacagacaccactgatgtgaagacgcaggagacaggacaaccccccgtgaagggtcctgtccacccaccactgaggcctggcccgactttctacaagaccctgctgggggggaagtgcccctcggagtaaaggaaatacagccccactcctgggaagacagcactcatttccatcagaggccacgccccccactcacacgccaggagaaagccacacctgcagaagcctgctccccacccaatgccaggggcggaaatgtggacggagggcgacttctctgccagcctggcgggggcctgcagcaagctcgccgatgccctctgcgcctgctgggcccgcaggggcctgacaagcgctactgtctccgggctacagaggacactggagctcagagctggacaaccggcccaggcccaggccgcacacggcgcagcaggccgtctgccgcactctgggggaggtcaccctggggctgctgacctgctctgtccctcgccccagcaccgtggcaatctaacaggaaggggcagggccagctccctctggaactcgggcagcgtcaaagataaggtgtcttcaaaaagctcatggaaaacgtgcgttgtgacgaaacttgcatggctttcaagtttttttgccccaaaataaactgatactaacttgtcaaaaaatg

SEQ ID NO: 409448 - DNA, 454 bp, Homo sapiens
gtccatttaggcttagtgctgacatgacatctgaccaggctattttcatgacacaatcaaaagagaataaagctgtgtgtgatctgtgaaataaaaaccccttgcaggtctgtgaacacaagcaagataaatttatgaaggctctggccaagaatctctctcaacaatatacaaagagtcctgtcttgaagatctgtgtgaaaaaggattctaggttagtttcggtaataataaaacctaccactgtatccttataaccgcagacatctgggtaagacccagaagagaactgccatgatacaatctattttggaattacctatgggctttttatttcattttttgaaacaaggtcttgctctgtcactcaggctggagcagtggcatgattacaactcactgaagccttgacctcccatgctcaaacgatcctcctgcctcagcctcttgagca

SEQ ID NO: 409449 - DNA, 597 bp, Homo sapiens
caaaaaaaaaaaaaaaaaaaaaactctgggcaaaaggtacctatgttcatttcagttgtcatttcattcaaactttctatgcctgttctccaccctagcagctgatttatagactgaccttttacctgggctagtccccagctacattggcactgtcacaaggcagtgaactccgtgagtaaatgcatgttctgatttgctttgctctcaaaggccaacctgaccttctgcttgtctttctgactggttgtgactcatagactagctgaacaccaggtccttgggatcccaagctgggcagggtgctgtgttttttctttgctcactcagactttcccagtgctgtctgtttcagaactggggttgataacagggtcggtaatggggagaccaggctccattgctatggttactctctccatggatacaaattatcagggaacttccatcctcacagacctgactcctacctcctccagaggtcttttaccaagtaaaaacaagtggtgaactcttcactcacttcctggaaatttctcttcaatttcaccctatttgtatcaacaaaatcacctacctaccaaataggaattttta

SEQ ID NO: 409450 - DNA, 3347 bp, Homo sapiens
agcggggaggagctggagaacatagacagggatgatttatttattgttcctggtcactgtctctttgaggattggtatctctgctccagaaaagatggcagcctctttcttctctgattttggtcttatgtggtatctggaggagctcaaaaaggaggagttcaggaaatttaaagaacatctcaagcaaatgactttgcagcttgaactcaagcagattccctggactgaggtcaaaaaaagcatcccgggaagaacttgcaaacctcttgatcaagcactatgaagaacaacaagcttggaacataaccttaagaatctttcaaaagatggatagaaaggatctctgcatgaaggtcatgagggagagaacaggatacacaaagacctatcaagctcacgcaaagcagaaattcagccgcttatggtccagcaagtctgtcactgagattcacctatactttgaggaggaagtcaagcaagaagaatgtgaccatttggaccgcctttttgctcccaaggaaactgggaaacagccacgtacagtgattattcaaggaccacaaggaattggaaaaacgacactcctgatgaagctgatgatggcctggtcggacaacaagatctttcgggataggttcctgtacacgttctatttctgctgcagagaactgagggagttgccgccaacgagtttggctgacttgatttccagagagtggctgaccccgctgctcctataacagagatcgtgtctcaaccggagagactcttgttcgtcatcgacagcttcgaagagctgcagggcggcttgaacgaacccgattcggatctgtgtggtgacttgatggagaaacggccggtgcaggtgcttctgagcagtttgctgaggaagaagatgctcccggaggcctccctgctcatcgccatcaaacccgtgtgcccgaaggagctccgggatcaggtgacgatctcagaaatctaccagccccggggattcaacgagagtgataggttagtgtatttctgctgtttcttcaaagacccgaaaagagccatggaagccttcaatcttgtaagagaaagtgaacagctgttttccatatgccaaatcccgctcctctgctggatcctgtgtaccagtctgaagcaagagatgcagaaaggaaaagacctggccctgacctgccagagcactacctctgtgtactcctctttcgtctttaacctgttcacacctgagggtgccgagggcccgactccgcaaacccagcaccagctgaaggccctgtgctccctggctgcagagggtatgtggacagacacatttgagttttgtgaagacgacctccggagaaatggggttgttgacgctgacatccctgcgctgctgggcaccaagatacttctgaagtacggggagcgtgagagctcctacgtgttcctccacgtgtgtatccaggagttctgtgccgccttgttctatttgctcaagagccaccttgatcatcctcacccagctgtgagatgtgtacaggaattgctagttgccaattttgaaaaagcaaggagagcacattggatttttttggggtgttttctaactggccttttaaataaaaaggaacaagaaaaactggatgcgttttttggcttccaactgtcccaagagataaagcagcaaattcaccagtgcctgaagagcttaggggagcgtggcaatcctcagggacaggtggattccttggcgatattttactgtctctttgaaatgcaggatcctgcctttgtgaagcaggcagtgaacctcctccaagaagctaactttcatattattgacaacgtggacttggtggtttctgcctactgcttaaaatactgctccagcttgaggaaactctgtttttccgttcaaaatgtctttaagaaagaggatgaacacagctctacgtcggattacagcctcatctgttggcatcacatctgctctgtgctcaccaccagcgggcacctcagagagctccaggtgcaggacagcaccctcagcgagtcgacctttgtgacctggtgtaaccagctgaggcatcccagctgtcgccttcagaagcttggaataaataacgtttccttttctggccagagtgttctgctctttgaggtgctcttttatcagccagacttgaaatacctgagcttcaccctcacgaaactctctcgtgatgacatcaggtccctctgtgatgccttgaactacccagcaggcaacgtcaaagagctagcgctggtaaattgtcacctctcacccattgattgtgaagtccttgctggccttctaaccaacaacaagaagctgacgtatctgaatgtatcctgcaaccagttagacacaggcgtgccccttttgtgtgaagccctgtgcagcccagacacggtcctggtatacctgatgttggctttctgccacctcagcgagcagtgctgcgaatacatctctgaaatgcttctgcgtaacaagagcgtgcgctatctagacctcagtgccaatgtcctgaaggacgaaggactgaaaactctctgcgaggccttgaaacatccggactgctgcctggattcactgtgtttggtaaaatgttttatcactgctgctggctgtgaagacctcgcctctgctctcatcagcaatcaaaacctgaagattctgcaaattgggtgcaatgaaatcggagatgtgggtgtgcagctgttgtgtcgggctctgacgcatacggattgccgcttagagattcttgggttggaagaatgtgggttaacgagcacctgctgtaaggatctcgcgtctgttctcacctgcagtaagaccctgcagcagctcaacctgaccttgaacaccttggaccacacaggggtggttgtactctgtgaggccctgagacacccagagtgtgccctgcaggtgctcgggctgagaaaaactgattttgatgaggaaacccaggcacttctgacggctgaggaagagagaaatcctaacctgaccatcacagacgactgtgacacaatcacaagggtagagatctgattgcgaggaacctgggctctgactcgaacacctgcaaaggacagggactgggaccgttacttacatgacactgcacccaggagatacaaatcattgacactctgagttgtgagatttctggcaccccattcatagatttgatatgatacacgtggtttttatgtgctctgtggccttggatgagtcactgaaaggccttcatggtctctcggtctcacaaggacctcttaacccctcaataaagtgttacatttctaaacattggaaa

SEQ ID NO: 409451 - DNA, 3382 bp, Homo sapiens
gcccccgcgaaacctcacgccccccccaactacggcagtacgagccggttaaatcggacgagattatcaatttatttattgttcctggtcactgtctctttgaggattggtatctctgctccagaaaagatggcagcctctttcttctctgattttggtcttatgtggtatctggaggagctcaaaaaggaggagttcaggaaatttaaagaacatctcaagcaaatgactttgcagcttgaactcaagcagattccctggactgaggtcaaaaaaagcatcccgggaagaacttgcaaacctcttgatcaagcactatgaagaacaacaagcttggaacataaccttaagaatctttcaaaagatggatagaaaggatctctgcatgaaggtcatgagggagagaacaggatacacaaagacctatcaagctcacgcaaagcagaaattcagccgcttatggtccagcaagtctgtcactgagattcacctatactttgaggaggaagtcaagcaagaagaatgtgaccatttggaccgcctttttgctcccaaggaaactgggaaacagccacgtacagtgattattcaaggaccacaaggaattggaaaaacgacactcctgatgaagctgatgatggcctggtcggacaacaagatctttcgggataggttcctgtacacgttctatttctgctgcagagaactgagggagttgccgccaacgagtttggctgacttgatttccagagagtggctgaccccgctgctcctataacagagatcgtgtctcaaccggagagactcttgttcgtcatcgacagcttcgaagagctgcagggcggcttgaacgaacccgattcggatctgtgtggtgacttgatggagaaacggccggtgcaggtgcttctgagcagtttgctgaggaagaagatgctcccggaggcctccctgctcatcgccatcaaacccgtgtgcccgaaggagctccgggatcaggtgacgatctcagaaatctaccagccccggggattcaacgagagtgataggttagtgtatttctgctgtttcttcaaagacccgaaaagagccatggaagccttcaatcttgtaagagaaagtgaacagctgttttccatatgccaaatcccgctcctctgctggatcctgtgtaccagtctgaagcaagagatgcagaaaggaaaagacctggccctgacctgccagagcactacctctgtgtactcctctttcgtctttaacctgttcacacctgagggtgccgagggcccgactccgcaaacccagcaccagctgaaggccctgtgctccctggctgcagagggtatgtggacagacacatttgagttttgtgaagacgacctccggagaaatggggttgttgacgctgacatccctgcgctgctgggcaccaagatacttctgaagtacggggagcgtgagagctcctacgtgttcctccacgtgtgtatccaggagttctgtgccgccttgttctatttgctcaagagccaccttgatcatcctcacccagctgtgagatgtgtacaggaattgctagttgccaattttgaaaaagcaaggagagcacattggatttttttggggtgttttctaactggccttttaaataaaaaggaacaagaaaaactggatgcgttttttggcttccaactgtcccaagagataaagcagcaaattcaccagtgcctgaagagcttaggggagcgtggcaatcctcagggacaggtggattccttggcgatattttactgtctctttgaaatgcaggatcctgcctttgtgaagcaggcagtgaacctcctccaagaagctaactttcatattattgacaacgtggacttggtggtttctgcctactgcttaaaatactgctccagcttgaggaaactctgtttttccgttcaaaatgtctttaagaaagaggatgaacacagctctacgtcggattacagcctcatctgttggcatcacatctgctctgtgctcaccaccagcgggcacctcagagagctccaggtgcaggacagcaccctcagcgagtcgacctttgtgacctggtgtaaccagctgaggcatcccagctgtcgccttcagaagcttggaataaataacgtttccttttctggccagagtgttctgctctttgaggtgctcttttatcagccagacttgaaatacctgagcttcaccctcacgaaactctctcgtgatgacatcaggtccctctgtgatgccttgaactacccagcaggcaacgtcaaagagctagcgctggtaaattgtcacctctcacccattgattgtgaagtccttgctggccttctaaccaacaacaagaagctgacgtatctgaatgtatcctgcaaccagttagacacaggcgtgccccttttgtgtgaagccctgtgcagcccagacacggtcctggtatacctgatgttggctttctgccacctcagcgagcagtgctgcgaatacatctctgaaatgcttctgcgtaacaagagcgtgcgctatctagacctcagtgccaatgtcctgaaggacgaaggactgaaaactctctgcgaggccttgaaacatccggactgctgcctggattcactgtgtttggtaaaatgttttatcactgctgctggctgtgaagacctcgcctctgctctcatcagcaatcaaaacctgaagattctgcaaattgggtgcaatgaaatcggagatgtgggtgtgcagctgttgtgtcgggctctgacgcatacggattgccgcttagagattcttgggttggaagaatgtgggttaacgagcacctgctgtaaggatctcgcgtctgttctcacctgcagtaagaccctgcagcagctcaacctgaccttgaacaccttggaccacacaggggtggttgtactctgtgaggccctgagacacccagagtgtgccctgcaggtgctcgggctgagaaaaactgattttgatgaggaaacccaggcacttctgacggctgaggaagagagaaatcctaacctgaccatcacagacgactgtgacacaatcacaagggtagagatctgattgcgaggaacctgggctctgactcgaacacctgcaaaggacagggactgggaccgttacttacatgacactgcacccaggagatacaaatcattgacactctgagttgtgagatttctggcaccccattcatagatttgatatgatacacgtggtttttatgtgctctgtggccttggatgagtcactgaaaggccttcatggtctctcggtctcacaaggacctcttaacccctcaataaagtgttacatttctaaacattggaaa

SEQ ID NO: 409452 - DNA, 3176 bp, Homo sapiens
agcggggaggagctggagaacatagacagggatgatttatttattgttcctggtcactgtctctttgaggattggtatctctgctccagaaaagatggcagcctctttcttctctgattttggtcttatgtggtatctggaggagctcaaaaaggaggagttcaggaaatttaaagaacatctcaagcaaatgactttgcagcttgaactcaagcagattccctggactgaggtcaaaaaaagcatcccgggaagaacttgcaaacctcttgatcaagcactatgaagaacaacaagcttggaacataaccttaagaatctttcaaaagatggatagaaaggatctctgcatgaaggtcatgagggagagaacaggatacacaaagacctatcaagctcacgcaaagcagaaattcagccgcttatggtccagcaagtctgtcactgagattcacctatactttgaggaggaagtcaagcaagaagaatgtgaccatttggaccgcctttttgctcccaaggaaactgggaaacagccacgtacagtgattattcaaggaccacaaggaattggaaaaacgacactcctgatgaagctgatgatggcctggtcggacaacaagatctttcgggataggttcctgtacacgttctatttctgctgcagagaactgagggagttgccgccaacgagtttggctgacttgatttccagagagtggctgaccccgctgctcctataacagagatcgtgtctcaaccggagagactcttgttcgtcatcgacagcttcgaagagctgcagggcggcttgaacgaacccgattcggatctgtgtggtgacttgatggagaaacggccggtgcaggtgcttctgagcagtttgctgaggaagaagatgctcccggaggcctccctgctcatcgccatcaaacccgtgtgcccgaaggagctccgggatcaggtgacgatctcagaaatctaccagccccggggattcaacgagagtgataggttagtgtatttctgctgtttcttcaaagacccgaaaagagccatggaagccttcaatcttgtaagagaaagtgaacagctgttttccatatgccaaatcccgctcctctgctggatcctgtgtaccagtctgaagcaagagatgcagaaaggaaaagacctggccctgacctgccagagcactacctctgtgtactcctctttcgtctttaacctgttcacacctgagggtgccgagggcccgactccgcaaacccagcaccagctgaaggccctgtgctccctggctgcagagggtatgtggacagacacatttgagttttgtgaagacgacctccggagaaatggggttgttgacgctgacatccctgcgctgctgggcaccaagatacttctgaagtacggggagcgtgagagctcctacgtgttcctccacgtgtgtatccaggagttctgtgccgccttgttctatttgctcaagagccaccttgatcatcctcacccagctgtgagatgtgtacaggaattgctagttgccaattttgaaaaagcaaggagagcacattggatttttttggggtgttttctaactggccttttaaataaaaaggaacaagaaaaactggatgcgttttttggcttccaactgtcccaagagataaagcagcaaattcaccagtgcctgaagagcttaggggagcgtggcaatcctcagggacaggtggattccttggcgatattttactgtctctttgaaatgcaggatcctgcctttgtgaagcaggcagtgaacctcctccaagaagctaactttcatattattgacaacgtggacttggtggtttctgcctactgcttaaaatactgctccagcttgaggaaactctgtttttccgttcaaaatgtctttaagaaagaggatgaacacagctctacgtcggattacagcctcatctgttggcatcacatctgctctgtgctcaccaccagcgggcacctcagagagctccaggtgcaggacagcaccctcagcgagtcgacctttgtgacctggtgtaaccagctgaggcatcccagctgtcgccttcagaagcttggaataaataacgtttccttttctggccagagtgttctgctctttgaggtgctcttttatcagccagacttgaaatacctgagcttcaccctcacgaaactctctcgtgatgacatcaggtccctctgtgatgccttgaactacccagcaggcaacgtcaaagagctagcgctggtaaattgtcacctctcacccattgattgtgaagtccttgctggccttctaaccaacaacaagaagctgacgtatctgaatgtatcctgcaaccagttagacacaggcgtgccccttttgtgtgaagccctgtgcagcccagacacggtcctggtatacctgatgttggctttctgccacctcagcgagcagtgctgcgaatacatctctgaaatgcttctgcgtaacaagagcgtgcgctatctagacctcagtgccaatgtcctgaaggacgaaggactgaaaactctctgcgaggccttgaaacatccggactgctgcctggattcactgtggttggaagaatgtgggttaacgagcacctgctgtaaggatctcgcgtctgttctcacctgcagtaagaccctgcagcagctcaacctgaccttgaacaccttggaccacacaggggtggttgtactctgtgaggccctgagacacccagagtgtgccctgcaggtgctcgggctgagaaaaactgattttgatgaggaaacccaggcacttctgacggctgaggaagagagaaatcctaacctgaccatcacagacgactgtgacacaatcacaagggtagagatctgattgcgaggaacctgggctctgactcgaacacctgcaaaggacagggactgggaccgttacttacatgacactgcacccaggagatacaaatcattgacactctgagttgtgagatttctggcaccccattcatagatttgatatgatacacgtggtttttatgtgctctgtggccttggatgagtcactgaaaggccttcatggtctctcggtctcacaaggacctcttaacccctcaataaagtgttacatttctaaacattggaaa

SEQ ID NO: 409453 - DNA, 647 bp, Homo sapiens
ctcctgtagacaatatacccgtgaatggtgtagtgagttctaatgaaactttatttacaagaggagactgaccaggtttggcctgggggccacagtgtgtagacctctggaaagatacatcctgagaagaaaaaaagaatatatgcaggaatgcttaactttgtgggttttctctcctcttgccctcactgactcaggatacacaaagacctatcaagctcacgcaaagcagaaattcagccgcttatggtccagcaagtctgtcactgagattcacctatactttgaggaggaagtcaagcaagaagaatgtgaccatttggaccgcctttttgctcccaaggaaactgggaaacagccacgtacagtgattattcaaggaccacaaggaattggaaaaacgacactcctgatgaagctgatgatggcctggtcggacaacaagatctttcgggataggttcctgtacacgttctatttctgctgcagagaactgagggagttgccgccaacgagtttggctgacttgatttccagagagtggctgaccccgctgctcctataacagagatcgtgtctcaaccggagagactcttgttcgtcatcgacagcttcgaagagctgcagggcggcttgaacgaacccga

SEQ ID NO: 409454 - DNA, 370 bp, Homo sapiens
gacaaggacaggaggctgggaaattctgggcagaagagagcgagtcctggtaaaggccccaccctcaagcctggaactacagcccaaagtgagaacatgcattcctgttttcctgctcaaatgttgccttttccaaaaccacccatggcccactctgccccctatcctgtgccatcccaggctttgccagcagagcaggcgaggagaagatgaaaagcagctggacattggaaactggtttggggctggagagaagaagtccaggccactggacttcaggaaaagatcatcttcctgctctatcccttttccagctccccttgcggctgagagccactttcataggcaataaagtccttcacattcacta

SEQ ID NO: 409455 - DNA, 405 bp, Homo sapiens
atatatctgcataaaactttcatgtgcaacttaatactattaagtgaacactcatggaatcagaaaccatgtcatgaaacacaaatggctctgcaaaaatccctgtttacctatgcttggttacaacttctctatgcttagaattcacacaacttctctatgcttagaattcaccagtctcctaatatttatgtaataatttccttgattttcttcatagttttatcaacaatatatgaattcctaaaatgtcattgaattttgcctgcttctgacctttacataaatatagccatatatgcatattttttcttttggttaatattatgtttgtaatcagtgtacaagattttatgtggctgtataatttttccttaaagaatacaactgtttctccattctact

SEQ ID NO: 409456 - DNA, 399 bp, Homo sapiens
ggacacatcatttaactcctttgagcctctctcctcttcccatttccccaaacagtcaagccctttctcgttggtgccctgggaacaatgccatttctagtacttaccatggcagatttcagtgattgtttgcctctctcattaggctcggagcaacttgaaggcggggcccatgtctgtctcattcaaagctatatcctctgctcctaaaatagtgtctaacccttgataggtgcccagttgatgtttgataaaggaatgtagatgtggatgaaatgtgaaccagaaaatgacttctgtgaacttcatgtatcatggctgctgctttctagatacatcatggtatttagtctccctcatgttattatctgccatttattaaatactgactacattcca

SEQ ID NO: 409457 - DNA, 483 bp, Homo sapiens
ggccactccatgtgccatctcaccatctcttcagcgttcctcatgctgcttctccccgtgccataggcgtttccattcttgcaggaaaatgacaatgcaagtgcaaattccactcacttttattggtatgacaataaattattctttctaaacacttagcaaaatgacgaaaagcagtattccttaaaatataggttttcattttctcaatatattttgaactgactaaagttctttacaaagacaagaggatcagaaggttccacttacccgtgttttagcgtttgtttggagataatgccaaccaaaaggtggaaaactaaaaccaccattgctttacataagaggtacacactgccccccaccccccaaaaaaaaacacagctttgaaagttgggagaaacactgcagtcttcattgtaaatataaagtgataatttaggtgaggaaggaacggtaaggagggaaggggaatgagtcctt

SEQ ID NO: 409458 - DNA, 212 bp, Homo sapiens
aatttggtttcattctttagagctgtgctgaacaatacgtagccacgagccacatgtgactactgagcacttgaaatgctacttttccatattgagatgtgctctaagtgtaaaatctacactgaagttcaaagacttaggaaaaatgaatgtcaaatatctcattactaattttgatattgcatgctagtttggatatattgagttaaata

SEQ ID NO: 409459 - DNA, 563 bp, Homo sapiens
ttttttttttgccttttcgaagttgcgttattgtgatatttgtaaagggcttcctattacatctgcaagagggtaaggaattaaactaccaggtctttaccacatcttattaaaaaaagaaagtcattcttacagacctaacgcttcttcccccaccaagcactatttttccatgagtgaaaagtgttgaattctgggattttgccagcaattaattgtattctgaaaatggggaaatgatgtgctttggggatgcacttatataatcacttacattcttggagtagccagaggacagtttgccatatacagaatggtgtgacagacacttaagcacctaagatatttagggtatgggctttgtgttagaggaaagttaacacagtggctggttttgtgaaggaggaaatctagctgtgggaggagagagatgacatgttgagttttaaaaggatggatacttaaaatgtcattgggaacattctacaacttgggagaggtcctttctaaagctgttacgattaggtgctaaaggaggtattgaaggcaaaggcatatccaaa

SEQ ID NO: 409460 - DNA, 651 bp, Homo sapiens
gaactttccaacgaaaaacttttgaaggatgggcttctggtagtggtaattgacctgaatacgtaacatttaaatcaaagacctcaaactaatttcctagatttatctagacatattcttttgctacatgaggaccagcgttccaccccctttggaggatttgacaacaaggtgccatcttggaagcagagaacagcacgcaccaaacaaccaaatctcttggcaccttgatcttgcacttcacagccccaaggactgaacctgtacccactcatgggcttaccacatatggagcaatatagatggagtgttctcctgaagggagctgcagcccaaccttcttctttattctagtcttcaagcctctcttttggctctgagcaaagctttgaagggctcattatgtgctataatggttccactatcaacctgctatgttgtgaaattcagcctgatcacctggagaaaacatgacctttctgagcaacttgtctctcaggagaaaagtctcctttattttgaaggagattggcctcagggcactgtggaagtgataactctatttctacttttgtcccttatttcaaggtgaagagaagtggaaaccttgcagtgagtcatgacaaaaatatataaagtaaaacattaaaa

SEQ ID NO: 409461 - DNA, 408 bp, Homo sapiens
ctcctcccccaaatagggagacatctgaatttgaagccagtaagtcagcaaaaaattaaactatctgttgaagaaacccccctgggagatgacttacaaatgagttcctgatgagactatttatactttcgtggaccaggaataaataatatggtaagctgcagaataaaactgtcataacataaggaaaactacatggaacttgaaaaggatataggaaataaaatatcagggcacctctatgggctaggaaagagatgagattttggcagagataagcattctaattaatgatgaagcaggaaaaattctccaagtcttacctcagcacaactgaaatattaccccaatttatcaatcttcctttgctcatacctgtgtttaccaagtaacttcctgtttcctaat

SEQ ID NO: 409462 - DNA, 444 bp, Homo sapiens
tgttgtgttagtccaggagagtgatactaatgatagtttttatagttctagataaaaggatgaatataaagacatggcagaaggaaaatatgtgagctttggcatctgatcagtggggatgatctagataaagcaatctaaaaatgacgaagatttcaaactgccatgatgggaagcaaaaaatgatttgattttagatagagaagctcggaggttcccgtgggaaaatggtagaaatctgggtttaccacttgaaaggagagatatgccagggtttagggaatcatcttcagagaagtcatcattgaaattgctgaagcagctgatatctctgataaattatatagtaagaaaagagatcagggttgacatgagaccttggaggattgtctggctttaaggggcagaaagaggaagaggtgctaacaaagaatgcagcaaaaa

SEQ ID NO: 409463 - DNA, 766 bp, Homo sapiens
gtgtgtagagccggaactccaagggagagctattcaaatgagaagtatccaaatcagttagatcaatggtttgcatttttctaatgtttttctaaatttattttatcttcccaaattatctcgaagtgaactccactaattatatcattcagagatgcctggctttaaacttttaaatctctttttgggtaagctgttccctcttttgctctctcgctctgtgtatgtgtttaaacagattctattttaaaaagcctaaaggtcaaagtttgtgactttacgagcttggacatttcatttgtgaggcaactgttatttcggcttggcaatgttcctatccctattttacatagacaagctgttaaactgttagtttagttagattttgaatgtgagagacatgttctccaagcttcagggctgtgggattgtggaatgctgtgtgtggcaaaagatgaaatgagttcaatgatagtgaaatgtcctttgatatgtaggaaaatgcatgctgtaagtatggaacataaatatgtattgaaatgcaagtgttatacaccttgctctgagattttatttctgaaaagaagagaaaatgtttactgtttactgagtttttagaactgcttaaaaatgatatggttagaaacagattatatgtttataaccagtttcaaatttgttgcctttctagtaaatcatgaacaatgaaaccattgttcattataacaagggaacatttactaggagaaataaatgactatacttt

SEQ ID NO: 409464 - DNA, 220 bp, Homo sapiens
cctggttcctaataggccacagattgatacatgtccacagcctgggcattggggacccctggtctaaatgcccaatttaaaggcatagagtgaaaagcttgataaaaagtcaagaaacaattgtctgttgtcttcaagagacacagctcatatgtaatggcagccacaggctcaaagtaaagggatggaaaaagatctaccatgcaaatggagaacaaaa

SEQ ID NO: 409465 - DNA, 529 bp, Homo sapiens
aagagggactggacggctgagctgggcatccgacacgtactgctgaccatcaagtgcctgctgatccaccctaaccccgagtctgcactcaacgaggaggcgggccgcctgctcttggagaactacgaggagtatgcggctcgggcccgtctgctcacagagatccacgggggcgccggcgggcccagcggcagggccgaagccggtcgggccctggccagtggcactgaagcttcctccaccgactctggggccccagggggcttgggaggggctgagggtcccatggccaagaagcatgctggcgagcgcgataagaagctggcggccaagaaaaagacggacaagaagcgggcgctacggcggctgtagtgggctctcttcctccttccaccgtgaccccaacctctcctgtcccctccctccaactctgtctctaagttatttaaattatggctggggtcggggagggtacagggggcactgggacctggatttgtttttttaaataaagttggaaaagcaaaaa

SEQ ID NO: 409466 - DNA, 470 bp, Homo sapiens
actggaaaggtaattaaaagggtccttttactcccctatgccacatgtcacagtctttaatgtttaatgagagttgctctttgagtctaggatttagtgaaagacatttggcttggacaagaactaagacaaatgctgctaacatgattctattcaatttagtgctttaaatactttcaggaatggtggattattttcaaagtaaggtttgtggaagctgggaattttgaagtattttacctggaaattatctatcggaatgcttctgtatgctttaaaaaatgtatactctacatatggacacaaagaaaggaacaagagacactggagcctacttgagggtagagggtgaggattgaaaaactacctattgggtactctgcttattacctggatgatgaaataatctgtgcactgaagccccgcaacacacattgacctatataataaatctgcacatgtgtccctga

SEQ ID NO: 409467 - DNA, 490 bp, Homo sapiens
gggctgtgagctcaggaaagactggtaggacccaggctggtatctgaaattatgcccacaggcatcccaaggcccacattatccagagcctttactttgtattacgaatttttatttattacttttagtagcagagaaatctaaggatgaggcagaaaagtggtagagatcaagtaggagcagactggcaaagtgtggaaccagggtcagagatgggcaaatggattagcataaaatgtgctcaggacaaaagtgggaagacaatctcctttcaatcttggtgcaaatgttaactgcagacatccagcctttgtgtcagtccacaccaaaacttaagagtccttaataagggcgatgtgaacaagggggctgggtgccatttatcaatgtgctgcaaatggctggaaaaggcacccctcaccaaatactggatataaagaggtgataaggataaagaatttgggtaataaggaacatctatattagaatg

SEQ ID NO: 409468 - DNA, 395 bp, Homo sapiens
ggccatcttccctccccattaaggagacagctgtctttgcgggcatccaggagactggacagagagaagacaaaaaataaacatcactgagtgccagccttcagggtccggctggattggaacagcaaaccctctctgcctgcctctggcctcttcttgcccccttggattgaagaattggctcagggtgctgcctctgacataggttgcaaagagtgattctgccccatgccaaaccctttcgcgatgattgtctcatgtgacgcttacaattctgggagccaggcaggacagatagagtgatcatctccattttatggatgaggaaattgatccccaagagttgaagtgacttgcccaaggacatggtgagtaaggagtctggacttcccgca

SEQ ID NO: 409469 - DNA, 675 bp, Homo sapiens
attttcgagaactaagaatgctgatgtttgtaaactctgtagcacagtgtctggaaaatggaagatattcaatacatctagctattattataacaggtaataatttactattgtaaataaataaattaaaatcctgaggtttggtagaggaggaataatgcataggagatagtcctccaatctgtgtaagggtttcatttatgttcttagttagggtctctcctctaaactcactgcccccaaaccccaaactatcaagtccttgatcacagggacactgccatccacttcccaccacttaagaggcagtgcctggctccacagtgacggtttttgcttagtggtgatatttgaagctgtaggagggcgtgaagttgccaaattaaagaatgaagagcttggccatgggaaacacctgtatttatttacagtggagagagagagagagagaggagagagcagttgatgccagaaaaactaggatagtcagtctctacagcccaggaatgaaggagagttagtgcagcaagctgcatcacagtctgggaggacaaggagactagaaaaaaggaccagatgggatgagaacattgcctctcagagagacagtttcaggcacgtgtggggcagaatctggattgtagagttaaaatgtaggtggtggtgaggaagtgg

SEQ ID NO: 409470 - DNA, 301 bp, Homo sapiens
atactgagatcaacataatcatgaattcttctcccactgtaaagtttgaggaggtaagaatctccttgacttagcaaatttgggcttataaatgctaggtccaactagactttactggcctcaatcccttagcattatcctgcaaaatactgatgtatactttttggataatacctttgatctactttcagccaccattgtagggaattgttagtatgagaggttgacattttggttaaataatcacttggaaactgtgactcagcattagtcactggctttctgctgggttacattctct

SEQ ID NO: 409471 - DNA, 248 bp, Homo sapiens
tggtgttgagcacagtgtggatgctcaataagcagcagatgctaccatcctgattattatcactattatttcctccaccaccagcagcagccagggtcacacagctcgtcagggccagaacctgcctacagaggcccacaagacattttaatcaaggtccggggaacaggccagggctggattaagccaagttttgtttgtggggagtcacatggtccaaagctatgcgtgtgcacagccaagtaaac

SEQ ID NO: 409472 - DNA, 688 bp, Homo sapiens
tttttcctgtaaagacggtgttcgccttgttgcccaggtgggtcttgaactcctaggctcaagcggatccgcccgcgtcggcctcccataagtgttaggattacaagcgttagctaccccgcccggccgtcataggagacttttaaacaaagcagtaacacgatctgattctggatttgtgttgaaagcagagcaggcagggtttacagataattgttatgtaaaaagagggaaaagagctaagaaagactctaaatttttggattaagcggccgacggatgacgtcatttactgaaatgggtaagaccgaaggagaattaggccgggagagtgaaatttcagatggccatggacaaagcagataagccagtatggtgctcataaagacatcaggggaggggacgctcacacacaggcatataggtacccaataacccttgaaaacagattactaaaacaatcatttgttccttcctaagcaaacaacttaaggaaaatgacggccagccggcaagcccggagccgcacgctcgcgtcagggccggcctttccataccaaggggcggcacgtgcggcaccgcctcccgcccaggccccaccccgcatgccgagcttggcccaacctctcctcccacttttcccaaggcggcaaaagccggaaagtgggagtagatgagcacatacccg

SEQ ID NO: 409473 - DNA, 465 bp, Homo sapiens
ttgggaaaagaaaaagatgtgggaaactaatggaaaaatagtagaaaaaattaaatataggagaaagagggaatttgaatcgatcctccaaaatgtaatggaattttttcatttaaaatgtgtttgatgacaaccccaatggagtgattgctccgtcaaaatttatcctcggttccagctttttaaaaaagtattagtatttaccaatacatttttgcatatttgcaaaatatcttctacaaaagatctaattttcatatgtaagaaattgctgcgaaattgcagctgggtttataacagcgtactccaagtatgcaacacagagacttgtctggcactctcaaaaatcacatgcgacttctccgaattggcctttttcggaacaaaggttttctccaagctgccgggcagacatagagatgcacctagtaggaaaccagtgacctccaggacttctgcccctgg

SEQ ID NO: 409474 - DNA, 371 bp, Homo sapiens
gcaaccagttaactttgtccgagtttgttctctgggtcacagtgccacctagaggacgtgtctgtccttggctggttttcctgctgacaaaaaaaatggacttgattcacttcgatgaatgtacaatgaggccgaggcgggcggatcatctgaggtcaggagttcaagaccaccctggccagcatggtgaaaccctgtctgtacaaaaatacaaaaaaaaaattagcccggcatgatggtgcatgcctgtaatccagctactcaggaggctgaggcaggagaatcacctgaaccggggaggtggaggttgcagtgagccgagattgcactacggcactccagcctgggcgacagagcaagactccatctca

SEQ ID NO: 409475 - DNA, 435 bp, Homo sapiens
cggcacgaggccggagcgcgggccaagctggagatggatgatgctgaccctgaggaaagaaactatgacaacatgctgaaaatgctgtcagatctgaataaggacttggaaaagctattagaagagatggagaaaatctcagtgcaggcgacctggatggcctatgacatggtggtgatgcgcaccaaccctacgctggccgagtccatgcgtcggctggaggatgccttcgtcaactgcaaggaggagatggagaagaactggcaagagctgctgcatgagaccaagcaaaggctgtaggccccactggcccaccacagctgccatgccaccctctgcccgtatgaagaggtcactgggggatggagctggcacccacatgaatagctgtatgcactgtacttgtttcttaataaacttatttttaagcacagc

SEQ ID NO: 409476 - DNA, 438 bp, Homo sapiens
taggaacagccatggaatgttctaatgcttgaaatacagaccatagcatgcacccatgtgcatgccatgtatttcttgttgagagtttcttgggaaccagtgaatttggctggaccatcagaaaattttgtgacttctccctctgcctgttgtccaaatggtggagagatggacccttgtggccagagaacacactggtgatttctcagacttcccttagcattttcagaggatctcagggtgctctttccctttctcctccttattggcttctttgttcccatggaatcactgatgaagcccagccctcctggagttaagtgtggtcaaatggtaaaaaatcccaggtgtttgttgctattcatctttgtcttggacattttggatgactctcccctcctgggactagagacaaactgaactgactttccagggcct

SEQ ID NO: 409477 - DNA, 518 bp, Homo sapiens
gttgtggagataagaagacttaaaatacaatttaaaaatcttagggaagtaaatgcctgacacaaaccagacattgtaaggattaaataagataataaatgtacaccacttagaatggtgccaagtatatagtaattatacaatatatgtacattatattgctataattcattaaaaggaagtcacttattgacttccaattttaacatggtaaaaacatttccatacccccaaacataaaggtaaacaagaaacagaaacacattcaataacccacaaagacatttataaccctaagctaaaatgcatgaggatggaaaacatttgaaagaaaggtaaatgactcagcagaatgggaaaaggtcaagttaaaatgcctgcagaggaaactgttcatgtgagcaagctaaatcacccccagagaaccccaaaaggctccaaattatagaagcacctgtaatcaccaaaggcagaggactggggagggcaagataaagaatgcaaacaggggaaatgtc

SEQ ID NO: 409478 - DNA, 601 bp, Homo sapiens
tgtcatcccagctgcagactggaagagacctggaagatgaagtcgttgtcagctactctcatcctcacgtcaggctgcttcgccaaaggatggatcggctggataatttaacctgtcacctgttgaagaaacaggcctttagaccccagctgcctgcctacgagtccctggttcaggagatccaccactacgtcaccagcatcgccaaggcccctgctgttcaggatctgctcacacggcttctgcaggccctccacatagatgggccacggtctgcccaagtagcccagagccttctaaaggaggaggcctcttggcagcagtcacaccaccagttccggaagcggctgtcagaggagtacaccttctatccagatgccgtgagcccactgcaggcatccatattgcagttacaacatggcatgaggctggtggctctgagctccacacctcactccacagcagtatggttggtgcagacaggctggggaccctggccacagccttgctggctttcccatcggtgggccccaccttcccgacttactatgctcatgcagacactttgtgctcggtgaagtctgaggaggttctacgaggc

SEQ ID NO: 409479 - DNA, 429 bp, Homo sapiens
tgccattcttcccagctactaaatttctccctctccctcagggtaactttgacctaaatcttcagtgcctgcttgcctcaaccaggccttatgcagcggttacacagtcacctccagagcccatgttttatttaggaggaaatattgcccatttctacccgggtaataacctgccagccctatggggccaaagtaaacaccaggcccatggattaaggccttcggcaaggattaggctgcagttcactaggtactccttctgagtaggcccttgtaagcagtgagaaataaactattatgaaaaacaagttcctaatgaaaagataccaggtcctgagatcgaaactgctagtaaacaatttatatctggagggcactctcaatgctttcaagactctgaattatccagcggtggagttgggctgcagt

SEQ ID NO: 409480 - DNA, 3944 bp, Homo sapiens
  misc_feature (2331)..(2331): n is a, c, g, or t
cttttttcccgggaactaagtgttaaacatttaccagcacaccactgcctagacttgttaggaaattcacaagtgagaagaaattctgtgattccaggagatgaaagagggaagtgtaatgagaatatcaacttgagtattttatccgttgctttctttaattgggtcatttcagagggtgggtagattttgttaagacagttgaaatatttaggtaggtagaggggtgagtgcagttgaagagtaaaggctgtttggggcagacaaaaggatgatagcactctttcaagtgctctgccaccagcagtaaaagtcgggagaaggacctagcaccaggacacgtgatctgtccggcgtaagcgagtgctgagtcaaaggcctgcaattcaggcccctgctctggggcacggtcagtttcagccaggcccaactctctttcccaggtccatggcgtggatggcacccagaatccagcaggggagtgctggtggatacacctgggagggcctggtggaggatcatttgcgtgcagaaataaggaaatagacatatttgagctggaagaaaatcttacatgtctgatccaattctctcatttcacagataaggaaaaggggccccaaagagtgaagaggggatgtcctgaggtcatgaggctggcttacagcaaggatctggaccagacagcagggtgggaccctcagctgtccccatacttgctgcttgatattggataggttatttaggctctatgtgttttctcataaacacatagaggttaggtaaaaatggtggtgtgagaatgaactaatacatgtaaagagcttgcatgtagtaagctctcaataaatattaataatactgggcacagtggctcacacctgtaatcccagcactttgagaggccaaggcgggtggatcccttgaggtcaggagtttgagaacgccctgacaaacatggtgaaaccccatctctactaaaaatacaaaaaattagccaggcatggtggtgggtgcctgtaatcccagctgctcgggaggctgaggcaagagaatcacttgaacctgagaggtggaggttgctttgagcccagatcatgccactgcactccagcctaggtgacagaaccagacttcatctcaaaaaaaaaaattaataatatagagcccttgtgttgacactattctcttttacagccagaaagagagaaagattacagaaaataaaaatatattaatatattaaaggcataatactgtgaattaatactgattaattcaatatactattatatcaaaaaccaggatactaataataaataatatatggaaaaccaccatacacattggtaaaacattaacattttcaaatctccaatccaagaattttccccaaatccagattgtgcaggtattttagtgaatgattcaccctacagaattacttattacatttttctttaaacttcaatggatttgtagctgaatgagggatcaggtaatcaccagacatcttggaagggcacatgatccctcaggccttttcttggagaatgtttaaagaaacctcttccttcccattagggaggccgaccatgagtccctttgtgttgacagtgaaggtgtctggggctacacctctttcacatgctctgccaccagcagtaaaagtcagaaggccctggcacagggcacacctgatctgttcggcataagtgctgagtcaaaagcctgcaattaaggccagtggctgggaggaggcctggtcccagcctctccttgatttgcctcaccccacccaaacacaggtcatgttcatcatctgctagccagcaaggaagatgtgtggggtacaggttacagggactgagcccggagcctgactttctgggctctaccactcgttgtcttcatttccaaaggcaaagcacttgacctctctgagcctccatttctcatccataaaatggggatgatgataaaagtgactgcttcataggattgttgagaggatcaactcaagtaatatgtgaaaagtggcacataataagtactctgtttcatgtttctaattaattttattttttttaggttttttactgtggtaaaatatatgtaacataaaatttactattttactatttttaagtgtaagtggcgttgaatacattgtggcattgaatacattcacactgtcatgcaaccatcaacaccatccacctccagccttcttcgtcatcccaaactgaaactctactcattaaacaataactcctcattcccgcttccccttagcctctgggaaccattgttctttgcccatttttaaanggaggttgttgctgggttgtgggagttctttattctggatattaatcctttaccaaatagataatttgattttttttcctattctgtgtgttgccttgactatgtcctttcatgcacaaaatattttaattttgatgaagtctagtttacctattttttcttgtattgcctgtgttttggtgttaattccaagaaatcattgcaaaattcaatgtcatgaaattttgcccctttcttctaagagttttatagttttagctcttatgtttaggtcattgatgactttgagttaatttttgtttatgatgtaaggtaatggtacaacttcatccttttgcatgtggatatccagttttcccagcactatttattgaaaaaaagactgtcttttctccattgagtggtcttggcatcctagttgaaaatcatttgaccctatatattaaggtttatttctgatttcattggtctatgagtctgtctttatgccaggaccactctgttttgattacggtagctttatagcaagttttgaaatcaggaagtgtgagaccttcaactttgttcttcatttttctggatgttttggctattctgggccccttgagatttgagaaagagttccctctactggcagatctaagacagtctgttgactcaggtacctgataatttttgaagatgcatttaagaagttaaactattgagaataaaaaaatcttagctaggctttattttatttttctgatcggttagagactcttggagacttctctttcttctcaatcaatttgactgaggtataattaaaaaaaaataaaacatactgatatggcttggctgtgtccccacccaaaatctcatcttgaattataatccccataatcatcataatccccacgtgtcaagagagagaccaggtggaagtaattgaatcatgggggcagtttccccgatgttgttctcgtgatagtgagtgagttctcacgagatctgatggtttatgtgtttactagttcttcctgcgttaattttccttcctgccaccatgtgaagaaggggtcttgcttccccttcgctttcttacacgattgaaagtttcctgaggcctccccagtcctgcggaactgtgagtcaattaaacctctttcctttataaattacccagtctcggacagttctttatagcagtatgaaaacagactaatgcatatacagacacatacacctaagtaaccatcactatcgcaatcaggatatcaaatatttctatcaacccaaaaagttcctttgtgatttttgtagtcagtccccactcttgattccccatgccccaggcaaccacaggtctgctccccgtcatatagacgagtgttgtctgtgttcagatttcaaatacatggaattgcacaatatatgctcctatgtctaaatttttttcacttagcataatgttttcgaaattcattcatgttgtatttatcagtagtttttagcattgtatcgcactgtggtatttcattgtatatatcatcatttgtttatccattgaccagttgaacatttgggctatttccagtttggggctgttttgaataaaggtgccaagttca

SEQ ID NO: 409481 - DNA, 1119 bp, Homo sapiens
  misc_feature (29)..(29): n is a, c, g, or t
  misc_feature (33)..(33): n is a, c, g, or t
  misc_feature (41)..(41): n is a, c, g, or t
  misc_feature (43)..(43): n is a, c, g, or t
  misc_feature (50)..(50): n is a, c, g, or t
ggaaaggttaattcactgaacagctaacntatnattggggngncgacccnttggggcagtgttttaaaccgcgtgcgcggatactcgtaaacatacattatcgagtatgataagcaacggcgaccgaatcgtcagaatggcagatctaagacagtctgttgactcaggtacctgataatttttgaagatgcatttaagaagttaaactattgagaataaaaaaatcttagctaggctttattttatttttctgatcggttagagactcttggagacttctctttcttctcaatcaatttgactgaggtataattaaaaaaaaataaaacatactgatatggcttggctgtgtccccacccaaaatctcatcttgaattataatccccataatcatcataatccccacgtgtcaagagagagaccaggtggaagtaattgaatcatgggggcagtttccccgatgttgttctcgtgatagtgagtgagttctcacgagatctgatggtttatgtgtttactagttcttcctgcgttaattttccttcctgccaccatgtgaagaaggggtcttgcttccccttcgctttcttacacgattgaaagtttcctgaggcctccccagtcctgcggaactgtgagtcaattaaacctctttcctttataaattacccagtctcggacagttctttatagcagtatgaaaacagactaatgcatatacagacacatacacctaagtaaccatcactatcgcaatcaggatatcaaatatttctatcaacccaaaaagttcctttgtgatttttgtagtcagtccccactcttgattccccatgccccaggcaaccacaggtctgctccccgtcatatagacgagtgttgtctgtgttcagatttcaaatacatggaattgcacaatatatgctcctatgtctaaatttttttcacttagcataatgttttcgaaattcattcatgttgtatttatcagtagtttttagcattgtatcgcactgtggtatttcattgtatatatcatcatttgtttatccattgaccagttgaacatttgggctatttccagtttggggctgttttgaataaaggtgccaagttca

SEQ ID NO: 409482 - DNA, 994 bp, Homo sapiens
  misc_feature (147)..(147): n is a, c, g, or t
tggacggggtcccctccctggagctggggttgccaaggaaacagagcgagatgcagatgaaggccggtgtgacctgtgaggtgtgcatgaacgtggtgcagaagctggaccactggctcatgtccaacagctctgagctcatgatcnacccatgccctggagcgcgtgtgctcggtaatgcctgcctctatcacgaaggagtgcatcatcttggtggacacctacagcccctccttggtgcagcttgtggccaaaatcaccccagagaaggtgtgcaagttcatccgtctgtgtggcaaccggaggcgggcccgggcagtccatgatgcctatgccatcgtgccgtccccagagtgggacgcggagaaccagggcagcttctgcaatgggtgcaagaggctgctcacggtgtcctcccacaacctggagagcaagagcaccaagcgagacatcctggtggccttcaagggtggctgcagcatcctgccgctgccctatatgatccagtgcaagcacttcgtcacccagtacgagcccgtgctcattgagagtctcaaggacatgatggaccccgtggctgtgtgcaagaaggtgggggcctgccacggtcccaggaccccactgctgggcaccgaccagtgtgccctgggcccaagcttctggtgcaggagccaggaggccgccaagctgtgcaacgctgtgcaacactgccagaagcatgtatggaaagagatgcacctccacgctggggaacacgcgtgaccgtggctgccagagacccagagcctgctagcgaggcccatgagaatggggatgatcatacctgcctcacaagaatgttgagacaattcacagagacgttctggagcccctttcccccgagaccggcattcatgagtctgctgggaccagaaaacccatctcaggggcccagcggggcacccaggagagtctggcggtgcaagcgctgtataaaccacaagcgttctccaaa

SEQ ID NO: 409483 - DNA, 1819 bp, Homo sapiens
  misc_feature (147)..(147): n is a, c, g, or t
tggacggggtcccctccctggagctggggttgccaaggaaacagagcgagatgcagatgaaggccggtgtgacctgtgaggtgtgcatgaacgtggtgcagaagctggaccactggctcatgtccaacagctctgagctcatgatcnacccatgccctggagcgcgtgtgctcggtaatgcctgcctctatcacgaaggagtgcatcatcttggtggacacctacagcccctccttggtgcagcttgtggccaaaatcaccccagagaaggtgtgcaagttcatccgtctgtgtggcaaccggaggcgggcccgggcagtccatgatgcctatgccatcgtgccgtccccagagtgggacgcggagaaccagggcagcttctgcaatgggtgcaagaggctgctcacggtgtcctcccacaacctggagagcaagagcaccaagcgagacatcctggtggccttcaagggtggctgcagcatcctgccgctgccctatatgatccagtgcaagcacttcgtcacccagtacgagcccgtgctcattgagagtctcaaggacatgatggaccccgtggctgtgtgcaagaaggtgggggcctgccacggtcccaggaccccactgctgggcaccgaccagtgtgccctgggcccaagcttctggtgcaggagccaggaggccgccaagctgtgcaacgctgtgcaacactgccagaagcatgtatggaaagagatgcacctccacgctggggaacacgcgtgaccgtggctgccagagacccagagcctgctagcgaggcccatgaggtgggtgctttccccatccccatttcacaaatgaaaaactgaagctctgaggagggaggctgggaaggagcagagctgaagttcaaaaccaagtattcctgatcccgaaagcctctctcttaacaacggtgccgcacagctttgcccttgaaagcatctctactggaccggaacacactcatgtgccccgctccctgacccagccaaggctgccctctcatctccaaggctgagatgttgccggtggtcccatgagagcctgcccatgggctcaggtgcccctttaccttctgctggatggacatctggctgtgagccaggctggggtcatggccggggtgagcggaggcaggggtggacggaggcttcgagggcccatcactagtaggttcattacctcttgccaacagccggggggtgggagtctgggtctcgctcaggccagagcttctcaacctggagtccctgggggtggctgccaaaggtgtgtatgacaagcacgtatccctggacatttccggggagaggtctggggctttggtcacattctccaagggctgctgggcttcggagcagtccccccccatgtctcagccactacagggtccctctctctccttgcaccccagaccctccgctgccctggtaatgagcagaaggaaagtcttggggtgtgctcaaagtcaggagagcaaaatatgccaggcaaaagctcccgggaaaagccggaggagtctggggtggccaccgggatgtggagcagcgagggcaaagacggtgaacacagccctccagctgtctgagcctcagttttctaatctgtagaatggggatgatcatacctgcctcacaagaatgttgagacaattcacagagacgttctggagcccctttcccccgagaccggcattcatgagtctgctgggaccagaaaacccatctcaggggcccagcggggcacccaggagagtctggcggtgcaagcgctgtataaaccacaagcgttctccaaa

SEQ ID NO: 409484 - DNA, 551 bp, Homo sapiens
ttatacaggtgttagaatgtgaggaatacacaacctatgagatggtgctatgtacatatttgtttattttgttgaatagctggccagtacaggagagttccattaaactgaaagtagctcatttaaagcaacatacatcactaaagcttaggcctccattgcacagaatggcgattgtagttaataattcttatatatttcaaaattggtaaaataataaattttaaatgttcccatcacaaaaaataagtatatgaggtgatggatatgctacttagtttgagttcatcattccacagtggagatatatatcaaagtatcatattgtaccctaaatgtatacaattattatttgtcaattaaaaactgtatttaaaattataaaaaataaataaataataagcccaacatatagtcacagagatggctagtatcaacaaatgatatactttttcccaccacaactataaataacaattcaagtccattttatttagtttttgcttttggtcttttgcatttcaagttaataaaatataaactatttggca

SEQ ID NO: 409485 - DNA, 343 bp, Homo sapiens
ctcatgctttccaagctccttcaaatgcaagtaataataatcaaaggaaaacgaagccccgtatgtttaggaacagtgccatgctttgctgactggcgaagctctgtatctttaggggcggtgtcatgctttgctgactgtcaaagccctgtatctttagggacagtgccatgctttgctgaccatggtgctggctgtctaccgctggtccagacccacctccatcctcgccacgctctgtgttgcaggaggctgactgcatgggccagaccccagcggcttctctgctctttggcttctggtcaggttggcagccagggagagagagtagaagggggcagga

SEQ ID NO: 409486 - DNA, 871 bp, Homo sapiens
aaaatgaagcatttaaatttattcattaatcattcatctccagctcattgaaaactttaaacttccacaaaattaagatagaacattgaggagtgattgagagagacagctctcagtgagctaaaaaagactggtaaacacaaaaacaaaagtacattagacagagtgtctcaaagtgtcacatgggcatagatattgttacagtttacacaaactttaagtactgaatggcaaagcctttatttgggccaagacgatagggaaatctggggaagcgaacagtcactgtcaacaccgccagtaattattctctcttccaattaatggtgacatagattaattatcagatgaggcaaagccaattgcaatcagtcacccagagctgaaattagatcgttcctgacagcagcatgaaagtcacctgtttcattgttatggatttgctgtgagtaaaagagtggcaaagcatgctgggaggtgagtgagtttttcgttcatggaagtgtgaaatggcaaacaggtgaatgtccaattacactgttatctgaactgtgtgacttttcttgtcttttatttcagcatccaagatacattggttgtttgcttaaccatcgttttcgcatgtgccatctgtcaaagtctggaagaaacctaagatgtgttgcattaaatttgaagattcctcctgcacagctaatattttctgaatactctcctgagagtctgtctggaagttggccagcctcatctggctgaagaggaccaccagtttgaagtgctcctgccacagtgtgtgcatccttctctgcagctgacagagcatgaggaaggggaaaatctgatcctgggttgttattttgcagagcaagtt

SEQ ID NO: 409487 - DNA, 494 bp, Homo sapiens
agttcagaggctattgaaatgctccagccctatattaggtattgagggttcagggatgaactaagctgatctggttcctgctctctaggctgtagaagatggcaagtgctgtggacttcaaagaaaagatttctgaagtgtcatgttatgacaattgtgcatccaagatacattggttgtttgcttaaccatcgttttcgcatgtgccatctgtcaaagtctggaagaaacctaagatgtgttgcattaaatttgaagattcctcctgttcagaagcaagaaacaaacaaaatcaataagtactcattaattaagaaaacagagcattattatgaaatcatacacatggaaaacttatcaacaataaaaataacgacaaacaccattacattctcctttataggagacaaacagtataaaccccaaggaagagtgatttctctatgatctagtaagttctaaaaattaaagtccaactaactttaaggtagaga

SEQ ID NO: 409488 - DNA, 230 bp, Homo sapiens
gcagaggttgcagtgaactgagatcacaccactgcactacagcctggcaacagagcaagactccatctcaaaaaaagtgactgctatagattgaacaaagcaaatacaaaagtagaggagctaaacttaaaagcatatgtaaacaagaatgaatgtaagctagaataaagatcaagtctctcacacataccaagtttaggctggggcttgtaacccatttctgaccacct

SEQ ID NO: 409489 - DNA, 501 bp, Homo sapiens
gagagccaaacccagcaaacatcatgtcagagaaaaagaactgtaagaactcgtctacaaataacaaccagactcaagacccttctagaaatgagctacaggtccctaggagcttcgtggaccgcgttgtgcaagatgaacgagacgtccaaagccagagttcctccacaataaataccctccttaccttgctcgattgccttgctgactacatcatggagcgggtaggcttggaggccagcaacaatggcagtatgcgcaacacttcacaagatagggagagagaagtggacaacaaccgtgagccccacagcgctgagagtgatgtgactcgctttttgtttgatgagatgcccaaatccaggaagaatgactgaagactgggtcccagagccttgaagggaacctcacaggcttagccagggcaaaaatgtgtcacagctgaggaatatctgctgttgtcatcaacaagtgctattaaaggatgtaaatccatgagta

SEQ ID NO: 409490 - DNA, 566 bp, Homo sapiens
gctgaaaatggtgataatgaaaagatggctgccctggaggccaaaatctgtcatcaaattgagtattatcttggagacctcaggttgccacggacaagtttttaaaggaaaagataaaactggatgaaggctgggtatctttggagataatgataaaattcaacaggttgaaccgtctaacaacagactttaacgtaattgtggaagcattgagcaaatccaaggcagaagtcatggaaatcagtgaagataaaactaaaatcagaaggtctccaagcaaatccctacctgaagtgactgatgagtattaaaatgatgtaaaaaacagatctgtttatattaaaggcttccctactgatgcaactcttgatgcatgaaagaatggttagaagataaaggtcaagtactaaatattcagatgagaagaatattgcataaagcatttaagggatcaatttttgttgtgtttggtagcattgaatctgctaagaagtttgtagagacccctggccagaagtacaaagacacagacctgctaatacttttcaagaacgattgctttgcca

SEQ ID NO: 409491 - DNA, 432 bp, Homo sapiens
aggaattagaaactccacatctaacttagttgccttgaggaagcagctatggcaaccagaaagttcccaggatcctgtctcctaaaggtagctgaagcctaatcgactgcagggggcctttctgtgggaagataacagcagcgcagaggcaaagaaaagggaaggcacggcggtggcccttgtggggcgttctgggagaagagattaattcaccaagtccctgcgcggcacagcaggattacggggcttttacaaaactgaagacaaaatgaagagcagcagcttctagaataaggccaagcaccaaattgaagactcggtggagactatcacttcagatgatagcatgtctccaagcaagacaaatgaaagggaaaatgaagcaaagggagagtggggagctacaataaaaaccgagctattctttgccaa

SEQ ID NO: 409492 - DNA, 670 bp, Homo sapiens
gaagagagagccccgaggcttcctcagatatgtcctgtccttcctgtcccttcaccctcccaactggggtcaggacgtcccatgcccatcccctgctcctgctggggcccaggcaggtcagatggaaggtgcaaggtactgcagcactgagtgtggaacccctgccccgaagcatgtactactctcctgggcagccccacccactttagggtacaccctcattccatatttcttatacgccaggggtcctcaacccttgggccaccaactgatagcagtccatggcctgttaggaactggatagcacagcaggaggagattggtgggcgagcaagcgaagcttcatctgtatttacagctgctccccacggctcagggtaccacctgagctctgcctcctgtcagatcagcagaggcattagattcccataggcacgtgaaccctattgtgaattgtatgggagggatctaagttgaatgctccttatgagaatctaatgcctgatgatctgtcattgtctcccatcacccccaaatgggaccctctcgttgcaggaaaacaagctcagggctcccacagtttctacattatggtgagttgtataattatttcattatatattacaatgtaataataatagaaataaagtacacaataaatgtaatatgc

SEQ ID NO: 409493 - DNA, 311 bp, Homo sapiens
atctccaccaccctttatcttaacccatacattcctttctactgacaatagctttttcaaccaattgccaatcagaatatatttaaatctacctatgatctggaagtgccctgctccctttgagttgtcccacccttccagatcaaaccaatgcaaaccttacatgtattgattgatgtctcgtgtctccctaacatgcataaaagcaaactgtaccccaaccatcttgagcatgtgtctgcaggacctcctgaggctgtgtcacgggtgtgtccttacccttggcaaaataaagttaccaaattgattga

SEQ ID NO: 409494 - DNA, 681 bp, Homo sapiens
gtctcaaaaaaaaaaaaaaaggctagtttattagtcaacagttttccattcttgctctgagacagactactggagacagcagtacagaaatattagcatgccttatgtttgattaactaaggcaagcataactcaaagctgcaaagaatcccttcccaaatttgagaatggtttaaaatcttccttatcacttggctactgcaccaaatacaaatgtatcaacttagaaaaatcctatacagatcagagttgaatgacaactaccaatttcgttgggaaaaatatccctgcattcaaaatgctaaaaaccacacatgaggttaacaactgtttatagtgctactcaaagggctggtcctggtaagatgtggataaatcaacgcaccactttcttcactgagagttttgctaccaggaaaaaaaaaagtcaccatctgaattaacagtgtggttagtggtgtaatttctttatctcattccacactggtaattgacagttcacagactggcagccagtgcaggccccacctgaggacaacagtggtacagaaacaaatgttttaaaaaatgcgctaaagctcatctaataccaagaaagcagtccatttctctggatatctctactagaaaaaagttctctctttacgttagaaagacttaatcaacctgctctacattcag

SEQ ID NO: 409495 - DNA, 608 bp, Homo sapiens
aggtcatagaatcttccctctcctccctctgtctcctcattgccacagccaaccggctcccacatatctgcacacacttaaatacaaaggccgggaagggtcagaccaccatccgggtactctaagtcctccctcccccttctccttcacccccaagtgtctcccacgactgccctccccgacctctagctgaccatggcatcagaggcagaaaaaacattccatcggtttgctgcgtttggagaatcatcaagcagtggcactgaaatgaacaacaagaacttctccaagctgtgcaaagactgtggcatcatggatggcaagacagtcacctccacggacgtggacatcgtgttcagcaaagtcaaggccaagaacgcccgaaccatcacgtttcaacagttcaaagaggcagtgaaggaactgggccagaagcgcttcaaagggaagagtccagatgaagtcctggagaacatttatggactcatggagggcaaagacccagccaccactggcgctacttggatgctctcgtctcgcctggacagcacacacactccaactccagtaagactcaactcaaatatatctcttatacaacttcaaga

SEQ ID NO: 409496 - DNA, 768 bp, Homo sapiens
ggcaactttccaacccaacaaacctttttaaaaagtttaccaaaaaagggcccgggaaggggtcagaccaccatccgggtactctaagtcctccctcccccttctccttcacccccaagtgtctcccacgactgccctccccgacctctagctgaccatggcatcagaggcagaaaaaacattccatcggtttgctgcgtttggagaatcatcaagcagtggcactgaaatgaacaacaagaacttctccaagctgtgcaaagactgtggcatcatggatggcaagacagtcacctccacggacgtggacatcgtgttcagcaaagtcaaggccaagaacgcccgaaccatcacgtttcaacagttcaaagaggcagtgaaggaactgggccagaagcgcttcaaagggaagagtccagatgaagtcctggagaacatttatggactcatggagggcaaagacccagccaccactggcgctactaaagcaacaacagtgggtgcagtggaccgtttgacagacaccagcaagtacaccggcacccacaaggagcgctttgatgagagtggcaagggcaagggcattgcgggacgggaagagatgactgacaacacaggctatgtgagtggttacaagggttctggcacctacgataagaagaccaagtagagaggagcttcatctcagcctgctagccccctgaccctgcatgtttaacaccagggagcttggaaaacaataaacatctgtgtgtgcagcagccaaaa

SEQ ID NO: 409497 - DNA, 1063 bp, Homo sapiens
aggtcatagaatcttccctctcctccctctgtctcctcattgccacagccaaccggctcccacatatctgcacacacttaaatacaaaggccgggaagggtcagaccaccatccgggtactctaagtcctccctcccccttctccttcacccccaagtgtctcccacgactgccctccccgacctctagctgaccatggcatcagaggcagaaaaaacattccatcggtttgctgcgtttggagaatcatcaagcagtggcactgaaatgaacaacaagaacttctccaagctgtgcaaagactgtggcatcatggatggcaagacagtcacctccacggacgtggacatcgtgttcagcaaagtcaagtgaggagccaaaaatatggaggtgggggtgagaagaacctgcgaggtagttggccacggaagggttcacgtggtggaacatttgcagtgggcctaccaagcaccacagggtacctggcgctgtgctatcctttgtcttcgagacactcactgattgataggacaaaagaggccaaatctgagtgaggcaagagttggaccttggaaggtaatgcattcatgctccaaagtttctggatttctgtctaactgaccagggccaagaacgcccgaaccatcacgtttcaacagttcaaagaggcagtgaaggaactgggccagaagcgcttcaaagggaagagtccagatgaagtcctggagaacatttatggactcatggagggcaaagacccagccaccactggcgctactaaagcaacaacagtgggtgcagtggaccgtttgacagacaccagcaagtacaccggcacccacaaggagcgctttgatgagagtggcaagggcaagggcattgcgggacgggaagagatgactgacaacacaggctatgtgagtggttacaagggttctggcacctacgataagaagaccaagtagagaggagcttcatctcagcctgctagccccctgaccctgcatgtttaacaccagggagcttggaaaacaataaacatctgtgtgtgcagcagccaaaa

SEQ ID NO: 409498 - DNA, 906 bp, Homo sapiens
aggtcatagaatcttccctctcctccctctgtctcctcattgccacagccaaccggctcccacatatctgcacacacttaaatacaaaggccgggaagggtcagaccaccatccgggtactctaagtcctccctcccccttctccttcacccccaagtgtctcccacgactgccctccccgacctctagctgaccatggcatcagaggcagaaaaaacattccatcggtttgctgcgtttggagaatcatcaagcagtggcactgaaatgaacaacaagaacttctccaagctgtgcaaagactgtggcatcatggatggcaagacagtcacctccacggacgtggacatcgtgttcagcaaagtcaaggccaagaacgcccgaaccatcacgtttcaacagttcaaagaggcagtgaaggaactgggccagaagcgcttcaaagggaagagtccagatgaagtcctggagaacatttatggactcatggagggcaaagacccagccaccactggcgctacttttccctggttacctatgcaagaaacctgaaagtgatcctagacccctccacctccccaatcccagctacggggaggcggtcctgcatggtggttaagatcaaggcttttgagtgaaacagaccaggaattgaatcctgcctctgcagcttacaaactgcacaccatctatctgtttacgaaaccactgaaagcttccttgtttcatctgttcatgaggatagtattttttactcacggcagtatgaggatccattaagatgtatatcaagagtttttagaccagtgcccggcacatgtggatgctctcgtctcgcctggacagcacacacactccaactccagtaagactcaactcaaatatatctcttatacaacttcaaga

SEQ ID NO: 409499 - DNA, 865 bp, Homo sapiens
aggtcatagaatcttccctctcctccctctgtctcctcattgccacagccaaccggctcccacatatctgcacacacttaaatacaaaggccgggaagggtcagaccaccatccgggtactctaagtcctccctcccccttctccttcacccccaagtgtctcccacgactgccctccccgacctctagctgaccatggcatcagaggcagaaaaaacattccatcggtttgctgcgtttggagaatcatcaagcagtggcactgaaatgaacaacaagaacttctccaagctgtgcaaagactgtggcatcatggatggcaagacagtcacctccacggacgtggacatcgtgttcagcaaagtcaagtgaggagccaaaaatatggaggtgggggtgagaagaacctgcgaggtagttggccacggaagggttcacgtggtggaacatttgcagtgggcctaccaagcaccacagggtacctggcgctgtgctatcctttgtcttcgagacactcactgattgataggacaaaagaggccaaatctgagtgaggcaagagttggaccttggaaggtaatgcattcatgctccaaagtttctggatttctgtctaactgaccagggccaagaacgcccgaaccatcacgtttcaacagttcaaagaggcagtgaaggaactgggccagaagcgcttcaaagggaagagtccagatgaagtcctggagaacatttatggactcatggagggcaaagacccagccaccactggcgctacttggatgctctcgtctcgcctggacagcacacacactccaactccagtaagactcaactcaaatatatctcttatacaacttcaaga

SEQ ID NO: 409500 - DNA, 631 bp, Homo sapiens
ggcaactttccaacccaacaaacctttttaaaaagtttaccaaaaaagggcccgggaaggggtcagaccaccatccgggtactctaagtcctccctcccccttctccttcacccccaagtgtctcccacgactgccctccccgacctctagctgaccatggcatcagaggcagaaaaaacattccatcggtttgctgcgtttggagaatcatcaagcagtggcactgaaatgaacaacaagaacttctccaagctgtgcaaagactgtggcatcatggatggcaagacagtcacctccacggacgtggacatcgtgttcagcaaagtcaaggccaagaacgcccgaaccatcacgtttcaacagttcaaagaggcagtgaaggaactgggccagaagcgcttcaaagggaagagtccagatgaagtcctggagaacatttatggactcatggagggcaaagacccagccaccactggcgctactctgcttccaagaacaggatggaagaatatatttggagtaaagagatgaaccagatgtggagtggatgctctcgtctcgcctggacagcacacacactccaactccagtaagactcaactcaaatatatctcttatacaacttcaaga

SEQ ID NO: 409501 - DNA, 434 bp, Homo sapiens
tatctgggccctaagaaagcagcaccccatgccagtggcagagcaagagctccaagcacttgttctaagtatctcgggccatctttggggaagggatatgacagcgtaaggaaaggaagagagctcaaatccatccctggcttgcagaaagcaacaacagtgggtgcagtggaccgtttgacagacaccagcaagtacaccggcacccacaaggagcgctttgatgagagtggcaagggcaagggcattgcgggacgggaagagatgactgacaacacaggctatgtgagtggttacaagggttctggcacctacgataagaagaccaagtagagaggagcttcatctcagcctgctagccccctgaccctgcatgtttaacaccagggagcttggaaaacaataaacatctgtgtgtgcagcagccaaaatct

SEQ ID NO: 409502 - DNA, 641 bp, Homo sapiens
tcctcattgccacagccaaccggctcccacatatctgcacacacttaaatacaaaggccgggaagggtcagaccaccatccgggtactctaaggtacataaaagaggtaggggaaagagaggatcattcagtaggtaggatccacactggtatctccaatgctgggaatgggagactcatgctgtagttgcgtaggtgcaatgggagctgggagggagaaaggagagagcaacagggaagaggggagctgttcctgttgctgactgattttaccataacactcatcctcattactccacagtcctccctcccccttctccttcacccccaagtgtctcccacgactgccctccccgacctctagctgaccatggcatcagaggcagaaaaaacattccatcggtttgctgcgtttggagaatcatcaagcagtggcactgaaatgaacaacaagaacttctccaagctgtgcaaagactgtggcatcatggatggcaagacagtcacctccacggacgtggacatcgtgttcagcaaagtcaagtgaggagccaaaaatatggaggtgggggtgagaagaacctgcgaggtagttggccacggaagggttcacgtggtggaacatttgcagtgggcctacc

SEQ ID NO: 409503 - DNA, 1180 bp, Homo sapiens
atcctctggacaaaccagccagcctctccagagcaggcgtgtgatctctgtacccccgcagtggtcagaatatggagaacttctcactcctcagcatctctggacctccaatctcttcctccgccctgagtgcttttcccgacattatgttctctcgtgccaccagcctgccagacattgcaaagacagcagtacccactgaggcatccagcccagctcaggccctgccaccccagtaccaaagcatcattgtcaggcaagggatacagaacacagtgctctcaccagactgcagcttgggggacacccagcacggagagaagctgaggcggaactgcactatctaccggccctggttctccccctacagctacttcgtgtgtgcagacaaagagagccagctggaggcctatgacttcccagaggtgcagcaggatgagggcaagtgggacaactgcctttctgaggacatggctgagaacatctgttcgtcctcttcctccccagagaacacttgccctcgagaagccaccaagaaatccaggcatggcctggactccatcacatcccaggacatcctaatggcttccaggtggcacccagcacagcagaatggctacaagtgcgtggcctgctgccgcatgtaccccaccctggacttcctcaagagccacatcaagaggggcttcagggagggcttcagctgcaaggtgtactaccgcaagctcaaagccctctggagcaaggagcagaaggcccggctgggagacaggctctcctccggcagctgccaggccttcaatagtcctgctgaacaccttaggcaaattggcggtgaagcctacttatgtctctagagagatgccaataaagttagtcacagccttctgtccagtctgaggtcaccccgcacagcctgctgtccttcccagaacccggctctcatcacctttggctaatggttgcctagcaacaccaggcacacaccctcccctttctctcttttaaaaataaagacaatacttgaagtttgggaaaatcatctaagatagaggttctcaaaggtgcccagctggcagtaccagcaacccctgggaactctcaggccctcctcagacctactgaatcagaaactatgggtctggggctggcggtctatgtcctaaccagccctccaggt

SEQ ID NO: 409504 - DNA, 888 bp, Homo sapiens
atcctctggacaaaccagccagcctctccagagcaggcgtgtgatctctgtacccccgcagtggtcagaatatggagaacttctcactcctcagcatctctggacctccaatctcttcctccgccctgagtgcttttcccgacattatgttctctcgtgccaccagcctgccagacattgcaaagacagcagtacccactgaggcatccagcccagctcaggccctgccaccccagtaccaaagcatcattgtcaggcaagggatacagaacacagtgctctcaccagactgcagcttgggggacacccagcacggagagaagctgaggcggaactgcactatctaccggccctggttctccccctacagctacttcgtgtgtgcagacaaagagagccagctggaggcctatgacttcccagaggtgcagcaggatgagggcaagtgggacaactgcctttctgaggacatggctgagaacatctgttcgtcctcttcctccccagagaacacttgccctcgagaagccaccaagaaatccaggcatggcctggactccatcacatcccaggacatcctaatggcttccaggtggcacccagcacagcagaatggctacaagtgcgtggcctgctgccgcatgtaccccaccctggacttcctcaagagccacatcaagaggggcttcagggagggcttcagctgcaaggtgtactaccgcaagctcaaagccctctggagcaaggagcagaaggcccggctgggagacaggctctcctccggcagctgccaggccttcaatagtcctgctgaacaccttaggcaaattggcggtgaagcctacttatgtctctagagagatgccaataaagttagtcacagccttc

SEQ ID NO: 409505 - DNA, 863 bp, Homo sapiens
ggcagatcactgaagcatcactcctgaatgttcctctgtaccctcaatgtgcatttgcactaccagtgatctcaagaattctagaaaatgaaaactggattaccatcaccaacgtctaggaactgtgagtcctatggctattgatatctaacatcctggcttcactcacatggatgagccccacctggaatgcctagaagacgtgggacagctggatctctctccacacggtttttcattgttgcctcaggttccaataaaagcaaaagctgcaaggtcttctgaggcaaagacttagaaataccacaatgttacttctgctgcattctgttgataaaagaatcccacaatgccagcttcatttaaaggggtaaagatatagattattcaccttcgatgggaggaactgcaaatgatgtaattagtgataatttttaatatactgtaatgtattgacttatctttaaaaaatgaaaaaataaacaaaaactaaaagcaaaacaaaactataatagaaaacaattgcttctggaggaggaatgcaatggggaaaaggttatagaaacaaaagctacattttatttgaatatacctgttttaggtttgaccctggtaacatttgatattttacataattatatcattatttaaaattaaattttaaaacaccaatacccataacagaaaagtttgataaaagaggtgaaatataaatataaatatattaagtttgcattataatcacacagagatgaattgtgtcagttactcaaacacagatatttgactatacaacctttataagatatcctaaggacaaaaaaacatgcaaaaatatatattgaactgttttaaaattatat

SEQ ID NO: 409506 - DNA, 962 bp, Homo sapiens
gctctcattctgtcttgccgccacaatgtaagaattgtctctcaccctctgccatgtaagaattctctttcaccctctgccgtgatcgtgagaccttccccagccatgtgaaactggtctcactctgtcgcccaggctgcagtgcagtggtgtgatcatggctcaccgcagccttgacctcctaggctcaagcgatcctttcacctcagcttcctaagtagccaggactacagttttcagctttcctccactgttttgggaaacgtcaccttcttatcttggaagagtaatctcaaaattgaagcatcttagatccaacaagaattaaaaggatgggaagtccttgcagccatccaatagagtcagaagactttggattttggagtctgtgagattatcttacagagcaagactgcagatcaagattttccaacgtggtgctgacttttttgagaacagttaatgagaactaggaaagtccttgcagaccatccagtccagcggctttcaaatggaacatgtgaaaggacaacagaatcacatggattcttttctgaactgcttttttccagtgatgccatattctataagacttcatgtgaaggtgtgacggaggacgggtaatgtctgaatcttccaggcaatgagagggatggtgtgagtctggaaattctttgtgatggtctgagactccccttactccagttaagaacactgacttaattcgatctggttttttttaacaaatggcctctgagacgtagagcagtgaggataaggactcttacccggttacagagtggagtaagggctagaactcaactcttaaaaatttcaaatgcaatgttctttctacaatattgtgcctacttcttcacttctgcttataggcaacttccttttcctttaattctctaatatttggagggcacgtcacaacttatacacttgctctatatgtt

SEQ ID NO: 409507 - DNA, 844 bp, Homo sapiens
gctctcattctgtcttgccgccacaatgtaagaattgtctctcaccctctgccatgtaagaattctctttcaccctctgccgtgatcgtgagaccttccccagccatgtgaaactttttcagctttcctccactgttttgggaaacgtcaccttcttatcttggaagagtaatctcaaaattgaagcatcttagatccaacaagaattaaaaggatgggaagtccttgcagccatccaatagagtcagaagactttggattttggagtctgtgagattatcttacagagcaagactgcagatcaagattttccaacgtggtgctgacttttttgagaacagttaatgagaactaggaaagtccttgcagaccatccagtccagcggctttcaaatggaacatgtgaaaggacaacagaatcacatggattcttttctgaactgcttttttccagtgatgccatattctataagacttcatgtgaaggtgtgacggaggacgggtaatgtctgaatcttccaggcaatgagagggatggtgtgagtctggaaattctttgtgatggtctgagactccccttactccagttaagaacactgacttaattcgatctggttttttttaacaaatggcctctgagacgtagagcagtgaggataaggactcttacccggttacagagtggagtaagggctagaactcaactcttaaaaatttcaaatgcaatgttctttctacaatattgtgcctacttcttcacttctgcttataggcaacttccttttcctttaattctctaatatttggagggcacgtcacaacttatacacttgctctatatgtt

SEQ ID NO: 409508 - DNA, 643 bp, Homo sapiens
gatatatccaggggtgatcagagtggaaggggggcaacccttcggatttagaggagagaagaatcaactcagacattatcttacagagcaagactgcagatcaagattttccaacgtggtgctgacttttttgagaacagttaatgagaactaggaaagtccttgcagaccatccagtccagcggctttcaaatggaacatgtgaaaggacaacagaatcacatggattcttttctgaactgcttttttccagtgatgccatattctataagacttcatgtgaaggtgtgacggaggacgggtaatgtctgaatcttccaggcaatgagagggatggtgtgagtctggaaattctttgtgatggtctgagactccccttactccagttaagaacactgacttaattcgatctggttttttttaacaaatggcctctgagacgtagagcagtgaggataaggactcttacccggttacagagtggagtaagggctagaactcaactcttaaaaatttcaaatgcaatgttctttctacaatattgtgcctacttcttcacttctgcttataggcaacttccttttcctttaattctctaatatttggagggcacgtcacaacttatacacttgctctatatgtt

SEQ ID NO: 409509 - DNA, 1512 bp, Homo sapiens
gctctcattctgtcttgccgccacaatgtaagaattgtctctcaccctctgccatgtaagaattctctttcaccctctgccgtgatcgtgagaccttccccagccatgtgaaactggtctcactctgtcgcccaggctgcagtgcagtggtgtgatcatggctcaccgcagccttgacctcctaggctcaagcgatcctttcacctcagcttcctaagtagccaggactacagttttcagctttcctccactgttttgggaaacgtcaccttcttatcttggaagagtaatctcaaaattgaagcatcttagatccaacaagaattaaaaggatgggaagtccttgcagccatccaatagagtcagaagactttggattttggagtctgtgagattatcttacagagcaagactgcagatcaagattttccaacgtggtgctgacttttttgagaacagttaatgagaactaggaaagtccttgcagaccatccagtccagcggctttcaaatggaacatgtgaaaggacaacagaatcacatggattcttttctgaactgcttttttccagtgatgccatattctataagacttcatgtgaaggtgtgacgggatgtactcacatcccaacaaattgaaaatgctgaccaatcccagcacagccaactcgaatttgctccttcatcaaagtgaccagcacctcatttcttcctctttagaatttatagttcaggaactttgcagatctcttattaactcttcagttaataatgagagtcctatggctattgatatctaacatcctggcttcactcacatggatgagccccacctggaatgcctagaagacgtgggacagctggatctctctccacacggtttttcattgttgcctcaggttccaataaaagcaaaagctgcaaggtcttctgaggcaaagacttagaaataccacaatgttacttctgctgcattctgttgataaaagaatcccacaatgccagcttcatttaaaggggtaaagatatagattattcaccttcgatgggaggaactgcaaatgatgtaattagtgataatttttaatatactgtaatgtattgacttatctttaaaaaatgaaaaaataaacaaaaactaaaagcaaaacaaaactataatagaaaacaattgcttctggaggaggaatgcaatggggaaaaggttatagaaacaaaagctacattttatttgaatatacctgttttaggtttgaccctggtaacatttgatattttacataattatatcattatttaaaattaaattttaaaacaccaatacccataacagaaaagtttgataaaagaggtgaaatataaatataaatatattaagtttgcattataatcacacagagatgaattgtgtcagttactcaaacacagatatttgactatacaacctttataagatatcctaaggacaaaaaaacatgcaaaaatatatattgaactgttttaaaattatat

SEQ ID NO: 409510 - DNA, 1192 bp, Homo sapiens
gctctcattctgtcttgccgccacaatgtaagaattgtctctcaccctctgccatgtaagaattctctttcaccctctgccgtgatcgtgagaccttccccagccatgtgaaactggtctcactctgtcgcccaggctgcagtgcagtggtgtgatcatggctcaccgcagccttgacctcctaggctcaagcgatcctttcacctcagcttcctaagtagccaggactacagttttcagctttcctccactgttttgggaaacgtcaccttcttatcttggaagagtaatctcaaaattgaagcatcttagatccaacaagaattaaaaggatgggaagtccttgcagccatccaatagagtcagaagactttggattttggagtctgtgagattatcttacagagcaagactgcagatcaagattttccaacgtggtgctgacttttttgagaacagttaatgagaactaggaaagtccttgcagaccatccagtccagcggctttcaaatggaacatgtgaaaggacaacagaatcacatggattcttttctgaactgcttttttccagtgatgccatattctataagacttcatgtgaaggtgtgacgggatgtactcacatcccaacaaattgaaaatgctgaccaatcccagcacagccaactcgaatttgctccttcatcaaagtgaccagcacctcatttcttcctctttagaatttatagttcaggaactttgcagatctcttattaactcttcagttaataatgagagtcctatggctattgatatctaacatcctggcttcactcacatggatgagccccacctggaatgcctagaagacgtgggacagctggatctctctccacacggtttttcattgttgcctcaggttccaataaaagcaaaagctgcaaggtcttctgaggcaaagacttagaaataccacaatgttacttctgctgcattctgttgataaaagaatcccacaatgccagcttcatttaaaggggtaaagatatagattattcaccttcgatgggaggaactgcaaatgatgtaattagtgataatttttaatatactgtaatgtattgacttatctttaaaaaatgaaaaaataaacagatgcggccgtaagggctttttggattaaaacaacaataatttaacggaaggtggggc

SEQ ID NO: 409511 - DNA, 1197 bp, Homo sapiens
gctctcattctgtcttgccgccacaatgtaagaattgtctctcaccctctgccatgtaagaattctctttcaccctctgccgtgatcgtgagaccttccccagccatgtgaaactggtctcactctgtcgcccaggctgcagtgcagtggtgtgatcatggctcaccgcagccttgacctcctaggctcaagcgatcctttcacctcagcttcctaagtagccaggactacagttttcagctttcctccactgttttgggaaacgtcaccttcttatcttggaagagtaatctcaaaattgaagcatcttagatccaacaagaattaaaaggatgggaagtccttgcagccatccaatagagtcagaagactttggattttggagtctgtgagattatcttacagagcaagactgcagatcaagattttccaacgtggtgctgacttttttgagaacagttaatgagaactaggaaagtccttgcagaccatccagtccagcggctttcaaatggaacatgtgaaaggacaacagaatcacatggattcttttctgaactgcttttttccagtgatgccatattctataagacttcatgtgaaggtgtgacgggatgtactcacatcccaacaaattgaaaatgctgaccaatcccagcacagccaactcgaatttgctccttcatcaaagtgaccagcacctcatttcttcctctttagaatttatagttcaggaactttgcagatctcttattaactcttcagttaataatgagagtcctatggctattgatatctaacatcctggcttcactcacatggatgagccccacctggaatgcctagaagacgtgggacagctggatctctctccacacggtttttcattgttgcctcaggttccaataaaagcaaaagctgcaaggtcttctgaggcaaagacttagaaataccacaatgttacttctgctgcattctgttgataaaagaatcccacaatgccagcttcatttaaaggggtaaagatatagattattcaccttcgatgggaggaactgcaaatgatgtaattagtgataatttttaatatactgtaatgtattgacttatctttaaaaaatgaaaaaataaacacctgtgcacgcgtgaaggttcttttttcttgtacattgattataatctcttctatattagtat

SEQ ID NO: 409512 - DNA, 1752 bp, Homo sapiens
aaacgactaattggttgcagaaagtgatgaatcagaggctgaagtgaagttacaaagttatactcctatgcaaaggaagacttggcctgtgaccagcctgattgactgcaggaggggaccagtcagagcaagaaggcagccatctgtagggcaggaagagagccctcaccagaacttgaccatgctggcaccctgatctcagacttctagcctccagaactgtgaggatgctgagatgtagagagactgatttgctcaagataacaaagagttttattgatttgggaacccatggaagggggtcagctgtgagatatcacatgatcagactgactgcctgaccagactgactgccatcctgttaaaggaatgaatcacagttcatctcgcagatttatggcatgcctacagaaaaagtaccttatgatgcaaacctgaaagtttaaataatctcctgaaagttccacaatcagttttcagctttcctccactgttttgggaaacgtcaccttcttatcttggaagagtaatctcaaaattgaagcatcttagatccaacaagaattaaaaggatgggaagtccttgcagccatccaatagagtcagaagactttggattttggagtctgtgagattatcttacagagcaagactgcagatcaagattttccaacgtggtgctgacttttttgagaacagttaatgagaactaggaaagtccttgcagaccatccagtccagcggctttcaaatggaacatgtgaaaggacaacagaatcacatggattcttttctgaactgcttttttccagtgatgccatattctataagacttcatgtgaaggtgtgacgggatgtactcacatcccaacaaattgaaaatgctgaccaatcccagcacagccaactcgaatttgctccttcatcaaagtgaccagcacctcatttcttcctctttagaatttatagttcaggaactttgcagatctcttattaactcttcagttaataatgagagtcctatggctattgatatctaacatcctggcttcactcacatggatgagccccacctggaatgcctagaagacgtgggacagctggatctctctccacacggtttttcattgttgcctcaggttccaataaaagcaaaagctgcaaggtcttctgaggcaaagacttagaaataccacaatgttacttctgctgcattctgttgataaaagaatcccacaatgccagcttcatttaaaggggtaaagatatagattattcaccttcgatgggaggaactgcaaatgatgtaattagtgataatttttaatatactgtaatgtattgacttatctttaaaaaatgaaaaaataaacaaaaactaaaagcaaaacaaaactataatagaaaacaattgcttctggaggaggaatgcaatggggaaaaggttatagaaacaaaagctacattttatttgaatatacctgttttaggtttgaccctggtaacatttgatattttacataattatatcattatttaaaattaaattttaaaacaccaatacccataacagaaaagtttgataaaagaggtgaaatataaatataaatatattaagtttgcattataatcacacagagatgaattgtgtcagttactcaaacacagatatttgactatacaacctttataagatatcctaaggacaaaaaaacatgcaaaaatatatattgaactgttttaaaattatat

SEQ ID NO: 409513 - DNA, 1303 bp, Homo sapiens
gctctcattctgtcttgccgccacaatgtaagaattgtctctcaccctctgccatgtaagaattctctttcaccctctgccgtgatcgtgagaccttccccagccatgtgaaactggtctcactctgtcgcccaggctgcagtgcagtggtgtgatcatggctcaccgcagccttgacctcctaggctcaagcgatcctttcacctcagcttcctaagtagccaggactacagtatcttacagagcaagactgcagatcaagattttccaacgtggtgctgacttttttgagaacagttaatgagaactaggaaagtccttgcagaccatccagtccagcggctttcaaatggaacatgtgaaaggacaacagaatcacatggattcttttctgaactgcttttttccagtgatgccatattctataagacttcatgtgaaggtgtgacgggatgtactcacatcccaacaaattgaaaatgctgaccaatcccagcacagccaactcgaatttgctccttcatcaaagtgaccagcacctcatttcttcctctttagaatttatagagtcctatggctattgatatctaacatcctggcttcactcacatggatgagccccacctggaatgcctagaagacgtgggacagctggatctctctccacacggtttttcattgttgcctcaggttccaataaaagcaaaagctgcaaggtcttctgaggcaaagacttagaaataccacaatgttacttctgctgcattctgttgataaaagaatcccacaatgccagcttcatttaaaggggtaaagatatagattattcaccttcgatgggaggaactgcaaatgatgtaattagtgataatttttaatatactgtaatgtattgacttatctttaaaaaatgaaaaaataaacaaaaactaaaagcaaaacaaaactataatagaaaacaattgcttctggaggaggaatgcaatggggaaaaggttatagaaacaaaagctacattttatttgaatatacctgttttaggtttgaccctggtaacatttgatattttacataattatatcattatttaaaattaaattttaaaacaccaatacccataacagaaaagtttgataaaagaggtgaaatataaatataaatatattaagtttgcattataatcacacagagatgaattgtgtcagttactcaaacacagatatttgactatacaacctttataagatatcctaaggacaaaaaaacatgcaaaaatatatattgaactgttttaaaattatat

SEQ ID NO: 409514 - DNA, 1129 bp, Homo sapiens
gctctcattctgtcttgccgccacaatgtaagaattgtctctcaccctctgccatgtaagaattctctttcaccctctgccgtgatcgtgagaccttccccagccatgtgaaactttttcagctttcctccactgttttgggaaacgtcaccttcttatcttggaagagtaatctcaaaattgaagcatcttagatccaacaagaattaaaaggatgggaagtccttgcagccatccaatagagtcagaagactttggattttggagtctgtgagatgatgtactcacatcccaacaaattgaaaatgctgaccaatcccagcacagccaactcgaatttgctccttcatcaaagtgaccagcacctcatttcttcctctttagaatttatagagtcctatggctattgatatctaacatcctggcttcactcacatggatgagccccacctggaatgcctagaagacgtgggacagctggatctctctccacacggtttttcattgttgcctcaggttccaataaaagcaaaagctgcaaggtcttctgaggcaaagacttagaaataccacaatgttacttctgctgcattctgttgataaaagaatcccacaatgccagcttcatttaaaggggtaaagatatagattattcaccttcgatgggaggaactgcaaatgatgtaattagtgataatttttaatatactgtaatgtattgacttatctttaaaaaatgaaaaaataaacaaaaactaaaagcaaaacaaaactataatagaaaacaattgcttctggaggaggaatgcaatggggaaaaggttatagaaacaaaagctacattttatttgaatatacctgttttaggtttgaccctggtaacatttgatattttacataattatatcattatttaaaattaaattttaaaacaccaatacccataacagaaaagtttgataaaagaggtgaaatataaatataaatatattaagtttgcattataatcacacagagatgaattgtgtcagttactcaaacacagatatttgactatacaacctttataagatatcctaaggacaaaaaaacatgcaaaaatatatattgaactgttttaaaattatat

SEQ ID NO: 409515 - DNA, 370 bp, Homo sapiens
caagacgggtccatgagacagatgaggaaactgaggctcaaggtggtcaaggggtttttctaaggccccatggcagcaggtgatagagcctggattagaaccgaaatttgctgcactgccttcaactccagcttgttgtctcccttacctcttgggcccctcctcggcttctttggtgggctgtgctctcagcccccaccctcttctcctcacaactcaagtgagcacctctgtgtctgtggcttccatgcccatttttcttttttctttttctttcttttttttttttatttgagacagagcgagaaactgaaaaaaaaaaaaaaaaaaaaaagagattaataaacttgtaaatttgtcccaaggtcaa

SEQ ID NO: 409516 - DNA, 435 bp, Homo sapiens
catgaacctttttttaaagcagagaaaattctacagctggaggcagaagagattctgtagaaggggaagtcagagagattcaaagcataaaaaagacactacctgctgtatggctttgaagatggtggaacaaggccactcgccaaggtacaaggagcctctagaaagctgaacaggatgtcagctgacaatcaacaagaaaacaaggacctcacccttaagaccaccacgtggatctgaattctgtgaacaacttgcaagaatttgggagcaaattcatttccagaacctccagcaaaggaatccagccctggtgacaccttgatattggccttgagagactctaagcagagaaccagctgagccactctgcacctaaacttctaactcagaacattgtaaaccaatacatttgtgttgttttaagccactaaa

SEQ ID NO: 409517 - DNA, 1074 bp, Homo sapiens
caagctctcatcgtcctgcatagtaagagtcttcagaacgtggaaaggaacttcagtggcttttgctgggttgggctgaaggaaaccccggtgaaacccacacctgtaaagatgcttctcacagtgggacttttatcgcttgggtcctggtcacaatcaatttttctgcaaataattggctttgcttttcttgtggtgagtctctaaggacagtgagttccgttctggggactgtgagttctatgctgtgtacatgtgtgctttggagggtgactggaagcaccatcgttccttcccatactttcaggctcagttaccgcttcagtctggactgttgtgaacgagaatatggaagtcattttccccacattgtttacccagcttgcctgggaaacaccaactggaggattagagtccggctcttcagtttgaactcactttccctttctcttcctgggaccacccagtgattcagagccctgcattctgtaatgagattaatgtcaacagtttcctgcattgaagattattttcccaaagagttcacgatttccttcaggacttctccatcaccccagtgtctggctacctaatgactgattaacaggttgattttctagaaaactcaaattacaatttcttttttttaaaaaagggcaatccagccttttctctgattatccgtcctccccatctcccacttgtcctatgttttagccacacaggctgttgtcatcccctaaaagtgtgcttctgagtctccaggcctttgataaattgttccctcctcctgaaatgccattcaccccatctgccttttggaattctgcccttccctcggaatctagcccaagtcctatctcctctaagaagggacttttctagattgaattaaatttccttccctggccctgcatagtggccgcacccagtagactgtgagtctacttttttcatcttttattcttacaagtgcctggcctcatattttgcacacagtaggcatttgctatactttaattactagtaaaattgagtgataaaataaaacatttaaatctcaccatacgtttg

SEQ ID NO: 409518 - DNA, 722 bp, Homo sapiens
gaaaaaaaaaaagaactgagaccccatctctacaaaagtaaaaaattagctgggtgtggtggggcacacctgtgattctcagcctcccgagtagctgggattacaggcatgtgccaacatgcccagctaatttttgtatttttggtagagatagggtttcaccatgttggtcaggctggtctggaactcctagcctcaggtgatccacccacctcagcctcccaaagtgctgggattcctcccatcttacacatgaaaaaacagaggcagagagagcacagggtctttcccaaactcatgtaaatcagaattatagagtctcaaagttttgaagttctagtgtgttccaccacctgtcaaactttttttttttttttgagatgaggtcttgctctatcacccaggctagattgcagcggtgcgatcatagttcactgtcaccttgacttctggggagtgatcctcctgcctcagcctcccaagtagttgggactgcaggtgcatgcttccataagcggacttagaaaatttgaatgaggccgtactgggtgcctcatgcctgtcatctcaacactttaggaggctgaggtgggaggatggtttgtgcccaggagttccacgtggcagtgagctgtgattacaccactgcacagcaacctgggcgacagtgaggctcagtcgtgttgaaaaaagaaaagacagagagagaaagaaaagaaaaa

SEQ ID NO: 409519 - DNA, 677 bp, Homo sapiens
cactggttgccgtggtaacaggcctccggtggagggcggggaccctcggaagccagctgggtggcgatcgcttgtctgccttggcaggccccttgtgcagtcttttcccggcgtgagcgtgcagggattgaaaaggaatgctttatggttcagcagagagccaccacgcaggatgcactgggacctgagaaccgtcgggcagtcccacgagctctttcatgaccagctccaaccgacaagtacacgccccttcgcactccactagctagtaagctgagctacaaggtgtgccaggcacccaggacgccgattcaccgcttcagtgaaggcccagctcaaatgccacctcttccatgaagacttccgtgatccacaatgatagcatctccagcaattgcttctataatgaatagcatgagtcattctgcaggatgttgatcttcctttttttactcctagactgaatttttccaccacctggatgaacatagcagaaagaacatagtgttttagagtcagacacaataggaatcaggcactttggaatcttggctctaccacctttgagctatgtatcccaaggcaagtcacttcccctctctcagctttaaaatagtaataggattgctgtagggattaaagtaaatcaacatatgtaaagtgcccacacaaaacct

SEQ ID NO: 409520 - DNA, 356 bp, Homo sapiens
cgccctcatctatccggaacacagccgagaaacaaggaagttagcaaaaaaggaatctgagcagccagattagacgtttaaaaagttcatgcaccaaagctcatgcacttaactcctaggagaaatcttaggcccccaactcagagctccttcattttgattttatttgtaatctgaacaagctgggttgaaggagcacattgacattgagttgctatactcaggcaggctggctacagcaagaaggacagacaacagcttaataacgagagaggaggaactaatataaaaagtagacacataaaccctggggccatttaatgtaggggcacaccagtcaaccctgagaacacacc

SEQ ID NO: 409521 - DNA, 338 bp, Homo sapiens
aagctcagacacgctgcactttggtggctgatgagcccaaggtgggaacttcagaatcgcaactttagaagcttaatttcctccttgcacagaacaatggtgcacccagcttactcgtgcctagggtagggccacacagaaaatgagagacttcaaggttatgaatcacactctgagccagctggatcttcttaaagcatctctataaggcaatgcctcccagcaagggatcatgcttgaccctctcaaagctgccacagtgtcctcccagggcagtactttaaaaaaacagtaacatggtgttattctcaagtttacttctgctttttatagagtct

SEQ ID NO: 409522 - DNA, 283 bp, Homo sapiens
gaaagtgacagaagacgtgcggagggagacgcagagacagaggagaggccggcagccacccagtctcgggggagcacttagctcccccgccccggctcccaccctgtccggggggctcctgaagccctcagccccaaccccgggctccccatggaagccagctgtgccccaggaggagcaggaggaggtggagtcggctgaatgcccacggtgcgcccggggcccctgagcccatcccgctcctagccgctgccctaaggcccctgcgcgccccgcgcccccc

SEQ ID NO: 409523 - DNA, 511 bp, Homo sapiens
gcagcctgctgtttgacaaagctgctttgctgagtgagacaatgattctgatgcagaaagggaagcagaaacaaaagataagcaagcgagtgcttggaaggcactggaatccctggcttgatctatctttggagcccagccataatgttttctttcctgcatgcacataaaccactgcattatccttttgttttagcctgtttaatttaggtatctgtcatttgcagccaaatatactctctgtaaccttggatttgccatttaatagtgcctggtgcatagtaggtgttcaacaaatatttgttgactgacttgtaccctctggaccctgtttcccttacttgtgtgttgggggtgataattagtagctcgtagggctgttgcatggatgagaaaatgagagggagagggctgtcttggcctgtttcatgctgctgcgacagaccaccaccgactgggtaatttataaagaatagatatttattttctcacagttctgtaggctgggaag

SEQ ID NO: 409524 - DNA, 706 bp, Homo sapiens
ggaatatttttcatctactagttcacccacatacagtgtttgcactccccagaaacgatttcacaacttctaaatattttttaaacgcaatttgtttcctttttaagttactttgctttctttaaaatgtcaatttatttttagtgacacttagttttacttaattggctatgccttcatcacttaaaaacctatttctttcatatttgagaagcttttacttcactttaacataactttgattgctctgtgatgctctggtgccatcatttagtccaatttctaccattaaaattgaagctgtagggaaaatatgtgcaatttcgacgaaagttcaggagctatgcagaaatcaatttaacaaatcaaaaagcaaataatttagggagttaacaaaattactttagtaatccagactgaaaaagtatttgaggctagataaacatagttaatatatgaagtattgttaaagattctaatttctgactattttgtttcagacagttcatttagagccatcattgcatgatacacgtgtttagaccacatactgtctggaccctgattccatgtcgtccaacctcgggagtacaatctgactttccatgcagatcctgcgcagcagagaaacatgttcctgagcagacatcagcagtgcctgacaattacattacacgctataaatttatgtgtggcttgagattct

SEQ ID NO: 409525 - DNA, 412 bp, Homo sapiens
ccacataaattcttcaaagatatcatttacatctattttaatagctgccctaaatgtctttactacaaagactgaccactgaaggacaaatttccaggagctgtgacagatgtaatagctgtctttctgctttgattcaagacaattttttgaacctaaatacagagaatgggtgctcagaattcctttctcattatcagcctcagacagttcatttagagccatcattgcatgatacacgtgtttagaccacatactgtctggaccctgattccatgtcgtccaacctcgggagtacaatctgactttccatgcagatcctgcgcagcagagaaacatgttcctgagcagacatcagcagtgcctgacaattacattacacgctataaatttatgtgtggcttgagattct

SEQ ID NO: 409526 - DNA, 426 bp, Homo sapiens
atgaatgtttttcaggaagctattgagctaaagtaggaaagtatccaagaaagaaaaaaaaaaaacagcttccaaataccagagagatgaaactctgattccttcatgaaatgaattgaaagtactctgtgtaactgaaggcaaacttttaatcaattggatttcaagggtgcgggctgagtctatgccgtgcaatgactggacagtaaatcacctaccagaagctgctaaacttcacgtggtgctctccaccaaaatggctagagagatccaccattggcagcacactcccttcaacttgctgtttctatactggaaattgttttatttgatccaaccatatcaccgcctaggtagggtaatgtcttgcccaaacagtgaagtctcttaagtccatctttgaaataaaaattggcgacattcttt

SEQ ID NO: 409527 - DNA, 371 bp, Homo sapiens
ttatggactgaattgtgcccccccaaccagatgcttctgttgaagttctaactcctgaatggatttggagctagggccttaaaggaggtaattaaggttacaaagattctaagggtggcgccctaacctgataggactgatgcctttataaaaagaggaacagacaccagaaatctcaatctctctctctctctctctctctgtctccacacacacacaccgaggaaaggccatgtgaggacacagcaagaagacagctgtctgcaagccaggaagagaagcctcactagaaaccagccctgccagcactttgatctttgatcttggacttatagcccctagaactgtgagaaaataaacttctgttgttt

SEQ ID NO: 409528 - DNA, 4593 bp, Homo sapiens
  misc_feature (1)..(1): n is a, c, g, or t
  misc_feature (1105)..(1105): n is a, c, g, or t
  misc_feature (2777)..(2777): n is a, c, g, or t
  misc_feature (2801)..(2801): n is a, c, g, or t
  misc_feature (2819)..(2820): n is a, c, g, or t
  misc_feature (2884)..(2884): n is a, c, g, or t
  misc_feature (2921)..(2921): n is a, c, g, or t
  misc_feature (2936)..(2936): n is a, c, g, or t
  misc_feature (3472)..(3472): n is a, c, g, or t
  misc_feature (3474)..(3474): n is a, c, g, or t
  misc_feature (3911)..(3911): n is a, c, g, or t
  misc_feature (3988)..(3988): n is a, c, g, or t
  misc_feature (3993)..(3993): n is a, c, g, or t
  misc_feature (3995)..(3995): n is a, c, g, or t
  misc_feature (3997)..(3997): n is a, c, g, or t
  misc_feature (3999)..(3999): n is a, c, g, or t
  misc_feature (4001)..(4001): n is a, c, g, or t
  misc_feature (4004)..(4004): n is a, c, g, or t
  misc_feature (4008)..(4008): n is a, c, g, or t
  misc_feature (4010)..(4010): n is a, c, g, or t
  misc_feature (4012)..(4012): n is a, c, g, or t
  misc_feature (4015)..(4015): n is a, c, g, or t
  misc_feature (4017)..(4017): n is a, c, g, or t
  misc_feature (4021)..(4021): n is a, c, g, or t
  misc_feature (4025)..(4025): n is a, c, g, or t
  misc_feature (4029)..(4029): n is a, c, g, or t
  misc_feature (4031)..(4031): n is a, c, g, or t
  misc_feature (4034)..(4034): n is a, c, g, or t
  misc_feature (4036)..(4036): n is a, c, g, or t
  misc_feature (4039)..(4039): n is a, c, g, or t
  misc_feature (4043)..(4044): n is a, c, g, or t
  misc_feature (4049)..(4049): n is a, c, g, or t
  misc_feature (4054)..(4054): n is a, c, g, or t
  misc_feature (4057)..(4057): n is a, c, g, or t
  misc_feature (4060)..(4060): n is a, c, g, or t
  misc_feature (4062)..(4062): n is a, c, g, or t
  misc_feature (4067)..(4067): n is a, c, g, or t
  misc_feature (4071)..(4071): n is a, c, g, or t
  misc_feature (4073)..(4073): n is a, c, g, or t
  misc_feature (4076)..(4076): n is a, c, g, or t
  misc_feature (4079)..(4079): n is a, c, g, or t
  misc_feature (4082)..(4082): n is a, c, g, or t
  misc_feature (4084)..(4084): n is a, c, g, or t
  misc_feature (4090)..(4090): n is a, c, g, or t
  misc_feature (4092)..(4092): n is a, c, g, or t
  misc_feature (4094)..(4094): n is a, c, g, or t
  misc_feature (4097)..(4097): n is a, c, g, or t
  misc_feature (4100)..(4100): n is a, c, g, or t
  misc_feature (4102)..(4102): n is a, c, g, or t
  misc_feature (4108)..(4108): n is a, c, g, or t
  misc_feature (4112)..(4112): n is a, c, g, or t
  misc_feature (4115)..(4115): n is a, c, g, or t
  misc_feature (4120)..(4120): n is a, c, g, or t
  misc_feature (4123)..(4123): n is a, c, g, or t
  misc_feature (4526)..(4526): n is a, c, g, or t
ncctcgggtcatttttaacaataacaaaaaatattttcagctgaaacttcagaccggagacctgcaagtaaatgagacattggaccgggaagaattgtgtagaatcactgagccttgtgtgctgcaattccaagtgttactggaagaacctttggaggtttaaacttttggtcagtgacataaacacaattcccctgtattcccagaagcagaaattattttgaaatcatggaaaatactcctccaggaactgtgtttcctctgaaaaatacacaagatttggatgtggccatcaataacatccaaaactacaccatctacccctactcccatgtccacgctctcacccaaaatggcagtgaaggcagaaaatacccagagctggttctggacaaagccctggatcgggaggagcaggctgagatcaggttaactctcatggcagtagatggcgggactcctcccagaactgggactgctctggtcctcattgaaatcttggacatcaatgacaatgcacctgagtttgtgtagccactctatcaggtgcagatatcagaaaacagccccctggattcccttgttgccactgtttccgctagagattcagacatgggaattaatggtgagatattctactcattttttatggtgatgaagagatttctaagacatttgcacttaatgaacgaaggggagaaattaaaataatcagaaaactagattttgaaaaaattgtgtcatatcaggtggatattaaagcctctgatggggcaggtctttctggaaaatgcactgtcataatacaggtggtagatatcaacgataacgctccggaactgaccatggcttcattcacaagccccatccgcgaaaattctcctgagaccgttgcagctcttttcagcattcaagaccgcgattctgggaaaaatggaagaatagtttgatcaattcaaaatgatgttccgttcatgccgaaaccttccgttgagaatttatactggctgttaacagaaggaccactggacaaagagattagagccgagtacaacatcaccaacacagccacggacttggggactcctaggctgaaaaccgagtncaacataacggtgctggtctcctacgtcaatgacaaagcccccaccttcacctaaacctcctacaccctgttcgtccgcgagaacaacagccccgccctgcatattggcagcgtcagcaccgcagagactcgggcaccaacatccaggtcacctactcgctgctgccgccccggaacccgcacctgcccctcgcctccctggtctccatcaacacagacaacggccacctgttcgccctcaggtcgctggactacgaggccctgcaggagttcgagttccgcgtgggcgcttcagaccgcggctccacggcgctgagcagcgaggcgctggtgcgcgtgctggtgctggacgccaacgacagctcactcttcgtgctgttcccgctgcagaacggctccgcgccctgcaccgagctgatgccccgggcgggccgccgagccgggctacctggtgaccaaggtggtggcggtggacggtgactcgggccagaacgcctggctgtcgtagcagttgctcaaggccacggagccagggctgttcggcgtgtgggcgcacaatgcactgacaggctgctgagcgagcgtgacacagccaagcacaggctgatggtcctggtcaaggacaatggcgagcctccgcgctcggccaccgccacgctgcacgtgctcctggtggatggcttctccctgccctacttgccgttccctgaagcggccccggcccaggcccaggccgacttgctcaccgtctacctggtggtggcgttggccttggtgtcgtcgttcttcctcttctcggtgctcctgttcgtggcggtgcggctgtgcaggaggagcagggaggcctcattgggtcgctgctcggtgcccgaggacccctttccaggcatctggtggacgtgagcgacaccaggaccctatcccagaggtacaagtatgaagtgtttctgacgcgaggctccgggacaaatgaattcaaattcctgaagtctgttatccctaagcatccgggcgctgtgaatgatgggaggaaaagtccaactttgtaaatggttttggattcaattaagaatctgtagatttttcagagcatttaggataaaggttagtcctttatcaatatattaagtctctgttatgttttttgtgctatatggattttctaagatttttgctgatttcattttcctacttaagattagacattttctttgattatttgttcatacttggtctccttttatcatgtccattttgatgaatacaactttcaggtttactcattaatgaaaagtaatatttgttcaatttatcaacttttcaaaatcacaggctgttgacttgaagactccagctccattccgtttcattaaagaaagcttttctaaacttttgatgcttagaagacaggaacgatgatatagtgattattagtacatattctattgattctgtcttatgcttacctgtcttgaatttttaaatggagaagcgtctgcaaaaattgcatcgttttatttcacaatagcttgaagtgggaaagactacatttttccccaaacttaaagacttttctgctctttttataaccttcactccataacatatatgagcattattattactattattgagtcagagtttcactcttgtcgcccaggctggagtgcantggcgcgatctgggctcactgcancctcgcctccccggttcnngcgattctcctgcctcagcctcccgagtagctgggattacaggctccttgttttagtagagatngggtttcaccatgttggccaaactcaaactgacctcnggtgatacactcgcntctgcctcccaaagtgtggcattacaggtgtgagccaccttgcccggccatacgagcatctttagtgattattagattatctcaagattttaaaatcatagctcccttttgtagcgtctatctagcccacctgatctttttctggaaaattctccctgtctttggctgaagtgtaatgttgcagccacatttattttatatgacccacctccctctgtgatttcaaacacaaaaataagatgatcctagctggcctaatctgattctctctgtttaaaaaaaaatggctttaagaaccagatacaacatagtctctttgttaggaacataagcagaaagtggtgtcatatttggctaaacacttgcaaagaaatacagaacatcaatctattgagagacaagaaaaaataaggtaccaaaagaatgaccttgtcatagattttcctgttttagattttccagtccctcccaagtctttttcccttaggttgctggagacaaatttgtgctctttaataaatttccctctaattaananatctaagtgaggtttttgttgtcaaaagcatgtttagatattcctgcattgttggtaagttagacctttcttcctattgggtttttattgtggcttttcatattagtatgacaacatttgggatcaaggaggttgtaaaatattagtagtctataagggacatgcactagcttttgtcagaatatacaattttgagaaaaactgaaggatctttccaatggtacagtctttgaagtgtttaatagaaattcttagaacattttattatataagagttttgaatatcgtaagtgtcataataacattactgtaaaaaaaaaaccttgacaatgaaaaatgtgtgtctaaaagagacataatccttatctttagggtcatcataatcttgttatgttctttctttctgtcatataatatatcccttgcttatgggtagntaagttgttttgccacttaatgaaatgacattttaggtcattctgagttatttcacattactatttaaagggcatangaaanancnancntangaanangntgncnttgnttanccancntananaangaanntgaancccanaanaananggaanttcnanagnagnagnanaaccancngncanaangnttaaantaantgngattnatnaatggatccatttaacaaatatttattgagcacgtaccatgtgccagggattattttagatattggggatgcagcagtgaacaaaatgaagttctaacatgtgaggttgaaacagaaaggaaacaactaaataagtacatctatactacgtcagataataaatacgagagagacaaggcagggctgggtacagcagctcatgcctataaccccagcactttgggaggctgaggcaggaggattgcttgagctcggaaatttgagaccagcccgggcaacatagcaagacctcatctttacaaataattaaaacattagccaggcatggtgatgcgcaactgtggtcccagctacagttgctgaggtggggggattgcttgagcctgggtagtcaaggctgcantgagcagtgattgtgccactgcactccctcctggacaacagagcaagaccccatctcaaaaaaaaaa

SEQ ID NO: 409529 - DNA, 1131 bp, Homo sapiens
tgggcccattttacttaaagcaaatacaataggtttggaattatgtatttaaaagcatggcattggtccacgtgacatgttgggtgtcttgttttcattttaccagactctgtttttatttatgttttcagtttatgatcctgtcctttgttcataaggtacttagatggtttaagatgtagacttcttatatgaagatgttgctgttgtttttccaaagtaatggtggtcatcagcccatttttctatttagtctcatgaatagaatcatgagtagaatctttcttaaattattacttgtaaatggatcactttcttgttttctttttcttaattggagctttaaataaatatggaacttggaacaaaaagattttcaggaattttatggaaactaacttttttgacctaaatcgaaagggatgaaagtttctgaaaacctaacaaaatgtgtgcacagccaattcttttaggggaggaaataggcagggaatgtgtaattggctattttaaaaacatatgccttcttttgtaacttattgttgtttcaagttacaagatctttgaaggcaagtgtttatctcaaaatatttgaaagcttttatagtgcttaacatactaagacgtcctattagggtttacttagaacaagcttatccaacttgtgggccacatgtggcccaggatggctttgaaagcggcctaacacaaattcataagctttcttaaaacattatgtgatttttttttttagcttatcagctatcattagtgttaatgcattttatgtgtggcccaagacaattctttttcttccagtgtggcccagggaaaccaaaagattagacacccctgacttagaactttccataggttaggagaaagttgtactttcttgatgtctataacctagaatttctggtaaaggaattgattggaaatgttattaaaagttgaaaataatttggaaattaaacattttagtgatcagttcttccattgagactgtgttggttcctttactagatatgtgccatctttttaaaaacttactgtgttgcttcctttactagaaaattgccatctttttgagccttgtctattgaggaaccaagaacacagaaaaggcag

SEQ ID NO: 409530 - DNA, 434 bp, Homo sapiens
ctctgattttggatcaaaacaaaacgcctacagggaccggggggagcacaaatgagccaggtggtccaggtgtcttaagatagctgctttcaatacagaggcccactgcattaagcaggtcatattcttcacttccacagagaaatatgctttccactgcttttctttaaacatatcaccctctggtctatctttcacatctccactttgagagaaacaagtttaagagatatccactgaccttttaaccttactaaaataaatacacgttaaaactgagataaacagtagtaactggcagcctcgatgtcaggaacacactagagaggaggggcacaccccacactgtgtcccacaggggtgagggaggcagtggcgtagctgcatctcagccactgtggctgcaggagaggcgcaacccagtggctggagtc

SEQ ID NO: 409531 - DNA, 295 bp, Homo sapiens
cggcacgaggagcgttgggctgcggcagcggaggagctcaacatgcgtgagtgtatctctatccacgtgggagaaggcatggaggagggggagttctctgaggcccgcgaggacctggcagctctggagaaggattatgaagaggtgggcgtggattccgtggaagccgaggctgaagaaggtgaagaatactgaggggagggtgtggtgggttctccactccactgccacccccagcgtggctgctttcaagttctttgcaattaaaggttctgtataaaaccaaaaaaaatgt

SEQ ID NO: 409532 - DNA, 1530 bp, Homo sapiens
agcggtgggtgtgcgcagctgcagcggcggttgaggtcaagtagtagcgttgggctgcggcagcggaggagctcaacatgcgtgagtgtatctctatccacgtggggcaggcaggagtccagatcggcaatgcctgctgggaactgtactgcctggaacatggaattcagcccgatggtcagatgccaagtgataaaaccattggtggtggggacgactccttcaacacgttcttcagtgagactggagctggcaagcacgtgcccagagcagtgtttgtggacctggagcccactgtggtcgatgaagtgcgcacaggaacctataggcagctcttccacccagagcagctgatcaccgggaaggaagatgcggccaataattacgccagaggccattacaccatcggcaaggagatcgtcgacctggtcctggaccggatccgcaaactggcggatctgtgcacgggactgcagggcttcctcatcttccacagttttgggggtggcactggctctgggttcgcatctctgctcatggagcggctctcagtggattacggcaagaagtccaagctagaatttgccatttacccagccccccaggtctccacggccgtggtggagccctacaactccatcctgaccacccacacgaccctggaacattctgactgtgccttcatggtcgacaatgaagccatctatgacatatgtcggcgcaacctggacatcgagcgtcccacgtacaccaacctcaatcgcctgattgggcagatcgtgtcctccatcacggcctccctgcgatttgacggggcctgaatgtggacttgacggaattccagaccaacctagtgccgtacccccgcatccacttccccctggccacctacgccccggtcatctcagccgagaaggcctaccacgagcagctgtccgtggctgagatcaccaatgcctgcttcgagccaagccaatcagatggtcaagtgtgaccctcgccacggcaagtacatggcctgctgcatgttgtacaggggggatgtggtcccgaaagatgtcaacgcggccatcgccaccatcaagaccaagcgcaccatccagtttgtagattggtgcccaactggatttaaggtgggcattaactaccagccccccacggtggtccctgggggagacctggccaaggtgcagcgggctgtgtgcatgctgagcaacaccacggccatcgcggaggcctgggctcgcctggaccataagttcgatctcatgtatgccaagcgggcctttgtgcactggtacgtgggagaaggcatggaggagggggagttctctgaggcccgcgaggacctggcagctctggagaaggattatgaagaggtgggcgtggattccgtggaagccgaggctgaagaaggtgaagaatactgaggggagggtgtggtgggttctccactccactgccacccccagcgtggctgctttcaagttctttgcaattaaaggttctgtataaaaccaaaaaaaatgt

SEQ ID NO: 409533 - DNA, 1434 bp, Homo sapiens
agcggtgggtgtgcgcagctgcagcggcggttgaggtcaagtagtagcgttgggctgcggcagcggaggagctcaacatgcgtgagtgtatctctatccacgtggggcaggcaggagtccagatcggcaatgcctgctgggaactgtactgcctggaacatggaattcagcccgatggtcagatgccaagtgataaaaccattggtggtggggacgactccttcaacacgttcttcagtgagactggagctggcaagcacgtgcccagagcagtgtttgtggacctggagcccactgtggtcgatgaagtgcgcacaggaacctataggcagctcttccacccagagcagctgatcaccgggaaggaagatgcggccaataattacgccagaggccattacaccatcggcaaggagatcgtcgacctggtcctggaccggatccgcaaactggcggatctgtgcacgggactgcagggcttcctcatcttccacagttttgggggtggcactggctctgggttcgcatctctgctcatggagcggctctcagtggattacggcaagaagtccaagctagaatttgccatttacccagccccccaggtctccacggccgtggtggagccctacaactccatcctgaccacccacacgaccctggaacattctgactgtgccttcatggtcgacaatgaagccatctatgacatatgtcggcgcaacctggacatcgagcgtcccacgtacaccaacctcaatcgcctgattgggcagatcgtgtcctccatcacggcctccctgcgatttgacggggcctgaatgtggacttgacggaattccagaccaacctagtgccgtacccccgcatccacttccccctggccacctacgccccggtcatctcagccgagaaggcctaccacgagcagctgtccgtggctgagatcaccaatgcctgcttcgagccaagccaatcagatggtcaagtgtgaccctcgccacggcaagtacatggcctgctgcatgttgtacaggggggatgtggtcccgaaagatgtcaacgcggccatcgccaccatcaagaccaagcgcaccatccagtttgtagattggtgcccaactggatttaaggtgggcattaactaccagccccccacggtggtccctgggggagacctggccaaggtgcagcgggctgtgtgcatgctgagcaacaccacggccatcgcggaggcctgggctcgcctggacctggcagctctggagaaggattatgaagaggtgggcgtggattccgtggaagccgaggctgaagaaggtgaagaatactgaggggagggtgtggtgggttctccactccactgccacccccagcgtggctgctttcaagttctttgcaattaaaggttctgtataaaaccaaaaaaaatgt

SEQ ID NO: 409534 - DNA, 737 bp, Homo sapiens
cccttggattctgaagcggaaggagagctgtctcctccagctggtggaaactgcttcctatcctcctcctggagagcccaactcccagagcagatggcagaggagacctttagatggggcggtcacatgtcccagctggccttataacaactgtcccagggaactattaatagatctaccttacacacatctggactttcagatctgaaacgccctggtttggatgacagattatatggtgaacctacttttagagtgtagttcaactcatttgtcacatggatgagaaaatcagtccataaagggtttgctggggccaacaccagcctaagtggagagtaagcgtccattctcctagaccggcacttaaagcctggctgtcacccagccatcccgtctctgtgctggatggacaccaaaccccaaggccctcatctgcctttgtcccagctactgtccagtgcttcagagatggctacttcgtcctcgtggtgtcccaagaaatggccttgacacacaggatcacactggccaacatccacctggcctatgcccccaccagctgctccccaacacagcacacggaagctttcgtggtcttctacttccctctcacccactgtggaaccacaatgcaggtggctggcgaccagctcatctatgagaactggctggtgtctggcatccacatccaaaaggggccacagggttccatcacgcgggacagcaccttccag

SEQ ID NO: 409535 - DNA, 1738 bp, Homo sapiens
atttagtagaaaaatactgtgaaaaatccattacagttaaagtgaacagcacatatggaaattcctcaagaaatattgtgaatcagaatgtacgtgagaacctgaagacactctacagacttacaatggacctttgctctaaactgaaggattatggtttatggcaactatttcgtactttggagcttcctctgataccaattttggcagtgatggaaagccatgccattcaggtgaacaaagaggagatggagaagacgtcagcacttcttggggctcgtctcaaggaattggagcaagaagctcattttgttgcaggagaacggtttcttataacgagcaataaccagcttcgagagatcctctttggcaagttaaagctgcacctgctgagtcaaaggaacagtctccccagaacggggttgcagaaatacccgtctacatcagaagcattaaatgctctgcgagaccttcatccattacccaagataattttggaatacaggcaggttcacaagatcaagtcaacctttgtagatggattactagcttgcatgaaaaagggctccatttcctctacatggaatcagactggaactgtgactggaagactttcagccaagcatcctaatatccaaggtatctccaagcacccaattcagattactacacctaagaattttaaaggtaaagaagacaagattctcacgatctccccgagggccatgtttgtttcatccaaaggccacacctttctagcagcagacttttcacagattgaattgcgcattcttacacatttatctggagatccggaacttctgaagttattccaggaatctgaaagagatgatgtattttctactctgacttcacagtggaaggatgtgcccgtggaacaggtgacacacgcagacagagagcaaaccaagaaggtggtgtacgcggtggtctatggagcagggaaggagcggctggctgcttgccttggagttcctattcaggaagctgcccagtttttggagagttttttgcagaagtacaagaaaatcaaggacttcgcccgagcagctattgcccagtgtcaccagacaggctgtgtggtgtccatcatgggcagaaggagacccctgccaaggattcacgctcatgaccagcaactccgggcacaagcagagcgacaggcagtgaacttcgtggtgcaaggctccgctgctgacctctgcaagctggccatgatccatgtcttcactgcagtggctgcttcccacaccttgacggccaggctggtggcccagatccatgatgagctgctgtttgaagtggaagatccgcagatcccggagtgtgcagctctcgtcaggaggaccatggagtccttggaacaggtacccctcaaggtgagcctgagtgccggccgctcatggggacacctggtgccactgcaggaggcctggggccctccgccaggcccatgtcgcactgagtctcccagcaacagcctggctgcccctgggtcccctgccagcacccagcccccacccctgcatttttcgccttcattttgtctgtagccccaggcaacagtgggaggagagaactggtttccagcagtccattgtgtggccttccccaaggtcaccagctctgtacgccccaggacgcattaaccctttggggctggggtggcccgccatcccctggagtaaatgcctgtgcaaagccctcctcatccttg

SEQ ID NO: 409536 - DNA, 996 bp, Homo sapiens
gtgggaaggaaaagagactccttacctcccttccttagcagggagggaggtaaggaaaaaaaaaatagcctccttggaagttgaagggaatgcagtcctgggccaccctgcctgagagagagcctgggaaatgtcctttgtagctgaggacacagccccacctccaccccacccagcaacaaaggggccaacatgaagaaagagaggaagggcggattggggcaggtcaccggaaatctctgttgcaaagtccacatcccctgtggaaagtgccagcacagcccacctgtaccctggggcttgaaggctgccccttatcccagctggggctctccgtcacatgcccgtgactactgcccggcaaggacgcccatgcagaccagctccctagggccctgggcccgctgtgcccatctgtgccagccaaggacgggcagcaggggcgaagataggacgtgacccctgcccctgaagactcgatccaggagacagagccaaggtcacacagaggacagagctggtggcccagatccatgatgagctgctgtttgaagtggaagatccgcagatcccggagtgtgcagctctcgtcaggaggaccatggagtccttggaacaggtgcaggcattggagctgcagcttcaggtacccctcaaggtgagcctgagtgccggccgctcatggggacacctggtgccactgcaggaggcctggggccctccgccaggcccatgtcgcactgagtctcccagcaacagcctggctgcccctgggtcccctgccagcacccagcccccacccctgcatttttcgccttcattttgtctgtagccccaggcaacagtgggaggagagaactggtttccagcagtccattgtgtggccttccccaaggtcaccagctctgtacgccccaggacgcattaaccctttggggctggggtggcccgccatcccctggagtaaatgcctgtgcaaagccctcctcatccttg

SEQ ID NO: 409537 - DNA, 490 bp, Homo sapiens
ctgggacattcagaagggtcacactttagaggcaggtctagactagccctagattacagctattccaaatccactctaacaaagcttagaagcaaacctcaaaagggtcaagatgattggcaagtaacttaagcctgccaaaacaccctcagaaggaagacagcacaccccagcattcaacaacataaaattcacagtgcccagcatccggccaaaagtcactagaccgacaaagcagcagaagctgaaagggaccaagtcagagcagaagatctctcgtgtcctcactgccagtccttcttaagaatcttgtatattgcctggcatgtagctgtgtggtgtccatcatgggcagaaggagacccctgccaaggattcacgctcatgaccagcaactccgggcacaagcagagcgacaggcagtgaacttcgtggtgcaagacagctcagagccagcacctctgtgtggaggtaccgtgagagctgtggc

SEQ ID NO: 409538 - DNA, 434 bp, Homo sapiens
tgtgcaggcaaaaaggacacccgtaccccatcttccttttcagatttgtgccagacaggtggcttctgatttccagaaatgtgttgaagtatctgatgctatgatgaacagctccattttttggtggttgttgaagctgtatctctgatgaagaaaaaaaaaaaaaagctctaaattcccttgaacttatgatgcagcttgcatcacacttaaagcacttaactttctaaatggctctgtattttgaactaaaaaagactcatgattaatttctcattatagaaaattccttagatacagaaaagaaataaaaatagtaataagtcacttgttatccactgtgcagaactgtggtatctatctttccacactttttgctaagcacatatatttataaaatacaattttttaggccaggcgcagtggctcatgcc

SEQ ID NO: 409539 - DNA, 389 bp, Homo sapiens
aaaggactgaacgaatgtttatccaggggctccaggtttcagagcaagccctgagaaagcctgagcttgcgggtcccacctctggcccctgcccaggccttccctttcgtagggctctgagccccactgctgcatggtgatccacgccccaacaacggggtcagcctgcctgtggcacaaagccactgttgcctcaaacttcaccgggcagtagtggggatggggggttcttgtgtgcctggtggctctggctggtgggggctccctgtgcctcccccatcctcccagccccagtgctctgtacgccccaggacgcattaaccctttggggctggggtggcccgccatcccctggagtaaatgcctgtgcaaagccctcctcatccttg

SEQ ID NO: 409540 - DNA, 2754 bp, Homo sapiens
atttagtagaaaaatactgtgaaaaatccattacagttaaagtgaacagcacatatggaaattcctcaagaaatattgtgaatcagaatgtacgtgagaacctgaagacactctacagacttacaatggacctttgctctaaactgaaggattatggtttatggcaactatttcgtactttggagcttcctctgataccaattttggcagtgatggaaagccatgccattcaggtgaacaaagaggagatggagaagacgtcagcacttcttggggctcgtctcaaggaattggagcaagaagctcattttgttgcaggagaacggtttcttataacgagcaataaccagcttcgagagatcctctttggcaagttaaagctgcacctgctgagtcaaaggaacagtctccccagaacggggttgcagaaatacccgtctacatcagaagcattaaatgctctgcgagaccttcatccattacccaagataattttggaatacaggcaggttcacaagatcaagtcaacctttgtagatggattactagcttgcatgaaaaagggctccatttcctctacatggaatcagactggaactgtgactggaagactttcagccaagcatcctaatatccaaggtatctccaagcacccaattcagattactacacctaagaattttaaaggtaaagaagacaagattctcacgatctccccgagggccatgtttgtttcatccaaaggccacacctttctagcagcagacttttcacagattgaattgcgcattcttacacatttatctggagatccggaacttctgaagttattccaggaatctgaaagagatgatgtattttctactctgacttcacagtggaaggatgtgcccgtggaacaggtgacacacgcagacagagagcaaaccaagaaggtggtgtacgcggtggtctatggagcagggaaggagcggctggctgcttgccttggagttcctattcaggaagctgcccagtttttggagagttttttgcagaagtacaagaaaatcaaggacttcgcccgagcagctattgcccagtgtcaccagacaggctgtgtggtgtccatcatgggcagaaggagacccctgccaaggattcacgctcatgaccagcaactccgggcacaagcagagcgacaggcagtgaacttcgtggtgcaaggctccgctgctgacctctgcaagctggccatgatccatgtcttcactgcagtggctgcttcccacaccttgacggccagcccttgtggaattgataaaggaagttggcatgtgaggagctgaggtctctctctgttgctgactgagtccttctgaaagctggacacagacacttttactcaggaacgcagttactcgctggtcatccttctgtcatcagccattggctgtcacgaggaaatgcttctcatagcaaaatgcaaagcagactcgtgtggaatattgggcacatggtctgtgttttgtgaacgtgatttgttcttccaggagtaatgtgaaaggctgtggatggcgtctggaagggacgggtgcaggctcagtgtggccaggcatctctcgctgaagcagcaggcatgaaactcgatcactgggaggcacacggtgcccctagagtgagctgagatcgcaccacttcactccagcctgggcgagagcgagagtctgtctaacagaaaaaaaaataagattcactctcagtcctctcctgccccatctcactgccatctgcattcattcccaacacacacgtgcacacacacgcacacacaagcacatgcacccatacacgtgttcacccatgcatacaacccatgcacacacatatacgcatatacactgatgccaggcagcctctagtgccccacagtgttctcatggtgtcctgaaatccatgcatcccgctcacttccacagtttctgcaggtaaattatagcttctcccaggatatgagcagcttgtgctagtttccgtcttggcaggaactgaaagccaaatggtggtcctgcctctaagatactgcaagtctagaaaagttgattcaaggctgggcgcagtggctcacacctgtaatcccagcatttgggaggccgagtcgggtggatcacttgagctcagaagtttcgatgaacaacatatgtgttgcctgggcaacataatgaaacctgtctctacaaaataaaagctggccatggtggtgcacacctgtagtcccagctactcaggaggctgaagtgggaggatcacctgagcctgggagttcaaggctgcagtgagccatgatcataccactgcactccagcctgggcaacagggcaagaacctgcctcaaaaaaagaaaaaaatcggttcactttcagcccttgtggaattgataaaggaagttggcatgtgaggagctgaggtctctctctgttgctgactgagtccttctgaaagctggacacagacacttttactcaggaacgcagttactcgctggtcatccttctgtcatcagccattggctgtcacgaggaaatgcttctcatagcaaaatgcaaagcagactcgtgtggaatattgggcacatggtctgtgttttgtgaacgtgatttgttcttccaggagtaatgtgaaaggctgtggatggcgtctggaagggacgggtgcaggctcagtgtggccaggcatctctcgctgaagcagcaggcatgaaactcgatcactggg

SEQ ID NO: 409541 - DNA, 1113 bp, Homo sapiens
ggaggtggctgctccagcctcacaccttgcaggaaaggagaaagtcatagtggtcagaaaagcatctgcccctgggcagccctttacagtcagccgtttaaagagccttcccttttaggactttcctggagtctcttttccttcccactccttacctccctccctgctaaggaaaaaaaaaatagcctccttggaagttgaagggaatgcagtcctgggccaccctgcctgagagagagcctgggaaatgtcctttgtagctgaggacacagccccacctccaccccacccagcaacaaaggggccaacatgaagaaagagaggaagggcggattggggcaggtcaccggaaatctctgttgcaaagtccacatcccctgtggaaagtgccagcacagcccacctgtaccctggggcttgaaggctgccccttatcccagctggggctctccgtcacatgcccgtgactactgcccggcaaggacgcccatgcagaccagctccctagggccctgggcccgctgtgcccatctgtgccagccaaggacgggcagcaggggcgaagataggacgtgacccctgcccctgaagactcgatccaggagacagagccaaggtcacacagaggacagagctggtggcccagatccatgatgagctgctgtttgaagtggaagatccgcagatcccggagtgtgcagctctcgtcaggaggaccatggagtccttggaacaggtgcaggcattggagctgcagcttcaggtacccctcaaggtgagcctgagtgccggccgctcatggggacacctggtgccactgcaggaggcctggggccctccgccaggcccatgtcgcactgagtctcccagcaacagcctggctgcccctgggtcccctgccagcacccagcccccacccctgcatttttcgccttcattttgtctgtagccccaggcaacagtgggaggagagaactggtttccagcagtccattgtgtggccttccccaaggtcaccagctctgtacgccccaggacgcattaaccctttggggctggggtggcccgccatcccctggagtaaatgcctgtgcaaagccctcctcatccttg

SEQ ID NO: 409542 - DNA, 718 bp, Homo sapiens
ggacccccgggagggctctcctggcctctaggagccaccaatcctcccgggggcaggaccctgaggggcaagcacaggatgccccaggacacacccacccatccaagggcaccttgtctgccggccgcagcctacccactggcacagaggccctggcaggtgggggaacctccgccaagatcgaggtgtcgtgactgggaggtggatgtggcataagcctgttgctgggcgagtgtggtgagtgtgcacgtgtatgcacatgtgtgcgtgtggctgtctgatcatgtatctggatgtgtgcacctgtgtgctgtaggccctgtccccctgcttggggtctgggaggtggctgggggtggctggcccaggcgtggggctcacctctggctgccacctgcaggtacccctcaaggtgagcctgagtgccggccgctcatggggacacctggtgccactgcaggaggcctggggccctccgccaggcccatgtcgcactgagtctcccagcaacagcctggctgcccctgggtcccctgccagcacccagcccccacccctgcatttttcgccttcattttgtctgtagccccaggcaacagtgggaggagagaactggtttccagcagtccattgtgtggccttccccaaggtcaccagctctgtacgccccaggacgcattaaccctttggggctggggtggcccgccatcccctggag

SEQ ID NO: 409543 - DNA, 507 bp, Homo sapiens
acatagcattgctggagtttacactgattctttttaactaataaagggctccatttcctctacatggaatcagactggaactgtgactggaagactttcagccaagcatcctgtaagttgtttaaacaactgtctttgttaaacgccattttcctgccttgctattgaagttttttctccatatgtgtttgcctgtgcactttctgtttccaagagggaacttcatactgatatgttgtgttttattctgtttattctgagaacatagcaggagaacaagacagatgggttctcttctcatgaagtgctgagttagcaagaggggggcttcacacccagaaacccatgcaccagtgtgcaggcaaaaaggacacccgtaccccatcttccttttcagatttgtgccagacaggtggcttctgatttccagaaatgtgttgaagtatctgatgctatgatgaacagctccattttttggtggttgttgaagctgtatctctgatgaag

SEQ ID NO: 409544 - DNA, 774 bp, Homo sapiens
aatttagcaataatgtcgtgctaggacatgagagggattaacattgaagacacagcctctatctttaagtaattcataatttagccaaatatattaaatatctgtaatataaaacttacctaggaaagtaaaatagagatccaagaatcaggagtcctaaagcatataatgagtctgttcctcttggaagccacacatgtcaaggtcatcagtaagcaggcctactctttcttcatattctgggttaatgttcaccttgactgcttggtaaatttccctcactggtgctgaagtaaccaaaatggggaaggagtgatgaaaactcatctttgagtaagcttagtgggaaatagtatatctgggcctatagagaagttgggtcattacttagaatgacaactggaaaagtacatagactgcttgccaatcagtttgttgtaccatgtacctgttcacagactcttttcaaaaaacaagtttattttactttttttggtactttggtcatgttgtttccttggtaaagatcaaagttgaataaagcttaacaaagtttaataaagaaaaggaataaattactatctaaatgtgttaaaagcaatcaccaagtttaatcacttaaaaaataaatattctcttaacagaaatgtcagcggttacttacaatgcttagcagctaaattccatgagtataacgtttaatgtctttttggtacattaaatattcagtgcctttgatgaagggaacaaactgataatttcattcatgtgcag

SEQ ID NO: 409545 - DNA, 442 bp, Homo sapiens
tgcaaatgggagaggaagctggtaatgaatacatattttgcatgtgattagtaagattttcctaactggatagatagaggaaagaaaataaaataaaactaagcgttttataggggtagttattttagggagcaggaaaaacagagaatgggataaatacaacaaaaactctaaatgtaagtagtataacaaggaaaatcaggagataacaggaattttggaatagactcaacagggagggggtttagaagctgaaagtaaattacagtctaggtcttgacattatctagattataatggttagaatagtctattgtctacattcttacaatttgatatccctcatcaattcaacatcaaattaaatttataacagcaccaactcctttatgattaaatgaaaaagtttatagctctaacctgtcttatggttgtgattcat

SEQ ID NO: 409546 - DNA, 269 bp, Homo sapiens
tgcactgcagcctgggtgacagagagagagactctgtctaaaaaaagtaaatgattagtacataacttgtattaccaaatgacttgcccaacattgttagttaatggaaaccaatgatatccctagtaactgtcagggctaagaagttcatttttatagcctgttacgaaaaagttttgaaataaaccaacatatttatacttgagagagtagttgtctgtttattattttaaatagaccagaactatgattggtgagagacaaattat

SEQ ID NO: 409547 - DNA, 434 bp, Homo sapiens
aaaaacaaaaaaagaaacaaacaaaaaaaaaacaaaacacaacacatcctttggcccatcaattgtcctcagtagctaccctagagaaattattgctcacatgctcaaagaagcatgcccaaggatgctttagctactatattgcttgagcactccgccagtagaggaatggctgaataaagcctgtccatccctcctatgggacacactgcagggttgacaacaaagagggaggtttgtagggaccggcatgatccttgagacatgatgtagggggagaaaaccaagctacagatggatgtgctaagcagacaggataccaatcatgtttacagcccccactagacaatcctctacatcgtctgcatctttacatgtgggaatacccagaacagcgtgtggcatcccctaaacttcttagagagggagagaaa

SEQ ID NO: 409548 - DNA, 651 bp, Homo sapiens
ttcggcacatgagggagggtacctttcacatgatctgcctcagggaaggatcagacaatctttgctatacatgctgttttccaaattccttcaacctaaaatattcagtattccaagtcaccatattttggggtagtatgtcttgaaccttatcatcagtgatgtaatattcctccccagaaaatccttttgttggtaagttacaaacaattgctataacgattgttgacccactggcttcctacaggcaacccagctatactcagctgagtgtcaattcataagggttggaatcatttgagtttgctgcctgcacagtttgtgtctctaagccctgtgatactacctagtcctacgtttaaagagtaggttcaaaataaacaatggtaatacaacaattctaagggtaaagtgacagagcttgccttattgcacttttgtgtgcagatctttctctaaccttgtagcatttattcctttggacgtgtttcttttatgctctccttctcccttaaaataaatacttaaatgtaattaaaaattattaatccattactttgtttccttttttgtactgtgataattttctaactgacttgaatgtacatacaaaatttaataaaagactatgttttatgtttgccattaaaa

SEQ ID NO: 409549 - DNA, 629 bp, Homo sapiens
gttgcagtgagctgagatcatgccactgcactccagcctgggtgagtgagactctgtctcaaaaaaaaaaaaaaaaccccaaaaggcagcaagcaagatgtggctcgtggattgtagtttaccggccctgtcttagtggttaaatatctagctttaactctgtccatttctttgtcccccaagaaaatgtattggtgtgcacatgagtgagcttgaatgtgctctaaattatttgtgaaaaattattagcaaactttgatacttgtaactaagagattacttgtaacttacctcatgacttggaactcttaagatgaattcaaacaccaggctatcaagactaaggatacacaggttgagaatccctgaaccgcaaattggaaatgctttaaaatctacacttctggagcgctgacaggaggccacaagtggaaaatttcgcacctgacctcctgtgatgggtcaaggtcaaaacgcagtcgaaactttgtttcatatatgaaattgtcaaaaatattgtataaagttatctacaggctatgtgtgtaaggtgtatatgaaacaaaggaattttgtgtttagacttgatacatccccaaggtacatcattatgtatatgcagatttaaa

SEQ ID NO: 409550 - DNA, 1373 bp, Homo sapiens
taaaggtgggccactgcccccacagtttctctctgcttctggtcagctgggttgtcctgcatggtgacgggtgtcatcccgaacaaatcagatggcatcagaggcactccatcaagtgggagatggggaggaggctgtactgaagaaagaaaacttcaacatgatgaatgcccttgaccaactgccaaaaccctttccaaaccccaagtctatgaaccggaccgtcactaccaaaggactcccactagcctcaaagggcaatttggtcaacttcttggaggatgataccatcaacctactgaagccgctgccagtagaggattcagactgcagctctgatgagaccagcatctctgccttctcatccaccttgctgaaccccatcaaattagctgtgacccagcccaacagcagcttctttgcagggatgctggagggggagctgaacaaactcagcttctccccaatggccaagaatgcagaaaatgaggacctggcgctcggcccctgcccatgcccatcgaagtcccagatggccacaaggggcctgctggaccttgacaaccctgagctggagacagaaacctcctcaacgcactcagaatcttctgtggttgtggacctgccggacacccccttcatctttgagcacaccgtcaacaattccacagctgtgatttcctggacctacgccttgggcaagcagccggtcagtttctaccagctcctgttacaggaggtggccaagacacaggagaatgagttgcccgaggcaaagaatcgtccatggatcttcaacaagattttgggcactactgtcaagctgatggagctaaagcctaacacgtgttactgcctcagtgtccgtgcagccaacacagctggggtggggaagtggtgcaagccctacaaatttgcaaccctggccactgacttcagcagctttcctgagaactaccccatccagatcaccgtgcggcgcaaggaaccccggcaaaagatcgtgtccatcgggccggaggagatgcggaggctggaggatctggaatacctatttccctgttaagggggagggccccaggacacccctcacctactttcagcttcaaccccaggccctcagaaaccagagccatgagacctaccataccaccagcaccctgcgggcccggggtctggcagagtggtatgggcaccccacccctgggctggggccaaggctacataggggccccattcacctggaggcatctcaggccaggccatgccaggctcagccactgcccacagctgctagactccctcctcctccaaatctgggctgggtctaggtccctcattaaagaactgcaggtcatccagcaaaaaaaaaa

SEQ ID NO: 409551 - DNA, 382 bp, Homo sapiens
gcatcactaagtggacaagggccaggtgacaggtgatgaggtcagtgggcttaggcctgcagtccagagggagtgtgcagatacagaagaaaaggaggaaggtgttggctgtgagtccaataccagcttgggaaaaaagggcaatttttaatagtgtcataagtggactatggtcgtcttaatggtgaagagggatcatattttatatatctgaaaaagcaatagatatcctatcatcagtattatttattgcacggtcaaaattattaccaatattatcattttaattttacccatttatcctgattaacctggactatctcatataaattctttaaaatgtagcctaagcattttatcttacaacaaataagttatacgt

SEQ ID NO: 409552 - DNA, 497 bp, Homo sapiens
gctttgtcagatgaccaaccaactgcaagggaagctggaaaatggagctacctgtgtggccagggaaaaaaaatcccaggaaaaggatttactgagtgtgtatgaaatgttagtcagttctcagtgattttagaacagaagcaacagtgctctgtaaatttcctttttctatgcatgtgtagttattagtgttgctgttttcactatcatggtgtttgcatagtgttttggggattgtattttgtttcttttgttttggggtgggttttttttttcttatcttgttttttctgtagtgaagaatgcacatagaggtactgcatgagatccaattcctacaagtgaccacaagtcatttcatttcctcattgttgcatagagtaataatttgggcaagttgcagctggaagtaatttttttaaaaagccaaatgagaggtctcaagcaaaatagaagattatttctcccacacattaaagtctaggtaggcagtctag

SEQ ID NO: 409553 - DNA, 406 bp, Homo sapiens
ccatcaggacagcagtgtgaagaaagtgtggtgagttccatctcacagatgatcaagctctggctcacagatactaagaccctctccagataactggcagaatggcaatgaggttctatctcctaccctcccacacaatggaaccagcagcttcttatttggaggatgataattttatacttccccagtattgttccctaagggtactcactcaacagcccttcacattgaggaagaggatggtagagatgaaatcctgccctttgggcatgaggcatagctgtggggtcatatggattaccaggtctctgaggttaactgtggggtgaaataaagaaatataacctcatgtggaacaagaaagagcagtgaagagaatagaaaacagcaggccctccagggatca

SEQ ID NO: 409554 - DNA, 2217 bp, Homo sapiens
actgaagtaatcagattggactgttaaaatagcaaatgaaaatcagaagggaggtgcagtgacagcgaacccactttttccctttggaccccagttatgaagaaaaaattggaaactgaacttgtgacctataagatgaccctagacccaagaggctgggttgaagagagggcacagctcagttctagcacagccaatgccttttacgtgtgtaatttggtcccaagaagacccagcctgcaagcctagtggaatcagaatagagaaaagttctcattctgcacatacagcattcagagcctcgtcatcatacattatagatggtatagcatccagccaggtgctgatgttataaaaaatgatggaatttactcgaggtattttttctcctttgctgcaaatggtagatatagcttgaaagtgcatgtcaatcactctcccagcataagcaccccagcccactctattccagggagtcatgctatgtatgtaccaggttacacagcaaacggtaatattcagatgaatgctccaaggaaatcagtaggcagaaatgaggaggagcgaaagtggggctttagccgagtcagctcaggaggctccttttcagtgctgggagttccagctggcccccaccctgatgtgtttccaccatgcaaaattattgacctggaagctgtaaaagtagaagaggaattgaccctatcttggacagcacctggagaagactttgatcagggccaggctacaagctatgaaataagaatgagtaaaagtctacagaatatccaagatgactttaacaatgctattttagtaaatacatcaaagcgaaatcctcagcaagctggcatcagggagatatttacgttctcaccccaaatttccacgaatggacctgaacatcagccaaatggagaaacacatgaaagccacagaatttatgttgcaatacgagcaatggataggaactccttacagtctgctgtatctaacattgcccaggcgcctctgtttattccccccaattctgatcctgtacctgccagagattatcttatattgaaaggagttttaacagcaatgggtttgataggaatcatttgccttattatagttgtgacacatcatactttaagcaggaaaaagagagcagacaagaaagagaatggaacaaaattattataaataaatatccaaagtgtcttccttcttagatataagacccatggccttcgactacaaaaacatactaacaaagtcaaattaacatcaaaactgtattaaaatgcattgagtttttgtacaatacagataagatttttacatggtagatcaacaaattctttttgggggtagattagaaaacccttacactttggctatgaacaaataataaaaattattctttaaagtaatgtctttaaaggcaaagggaagggtaaagtcggaccagtgtcaaggaaagtttgttttattgaggtggaaaaatagccccaagcagagaaaaggagggtaggtctgcattataactgtctgtgtgaagcaatcatttagttactttgattaatttttcttttctccttatctgtgcagaacaggttgcttgtttacaactgaagatcatgctatattttatatatgaagcccctaatgcaaagctctttacctcttgctattttgttatatatattacagatgaaatctcactgctaatgctcagagatcttttttcactgtaagaggtaacctttaacaatatgggtattacctttgtctcttcataccggttttatgacaaaggtctattgaatttatttgtttgtaagtttctactcccatcaaagcagctttctaagttattgccttggttattatggatgatagttatagcccttataatgccttaactaaggaagaaaagatgttattctgagtttgttttaatacatatatgaacatatagttttattcaattaaaccaaagaagaggtcagcagggagatactaacctttggaaatgattagctggctctgttttttggttaaataagagtctttaatcctttctccatcaagagttacttaccaagggcaggggaagggggatatagaggtcacaaggaaataaaaatcatctttcatctttaattttactccttcctcttatttttttaaaagattatcgaacaataaaatcatttgcctttttaaaaa

SEQ ID NO: 409555 - DNA, 4023 bp, Homo sapiens
tcccagatggatccaccccagacttttcaaagaagacacctccttcatcttgtgttctaaaaccttgcaagttcaggaagaaaccatctgcatccatattgaaaacctgacacaatgtatgcagcaggctcagtgtgagtgaactggaggcttctctacaacatgacccaaaggagcattgcaggtcctatttgcaacctgaagtttgtgactctcctggttgccttaagttcagaactcccattcctgggagctggagtacagcttcaagacaatgggtataatggattgctcattgcaattaatcctcaggtacctgagaatcagaacctcatctcaaacattaaggaaatgataactgaagcttcattttacctatttaatgctaccaagagaagagtatttttcagaaatataaagattttaatacctgccacatggaaagctaataataacagcaaaataaaacaagaatcatatgaaaaggcaaatgtcatagtgactgactggtatggggcacatggagatgatccatacaccctacaatacagagggtgtggaaaagagggaaaatacattcatttcacacctaatttcctactgaatgataacttaacagctggctacggatcacgaggccgagtgtttgtccatgaatgggcccacctccgttggggtgtgttcgatgagtataacaatgacaaacctttctacataaatgggcaaaatcaaattaaagtgacaaggtgttcatctgacatcacaggcatttttgtgtgtgaaaaaggtccttgcccccaagaaaactgtattattagtaagctttttaaagaaggatgcacctttatctacaatagcacccaaaatgcaactgcatcaataatgttcatgcaaagtttatcttctgtggttgaattttgtaatgcaagtacccacaaccaagaagcaccaaacctacagaaccagatgtgcagcctcagaagtgcatgggatgtaatcacagactctgctgactttcaccacagctttcccatgaatgggactgagcttccacctcctcccacattctcgcttgtacaggctggtgacaaagtggtctgtttagtgctggatgtgtccagcaagatggcagaggctgacagactccttcaactacaacaagccgcagaattttatttgatgcagattgttgaaattcataccttcgtgggcattgccagtttcgacagcaaaggagagatcagagcccagctacaccaaattaacagcaatgatgatcgaaagttgctggtttcatatctgcccaccactgtatcagctaaaacagacatcagcatttgttcagggcttaagaaaggatttgaggtggttgaaaaactgaatggaaaagcttatggctctgtgatgatattagtgaccagcggagatgataagcttcttggcaattgcttacccactgtgctcagcagtggttcaacaattcactccattgccctgggttcatctgcagccccaaatctggaggaattatcacgtcttacaggaggtttaaagttctttgttccagatatatcaaactccaatagcatgattgatgctttcagtagaatttcctctggaactggagacattttccagcaacatattcagcttgaaagtacaggtgaaaatgtcaaacctcaccatcaattgaaaaacacagtgactgtggataatactgtgggcaacgacactatgtttctagttacgtggcaggccagtggtcctcctgagattatattatttgatcctgatggacgaaaatactacacaaataattttatcaccaatctaacttttcggacagctagtctttggattccaggaacagctaagcctgggcactggacttacaccctgaacaatacccatcattctctgcaagccctgaaagtgacagtgacctctcgcgcctccaactcagctgtgcccccagccactgtggaagcctttgtggaaagagacagcctccattttcctcatcctgtgatgatttatgccaatgtgaaacagggattttatcccattcttaatgccactgtcactgccacagttgagccagagactggagatcctgttacgctgagactccttgatgatggagcaggtgctgatgttataaaaaatgatggaatttactcgaggtattttttctcctttgctgcaaatggtagatatagcttgaaagtgcatgtcaatcactctcccagcataagcaccccagcccactctattccagggagtcatgctatgtatgtaccaggttacacagcaaacggtaatattcagatgaatgctccaaggaaatcagtaggcagaaatgaggaggagcgaaagtggggctttagccgagtcagctcaggaggctccttttcagtgctgggagttccagctggcccccaccctgatgtgtttccaccatgcaaaattattgacctggaagctgtaaaagtagaagaggaattgaccctatcttggacagcacctggagaagactttgatcagggccaggctacaagctatgaaataagaatgagtaaaagtctacagaatatccaagatgactttaacaatgctattttagtaaatacatcaaagcgaaatcctcagcaagctggcatcagggagatatttacgttctcaccccaaatttccacgaatggacctgaacatcagccaaatggagaaacacatgaaagccacagaatttatgttgcaatacgagcaatggataggaactccttacagtctgctgtatctaacattgcccaggcgcctctgtttattccccccaattctgatcctgtacctgccagagattatcttatattgaaaggagttttaacagcaatgggtttgataggaatcatttgccttattatagttgtgacacatcatactttaagcaggaaaaagagagcagacaagaaagagaatggaacaaaattattataaataaatatccaaagtgtcttccttcttagatataagacccatggccttcgactacaaaaacatactaacaaagtcaaattaacatcaaaactgtattaaaatgcattgagtttttgtacaatacagataagatttttacatggtagatcaacaaattctttttgggggtagattagaaaacccttacactttggctatgaacaaataataaaaattattctttaaagtaatgtctttaaaggcaaagggaagggtaaagtcggaccagtgtcaaggaaagtttgttttattgaggtggaaaaatagccccaagcagagaaaaggagggtaggtctgcattataactgtctgtgtgaagcaatcatttagttactttgattaatttttcttttctccttatctgtgcagaacaggttgcttgtttacaactgaagatcatgctatattttatatatgaagcccctaatgcaaagctctttacctcttgctattttgttatatatattacagatgaaatctcactgctaatgctcagagatcttttttcactgtaagaggtaacctttaacaatatgggtattacctttgtctcttcataccggttttatgacaaaggtctattgaatttatttgtttgtaagtttctactcccatcaaagcagctttctaagttattgccttggttattatggatgatagttatagcccttataatgccttaactaaggaagaaaagatgttattctgagtttgttttaatacatatatgaacatatagttttattcaattaaaccaaagaagaggtcagcagggagatactaacctttggaaatgattagctggctctgttttttggttaaataagagtctttaatcctttctccatcaagagttacttaccaagggcaggggaagggggatatagaggtcacaaggaaataaaaatcatctttcatctttaattttactccttcctcttatttttttaaaagattatcgaacaataaaatcatttgcctttttaaaaa

SEQ ID NO: 409556 - DNA, 2011 bp, Homo sapiens
tcccagatggatccaccccagacttttcaaagaagacacctccttcatcttgtgttctaaaaccttgcaagttcaggaagaaaccatctgcatccatattgaaaacctgacacaatgtatgcagcaggctcagtgtgagtgaactggaggcttctctacaacatgacccaaaggagcattgcaggtcctatttgcaacctgaagtttgtgactctcctggttgccttaagttcagaactcccattcctgggagctggagtacagcttcaagacaatgggtataatggattgctcattgcaattaatcctcaggtacctgagaatcagaacctcatctcaaacattaaggaaatgataactgaagcttcattttacctatttaatgctaccaagagaagagtatttttcagaaatataaagattttaatacctgccacatggaaagctaataataacagcaaaataaaacaagaatcatatgaaaaggcaaatgtcatagtgactgactggtatggggcacatggagatgatccatacaccctacaatacagagggtgtggaaaagagggaaaatacattcatttcacacctaatttcctactgaatgataacttaacagctggctacggatcacgaggccgagtgtttgtccatgaatgggcccacctccgttggggtgtgttcgatgagtataacaatgacaaacctttctacataaatgggcaaaatcaaattaaagtgacaaggtgttcatctgacatcacaggcatttttgtgtgtgaaaaaggtccttgcccccaagaaaactgtattattagtaagctttttaaagaaggatgcacctttatctacaatagcacccaaaatgcaactgcatcaataatgttcatgcaaagtttatcttctgtggttgaattttgtaatgcaagtacccacaaccaagaagcaccaaacctacagaaccagatgtgcagcctcagaagtgcatgggatgtaatcacagactctgctgactttcaccacagctttcccatgaatgggactgagcttccacctcctcccacattctcgcttgtacaggctggtgacaaagtggtctgtttagtgctggatgtgtccagcaagatggcagaggctgacagactccttcaactacaacaagccgcagaattttatttgatgcagattgttgaaattcataccttcgtgggcattgccagtttcgacagcaaaggagagatcagagcccagctacaccaaattaacagcaatgatgatcgaaagttgctggtttcatatctgcccaccactgtatcagctaaaacagacatcagcatttgttcagggcttaagaaaggatttgaggtggttgaaaaactgaatggaaaagcttatggctctgtgatgatattagtgaccagcggagatgataagcttcttggcaattgcttacccactgtgctcagcagtggttcaacaattcactccattgccctgggttcatctgcagccccaaatctggaggaattatcacgtcttacaggaggtttaaagttctttgttccagatatatcaaactccaatagcatgattgatgctttcagtagaatttcctctggaactggagacattttccagcaacatattcagcttgaaagtacaggtgaaaatgtcaaacctcaccatcaattgaaaaacacagtgactgtggataatactgtgggcaacgacactatgtttctagttacgtggcaggccagtggtcctcctgagattatattatttgatcctgatggacgaaaatactacacaaataattttatcaccaatctaacttttcggacagctagtctttggattccaggaacagctaagcttagaagattcgcatttattccagatgggaggctgaatctctcagttgtagattttgacacattggcactatttttgtttctgatttattgccttggccataaggtcaaaggcaacaataaagtgtactttcatt

SEQ ID NO: 409557 - DNA, 2251 bp, Homo sapiens
tcccagatggatccaccccagacttttcaaagaagacacctccttcatcttgtgttctaaaaccttgcaagttcaggaagaaaccatctgcatccatattgaaaacctgacacaatgtatgcagcaggctcagtgtgagtgaactggaggcttctctacaacatgacccaaaggagcattgcaggtcctatttgcaacctgaagtttgtgactctcctggttgccttaagttcagaactcccattcctgggagctggagtacagcttcaagacaatgggtataatggattgctcattgcaattaatcctcaggtacctgagaatcagaacctcatctcaaacattaaggaaatgataactgaagcttcattttacctatttaatgctaccaagagaagagtatttttcagaaatataaagattttaatacctgccacatggaaagctaataataacagcaaaataaaacaagaatcatatgaaaaggcaaatgtcatagtgactgactggtatggggcacatggagatgatccatacaccctacaatacagagggtgtggaaaagagggaaaatacattcatttcacacctaatttcctactgaatgataacttaacagctggctacggatcacgaggccgagtgtttgtccatgaatgggcccacctccgttggggtgtgttcgatgagtataacaatgacaaacctttctacataaatgggcaaaatcaaattaaagtgacaaggtgttcatctgacatcacaggcatttttgtgtgtgaaaaaggtccttgcccccaagaaaactgtattattagtaagctttttaaagaaggatgcacctttatctacaatagcacccaaaatgcaactgcatcaataatgttcatgcaaagtttatcttctgtggttgaattttgtaatgcaagtacccacaaccaagaagcaccaaacctacagaaccagatgtgcagcctcagaagtgcatgggatgtaatcacagactctgctgactttcaccacagctttcccatgaatgggactgagcttccacctcctcccacattctcgcttgtacaggctggtgacaaagtggtctgtttagtgctggatgtgtccagcaagatggcagaggctgacagactccttcaactacaacaagccgcagaattttatttgatgcagattgttgaaattcataccttcgtgggcattgccagtttcgacagcaaaggagagatcagagcccagctacaccaaattaacagcaatgatgatcgaaagttgctggtttcatatctgcccaccactgtatcagctaaaacagacatcagcatttgttcagggcttaagaaaggatttgaggtggttgaaaaactgaatggaaaagcttatggctctgtgatgatattagtgaccagcggagatgataagcttcttggcaattgcttacccactgtgctcagcagtggttcaacaattcactccattgccctgggttcatctgcagccccaaatctggaggaattatcacgtcttacaggaggtttaaagttctttgttccagatatatcaaactccaatagcatgattgatgctttcagtagaatttcctctggaactggagacattttccagcaacatattcagcttgaaagtacaggtgaaaatgtcaaacctcaccatcaattgaaaaacacagtgactgtggataatactgtgggcaacgacactatgtttctagttacgtggcaggccagtggtcctcctgagattatattatttgatcctgatggacgaaaatactacacaaataattttatcaccaatctaacttttcggacagctagtctttggattccaggaacagctaagcctgggcactggacttacaccctgaacaatacccatcattctctgcaagccctgaaagtgacagtgacctctcgcgcctccaactcagctgtgcccccagccactgtggaagcctttgtggaaagagacagcctccattttcctcatcctgtgatgatttatgccaatgtgaaacagggattttatcccattcttaatgccactgtcactgccacagttgagccagagactggagatcctgttacgctgagactccttgatgatggagcaggctgatgtgtctattgaagattctgtgatctcactctcaggagaccattgcatcattggccgcacactggtggcccatgaagaagcagatgacttggcaaataag

SEQ ID NO: 409558 - DNA, 965 bp, Homo sapiens
tcccagatggatccaccccagacttttcaaagaagacacctccttcatcttgtgttctaaaaccttgcaagttcaggaagaaaccatctgcatccatattgaaaacctgacacaatgtatgcagcaggctcagtgtgagtgaactggaggcttctctacaacatgacccaaaggagcattgcaggtcctatttgcaacctgaagtttgtgactctcctggttgccttaagttcagaactcccattcctgggagctggagtacagcttcaagacaatgggtataatggattgctcattgcaattaatcctcaggtacctgagaatcagaacctcatctcaaacattaaggaaatgataactgaagcttcattttacctatttaatgctaccaagagaagagtatttttcagaaatataaagattttaatacctgccacatggaaagctaataataacagcaaaataaaacaagaatcatatgaaaaggcaaatgtcatagtgactgactggtatggggcacatggagatgatccatacaccctacaatacagagggtgtggaaaagagggaaaatacattcatttcacacctaatttcctactgaatgataacttaacagctggctacggatcacgaggccgagtgtttgtccatgaatgggcccacctccgttggggtgtgttcgatgagtataacaatgacaaacctttctacataaatgggcaaaatcaaattaaagtgacaaggtgttcatctgacatcacaggcatttttgtgtgtgaaaaaggtccttgcccccaagaaaactgtattattagtaagctttttaaagaaggatgcacctttatctacaatagcacccaaaatgcaactgcatcaataatgttcatgcaaagtttatcttctgtggttgaattttgtaatgcaagtaccacatccagagtgtcgggatcctcatagagtca

SEQ ID NO: 409559 - DNA, 290 bp, Homo sapiens
atctctctgtctaatttctaatcactgtaaatatgttcaaaatgaaagaaaaaagtaatcttcacatgtatccccaaaccttaaataaaagttaaaaaaagaaaatgatgagattgtccaaatgcttagtgatatgaaaatctcataaggaatctggtccactggacataatggctcacacctgtaatcctagcaactccgaaggctgaggtaggaggattgcttgagcccaaaaattcaagaccagcctggataacatcatgaggtccccatctctaaaataaaattta

SEQ ID NO: 409560 - DNA, 541 bp, Homo sapiens
cagggagttgtggttgcaacactgtactccagcctgggcaacagagggagactctgtctcaacaaacaaacaaacaaagaaaaaaccccacagctatctagggaaaaagtaaagcaaccagcttttagaagtgacatattgttatattttcaccataggtttgctttaagaaatagtgctcccttcagaatggaagaatttatctgcctcttatttgatgtggatcagagctaagatggctgactaaataaacatgggggactggaatctccttggagatactctggaggaagttcacatccactccaccatgattggaaagatctggctcaccatcctgttcatatttcgaatgcttgttctgggtgtagcagctgaagatgtctggaatgatgagcagtctggcttcatctcctgcaaagaaacctaattgctacgggggccggaagaggaagaggtgcggctccgacagccagaggggcgggcatacgcagcctccctcggctcagcctgctactggggatgcagagcgtcctggtcg

SEQ ID NO: 409561 - DNA, 1901 bp, Homo sapiens
cagggagttgtggttgcaacactgtactccagcctgggcaacagagggagactctgtctcaacaaacaaacaaacaaagaaaaaaccccacagctatctagggaaaaagtaaagcaaccagcttttagaagtgacatattgttatattttcaccataggtttgctttaagaaatagtgctcccttcagaatggaagaatttatctgcctcttatttgatgtggatcagagctaagatggctgactaaataaacatgggggactggaatctccttggagatactctggaggaagttcacatccactccaccatgattggaaagatctggctcaccatcctgttcatatttcgaatgcttgttctgggtgtagcagctgaagatgtctggaatgatgagcagtctggcttcatctgcaatacagaacaaccaggctgcagaaatgtatgctacgaccaggcctttcctatctccctcattagatactgggttctgcaggtgatatttgtgtcttcaccatccctggtctacatgggccatgcattgtaccgactgagagttcttgaggaagagaggcaaaggatgaaagctcagttaagagtagaactggaggaggtagagtttgaaatgcctagggatcggaggagattggagcaagagctttgtcagctggagaaaaggaaactaaataaagctccactcagaggaaccttgctttgcacttatgtgatacacattttcactcgctctgtggttgaagttggattcatgattggacagtaccttttatatggatttcacttagagccgctatttaagtgccatggccacccgtgtccaaatataatcgactgttttgtctcaagaccaacagaaaagacaatattcctattatttatgcaatctatagccactatttcacttttcttaaacattcttgaaattttccacctaggttttaaaaagattaaaagagggctttggggaaaatacaagttgaagaaggaacataatgaattccatgcaaacaaggcaaaacaaaatgtagccaaataccagagcacatctgcaaattcactgaagcgactcccttctgcccctgattataatctgttagtggaaaagcaaacacacactgcagtgtaccctagtttaaattcatcttctgtattccagccaaatcctgacaatcatagtgtaaatgatgagaaatgcattttggatgaacaggaaactgtactttctaatgagatttccacacttagtactagttgtagtcattttcaacacatcagttcaaacaataacaaagacactcataaaatatttggaaaagaacttaatggtaaccagttaatggaaaaaagagaaactgaaggcaaagacagcaaaaggaactactactctagaggtcaccgttctattccaggtgttgctatagatggagagaacaacatgaggcagtcaccccaaacagttttctccttgccagctaactgcgattggaaaccgcggtggcttagagctacatggggttcctctacagaacatgaaaaccgggggtcacctcctaaaggtaacctcaagggccagttcagaaagggcacagtcagaacccttcctccttcacaaggagattctcaatcacttgacattccaaacactgctgattctttgggagggctgtcctttgagccagggttggtcagaacctgtaataatcctgtttgtcctccaaatcacgtagtgtccctaacgaacaatctcattggtaggcgggttcccacagatcttcagatctaaacagcggttggcttttagacattatatatattatcagagaagtagcctagtggtcgtggggcacagaaaaaatagataggggcagctctaaagaccagct

SEQ ID NO: 409562 - DNA, 2153 bp, Homo sapiens
actattataagcattctttatctgtgctgtccaaaaaagcagccattaggtagatgcagctctttacatttttattaaaattatttaaaattaaaaattcaattgctctgacacacaaaccataatgcaagtgttcaatagctacatttggctactggctgccttattggctagcacagatagaatatttccattgttgcagaaagttctattggatggtgctgttttaaaagcaaggataagcagaaagggacatggattttagttgatggatgactcactcactacattcaactgaactgaatctgctctataccagcaaagggacaaattcagaaaataaattgaagatggccatgctgtaacttctaaacatggtttgcttctcagatttacctaaactaagaaaggtttgctttaagaaatagtgctcccttcagaatggaagaatttatctgcctcttatttgatgtggatcagagctaagatggctgactaaataaacatgggggactggaatctccttggagatactctggaggaagttcacatccactccaccatgattggaaagatctggctcaccatcctgttcatatttcgaatgcttgttctgggtgtagcagctgaagatgtctggaatgatgagcagtctggcttcatctgcaatacagaacaaccaggctgcagaaatgtatgctacgaccaggcctttcctatctccctcattagatactgggttctgcaggtgatatttgtgtcttcaccatccctggtctacatgggccatgcattgtaccgactgagagttcttgaggaagagaggcaaaggatgaaagctcagttaagagtagaactggaggaggtagagtttgaaatgcctagggatcggaggagattggagcaagagctttgtcagctggagaaaaggaaactaaataaagctccactcagaggaaccttgctttgcacttatgtgatacacattttcactcgctctgtggttgaagttggattcatgattggacagtaccttttatatggatttcacttagagccgctatttaagtgccatggccacccgtgtccaaatataatcgactgttttgtctcaagaccaacagaaaagacaatattcctattatttatgcaatctatagccactatttcacttttcttaaacattcttgaaattttccacctaggttttaaaaagattaaaagagggctttggggaaaatacaagttgaagaaggaacataatgaattccatgcaaacaaggcaaaacaaaatgtagccaaataccagagcacatctgcaaattcactgaagcgactcccttctgcccctgattataatctgttagtggaaaagcaaacacacactgcagtgtaccctagtttaaattcatcttctgtattccagccaaatcctgacaatcatagtgtaaatgatgagaaatgcattttggatgaacaggaaactgtactttctaatgagatttccacacttagtactagttgtagtcattttcaacacatcagttcaaacaataacaaagacactcataaaatatttggaaaagaacttaatggtaaccagttaatggaaaaaagagaaactgaaggcaaagacagcaaaaggaactactactctagaggtcaccgttctattccaggtgttgctatagatggagagaacaacatgaggcagtcaccccaaacagttttctccttgccagctaactgcgattggaaaccgcggtggcttagagctacatggggttcctctacagaacatgaaaaccgggggtcacctcctaaaggtaacctcaagggccagttcagaaagggcacagtcagaacccttcctccttcacaaggagattctcaatcacttgacattccaaacactgctgattctttgggagggctgtcctttgagccagggttggtcagaacctgtaataatcctgtttgtcctccaaatcacgtagtgtccctaacgaacaatctcattggtaggcgggttcccacagatcttcagatctaaacagcggttggcttttagacattatatatattatcagagaagtagcctagtggtcgtggggcacagaaaaaatagataggggcagctctaaagaccagct

SEQ ID NO: 409563 - DNA, 466 bp, Homo sapiens
actattataagcattctttatctgtgctgtccaaaaaagcagccattaggtagatgcagctctttacatttttattaaaattatttaaaattaaaaattcaattgctctgacacacaaaccataatgcaagtgttcaatagctacatttggctactggctgccttattggctagcacagatagaatatttccattgttgcagaaagttctattggatggtgctgttttaaaagcaaggataagcagaaagggacatggattttagttgatggatgactcactcactacattcaactgaactgaatctgctctataccagcaaagggacaaattcagaaaataaattgaagatggccatgctgtaacttctaaacatggtttgcttctcagatttacctaaactaagaaaggtttgtgttaatctctctgttttagcttattaagaaagagttgtttgaaatgtttt

SEQ ID NO: 409564 - DNA, 276 bp, Homo sapiens
caggaagtagccagaaagagcacgtcgcccctcatccttttataactatagggtctggattgacaaagcaggagcatcaacattttggacaaacagcagcattttaagttccccttgattaaaaaccgcctaaatccagcccccaaaaaatcagcctaatggctgtcagcatgaccataaaccacaaatgacacctccaatcagaaacattccaaccctgagataaagcgccctccaaccagaaacattcctaccccgaaatcaaacactcctctg

SEQ ID NO: 409565 - DNA, 993 bp, Homo sapiens
atccaagatgaagaaaaacatcagaaactgccaaccttcctccacttccttcagcaagggtcgagagtgcgccatggcaccacccaccctgaagatgtcatcttcagaagcagcggacacagcctccttcatggccttgtccagctcctcctcagcggtgagatctccagagatggcccgtcggatctcaggcccgatgtcatgcagtgtgcgcaagccagcctggaatccaaggggaggatggtgaggaccacgctcctttcctccaagctccccagccagccacagcctcgggccaagacctgtccctccagggccctggcatcctccacccagccagtcgaccctccggaagagagaagcttgtttggcttggtactggacttgggatgagagctcttccttctacgttccaagagagaagcttctttggcttggtactggacttgggatgacagctctgtttctctgagggccgtcctgaccagggcaaacagggtggcattgaacatgactgtcccgtcgctgttcagaggcatgttcatggagaccaggcgctgcaggcgaagagaagcaaagctggtgatgatggcaggcggtgcttaggggaccgcagaacaccgtggcagagtgatatggtttggctctgtgtcctcgcccaaatctcatgttgaattgtaatccccagaattggaggtggggcctgatggaaggtgattgcatcatggggtggatttctcataaatggtttggtaccatccccttggtgagtgagtactcatgagatctgcttgtttaagtaagtgtgtggtccctcccccttctctcttgctccctgtctgtccatgtgacgtacctgcctcccctttgccttccaccatgattgactggaagcttcctgaggcctccccagaagcagaatgctagtgccatgcttcctgtacagcctgctgaactgtgggccaattaaacctgttttcttataaattaaaa

SEQ ID NO: 409566 - DNA, 529 bp, Homo sapiens
ttgatgttggcgttggagccggtggacgagtagctgctcggggtgaaggtggagtccaccagcttctcgtgggatggcgactcagtgtcgccctggctgctgcccgccttgttgatgtgcagcgggcgctgagtggtgaaggtctgggggaaggcgctccggccgtcgctttggtagtagctgacgtggttgccgaacaggccaccggccctctcctgaagatgtcatcttcagaagcagcggacacagcctccttcatggccttgtccagctcctcctcagcggtgagatctccagagatggcccgtcggatctcaggcccgatgtcatgcagtgtgcgcaagccagcctgcagagacagcgcgttcctctgggagggcttgcccacaaggccctgctctttgcgcttcttgaacttccggaagtactcctggatcaggaacgtggcgtagaacttgccaacggtgacctcatcatcacctgcagggggcaccacctggtccagcagcttcatgctggtccgcttcca

SEQ ID NO: 409567 - DNA, 2447 bp, Homo sapiens
tccgcagtctcagtggcgagctccgggtgctgtggcccggccttggcggggcggcctccggctcaggctggctgagaggctcccagctgcagcgtccccgcccgcctcctcgggagctctgatctcagctgacagtgccctcggggaccaaacaagcctggcaggacaaaattagaagatcaaaatggaaaatatgctgctttggttgatatttttcacccctgggtggaccctcattgatggatctgaaatggaatgggattttatgtggcacttgagaaaggtaccccggattgtcagtgaaaggactttccatctcaccagccccgcatttgaggcagatgctaagatgatggtaaatacagtgtgtggcatcgaatgccagaaagaactcccaactcccagcctttctgaattggaggattatctttcctatgagactgtctttgagaatggcacccgaaccttaaccagggtgaaagttcaagatttggttcttgagccgactcaaaatatcaccacaaagggagtatctgttaggagaaagagacaggtgtatggcaccgacagcaggttcagcatcttggacaaaaggttcttaaccaatttccctttcagcacagctgtgaagctttccacgggctgtagtggcattctcatttcccctcagcatgttctaactgctgcccactgtgttcatgatggaaaggactatgtcaaagggagtaaaaagctaagggtagggttgttgaagatgaggaataaaagtggaggcaagaaacgtcgaggttctaagaggagcaggagagaagctagtggtggtgaccaaagagagggtaccagagagcatctgcaggagagagcgaagggtgggagaagaagaaaaaaatctggccggggtcagaggattgccgaagggaggccttcctttcagtggacccgggtcaagaatacccacattccgaagggctgggcacgaggaggcatgggggacgctaccttggactatgactatgctcttctggagctgaagcgtgctcacaaaaagaaatacatggaacttggaatcagcccaacgatcaagaaaatgcctggtggaatgatccacttctcaggatttgataacgatagggctgatcagttggtctatcggttttgcagtgtgtctgacgaatccaatgatctcctttaccaatattgcgatgctgagtcgggctccaccggttcgggggtctatctgcgtctgaaagatccagacaaaaagaattggaagcgcaaaatcattgcggtctactcagggcaccagtgggtggatgtccacggggttcagaaggactacaacgttgctgttcgcatcactcccctaaaatacgcccagatttgcctctggattcacgggaacgatgccaattgtgcttacggctaacagagacctgaaacagggcggtgtatcatctaaatcacagagaaaaccagctctgcttaccgtagtgagatcacttcataggttatgcctggacttgaactctgtcaatagcatttcaacatttttcaaaatcaggagattttcgtccatttaaaaaatgtataggtgcagatattgaaactaggtgggcacttcaatgccaagtatatactcttctttacatggtgatgagtttcatttgtagaaaaattttgttgccttcttaaaaattagacacactttaaaccttcaaacaggtattataaataacatgtgactccttaatggacttattctcagggtcctactctaagaagaatctaataggatgctggttgtgtattaaatgtgaaattgcatagataaaggtagatggtaaagcaattagtatcagaatagagacagaaagttacaacacagtttgtactactctgagatggatccattcagctcatgccctcaatgtttatattgtgttatctgttgggtctgggacatttagtttagtttttttgaagaattacaaatcagaagaaaaagcaagcattataaacaaaactaataactgttttactgctttaagaaataacaattacaatgtgtattatttaaaaatgggagaaatagtttgttctatgaaataaacctagtttagaaatagggaagctgagacattttaagatctcaagtttttatttaactaatactcaaaatatggacttttcatgtatgcatagggaagacacttcacaaattatgaatgatcatgtgttgaaagccacattattttatgctatacattctatgtatgaggtgctacatttttaggacaaagaattctgtaatctttttcaagaaagagtctttttctccttgacaaaatccagcttttgtatgaggactatagggtgaattctctgattagtaattttagatatgtcctttcctaaaaatgaataaaatttatgaatatgacttaaaa

SEQ ID NO: 409568 - DNA, 467 bp, Homo sapiens
atcagagttaggtcaatgtttcttaaactttaatatgcacacaaatcatctggggattttattaaaatgcagattctgattcactaggtctggggtggggcctgggattctgcatttctagcaagctcccagggaattccagtgctgctagtcagtgaaccacatgttgagttgtaaaagttctgggtggtatcagagaggggcagaatcacagtgaactgtaaagttttgtgctactttaaaattttgttgaaaatgcaattttaaataagaaattaaaaacaaacttctacccctaaacattctaactcggaggaagttcttttccctgtaaactttagtaatgtccttcaattctataatctcttgttttatttctgtaattcatttttagttacgttttgttcttgattctcataagcataaagtcccgattggctcataataaactctgagtagacgaggcc

SEQ ID NO: 409569 - DNA, 1175 bp, Homo sapiens
ggggcgagtcctgtcaccaaaggggctggactttctttcctggcaggctcagccgcacctgggatgtggaaaccttggcgggggtgagcacccaggccattttcactagcagcaaaacaaaaacaaaacttcagctggtttccaatcactcaccatgcttcttctttataaatcattttaaagtgatttcgccaataaaattcagcatgtacagcgttttatttttaatgtacacattttaaagcataatgttacatacattatggaaaggtgcataatgagagaaatcatttccataatatatcaactccctgactaaaaattctttggataaaaatgcaatatttatttgatatcaatggacacctatgtcaatgtggttttcactgagggaccttagagggaaactttgaagtgggaagatggtctgtgttcttgaatagaaagacacatttttctaaaattctgagctctttctgtgtttataaattttacataatcccaataaagttattaaagtgttaacatttttgaattactcatgctgtcttttactattgtgatgacattaagaaaacttttgaaatggagtcaaaaaagacttgcctttctagatatgaaaatgtgctgttaatttccacaaggtatttactaacagctgaaacaacaaatcagtgaacggaacaggttagaaaatccaggaacacaccaatctaatagaattggataatggtgacatttcatattagtaggaaaagatgaattactcataaatgaagtgcctgctaactacttggataaatctggctagatttttatgtcacagaaataagttcgttatggaatgtagattaaaaattttaaatgcacaaaataagaaagataacagaaaaaaacacaaatgcctacttatacatgtttatattcctacaaatatcacaagcacacattctgaaggttgatttagcaaaataaaaaaaattcagtttataagaaaaaattaacaaaagacaatatgtgtatatacatattagataaaaaagtgattttcattttacagagaattcttcaaataaacaagaactctcatttaaaatagagcaaagcatttttttttcagatattcaagcaacctatgcacataggaaaaaatatttagtgttcctgggaggaga

SEQ ID NO: 409570 - DNA, 1715 bp, Homo sapiens
  misc_feature (1705)..(1705): n is a, c, g, or t
  misc_feature (1707)..(1708): n is a, c, g, or t
  misc_feature (1710)..(1713): n is a, c, g, or t
taggtggacagactgcattgcttgttgttgcgcttcggaggcggcgatccccgaaggcgagctgaaatacggctggagcgttcccaggctacagtttgtagccgacgattgtggaagactaggagccggagaggtggcccaccctcagggagcgcttgtgctcggagggcttctcatttccccaataccacattaaatcgtctcatctgaggaggatccacagagctgtcttctatggtaatctggagaaactggagtaccttctgctcacgtatcatgacaccaatgagagagacaaggaggaaagcttaccctgaaagaagcagatcccagttcaaaagtagccataagaaggaaggattcaccacctccaggaaaagtgtcttctcagaaacaaccagctgagaaggctgcaagtgacgagaaagattctgtttcgaatatagccacagaaataaaggagggaccaatatctgggacagtgtcttctcagaaacaaccagctgagaaggctgcaagtgacgagaaagattctgtttcaaatatagccacagaaataaaggatggacaacaatctgggagacataattttgcaaagcagatttaatgtcatgttcagccaagatagacaagaacttctcttccccgaataaatcagcgggggactctttgaagctgcacattctgattcagcaggcctgagattctacatttgtagtaagttctcaggtgacactgatgctgctggtcttcgacatgaactttgcagtaagattatagacttccatacattgaaattgggaagaagaaaggttggagagccattaaagacataaggagtcaggggacagcataattttgctttaattctacagcatgttttcaccaagggtggaaggagaaagagatgaagtatagatttacagacgtcacatcgtattgctaaaaacagatggagaaatgattgtaaaaacccataaacgctgtagaacgagaactaaggagaccattgatgtagcaatgactttcctcaaggaagaggattgtcaggcaggaaggagggaaaataagaagttatttatgtaattttgggatttcttctaaggaaacctgagttcagttgcatattcgaacattttcctaaaagaaggtttgattttggctgctttaggaaccagtggaagcaggaaggagtactagaactgggacaagccacagtgactcattactcctctttgttactgttgggcatcagagatatacattttgtttatattagttattcaaatgagataaacatgaatatgcatatattggctttgcttttcaattagctaacttttggataaaaatagcaatttaatgaaaatgctttagagaataacatgatattttaaaccagactattttagaaagaaaataatggtgaattcattaattgacttttaaaattcttattttcaatgaatattggagtgatttccaaatgtaaaaggttattcatatctaatgcttgtagcaactttattttgtataagtatgtcaaatttaatcatttattatactttttgataaggtttatgtattatactttgttgccatgagtggatgaagaacctttctgtagcctaaactagagggcacaacaaatgtaggcacattattacaccacatgggtttgagaaataaagaatattatatacanannannnnaa

SEQ ID NO: 409571 - DNA, 555 bp, Homo sapiens
taggtggacagactgcattgcttgttgttgcgcttcggaggcggcgatccccgaaggcgagctgaaatacggctggagcgttcccaggctacagtttgtagccgacgattgtggaagactaggagccggagaggtggcccaccctcagggagcgcttgtgctcggagggcttctcatttccccaataccacattaaatcgtctcatctgaggaggatccacagagctgtcttctatggtaatctggagaaactggagtaccttctgctcacgtatcatgacaccaatgagagagacaaggaggaaagcatccggtgaaagacagagatcacatttcaactagattcttaggaagtatggattcactaacttcagcgaagagaaaagctatacctgctgacgttacaattgttttagaacttcaactcctttatgtcagtgttgttacattgagaatctttacttaatcacatcttctgattaccagattgagtttctgcatgtgtgtgtgtatctctgattaaaaatgaataaaatgattaatcattcttttgta

SEQ ID NO: 409572 - DNA, 1067 bp, Homo sapiens
taggtggacagactgcattgcttgttgttgcgcttcggaggcggcgatccccgaaggcgagctgaaatacggctggagcgttcccaggctacagtttgtagccgacgattgtggaagactaggagccggagaggtggcccaccctcagggagcgcttgtgctcggagggcttctcatttccccaataccacattaaatcgtctcatctgaggaggatccacagagctgtcttctatggtaatctggagaaactggagtaccttctgctcacgtatcatgacaccaatgagagagacaaggaggaaagcatccggtgaaagacagagatcacatttcaactagattcttaggaagtatggattcactaacttcagcgaagcttaccctgaaagaagcagatcccagttcaaaagtagccataagaaggaaggattcaccacctccaggaaaagtgtcttctcagaaacaaccagctgagaaggctgcaagtgacgagaaagattctgtttcgaatatagccacagaaataaaggagggaccaatatctgggacagtgtcttctcagaaacaaccagctgagaaggctgcaagtgacgagaaagattctgtttcaaatatagccacagaaataaaggatggacaacaatctgggagacataattttgcaaagcagatttaatgtcatgttcagccaagatagacaagaacttctcttccccgaataaatcagcgggggactctttgaagctgcacattctgattcagcaggcctgagattctacatttgtatgtcttctcagaaacaatcggcctggaaggttatatttaaaaagaaagtttctcttttgaatattgccacaagaataatgggtggtcagaaatctggaacagagtatcctgagaatctgcccaccatgaaggctacagttgaaaataaagattctgttctgaatacagccaccaaaatgaaggatgtacaaacatccacaccagaagaacaagacttagaaatggcatcagagggagagcaaaagaggcttgaagaatatgaaaataaccagccacag

SEQ ID NO: 409573 - DNA, 1436 bp, Homo sapiens
taggtggacagactgcattgcttgttgttgcgcttcggaggcggcgatccccgaaggcgagctgaaatacggctggagcgttcccaggctacagtttgtagccgacgattgtggaagactaggagccggagaggtggcccaccctcagggagcgcttgtgctcggagggcttctcatttccccaataccacattaaatcgtctcatctgaggaggatccacagagctgtcttctatggtaatctggagaaactggagtaccttctgctcacgtatcatgacaccaatgagagagacaaggaggaaaggctcagccgcacctgggatgtggaaaccttggcgggggtgagcacccaggccattttcactagcagcaaaacaaaaacaaaacttcagctggtttccaatcactcaccatgcttcttctttataaatcattttaaagtgatttcgccaataaaattcagcatgtacagcgttttatttttaatgtacacattttaaagcataatgttacatacattatggaaaggtgcataatgagagaaatcatttccataatatatcaactccctgactaaaaattctttggataaaaatgcaatatttatttgatatcaatggacacctatgtcaatgtggttttcactgagggaccttagagggaaactttgaagtgggaagatggtctgtgttcttgaatagaaagacacatttttctaaaattctgagctctttctgtgtttataaattttacataatcccaataaagttattaaagtgttaacatttttgaattactcatgctgtcttttactattgtgatgacattaagaaaacttttgaaatggagtcaaaaaagacttgcctttctagatatgaaaatgtgctgttaatttccacaaggtatttactaacagctgaaacaacaaatcagtgaacggaacaggttagaaaatccaggaacacaccaatctaatagaattggataatggtgacatttcatattagtaggaaaagatgaattactcataaatgaagtgcctgctaactacttggataaatctggctagatttttatgtcacagaaataagttcgttatggaatgtagattaaaaattttaaatgcacaaaataagaaagataacagaaaaaaacacaaatgcctacttatacatgtttatattcctacaaatatcacaagcacacattctgaaggttgatttagcaaaataaaaaaaattcagtttataagaaaaaattaacaaaagacaatatgtgtatatacatattagataaaaaagtgattttcattttacagagaattcttcaaataaacaagaactctcatttaaaatagagcaaagcatttttttttcagatattcaagcaacctatgcacataggaaaaaatatttagtgttcctgggaggaga

SEQ ID NO: 409574 - DNA, 875 bp, Homo sapiens
ggggctgagagtctgtgcgaaggatccacagagctgtcttctatggtaatctggagaaactggagtaccttctgctcacgtatcatgacaccaatgagagagacaaggaggaaagcatccggtgaaagacagagatcacatttcaactagattcttaggaagtatggattcactaacttcagcgaagcttaccctgaaagaagcagatcccagttcaaaagtagccataagaaggaaggattcaccacctccaggaaaagtgtcttctcagaaacaaccagctgagaaggctgcaagtgacgagaaagattctgtttcgaatatagccacagaaataaaggagggaccaatatctgggacagtgtcttctcagaaacaaccagctgagaaggctgcaagtgacgagaaagattctgtttcaaatatagccacagaaataaaggatggacaacaatctgggagacataattttgcaaagcagatttaatgtcatgttcagccaagatagacaagaacttctcttccccgaataaatcagcgggggactctttgaagctgcacattctgattcagcaggcctgagattctacatttgtatgtcttctcagaaacaatcggcctggaaggttatatttaaaaagaaagtttctcttttgaatattgccacaagaataatgggtggtcagaaatctggaacagagtatcctgagaatctgcccaccatgaaggctacagttgaaaataaagattctgttctgaatacagccaccaaaatgaaggatgtacaaacatccacaccagaagaacaagacttagaaatggcatcagagggagagcaaaagaggcttgaagaatatgaaaataaccagccacag

SEQ ID NO: 409575 - DNA, 911 bp, Homo sapiens
cagctttctgtaatgtgttggatttaatacctctagttcttctagtcccagtcttcaaaatttgcagttgctcttttgttcttcccaaccttgtaggctctttccttgcatcacttcttactttctaaaaaacaccttttctgtaggtttagtgaggtttcaagaaggagagaaattagatgttttggttcagtctgacatcttttacctgaaagttcctattaatctggattcctaagccagatttggatattttaaaaaaattcattctgtatttatgcttccttcagtatctatatttgtagttaaaggtataagtgctaatgtttagtggaggactcaatagaagggccaggaagtgagatatttaccacagccagcctaggacagtaagggtttggtttgggaccagaagagaattgacagcaaacaaggagaatgatgaaagtggatgcatttagatgtaggtaggatgattagagacttaattttaagaatcttggatatctgagacctaatacataaataaagctccagtaacatttatctccctggactcctgtgtttttgttgttgttgttgttgttgtgtgttgttgttgttaacttgtcatgatctaggaacttattctatatttcagagaatacacacaactaatgatacaattaaaaaatgactactgaacaaagctgtttgccaacatagaatctgtaagaacacacatagtattaactaagtaaacaatacactctgaatatactgtagcagcaggtttctattttaataattgagcttgctgtttgagtgttgtattggattctaaaaccgttttgcttgtactgactgggctgtgattcactttgctggttgttgctgccctctgttggactagctcaggaaatgcagctttt

SEQ ID NO: 409576 - DNA, 440 bp, Homo sapiens
cgtaccatatgtgatgaaggccaagcagagagggcttttcaatttctgtccatcaaaaaaaactccaattctacttctgctttatataccaagattctttttgtaagagtttgtttgggagaagggagaaagaactctactgctaaaaaagtgaaaatggcaaatgaaccaagcagcatcccatcttatattttaaagtcttctcccaagttaacccaatttccccatttatttctactttaaggcacatattagcaaatgcccacagtcattcattcaacatacactggatgctatcaaatttaagtgctatgaaaacaatggtccagcattaaaagtcatctgagatcaaaatcagaaaaaaattaactaacaaatctaaaggcaaaacctaccatttatgtctcttccaaaatctccgagttattttcgtggagtta

SEQ ID NO: 409577 - DNA, 435 bp, Homo sapiens
gtgatgataattaattttttttccttataccttacacacttgtttgggatatctgttgtagactgaattgcatcctacccaaatttataagttgaagctctaatccctagtgtgactgtatgtggagacagagcttttaaggaggtaattaaggccataagaggggctggtaatataatatgattggtgtccttaaaagaaaaggaagagacaccaggaatgcaggtgcacaggaaaggccatatgaggacaggatgagatggccctttgcagccaaggagagaggccatagaagaaatcatccctgcgaacacgttgatcttggacttccagccttcagaactgtgagcaaacaaatttatcttgtttaagccacccaggctgtgtattttgttatgccagccctaggtaactaataaaatgttcaaaggaaat

SEQ ID NO: 409578 - DNA, 428 bp, Homo sapiens
tccattgattcatatagatcatttgatggtctaatgccggtccctcattttacagaggagaaaatggttctagagggatttgaagtgactgtccagaggccacatgcgcagttagtggaaacccaggacccagatctaggtctgcagacactgtgtttagcctttctacggccctgttcagccaccaagtattttaggattgaaaatgaaaaagcaccttatcattatgcttgtctcttttcaatagcattcagtaatcttcttcatatgtctttttactgaaattaaattattgtactttgtaaaatgtgattagatatatcaaccaaagattttatttgttgatgttttgtgagtttttaaccattgactataatttgttatttaactgttaatttattgcaaataaattatttaagaaaacaaat

SEQ ID NO: 409579 - DNA, 365 bp, Homo sapiens
tacgataactctggactaaaaaaatcaggatcattaaaagaattaaaaactatgtatttcagcattcaacaaagcattaaatcaattctactggaaatgtgggataagaaatattttggtaatcaccttatccaccaggctgccacgtgtgagctgtagcttggaatagcagcaaggtgcaattggccatggaagtgcatgagcagacccacatctggacttgcatgctgcccgctggcgacatagatatcccgcccgctttgttgcaagctttgtcatttatcagcagatcagtttgacactggtccccctcactcaccctgtgccttgtacacagtaggcactcaatcagtaggtattggcta

SEQ ID NO: 409580 - DNA, 1796 bp, Homo sapiens
agactagacgcgtcttacagtgggagagctcagcctcactgatagccggggatctctcctgttcgagggctgagatctccggtcccacaaccgcccacaaccaggggcacttctggaagtcccctttctagggacatttttcttctaagctctgtaacgcgggccgaggcagaccgaggcttctttcccggatccaatcccctgcccccatgcctaagaaagaaaaaatggccaagacgcccctgtccgatgagaagcagctgcttctgtttcagcagaagttgctggcagaggaggagatggccaaaaagaaggagaggctcctcagccagttcttgaaggacaagctggccaaggaggaacacaacagtgctctgaaccttaataagattaacacacagtggagaactgtccttcgggaagtcaagaccagagaacttcataaggacattgagatcctcagccaaacatttgaacgagtggtggactgtaaggacaatgtcatcaagtctttagctaaagacctgtccgaagccgaggagcagtacgcccatgccctgcgcagccacttgcacaatgttgaccagctcttggccctgcagaggcaccggctcagtctcctggaggaaagttacaacatggagctggaagccctaaccaaggagtttgagacagaaaggaagacaattattgaccaacatgagaaagagattcactatctgcaagatatcttcatggccatggagcagaactatatagattctgagtatgaaagcaagctggagttccagagcatgtggaatgatctcaaagacatgaatttagaagagaagcactttctaagactgcacctggagaacagagtagaagatctgtggagaaagttccaggatgtactcaagaattacactgatgccacagaggatcgaaagactgcctttgagaccctgcaggtgaaggatgagaagagctccaaagagattgaagtacagatgaaaaaaatacagaaactacaggatgccataactatttcaaaaggcaagatcatgatacacagccgtgagagtgaagatgagaaccggtatatccgtaatgacaaggaattggtccttgtacaactgcgaaaacttaaggcccaaagaactcaggcccgggcagcatcccagaagaacttagtcagactcaccctggaaagtaatgccaccctcaaggccctgagaaagattgttgataagggtgaaaagatccttaaacttgctgaaatatgtaggaaatttgaaaccgaagaagaaaaagtgctgcctttttattcatcagtattgactcctaaggagcaggaggggattcagaagaataatctagaagagcttactgaggagctcaccaaggtgatggtggactacataggaatggagaatttctggaaaaggtacaacaaagtgaaactggagcaactgagcctccaacatagacgagcccagctgctagatatcaatgggaagctgcgggagatgctgaagcagtacttggatggcatctcagtgagtgacgaagtgctgagccagctcaacccactctttatagtcaactatcaaagcaacttactccagcccttgtccatacgtatagcccatccaggtgataaacaacatccaaccacttaaaatataattgaagcagcccagatgatcttccacaacctgtgatctaaggaaaaaaatctttcaactcctagagatttttttttttttttgagaaatgtagggatgttgctattaaaaatttccatggagttt

SEQ ID NO: 409581 - DNA, 2334 bp, Homo sapiens
agactagacgcgtcttacagtgggagagctcagcctcactgatagccggggatctctcctgttcgagggctgagatctccggtcccacaaccgcccacaaccaggggcacttctggaagtcccctttctagggacatttttcttctaagctctgtaacgcgggccgaggcagaccgaggcttctttcccggatccaatcccctgcccccatgcctaagaaagaaaaaatggccaagacgcccctgtccgatgagaagcagctgcttctgtttcagcagaagttgctggcagaggaggagatggccaaaaagaaggagaggctcctcagccagttcttgaaggacaagctggccaaggaggaacacaacagtgctctgaaccttaataagattaacacacagtggagaactgtccttcgggaagtcaagaccagagaacttcataaggacattgagatcctcagccaaacatttgaacgagtggtggactgtaaggacaatgtcatcaagtctttagctaaagacctgtccgaagccgaggagcagtacgcccatgccctgcgcagccacttgcacaatgttgaccagctcttggccctgcagaggcaccggctcagtctcctggaggaaagttacaacatggagctggaagccctaaccaaggagtttgagacagaaaggaagacaattattgaccaacatgagaaagagattcactatctgcaagatatcttcatggccatggagcagaactatatagattctgagtatgaaagcaagctggagttccagagcatgtggaatgatctcaaagacatgaatttagaagagaagcactttctaagactgcacctggagaacagagtagaagatctgtggagaaagttccaggatgtactcaagaattacactgatgccacagaggatcgaaagactgcctttgagaccctgcaggtgaaggatgagaagagctccaaagagattgaagtacagatgaaaaaaatacagaaactacaggatgccataactatttcaaaaggcaagatcatgatacacagccgtgagagtgaagatgagaaccggtatatccgtaatgacaaggaattggtccttgtacaactgcgaaaacttaaggcccaaagaactcaggcccgggcagcatcccagaagaacttagtcagactcaccctggaaagtaatgccaccctcaaggccctgagaaagattgttgataagggtgaaaagatccttaaacttgctgaaatatgtaggaaatttgaaaccgaagaagaaaaagtgctgcctttttattcatcagtattgactcctaaggagcaggaggggattcagaagaataatctagaagagcttactgaggagctcaccaaggtgatggtggactacataggaatggagaatttctggaaaaggtacaacaaagtgaaactggagcaactgagcctccaacatagacgagcccagctgctagatatcaatgggaagctgcgggagatgctgaagcagtacttggatggcatctcagtgagtgacgaagtgctgagccagctcaacccactctttatagtcaactatcaaagcaacttactccagcccttgtccatacgtatagcccatccaggtgataaacaacatccaaccacttaaaatataattgaagcagcccagatgatcttccacaacctgtgatctaaggaaaaaaatctttcaactcctagagatttttttttttttttgagaaatgtagggatgttgctattaaaaatttccatggagtttatgagctctttatatcttttccatattggacagagcagttctctttgaggacactaggaacactgtggtcccagggaacagagagaacagctaggcaactaccaggaggctcactgctcaattaagcatccctcctcagaatcagggcaccatgagagccaaaacccataccttaaggacctagagatcctatgggaagactcaagaccaggtccttaaagtcagttaggacagcaagaggaggccaggggaagaggtgatccagggcctacaaccacccccatgccaggcaagatgcaattcacaatgcttttttcctcagccctttacctcattcccactttcaaaggcagtctcagaaaatatcagatgaagaatgcaaataagttttttaaaatttattatttattatttctttttgctcttgtttcgtttctcttccttgagcttctttttggagactttgggtctattggcctttctgtataggtgatacccaatgaggcccaggagggctggcaccatggccatccctacc

SEQ ID NO: 409582 - DNA, 1865 bp, Homo sapiens
  misc_feature (1544)..(1544): n is a, c, g, or t
  misc_feature (1558)..(1558): n is a, c, g, or t
agactagacgcgtcttacagtgggagagctcagcctcactgatagccggggatctctcctgttcgagggctgagatctccggtcccacaaccgcccacaaccaggggcacttctggaagtcccctttctagggacatttttcttctaagctctgtaacgcgggccgaggcagaccgaggcttctttcccggatccaatcccctgcccccatgcctaagaaagaaaaaatggccaagacgcccctgtccgatgagaagcagctgcttctgtttcagcagaagttgctggcagaggaggagatggccaaaaagaaggagaggctcctcagccagttcttgaaggacaagctggccaaggaggaacacaacagtgctctgaaccttaataagattaacacacagtggagaactgtccttcgggaagtcaagaccagagaacttcataaggacattgagatcctcagccaaacatttgaacgagtggtggactgtaaggacaatgtcatcaagtctttagctaaagacctgtccgaagccgaggagcagtacgcccatgccctgcgcagccacttgcacaatgttgaccagctcttggccctgcagaggcaccggctcagtctcctggaggaaagttacaacatggagctggaagccctaaccaaggagtttgagacagaaaggaagacaattattgaccaacatgagaaagagattcactatctgcaagatatcttcatggccatggagcagaactatatagattctgagtatgaaagcaagctggagttccagagcatgtggaatgatctcaaagacatgaatttagaagagaagcactttctaagactgcacctggagaacagagtagaagatctgtggagaaagttccaggatgtactcaagaattacactgatgccacagaggatcgaaagactgcctttgagaccctgcaggtgaaggatgagaagagctccaaagagattgaagtacagatgaaaaaaatacagaaactacaggatgccataactatttcaaaaggcaagatcatgatacacagccgtgagagtgaagatgagaaccggtatatccgtaatgacaaggaattggtccttgtacaactgcgaaaacttaaggcccaaagaactcaggcccgggcagcatcccagaagaacttagtcagactcaccctggaaagtaatgccaccctcaaggccctgagaaagattgttgataagggtgaaaagatccttaaacttgctgaaatatgtaggaaatttgaaaccgaagaagaaaaagtgctgcctttttattcatcagtattgactcctaaggagcaggaggggattcagaagaataatctagaagagcttactgaggagctcaccaaggtgatggtggactacataggaatggagaatttctggaaaaggtacaacaaagtgaaactggagcaactgagcctccaacatagacgagcccagctgctagatatcaatgggaagctgcgggagatgctgaagcagtacttggatggcatctcaggntgaggttggaaccngggaaaaagggcttgggcccttttggaaaggggcccaagggccgttcccaaaagcgcccccgaagccttccttttattatggtccaaaagcctaattcaagagcgaacgttatctcccaggcccttgtccatacgtatagcccatccaggtgataaacaacatccaaccacttaaaatataattgaagcagcccagatgatcttccacaacctgtgatctaaggaaaaaaatctttcaactcctagagatttttttttttttttgagaaatgtagggatgttgctattaaaaatttccatggagttt

SEQ ID NO: 409583 - DNA, 952 bp, Homo sapiens
tgagacagggtctcgctcagttgcccaggctggagtgtggtggcaccatctcgtctcactccagcctctgcctcctgggctcaagtgatccttccatctcagcccccccagcagctgagactgtaggcatgtgccaccatgcctggcttttaaataattttttgtagagatggggtctttccatgtttcccaggctatgaatcaattttacaataagaaaatacttggaatagtgtgtgttacatggtaacctccatttgctatatgtatttattgctattgtttcccacttggatgagtagcttccctgggttcaaacaggggaaccaactccactagcttccctcttcactccctttcctaatataaactctcttcccgcttcaaatagggtgaaaagatccttaaacttgctgaaatatgtaggaaatttgaaaccgaagaagaaaaagtgctgcctttttattcatcagtattgactcctaaggagcaggaggggattcagaagaataatctagaagagcttactgaggagctcaccaaggtgatggtggactacataggaatggagaatttctggaaaaggtacaacaaagtgaaactggagcaactgagcctccaacatagacgagcccagctgctagatatcaatgggaagctgcgggagatgctgaagcagtacttggatggcatctcagtgagtgacgaagtgctgagccagctcaacccactctttatagtcaactatcaaagcaacttactccagcccttgtccatacgtatagcccatccaggtgataaacaacatccaaccacttaaaatataattgaagcagcccagatgatcttccacaacctgtgatctaaggaaaaaaatctttcaactcctagagatttttttttttttttgagaaatgtagggatgttgctattaaaaatttccatggagttt

SEQ ID NO: 409584 - DNA, 536 bp, Homo sapiens
ttgtttgtttttgtagagatgggggggtctcattatgttgcccaggctagtcttgagctcccaggctcatgtaatcctcccaccttggctacccaaagtgttgggattacaaatgcgagccaccttgctcagcccttgccatcactcttgctttacacaagagtgagggggacagccagcattcttaaagtcaaagaattggcattaggaacaaagaaaaaactgccagctgaatatatttttattttctcacagagatgctattcagctggaatggtaactctctctttctggcctagtctttagctaaagacctgtccgaagccgaggagcagtacgcccatgccctgcgcagccacttgcacaatgttgaccagctcttggccctgcagaggcaccggctcagtctcctggaggaaagttacaacatggagctggaagccctaaccaaggagtttgagacagaaaggtatgggggcctaagagaagatggggaattgaatccaggggagtgcccagagtccgtgtcaaggagt

SEQ ID NO: 409585 - DNA, 720 bp, Homo sapiens
gagggagaccgtggaaagagagggagagggagaccatggggagagggagaccatggggagagggagagggagagggagagggaccaactacccactttcaactatcaaaatcctacccatttggcagggaacagggatgggagagagacttctcactgtaaccttttgtactttttttgtatcacatgaatgtattacccattcagaaatcaaaataaaataaccttactcattctttctagccctaaaaagagtaaagccttccctctctcttttctccatcagtacctaagagtttgtaccattcacatagattacatactgctttgaattgtcattattggtcaatatcctgtatccctcagagcagggacagtgtcttgtctcctacaggaagacaattattgaccaacatgagaaagagattcactatctgcaagatatcttcatggccatggagcagaactatatagattctgagtatgaaagcaagctggagttccagagcatgtggaatgatctcaaagacatggtacggagggagagtagataggcaagaagtgggaggaggtgatagaaaaatgctcaaggaggctgggcacagtggctcacacctgtaatcccagcaccttggtaggccaaggcaggaggatcacttgagactgggagttcaagactagcctgggcaacatagggagtcccccccatctctaccggccc

SEQ ID NO: 409586 - DNA, 214 bp, Homo sapiens
taatacttatgtccggccgcaccccttccgtaggccactggtgtgggtgctatcaatctagtcaggatttgattgttactgtagataccttcccaacaccacagacctcaaattcctccagcagacagtgggcttggtgtagggtctcgggtgctggagggtttttctcagtgtcctgattgctcagctgtcactgaggccttgacacgtgtgc

SEQ ID NO: 409587 - DNA, 720 bp, Homo sapiens
ggaagtaagtggagacacgtgctttggcctgttggaggggaaacccgctctcgcctcctggtggtcgccgactcgcagtccgcaggatgactcagggcagccctgaccacagttccgccgccatcggccctagcctgcggaattgggctcgccccgggacgataacagagctctgccgggggctggaggcactgaccgggtgaccagagacccagagaccagaccccctccacggcgcccgggatttcggggacggcttctcccatcgcaagtttcaacagaaaatgagaaatatcgcccgacgattggctgaaaacatgcagcaaccactattttcttcctgcccctcgttgatgagagcattcgaagtgacctcagcagggcatccaggtatgtcaagcatggtgacaaagtgttcaggtcagacggtctggggaaaggctcctgtgttgttgagcctgccaagttgtgggtgcagcatggtaccaggcagcccaaccctgacctaaagtaaattcccggaagaagtctttcctgggttttgaatttgcagtaacaggtgtgagcattctagcagcagtttgatgatcatgtatgatactgcaaacaggacctacgtttaaagaaaatggttgtagttagtatcagagagcccttgcttttcaaaacttcataaacaatgttactgtcatgtctttcattcaataaacatttgttgat

SEQ ID NO: 409588 - DNA, 2137 bp, Homo sapiens
  misc_feature (1891)..(1891): n is a, c, g, or t
ggaagtaagtggagacacgtgctttggcctgttggaggggaaacccgctctcgcctcctggtggtcgccgactcgcagtccgcaggatgactcagggcagccctgaccacagttccgccgccatcggccctagcctgcggaattgggctcgccccgggacgataacagagctctgccgggggctggaggcactgaccgggtgaccagagacccagagaccagaccccctccacggcgcccgggatttcggggacggcttctcccatcgcaagtttcaacagaaaatgagaaatatcgcccgacgattggctgaaaacatgcagcaaccactattttcttcctgcccctcgttgatgagagcattcgaagtgacctcagcagggcatccaggtcagtttctggaagacttgtgtgtgtgatgaatgaatatctggttttgtctctgctgggcctgtgtgcctggaaaggaattgttttggcctaggatcatccaggtttgtttggtttagttcttgaccacatattttttgaatggtgactgcttaagaccctgttgtgtatggctataaatagatacacgccaaggtgaccacatactctgtggttcctgtgcccgccggccatgtgtctgagtgtgtagcctctcatcatctaaaggaactttggctgcagaggggaggcctggtcccatgggaagttttgggagcgcagcagcaggtgggttcaaacgacccagcaagtgcctccttagcacttagaggcggaggccaccacgttgtccacgtggggtttctgatcccagctccccaccagcctgctggacctcgggcaggtccctccctgtttgtacctccattacttcttcagtaagatggggacactgaagatgaccatgcctcccaccagattggtgctttttttgttttaataagggacagagtctcactatgttgcctataggctggtctcaagctcttggcctcagttttcctgcctcagccttcaaatatgctggggtgacaggcatgagccactgcactggcccagattggtacatttgagggttaaatgagcaaatcctataaagcactcaggagagggctgtggggtttgggctggggcctgggagcactttagacgtggtagctatgttgttgtcacctttctcctctttcaaagcattttttgtttgtttgtttttgtttttgagacagagtttcgctcttgtggcccaggctggagtgcggtggtgtgacctcggctcactgcatcctccgcctcccgggttcaagtgatgggattacaggtgcctgccacaacgcccagctaattgtttgtatttttagtagagacgaggtttcaccatgttggccaggctggtctcgaactcctgacctcaggtgatccacctgccttggcctcccaaagtgctgggattacaggtatgagctaccgcgcccggcacaaagcattttcagctgtgaaattccctggggtgctgcagtagaggaaggtttggggtcttgacgggtgctatttgccacggaaagatgccttcctgctcccagggcaggagagccgaggtaagacttactgtaggctgtcgttttttttgtttgttttttgtctttgcgatggagtctcactctgtcgccaggctggagtgcagtggcatgatcttggctcactgcagaacctccacctcccaggttcaagcgattctcctgcctcagcctcccaagtaactgggattacaggcacatgcccccacaaccagctaattttttatttttagtagagacagggtttcacatgttggccaggctggtcttgaactcctgacctcaggtgatccgcccgcctcggcctcccaaagtgctgggattacagncatgagccactgcgcccagccaggctgttgtttttttacctccttgtttgcacaatttgggccactcacaagagtgtataccctgtgataaacagttacctacattctcctctgcatgcttgtctttagaggaaggaaatgtattaattgcccaaagtaatatattgtgttaagatgtgatatatactggggaaaaaaaaagtgtatattgacatttctggaataaaccactttgattcccagtta

SEQ ID NO: 409589 - DNA, 1801 bp, Homo sapiens
ggaagtaagtggagacacgtgctttggcctgttggaggggaaacccgctctcgcctcctggtggtcgccgactcgcagtccgcaggatgactcagggcagccctgaccacagttccgccgccatcggccctagcctgcggaattgggctcgccccgggacgataacagagctctgccgggggctggaggcactgaccgggtgaccagagacccagagaccagaccccctccacggcgcccgggatttcggggacggcttctcccatcgcaagtttcaacagaaaatgagaaatatcgcccgacgattggctgaaaacatgcagcaaccactattttcttcctgcccctcgttgatgagagcattcgaagtgacctcagcagggcatccaggtcagtttctggaagacttgtgtgtgtgatgaatgaatatctggttttgtctctgctgggcctgtgtgcctggaaaggaattgttttggcctaggatcatccaggtttgtttggtttagttcttgaccacatattttttgaatggtgactgcttaagaccctgttgtgtatggctataaatagatacacgccaaggtgaccacatactctgtggttcctgtgcccgccggccatgtgtctgagtgtgtagcctctcatcatctaaaggaactttggctgcagaggggaggcctggtcccatgggaagttttgggagcgcagcagcaggtgggttcaaacgacccagcaagtgcctccttagcacttagaggcggaggccaccacgttgtccacgtggggtttctgatcccagctccccaccagcctgctggacctcgggcaggtccctccctgtttgtacctccattacttcttcagtaagatggggacactgaagatgaccatgcctcccaccagattggtgctttttttgttttaataagggacagagtctcactatgttgcctataggctggtctcaagctcttggcctcagttttcctgcctcagccttcaaatatgctggggtgacaggcatgagccactgcactggcccagattggtacatttgagggttaaatgagcaaatcctataaagcactcaggagagggctgtggggtttgggctggggcctgggagcactttagacgtggtagctatgttgttgtcacctttctcctctttcaaagcattttttgtttgtttgtttttgtttttgagacagagtttcgctcttgtggcccaggctggagtgcggtggtgtgacctcggctcactgcatcctccgcctcccgggttcaagtgatgggattacaggtgcctgccacaacgcccagctaattgtttgtatttttagtagagacgaggtttcaccatgttggccaggctggtctcgaactcctgacctcaggtgatccacctgccttggcctcccaaagtgctgggattacaggtatgagctaccgcgcccggcacaaagcattttcagctgtgaaattccctggggtgctgcagtagaggaaggtttggggtcttgacgggtgctatttgccacggaaagatgccttcctgctcccagggcaggagagccgaggtaagacttactgtaggctgtcgttttttttgtttgttttttgtctttgcgatggagtctcactctgtcgccaggctggagtgcagtggcatgatcttggctcactgcagaacctccacctcccaggagaatctcttaaacctgggaggcagaggttgcagtgagccgggattgtgccactgcactccagcctggcgacagagcaagactccatctca

SEQ ID NO: 409590 - DNA, 1269 bp, Homo sapiens
ggaagtaagtggagacacgtgctttggcctgttggaggggaaacccgctctcgcctcctggtggtcgccgactcgcagtccgcaggatgactcagggcagccctgaccacagttccgccgccatcggccctagcctgcggaattgggctcgccccgggacgataacagagctctgccgggggctggaggcactgaccgggtgaccagagacccagagaccagaccccctccacggcgcccgggatttcggggacggcttctcccatcgcaagtttcaacagaaaatgagaaatatcgcccgacgattggctgaaaacatgcagcaaccactattttcttcctgcccctcgttgatgagagcattcgaagtgacctcagcagggcatccaggtcagtttctggaagacttgtgtgtgtgatgaatgaatatctggttttgtctctgctgggcctgtgtgcctggaaaggaattgttttggcctaggatcatccaggtttgtttggtttagttcttgaccacatattttttgaatggtgactgcttaagaccctgttgtgtatggctataaatagatacacgccaaggtgaccacatactctgtggttcctgtgcccgccggccatgtgtctgagtgtgtagcctctcatcatctaaaggaactttggctgcagaggggaggcctggtcccatgggaagttttgggagcgcagcagcaggtgggttcaaacgacccagcaagtgcctccttagcacttagaggcggaggccaccacgttgtccacgtggggtttctgatcccagctccccaccagcctgctggacctcgggcaggtccctccctgtttgtacctccattacttcttcagtaagatggggacactgaagatgaccatgcctcccaccagattggtgctttttttgttttaataagggacagagtctcactatgttgcctataggctggtctcaagctcttggcctcagttttcctgcctcagccttcaaatatgctggggtgacaggcatgagccatgcgcccagccaggctgttgtttttttacctccttgtttgcacaatttgggccactcacaagagtgtataccctgtgataaacagttacctacattctcctctgcatgcttgtctttagaggaaggaaatgtattaattgcccaaagtaatatattgtgttaagatgtgatatatactggggaaaaaaaaagtgtatattgacatttctggaataaaccactttgattcccagtta

SEQ ID NO: 409591 - DNA, 1834 bp, Homo sapiens
  misc_feature (1588)..(1588): n is a, c, g, or t
tagagagtatctcatggagctcacagttttaaatattcagacttggtaaagtagaataagaactgatgcatatacttttctttgcaggtcagtttctggaagacttgtgtgtgtgatgaatgaatatctggttttgtctctgctgggcctgtgtgcctggaaaggaattgttttggcctaggatcatccaggtttgtttggtttagttcttgaccacatattttttgaatggtgactgcttaagaccctgttgtgtatggctataaatagatacacgccaaggtgaccacatactctgtggttcctgtgcccgccggccatgtgtctgagtgtgtagcctctcatcatctaaaggaactttggctgcagaggggaggcctggtcccatgggaagttttgggagcgcagcagcaggtgggttcaaacgacccagcaagtgcctccttagcacttagaggcggaggccaccacgttgtccacgtggggtttctgatcccagctccccaccagcctgctggacctcgggcaggtccctccctgtttgtacctccattacttcttcagtaagatggggacactgaagatgaccatgcctcccaccagattggtgctttttttgttttaataagggacagagtctcactatgttgcctataggctggtctcaagctcttggcctcagttttcctgcctcagccttcaaatatgctggggtgacaggcatgagccactgcactggcccagattggtacatttgagggttaaatgagcaaatcctataaagcactcaggagagggctgtggggtttgggctggggcctgggagcactttagacgtggtagctatgttgttgtcacctttctcctctttcaaagcattttttgtttgtttgtttttgtttttgagacagagtttcgctcttgtggcccaggctggagtgcggtggtgtgacctcggctcactgcatcctccgcctcccgggttcaagtgatgggattacaggtgcctgccacaacgcccagctaattgtttgtatttttagtagagacgaggtttcaccatgttggccaggctggtctcgaactcctgacctcaggtgatccacctgccttggcctcccaaagtgctgggattacaggtatgagctaccgcgcccggcacaaagcattttcagctgtgaaattccctggggtgctgcagtagaggaaggtttggggtcttgacgggtgctatttgccacggaaagatgccttcctgctcccagggcaggagagccgaggtaagacttactgtaggctgtcgttttttttgtttgttttttgtctttgcgatggagtctcactctgtcgccaggctggagtgcagtggcatgatcttggctcactgcagaacctccacctcccaggttcaagcgattctcctgcctcagcctcccaagtaactgggattacaggcacatgcccccacaaccagctaattttttatttttagtagagacagggtttcacatgttggccaggctggtcttgaactcctgacctcaggtgatccgcccgcctcggcctcccaaagtgctgggattacagncatgagccactgcgcccagccaggctgttgtttttttacctccttgtttgcacaatttgggccactcacaagagtgtataccctgtgataaacagttacctacattctcctctgcatgcttgtctttagaggaaggaaatgtattaattgcccaaagtaatatattgtgttaagatgtgatatatactggggaaaaaaaaagtgtatattgacatttctggaataaaccactttgattcccagtta

SEQ ID NO: 409592 - DNA, 369 bp, Homo sapiens
attgttttggcccttttcttgaagtcagtgaaacattagtatgatattggggtagaaaaattcctcatagttgaaatattttaattgtgtttattggtcttgtggtgttggctgccagttgagttgtctactccaaattgacagtaactccataagtcacaagcatctgagatatattttgtgtattttgagggtctttagtgaatatataatattccatatggttttagaattctaaagtgattaggattaatttccatcccagcatcattgaatttaggacctcaattttctaaccacacatcagactgtgcagtcgaccctctgcatccacaagttccacatctgtggattcaaccaactatagat

SEQ ID NO: 409593 - DNA, 559 bp, Homo sapiens
ccttcagtcgaatgcaacagctttgctttgctgcaaagcaaatttaaagaggatttccaatttaaaaaagtctcctaccctaccatcaccaactttttcccacgaattttctacataagtgaacatttcttacatgtgttggccagattgtttctctgaccaattatatgacaaagtcagaatttttcatgttagctagaacttgaatgtccctatgcatagaccaaaacagtatgggacagcagtctaaaatatttgtgttgtccgtcacaaggggacttagcaagagtcaacacaaatgcatcactaatactataaaaataaatctccttgccgcctgcctgtggctcagcagcaatctcttcatgtacatgcatttgctttagcattatcatccttaaatatgtttttttcagatatgtgtcctctctagggatgaagcagtatgtcaatattcccgcctgtgaaatggaaaatgagggcttggaggttactgaaaagagaactggtgctcattatgtatacaaagtagaagaatgtcaggcacatgctaccatat

SEQ ID NO: 409594 - DNA, 531 bp, Homo sapiens
cactgcgtacatacccggggcctatgtgtgcctggcaaggccaagctgatgatgttaccaagctcaaactaccactggccaccttggtgagggtggggcagaaacacgtggaccagccaccaacctcatccattcaaggaagcagaaatggtcaggctcctgcaggataagtggccaccaccagaccaccaatggggcagagttctgaggcccaagcagatggcactggggccctgcttccagggtccacaatctgctccaggacacaagactgaagaaaactaagcaaatgagagtccaggaggctggatccctcatctgccattcttggcagttgcattttgtggtcagaaaaagtcaggaaacttggctctactcactgcaggaggctccaaggtgggaccagagcttccagcatagattcaacaatgcctaagaatgcctcttcttggggaaaaggaccccttccttggcctcaaagcccccacttattttgattaaagcacaataaagtctttgttgttaaaaaaa

SEQ ID NO: 409595 - DNA, 777 bp, Homo sapiens
agcggcttcttgcgcgggatagggcacctgaggaagcgggctgcgcctgtggcacagtggtacggggccggaagataacttacctgaagaggcgatcaatccctgagaatcgcgggcgacccgttttttgtgtgcccgggtgcggggtgccgggacacggcgttgaaggcgctgagcggagggatctcagggcgagctcgagcggcgacggcgcgctctgtgattgcaccgcgagcgcctgaggtgatctcggcctacatcgcgtcagcggggccttgggcgtgagcaccgccccctgtccggacgcagggtactggggcacctcgaactgtggcacctcacccttctccggggccacgtcttggggactccgacagccccaaataagccctcggggactggggttgtgaaaagcgaggtcgtgaagacgccggcctcataccgaagggtaggacggtgaggtcagccccgtcccactccaactaaaatcaacctgacaggtattaatatgccaccatgaagttaacaaatgttggtgattaagtatgctaggttttacgaaaacagattttccaaaataaatgtacatgttttaggacgtcgcgagccgtttgaggcagcattccccaaggacgccacttagtctgtaggtttagcggctagaaagattcagaagctgagttcagtcctgccgccacaatcaatcttcgctcctatggcttcacagaagcgtctcccatgactaccaaatttaactccttccagatcacccacggg

SEQ ID NO: 409596 - DNA, 822 bp, Homo sapiens
agcggcttcttgcgcgggatagggcacctgaggaagcgggctgcgcctgtggcacagtggtacggggccggaagataacttacctgaagaggcgatcaatccctgagaatcgcgggcgacccgttttttgtgtgcccgggtgcggggtgccgggacacggcgttgaaggcgctgagcggagggatctcagggcgagctcgagcggcgacggcgcgctctgtgattgcaccgcgagcgcctgaggtgatctcggcctacatcgcgtcagcggggccttgggcgtgagcaccgccccctgtccggacgcagggtactggggcacctcgaactgtggcacctcacccttctccggggccacgtcttggggactccgacagccccaaataagccctcggggactggggttgtgaaaagcgaggtcgtgaagacgccggcctcataccgaagggtaggacggtgaggtcagccccgtcccactccaactaaaatcaacctgacaggaggtggttcaggaaaacggtcccatttggcacctcaagtctaggtccctcaagtctctacaacagtatgcaaagaaaatgttcatcttcattcttcttatagttttctggtaacttactgaaccaagcgcacacacactctccaaggacaaacatttttcagtgctgggacaatgcaaattcagctctcggcagactactacacactgtgcatgatataccaagactaaaagactcataacctacccgcagaaagagtgcatcttccatagtagctctgcaaaaagatccaaaagaaactgttaatggcctggcttaagtc

SEQ ID NO: 409597 - DNA, 250 bp, Homo sapiens
tttgcaaaacataataaatctgattttttccgtaggaggtggttcaggaaaacggtcccatttggcacctcaagtctaggtccctcaagtctctacaacagtatgcaaagaaaatgttcatcttcattcttcttatagttttctggtaacttactgaaccaagcgcacacacactctccaaggacaaacatttttcagtgctgggacaatgcaaattcaggtaagggaagacaaacatttccctaagtgc

SEQ ID NO: 409598 - DNA, 342 bp, Homo sapiens
caaaggaatacagtaaaaactcaatagataaacaaaaatagagcactgaaaatattcaaataattcaaataaaattaggaaaggaaaaacaggaacaaaatgagggaagaaacctaaaataaatcataaagggtagatttaaatttcaacgtataactaattatattaaatataaatgatctaaacatacaaattaaatgacagagattgtcataatggattttttttaaatgaccaaaggatatgctatctacaggtaatacattttaaatataatgaaatgaatgtgttaaaagtaaagtgatatacactaatcataaggaagctggaggggccatatta

SEQ ID NO: 409599 - DNA, 549 bp, Homo sapiens
cttagtatatataaatgtgcatatgtatatatatatacacacacacacacacacagaaacacacacattttaaaaatctacccatccttttttccaaaggtaaccactgtaaacattttagcatcttttctgtccctctctgtatatagaactccattcctaggactgcagtagtgaaacacatggagtctggagccagactgccaggagggtgaatcctggctttgccatttacactatgaccatgagcaagttaagtaacttttttatatctcaatctttatctgtaaaagaagggttgtgatagaacctagttctataaataggattgttatgaagattaaaagttcaataacatacataaagctcttagaacagtatctggcacagaaaaagtgacatgtattattaaactgaatgaggcctttaggggaaatcatgataatttggtactctgtcaaacagtatgttgtttaaaataacaaaatctgcaggcaaaagaggctttttaagagaatcagataggatgtagaagcctacatctcagac

SEQ ID NO: 409600 - DNA, 415 bp, Homo sapiens
aaaatgtttacatttacctatagcctgtacagtaacccccctactacccgcctcaccggcttagaattgtctctcctttctggaccaaatcaatgtatttcttaaatatatttaaacgtatttgactgaagtctcatgcctccctaaactgtgtaaaaccaagctgcaccccaaccattttgggcacatgttcccaggacctcctgaggtctgtgtcatgggccacagtcaatcatatttggctcagaataaatctcttcaaatattctacagagtctgactccttcttgtaaacatctggaccatctcatttctttttcatattcagaaacttacagatactaaccaaacacacacacacaaattattagtaccactgcactccagcctgggcaacagaatgagactccttctc

SEQ ID NO: 409601 - DNA, 910 bp, Homo sapiens
ttcatatatggcttttattatgttctggtagtttcctactgttgctaatttttaagtttttatcatgaaagagttttgaattgtcatttttttcctgtatgtgttttttccctttattctgtttatattatgtgttacactgattgattttcacatgttgaacaatcagtccttgcgtcctgggaataagtcccacttggtcatggtgtaaaatcctttacagcaggggcgctgctaaatttggattgtaggcttttgttgattttgcatctggattcatgaaggatattggtcagtacttttcttgtagtgtctgtctggctttggtattggcaatactggcctcacagaatgagttatgaagtgttcatttctttattttccttcttacagcctagattcttaagtccattattaaaatcacttcctggcacatgtcttcaactaccattctctcccctgaatcccattctcctggaaaaatagcagtcttgatttatctctgtgcctcaagcagctggccatgactggataaaatacacaattgcactcactagttttacttccagtgactgaacctcaggtgggttcttagcacagcacagtgttcttaatactttccccctagtttcagtttctctaagtcaactatttcccacttcttttctcttcaaatttatagtgctccccaactccaatcttaactgatgactacttctttctttggtgagaaaataaaagcagcccgagagaattcctacttgctcccatctccaaatccgtactctgctttccctctctcacctacacaaaaactgtgttcttcagttaccccagacttacctacatcactgactcttctctacttgaccatttccatctgtagataaactacgttttcacccccaaa

SEQ ID NO: 409602 - DNA, 630 bp, Homo sapiens
gaatgggctttggttcgaaggatggtgagcagatggtcaccggcctcacagagaagaaggttgtgcaacagggcctggaggccctctgaagatctgagacaaggggaagaggacaactttaccagggacaagacagcctgagcttcagcaaaacactataaaagagtatccttggttccatatgacccaggcagagggaggagtgatgggttttcaaggactgagaatgcacatatggatagaacaaatctagaaattcaagctacttctattgctaaacaagtatagagtttcatataaatataattcataaaaggtataaacggcaagagtttctacccaaagattttgtgaaacacctggcattctagctacagcagcaaattatggcatcccttagcccctcagagacctctgtcctcagcagatgtgaccgccttcttggatctcagcagtgcaagggttcagtgtgccagcatctctacatctgaggtcttgctgtcttctgcaggccttccagctgctttgagagagaagtgaccaaagtattctcacttttgaagggagtgaaataaaacctggacaaaccaggttctcaaattaaaattcatggatcttcctattttccca

SEQ ID NO: 409603 - DNA, 2413 bp, Homo sapiens
ggattttcagtgttccaggactgggtgttctgctggtctccctctcccctcccttccccgattccccggtgccctccctgcgcgcagacccaggggactctgagaatggaagggagctctcattcccgggaggaaaagacaccaggttccctgggctgcctgcactcagttctcagcctccttcctcatgcctccagccactgcccgggtctgcggcacgggcgcgatttgaaatacccctccttcccgctttgaagaaggctgggctggctgggggttattttgggagcagcttctgagatccaatggccttgttagggcaacactgacctttccgtcccagaaggagggcaggattggagaagggggcggggcagcggcggggagaccgacagccccgcacacccactggggtggagaagggggccagcgggctgcgggaattcagcctccggcgggggctgccaccgaggggaatttcccctctttgaaaaggctggggacccctccaccccaccctttcactgggcttcttaaagagatcacaccgttttcccttggacttcttggaaggcagacttgggacgctttgtggggactttgaacctttccttcctgctttctttccagcaggcagccttgctctggctggtggagtcggggctcccgggcatggcactgactagccgacccggtgctgacttggcgccggggctctttcagcctctgctggcatcctgcttcccccctcctggggtgcagtggtgagtctgggggcctgcccccgagggcactggaggagtgttgcaggcatcacccacgccctctgcacccacgctggaggacggggaggttgtcaggggctatgatgagatgagtgggggccgcttcgactttgatgatggaggggcgtactgcgggggctgggaggggggaaaggcccatgggcatggactgtgcacaggccccaagggccagggcgaatactctggctcctggaactttggctttgaggtggcaggtgtctatacctggcccagcggaaacacctttgagggatactggagccagggcaaacggcatgggctgggcatagagaccaaggggcgctggctctacaagggcgagtggacacatggcttcaagggacgctacggaatccggcagagctcaagcagcggtgccaagtatgagggcacctggaacaatggcctgcaagacggctatggcaccgagacctatgctgatggagggatgtgttaaaatcgccctcagaatatggtcgagacaatgaaacaagacaatgaagcactgagcatcatgcctggcacataggaaatgccaaaatatatattcccgtatttccttcacattccaaagggtgaattaattcaggatggcctgaaccatagctgtcactgtcttcgggaggatatttgaggacaaaaacgagtttttgactttggaacagtaaataagacaagactttgattcgcttagttctgccttgagtcctgccagtgtagatggaatccatgccagacatgattccatttcgaatgtagaatcagcataatttaacctcatcttggaaatctcatgtcccagttcacagccaggcatcagcgtgacagtcagctgagctgctgtcttggcagcttctgggcattctatggagaccccaggagagcacagcagacccttagcagaacagaaaagcggaccgtattagtctttcctgtccacggccttgttttcagtgattcatgtgcccgattggccaaatctctgcagacgtgcccctgtccgaggccaggcttctgggattcatcgagcttgcttgtttccgggacctgctaattccgtgcccagcagctgttccccggagcaggccctgccctccacaccctcatgaggaatgccgagtctcattttctgagggccctggttgagggtggggtgtggggcgagggggacagggttgcttcctgccatagacttcctgccttggagggttatccttgttctcacctatcccttcccgagctgaagccacagagtaggagagaagttagggctggcacacctccctcccgtgtaactttcactccctgcttaaagggaactgatgagagttgcctggcacagatctgtgcctggcagaatccacagagcagcccaggtgtgctaggaactccagagtgacccctgctccaggccaggaatgagcaccttgtgcctggaggtcttcctgccactgctggctgcccattgctgtggatggggtagagctggagtcacacatggaggctggacagctgcatgcagcctgcaggggacactctggatggcatgtaccatgtttttattatttctatttttaattaaattggaatcctttatggataccttt

SEQ ID NO: 409604 - DNA, 1508 bp, Homo sapiens
ggattttcagtgttccaggactgggtgttctgctggtctccctctcccctcccttccccgattccccggtgccctccctgcgcgcagacccaggggactctgagaatggaagggagctctcattcccgggaggaaaagacaccaggttccctgggctgcctgcactcagttctcagcctccttcctcatgcctccagccactgcccgggtctgcggcacgggcgcgatttgaaatacccctccttcccgctttgaagaaggctgggctggctgggggttattttgggagcagcttctgagatccaatggccttgttagggcaacactgacctttccgtcccagaaggagggcaggattggagaagggggcggggcagcggcggggagaccgacagccccgcacacccactggggtggagaagggggccagcgggctgcgggaattcagcctccggcgggggctgccaccgaggggaatttcccctctttgaaaaggctggggacccctccaccccaccctttcactgggcttcttaaagagatcacaccgttttcccttggacttcttggaaggcagacttgggacgctttgtggggactttgaacctttccttcctgctttctttccagcaggcagccttgctctggctggtggagtcggggctcccgggcatggcactgactagccgacccggtgctgacttggcgccggggctctttcagcctctgctggcatcctgcttcccccctcctggggtgcagtggtgagtctgggggcctgcccccgagggcactggaggagtgttgcaggcatcacccacgccctctgcacccacgctggaggacggggaggttgtcaggggctatgatgagatgagtgggggccgcttcgactttgatgatggaggggcgtactgcgggggctgggaggggggaaaggcccatgggcatggactgtgcacaggccccaagggccagggcgaatactctggctcctggaactttggctttgaggtggcaggtgtctatacctggcccagcggaaacacctttgagggatactggagccagggcaaacggcatgggctgggcatagagaccaaggggcgctggctctacaagggcgagtggacacatggcttcaagggacgctacggaatccggcagagctcaagcagcggtgccaagtatgagggcacctggaacaatggcctgcaagacggctatggcaccgagacctatgctgatggagggacgtaccaaggccagttcaccaacggcatgcgccatggctacggagtacgccagagcgtgccctacgggatggccgtggtggtgcgctcgccgctgcgcacgtcgctgtcgtccctgcgcagcgagcacagcaacggcacggtggccccggactctcccgcctcgccggcctccgacggccccgcgctgccctcgcccgccatcccgcgtggcggcttcgcgctcagcctcctggccaatgccgaggcggccgc

SEQ ID NO: 409605 - DNA, 478 bp, Homo sapiens
cagaagagtatttagctttattctcctccactcccttgtctgatgagttctcataaattgctttctgaaatgacaaaacattgggatttggaaagccttgagaattcatcagttttatctttttctccagtgttttttacaaaggacccatttagtcgtgatatttataggatatgaggaaggcagtgatcctggcattcgtggactccagaaaacattttggagaaaaattaatgtaaggtaagggtgtagtaggtatacattgctgtattcattttattgtcccttccttccttccttccttccttccttccttccttccttccttccttccatccttccttccttccttccccttgaagatcttgttgcataccaatttattcattttagtatagcagtgactatttaaatgggtccctttctaaccacctttccctccaacctcaaaatccctggttaaaatgcttttctttaa

SEQ ID NO: 409606 - DNA, 444 bp, Homo sapiens
gtgacactgatgataaaaatccatccaagaatttatatgtgacatctgcagcaggttcaaatctctcagctatgagacaaactggatacttcctaaggattgccatctattatgcacagagagccaaaatccgttactgaaattgtctggtgttttttacaaaggacccatttagtcgtgatatttataggatatgaggaaggcagtgatcctggcattcgtggactccagaaaacattttggagaaaaattaatgtaagagacggagtttcactgtgttagccaggatggtctcgatctcctgacctcatgatccgccagccttggcctcccaaagtgctaggattacaggcttcagccactgcgtctggcccccttaatgcactgtttctatcaggccttccctttcctcatctccccacagacagctagtgttctgatttc

SEQ ID NO: 409607 - DNA, 321 bp, Homo sapiens
gtgacactgatgataaaaatccatccaagaatttatatgtgacatctgcagcaggttcaaatctctcagctatgagacaaactggatacttcctaaggattgccatctattatgcacagagagccaaaatccgttactgaaattgtctggtgttttttacaaaggacccatttagtcgtgatatttataggatatgaggaaggcagtgatcctggcattcgtggactccagaaaacattttggagaaaaattaatgtaagacacagggtcttgctctttcacccaggctggactgagtgcagtgtcatgattctagctcac

SEQ ID NO: 409608 - DNA, 1067 bp, Homo sapiens
gaaagaaagagagaaagaaagaaagaaagaaagagattggtttgaaacattgggagctgagcttaatgagaaaaggccattcctaactgctaagctaccgtattaaacagtggcaagtaccttggaaaataaaacagaaaccactgcccatctttttctaacggagaaagacaagagatggcttgaccagagtggagatttagaacttcaggtgctgataaatatggtaacatcatggggtgctttggcagctggatagattttatttattcagggctcctttaagccagaggagattcctggaggctgctaaaatagaatgctccacctggatagttaacatctggattttattttgtttcaaaaagttaattacaaatagttcgaattccttctggtatccctctgagaagagtttcttactgggtggctcacaagcggggagacagaaagggaaaaaaactagattgatattgctcaggagaaacaggattgtggctacacgtgagccatgtatgcaattttgaattttcccatagtcatgtttaaaaaaacgaggaaaaagtgaaattaattttaatactaaacccaatatgtataaaatatgaccatttcaatatgtaatcaattttacacttattaataagatcttaatatttttaaaattaagtttttgacatccattatgtattttacactcatagcatatctcagtttggactagttgcgtttcagctacctgtggttagtggccgccatgttaatactacagcacaggtcaagataacatttgcaaaggcaaggcatcttcccctccccatttctagtttcatgaactgtgcacagggatatggggctgttcgaggtacttttgggctgaccaaggctcagaggctactgacagctttgctgcaagtaacttctaggccttgtgggtcccagtgcagggaacccatgtgcggtgacactggagaagccatctgatccaggtctctcacttgacagatggggaaactgaggtccaaagaggtacagcagcttggtttaagagatagagatggaactgg

SEQ ID NO: 409609 - DNA, 665 bp, Homo sapiens
gcggttacgaggaggccgcctcctgcttgccggcctgcggtcctactcgacaacgcaagatttcaaaaggggaattccttcagggcttgattacaaggaagaaagcgatttcctccgcctcttccaaagcggtttggaaattgctctcttcatgtcatcataataaaccactagaaacttgcatttacttttgactgattattgaagtgtctggttatggagaacaaagaaattggagaaatgtgaagcttaagcttctgctgtgctgcagcgaagaagtctgggaagtttaggaagatatcctcttgactaaatggggctaaatgtcagcagaattgaagaaaagtaaaggaacttaccaatacttgatcgagacagtgctaaaataaaacacatcaaaagaagaatgagttctgtttgtcccagggagaacttagatgccatagacactatattgcagaaaggttgtggaaaagaagatagaaatgagtcacaacttatttcctggtatcaattgcaatgcaatgtggtgagcagctggatatctacatatggattccaatacttttgtggtaaggtgggactacaagatctatgcaacctgtctttcaattttggtaagagaataaaaatatttttggagattgctagtttctcaatctgag

SEQ ID NO: 409610 - DNA, 1421 bp, Homo sapiens
tggctcgcctcggcgtgcagtgcgcgtgcgtggagctgggagctaggtcctcggagtgggccggagatggcggcggccgacggggctttgccggaggcggcggctttagagcaacccgcggagctgcctgcctcggtgcgggcgagtatcgagcggaagcggcagcgggcactgatgctgcgccaggcccggctggctgcccggccctactcggcgacggcggctgcggctactggaggcatggctaatgtaaaagcagccccaaagataattgacacaggaggaggcttcattttagaagaggaagaagaagaagaacagaaaattggaaaagttgttcatcaaccaggacctgttatggaatttgattatgtaatatgcgaagaatgtgggaaagaatttatggattcttatcttatgaaccactttgatttgccaacttgtgataactgcagagatgctgatgataaacacaagcttataaccaaaacagaggcaaaacaagaatatcttctgaaagactgtgatttagaaaaaagagagccacctcttaaatttattgtgaagaagaatccacatcattcacaatggggtgatatgaaactctacttaaagttacagattgtgaagaggtctcttgaagtttggggtagtcaagaagcattagaagaagcaaaggaagtccgacaggaaaaccgagaaaaaatgaaacagaagaaatttgataaaaaagtaaaagaattgcggcgagcagtaagaagcagcgtgtggaaaagggagacgattgttcatcaacatgagtatggaccagaagaaaacctagaagatgacatgtaccgtaagacttgtactatgtgtggccatgaactgacatatgaaaaaatgtgattttttagttcagtgacctgttttatagaattttatatttaaataaaggaaatttagattggtccttttcaaaattcaaaaaaaaaagcaacatcttcatagatgaatgaaacccttgtataagtaatacttcagtaataattatgtatgttatggcttaaaagcaagtttcagtgaaggtcacctggcctggttgtgtgcacaatgtcatgtctgtgattgccttcttacaacagagatgggagctgagtgctagagtaggtgcagaagtggtaggtcagctacaaatttgaggacaagataccaaggcaaaccctagattggggtagagggaaaagggttcaacaaaggctgaactggattcttaaccaagaaacaaataatagcaatggtggtgcaccactgtaccccaggttctagtcatgtgttttttaggacgatttctgtctccacgatggtggaaacagtggggaactactgctggaaaaagccctaatagcagaaataaacattgagttgtacgagtctgatca

SEQ ID NO: 409611 - DNA, 1859 bp, Homo sapiens
  misc_feature (2)..(5): n is a, c, g, or t
  misc_feature (423)..(423): n is a, c, g, or t
  misc_feature (882)..(882): n is a, c, g, or t
annnnatggttgcctaatttttcttagcctaagtcttgattaaaaatgggatggaagatgagtaagtggattttgaatccaatattctgaacacacatcacaagtgcagagaagagaaagaaatcctcccaaagaagttaaaaggagaaaacacaaaaaacttacctcatacatttttctagaacttctcttacaaacttcggtttgggactttcaggatcttgactaagacaatctgacctaaggaggaaatgtagttttatcaatgcttacatataatctgcacttacacccatttgtactataattatctgttaacttataacaacttacaagttttgttaagttataattgcacttgtaactatttgtacttaactacaaatagtttccaagaaattaaatatttcagacacttttatnttacagttttaaacattagtagttttttgactacagaaaaagataaaacaaaccatcacttaccaatcttcccagctccaacggaactggaagttacttagatgatgagaaaaccaattaataaacctacgtagagaagggggaggtaggcagagaaaaaggaagaataactgggatttagaacagaaacttatataagccttcaaacagataaaacccgactttacagagttaatgaaaagcatattcccctacatgcagttgtatcttctgccaactctctttatcctttttaggtcaatgacagatataattctagtacctgttttgtgcgggcacctaacatgtttattatttaattctcacaacttccaaggtacatattattttctccatataaaagatgatgaaactgaagcaagaaaaaaaaaaattttatgaaattgtaggccaggtgcngtggctcatgcctgtaatcccagctactcgggatggagactaaggcaggaggattgcttgagcccataagttcaaggttacaatgagctatgctcatcccactgcactccagcctgggtgacagagcaagaccctgtctcaaataaaaaaaagaaattgcagataaaacattttataaatggcagagccaaagtatagtctttgatacttgactagagaatgaaattaaagaaaatcatagcatggacatcaaaaaacgtaatgttacattaagtatgagtctggttattatacaaaggttattttgggaggcaagaaaaaaactaaacatggaaattcttaaaaatgtctttctcaaattcctttatgaagtacaggaagtaaaagctgctaactcagctcagcagtaaagcgattactgtacctgtctacacaggtagtgttcattgtgtccaaacgcatgtatagcatttcagttgcctgtgcaagctgtgaatttaggataaggaaaactattctccacttttatcccaaataagttgtaatagacaagaatagaaataaaacatttcaagtctttataatgattaataatgctgaacatcttttcacacaatcaatcttgtttttgttttttcttacagctttgaaatatcagtgatgtataatgaatctgacctgcatacactcgtgaaatcaagataatattttcatcacctcccaaatttccccatgcccctccatacgcacaggcatacattgtttcattgtgcttagcagaaattgcttcttttttttttttttaactgaaggtttgtggcaaccctgcaacaagcaagtctactggcaccatttttccaatggcatctgcttgcttcttgtctctgtgtcacatactggtaatttttacaataaaacaagcttttccattattaattgctgcaatcccataataaaactttaaaaaataagaagat

SEQ ID NO: 409612 - DNA, 1652 bp, Homo sapiens
tggctcgcctcggcgtgcagtgcgcgtgcgtggagctgggagctaggtcctcggagtgggccggagatggcggcggccgacggggctttgccggaggcggcggctttagagcaacccgcggagctgcctgcctcggtgcgggcgagtatcgagcggaagcggcagcgggcactgatgctgcgccaggcccggctggctgcccggccctactcggcgacggcggctgcggctactggaggcatggctaatgtaaaagcagccccaaagataattgacacaggaggaggcttcattttagaagaggaagaagaagaagaacagaaaattggaaaagttgttcatcaaccaggacctgttatggaatttgattatgtaatatgcgaagaatgtgggaaagaatttatggattcttatcttatgaaccactttgatttgccaacttgtgataactgcagagatgctgatgataaacacaagcttataaccaaaacagaggcaaaacaagaatatcttctgaaagactgtgatttagaaaaaagagagccacctcttaaatttattgtgaagaagaatccacatcattcacaatggggtgatatgaaactctacttaaagttacagattgtgaagaggtctcttgaagtttggggtagtcaagaagcattagaagaagcaaaggaagtccgacaggaaaaccgagaaaaaatgaaacagaagaaatttgataaaaaagtaaaagaggttgttcccgccttcctgaataggccacaaagggctgagactggagtagacactgtagagattagacacaaggagcttactgtgcagttttctcagaaggctcagaacagagaggaataaaagcaagtctaaaagtattttagttgaaaagaaattggaacctggttcctcttggtcttctgattttgatccacaaagaagctgacacagtttacttctttatgggaagaattgcggcgagcagtaagaagcagcgtgtggaaaagggagacgattgttcatcaacatgagtatggaccagaagaaaacctagaagatgacatgtaccgtaagacttgtactatgtgtggccatgaactgacatatgaaaaaatgtgattttttagttcagtgacctgttttatagaattttatatttaaataaaggaaatttagattggtccttttcaaaattcaaaaaaaaaagcaacatcttcatagatgaatgaaacccttgtataagtaatacttcagtaataattatgtatgttatggcttaaaagcaagtttcagtgaaggtcacctggcctggttgtgtgcacaatgtcatgtctgtgattgccttcttacaacagagatgggagctgagtgctagagtaggtgcagaagtggtaggtcagctacaaatttgaggacaagataccaaggcaaaccctagattggggtagagggaaaagggttcaacaaaggctgaactggattcttaaccaagaaacaaataatagcaatggtggtgcaccactgtaccccaggttctagtcatgtgttttttaggacgatttctgtctccacgatggtggaaacagtggggaactactgctggaaaaagccctaatagcagaaataaacattgagttgtacgagtctgatca

SEQ ID NO: 409613 - DNA, 1212 bp, Homo sapiens
tggctcgcctcggcgtgcagtgcgcgtgcgtggagctgggagctaggtcctcggagtgggccggagatggcggcggccgacggggctttgccggaggcggcggctttagagcaacccgcggagctgcctgcctcggcatggctaatgtaaaagcagccccaaagataattgacacaggaggaggcttcattttagaagaggaagaagaagaagaacagaaaattggaaaagttgttcatcaaccagagatgctgatgataaacacaagcttataaccaaaacagaggcaaaacaagaatatcttctgaaagactgtgatttagaaaaaagagagccacctcttaaatttattgtgaagaagaatccacatcattcacaatggggtgatatgaaactctacttaaagttacagattgtgaagaggtctcttgaagtttggggtagtcaagaagcattagaagaagcaaaggaagtccgacaggaaaaccgagaaaaaatgaaacagaagaaatttgataaaaaagtaaaagaattgcggcgagcagtaagaagcagcgtgtggaaaagggagacgattgttcatcaacatgagtatggaccagaagaaaacctagaagatgacatgtaccgtaagacttgtactatgtgtggccatgaactgacatatgaaaaaatgtgattttttagttcagtgacctgttttatagaattttatatttaaataaaggaaatttagattggtccttttcaaaattcaaaaaaaaaagcaacatcttcatagatgaatgaaacccttgtataagtaatacttcagtaataattatgtatgttatggcttaaaagcaagtttcagtgaaggtcacctggcctggttgtgtgcacaatgtcatgtctgtgattgccttcttacaacagagatgggagctgagtgctagagtaggtgcagaagtggtaggtcagctacaaatttgaggacaagataccaaggcaaaccctagattggggtagagggaaaagggttcaacaaaggctgaactggattcttaaccaagaaacaaataatagcaatggtggtgcaccactgtaccccaggttctagtcatgtgttttttaggacgatttctgtctccacgatggtggaaacagtggggaactactgctggaaaaagccctaatagcagaaataaacattgagttgtacgagtctgatca

SEQ ID NO: 409614 - DNA, 867 bp, Homo sapiens
ctccttttcctactgtggcattctgttatctgaagtcaaacgtacctgaatgtgtcctattgtgttactcaactcacttctgaatatggttctgttttgcataccaccaacccacataaccatttctgaatctcttgtttcacactgctccagtgacaacttgattcacaggccgaactagtgagaattgcggcgagcagtaagaagcagcgtgtggaaaagggagacgattgttcatcaacatgagtatggaccagaagaaaacctagaagatgacatgtaccgtaagacttgtactatgtgtggccatgaactgacatatgaaaaaatgtgattttttagttcagtgacctgttttatagaattttatatttaaataaaggaaatttagattggtccttttcaaaattcaaaaaaaaaagcaacatcttcatagatgaatgaaacccttgtataagtaatacttcagtaataattatgtatgttatggcttaaaagcaagtttcagtgaaggtcacctggcctggttgtgtgcacaatgtcatgtctgtgattgccttcttacaacagagatgggagctgagtgctagagtaggtgcagaagtggtaggtcagctacaaatttgaggacaagataccaaggcaaaccctagattggggtagagggaaaagggttcaacaaaggctgaactggattcttaaccaagaaacaaataatagcaatggtggtgcaccactgtaccccaggttctagtcatgtgttttttaggacgatttctgtctccacgatggtggaaacagtggggaactactgctggaaaaagccctaatagcagaaataaacattgagttgtacgagtctgatca

SEQ ID NO: 409615 - DNA, 1171 bp, Homo sapiens
tggctcgcctcggcgtgcagtgcgcgtgcgtggagctgggagctaggtcctcggagtgggccggagatggcggcggccgacggggctttgccggaggcggcggctttagagcaacccgcggagctgcctgcctcggtgcgggcgagtatcgagcggaagcggcagcgggcactgatgctgcgccaggcccggctggctgcccggccctactcggcgacggcggctgcggctactggaggcatggctaatgtaaaagcagccccaaagataattgacacaggaggaggcttcattttagaagaggaagaagaagaagaacagaaaattggaaaagttgttcatcaaccaggacctgttatggaatttgattatgtaatatgcgaagaatgtgggaaagaatttatggattcttatcttatgaaccactttgatttgccaacttgtgataactgcagagatgctgatgataaacacaagcttataaccaaaacagaggcaaaacaagaatatcttctgaaagactgtgatttagaaaaaagagagccacctcttaaatttattgtgaagaagaatccacatcattcacaatggggtgatatgaaactctacttaaagttacagattgtgaagaggtctcttgaagtttggggtagtcaagaagcattagaagaagcaaaggaagtccgacaggaaaaccgagaaaaaatgaaacagaagaaatttgataaaaaagtaaaagaattgcggcgagcagtaagaagcagcgtgtggaaaagggagacgattgttcatcaacatgagtatggaccagaagaaaacctagaagatgacatgtaccctttgaaatatcagtgatgtataatgaatctgacctgcatacactcgtgaaatcaagataatattttcatcacctcccaaatttccccatgcccctccatacgcacaggcatacattgtttcattgtgcttagcagaaattgcttcttttttttttttttaactgaaggtttgtggcaaccctgcaacaagcaagtctactggcaccatttttccaatggcatctgcttgcttcttgtctctgtgtcacatactggtaatttttacaataaaacaagcttttccattattaattgctgcaatcccataataaaactttaaaaaataagaagat

SEQ ID NO: 409616 - DNA, 1202 bp, Homo sapiens
tggctcgcctcggcgtgcagtgcgcgtgcgtggagctgggagctaggtcctcggagtgggccggagatggcggcggccgacggggctttgccggaggcggcggctttagagcaacccgcggagctgcctgcctcggtgcgggcgagtatcgagcggaagcggcagcgggcactgatgctgcgccaggcccggctggctgcccggccctactcggcgacggcggctgcggctactggaggcatggctaatgtaaaagcagccccaaagataattgacacaggaggaggcttcattttagaagaggaagaagaagaagaacagaaaattggaaaagttgttcatcaaccaggacctgttatggaatttgattatgtaatatgcgaagaatgtgggaaagaatttatggattcttatcttatgaaccactttgatttgccaacttgtgataactgcagagatgctgatgataaacacaagcttataaccaaaacagaggcaaaacaagaatatcttctgaaagactgtgatttagaaaaaagagagccacctcttaaatttattgtgaagaagaatccacatcattcacaatggggtgatatgaaactctacttaaagttacaggtctctaataagttgtatttattatttttcactctggtaaattcttaataacaaactagtcataattggtttggcttttgcttacagagtgtggaaaaactcttttccctagttttgcatatgcttcacagtcatgtataatgacatttaataacatgttttctcattttgcttttttcttttcttttttcaaacaataaggtctcactctgtcactcaggctggagtgcagtggtgagatcatggctcactgcagccttgacctcccgggctcaggtaatccttccacctcagccttctgagtagcacctggctagttttttgtattttttgtagagatggggttttaccatattgcccaggctggtctcgaactccagggctcaagtgatcctcctgctttggcctcgcaaagtgctgggattacaggcatgagccgccacgcctggcctcattttgcttctaatatggcactttgaaagaaacctgttgctattgggtgatgttaagagtacaatttggaaactaaaaaaggttggaatgggagtcaggccctgtttccttaccctctttcacctcca

SEQ ID NO: 409617 - DNA, 413 bp, Homo sapiens
ctttatgttacttccttttcttttttcctctttaatttttttttttagataaacataaggtcttattttgtcttttacttaaatgtatttatgtcaggcattgcatacatgctgataagctaataaaatagaggaaaatatattgttctagtcataaaaaaggaaactagagttcattttccttttcttaggacctgttatggaatttgattatgtaatatgcgaagaatgtgggaaagaatttatggattcttatcttatgaaccactttgatttgccaacttgtgataactgcaggtacttattttagatggtgttcttaattgctaatgtttatgtgtaggtttagggcaaaacaagttatatctgtttggatttgatattttcttagtaattatgaatttcattttggg

SEQ ID NO: 409618 - DNA, 746 bp, Homo sapiens
agttttaaagcactacaaaagagtagaaataagaccacccttcatccaatccttccaccagctctcagagctcatcttagaagagccagggtcacagccatttgggggaaagaaatgggatccttggtgctgcccgccaccaggcctgcagcagccccacagccttccgtaccaacgaccatgatgttgaagtcgaaaccggtcttcatggtcttcttgcgcatctgctcgatgatggtgtcgatgccgatgtagcccagcagaatcatacaaagttgggcctggaagggatcttagtatcatccagtccaggtccctcatttcatagacaaagagactgaggcctggaggagaaagaactcaactaagaacacagagcaggtcagaggtaaaatctgggccagtgccaggttctctggttgctgggcactttcaaatgcacctcactgctctgaagcccacatctgtgcatctaacccaggggctgctccatcttggcactaatgacatttgagtaattattgtgggaggctgtcacatgcattacaggatgattagtggcacccctgatcttagtagccccccaggctgtgacaacccaaaatgtctctagatggtaccaaatgtcccctgggaagcaccattgccctggctgagaaccactggtctaagaaatgtctggggttgttcagacctgagtcatgcctccctccccgaataaagggcaaagactttttaggatcctg

SEQ ID NO: 409619 - DNA, 387 bp, Homo sapiens
gtctctctgtgttacccaggctggtcttgaacccctaggctcaagtgatccttctgccttggcctcctgaaatgctggtgacaggcatgtgccactgcacttggctgaaaatagtaatttaagagttctgtggtaggttagttcatctgtatttttgactagagctataggagattatcttaaggggtttctaaattggtgcacactaaaagataatattcaaggtactttggagcttttgaatttaggtgtatttaacttatgtatgtgttatagtttctgaccaaacaagcttgtgaaggtggcttgactgtattctggttttttgttttgtttttttttttagtttctcacaattatatatatactgttttctatctacattgt

SEQ ID NO: 409620 - DNA, 930 bp, Homo sapiens
cggaagggaagctaaagtcgttaccatggtgaccgcgacacactcagaaacgtctactagtgacggtcaagccacctacaaccggtcccaaagccgcaaacgagtcaggcatcgtggtaggacctggcgagtggggccggggagagcgggacgcctggatcgggaacttgtcgcattcacattggctgctaggaggcctcggcgaccacttccggatccggggcgggggtcgcaactcccagcccttgctcagagggctgaactagaattcccagaagcctctgcggccgccttcctgctccttcactcctgcttcccccacaaataacacttcttctttaggcattgaagactgttcctttctgggtgaaggagaatcacgtagcaattgggagcaagatgcatccatgtaacccagtactggaggtcaagatggagacaatctccacagccaccatggcctttccctgagtgctactataactcaggaggaaagccacccagatactgcagaacaccaacatgctgaaggcaaaccaaagagaagaaagactttgtgcttgagagttgaaaatgagaccaccttgccatgtcaattcaggtctcttaaagtcttcccttgcaggagaagagggaagtgaaaagatcttcttgtgaacagggtctggtgtggacctccagcaaactccaacagattaattcattgacagaatgggattgtcttgtgaaagggaaatatcttggatcccttcaagctgggaacccctcagggcaaatctgcctacttctgtcaattcatcaatctcattctccgtccagttttgtgcccttgctggagaggagttgccatcatttgtcatacacaagtatcaatagccaaattgatcacgcaaaagaaacgatatcagagattgaagatcaacttactaa

SEQ ID NO: 409621 - DNA, 239 bp, Homo sapiens
gatgttaacagttagcatttgtccttactttgtgccaggtactgttttaagcagttcacatgtaattattcatttaatcctcctagaagatagtattttaatatccgcattctcagaagaagaaacatggacacagagatattagggtggaattcaaccaagggtgtaatggctttgaagcaggctggcctcactttgaactcaggagaagtggaacagagttgcatattttcttaagg

SEQ ID NO: 409622 - DNA, 335 bp, Homo sapiens
tcccccaaaaaagatcagctccgaggagttggttctgagttcaaattctccatgaattttctcacttttctttgtaggcgtacttgttttcctagttgctggaattgtcatcgttggcagttttatttatgtgtagcctggaaaactcagtattttcagatttgaaagtgaattgtgattatttttatacattatttttattaaatatttgtctttatttaataaaggcaacttgcatcttcgaccaaccttttcattccccagtgttgtttcattttagacaatatatatggtagaatctgaataaaatatgccctaaattgagccttgttgaa

SEQ ID NO: 409623 - DNA, 555 bp, Homo sapiens
ggtgatcttcccacctcaacctctctcagtagcagggactacaggcatgcaccaccatgcctgtctaattttttgtagagatggagtttcagcatgtttcctaggctcgtcttgaacccctgagctcaaatgatccacccatcttggcctgccaaagtgctggaattataggtgtgagctaccatgttgggccaatgatttgatttgatataaaatgtggagattttgtctttgcagcactaaaagtctgaaaaacccagagttgacttatgcttattttggaagagaagttttcagcatatgtgttgcaaagggcatcgacttttttagaccaattcagcatcttccaattaagttgactgttattaaaaactgagacaaacatcacagaatttcctaggatttcataacttacagacaaaacggcttgtttcataccagaaagacaagagacagctgctttttaattactactcttgccatttgctttctactagagatgtgtctcaaacgtggaatctaattagaaatcttaattgaaaatggattcttaaa

SEQ ID NO: 409624 - DNA, 553 bp, Homo sapiens
gccctccacttctaccaccacgagtaacaccgcccccacgggaccgctctcgaggtcccccaagccaaggtgaggcaagtcccagttgaatgtcatcccgttcctcttgggcacggcggaccgctctcgcccttaaaggtgcgttgacgtggaaggtgaatgtctctttgcgtgacagtgcctcagcgcacgggcgacgaggggcacacctatccccctggctcgctctctagctggattcaggtggaacggaggaccatgaaccctctggaccttttctgccttggtcctatgcttgtaaggtttccggcctaagaggcccatcgactccttctgccttctttcagttgattacaaaataaataaataaataaataaataaataaataaataaataaataaaaaagcaggacattaaacctgccacctccagagggtcctctagcttccttctccactcctgaattgagcgaagcggtgccgacctccaccctttgggcacgagcccctgcgcacttgggagactcctgaacaccctcggagaagccagaaa

SEQ ID NO: 409625 - DNA, 520 bp, Homo sapiens
agtcttagcagagaatccacatcaacccctgcacagtcagtgaaatgggcttggctccatttctctgcaattactgatcacatccaaccctttacctaacgtgttatattgtgagacaatgtagcaaatgtaagaagccttgcttgctcatttcggcttgctagcatactttcacaaagcccctgctgtgatgacctgcagttctccagaaagatgcttcaaagacaaaacaagattgagcacacggcctcccatctctcttgcctgagtcactctactccttaaaagataagcaataatagtccttgccttttcctacacataagataacgtctgattgaaggatacctctgtaacctataaccagatctgctcatacacccaaacgttgatgtagttcggcttcaatgtagcttctgagctaatttgatgtagtggttaatatgtaacctcctgacatcgaaaaggatatggatttgtttctgaatcataaagttttactgattgttttgtgcatgaa

SEQ ID NO: 409626 - DNA, 605 bp, Homo sapiens
gcccctggcagcaaggtctctgccacatccacgtgtcctggggtggtttcagaggggctcatgcttcctagggcagctgaacccatccccaggaagacaggccatgggcagcatgcacaggtagcctggtagcactctcctccttgtccctttttgattgaaacatggctgtagctgggggtaggggcagtgccaggcccatcaataattcagcaagatggggaaaagctgcagctcctccagcaccccctgctgctggggccaggctagtgttcgcaagcatgcctcagtctggcatgtgacttctcgccctgcaggtgccctggcaggagggactggcttacgccaccctgtgcaggatcgtcttctcagcttacagagcctagtgtgattcaacaaccctccatctctgcccccaacatgcccaactgatctggtggagggaactgaagatgaaggcctctcaggcaccatggatgggatgggtgtgtgtgaagggggcagggtccccaggagctgccccaggtctggctggacagttgcacgggaagtcctgtttgtgaactcaacgtttccacggcttttccattaaactttaccccaaa

SEQ ID NO: 409627 - DNA, 640 bp, Homo sapiens
tggagagcgcggagggccgacctgacccgccgaaagggcctgaggcgaggggagcccgggtcccggggccttggggaaggacccgcagccgcacgccggccccaagtgcaaagcattgacacgaccccgagcggagagggggcgccctccttctcccgcgcccagaggcccggccgctctggcccgagccccagcctggcctccgacccagctccgggtcgtggcgccgcctgggggtccctgcgccccggaaagagacagcaggcactggaaagcgaggccggtgggcgggcgagtcgggaggctcgggcggccgaggtccgggagcggatcccaggtggcgggagctgaggtgccctggcaggagggactggcttacgccaccctgtgcaggatcgtcttctcagcttacagagcctagtgtgattcaacaaccctccatctctgcccccaacatgcccaactgatctggtggagggaactgaagatgaaggcctctcaggcaccatggatgggatgggtgtgtgtgaagggggcagggtccccaggagctgccccaggtctggctggacagttgcacgggaagtcctgtttgtgaactcaacgtttccacggcttttccattaaactttaccccaaa

SEQ ID NO: 409628 - DNA, 757 bp, Homo sapiens
tggagagcgcggagggccgacctgacccgccgaaagggcctgaggcgaggggagcccgggtcccggggccttggggaaggacccgcagccgcacgccggccccaagtgcaaagcattgacacgaccccgagcggagagggggcgccctccttctcccgcgcccagaggcccggccgctctggcccgagccccagcctggcctccgacccagctccgggtcgtggcgccgcctgggggtccctgcgccccggaaagagacagcaggcactggaaagcgaggccggtgggcgggcgagtcgggaggctcgggcggccgaggtccgggagcggatcccaggtggcgggagctgttgccacgctggctcccaccggcctctttccagatcatgaagatatttttccttcatcaaattgagaggaagtccgtagtaaagctgcccgttgaccaggtagtgccgagagaatcgaggtgccctggcaggagggactggcttacgccaccctgtgcaggatcgtcttctcagcttacagagcctagtgtgattcaacaaccctccatctctgcccccaacatgcccaactgatctggtggagggaactgaagatgaaggcctctcaggcaccatggatgggatgggtgtgtgtgaagggggcagggtccccaggagctgccccaggtctggctggacagttgcacgggaagtcctgtttgtgaactcaacgtttccacggcttttccattaaactttaccccaaa

SEQ ID NO: 409629 - DNA, 476 bp, Homo sapiens
agagcaagtccaaacccactcctaagaagccggtgctgctgagctgcctacccctgctcctacagcaagttgccacgctggctcccaccggcctctttccagatcatgaagatatttttccttcatcaaattgagaggaagtccgtagtaaagctgcccgttgaccaggtagtgccgagagaatcgaggtgccctggcaggagggactggcttacgccaccctgtgcaggatcgtcttctcagcttacagagcctagtgtgattcaacaaccctccatctctgcccccaacatgcccaactgatctggtggagggaactgaagatgaaggcctctcaggcaccatggatgggatgggtgtgtgtgaagggggcagggtccccaggagctgccccaggtctggctggacagttgcacgggaagtcctgtttgtgaactcaacgtttccacggcttttccattaaactttaccccaaa

SEQ ID NO: 409630 - DNA, 396 bp, Homo sapiens
ccgccttcaccggaagactcggaaggaacctggagttctccgcaggcccgggccccgccctgagctttccagcggccgggaggagcggatcctcggggccaggaagaggtgccctggcaggagggactggcttacgccaccctgtgcaggatcgtcttctcagcttacagagcctagtgtgattcaacaaccctccatctctgcccccaacatgcccaactgatctggtggagggaactgaagatgaaggcctctcaggcaccatggatgggatgggtgtgtgtgaagggggcagggtccccaggagctgccccaggtctggctggacagttgcacgggaagtcctgtttgtgaactcaacgtttccacggcttttccattaaactttaccccaaa

SEQ ID NO: 409631 - DNA, 410 bp, Homo sapiens
gcccctggcagcaaggtctctgccacatccacgtgtcctggggtggtttcagaggggctcatgcttcctagggcagctgaacccatccccaggaagacaggccatgggcagcatgcacagaggtgccctggcaggagggactggcttacgccaccctgtgcaggatcgtcttctcagcttacagagcctagtgtgattcaacaaccctccatctctgcccccaacatgcccaactgatctggtggagggaactgaagatgaaggcctctcaggcaccatggatgggatgggtgtgtgtgaagggggcagggtccccaggagctgccccaggtctggctggacagttgcacgggaagtcctgtttgtgaactcaacgtttccacggcttttccattaaactttaccccaaa

SEQ ID NO: 409632 - DNA, 984 bp, Homo sapiens
gcccctggcagcaaggtctctgccacatccacgtgtcctggggtggtttcagaggggctcatgcttcctagggcagctgaacccatccccaggaagacaggccatgggcagcatgcacagaggtgccctggcaggagggactggcttacgccaccctgtgcaggatcgtcttctcagcttacagagcctagtgtgattcaacaaccctccatctctgcccccaacatgcccaactgatctggtggagggaactgaagatgaaggcctctcaggcaccatggatgggatgggtgtgtgtgaagggggcagggtccccaggagctgccccaggtctggctggacagttgcacgggaagtcctgtttgtgaactcaacgtttccacggcttttccattaaactttaccccaaaaaaaaaaaaaaaataaagaaaacaaagacaaaaaaacaacaaaaaaaacaagacagggggggggcgcgccgcgccacaagaaatactccccagcagagggggcgcccagagtaatccggcgctaacccaccagagttttgtgggacacgaaggggggccccccataatattggaggaacgcaggattctataaaacggacgaaggacaaggggggccgacgagcgaataatacaacacgcctgctggccgcggcggaacaaaccgtggcctgccgcggaggagcacactcttgtgggagagaggagaaccaccacttatacagtcgcagggccgggggggcaccaaattatggtggggcaccagcacatctcctctaacgagaaagatatttaaaacacccccaagagagccaccaatccatatcacactttttcagcctgctacaacagctggcttttaaaaccccagccggccgacattatctgtagactggtcggaaaacatttgttggtccaaccaacggagcatgatacgtgcgagacaaatattttttacccggagcccatacacaac

SEQ ID NO: 409633 - DNA, 335 bp, Homo sapiens
gcggccgcgtggcagagcggacgacggacttgcgtccgagtgacggggcgcgggctgcagactggcttaagccctcggtggcagacgaatgtgcccaggctaagctcaggggacgtgtgtggccccgtgctatgggcccgctgtgagggtgccgccaggccgtcgatcactgcctggacgtgaggagtgtggtggtgaaggacactccctggacagagtcgcttcccatcacggcttccccgccggaccgcacctcccggagccctggcgccagccagcccggtttagcggccggaccgggctcccccgcggtcccaggtctggttggggtgggg

SEQ ID NO: 409634 - DNA, 570 bp, Homo sapiens
gcccctggcagcaaggtctctgccacatccacgtgtcctggggtggtttcagaggggctcatgcttcctagggcagctgaacccatccccaggaagacaggccatgggcagcatgcacaggtagcctggtagcactctcctccttgtccctttttgattgaaacatggctgtagctgggggtaggggcagtgccaggcccatcaataattcagcaagatggggaaaagctgcagctcctccagcaccccctgctgctggggccaggctagtgttcgcaagcatgcctcagtctggcatgtgacttctcgccctgcaggtgccctggcaggagggactggcttacgccaccctgtgcaggatcgtcttctcagcttacagagcctagtgtgattcaacaaccctccatctctgcccccaacatgcccaactgatctggtggagggaactgaagatgaaggcctctcaggcaccatggatgggatgggtgtgtgtgaagggggcagggtccccgaatgtcaaccctcagggttcggttgtctctgttagtgtggaacaatcatccctaagtc

SEQ ID NO: 409635 - DNA, 975 bp, Homo sapiens
gcggccgcgtggcagagcggacgacggacttgcgtccgagtgacggggcgcgggctgcagactggcttaagccctcggtggcagacgaatgtgcccaggctaagctcaggggacgtgtgtggccccgtgctatgggcccgctgtgagggtgccgccaggccgtcgatcactgcctggacgtgaggagtgtggtggtgaaggacactccctggacagagtcgcttcccatcacggcttccccgccggaccgcacctcccggagccctggcgccagccagcccggtttagcggccggaccggggtccccaggagctgccccaggtctggctggacagttgcacgggaagtcctgtttgtgaactcaacgtttccacggcttttccattaaactttaccccaaaaaaaaaaaaaaaataaagaaaacaaagacaaaaaaacaacaaaaaaaacaagacagggggggggcgcgccgcgccacaagaaatactccccagcagagggggcgcccagagtaatccggcgctaacccaccagagttttgtgggacacgaaggggggccccccataatattggaggaacgcaggattctataaaacggacgaaggacaaggggggccgacgagcgaataatacaacacgcctgctggccgcggcggaacaaaccgtggcctgccgcggaggagcacactcttgtgggagagaggagaaccaccacttatacagtcgcagggccgggggggcaccaaattatggtggggcaccagcacatctcctctaacgagaaagatatttaaaacacccccaagagagccaccaatccatatcacactttttcagcctgctacaacagctggcttttaaaaccccagccggccgacattatctgtagactggtcggaaaacatttgttggtccaaccaacggagcatgatacgtgcgagacaaatattttttacccggagcccatacacaac

SEQ ID NO: 409636 - DNA, 489 bp, Homo sapiens
gtatgtacatatgttttcaattttcttggatatatatctaagaattagaattgctggatcatacagtaattctgcttaaccttttgaggagctgccaggctgttttccaaagtggctacaacattttgcatttccaccagcatgtgtttgagggttccattttctcctcattcttgacaacatttattactccctttttaaattttagtcatcatagtgtgggtgaagaagtgtctcactgaggttttgatttgcatttccttaatgactgatgatgtggagcctctttccatgtgtttattgactttttatatattttggagtaatatctgttcatatcctttgtccattttcaatttgtttatgttcatatcctttgtccattttcaatttgtttatctttactgttgagatgtaagagtttttttatatattttctggatactaaaccattatatattgatttgcaagtattttattccattctgt

SEQ ID NO: 409637 - DNA, 380 bp, Homo sapiens
cccagggccacttagggtgcgtccacgctgggtgtgccaggcatgcacgtgggctgcagacgcccaggaggcagagccgagcctgccaaggttatgcgtgcacctctcagctccctgcttaacactgcgttcccgggagagagatttctccctggctgcttcacatccagaggagaacatcagctctcagcagaacataaggccctcttcacctgccagctgggcaacagcagttactctcattggagaccctttcccttcgccacttcccaggctactccagactgaatgcattcagggagtcacctcccaggtcaaaacctgctgtgataccatcaccctgcagcacagaccacagtcccaagcctcccattcttgac

SEQ ID NO: 409638 - DNA, 481 bp, Homo sapiens
aaaaaattccgtggaacacttatagaatatgttagataggtcatttttttagtgcagtttacaatggtttattcaacatagcaaaaactatctgctgagaaaaatttagaacagacatgagttgtgcaaaaagcaaaaagaacttcactcaaaagcattttttgctttaaaatttggtagttaaaaacagggcttcctttcagttgtttcattttgtttggaaatatttactttttagtcttaattatatttgacataacttacttcttaaagaagaagggtaataataccccaattcttataagtttaatttttcttggtgaggacttattcaaaatcaactttaaaaaaaccactcaggccaggtgcggtggctcacacctgtaatcccagcactttgggaggctgaggcaggtggatcacttgaggtcaggagttcaagactagcccggccaacatggtgaaaccccatctctaataa

SEQ ID NO: 409639 - DNA, 348 bp, Homo sapiens
tgggattatagctcacttcgccagttcccactcttagtctgtgtattgcccgcaccacaccctcaacgtgtcatctacgttcccttcatccacctgctcagatccgtgattgtttatagcatcctccagtgccccggccaggattagcaaggatttcgtgacccaatgggcgtggaggaagcgtggctttctttcatttcaccaggaaatgactgacgtcttgtcttggcgtgcatccagatgtgggaagtgcagcgttgcttgataacagaatcttattttgtgcagcttcccaggcactgaagcggggctgctgggagaagggcgtgaagtggtgtgacatcattt

SEQ ID NO: 409640 - DNA, 385 bp, Homo sapiens
taaagtgaaaatttgcatttagcagttatcaaaagatgaatatttgtttgctaaagaagggtcaataggaaaagccttgtcaagttaatatttatttaatatgctgatttttaaaaattcattttctaagagctgataattccctttgagaaacattatagttctgtgggtttattttgttaagtaaatgcattctattcagagcaagagacagttcaaccccatgctattcctagtaagtaaaaatacctagttgcttaaagttggagataaagcatttatcttttttcttatctaagttctagatttgtgcactcactatagttcttttagtgctgttggggttgggtgactggggcctagtagtacagtgacactttctgag

SEQ ID NO: 409641 - DNA, 671 bp, Homo sapiens
cgtctgccgctatctccgccccaatacggaagcggcctagtcctccggctccgacagctgggtgtccaggccatggggcagccctgggcggctgggagcacggacggggcgcccgcgcagctgcctctcgtgctcaccgcgctgtgggccgcggccgtgggcctggagctggcttacgtgctggtgctcggtcccgggccgccgccgctgggacccctggcccgggccttgcagctggcgctggccgccttccagctgctcaacctgctgggcaacgtggggctcttcctgcgctcggatcccagcatccgtggcgtgatgctggccggccgcggtctgggccagggctgggcttactgctaccaatgccaaagccaggtgccgccacgcagcggacactgctctgcctgccgcgtctgcatcctgcgtcgggaccaccactgccgcctgctgggccgctgcgtgggcttcggcaactaccggcccttcctgtgcctgctgcttcatgccgccggcgtcctgctccacgtctctgtgctgctgggccctgcactgtcggccctgctgcgagcccacacgcccctccacatggctgccctcctcctgcttccctggctcatgttgctcacagcaccttccagcctgaggaacagtgatttgcaggcaacgtg

SEQ ID NO: 409642 - DNA, 1775 bp, Homo sapiens
cgtctgccgctatctccgccccaatacggaagcggcctagtcctccggctccgacagctgggtgtccaggccatggggcagccctgggcggctgggagcacggacggggcgcccgcgcagctgcctctcgtgctcaccgcgctgtgggccgcggccgtgggcctggagctggcttacgtgctggtgctcggtcccgggccgccgccgctgggacccctggcccgggccttgcagctggcgctggccgccttccagctgctcaacctgctgggcaacgtggggctcttcctgcgctcggatcccagcatccgtggcgtgatgctggccggccgcggtctgggccagggctgggcttactgctaccaatgccaaagccaggtgccgccacgcagcggacactgctctgcctgccgcgtctgcatcctgcgtcgggaccaccactgccgcctgctgggccgctgcgtgggcttcggcaactaccggcccttcctgtgcctgctgcttcatgccgccggcgtcctgctccacgtctctgtgctgctgggccctgcactgtcggccctgctgcgagcccacacgcccctccacatggctgccctcctcctgcttccctggctcatgttgctcacaggcagagtgtctctggcacagtttgccttggccttcgtgacggacacgtgcgtggcgggtgcgctgctgtgcggggctgggctgctcttccatgggatgctgctgctgcggggccagaccacatgggagtgggctcggggccagcactcctatgacctgggtccctgccacaactgcaggcagccctggggcccgctgggcctcgtctggctctggccttcctggcctccccattgcctggggatgggatcaccttccagaccacagcagatgtgggacacacagcctcctgactccaggaagagccagagctgtgcagggaggaaggggtgagaggggggcccacacctagactcagtaaggaagtcgggttggaccttaacatctgcattggacaactccaccccttccttggccttgcccctgcccgcctacactcctacgtgtccagggcttgggccgtgacttaggcagaggagtgcagaggagggtctggcaggggctgctcaggccgcctagctgcccctttgccaggttaataaagcactgacttgtttctcagcctccctccatctttgcatagtttctggcccctcactttgttgctggggctgtttctgggaccctctgtagggcctggaaactgcaggatgcctgagggtctcaggggctggggctctacctcccctggcctgggtgagttgggggtggggcaccagcacgccaaggcagtgtcctactgatccaggctatgagaatccaaacattctttcccaggtttggcattttatagttagaagcatttctgcaacagcagtttcatggaacctctcttagctaacctggtccatggggcagcagttacgctctaagaatccatgtggtaagatcatggtgcggcaaatggaggcagggtccaacccaggtctttgtgcttttgcctttacccttgcacagctggaggaaatgagtaggaaagaaatcaaggtaaagaaatgcgctggggctgtttgggcatctgtggagggtggtgctgacagggctaggcctgcacctctctggcctcctcaagagctgcttgttaaatgtttccgtgtaaatagaatgaatagagaccgccatttccacatggcaggcctaaacac

SEQ ID NO: 409643 - DNA, 331 bp, Homo sapiens
tttaaacattatgccccgttgtattttccaatatttcttatccttctcagaaacgttatattgcgattcattcatagagcaaatacagttgccccttgaacaacatgggggttggggtgctgacccctcatgcagtaagaaatccataacttttggctcccccaaacttaactactaatagcctactgttgagtggaagccttaccaataatataaacagttgattaacacatattttgtatgttgtacatattatatactatatttgtttttttcacatgcctgctgtgtcaaatatatactgtattctgacaataaagtaagttgaaga

SEQ ID NO: 409644 - DNA, 321 bp, Homo sapiens
aataaaaataaaaaaaattatgtcttctgaggaaattactaaagttcagacactgataaatggataattaaaatgtagtgtgtccttacaatggtatattacttggtgataaaaataaatgaattacttatatatgctacaacgtggttgaacttgaaaacattatgttaaagaaaagcagccagtcacaaaggaccatgtatgtattgtgtgatcctatttgtatgaaatatacaataggcaaaacaggcaaatctgtaaagaaagtagagtcatgattttctagaatcggtggagtttggggaaatgggcggtgactgc

SEQ ID NO: 409645 - DNA, 494 bp, Homo sapiens
aatagaaccaggaaaaaaaatgggctatacctattctggcccacttaggtcaccatcgtctccttgcttctacttcaaagccccgtggctgcctcccacccagtggcggggcatcatttaaaagggaccatttttctactgaagcccctccatgcacttagtatgaaatccaaatcctctggcctggtggacgtgccctccttcttttgaatgttgttctcactgtcctttacctctgtgcccctcattgtctgtgccgtccccatgtgggagacatcccgtcccctcaatcgttagagctgtggagagctggccccgtaccctccacccctttctctacgttacacctgctttactctcagaacagtcttaccaccatctgcagttatcgtttttagttacttgttcactgccctttcccactgagagggtcagcgtcatgagatcagaacttgtcaagtcggtgcttcgtcggcgaggtgaggagtgagctc

SEQ ID NO: 409646 - DNA, 476 bp, Homo sapiens
gcaaccccagagagatcctgccctccagcatgcagcagactgctggcccagtcctggctccattgggtgctgtgtgggcccaagcaagttgaccaacctccctgaaccttaatttaatcctaggtagcccaattccagtagccattataggactgcctgcagggacagttacttaactcaggaaaagcaacctagctccaagtttagcaaccgggagctccagttgattccattagcgcaccccctgaggcattcccaagctggagtctggtggaagatgaggctcagggtgattggactgaagcaccaacctatcaaggagaagtcccacccagtctgccctgtgcgtatataaaggcgacgcgtggcggccgcagcactcattgaagccgccagttgggagaggagcagagccaggccggtgctcccgaaggcagcaagatgttgcgagccacagctccctgctggttcccacc

SEQ ID NO: 409647 - DNA, 530 bp, Homo sapiens
gcgggcacagtggctcacacctgtaatcccagcactttgagaggccgaggtgggcagatcaggaggtcagcagaccaagaccatcctggccaacatggtgaaatcccatctctattaaaaatacaaaatttagctgggtagggtggcacgtgcctgtaatcccagctactcgggaggtgccactgcactccagcctgggcaacagagcgagagtccttctcaaaataaaaaaaagaactgaagttgaatttcttatatgtgacttcaaagtccacagtctttccagctggtgaatgtgtcagtaatttaggcttctgggtttgtttagagtggctaattttgaaatgctttagtaactgttttacatagttgctttgttcatttattgattacataagtactcaagagatatggccgggtgcggtggctcatgcctataatcccagcactttgggaggccaaggcaggctgattatgaggtcaggagattgagaccatcctggctaacatggtgaaaccccgtcgctact

SEQ ID NO: 409648 - DNA, 490 bp, Homo sapiens
agcaaagtaaagaaacagtttggttgctaattgagactttaagtacttttcctgcactggaacatcaagtagagaggtggggaatgatggagtattaagagaataagactagctaagtgagatcagatctcattggcctgtccagctctgttaagaaacttaggtctaatccctgaaggcaatgggaaagcaaggaagagttttaaacacccacaagtgaaatgatcagatttgtgcttttgaaatctccttctgctgaactgtggaggaaaagcggaagagtggtactaatggaaataggacagccagataggaaactgaagctgtagttcaggaaagagacaaggatggcctgacctagtggaacagagagaaggatgttgagaaatgttttaggtttaaatggcagccctcatcccagcctaagcctctggaaaaataaagcaataaaacaaatgattggaagacaggctctaaaacatttattgct

SEQ ID NO: 409649 - DNA, 541 bp, Homo sapiens
gagctgcatgtccacaggcccctctggctgctgcttctctcctttcctggacgaaggcagccagggtggcccgcccagagttccccctgatgcacaaataaacagaggcgggctctgctggaggagtctttctctgccgggggccaggcagggcggcaggcagaggggtcgccagcagctcagaaacacaggctctttcttcctccctccaggcctgaagtggcttgttgtgtgggactgaattcagtgcaggcaggatggtcacctttgtggggcctcggggagtcacggcgcagcaccccactccccaggtcccactcgctgcctcagcagggctctccaaaggggtctgtgtgtggtgggggcagggacctgccatgggcatcccatgggcatgggcaaccccaggggagaaggaatctggaagagagacccctacctgcaggccacacccggagaaggtgccagctcgcataggacaggtccccctgtgttggtgggacccccacattgggctacaaaagcatttccgggaggaaca

SEQ ID NO: 409650 - DNA, 438 bp, Homo sapiens
ttgaactcctgacctcaagtgatctgcccgctttggcctcccaaagtgctgggattacaggtgtgagccactgcacccagcctctagaggcgatttctagagactctggcgtgggaggctttgtcttctgggccattgtcttccatcttcctcctcagccaggctagtagatttgggccaaccagacagagtaggaggtaaaagcagagagaacagaaggattcaggaaggaactcgatgcccaactccaccacgggctgtggcctgggcaagaggctcctcctaggcctcgcaggcctgaagccatttcctggctgtctccatgtttgcacaggggacggtgcagagctgaggaaagttaaatatagtctagcgtccccgctgaacggctccctgcatcggtgcccgagagtgccaccttgtggtccactcctggct

SEQ ID NO: 409651 - DNA, 355 bp, Homo sapiens
tattaacagtttggggtcatagctgaaaaactttattaagtcacagataaaatgggaaaatcaggaaattgtatgaaatatacaataacactatgtgtgatggctcaggtctgtaatcctgtgatagttaatacagattgtcaacttgattacattgaaggatgtaagcattgctcctgggtgagtctgtgagggtgttgccaaaggagattaatatttgagtcagtagtctggggaaggcagaccccctgcttaatctatgggcaccatttcatcagctgccagtgaatataaagcaggcagaaaaaaagtgaaaaagtgagtctggcccagcctcccagcctacatctctctc

SEQ ID NO: 409652 - DNA, 461 bp, Homo sapiens
ataatatatactgaccaagaaaatgtcaacatgaagtcttaaagtccttggtttcagcaggggtcgtttactgaagcctcagcaattaaatacatttatatgaagataggcattatttgatttagccctcataattcccttttgaatcttgctctatgtaacctatattcttacttggaaagacattgtggtgaggaaattgagccaggaaggaattaagtagactcaaccagtgagaggaagagctgaggtttgaagtgacgatgtttgactccagcatcttcagtcacaagcactacactacactgagtatgggttgtagacctaatcaccaatctttagcttgatgagttgaaaacttgtgaaccaatttttgcatggtgaatgtttctgtgaacagacatacagtttcaggaaggcattttagcaggcagcatgaaggaagtatttgacaccaaaat

SEQ ID NO: 409653 - DNA, 388 bp, Homo sapiens
aaatgtggacctgcccaagacacttcaccccctgcaggtggggagagtgtggcgtcctcctgagatcttttcaggttgcagaactgagtcattgctctgagacccgttccccaggacaactctctctgtgtcacccatggcatcacaggcaccctgggccatgggccctcccgagctgtgcaggttagcttgtgtgccagaaggacctgaggaccagaaaagctgaaagccagcaccacgctgagatcgtggcacacctgaggagggcagaaaggtggccccacaagcttcccaagatgaaactaaactgtatatggattgagtgggagcttttatcgttggttggttggttggttggttggttggttggttggtcgatcgacagaga

SEQ ID NO: 409654 - DNA, 394 bp, Homo sapiens
cagaagaaagtcatattcattctctaaaggagaaagaatgtttcttcttccacaactgtggtgctatggatggtttagagcaggggttttcaaaccccaggccacagaccggtaccggttcgtgacctgttaggaaccgggccacacaggaagaggtgagtggccagtgagcaagcactactgcctgagccctgcctcctgtcagatcacaggtggcattagattctcatagagcgcaaagctgcacatgcgagggatctaggttgtgctttcctcatgagaatctaaggcctgctgatctgtcattgtctcccattacccctagacaggaccatctagttgcaggaaaacaagcttagggctcccactgattctacctgatggtgagttgtat

SEQ ID NO: 409655 - DNA, 380 bp, Homo sapiens
atttggtaccgctcccacgaaagataaatttgcagaatgtactcaaattggaaacattaaataaattctataatgtaaaattagcacatcctgttgtccacactatagaaatatctgcacaagtgaccgaagatatgtgtacaagaatgatggtgattgcagcatcatttgtaatcctaaaactatgaaacgcacctcacttcaaaaacattttgaaaagggttaaataaatcatgcacaaactcaagaagaaatgctgttctcacaaacactggcgatgatcaccatgaggatgactgattccactggtcacattattgatagagcaatcagtaaacccaggcacatcctggggataggatactactgtaataggcctc

SEQ ID NO: 409656 - DNA, 278 bp, Homo sapiens
gaagaggcagtatcttgtgatgaagagagtggggtctgaaatacagagcctgggttagagccccatgttggccactttctgtgtgatcctgagaaatggatgtaacttctgtgggctttgttgtctttgtctctaagatgaggaagatgataagaatgccatcacaggattattctcagggtgaaatgcattagtacaaataaagggctttgaatacttcgagggagaaggctctgattctttcaatggacccacgcagctgctccatgggtccgtgg

SEQ ID NO: 409657 - DNA, 263 bp, Homo sapiens
ccagggcacctgacacaggttaagtagccagcccaggacggtgctagtctgcttgggaagtgcggcaaggcaggtggaccaagggggaggaaggaccacgaccgggtgaaggggcctccagttgggtagagggctcccctgggtctcttgtgcccttgggaggagggtgatataggacctgacccctagaagggcaaataggttgggtgaggttggtttaggagtcacccaggaggggcaggcctggagtgctggggcaaggt

SEQ ID NO: 409658 - DNA, 394 bp, Homo sapiens
gtggctgtacactgaggagcaggcacaacgccttccggaaggacctgcctgcggacagggagatgcagacattcacctgtgggaccctccaggagccatccaactgcagtgtgcttccgcagagcctgatcttgagccaaacaggcaacatggcttagaggaagccctggagggaaaatcagagaggcgcgggtttcccccttgagtatctctttctcctgtacaggagcctgggtcaatcctagaagcttccaccccagcaggggttgaagtcggggagggctgcgggaatgtcatgcatggtgcaaaaagattctgctatagtcaggatacagctaaagttcacatctctagccctgaaagcctgagtaagccaggttgtgggaagatagta

SEQ ID NO: 409659 - DNA, 388 bp, Homo sapiens
tcttctctttactggaatggtatccctattgctgtttccagaatttgcatgttatttatgcctcgccataaaggaggacaagtctcaggcattgggctgcctccattcatttagcccattcgtgggtaaacattcattaagtatctcctgtgctcagaccagtgttacagttatgaagggggatatagctactacagaaagagagtgcacccttgtcctctactggtggtcagtttcaccaggaagatgacataaaaggggagaaaaagaggaccgttaccagaagtcaacgaagcacagattaacaccagcttatgtattagctgtcttcatgaaaactgcatccaaagatcattttggtacacaaaaattgtattagaagtatact

SEQ ID NO: 409660 - DNA, 322 bp, Homo sapiens
acgtcatctactgttgcaaatgttaacagcatagataagtacaaatgtaacaccctttccacatgacattggaggtagttttaggtttggattggcatactcattcatacagctcatgggccataatctggcactatgttcactttagttttctgcaaaaatatagatcagggatttcaatatatctgacagcttcaggagaattgtcttcacggggaatgcatagagtacataagaaaattattcaggctacctaagtatcttcccatttataagggataaagccacgtgtgttgatgcagagaccatcctggattcgaat

SEQ ID NO: 409661 - DNA, 441 bp, Homo sapiens
aaggtggtggagagggcagttaatcccaggaagagtcaggggttagagagtaaactaagactagatccattccttggagccagcctactgcccctcccccacctccctgcccaaacccctctggagttccccattgttcccagagacaatagctagtttcctttacctgcctcatcatcccaggcccaggaatctctcactctgtttacaagaggcagcggtggggtaggagtatctgggccttaccccagggtccaaggatctcaccgctggaagatcccacagctatggaaactgaggctgggaggagtgggatgtgacttagccaaggtcacagcaaccacagatgtgggccagtgcttggtggggcctccacggttccccgtggagtacgcactttggtggttctcagagggagccatcagggcctgccgttcctcc

SEQ ID NO: 409662 - DNA, 609 bp, Homo sapiens
gcatggacccaaacgccagcatagcaccacacccccaaatgaggggggaacaggctcagcaccccaagacatccaagcaccatggcttttacagctagatgcactctccacaagccaacaggagtcgcgagtgagagccttcgaacacatccagtgtgaacatgcattcagcaaacatttcctgagccctgctttgtgccaggctgttctcagtgctcaggatacacaaggaagaaataaataaaagataaggtttctgtccttgtaaagcttatattcgtgtccgtgtgtgcatgcctgtgtgtatgtataagaatacattcaatagacacaattattaagtaaattaagtcatatgttagaaaataagtgctgtggcaaaatccagattaaaatcaccaatcactagtcaggagaccccatcagctacgcaaagaccatacaggtagtgtgcagagacaccagagaggtcaccctgtttgatcgacaaaagtatgctcattagaaggtaaaccacaggactatggggtctttatctcttttctccctgcaggattctcagctcaagaagagcacctggcacaggtcagggactcagaagcatttgtt

SEQ ID NO: 409663 - DNA, 413 bp, Homo sapiens
gcatggactcgtgtgcttcagctcctgtatattgttaggaatttacaatttagaagccagcatctggcacagtcggcaaagtattctaatttcccagctcccccttgctgcaacctggtcctcccgagtccttctgcagtgatctgtgaagcccaggatgggcttcccatgttcaggtttactataaactggcaaagaattaagtcaagaagactcaggcaatgaagagatgcacgggaatgctgaggcctgaccacaattgaaactgtctgagtcaaaagtcaagaagtcattcacatgccaagggccatttcctccacctcgcccccaccccgctatgctggaagtcaattctccacagtgcgtggtgagtcaggcatgagcactttgattacggctcagctgatgtcatt

SEQ ID NO: 409664 - DNA, 446 bp, Homo sapiens
cttcctgcctttcttattacccacatctcagccctcattcaagacctaactcccctgaagcagatcgtcgtgaccctcttgtgagaggtgccccccacaccagggaaagggtgcatccttagctccaaagatggagggaggccaagagggacctgaatggacaggcctcgccagggcccctcccggcccgtttcctgcgcttgctcatgtgctctcgtcctatcacacctttcaggaccccactcttcatcaaacctagcatcaaaacaccaagctcagctgtttcttgtcaagcaacgcttatatgaaatacatgagtatgcctttttcttgttaacctgtccttcgtgtctaatctgcagggccctggttggagaagctaggagggtggggaaacagtgttttctcctcccctctgaatctcacagtctcctccatgtcctctg

SEQ ID NO: 409665 - DNA, 337 bp, Homo sapiens
ccacccaggcccttgaccagctggccaaaccatttgttccatatatatcctaaccttgggttgcaccactcctgttttccacataatgtggataatcagtgtgctccccaaagccctgcctattgggaaaatttccccttgccacctctaagagggtctatactgccaacactgcatatctggattgtacccaagtatggagccaaccctcttgtgaacccagctctgtctttttccttctgcatcagcttaaggacccctccactctgcctagcagctctaggtgtgagttgagggagagacgctgaagcaccggcgtgggccactgtgtctgggg

SEQ ID NO: 409666 - DNA, 378 bp, Homo sapiens
tcattcatgcattcatgcattgctacttattcactaatcatttatgacacagctaaaatattcttgggatacaaagatgaataggatacaccatctgccctggataatatttacttctaattcgtagtctagtgaagaagaaatctaaatggtaagactatgtaaatctctaacagaaaccacaaagagctataatttgtttttgtaaaatcctgctgggttgaatactatctcttttgtattaaaatatattgttaatcctcaagaagttttcaaagataagagattgaacaatattttgggttaggtccatgatgtactgttattaaagtttctatggattcagattgccttggatgcctaggctggagtctaagg

SEQ ID NO: 409667 - DNA, 359 bp, Homo sapiens
atttcctcagatctaaaaggatcaggaggagaggcaaacacaccagagaggcctgccccggaagaattagaggaaatagaagtcaggagcaagacaatgggtgaggaggggccaacgtggccactgactcccaatctggaagtactttcagaaatggcatttcctattatctgaccacaattcctcctctttggaagagagcccccaccagcataatatatcatgcatgtgatcagcgtatacagagcaaacaagggaccccagagggccagggcacaccatcttagatgcaagtgccttactagccctgggagccctaactatcagacaggtgttgggtttgggggaatgatccatta

SEQ ID NO: 409668 - DNA, 874 bp, Homo sapiens
cgattatttgaagacgctcacggagcggctggctaggctgaggagagctcgccgggctctgaggcgcaggaattcaataaagaaaatggcagctcttactccaaggaagaggaagcaggattctttgaagtgtgacagccttttacacttcactgaaaatctgtttccatcacctaataaaaagcactgtttttatcaaaacagtgataaaaatgaagaaaacctgcattgctctcaacaagagcattttgttttaagtgcgctcaaaacaactgaaataaatagactgccatcagcaaatcaaggctcaccatttaaatctgcgctctccactgtatctttttacaaccaaaataagtggtacctcaatccactggagagaaagctgataaaagagagtagatctacttgtctaaaaactaatgatgaagataaatcttttcccattgtgacagaaaaaatgcaaggaaaaccagtctgctccaagaagaacaacaaaaaaccacagaagagtttaactgctaagtatcaaccaaagtatagacacatcaagcctgtatcaaggaattctagaaattccaagcaaaatcgagtgatctataagccaattgtggagaaggaaaataattgtcattcagctgaaaataattccaatgctcctcgggttctgagccaaaaaataaaaccacaagttacactccagggtggagcagcattttttgttagaaaaaaatcttctcttagaaaatcgtccctggaaaatgagccgtcactgggacgcacccaaaagagtaaatcagaagtcattgaagattctgatgtagagactgtcagtgaaaaaaaaacttttgcgacaaggcaagtgccaaagtgc

SEQ ID NO: 409669 - DNA, 446 bp, Homo sapiens
tccatatttttaggatgacattcaaggctcactccagtccacgtttctagcttccgtcttccctcccctgcacatactactgcatgtacctccacagtcttcccttttgctttgctggcatctcatgtctttgttgcctatccaagctccctgttgaaattctatccatacttataattaacatgtcccttgattcatacagactttatcagcctgcccttagtttctgtcagacagaattaagtcctctgttcccatataaagcagatctttatagctgttttagtagatattgtttatatatctctctctttcacagccccttgtaacccatctcattcccatattctctttcaacccccatctctgattacagatagaaagggtgataagtttgtgggctgtgtctctttaatcttgtacctccacagcatctaggacagtgt

SEQ ID NO: 409670 - DNA, 315 bp, Homo sapiens
agaccaggaaattccctttccatattgctgtgatgacacataaatacttccccttttccaacttgaggaaagcaaggagttcagaagatacatgtaaaagatgaaataattatttcaaacaaatctagagacgatttaaacccttggattgaattaagttttaaagtgaaatatactacatagaatttctttttcacttttccttgctactagctggtgtggttggggacaggctcatgagtaagaccacgttagttaatagactaagaaaaaaatacttcattttctttgcctttaataaattgtagtatagat

SEQ ID NO: 409671 - DNA, 282 bp, Homo sapiens
aaaaaatgtaataccattgtagaaattaccctatgtactgatatatttactacctcttctctagagaagacaatctgtctttaaagggaaaaacactggtcaataagtagtgatcaaaattatcactattctggctaaccttgctgcaaagctaaatacatagattattaaaatatgccttccctttagattttaaactgtttccaaaatgctgtttggcaccctttcatttcttccacgttagtgaagttttctttgaattggttcacagtttatcatgag

SEQ ID NO: 409672 - DNA, 536 bp, Homo sapiens
acacaacacaacacaaaaatttgggagagacacagctccaggaaagatctttacaaatcaggacatcctggtaagactccaggagtgctgacctcacagcctttaaggtccaaagccttcaccaaggcatctgcctgcaggcagtgcccagcccaggggaaggtgacagaccagatctcaggtgaaaaaaccctgacccggggaactgtgcttgctagtcagcctctgtgactaatgtactgtaccatgctgggtaagcctttagagcttcatttcctctgtctgcaaacagaaacagtaagatctgttattgtggctgtcaaataagatattaatggaaaatggttaatgtatcaaccatttattgggtacctattgtgtgcaggcgctgttctaagtactttcaggcatttttcctatctgcttctcatagtaacccgggaaggcattcctgtctccattttaccatgaggaaatggaagctcagagaggatcagagatttgtccaagcccacacagctagcaagtggtagagc

SEQ ID NO: 409673 - DNA, 610 bp, Homo sapiens
ggatgaagggtttcatgatagtaatcttggaaaaattcaaaagttagtagacaccagaaaaattaacagaagacgatttgatggagatgaatacttctaaaccagtaccaggtgatgaggaagaagacacagaagaagcaatgccagaaaacaagatgatattagacaatctggcagaagggtttccattattcaagactgcttttgacttcttttacaacacggtcctttctatgatataggcactaaaactaaagcaaatgatggaagaagaactggtagtgtataaaaatatttttagagaaaagaaaaagcaaaaaacatacatgatgtctaagaattaaatggaatgtgactgcctttcctgactcccttctctaccttctctgcctctgccatccttgagacagcaagaccaacccctcctcttcctcctcctcctcagcctactcaatgtgaagactggatgaagaccttcatgaaaatctacactcacttaatgaatagtaaatgctttttctctttcttatgattttcttaaaatcattttcttttctctagcttactttattgtaagaatacagcatataatacatatacaaaatacata

SEQ ID NO: 409674 - DNA, 417 bp, Homo sapiens
cacttatttcctctatttctatttttgcaagaaacatcattggagttacagggtttgcattgactctaggttgttttgggtaatggtcattttaacaatactaagtcttccagtctaataacaagggactgggttccatttacttatgtcttctttaattccttttagcagtgttttgtagtttttattagatgtctctttcaattaagttaattcctaaatgttctttttgatgttattgtaaatggaattgtttttgtaattttcattttagattgtttatttttagtgtatagaaatataattgacttttgagtgttgactttgtatgccgcaattttgcctaacttattctaatacattttttgggaggtgggatctttaggattgtctacataaaagatcataaatcactta

SEQ ID NO: 409675 - DNA, 426 bp, Homo sapiens
ctcctcacagctcactgtgaaccaaggggaatttcgcaggtatccatttccctatatgtccctacaaacaccttctattcaatgcagagtaggtattggccccatttcacagaacaggaaaccaaagggctttacgggctggttcattgagtctggcagtgagggcctctgcttcctcttcctggttaggccactgcactcttctttcaccaggaaccaggcagtcttctgggattttggttccccccccttacctgcactgtggaggggttggactggatattttatattttttccaagattttaaaggcatgaactttgttttctaaccctgaggagaactttttaagggtagtagggttgctgtattatttatcgcagcacctagaatatactgaagaataaatgaaaatctgactaacatca

SEQ ID NO: 409676 - DNA, 376 bp, Homo sapiens
ttttttttggttctttatagtaagtcttgctactgttcattgtttgggtcagccttgtgtgtatgggttgtaatactcgccgtgaaggtctgcattttcactcctgagctggtgaaactgggaacccactaatagaaaacaattctgaacacgtgatgaacatcagaaaaaaataaaggaacgcccagacatactgcttttagtgaaccgtaacactcactgtgagggtctgtggcttcattctttaagtcagaccaagaacccaccaattctggatgtagaaggatctactggattccaggagtgcaaatctagtttgagcaatacagcaaggttgtgtgtctgaaataaacgaataaataaatgggtgtttaaa

SEQ ID NO: 409677 - DNA, 482 bp, Homo sapiens
gccactgcactccagcctaggggacaagagcaagactccatctcaagtaaataaataaataaataaatctccaatcaatcaatcaatctaatgattagtattataattcaggtatgctctagatctccaagaatttagaaaatacaaggcagatgtcaactgtgtgcctatatatttagatatcacttttaataatagaaatgtggcacacgtaaaacattattttatatgggaagctaaaagactattaaatatacagatttatagatattgttagggcatatgtaaccactaataaggttttttaaatgtaatcttcagtgcagaacaccttacaaaaaaagcacttgaagttttgttgttgttgtttttttttcctgagccagagtcttgctttgtcacccaggaggcagagattgcagtgagccaagattcaccagtgcactccagctgggcgacagagcgagactccatctcggaaa

SEQ ID NO: 409678 - DNA, 513 bp, Homo sapiens
atagatccatgaaacagaatagagagcccagaaatagattcatacaaataaagccaactaatctttggcaaaggaacaaaggcaatccagtggagcaaagacagcttgttcaacaaatgacactaaaacaatcgtacatccacatgcgaaaaaattaacctggacacagaccttacattgttcacaaaaattaactcaaaatggtcacagacctaaatataaaatgctataaaactcctagaagataacaaaagagaaaatctagatgaccttggggatagaaatgactatttagttataacaacaaaggcactatccagcttaactggtaagctggacttcagtaaaactgaaaaattctgtccccactccaaactgccttttaattctgaatcttaagttttcattaactgagagaatactttgagctaacacaatgctaatctgctagacaggagtacaatttagtaaatgaaattagtgaatattttattgaattttgtctttatttta

SEQ ID NO: 409679 - DNA, 357 bp, Homo sapiens
tgacacatatattcacagtggaagacagatactcatttaaaacacatgactctcctaaaagcagaagtggaaagctcaagtgaatcattcattatactctctgtcacagcaatggggtagatttctttccagaggtatatctttgaatactttgtccactcttgtgtgaaataacttacaggatggcttttccactgcttccattgtgaggccattctacaatttaatagatattactattgggaaaactttgtagatacagagcctacatattctcttctcttattcaatttcatgccctgacttctagttatgcccccagggagcatcataaacaattctttcccttcatggcga

SEQ ID NO: 409680 - DNA, 687 bp, Homo sapiens
ccaagaaaacttgctgtttcgtaactgtcaatggagaaagattcttcgccaagcgcagtggcacatgcctaaaatcccagcactttgggaggctgaggcaggtggaccacctgaggtcaggagttcgaaatcagcctgggcaacatggcaaaacactgtctctattaaaaatacacacatacaaaaaaattagctggacgtggtggtgcacatctgtaatcccagctactcaggaagccaaggcaggagaatctcttgaacctgggaggtggaggttgcaatgggctgacattgcaccactgcactccagcctggatgacagagcaagactgtctcaaagaaaaaaaaaaaaagattcttaaaaaccatctttctattgaaatttaatattcatggaaacttgaaaaaattacagcatgcatgcgactgtaaaacatgataggggccttcagggtataataagctattgtagcataatatgccatttctattattccaggaagcctggtttactttaattcatacatcttgcttcattctacattttgaggtagtgaaacctttttttaaaaaaccttagaatctaatttacatcaaaatttggagctcaccagtcattgctatataaggacagatttttctgcttcaccagtaacttttctctaagaacagctacattgtttttgg

SEQ ID NO: 409681 - DNA, 475 bp, Homo sapiens
  misc_feature (42)..(42): n is a, c, g, or t
tcactcctctccactctatagcatcttcatgactacaggccntgctgaccaacagcagccctaggccgaccacaaggcactgggctgcagacctgaagacagtagcttcagaaaagcagagtcgttccacattcggcagtttccatagatttccccagcaagctcccccttcatagttccacttcagcagcttgggcatgcttggattatcagatttccctgcaagcttcaatttgtttacccacaccagtgcttcaaacagcctgctcagtcatcctttctctgatcctgactggcacgccacagtagagcaggctacatttttatcccttgccccatatactctgatccttcaattttccttttccagaccctcattttcccagctcctatatttggtaaaatgtaattcctgtgataagtaccttagtcccataattcttataatggctttgttttcctgatggatacggtc

SEQ ID NO: 409682 - DNA, 471 bp, Homo sapiens
ggtctggccatgtgggatgtctgttcctcgcttccctcctgccatggctgttaagtttcctgaggcttcaccagaaaccaagaggattccagcaccatgcttcctgtatagcctggagaactccaagaaggatcgtgtcagtcctgcaacttgtcagtggaattaaatttcaggcgttttaaagataaatggtaaaactgaactggaaatccatctggccggctgcctgctctaatgaataaccccactttggctcgtgcaatgacttcttccctttggaatgcaagtgcggtggcagtgtcaaggatgcctgtgtgtttgcagcaggttccttccagaagcagctgcaagtgccacctccaggccatctggccaatgtgaggaaaggaggctgcaagggcttggcaaaaacaactttctgttcctctggtatcccctgataactgatttcaagttatggccaaggactgc

SEQ ID NO: 409683 - DNA, 447 bp, Homo sapiens
actgtgaggaatgaatgtgtgttctctaaactaatctatgatatttttgttatagcagcctgaactaaggctcacatactcacaagaaagaagaaaaatggtagtgttgaaggaagccaactgatgagaaagacagggtctcactatgtggccccaggctggtctcagactcctgacctcaagcaaccctcctgcctcggcctcccaaagggctgagatgacaagcatgaaccacggtgcctggccagtcatttttattataataattataatatattataaattattatatagtacatatcatacattacatcatacatcactacatgctatataatgtataatatatacgttgtataaatgtatattaacataagttttattttgtaatttagaataacatgatctgtaacagtatataataaaacaatcagcggattcggaaac

SEQ ID NO: 409684 - DNA, 412 bp, Homo sapiens
ccgcgcttgccctggaagtatgtaaatcttaaagaacctgaaaatattaaggtgtgaaataaagttatatgagaaaaatagtcagaaagttctgtgtagagatattctaaaaaaaacctgatctttccttgctaagtaaaaatgagaaatttaaattggaaataaacttttttgtccacaaagattatgcttattatgatgaaataattcttaagaatttctagatgttatatcttgaagtattattattttttattttttttttgttttttagagacagggtctccctctgttgctcaggctagagtgcagtggcacagtcatagttcactgtaacctcaaatccctgggctccagcgatcttcctgcttccacctcctaagtagctagaactataagcacacaccaccac

SEQ ID NO: 409685 - DNA, 442 bp, Homo sapiens
atgcgagacactttcacagtaatatcctgtttctcagaacaaccctgtgaaaatgggtcattatccagttttctcaatgaagaaataggctcagcaaggtcctcagacttacgtaagtcagctgagctacactgactacactcagaccttcccactctcaagcctctttttttgtttttgagacagtgtctcactctgttgcccaagctgtagtacagtggtgcagtctcggttcactgcaacctccgcctcccaggttcaagcaattcttctgcctcagcctcctgagtagctgggaatacaggcacctgtcaccacgtccagctaatttttagtagagaaggggtttcaccatattggccaagccagtcttgaactcctgacctcagatgatctgcctcccttggcctcccaaagtgctgggattataggcacgagccac

SEQ ID NO: 409686 - DNA, 3160 bp, Homo sapiens
acagtttcacccagcaagcgtgagaacaggtactgcttcctgagcaccgccagccaccggcaccaagaccggccacatcccagcactgcccacctctgctcccagccgccagatgacggaggctctcgccagaccctcagcacgcagagctggcttctgatagaagtgctcgggaaagaaagcaaagcgggaggtgcctctttagaaaccacgaagtgcacgcggcgtcgacagtgatcacgccacctggacagccagagtccaaggcataaggaggaaaatgagtctcctcaaagagcggaagccaaaaaagccacattacatccccaggcctccaggaaagcccttcaagtataaatgtttccaatgtccctttacttgcaatgagaagtcacatctttttaatcacatgaagtatggtctttgtaaaaactcgattactttagtatcagagcaggatcgagttcccaagtgccctaaatctaactcactagaccccaagcaaaccaaccagcccgatgccacggcgaagccagcctcttccaagtctgtcgcaaatggactctctgccttcgactcgaagcttcagcacagctctgccagggaagacatcaaggaaaacctggagctgcaagcccggggaacccacaggtgcctgggacagaagccagccctccacagggcatcaccctgcaagagcccagctccggaagccgccctcggtgcccagcctgctctggaaggcgcagctcggccttctgcatttgttccagtcggcgagcacagactcaaggggccagacaacgccgagccgcccgagacactggctttacacaaccccactgccaaggccgtgtctttccacaccaagtcggccttccacactcctggctacccctggaaagccggctcacctttccttccaccagagtttccacataaaatctcatctacaaaggggcttggggccatttccccttacatgcaccccacaatcccagagtacccgcctcacttttacacagagcacgggctggccaccatctactcgccttacctgctggctgggagctcgcctgagtgtgacgcacccctgctgtcagtctacggaacccaagacccgagacacttcctgcctcacccggggccgatccctaagcacctggctccatctccagccacatacgatcactacaggtttttccagcaatatccctctaacctgccgattccttacggattttacaggccagagtctgcattttcctcctatggtctcagactcccacctgtcactggcctcacccgagatcagagctctcacctgcttgaagaagccaccctggtctatccagcctcgagtccttccaggttaaacccttcggaccccaacagaaaacacgtcgagttcgaaagtccaattcctgaggctaaagactcctccaaggctgggcagagagacacggaagggtccaaaatgagcccccgcgcagggagtgcagccacgggctccccagggaggccgagccccaccgacttcatgcagacgagccagacctgcgaaggcctgtacgacctctccaacaaggcagcctccagcgcactgggaagactctacccgccagagcaaagcctcacagccttcaggcctgttaagaaaagcacagaatgcctacctgcccaggctgctgagaccacagcagagtctccagtaagcctcaatgttgtgaacggagaccctcctgctccgaccggaagcgcctctctcgtctcggaggccgcgccttccagtccggacgacagctccgggatgggccccctcaacctctccaagaaatcagagataaacctggcagccacccacgaacccacgtaccaaggcagcccccaggcggaaaccgccagcttctcagagctgcaggaccttccactcaatctctcggtgaaggacccctgtaacacccaggctccgaggcccgccttccccggtcgaccacgagctgcggaacctgctgctgctgttccacagaagactgggacagaaggttctgaggatgggcccagccaccctgagaccaagccaggcagcctcgacggtgacggggccccacccacaggccccggcgaggaggctccagacgcatgcgcggtggacagcagcgaggagcagaagcagacggcagccgtggccctgtgccagctggcggcctacagccccaggaacatccgggtgggcgatggggatgctgcggccccggaacctgcctgccggcaagacacacccacactgagctccatggagagccaagaggcccagtgtgacctcagacccaaaggacaaaagaggacaagtctaagggatgctggaaaatcccagcaaggagctaagaaggcgaagctgcaggacacggccagagtgttcacactacgaaggagggcccgggtgtcctaacgccgggttcacacgtgtgttcacagagctacggccacacacacgccttccaaggtggcaagctacaacacctctgaactggcactttcacatttttacaaatgcagctgctgcttctcaaaaaaacaaacaaacaaacaaacaaaaaaccctccaattcagtttttataaatattaagcatgaatattaaaaggtgcttctacttttggttgtaaaaacacctgaatgactctaagactgatatgtattttcaagtctaagctgtcttacagaagatcttttataaatgtttccttataaatatctcaccattacaacaaattgttttaactgtttttctattagctctagctgcatatttgatgtaaatgacaattactgaaaaaatgtcagaaaaaacattttcagtactaacattaaagtgccatatgtaaaaaagaaaaatgtgatttgtataactaaataacacacaaacatcaagaggctatttatacaaataatttatttccactagggaaagtgcattactggtgaaggtattatcaatttattctacttgcttataatgttacagtgaatgttctggcttactctgcctcactttccattccccaaaatgatgtgtatgttgctaattttccaataaactcatatgaaccataaggaaacataaaatgcaaataaacataaatctatgttatccttta

SEQ ID NO: 409687 - DNA, 334 bp, Homo sapiens
ctgggtggcggacgtcagttggcggcacgggagtgggtgcggcggacggcggcggctccgcgagatgagtatagagatggcggatttcgaagagttgaggagtggctgtaccattttacatccctaccagcaatgtatggagtgatccagtttctcagcatcctcgccagcatttggtgttatcagtgtttttcattttagccattctgcccatagagccagttgcattaacatcctttgccaaataatgttatcactggaaatatgagatatgagacctcctagaaattcctctgagagtcaagcttaggtaggatgactttgtgctttgttt

SEQ ID NO: 409688 - DNA, 387 bp, Homo sapiens
ggcttaaagtaatgtgtcatccagagtttgttcgcctgttggatgattcattcattgatcttccaaacaaacagatggtgggtaggggagaagacagtggaaaaagaaaggaaagaaagtaacaaaaggggaaataatgttgacatgaagatgtctgttttgtgattttttttatctcttaaaaactagaaatgactatcttggtttcttctgtgaaaaattcaaactagtaataccataaacttgaagtaagttccatggtttaactgaaatatctgcagtattgtttgttttatggttgtcgttttcatctaaatgaagatgatatttatataggacagtgaggctagaacataagtaatacattggatttgatgactctggttg

SEQ ID NO: 409689 - DNA, 336 bp, Homo sapiens
ggcaaagaaatatgcaagaggaaggtgtaatgtgatgaccatcagactgagtattagatgtgaattctatactctatcctcccattttgggatggtgatgacaaaaacaaacaaatcaattaagttagaacaaaagccactggagatcacaccaacttccagataaccaccagccctcaaaatgcttcttgactcttgctactttagagaaattgtagaccaaaattcagatatatgtggggccagacactgtacactaaatgtgttactacatcttaccctttcaataaatacaaaatctaaagttgtgacccaacactgtacaaaaataaattg

SEQ ID NO: 409690 - DNA, 414 bp, Homo sapiens
ttaaattctttatagaggattgtaactttctaatttgccatactcatttttctttattttcccctctgatataattcagctgtgtctcaccaaaatctcttcttgaattgtagttcccaaagtctccacgtgtcatgggagggatctggtgggaggtaattaaatcacgggatggtttcccccatgctgttctggtgacagtgagtgagttctgatagtgagtgagttctgatggctttatcagcatctggcatttcccctgccagcattcattgtctctcctgccaccctgtgaagaggtgccttccaccatgattctaggtgtcctgtggcttccccagtcacttggaactgtaagtcaattaaacctcttttctttataaattacccagtcttgggtatttcttcacagca

SEQ ID NO: 409691 - DNA, 512 bp, Homo sapiens
ttaaattctttatagaggattgtaactttctaatttgccatactcatttttctttattttcccctctgatataattcagctgtgtctcaccaaaatctcttcttgaattgtagttcccaaagtctccacgtgtcatgggagggatctggtgggaggtaattaaatcacgggatggtttcccccatgctgttctggtgacagtgagtgagttctgatagtgagtgagttctgatggctttatcagcatctggcatttcccctgccagcattcattgtctctcctgccaccctgtgaagaggtgccttccaccatgattctaggtgtcctgtggcttccccagtcacttggaactgtaaatgaatagatcttgtacacaattcaatgtatatacctgtgaaaccactatcccaatgaagagaaagaaaatttttgtcattccagagagttcactcaggccctcttccagtcaatctccacactcctagacgatagctgaagaatgtgagaaaga

SEQ ID NO: 409692 - DNA, 402 bp, Homo sapiens
caactgctatgaacattcttgaacatattttgtgaacctgtggaaacatttctcttgagtatgtacctaggagtataccttggaggttatagggtaggctaatgtttagttttattagaaactcctaaacagttttccaaagtgcctataccattttgcattcttatttacagtacatgaaagttttagttgttttccatcctcaccagaactgatcagactctaatttcagacattctagtggatgtgtagtggaatctcaatcctccccaccaatgaggtgttccaagatgtaatttacatgtaataaaatgcactcattttaagggtatagtttggtgtgtttgtgaaagtgtttaaaaccacataactattcataccaccccaatccatttttaggta

SEQ ID NO: 409693 - DNA, 400 bp, Homo sapiens
atgaatctcacaaacataacagtgaacgaaagacaccaaatacaatcaagtacatcctgtgcgattccttactatcaagtacaaaaatacatctatggggttagaaatcaggattggggttgccctgaagggggcgcaacaggaaagtttctggggtctcagcatgttctgtttctagatctatgtgctggttacatggttttatcccatttgtaagaattcatcaagctgtacaaatacaataacgtacacttttctgtatgtatgttatatttaatttcaataattttttaattaaatacatatgtggccaggtgcggttactcacgcctataatcccagtactttgggaggttgagacagaaggaatgcatgaggccagaagtttgagaccagcctg

SEQ ID NO: 409694 - DNA, 1403 bp, Homo sapiens
aggcaaacaaaggtttgctgaataacatactggtgtaagaaaactccatccagaaacaaagtccagagaatttaaagagaaagaaaaaaacaggcttcacttctaaaaatgaggtctgctaaaaaaaatatgaagcagacaggatgggcaaagtatatatctggactcattcaaatactaatatttgaaaaatataacttatataaaaaaggataagctaccaatctgagactataggattttattaatttaatacaaagcaaaaagatttagaccactgcatcaatggtgaaaccttatgcactttctgaatgcatcattattgtcttggtactggtatttcagaggaagatcacccacccaacctcaccctccaagcacctgacaccggctgagacagaacgggagcctaaaaggacaactggtcttccctggcacaacacttcctatttctgaaatcacaggcagtgcatttagtctgacctgggacatccaggccatctgagtacagcagcctggatatgaaatgcaccatggtcttgcaggagcttaggaaggaaatgatatcaggaaagagatgctcaatatagtgtgctcaccttacgatgaacttattttattgcttacagaaggaactgaagcattcttttcactctgtcggtgtattcgtttctacacctactagatactgttttggcagagggaaaatggcaaaacaactaaaaaaggtgcacacctgtggcaccaccttcctgtacttctctccagagccctcaactcagtgctcaatagtttacttactttttcctttagggcaataaatgatgaagggaaccataaaacactttactttggaccaaatataacaagataccaccactggaagaaagtgacgacaggaccgtcaccaggaccccagagaagagctggtgttcaagcagcgccctgcgtggcacttcactcctgaccccatgcttatttttttgggttttgttttacatacgagttggttaccagcttttcttgctgtttccttggtattaaaacacagtagggtagggtacagccagataaagagcgttgaggaccctatggagggacacaatggcagcagaagtacagaggccacgtgaaacgcaacttctatgcagtacagtaaatgagtgtttttaatcacaaactggagtgttgaaaaggttaaattattccctggaaatggcagaattttaaaaggcctggaaataataatatgtttcagaaataatcttgaaagttctttgaggctgggggtggtggcacacctgtaattccagcactttgggaggccgagatgggtgaattacctgaggtcaggagttcgagaccagcctgatcaacatggtgaaactctgtctcaaaaaaaa

SEQ ID NO: 409695 - DNA, 1563 bp, Homo sapiens
  misc_feature (523)..(523): n is a, c, g, or t
gggaaggggagcttcacagggggttttctggaagtgcccagggtgaaactgtgcttgaaggaagctcagatgtcagtttttcagattgtgctgtctgtatatctaggcattcataaatactttctagaactttgtgtggtgttttgcaaatgtagttaaacagatttgcgaattcagtaatttataaaaacttaagcttgtgttcttctgaatcccgttatttttcttctgcctccgaattagacacttcccctatgcattaattccaagtacagtcaaagattaagtaaggaaatgatgtgcatgaaaaaagttctgcatgtttgctaataatctaatgactgtgacatctaaacactggaaacaccttgatttatggataatagggctatctagaattttcaagggatcatggacaaataattataggcaatttgatcaagtgaccatgtaagaccattggtgcagatacagactgattaaagtggaaaaagttcttttttcttcctagcttcctgctctnccattaccttgataatgtgagccaaggcctattggcctccacaggacaagccctaggctgtagtctgggcttgcttgaacctgcctgacctgtcacttcaaggccagccctgatcctctgagaatgggcctgggaaccatcagaaattatgtctatttgcagcaggcagggcctcttttggtctccagcatagcccttgccccatctgctcttttcactttacatggagtactaggcaaagtggcttcctctttgggttttgttacatactttaaccaagactgtgcatgcaaatggcctggcatgtactcggtgctcaggatgttgcagctactgaattattatcattgatttcttctgcgtgtgacctggatccacaagtcaaatgcaaaaatttgtcttgactgatggtcctctcctgtctccctccagtaccccctcttgaggcttgcaggggcagggaccagagggcccagcaccatgtcctgctaatgctcactcctgactgcaagggagtcagggttgggagacgctgtaacaggagaggctacagctgactgggatgcagaccgggggctgggtccttaggaaatttgttctaatcttagaaggtatgccctggcttcctgctgcagcctgaaggacaagtgtcccagacctcaggacacacacgcacactcacactgtcacttgactcctgcctgggaggcaggaatggcccctagtgaagggtacttgtgtgggcctccaggtggctgtaacataccccaggactccaggcaatcctggaaaggtggctcctggagaccaaccacccttcagactcagaggagctctctgtgaagtcaattttattattgaactaaccaacagtagagagtcagagtagtgcataacagggagattctgaacttaccttggagagtaacaaatcgtacatttacttgttggcttaggtgagtaaatccatctaaatcacccatgccagctatgaagagacacttctttcccactctttccctttgcaaaagaaaaaaaaa

SEQ ID NO: 409696 - DNA, 371 bp, Homo sapiens
cccaaaccatgctcatagtccttgacccacaaaccccacataacatagtatatatcttgagattttaaaaaaatcccatttttttttcaagaaagtcaaaagatgaaaaaaaagtttataaatataatttaacaacaaattataagcaacctaaagatccaaaagctagaagcataagttggtcagcaatgttgacaaggctcttgggaaacaatttgtgacaatgcacagtaacacaactcttctggcaaacaatgtaccactaaaaaaaagaaccaaaccatgctcatagtccttgacccacaaaccccacataacatagtatatatcttgagattttaaaaaaatcccatttttttttcaagaaagtc

SEQ ID NO: 409697 - DNA, 1377 bp, Homo sapiens
ttgctgaagtaaaggaaccctgcagccttcccatgctatctgttgacatggaaaacaaggaaaatggctctgtcggtgtaaaaaattccatggaaaatgggagaccacctgatcctgcagactgggccgtgatggatgtcgtcaattatttccgaaccgtgggatttgaggagcaagctagtgcttttcaggaacaggaaattgatggaaaatccctgctattgatgacaagaaatgatgtgttgacaggacttcagttaaaattggggcctgctctgaaaatctacgaatatcatgtaaaacctctgcagacaaagcatttaaagaacaactcttcatagtacagtcaaattggggtcttcgacctcaaaaaaatacataatgacataatttagtttcatgtaatgaaactttgtaaacagaatacatacatgtgtatatgtaaagaatttcaatcaaatgaaacgttatcctattggatagactaggcaattcatcagctcacctgaaatcagccaggaggagcaaggacaagatgcgcacagggtggttttcctcatggattttgtcaaatagatgatctttgacacgattagacactcctccccacaaaggctttgaaatcataaggattttcctcatctctttatagctttcccaaaatcttttaaaaaagaatttaattaaatgacagtcttttggttacagacttaggatgagtaaaaacaagaaaatttggggagggggagaaagaagaaagggattgctgtctcccttgaattcctctgttccttagagcttgtgttacttggacggaattgccaacacccttttttatagagggttctccacttgaccttattaaggttttattgggatatgctgcagtgtttgaaatgaacatgcatcatggccccttcaggagcagaatcatagctctgaaaagagaagctccgttgtgtactgaggatatccatccatattcagctagctttcaaatggggtaatgatattttctgcatagattttcttttaaattggttctttgtttctgaagaaagaattttttttaacttcatggttttatttataataatttgtttctgaagaaatttgccgagagttacaggtcaaaaagccttgttactagtacagaatatttttatatatattccttcatgatggtgtaattttttttaattgtcctatgctttgttcggttcctgggttaagtacttgtttttaagagcttggaaaaagtgggcttgctacatctctgttcaaagagacatttgttcaatctctgtgtgtcaacgccttgttgaattggtgctttgtggttgcaataaagcattgcttcagtttaaaaaaaaaaaa

SEQ ID NO: 409698 - DNA, 494 bp, Homo sapiens
ttgctgaagtaaaggaaccctgcagccttcccatgctatctgttgacatggaaaacaaggaaaatggctctgtcggtgtaaaaaattccatggaaaatgggagaccacctgatcctgcagactgggccgtgatggatgtcgtcaattatttccgaaccgtgggatttgaggagcaagctagtgcttttcaggaacaggataaagttactgacagagataaatacctagaatgcacaccaatcgagagctggagtggtcaaatcaaagggctgctgctatgataaggcctacttctgcctgcctaccctcagaaacaggatctcactatgttgcccaggctggagcatagtggttattcacaggcgtgatcccactactgatcagtacaggagtttcatctctttttgataaagaagactgaggatcccacacaggtgcacactgttttgtgctatagatgtacaactaataaaacaaatccttgtcaatactaa

SEQ ID NO: 409699 - DNA, 682 bp, Homo sapiens
aactgagaaccaaagtatccaaacaggagtggctccttcagagcacagctgagcatctgaagatcgacaaccagcagaaagagagcatggagcagttcattgtcagccagctaaccagaacacatgatgttttaaagaatgcaaggactaacctagagttaaggaaactactgcaccagtcagaggcaccaagcctgtccccaacccatcaccatctgttagcagatcttgtaggtgacgcttggcctgctttcgccttccaggagaagatttccagtccacttgtgaaatccctaagggctctgccatgtactccagccttgtgacccttgccttccaggaaccatgcaagaagtgcagccaccggaagtccttaagagcatctgggtctcattcctccaagtccactggagggtccagaagagggagtcagagttgtatcctggtggagctggcagaaaggcagaaagcctttctgacagctatggaatacgattagccaaggtccacttggcccagcactaagaagaagatgcatagtttgcacagaaggttttgtgatactgcctctcaacagccccagcagcttgggaactagcaagagcacatttcttgcctcatcagctgtcctgagatggaaaactcagtgaatataggaccctgattccgatgaatggggcac

SEQ ID NO: 409700 - DNA, 736 bp, Homo sapiens
aactgagaaccaaagtatccaaacaggagtggctccttcagagcacagctgagcatctgaagatcgacaaccagcagaaagagagcatggagcagttcattgtcagccagctaaccagaacacatgatgttttaaagaatgcaaggactaacctagagttaaggaaactactgcaccagtcagaggcaccaagcctgtccccaacccatcaccatctgttagcagatcttgtaggtgacgcttggcctgctttcgccttccaggagaagatttccagtccacttgtgaaatccctaagggctctgccatgtactccagccttgtgacccttgccttccaggaaccatgcaagaagtgcagccaccggaagtccttaaaacatcaggaaaggttggcctgtcccccttttgtgcagctacctatctgctgaggagcatctgggtctcattcctccaagtccactggagggtccagaagagggagtcagagttgtatcctggtggagctggcagaaaggcagaaagcctttctgacagctatggaatacgattagccaaggtccacttggcccagcactaagaagaagatgcatagtttgcacagaaggttttgtgatactgcctctcaacagccccagcagcttgggaactagcaagagcacatttcttgcctcatcagctgtcctgagatggaaaactcagtgaatataggaccctgattccgatgaatggggcac

SEQ ID NO: 409701 - DNA, 349 bp, Homo sapiens
attttcttctgtcctttttcctaaatagtatttttttcaatattgaaggtattatttccagtatatgcaactttatgtcttgtttttaaaaaaatgttcacatatcataagcatgttcccataaatgttagcaaaaactcctggtaatcattttcaacaactgcattatagtttatccaatgaatacaccatgctttatttaaccattcctctaatgtgagacaaatataagttgttaataactttttactctcctaaaaaatgctatgatgatatttgcctgcaaattatggagtaattacagagtattctcccctcagataaattcctaaaagggaaatcactggaa

SEQ ID NO: 409702 - DNA, 411 bp, Homo sapiens
gaccacactctccttcacgtccccttgacagtagaagtaagggtgactccaaatgcctttttctttctggcatgcgccccactcccccgccatcccaggggagccttccaagttgcccagctgccaaggcggtagctgtggcagttgcagggaccggggagcgcgccgtgcggaggcaggaagaggaggaggaggagaaaaaacgctgcactggctatcaattttgaggagagcgaccgctgccgctgccgtggaaggaaacgctgccaaccgcaacagaaatgccactctcggatacctaagtgagcatgtgtgcgactctgcgcacgcctagttgcgcagctcaatgacatcgggcttcttagcaagttatccagtttccgggttttgagtgtacccatcaggctccgt

SEQ ID NO: 409703 - DNA, 397 bp, Homo sapiens
caaatttgtatgtttgactcaaagatgttgccgtagctctgtgggtttctacttagcaactcttcccccgagttaccttcagcaaaggcaagagagggcatgtggcacttgggctgtagataaaattcctcttctgcccaggcctgggctggtggattgaaatctcattccatagtgcaggcaagcaagaaggacaattttcgtcatttttccgtcatataaattaatttcttctttcaccctttttgcctgttagtgaaaattaaatcccagttctgactcccgcccactttctcaggggctgtgtctgagtcccgggtgcctgctcatggggtgggtgacctgcctggtccccagtcaccaagatgtccattgtccttcccgggccttggtcccc

SEQ ID NO: 409704 - DNA, 448 bp, Homo sapiens
aggttccatgtcgcgtcgaccgtttcttccatgtgttacttgagtgaaaatttacgggctacataaatatggctgttgtttggaaagaaaatgttgtgacattagtatgcgcacaagacaatgggaagtacgaactaggattcctgtaaatacgagaaaggaaaagaatgcttttactatgttagaagacttaaaatcacatgaagtgattccagtctttctgttgttattccgatgttttagctattttagattttggggtttggcttttttttgtttcattgcctttctacataattggataaccttgttagtatctgcagaatgccctgattaggaaatgtgttaaccctatgtgtcaatttggtataatttcatattgttttcatattgttttatgtggagtcttccaataaatgtatattgtatatgtgtctgtaaaaggtgt

SEQ ID NO: 409705 - DNA, 376 bp, Homo sapiens
tctcaaaaatttatatgagtaagagttacgacttaagacttcttttggtcagtttttgcatcaattctgcatattgtatccctgatcctgtctaccttcctagaaacttgggtttctatcacaagggcttccagggatgagtttgggagtgtcagtcctagcatgactgcataattggcaaaataacactgaacacatctcctttagggtagtgggcccacactgtaaccccctcatatgaatgatgacacaatattactagtgtgcaaaaagaaacttagagtcataggtatactgacagtgtctgcattcttttaagtttttattattgaaatttctagacttatgtaaaagtagagagcatggtatcatggat

SEQ ID NO: 409706 - DNA, 512 bp, Homo sapiens
ggatcattctctatcttacttgatgttagttccatttttccagtcactctgaccaaaagccttgaggaatcatcctcagttacgttttttcaaactctaaatctagtccgtccacaaatccagtatctatggtacaacaatgtgtgtgaatctcagaatcttaatactgaatgacaaaaagccagatacaaaaaagtttatatagtgtatgctgtgtaattgtattcatatgaaattctaggctgggtgcaggtaatcccaacactttgggaggccgaggcaggcagatcacctgaggtcaggagttcaagaccagcctggtcaacatggtgaaaccccatctctactaaaaatacaaaaattagctgggcatggtggtgcacacctgtagtccgagcaactagggagactgaggctggagggtcgcctgaacccaggaggcagaggttggagtgagccgagagtgcagtactgcactccagtctgggccacagagcgagactctatcaaaa

SEQ ID NO: 409707 - DNA, 353 bp, Homo sapiens
gccttaacctcccagagtgctgggattacaggtgtgagccacagcgcccgacctaatttttgtattttttttagtagagacagggtttcaccatattggccaggctggtctcaaactcctgaacttgtgatcctcctgcctcggcctcccaaaatgctgggattagaggcatgaggcactgcacctgaccaaaatttagctttttaatatgggaaatgttttctatgtaagaaatatctgaatttttacttggtaaagtaaagcatttctacaggaggtccattgcctgtctcaaataaatctttcaattgtgcattttcctagagactttttttttttttttgagacagaat

SEQ ID NO: 409708 - DNA, 736 bp, Homo sapiens
gggaaacacagttattggttattacaaaggatattacaaaagatataaggaaaaggtcaaggagcttgcctgccttcttcaggaccaccacattccaggaacctctaagtgttcagctctctgaaggctctctgaaccctctccctttgggctttttatggagatttcattgcataggcatgattgattaagccacaggctattggctatcaacttaaattttaactccctcccctccccagaggttctgaagtagggctgaaagtcccaacgctctaatcccggccttggctttctggtgaccaacccccatcctgaagctggccagggactgccagccatcaatcaatcattagcatgcaaaaagacatactttggagactccaaggattttaggaattctatggcagaaaatggagatgaacaccaaatagaaggccgggcacagtggctcacgcttgtaatcccaacactttgggagaccaaggtgggtgatcacctgaggtcaggagtttgagaccagcctggccaacttagtgaaaccctgtctctactagaaacacaaaaaattagccaggcgtggtggcaggcgcctgtaatcccagctactcaggaggctgaggcaagagaatcacttgaacccaggaggcggaggttgcagtgagccgagatggcgccactgcattccagcctgggcaacaagaacgaaattccgtctcaaaaaaaaaacaaaaaa

SEQ ID NO: 409709 - DNA, 360 bp, Homo sapiens
tactactactaaattcgcggccgcgtcccaacgctctaatcccggccttggctttctggtgaccaacccccatcctgaagctggccagggactgccagccatcaatcaatcattagcatgcaaaaagacatactttggagactccaaggattttaggaattctatggcagaaaatggagatgaacaccaaatagaaggccgggcacagtggaggcgcctgtaatcccagctactcaggaggctgaggcaagagaatcacttgaacccaggaggcggaggttgcagtgagccgagatggcgccactgcattccagcctgggcaacaagaacgaaattccgtctcaaaaaaaaaacaaaaaa

SEQ ID NO: 409710 - DNA, 495 bp, Homo sapiens
tgagtctgttggaggacagggcttggagaggcaggctgccccagtgtgcacccagaaaggagggcaaaaggctgagcagctggactggggttggatgcagcagctatgcagctgatttggagagcctgacatgagaggacactgaggagtcgacaggttttggagaagattcccatctaatagttttaaaaaatattcttggtcgggcgcggtggctcctgcctgtaatcacagcacttcaagaggccaaggcaggtggatcacgaggtcaggagatcgagaccatcctgactaacatggtgaaatcctgtctctactaaaaatacaaaaaattagccgggcatggtggtacgcgcctgtagtcccagctacttcggaggctgaggccggagaatcgcttgaacctgggtggtagaggttgcagtgagctgagatcatgccactgcactccagcctgggcagcagagtgagactcgaggatccccaaaaaataaa

SEQ ID NO: 409711 - DNA, 355 bp, Homo sapiens
ttctctcggtgttaaactcattttaaacaaagtggaaagtaagggatttagtagggaaatcctttcaccttggcaaaacgatagtatacaactggcacagcataatccttggtggcttggcacaagcattccctgtcccccatcaagcacataatgtccctcagtaattccactgcatttttgtgcagcggctgtgtgctggagctgtggggaacccctcggtaatctcttgtctgctttttaggagcccctatctcctggtcttctcttacttcccaagctaccctgcttctttgaaaagtcttcaggcttgcctacctcttctcagcttgctctgcatgccttggggaagctg

SEQ ID NO: 409712 - DNA, 443 bp, Homo sapiens
gttacagcagccctaggaaactgatacagagatactgttcaaagttttcataccctgttcaactccatgcaattgacttgagtctttattttggaacagatggattcagaagaatctaaggtttgtccataaaaaattccccagaatagagaatggttaaaatgctgagattccaagcgcttctttataaagacacctcttctctgaaagttaatagggaatgttcacaggtttaaaagagaaatgttgctgggcaccatggctccctgtctctacaaataattttttaaaaattggctgggcatggtggcatgcccctgcagtcacagctactctggaggctgagttgggagaattgcctgagcctgggaggccaaggctgcagtaagctatgattacaccactgcactctagcctgggcgacagagcaagatccagtctca

SEQ ID NO: 409713 - DNA, 663 bp, Homo sapiens
gttttgccccgagctttgcaggcagaacaggcatggccctcgtggaacatttagcctggtttgattctgtccccagcctagccaagactcagcccatccttcaagagatgcctttgctgtttgtcaagctccctcctggctcagaccattttagtgtctgatctcttaactaaaacttgtagcctgtcgtgggttggcctgaactggtcaactaggctcttacatagtatggatcagccatcccaagtatttgagggtgttgtggagactctgcactgtgcccatcctggtcaagtgttgtaaaacccactgttctgtcgtctgtgggaacatttttttcagggcctctaccatcatcctaggcatctaaacttattccacatttcctgggggccttaggacagagtttagatttcacttcaagaaccctcaggaggctggggcggtttggatcaccttaggtcaggagttcgagaccaccctggcaaacatggcgaaaccccgtctctactaaaaatacagaaactagccaggcgtggtggtgcacggctgaggtaggagaatcacttgaacccaggaggcggagattgcagtgagccaagatcgcgtcactgcactccagcctgggcgacagaatgagactctgtctcaaaaacatgaaga

SEQ ID NO: 409714 - DNA, 442 bp, Homo sapiens
accaagtctcactctgtcacccagactggagtgcagtggtgcaatcttggctcactgcaacctctgcctcctgggttcaagtgattctcctgcctcagcctcccaagtagctgggactacaggtgcccgataccacaccacacctggctaattttcgtatttttagtagatatggggttttgccatgttggccaggctggtcttgaactcctgacctcatgtgatctgcccacctcagcctcccaaagtgctgggattacaggtatgagccaacatgcctggcctaagaaaaaattttaattaaaacttgccgctgcctacaaatctcacagcaccctgatgtcacatatatcagccgcaactccacctgctaacccagagctccagattcctgacatgaggtagtaggtgagactgttgaggcaggaatttgaagattggc

SEQ ID NO: 409715 - DNA, 999 bp, Homo sapiens
atttgtgacatctgtcttctaagctgcatctaatgcatttgatgttgcattctctgttcctttttaatagcagaggccttggggtaggggatgggagaacctgtctaagaaaacctttagctctttgttgtaggcctgaagactgttctttcccctctcaactttgaataaatactcctggggtctcattctcccaactctacatattgcctcaaaaattggcaagcccctggcagcccctcccagtgtctgcagaagagtagtgtataagggcttctgctcttgatggtgtatttccttgatttttcctctcaagctgcctactctacctgcatctccccatcttttaacagtgcctattaaatgatggcccatcaatattgttactgtaattcctaaactgattttcaaagcattcttatttttttctatcagagataaataaatcatttaggaagagattcatttgaacattcttgtttataagccaaagggtttccaaagaggaatagtttgaagattgacaaaaatggggataatttgtgagagtgaatgcctggagagtatcagggaacatctagaacatacaataagaggatacatggaagggcaacttttcctttgagacaggaagggaaagacatatggatgaaatgagtgaaattatacagagttgggatttcctcttgatggcttcttcttcaggtaaccacagagtctgagcactatcaaaaattcttcctgggccaggcatggactcctagtggattgcctgagctcaggagttcaagaccagcctgggtaacatggtgagaccccatctctactaaaaatacaaaaaaattagccaggcctggtggcatgtgcctgtaatcccatctacgtgggaggctgaggcacaagaaccacttgaacctgggcggcggaggctgcagtgaactgagatcgtgccactgcactctagcctgcgtgacagagcaagactctgtctccagaaaa

SEQ ID NO: 409716 - DNA, 461 bp, Homo sapiens
atttgtgacatctgtcttctaagctgcatctaatgcatttgatgttgcattctctgttcctttttaatagcagaggccttggggtaggggatgggagaacctgtctaagaaaacctttagctctttgttgtaggcctgaagactgttctttcccctctcaactttgaataaatactcctggggtctcattctcccaactctacatattgcctcaaaaattggcaagcccctggcagcccctcccagtgtctgcagaagagtagtgtataagggcttctgctcttgatggtgtatttccttgatttttcctctcaagctgcctactctacctgcatctccccatcttttaacagtgcctattaaatgatggcccatcaatattgttactgtaattcctaaactgattttcaaagcattcttatttttttctatcagagataaataaatcatttaggaagaga

SEQ ID NO: 409717 - DNA, 411 bp, Homo sapiens
atttatcttaacaggccatgtgattctagtgcaacagtcctcaaattgtggttcacagacccagaggtgctttcatggactctgtaaggtcaaaactactttataatactgaaatgttaagccaggcgcagtggctcacacctgtaatcccagcacttcgggaggccgaggcaggcagatcgccagaggtcaggagtttgagagcagcctggccaaccaacatgatgaaaccctgtctctactaaaaatacaaaaatgggccaggcgtggtggcgtgcacctgtagtcccagctgctcgggaagctgaggcaggagaattgcttgagcctgggaggcagaggttgcagtgagccgagattgccccactgcgctccagcctggctgacagagtgagactccttctcaaaaaa

SEQ ID NO: 409718 - DNA, 421 bp, Homo sapiens
gacactggtccctacataatggcttatgcctgaaaccccaacactttgggagactgaggcaggtggactgcttgaggtcaggagctcaagaccagcttgggcaacatggtgaaaccccatctctactaaaaatacaaaaattagccagacatggtggcatgcacctgtagtcccagctactcggagggtgaggcaggaggatcacttgaacctcggaggcagaggttgcagtgagccaagatcataccactgcactctggactaggtgacagagaccctgtctcaattaaaaaaaaaaaaaaaaaagatttggaactgtgtatgtgcagtggaagatgtaagggttgtttgttaaaccacaacaaaacctagcctgtccttactcataagatccttactcataagagaaggacagagagac

SEQ ID NO: 409719 - DNA, 915 bp, Homo sapiens
atcggaggaggggagaggagaggaaagtgggaggagaggctgcactctaaacagccctcttgcctgagcaatctgacgcagaggcacatgaggaatcagcacggaaccatcgacccacagggttaatcccaatgtcaatacctgctagatgtcagggatcccctgggctgctggcgagccatttgaaatgacccatctcctgccaccttggcctgctcctctgggccacctctctccacctgcacttgcttaccgctggagggctggggtctgccgtcacctgcctctcaagaaacctgtgcctccagcagccaccgggatccactgggactgtgaccctcctgccaagaagacccaggaaaagcctgctggccactgtcgatgagaggcaggctcccacctgcagggtgttcactttgtggctccttccaataagtcaagcaagatggaaacattcgagcgatgcaaggcagcgctacttggggaaagagacactggtatgccacatcagcgaggaccaccaggaaagacgattcctttccaaattccaagcctcaacaaaagcgaccacagcagtccagactcctgtctctaatccctacttccccatgtggacaaagagtggggctcttttggcctgagctcatggggtttcacatcagcccagcaggacagaatgcatccctcctgacagccaggcacaggctggggaccagagagacccagctggctccacagggcagggctgacacagagccaggggagggttgtggcggcccacactgcatgtctctacaaggtgaaggaactccttgtgttggctgctgagctgagaggtcacagctctgcctcacagcaccctggccaagttttccatgaaatcatccaaagccaacaggagttccgggaaccatc

SEQ ID NO: 409720 - DNA, 524 bp, Homo sapiens
atcggaggaggggagaggagaggaaagtgggaggagaggctgcactctaaacagccctcttgcctgagcaatctgacgcagaggcacatgaggaatcagcacggaaccatcgacccacagggttaatcccaatgtcaatacctgctagatgtcagggatcccctgggctgctggcgagccatttgaaatgacccatctcctgccaccttggcctgctcctctgggccacctctctccacctgcacttgcttaccggaagacggcaaggccaccggtgcacttcgcagtgccaggagaaaggcgcctcatgctattagctcaaataaggaaaatcatgccgggaagattgaattttctgcagacttgtttaacctggtgatttctgagcacttggcgctggcagccacgggggagtgggctgccagccggcactttatcagccacttctcaggactattcctaagcttattaaatcagcatgagtcactcccttgccttcctcacaagcatgaatcacgaatcat

SEQ ID NO: 409721 - DNA, 569 bp, Homo sapiens
ggcacccccagtttttccatcctcctcattcgtgtaggggcacccgaatcccctattccttatttcccctatcactcaggcactggcagggtccttttcccactcctgttggccgccgcggctccaaagcgagctgggcagatgtgcctgagacaggtttgaccaggcaactgaaaatatatccctaagagaagacaaaacaaagatatgaaaggaacacacttccctgactgactaggaggaacagagctgcctgctgactggaaccgcttcctcccagactaaggtttcccagaggaagagagagaatttggacaaatgaatgaggaacaacgctctcctgagggttttctttaaggggcaaggatcaaagcctctagatcctttgaaagcagagttaagaggcagtgcaggaaggcacagcaggaaggttcatggttagactacagagaaggaagcagccactgctggggacctaacctgtgctggtcactgacaagctgtctcattaaaccttcccggaccctcaacccctcctagtatcttatcctcattttacagatgagaag

SEQ ID NO: 409722 - DNA, 346 bp, Homo sapiens
ttgtatttttagtagagatgggctttcaccatgttggccaggcaggtctcgaactcctgacctcaagtgatccaccagcttcggccacccaaagtgctgggattacaggcatgacccaccgtgcccagcctcctttttcacttcccaccttcctccccacctctgggtgcacccttccctgagctcagcctgtattcctatgtgctggccacttaccagccagtcccttcagctgcaataccctttactcacctagaaagctcatatcaaaagtcgcctcctccagaatacctctcaagttctcctctctggtcccttggccctttgcaggtaccttttttcttgc

SEQ ID NO: 409723 - DNA, 352 bp, Homo sapiens
ctccagaagttcaagatcagcctgggcaacatggggaaacccccatctctacaaaaaattagaaaattagccaggcacagtggttcatgattgtactcccagctactcaagaggctgaggtcagagggtcccttgagcccaggaggtctacactgcagtgcatggtgatcatgccactgcactccagcctgggtgacagagtgagaccctgtctcaaaaataataataatgatgatgataaatttagagcaaatgcaaattaacatgtaataatacatcctctcttgtgaaaatgtattagttatttactattgcataacaaattatgtaaaatgtaccatttcaaaataac

SEQ ID NO: 409724 - DNA, 294 bp, Homo sapiens
tgtaaccagtacgacccgtacctccacaactactgaaattttaaaaagaagatctgttacctatatagaaagaaactgtaaattaagagactaataaaaatcttcttcacttttgtaactcacccacatattggtacaaccaatacattgctaagtcaagatagaaatgataaggttcctttgcttttaggtcttagcctagatatctttaaaatataagcattatcatattaaaagtacattaattattgtggacacttttttcattcctttttttttttttctattcagtca

SEQ ID NO: 409725 - DNA, 359 bp, Homo sapiens
tgcccactttctaattggagtgtttgcttctttactgtggtgttttaaaagctctttataggttttatttttattttattttatttttgatatgtgtttcgctcttgttggcaaggctggagtgcaatggcctggtctcaacttactgcagcctctgcctcccaggttcaagcgattctcctctctcagcctcccaggtagctgggattacagatgcccaccaccatgcctggctaatttttgtatttttagtagagatggggtttcaccatgttagtcagactggtctcaaactcctgacctcaggcagtctgcccatcttggcctcccaaagtgctgggattacaggtgtgagccac

SEQ ID NO: 409726 - DNA, 502 bp, Homo sapiens
ttttttttttttttgaggctgggtctggctcttgttgcccaggctggagtgcagtggcatgatctcagctcactgtaacttccacctcctgggcttaagccatcctcctacctcaacctctccagtagctggcactacaagtgtgccaccatgcccggctaatttttgtattttttgtagagacagggttttgctatgtcgcccaggctggtcttgaactcctgagctcaagtgatccgctggcctcagccacccaaatgctgggattatggggatgagccgctgtaacgggccccttttttcactataacgtttctctctatgtgtatatatatatatttttggagatggagtcttgctcttgtcgcccaggctgctcttgtcgcccaggctggagtacaatagcatgatctcggttcactgcaacctccacctcccggattcaagcgattctcctgcctcagcctcccgagtagctgggatgtcgacgcgcccgcaacca

SEQ ID NO: 409727 - DNA, 1063 bp, Homo sapiens
  misc_feature (600)..(600): n is a, c, g, or t
  misc_feature (602)..(602): n is a, c, g, or t
  misc_feature (604)..(604): n is a, c, g, or t
  misc_feature (606)..(607): n is a, c, g, or t
cttttccagccccggtaccggaccctgcagccgcagagatgttgatgcctaagaagaaccggattgccatttatgaactcctttttaaggagggagtcatggtggccaagaaggatgtccacatgcctaagcacccggagctggcagacaagaatgtgcccaaccttcatgtcatgaaggccatgcagtctctcaagtcccgaggctacgtgaaggaacagtttgcctggagacatttctactggtaccttaccaatgagggtatccagtatctccgtgattaccttcatctgcccccggagattgtgcctgccaccctacgccgtagccgtccagagactggcaggcctcggcctaaaggtctggagggtgagcgacctgcgagactcacaagaggggaagctgacagagatacctacagacggagtgctgtgccacctggtgccgacaagaaagccgaggctggggctgggtcagcaaccgaattccagtttagaggcggatttggtcgtggacgtggtcagccacctcagtaaaattggagaggattcttttgcattgaataaacttacagccaaaaaaaaaacaaaaacaaaaaanananannaacaaacaaaacccgggggccctacatcgccgggggcgcggagcacaaagcggtcacagcacatggcgccacactggcccaaacacgggagcaccagaacccacatcttcttgtgcacacgcggggcacaccaccgaggcaccacataagacacagccacaacaaatccagaaaacccggtaaaccggaatagaaagccgcgagcacaaccccgcacgagcgagcaccacgcacgagagacaagcacaacaggcggccaaaaaacatataaaaaaacaagcaaaaaaaaaaaaacaaccacaatacaacaaaaacaacaaacacaacagaaaacaaacccataaataataatcacaaaccatcaaaacacaacacaacaaacacacaacagaagaaaaacccaacaagccaccaatcacaacacgcccagagccacacagataaccaccaacatac

SEQ ID NO: 409728 - DNA, 305 bp, Homo sapiens
ttttttttcaaacaagcaattggaccatgcagcatagaacttctgaaatgtctctatccaggaggataagttagatgatcaggactgaatttggctcttttcatttcctggcacgttagctcattatggtagctagaatgcttcgtgatatgttaggcatctattctgtactaccaggcgttctagattgcagagctccacgtgaggcccattaataaccttattgtccatctctttaaataatcagtgtgtgtgtaggaggcaggggcatggttggaggtaagggagtggagaggtgttgcagt

SEQ ID NO: 409729 - DNA, 375 bp, Homo sapiens
tcagcgtcgcatctataaccctttctgtctctgactcctttctctctgtctatgagcaatttaaaagcgatttattctaatccacattggaaatggggaactggagcagccgagaagcagatgtctgcagcatgaatgggattcacacacttcttggactccttactggcaagagaagcagggctgacctcctcaagagagttagagacatagagagatgattgatgcttgatcagcttctgactcattatttttctttacaagccatctttgaatctctgcaccaatcttaggaaaccctctgctcagcagaattttgtccaggcatgccattaggggtgcaggcgtcattagtagcctcttgcttcagggaac

SEQ ID NO: 409730 - DNA, 512 bp, Homo sapiens
ctcgtgcctcagcctcctgagtagctgggactataggtgaatgatactattttatttaacaaacactcatattgtacctacagcgaggcaagcactggtctaagcactttgcaagtattaaactttaatctgcctgatcaccctattactattattaacattcctgttttaccaaagaggaaactaaagctcagagagggtaagtgacttgccaaggaagggtagaaacagcattggcatctactccagggtctaggcattagggctccatgcgtctaaacacgggtgtctcctggaccatagcagagcttgcttaactgtcaggcccctttagggtctgtaaacacacacactgcccccacagaggtacacacaccatgttatgttgtcatttttggaactctatccccattgactgatggcatttgctgcagtggaggaagaatttgtcatccctgtccttctagaattcaaagtgggtgcggactaatccctgttacatggtaaacagg

SEQ ID NO: 409731 - DNA, 690 bp, Homo sapiens
gctgtgtccagtttgggaggtctacgttttcctgaatttctacacccttcccctagataggcgtacacttttaaaaaatttgcttcattgcatctgtgactcatgtatttatttactaccaacaacttttagaaaatatttaattgccccttctttcctttcagagaggctgtgtttttatacgtgtgattaaaaagtataaggaatctgaaaagcacttgtcagtccacctgtgggactgtgccaagtccctgttgccttgtccaggagatgggacgggaaatgcacggcaatatgtctgcttagaacatcccacccaggacagtttaaaatagaagaagccctgggaggatgcaggtccaggtgtggattgactgaataaacatgctatagaaaggagttaggatttttaagatgcctgttaacagtgttccattgcttgacagtagaatagttaagccagattttgctcctcttggtgagatgggaagagggcatagatgtttatatatccatcatgggtttatccagtaacgttggagtagggcgggaaatactcagcagatattcattacggcatagcagttctgtattcactcgctacaggaaataaagccatagccgagtctgcatattctagccgctgttgggagtgatgaacgacagtaccggtggactttcagccctcct

SEQ ID NO: 409732 - DNA, 651 bp, Homo sapiens
aaggccagagactcactcagaggaaagggtaaaacagggtctcctgactggaagaaaacaggcacagatgcgattgataaaactgtgctgaaatggggaataaagtttactagctaaatgttgtggtccctcaggttttctcttgaaatcagccctcaaactggcagccagtttatacacttcatggaggaaagtggaagatggaaaaaggaagaaaggcagaaaggcagacacagcaaagcttcctcagtgaacggccagcctagagtaaatggaggccgagtcagcacaccagccacgtgcccagagcttcaaatggttttagtgcctcgctcttaagtatgaataagaattaacacttttaaggaaatattctaaaaataaagacaggaaaccccaaaaatgaagaaaaaaaaaacttggaaacacaaaagatgatgcttgaagaagaaacttaaaaaaaaaattctttcactaataatagctcttaagttaaaaagatggtagcgaaaatgaaaaccaaaacttaacagaagggtggaaacctgaggtgaggtttcctcccagaagataaagcaaaaaagatggaaaataaaaaatataattaaaaagtcaggccgggcgcagtggctcacgcctgtaatcccagca

SEQ ID NO: 409733 - DNA, 440 bp, Homo sapiens
taaagacctaaggcttaattgaggcaaaatactcagtgtaaaggaaaagatttgttaaatggactatatataaaaccaagaacttctgttcatcagaagatagcatttagggcaagatactgagctggggaagatatttgcaatacatgtgtgaatcaaaggactcaaatctaggatgtataaagaactagaaatcatttaaagaaacagacaaacaaaaatgggcgaaagactggaacacttcctacacaaaaaaggctatccaaaagataaattcatgaaaggcacctattttgttagtcatcagggaaatgtaaattatagccataatgtggtaccactacacatctaccaaaatagctaacatggaatggcaagaatatacaccagttggaactttctgacacagttgatggggactttggaacgtaacactttgg

SEQ ID NO: 409734 - DNA, 1261 bp, Homo sapiens
ttgctttgctgttagcctgttggaccttcgagcctagctgctcgcacaggactcggccacctgcccttcctgcaccgactggccagctcaagaggtttggatatggaccttcttcaattcctggccttcctctttgtcctgcttttgtctgggatgggagccacaggcaccttgaggacctccctggacccaagcctggagatctacaagaagatgtttgaggtgaagcggcgggagcagctgttggcactgaagaacctggcacagctgaacgacatccaccagcagtacaagatccttgatgtcatgctcaaggggctctttaaggtgctggaggactcccggacagtgctcaccgctgctgatgtgctcccagatgggcccttcccccaggacgagaagctgaaggatgctttctcccacgtggtggagaacacggccttcttcggcgatgtggtgctgcgcttcccgaggattgtgcactattactttgaccacaactccaactggaacctcctcatccgctggggtatcagtttctgcaaccagacaggcgtcttcaaccaggggccccactcgcccatcctcagcctgatggcccaggagctggggatcagtgagaaagactccaacttccagaacccatttaaaatcgaccgcacagagttcattcccagcactgaccctttccagaaggccctgagagaagaagagaaacgccgaaagaaagaggagaagcggaaggagatccgaaaaggcccaaggatctccagatcccagtctgagttatagccctggagcagctcagggctcagggggccacaaggaggcaggtcgggaggaagaagaggtggaggtgtggttgtggtggagagcaccagctagccccttccagaaggggaggccacatttgcccggccccctggagctgggtctgagccccagctgaagggactgagcctcagatggctggattttctctcaggggcctcctgctgaaggggccttcagaggattttatgctggaaatatgaccctgtgcagactgctgggggaggcaggaggatgcctgcctggaccctgttggtggctgaagacctctggccagctggcttccgcccttggtggggaagcagcagaactaggttctgagccacgggtcagggtgccaccctgctgctggccccactgtgtcacagagctgcctggcacaggtcccagcccctctgcagagacacaataaaagccagcagaccctttg

SEQ ID NO: 409735 - DNA, 1389 bp, Homo sapiens
ttgctttgctgttagcctgttggaccttcgagcctagctgctcgcacaggactcggccacctgcccttcctgcaccgactggccagctcaagaggtttggatatggaccttcttcaattcctggccttcctctttgtcctgcttttgtctgggatgggagccacaggcaccttgaggacctccctggacccaagcctggagatctacaagaagatgtttgaggtgaagcggcgggagcagctgttggcactgaagaacctggcacagctgaacgacatccaccagcagtacaagatccttgatgtcatgctcaaggggctctttaaggtgctggaggactcccggacagtgctcaccgctgctgatgtgctcccagatgggcccttcccccaggacgagaagctgaaggatgctttctcccacgtggtggagaacacggccttcttcggcgatgtggtgctgcgcttcccgaggattgtgcactattactttgaccacaactccaactggaacctcctcatccgctggggtatcagtttctgcaaccagacaggcgtcttcaaccaggggccccactcgcccatcctcagcctgatggcccaggagctggggatcagtgagaaagactccaacttccagaacccatttaaaatcgaccgcacagagttcattcccagcactgaccctttccagaaggccctgagagaagaagagaaacgccgaaagaaagaggagaagcggaaggagatccgaaaaggcccaaggatctccagatcccagtctgagttatagccctggagcagctcagggctcagggggccacaaggaggcaggtcgggaggaagaagaggtggaggtgtggttgtggtggagagcaccagctagccccttccagaaggggaggccacatttgcccggccccctggagctgggtctgagccccagctgaagggactgagcctcagatggctggattttctctcaggggcctcctgctgaaggggccttcagaggattttatgctggaaatatgaccctgtgcagactgctgggggaggcaggaggatgcctgcctggaccctgttggtggctgaagacctctggccagctggcttccgcccttggtggggaagcagcagaactaggttctgagccacgggtcagggtgccaccctgctgctggccccactgtgtcacagagctgcctggcacaggtcccagcccctctgcagagacacaataaaagccagcagaccctttggaccgaccaaggctggtggggacactgtgaggggaccagggcccctcagggatgtagaaacagcttggaggatgcctctgccccaccaggaggggccccaggccctggcagggcagagaaggaagggg

SEQ ID NO: 409736 - DNA, 1339 bp, Homo sapiens
ttgctttgctgttagcctgttggaccttcgagcctagctgctcgcacaggactcggccacctgcccttcctgcaccgactggccaggagttcagagcctcatgctgagccaggaggagctccgggtgacgcatacggcaggatcgggattgagaggctgaaaaactcaagaggtttggatatggaccttcttcaattcctggccttcctctttgtcctgcttttgtctgggatgggagccacaggcaccttgaggacctccctggacccaagcctggagatctacaagaagatgtttgaggtgaagcggcgggagcagctgttggcactgaagaacctggcacagctgaacgacatccaccagcagtacaagatccttgatgtcatgctcaaggggctctttaaggtgctggaggactcccggacagtgctcaccgctgctgatgtgctcccagatgggcccttcccccaggacgagaagctgaaggatgctttctcccacgtggtggagaacacggccttcttcggcgatgtggtgctgcgcttcccgaggattgtgcactattactttgaccacaactccaactggaacctcctcatccgctggggtatcagtttctgcaaccagacaggcgtcttcaaccaggggccccactcgcccatcctcagcctgatggcccaggagctggggatcagtgagaaagactccaacttccagaacccatttaaaatcgaccgcacagagttcattcccagcactgaccctttccagaaggccctgagagaagaagagaaacgccgaaagaaagaggagaagcggaaggagatccgaaaaggcccaaggatctccagatcccagtctgagttatagccctggagcagctcagggctcagggggccacaaggaggcaggtcgggaggaagaagaggtggaggtgtggttgtggtggagagcaccagctagccccttccagaaggggaggccacatttgcccggccccctggagctgggtctgagccccagctgaagggactgagcctcagatggctggattttctctcaggggcctcctgctgaaggggccttcagaggattttatgctggaaatatgaccctgtgcagactgctgggggaggcaggaggatgcctgcctggaccctgttggtggctgaagacctctggccagctggcttccgcccttggtggggaagcagcagaactaggttctgagccacgggtcagggtgccaccctgctgctggccccactgtgtcacagagctgcctggcacaggtcccagcccctctgcagagacacaataaaagccagcagaccctttg

SEQ ID NO: 409737 - DNA, 485 bp, Homo sapiens
gggtcagggagaaacactgtgtgatggtttttgagccaggccttgaaaggaaagaaactcctagaggagggtgaggggcatcctgggcagagagggtgcagcgcgagcagagaggtggaggctctggaacagtagaatgcttgtggagacggcaggaagaccacagcaaagggaaggcaggagccaggtctggaggcttggtttcaggcttctgggtgtggagcgccatgggaactggatgaatagtgcgttgcaggtccatgcacttgtcagtttgttcatttcctggaggcttctagccctgggtgtccatggcccttgcagatacttgctggtcaggaatgagccttctgaggcaagactgctggattgtccaggcagggctattgatgccagccccttaacttaattctgcccagacaagaagatgtttgaggtgaagcggcgggagcagctgttggcactgaagaacctggcacagctga

SEQ ID NO: 409738 - DNA, 432 bp, Homo sapiens
gtgatatctcattagaacagcggcttaatttcaatattgaagctgctctccaaacaatgaagaaaagcagaaatctctacattttctatttctcaaccactcccagtgctcatttataggaattacccctaaattttcccagttaacctttcagggaaacacaaacccacagccacagaaaactttcgtctctctacacttatactctcttacttatactcactgcctctacacagtcatattcactctctacacactcctctcttttcccaagaaagagctctgttacaggcagaggagaaaatggagtgccctaggatacacaatggggccactgtactaaaaggtggagcttttagtagaagtagaggtattataaatagaactgaagaggggaagcttttctccctccaatctctatgatctttattc

SEQ ID NO: 409739 - DNA, 490 bp, Homo sapiens
ccaggtgggaccagccgtgggggcagaggcactgggccgactgtgatggggtgtcagagatgggacagggacagtgggcaggagtgtgggtgcatgggcacgtcggcagggtcccctcaccttccccctggagccctttctccctgagatcccctccctccagggcctccccctgccacacgctggagagggctgaggcctgtgggtgtgtgtccacagtcttctggaagtactactatgggcattacttggacgactatcacacaaaaaggacttcatcccttgtcagcctgtcaggcctcggcgccagcctcaacgccagcctccacactgccctcaacgccacttctgcccagggtgggtgggactgagcaggatggattttcttttgataaaagagtcgatgcctgaaagagaaaccatttccttgattgtgtaaggaacttgctggacgcacattagagaataaagctcctgtttctaggctcct

SEQ ID NO: 409740 - DNA, 3093 bp, Homo sapiens
ctttctccctagggtggcgtgggttgcatccctcggaagagcgaaggaatgagccaggtcggggggcggggagacaggtgcacacaggaggtccagggcttggtccatggggctggtgacctttctgcttcccttgcagaaaactctcccaccatgtcgcagaatggatacttcgaggattcaagctactacaagtgtgacacagatgacaccttcgaagcccgagaggagatcctgggggatgaggccttcgacactgccaactcctccatcgtgtctggcgagagtatccgtttttttgtcaatgtcaaccttgagatgcaggccaccaacactgagaatgaagcgacttccggtggctgtgtgctcctgcacacctcccgaaagtacctgaagttaaagaacttcaaggaagagatccgtgcgcaccgcgacctagatggcttcctggcgcaggccagcatcgtcctgaacgagacggccacctccctggataacgtgctgcggaccatgcttcgccgcttcgccagggaccctgacaacaatgagcccaactgcaacctggacctgctcatggccatgctcttcaccgatgccggggcacccatgcggggtaaagtccacctgctgtcagataccatccaaggggtcaccgccacagtgacaggggtgcggtaccagcagtcgtggctctgcatcatctgtaccatgaaggccctacagaagcggcacgtgtgcatcagccgcctggttcgcccacagaactggggggagaattcctgtgaggttcggttcgtcatcctggtgctggccccacccaagatgaaaagcactaagactgcgatggaggtggcgcgcacgtttgccaccatgttctcggatatcgccttccgccagaagctcctggagacccgcacagaggaggaattcaaggaggccttggtgcatcagagacagctgctcaccatggtgagccacggtccagtggcgccgagaacgaaggaacgcagcacagtctccctccctgcccacagacacccagagcccccaaagtgcaaggactttgtcccttttgggaagggcatccgggaggacatcgcacgcaggttccccttgtaccccttggacttcactgatggcattattgggaaaaacaaggctgtgggcaaatacatcaccaccaccctgttcctctacttcgcctgcctcctgcccaccatcgctttcgggtctctcaatgacgagaacacagacggggccatcgacgtgcagaagaccatagccgggcagagcatcgggggcctgctctacgcgctcttctctgggcagccattggtgattctgctgaccaccgcgcccctggcgctctacatccaggtgattcgtgtcatctgtgatgactatgacctggacttcaactccttctacgcatggacgggcctgtggaatagtttcttccttgcgctttatgcctttttcaacctcagcctggtcatgagtctcttcaagaggtcgacggaggagatcatcgccctcttcatttccatcacgtttgtgctggatgccgtcaagggcacggttaaaatcttctggaagtactactatgggcattacttggacgactatcacacaaaaaggacttcatcccttgtcagcctgtcaggcctcggcgccagcctcaacgccagcctccacactgccctcaacgccagcttcctcgccagccccacggagctgccctcggccacacactcaggccaggcgaccgccgtgctcagcctcctcatcatgctgggcacgctctggctgggctacaccctctaccaattcaagaagagcccctacctgcacccctgcgtgcgagagatcctgtccgactgcgccctgcccatcgcggtgctcgccttctccctcatcagctcccatggcttccgggaaatcgagatgagcaagttccgctacaaccccagcgagagcccctttgcgatggcgcagatccagtcgctgtccctgagggccgtcagcggtgccatgggcctcggcttcctgctgtccatgctcttcttcatcgagcagaacttggtggccgccttggtgaatgcaccggagaacaggctggtgaagggcactgcctaccactgggacctcctgctcctcgccatcatcaacacagggctgtctctgtttgggctgccttggatccatgccgcctacccccactccccgctgcacgtgcgagccctggccttagtggaggagcgtgtggagaacggacacatctatgacacgattgtgaacgtgaaggagacgcggctgacctcgctgggcgccagcgtcctggtgggcctgtccctgttgctgctgccggtcccgcttcagtggatccccaagcccgtgctctatggcctcttcctctacatcgcgctcacctccctcgatggcaaccagctcgtccagcgcgtggccctgctgctcaaggagcagactgcgtaccccccgacacactacatccggagggtgccccagaggaagatccactacttcacgggcctgcaggtgcttcagctgctgctgctgtgtgccttcggcatgagctccctgccctacatgaagatgatctttcccctcatcatgatcgccatgatccccatccgctatatcctgctgccccgaatcattgaagccaagtacttggatgtcatggacgctgagcacaggccttgactggcagaccctgcccacgccccattcgccagccctccacgtcctcccaggctggctctggagctgtgaggggaggtgtaggtgtgtgggtgactgctctgtgctgcgccttctcatggctgactcaggcctggggcatctgggcattgtaggggtgcagtggtatgtgcccacccctctcccattatcctttagctttaggccaagagcgttgctcagggcagcttctgcccagggtgggtgggactgagcaggatggattttcttttgataaaagagtcgatgcctgaaagagaaaccatttccttgattgtgtaaggaacttgctggacgcacattagagaataaagctcctgtttctaggctcct

SEQ ID NO: 409741 - DNA, 602 bp, Homo sapiens
gtcgccgagtttggggtccagaagcgccggagcgccgcgtgaggagcccggccgtgagtgcgcgagtgtgccatggccgcggccaccaggcgcgtgttccatctgcagccgtgcggtgggtgcctgaacccgggggcgcggcgggaaggccgcccgggtctccgccaccgtctcccgtcggggaccccggggagaacgcggatgccgtctgcctgcgcgggccggggccggtgggcgagagggctgcgggattcccagccgcggggaggagggcgcgggtgcgggaggcccgggcgcggcttcgcggccaccgcgcgcttggtttcattagggctctgctgtcgccgtcttgaatttcttaccaggtttgaacagctgatgcagcgggtcgagggcggggagctcgaaagtgggcagggcggagctgtggggctcccagcgccccgagcgccgagcttttgggagcctggcgggccgccgcctcggaaggtctcattttaccttccgcccgggcatcttcccgtccggcgccgcggtgggagccccggaacccctggagttttgggagtcccgggacccctgaccgtgccctgcgcggccgc

SEQ ID NO: 409742 - DNA, 3479 bp, Homo sapiens
gtcgccgagtttggggtccagaagcgccggagcgccgcgtgaggagcccggccgtgagtgcgcgagtgtgccatggccgcggccaccaggcgcgtgttccatctgcagccgtgcgaaaactctcccaccatgtcgcagaatggatacttcgaggattcaagctactacaagtgtgacacagatgacaccttcgaagcccgagaggagatcctgggggatgaggccttcgacactgccaactcctccatcgtgtctggcgagagtatccgtttttttgtcaatgtcaaccttgagatgcaggccaccaacactgagaatgaagcgacttccggtggctgtgtgctcctgcacacctcccgaaagtacctgaagttaaagaacttcaaggaagagatccgtgcgcaccgcgacctagatggcttcctggcgcaggccagcatcgtcctgaacgagacggccacctccctggataacgtgctgcggaccatgcttcgccgcttcgccagggaccctgacaacaatgagcccaactgcaacctggacctgctcatggccatgctcttcaccgatgccggggcacccatgcggggtaaagtccacctgctgtcagataccatccaaggggtcaccgccacagtgacaggggtgcggtaccagcagtcgtggctctgcatcatctgtaccatgaaggccctacagaagcggcacgtgtgcatcagccgcctggttcgcccacagaactggggggagaattcctgtgaggttcggttcgtcatcctggtgctggccccacccaagatgaaaagcactaagactgcgatggaggtggcgcgcacgtttgccaccatgttctcggatatcgccttccgccagaagctcctggagacccgcacagaggaggaattcaaggaggccttggtgcatcagagacagctgctcaccatggtgagccacggtccagtggcgccgagaacgaaggaacgcagcacagtctccctccctgcccacagacacccagagcccccaaagtgcaaggactttgtcccttttgggaagggcatccgggaggacatcgcacgcaggttccccttgtaccccttggacttcactgatggcattattgggaaaaacaaggctgtgggcaaatacatcaccaccaccctgttcctctacttcgcctgcctcctgcccaccatcgctttcgggtctctcaatgacgagaacacagacggggccatcgacgtgcagaagaccatagccgggcagagcatcgggggcctgctctacgcgctcttctctgggcagccattggtgattctgctgaccaccgcgcccctggcgctctacatccaggtgattcgtgtcatctgtgatgactatgacctggacttcaactccttctacgcatggacgggcctgtggaatagtttcttccttgcgctttatgcctttttcaacctcagcctggtcatgagtctcttcaagaggtcgacggaggagatcatcgccctcttcatttccatcacgtttgtgctggatgccgtcaagggcacggttaaaatcttctggaagtactactatgggcattacttggacgactatcacacaaaaaggacttcatcccttgtcagcctgtcaggcctcggcgccagcctcaacgccagcctccacactgccctcaacgccagcttcctcgccagccccacggagctgccctcggccacacactcaggccaggcgaccgccgtgctcagcctcctcatcatgctgggcacgctctggctgggctacaccctctaccaattcaagaagagcccctacctgcacccctgcgtgcgagagatcctgtccgactgcgccctgcccatcgcggtgctcgccttctccctcatcagctcccatggcttccgggaaatcgagatgagcaagttccgctacaaccccagcgagagcccctttgcgatggcgcagatccagtcgctgtccctgagggccgtcagcggtgccatgggcctcggcttcctgctgtccatgctcttcttcatcgagcagaacttggtggccgccttggtgaatgcaccggagaacaggctggtgaagggcactgcctaccactgggacctcctgctcctcgccatcatcaacacagggctgtctctgtttgggctgccttggatccatgccgcctacccccactccccgctgcacgtgcgagccctggccttagtggaggagcgtgtggagaacggacacatctatgacacgattgtgaacgtgaaggagacgcggctgacctcgctgggcgccagcgtcctggtgggcctgtccctgttgctgctgccggtcccgcttcagtggatccccaagcccgtgctctatggcctcttcctctacatcgcgctcacctccctcgatggcaaccagctcgtccagcgcgtggccctgctgctcaaggagcagactgcgtaccccccgacacactacatccggagggtgccccagaggaagatccactacttcacgggcctgcaggtgcttcagctgctgctgctgtgtgccttcggcatgagctccctgccctacatgaagatgatctttcccctcatcatgatcgccatgatccccatccgctatatcctgctgccccgaatcattgaagccaagtacttggatgtcatggacgctgagcacaggccttgactggcagaccctgcccacgccccattcgccagccctccacgtcctcccaggctggctctggagctgtgaggggaggtgtaggtgtgtgggtgactgctctgtgctgcgccttctcatggctgactcaggcctggggcatctgggcattgtaggggtgcagtggtatgtgcccacccctctcccattatcctttagctttaggccaagagcgttgctcagggcagcttctgcccagggtgggtgggactgagcaggatggattttcttttgataaaagagtcgatgcctgaaagagaaaccatttccttgattgtgtaaggaacttgctggacgcacattagagaataaagctcctgtttctaggctcctatgtgccacctgtgtccctgctactgccactccacccccactctggggaggggaagccctccctggggaagtggaatgcaagggacagagtttgtggagtgccacctgtggtctgtcacctccaacgtcgcacagtgggtgctggcccaacagtgaaacatggaagatccaggaggccttcgcatggccatttctccagggacctgcagggaaagcgttctgggaacagcatgtgcaagggtccagaggagcgagggcttggggccactgaggcgctgtggctggtgaagagcagtggggcgggagggaccatcagggtgacagcaaagggccctgtgactctcagatgaaagctgcctgccgggaggccgaggcttcgtgtggagcacttgtgaaccatcccatctgtt

SEQ ID NO: 409743 - DNA, 3638 bp, Homo sapiens
cttccaggcggccgggacgcggtcccaggactggagaccgttgcctgtcggcccccgtgtgacccggggcgcgtgacgggggtcgggggaactgcgcctgcaatgggcgtttatggcccccaggaccggtctgagagtgagaagagggatgtgcagagagatcccccgccttggcatccgaggagagagggggagaggcccgctcgggcccggtcccttcctctcgctgcagcggggcagggttttctcaggaaaacctggattagcgaacatgaaaactctcccaccatgtcgcagaatggatacttcgaggattcaagctactacaagtgtgacacagatgacaccttcgaagcccgagaggagatcctgggggatgaggccttcgacactgccaactcctccatcgtgtctggcgagagtatccgtttttttgtcaatgtcaaccttgagatgcaggccaccaacactgagaatgaagcgacttccggtggctgtgtgctcctgcacacctcccgaaagtacctgaagttaaagaacttcaaggaagagatccgtgcgcaccgcgacctagatggcttcctggcgcaggccagcatcgtcctgaacgagacggccacctccctggataacgtgctgcggaccatgcttcgccgcttcgccagggaccctgacaacaatgagcccaactgcaacctggacctgctcatggccatgctcttcaccgatgccggggcacccatgcggggtaaagtccacctgctgtcagataccatccaaggggtcaccgccacagtgacaggggtgcggtaccagcagtcgtggctctgcatcatctgtaccatgaaggccctacagaagcggcacgtgtgcatcagccgcctggttcgcccacagaactggggggagaattcctgtgaggttcggttcgtcatcctggtgctggccccacccaagatgaaaagcactaagactgcgatggaggtggcgcgcacgtttgccaccatgttctcggatatcgccttccgccagaagctcctggagacccgcacagaggaggaattcaaggaggccttggtgcatcagagacagctgctcaccatggtgagccacggtccagtggcgccgagaacgaaggaacgcagcacagtctccctccctgcccacagacacccagagcccccaaagtgcaaggactttgtcccttttgggaagggcatccgggaggacatcgcacgcaggttccccttgtaccccttggacttcactgatggcattattgggaaaaacaaggctgtgggcaaatacatcaccaccaccctgttcctctacttcgcctgcctcctgcccaccatcgctttcgggtctctcaatgacgagaacacagacggggccatcgacgtgcagaagaccatagccgggcagagcatcgggggcctgctctacgcgctcttctctgggcagccattggtgattctgctgaccaccgcgcccctggcgctctacatccaggtgattcgtgtcatctgtgatgactatgacctggacttcaactccttctacgcatggacgggcctgtggaatagtttcttccttgcgctttatgcctttttcaacctcagcctggtcatgagtctcttcaagaggtcgacggaggagatcatcgccctcttcatttccatcacgtttgtgctggatgccgtcaagggcacggttaaaatcttctggaagtactactatgggcattacttggacgactatcacacaaaaaggacttcatcccttgtcagcctgtcaggcctcggcgccagcctcaacgccagcctccacactgccctcaacgccagcttcctcgccagccccacggagctgccctcggccacacactcaggccaggcgaccgccgtgctcagcctcctcatcatgctgggcacgctctggctgggctacaccctctaccaattcaagaagagcccctacctgcacccctgcgtgcgagagatcctgtccgactgcgccctgcccatcgcggtgctcgccttctccctcatcagctcccatggcttccgggaaatcgagatgagcaagttccgctacaaccccagcgagagcccctttgcgatggcgcagatccagtcgctgtccctgagggccgtcagcggtgccatgggcctcggcttcctgctgtccatgctcttcttcatcgagcagaacttggtggccgccttggtgaatgcaccggagaacaggctggtgaagggcactgcctaccactgggacctcctgctcctcgccatcatcaacacagggctgtctctgtttgggctgccttggatccatgccgcctacccccactccccgctgcacgtgcgagccctggccttagtggaggagcgtgtggagaacggacacatctatgacacgattgtgaacgtgaaggagacgcggctgacctcgctgggcgccagcgtcctggtgggcctgtccctgttgctgctgccggtcccgcttcagtggatccccaagcccgtgctctatggcctcttcctctacatcgcgctcacctccctcgatggcaaccagctcgtccagcgcgtggccctgctgctcaaggagcagactgcgtaccccccgacacactacatccggagggtgccccagaggaagatccactacttcacgggcctgcaggtgcttcagctgctgctgctgtgtgccttcggcatgagctccctgccctacatgaagatgatctttcccctcatcatgatcgccatgatccccatccgctatatcctgctgccccgaatcattgaagccaagtacttggatgtcatggacgctgagcacaggccttgactggcagaccctgcccacgccccattcgccagccctccacgtcctcccaggctggctctggagctgtgaggggaggtgtaggtgtgtgggtgactgctctgtgctgcgccttctcatggctgactcaggcctggggcatctgggcattgtaggggtgcagtggtatgtgcccacccctctcccattatcctttagctttaggccaagagcgttgctcagggcagcttctgcccagggtgggtgggactgagcaggatggattttcttttgataaaagagtcgatgcctgaaagagaaaccatttccttgattgtgtaaggaacttgctggacgcacattagagaataaagctcctgtttctaggctcctatgtgccacctgtgtccctgctactgccactccacccccactctggggaggggaagccctccctggggaagtggaatgcaagggacagagtttgtggagtgccacctgtggtctgtcacctccaacgtcgcacagtgggtgctggcccaacagtgaaacatggaagatccaggaggccttcgcatggccatttctccagggacctgcagggaaagcgttctgggaacagcatgtgcaagggtccagaggagcgagggcttggggccactgaggcgctgtggctggtgaagagcagtggggcgggagggaccatcagggtgacagcaaagggccctgtgactctcagatgaaagctgcctgccgggaggccgaggcttcgtgtggagcacttgtgaaccatcccatctgtt

SEQ ID NO: 409744 - DNA, 194 bp, Homo sapiens
taacgggaacatatacaggtctcatttctaaggaacctgggccaggctgctgatcagtacttcagttttggggtgtttctcaaatgtttctttatcaatactgattgctaacttatctcccctcattctctggttactcctgttgttcttgagcaaggaccgtgtcattctgaataaaacctgttatttttagt

SEQ ID NO: 409745 - DNA, 398 bp, Homo sapiens
tttatctatggactgtggcacatgctgtcagagtcggtctttgacatagcacctaggaaagaagctgaatcagattaaacatactacccaaacattaggtcaattgaaaatggctagggaaaggggaagattcatcgtaaaaactaattgagtaaagctagggaggcccaataagttcaaagatttgaattcaaggtagaaagaagaagaaaaccctctagcagaaggcggccttaatggcccatagccttagatctggcatcatttagaaccacatggctggacatgtggctcaagcctgtaatcccaatactttgggaggctgaggtggacagatcacttgaggtcaggagtttgagaccagcctgaccaacatggtgaaaccctgtttctactgg

SEQ ID NO: 409746 - DNA, 773 bp, Homo sapiens
tggagtcttgctctgtactccagcctggacaacagagtgagaccctgtctcaaaaaaaaattaaatgttttgattatacaaggaaaatgaacattcatgtattaaagcttcatgttttatgaacaaaactgactttgcaggcaggagagcgttttctgggggcaccagaagcagggaacttcccttgtccgttggcttcagggctgcccactatccctccactatcttcccattgtagccctgtctggtgtcttttgtccctgacaaaacctacaaaaagtgactttaacacttcaggctgcatgcatttgaagagcaataagataacgttttttcgcttcccactaccagtggagatctgctggggtgggctgcatggaatctgaaatgatgtctaaatactgaagtgaacctctacactagagactgatatacagctgacccttaaacgacgcaggggtcagggataccgacccctgcggaattgaaaatgcttgtattacttttgactcccctaggtcttaactactaatagccaactgttgcccggaagccttatgaagttgcccggaagccttatgaattacataaactcccagtcgattaacacattttgtatgatatatgcatgatatatgcataatatatatgatatatgcattttgtatgatatatgcattatatatattttagtataagaactatacttgtactaaaacagaccagagaaagggtatcaggaaaattgtaagaggctcgttgacattacaccc

SEQ ID NO: 409747 - DNA, 426 bp, Homo sapiens
gtctagcgctagaggggaaagaggggccctcggaacacacaagatacaggccggttcaccaaggtaggagaaagaactggaagaggttaatagctcactaataacgaagagcatgccatttgtccttggtgcactcacaacactttttaggggtggcagcagccacataggtggctgacagggattctagtcctcttttctcaccataacattcccaggcttctttcctttgtcctctctagtttacaatctaaataggtgcttccaaccttgattttttaaaatcaaagccttaaacaacaacaaaaatcaccacacccagttttatgattgcctccataaaatagaccaggcacctttccatgatgccaggccaatgggcagggtgtgctagggtaatatgccactattatgccctcccttaaa

SEQ ID NO: 409748 - DNA, 739 bp, Homo sapiens
tatgtacaatctagagataatattaactatagataaaggataatcgataggattatatgcttatgagataatgcatatgagtagagataatgagtgatctgagattggacatataggtaatagataatatatgccctttatcaatcatacagattgaaggatgcttatggagctgtcttgcgtatatttgttccgtcagagcttagtataaaattcttagaaaatgaacttttttgcagcgaagattatgaataacaatcacttaaagcttttgttaacatgttgttgtttttttttcagaagggcaatactagtttgtttacctatccctcagttatacctgcatgtgacctggaacacgtggcagttcatggtttttcattatatttttattactgctgaatttttacatttttcaatgtagttactgaccctttactttttatattttataagctgtctgatcttctcattagcccatttttttcattaatgtgaaaatatgttttcaggatacagagctgcactgtacagtactaatgcatttggctcgtaaggcaactgaaacatggccagttctcactgggacatgctatgagtataaaatataccccagattttgtagacttagtaagaaaagaaagactgtaaaatatctcaatacctgttatgctgaatccctgtttaaatgataatattttggatatattgggttgaataaaatatattctttaatttt

SEQ ID NO: 409749 - DNA, 405 bp, Homo sapiens
cagcgattggtgaaatgggaagcctgccgccgtggtttgtggtttagggtcctctggagcagcgatttcaaaatcccagggctcagcttaggaatgctgctggggaaaagaaatagggacaatctctcttccactttggctgtagaaaacgaatacatttccacagaaagtgtgctagattaattggtcaattacaaacattcattaaaatatcaggtcctctcttttgcagtggaggatttgtgacagtggatatctgtgttccatattctactgctatctggatgtccgactttaatgccaaatgttatgagacaggacttggcacctcctagaagtgttcacatatactaaatgatctgctattatggaaataattaaatgacatgtttcttgctcgaaaga

SEQ ID NO: 409750 - DNA, 366 bp, Homo sapiens
cagttaacaacaacaacaagaaaaggctggagaaaacagcggtaagagcactatgagataaatatgaagactaaatatacagttaacaacaacaacaacaagaaaaggctggagaaaacagaggtcctgctggtcattgagagaaaaggtgtgcacacaggttgggcaataagagaatcaaacagttctccaccagccattaacaccagggtttgaaggtgaagaagctggcaaattgaaatgtcaacagacgcatataaaaccctaacaaaagcctctgtagccaatagaacaagaaaggagtagactagcaaggcagaaaacttttggaaaataactcttctgctatattcaatctgggaaaaa

SEQ ID NO: 409751 - DNA, 1003 bp, Homo sapiens
tcaaggaatttccagtatcttatagaaagagcagatacctacctccttaattaacccttttttatacttactggtgtacagacctgtctcttcttactattttatgagtttttggagggcagggaccaggtctgattctcctagcacagtatctggcgcatcatagctgctcagtgtgtgtttgttgagtggactacagaacctgagattatagtcaatctgttaatatcaatgccctgctcattacaactcacacacacacacaccctaacacaccctactggtcattctcagccaagagagcacatgatgcagggtaaagagaccaacagagacaccagatagttacagacatctctgaagcaacatgtccttaaaacaggatctgttttggcaccacaaggtaccccacagccctcagtgcctagaaataggataaatactgtaagctctatatctgtctttcaccacctcaggagcaacagcagttaggtgttcagatgtgaagtgtgaagagcaaaagtttcctctactgaagacagacagaaactcaaatgaaagctaaagatgctggctgtccccccaatagtgacacctagggtaacctggagaaatggtccacagagaatagtccatgatctgtacaaacatccagagagctgctttctcccatggcctcccacaggtctgactgccagagagtagaagcaagaggggtgaaaatagaggagtacctgctgtgctgtcatttcaggtctgctctggagaagaacatgggctaagaattatcttttatgatctgaaaaagctgtctgaagttccttccaagcttatcagcctcctaacctgagctttaacaaaacccggtatggtagagtcctagtgtgccaatccagctttccttacctggctgtgtgagtcacttaatatctttggacttaagattccttacctaaaaatgagggttgagacgtaggattcagtttaaaaaaaaaaagtatgt

SEQ ID NO: 409752 - DNA, 210 bp, Homo sapiens
aaaaaagaacacgatcctatgctacgtaggtgggaaatacaaaataaaattagaattctttctttacaaaatacgttcttatgagaatttgtttaaaaaacaaaaaagttatcaagtcagaaagtgatctatccacaaaggagatgtaaacacaacgttctgatgttttgggattctagaaaaggcattttttgttgtgtttacagtcgt

SEQ ID NO: 409753 - DNA, 269 bp, Homo sapiens
aaaccctctctactaaaaatacacagaattagctgggcatggtggcttgaacccaggagacggaggttgcagtgagccgagatcatgccattgcactccagcctgggcgacaaaagtgaaattccgtcttaaaaaaaaaacaaaggaagagagaattggctgaggttttctaatgaaaacatcagaacatcacgtgtactgagcacacagataaagataaactaacacttttgtcacattatagtgaaagtacagaacaaaaaaaaaaa

SEQ ID NO: 409754 - DNA, 289 bp, Homo sapiens
tttttatggatatagtagccctcattcactctagacctgtcctatgaattgtatggggaggctgggccctgggaagctttccctcggcttttagaatctcaacccccttgtggtcatccaagctttccaaaaaggaaagacatttcttttctttttgtttttctttcttttctttttttttgacatggtcttgctctgttgcccagactggagtgcagtggtgtgatcatagctcactgaaactttctgggctcaggtgatcctcccacctcagcctcccaagtagctg

SEQ ID NO: 409755 - DNA, 289 bp, Homo sapiens
ttcagattaggggttcttaaagaggttgtgatgatgacagagtcattcatcctgcttcttttggcaagaacaatattttaaaatatgtgctttggtggcaaaggcaaagctgacaagagagatagatgtggacactggagaaacaaaatagccctaacagtgagcacactgtggtcatttcaaatgcccagagtatactaaaagtatctgaacatgtaaattactcatatatacacaatgaaggcaaacatactgccttgttccaagtgggatgaaaaaaaattttaat

SEQ ID NO: 409756 - DNA, 1194 bp, Homo sapiens
ggtgatcccctcccccagctgcagtggtcccatgggcctggcccactgcccctgggtgctctggcccagggtggcaccctcagcatcccttcagtgcaggcccgggactctggctactacaactgcacagccaccaacaatgtgggcaaccctgccaagaagactgtcaacctgctggtgcgatccatgaagaacgctacattccagatcactcctgacgtgatcaaagagagtgagaacatccagctgggccaggacctgaagctatcgtgccacgtggatgcagtgccccaggagaaggtgacctaccagtggttcaagaatggcaagccggcacgcatgtccaagcggctgctggtgacccgcaatgatcctgagctgcccgcagtcaccagcagcctagagctcattgacctgcacttcagtgactatggcacctacctgtgcatggcttctttcccaggggcacccgtgcccgacctcagcgtcgaggtcaacatctcctctgagacagtgccgcccaccatcagtgtgcccaagggtagggccgtggtgaccgtgcgcgagggatcgcctgccgagctgcaatgcgaggtgcggggcaagccgcggccgccagtgctctggtcccgcgtggacaaggaggctgcactgctgccctcggggctgcccctggaggagactccggacgggaagctgcggctggagcgagtgagccgagacatgagcgggacctaccgctgccagacggcccgctataatggcttcaacgtgcgcccccgtgaggcccaggtgcagctgaacgtgcagttcccgccggaggtggagcccagttcccaggacgtgcgccaggcgctgggccggcccgtgctcctgcgctgctcgctgctgcgaggcagcccccagcgcatcgcctcggctgtgtggcgtttcaaagggcagctgctgccgccgccgcctgttgttcccgccgccgccgaggcgccggatcacgcggagctgcgcctcgacgccgtaactcgcgacagcagcggcagctacgagtgcagcgtctccaacgatgtgggctcggctgcctgcctcttccaggtctccgccaaagcctacagcccggagttttacttcgacacccccaaccccacccgcagccacaagctgtccaagaactactcctacgtgctgcagtggactcag

SEQ ID NO: 409757 - DNA, 1104 bp, Homo sapiens
ggtgatcccctcccccagctgcagtggtcccatgggcctggcccactgcccctgggtgctctggcccagggtggcaccctcagcatcccttcagtgcaggcccgggactctggctactacaactgcacagccaccaacaatgtgggcaaccctgccaagaagactgtcaacctgctggtgcgatccatgaagaacgctacattccagatcactcctgacgtgatcaaagagagtgagaacatccagctgggccaggacctgaagctatcgtgccacgtggatgcagtgccccaggagaaggtgacctaccagtggttcaagaatggcaagccggcacgcatgtccaagcggctgctggtgacccgcaatgatcctgagctgcccgcagtcaccagcagcctagagctcattgacctgcacttcagtgactatggcacctacctgtgcatggcttctttcccaggggcacccgtgcccgacctcagcgtcgaggtcaacatctcctctgagacagtgccgcccaccatcagtgtgcccaagggtagggccgtggtgaccgtgcgcgagggatcgcctgccgagctgcaatgcgaggtgcggggcaagccgcggccgccagtgctctggtcccgcgtggacaaggaggctgcactgctgccctcggggctgcccctggaggagactccggacgggaagctgcggctggagcgagtgagccgagacatgagcgggacctaccgctgccagacggcccgctataatggcttcaacgtgcgcccccgtgaggcccaggtgcagctgaacgtgcagtgtgagtccaccacgccacccggactaccttcccagctttccttctggctcccagccggcctgtcccctcttcatcctctcacccaccccagtccaaccaaaccccaccagctactcctgatacccctaatgctccttgacagccccatgctgtaggacacggaggtctgtgttctttgctccatttcatcaagtatctcccatcttcattttcagggacccggtgaacaaaaaaaaaattacttgattttgccaggtggaaatgggattttgaaggaggaggaaggacactca

SEQ ID NO: 409758 - DNA, 973 bp, Homo sapiens
  misc_feature (21)..(21): n is a, c, g, or t
  misc_feature (34)..(34): n is a, c, g, or t
  misc_feature (42)..(42): n is a, c, g, or t
aaacaaatacggggtcaatgngtaagcgaaggcnctcggcgngtgttttaaaaacttcggggcacggaaaggggagaaggtgacctaccagtggttcaagaatggcaagccggcacgcatgtccaagcggctgctggtgacccgcaatgatcctgagctgcccgcagtcaccagcagcctagagctcattgacctgcacttcagtgactatggcacctacctgtgcatggcttctttcccaggggcacccgtgcccgacctcagcgtcgaggtcaacatctcctctgagacagtgccgcccaccatcagtgtgcccaagggtagggccgtggtgaccgtgcgcgagggatcgcctgccgagctgcaatgcgaggtgcggggcaagccgcggccgccagtgctctggtcccgcgtggacaaggaggctgcactgctgccctcggggctgcccctggaggagactccggacgggaagctgcggctggagcgagtgagccgagacatgagcgggacctaccgctgccagacggcccgctataatggcttcaacgtgcgcccccgtgaggcccaggtgcagctgaacgtgcagttcccgccggaggtggagcccagttcccaggacgtgcgccaggcgctgggccggcccgtgctcctgcgctgctcgctgctgcgaggcagcccccagcgcatcgcctcggctgtgtggcgtttcaaagggcagctgctgccgccgccgcctgttgttcccgccgccgccgaggcgccggatcacgcggagctgcgcctcgacgccgtaactcgcgacagcagcggcagctacgagtgcagcgtctccaacgatgtgggctcggctgcctgcctcttccaggtctccgccaaagcctacagcccggagttttacttcgacacccccaaccccacccgcagccacaagctgtccaagaactactcctacgtgctgcagtggactcag

SEQ ID NO: 409759 - DNA, 444 bp, Homo sapiens
agcctgtgataacacactagggcaagagaagatgaagtctttaaataggccagggcccggagtaggacagaaggaccaagaatggatatatttagaaatgtttaagaggtggaatccctagtacttactagtgctggggaagaaggaatataggccaggctgacttcaggtctctttttgagttgggagacactgaggtggagacccaggagatggagaggatttggaaaagtgagttctgctttggaaatactgggggaccagtcggaagtctgggatgggagagagaggcttgcccctagcgggaggtaagcaggagccagaaggcagagcccagtggggagctctaactccgctcctacctctccgctgatcaccatcacccccacagtgccgcccaccatcagtgtgcccaagggtagggccgtggtgaccgtgcgcgag

SEQ ID NO: 409760 - DNA, 1209 bp, Homo sapiens
gacaaccactaaattactgccttcttccctcttttgtgtcttgcctttcttcctggtgcttcagcactaagggttttgctccctctccctgccctttcccctccacggactcaattttcttctgaatgggtggccattttaattaccttcccccttccccaccccacctctctgcccttgcccttgctgctgagaaaggcaggctcaggataactacctggggactgagaatgagccaggcttgctgttcacacggggacaaggaaagaagagacagagacatttggatcctatagtctctgcagtgaaagttttattggttggtacatggaggtctggttttaggaaggattcggaaatagagttttcatattatccaaaaccccctgaggcctcgtcccaattttcttaactgctcagtaccaaatgctttactggtttcagtatttacttccctgagcctgccaggaagagtaagctttacaagtgagaaaactgaggcatgaaatgcaaagcttactccagatcctgccatcattagttcgctgaacctggttgaatttttacagaaggtctgaagtagtctttttctcttttacatgtgcaaacacacaagcacttttagaaatactttttatttttcttatttcatcttgatgataactttgtgaaaaaggcaaggcaagaatttgcccattttataatgaaggaagccagagctcagagagtttgttcaacttttatgtggttaagccaggttcaaacctgtctgtcgcttttcagtgtcatttttaaagtctgtcagtcctgattttctcagaactggattatagtatgtcggtagcaacatagtatggggccaaaaaaaggttgacttgaaagacttcagaggcacactagatttgtgcatagaaaactttcagattggccgggcgcagtggctcatgcctgtaatcccagcactttgggaggccaaggtgggtggatcatttgaggtcaggagtttcagaccagcctgatcaacatggtgaaaccccgtctttactgaaaatacaaaaaaaatttgccgggcatcgtggcgcatgcccttagtcccaggtactcgggaggctgaggcaagagaatcacttgaacccaggaggtggaggtttcagtgagccgagattgcaccactgcactccagcctgggcgacagaatgagactgtctc

SEQ ID NO: 409761 - DNA, 198 bp, Homo sapiens
cttagcagtcagaattaatgattaaaatagaaatgctgaaaatagttgaaaccgaagcagattggatgatttattcaaaccttcaggaaaaattactattcaggccagaattgaaatttagacctgtggttcataaccaattagaatgcaactcttccctgatgctacccactcccccaccccacacaaaaaaggaaa

SEQ ID NO: 409762 - DNA, 381 bp, Homo sapiens
tgagacagagtcactgtatcccaggctggagtgcagtggcgcagtctctgctcactgcaacctccgcctcctatgttcaagcgattctaagttcttaacccatgtccaaggattccataagccacctgaattcacatgcaaaaaatcccaaattttgtttttgtggatgcatgtgcatttttctagggatagattagatattacaagatttccaagggcatctatgacccatgaaaagttaagaatttcactttcagctgggcacagtggctcgtgcctgtaatcctagcactttgggaggctaaggtgggaggattgcttgaggtcaggagtttgagaccagcctgggcaacacagggagatcctgtctctacaaaaaat

SEQ ID NO: 409763 - DNA, 814 bp, Homo sapiens
atcccttcatgtaccccacacatagtttccactattattaatatcttatatcagtatggtacatatgttaggaataatgaacaatactgattgtattatgattaactgaagtctatgcattatttcagtttccttagtttttatttaatatccttgttctgttccaggtcaccacattacatttagctgtcatgtctccttaggctcctcttagttgtgacagttccttagactttccttgtttttgatgactttgacagttttgagaggttactggacagatattgtaggagatatataaatatattgtaagtatattggaatttgatgatttgtcatgcttggactaagttagtgaatttttaggaggaagatgacaaaggcaaaatgatactttcatcttatcaagagcacatactgtctgcatgctttatgactgttgatgttgaccttgaccagctggctaaagtagtgtttgtcaagtttttcctctctacagttaatcccccaccctcctttctgtgctatactctacgtagccttctgcctttccatctttgtgggctgggatacagtcttagaggtcatagagataagaagggtagacactgctagacatcgcaagtggtggtggtagaagggtagcgcaaacaatttggactcatatccatttcttcactccaaaataaaatccacgtagatcaaatatatacataaaacccttaaatcatagaggtactagaataaaatataggacaattttctggtataagacctggtatgagacaggcctttctttgtatgacaagacact

SEQ ID NO: 409764 - DNA, 391 bp, Homo sapiens
actgttcttcaactttgaacattacacaaagccaaatacattttctaagtccagattcttttgtaaataatagtcatggagctaataatgaactagaattagtaacatgtctttcatcagatatgtttatgaaagataattcacagcctgtgcatttggaatcaacaattgcacatgaaatttatcagaaaattttaagtccagattctttcataaaagataattatggactaaatcaggatctagaatcagagtcagttaatcctattttatcccctaatcaatttttaaaagataacatggcatatatgtgtacatctcagcaaacatgtaaagtaccattatcaaatgaaaattctcaagtcccacagtctcctgaagattggagaaa

SEQ ID NO: 409765 - DNA, 260 bp, Homo sapiens
gtaactgcaaatttcacaaacagtattggagatgaagggtttaaaaagggaagagatgacagaaaagacagatggcagcgtcacagttgagtataaagagagatgagcatttgaggaaggtggtagacatggaaactaagattgtttctatggataggaagtagcagggtacttaaatatttgtttgactcagggtacttgaagaaagcgtgtgaagagagggttgtggactgagaatgtgatatcttcagtcaggactg

SEQ ID NO: 409766 - DNA, 378 bp, Homo sapiens
tgtataatagagagcaccttttatatggtatacatatgtgatacatacatacacacacacacacacacacacacacacacatatatatatatacatatgagagcattcgctcttgaggacaagttcatatgtagtcttctctgctcaagacaagataatgctttcatattagttagtgttaagctccaaaggaagaattatttcttaactagaaggtagaatatatttttgtaacttgttaagactgtatattgattcaggacaggcgctgtggcttatgcctgtaatcccaacactttgggaggcagagatgggaggattgcttgagtccagaagttcaagaccatcctaggcaacatagcaaatccccatctctta

SEQ ID NO: 409767 - DNA, 278 bp, Homo sapiens
gctgggacctaattaaactaaagagtttttccacggcaaaaagaacagtcagcagagtaaacagacaacccacagagcaggagaagaatcttcacaatctatatatctgacaaggactaatatccagaatctacaacaaactcaaacaaataagttaagaaaaactcaaacaggctgggcgcggtggctcatgcctgtaatcccagcactttgggaggccgaggtgggcaaatcatgaggtcaggagatggagaccatcctggctaagatggtgaaac

SEQ ID NO: 409768 - DNA, 209 bp, Homo sapiens
actctgtctcagaaaaagaagaaaagaaaaataaattaagaaaatcagtcttctttgtagagacataacataatccagacactctacaatgtatcattcacaacatccagaaaacaacctacaatgaaacaggaaacagggcccattctcaagaataaagaccaggaatggaggctgattctgagttgattaagatggtggattagcag

SEQ ID NO: 409769 - DNA, 255 bp, Homo sapiens
tttatttgtttgatttatcacagactaaagaagatgagttaaatagtcaactacagatgtaattctttctgaatttttcttccattttgtatagaaattgttttatgaattgtgttaatatttattgtattgctgaaaagtatttatgtctaagcttttcaattggatgtgcctaatttattgataaattcttcttgttgtcttctgtaatggtatatactttttgttcaaatatgtgtaaccattttaatagtt

SEQ ID NO: 409770 - DNA, 371 bp, Homo sapiens
tttttttgagtaagaagtttttaaattattagttcaatttatctttactagttatatatttactcaaagtttttatttctctttgagtcagttaccataatttatttctttctaagactttgtccatttcatctaagttatataacttgttgataaacacctccttaattttgatatctatattaaagtgtttagatcatctgttgggtatgttataactaaatgctattagaaaaacaatttattgtccgggcacggtggctcatgcctataatcccagcactttgggaggccgaggcgagcggatcacaaggtcaggagatcgagaccatcctggctaacacagcgaaaccccatctctactaaaaaaa

SEQ ID NO: 409771 - DNA, 444 bp, Homo sapiens
actcgcgaccgcgtcgacgtgcgtgtgtgtggagagtggctgtgaaagcgacacgggctctgggaagagaagtaaggaggactgctgggaaggaaacgaggttctcggatgagcaggggctgtgatatgaaagtgatcaagagatgggaccatctagttgcaagagaacaagctcagggctccccctgattctacatgatgtatttgtcttcactttcaaagagcgtaaagtgaaagaaaggaggaagtccacacccttgggtttgggggcatcggatccagtgtgcaatgtgagaagtaaaatgaagaggagaaatgatctagagagactttctgatgaagcaaacaccagatatcctagaatttcagcaaatctaagactccatcaagtgttagatgccccattattttatgtattattaataaagaaaaaaacactgccaa

SEQ ID NO: 409772 - DNA, 477 bp, Homo sapiens
atagaaacggtgtcttgctttgttgcccagcctggtcttgaactcttggcctcgagcaattgtcctgccttggcttcccaaagtactgggattacaggcatgagccgctgggcttggcatgaatttcttttatttctttttctttcctatcaccttggctagaacttccagtacagtgttgaatggaagtgatgagagtaaacatctttgttactgataagtagggagaattcatccaatctttcaccattaagtatgatgttatcagtaggtttttcataggtgtcctttatcttcttgaggaaattcccttctgttgctaatttttttaattatgaaaaggttttggatcttgtcaagtgctgtttctgtgtttattgagatgatcatgtgatttttattttattgatatatgatgtattgtaataattgatatttgcatattaaataaactttgcattcctagaataaatccca

SEQ ID NO: 409773 - DNA, 292 bp, Homo sapiens
tggaaatgattggtctgattggttatcacaaagactctgacatatttactttttcagatgttttatagtgataatttactttaaaactttccttatttaggctgggcgcggtggctcatgcctgtgatcccagcactttgggaggccgaggcgggcggatcacgagttcagcatatcgagaccatcctggctaacacggtgaaaccccgtctctactaaatatacaaaaaattagccagacgtggtggcaggcgcctgtagtcccagctacttggggtcgacgcaggagaat

SEQ ID NO: 409774 - DNA, 348 bp, Homo sapiens
acataatttctgtaatgatcatttttaatggctgcatcatagctaatgaaagtgataatttcttaagaataatttgccaagccattctttgattgtttaactgttaggctgcttttgatttttccatagatctataatgaacacctttgcattctagccttttctttccttagaattttgattattatatcaagtggtataaatgttttcatggttctgtagatgcattgccaaatcatttcttaaatggagagaaataatttacatgtttaatgcctctcagcactgatttaaattttgaaaataaatgcttaatggaataaaaaaatgatgttcttctcattaaaa

SEQ ID NO: 409775 - DNA, 183 bp, Homo sapiens
gtgaggatgtggagaaagtggaatgcttacacagtgttggtgggaatgtaaattggtacaacctctatgaaacacagtatggagatttatcaaagaaataaaaatagaactattatatgatccaacagtcctactgggattactactagatactgggtatctacttaaagagaagaaatcatt

SEQ ID NO: 409776 - DNA, 268 bp, Homo sapiens
tttgtttttagttagaggccataatattttaagtaggatttaaaattgtatgttatttatatggtcttctaggaatatacatattgataatcaactaattttttttttaaattttacagtcatgtgtggcataataacagtcaatgactgaccacctctaccacagcggtctcctgagattataatactgaatttttactgtgccttttctgtgtttagttagatacatttaggtacacaaataccattgtattacaattgcctacag

SEQ ID NO: 409777 - DNA, 425 bp, Homo sapiens
ttttttgagatggagtttcgctcttgttgcccaggctggagtgcaatggcgcgatctcagctcactgcaacctccgcctcccgggttcaagcgattctcctgtctcagtctcccgagaagctgggattacaggcacataccaccatgcccagctccccttcatgtcttaatgtcttcatctggggtatgaaagttgagctgcttttactcacaacacttctgtcaccaaaagtgtaggtgtttgccacaccaggcaagtctccagttctctgcatacactaaatgggtgtcctacaaatctattcaattcaattctgacactgtctacccagagtttgcctgagatcccaaaagtgaaggactcagtcccaccagactatccccagttcagatggcactcacaggtcccaggttgttactggtac

SEQ ID NO: 409778 - DNA, 286 bp, Homo sapiens
ccagatttttaaaaggtgtacagtacttggattgacatttctctaaaagaatatctgagtagccaacacacatatgaaaaaatgctcaatgtcactaatcggagaaatgccaatcaaaaccataatgagatatcactccccactggttgtcaaaacaacaacaaaaagataacaagtgttagcaaagatgtggagaaattggaatccttgtactctattgggagtgtaaaatggtgcagccactatagaaaacggtatggaggctcctcaaaaacattaaaaatag

SEQ ID NO: 409779 - DNA, 505 bp, Homo sapiens
aattttgagtccaagtttcagtcaaccagccaagtcaacagttagcaccactcaatttagctcacacactgaaattgccagtagaatgtaatctccatgaatgagagtctttgtgcctgaatttccaactgttgtattcccagcacgcacaacagtgtttgacacattaggcattttataaacattcgctggataaatgagtgaatgatcaatccctttaaaggttctctgaggctggttataaaattatagggagcaggtttggtgctagaattcatcagttaattgatcagctgagtttcagtattgaacagaatcatctccccttcagagttttgatttcaagttgctcccaccttcctggatgtaaaggcttgttctgcctttggcttttccagggtgagagagccctgttttcgtgttggttccccactttgtcaactgctgatcaactgtgttctccattctccacaccaattataaccaaagctttaacacgcggttg

SEQ ID NO: 409780 - DNA, 317 bp, Homo sapiens
cctggagcagatccttcctcccagcctcagaaggaactgaccctgcccacaccctgctcatgctcctgcatcttccagaagtgtgagaaaatacatttctgttattggagccactcagtctgtggtgtttgtcactgcagccccaggaaactttaataaaagtacaggctgagcattcttaaaccaaaaattccaaaatctgaaatactgcagagtatgaaacgttgagtgctgacaatgccacaggtgaaaacattcatatttgacctcaagtgacggattgcaggcaaaatacagtcagtcttcctttcatgcac

SEQ ID NO: 409781 - DNA, 304 bp, Homo sapiens
cagttctagtttacaaacataacatgcctttatagttctcagcgctccttaaatatgtggattggaattctaattcctttaaatttcatgttgagttctcagtttctctgcagctactatagctgctctgagttgatgtaattcaaagtctctttaaaagaagctagggcatttctctgttatgcaattccttctgttgcattggagaaacaccgagtaatgcagccacgttgggaaatgctgtcattcccaaatctaagtatcctttaatgggacctactgaaaaaagaagaagaagaagaag

SEQ ID NO: 409782 - DNA, 615 bp, Homo sapiens
tgcacctgtagtcccagctactcaggaggctgagatggaaggatcacttgagcccaggaggtcaaggctgcagtgagccaagatcttgccactgaactcccgctggggtgacagagcgagaccgccatctcaaaaccaaaaaaacaaaacaaatggaatcagcacaatagctgtagaaagatgctattagaaaggatggggggaaatggaaaataagtggcagataaagtacccatactaaaaagatgtttttagcttggttgaaaaataattgtcagtcctaccactgtgagttcaaagaacttaagaaaatacagaacttcaagcagagatatagaggattgggtaaaataaggcatggcaaagagaaaatataacatcagctggcagagcacacaggaaagtagtggaagagaaaactaaaattatcacaggattaaaagccacattggaaacagaataaaggctgggcacagtggttcactcctgtaatcccagctacttgggacactgaggcaggagacttacttgaacctgggaagaggaggttgcagtgagccgagatcatgtcactgtactccagcctgggtgatgaagtgagactgtcaaaaaaaa

SEQ ID NO: 409783 - DNA, 348 bp, Homo sapiens
tgcacctgtagtcccagctactcaggaggctgagatggaaggatcacttgagcccaggaggtcaaggctgcagtgagccaagatcttgccactgaactcccgctggggtgacagagcgagaccgccatctcaaaaccaaaaaaacaaaacaaatggaatcagcacaatagctgtagaaagatgctattagaaaggatggggggaaatggaaaataagtggcagataaagtacccatactaaaaagatgtttttagcttggttgaaaaataattgtcagtcctaccactgtgagttcaaagaacttaagaaaatacagaacattcttcttccccgccatcttattccct

SEQ ID NO: 409784 - DNA, 780 bp, Homo sapiens
ataaactggtcatcatttgattttgaaggatcttttaaattaccagatttagtattgaaacagatgatacaatttaaaaatgcaattgcaatgacagaaaaagtgtggctatgcatttatctggaagaactgaaagttacttggctctgagtacagcaccagaagccttgaggtgagagcatcccgtggggtggggtgggggcaaggtaaggggtgcagtaaggggtaggggtttgggggcaggatgcaccctccgggtaagcactgctcttctgatggggtccatcgggagctgcgccagcccagtctcctgcctcctgagttatttcccctcccatctgtgtccagtagcacctcaaggttccctatggcagaagcgagcattctcaggcgaggcttcacacttggggttctgcggcagaaatctgttttgaaacatgccgtgggaaagacaaacacatccctccgtgcacatcacagggagctcctccaccctgagccagcaaatatacaatcggctgaagaataatgaaaacatcttaaccacacattatgagctaactggcggccagggcactggcacactggcatccgcaggggccgttagaatggaaatgtggaagtgtgttccactgcaggaaaatcgctcttttcatgagcagtgtttgtgggtaaaggatgacaaggcttcacatcagctccctcctcctcaagctctaatggctgtggggcggctttgccactctgccagcagctggatgaccacgccgatccctgcca

SEQ ID NO: 409785 - DNA, 404 bp, Homo sapiens
  misc_feature (364)..(364): n is a, c, g, or t
  misc_feature (378)..(378): n is a, c, g, or t
  misc_feature (391)..(391): n is a, c, g, or t
ataaactggtcatcatttgattttgaaggatcttttaaattaccagatttagtattgaaacagatgatacaatttaaaaatgcaattgcaatgacagaaaaagtgtggctatgcatttatctggaagaactgaaagttacttggctctgagtacagcaccagaagccttgaggtgagagcatcccgtggggtggggtgggggcaaggtaaggggtgcagtaaggggtaggggtttgggggcaggatgcaccctccgggtaagcactgctcttctgatggggtccatcgggagctgcgccagcccagtctcctgcctcctgagttatttcccctcccatctgtgtccagtagcacctctattccnccttctcagaaagntcaggcttttgtntttttattgtttc

SEQ ID NO: 409786 - DNA, 456 bp, Homo sapiens
ttgaggtacctataaactatctttgaggagatgtctggcagggattggatataagagcgtgcagttcagggaagagcccatggctagaaacacacttttgggagttggggcactgtgatgagtttgcagatgaagacgtgaagggtgcctgggacaggggctccctcaccctaagtggagcagaggagcaggggccagcatggggcctgagaagagaggcctatgaggtgctgggactcaggagaaaggggcctgctggctcccttgccaacaggtcagatgagataagcagaagaggcaaaggagatcattccgtatggcagcatggaagtcatctgctgagtgaatgaatggaattctacctcattggttggtgcatctctttagaaatgaactcagtagaggctgggcacggtggctcatgcctgtaatcccagcactttgggaggccgaggc

SEQ ID NO: 409787 - DNA, 270 bp, Homo sapiens
tgatgagggtttgggatgagaagtcaccagcggtaacctcagaggtgtcagttggggccaaggaattcgccttctgttgagaagttcgtccttcctctttctcacatgataaactagcatatttaaatcaactagctcagatttggagtctttattttattttttaggaagtatttctgcttcacttagaaaagtgagatgctctgtgtctgtgacatgctgcctcactggagagtattttagagtcccttccaccccttgactgtcaaa

SEQ ID NO: 409788 - DNA, 658 bp, Homo sapiens
gaaaatggattctctaaatgacttgtttagttggttaccctcagggctaagttcattttttcgttctggtcttcaagtaattgttattataatcataagtacagtttccattttcctagttatcaaattactcatgattcgtgtttcagcttgcttgtgatcaatgactaaaactagaataataattgcttaaaaagttgccttaattgaaaataagtcacacaaccagaatcagaccactaagttatactttccttctgttgttcataattaggctttggcttctttcggcttatgaattaaacatttcccctctctgtggggcatgactctctaggaatgagacttcctagtgatgtgagatataactactctctaacaaatgcttcttccgtaatgctttcttcaaagatcttgaagaaaaggggaaaatgtgaaagaaaaggaatagtctgtctatttggggcttctaaaagcttaggttttgtggaagattgactttggagaccaagtcacagagcatgacctcttaatcttgactttttattatagattaatttcctttcttattttcttgtacctgactcagatggtacctgagatacaagactccttgactgagtctatataagtctccttgactgattcttgactgaga

SEQ ID NO: 409789 - DNA, 481 bp, Homo sapiens
tgacctcaggaggcctcggcctcccaaagtgctgggattacaggcatgagccgctgtgctggcctgatttttaagttttagaactcagtgagtcttcaaaccagtgcagatctgtcactataaaaagctgccaccaggcccactcacacctgtaatcttagaactttgggaggctgaggcgggattgcttgagcccagaagtttgagaccagcctggacaacatggtgagaccccatctcttgaaaaaaatttaaaaattagctactgtggccccagctactcggaaggttgaggcaggaagattgcttgagcccgggaggtcaaggctgcagtgagtcgtgtttgtgccattgcactcttgagtgggcaacagagcaagatcctgttcccaaaaaaaagctgccactggggccaggtgcagtgccactcgcctgtagttccagctacttgggaggctgaggcaagagacacaacctcttt

SEQ ID NO: 409790 - DNA, 386 bp, Homo sapiens
caggagtcatggttacagatgttttctgacgattctaaattttatgaattccccactagaaagtcttgttcactccccctgcttcctccctctctcctgaggggtaaaggcctgttcttggaggcaggccgacaatgacatgtttgtcaaggctatagctgcagaggctcataggaggagcccaggtcctctcaagatgcagtggccagagagttctggagtttaattagcaggacagcagctgtggagacttgggccgactgttggtgtcaaaggacatcctccctttaccccactctgtgccagtgtgcctcatatttctctctgggctacaactgttattaacgttcagattttggagataatggtcttaattaaactacttt

SEQ ID NO: 409791 - DNA, 470 bp, Homo sapiens
ttaaaggtcacctggcctttttctaccatgaagacttccaaagagtagttgttcacacccagcgcaggggtgcttctaagagtgagaatctggacagggcacccagaaagcaatggctaaaaatgcctcaatggtggagcactgtaggtccagccgagacacccagtaaactcacagggctttctgacagctcggggtaatcggttaggtcccagcttctttataagttcctgttgcctgaatctgtggacagtgtgtcccttccctaaaggtacagcccacagttagcaaacacagtaactgctaggtgaattaatcagtgcaaatgtcttaagccctgctggtgcagagtctccggggtgcagagcaggagaagtgatggcagccagggagaggttggactatgcaacttcccaggggcagaagtgaactctgccactcctgacaccagctctaggaaagacctgggt

SEQ ID NO: 409792 - DNA, 464 bp, Homo sapiens
aaaaacatcaaaaaaagaaaaagaggactcagaggagccttactcaagtttggtcaaggggtgagtgtgtccgactccaaggagcatctccgtttctgagtgggaactctcatgacactgtgtcccttgcctcaggcttgtcactgtctaaagaaaaacgctcctttcattccaacagctggcaggatctctgttttgccctaacaaagaagctagagccaaaattcaggatgaatcatcgttcttctctggcaaagtggctgtaggtcccaggtctatggaggctttcccagaatcttttagatactgttcatgaattctgatccaaaaggaacatttcatagtgcgggcaggatcacatattaggcagaaaacaattccaagcaaggagagttgctgggattattctgctctggtcgcaagctgtttctcccgccgcactgtatctgcttggtggagacaag

SEQ ID NO: 409793 - DNA, 460 bp, Homo sapiens
cagtggctccacttcctagcacttaactctaagacaggtatttatggtgccttgaccttccctaatatattgctacaaggtaacgtgggccagtcctgcagttctggtcatcccatggcccctccctgggcctgagcaaagaacaagaaaaaaccatcaagctggtcacgaggtttgcgatacaaatggcagtgagttgttttcaggaggcaaatgggcccccacagactaatggctttcagtggctccctccccctccctccctgagcttcccccgccccggtccagagctggcccagctgggaagctgcagttgctccagccacccccaccccccagcccttttgctgacagtataaccttcaggaacctgaaattcctgagtggtccccagagctccatgcatcttgaaagaaaatttgtgtaatgtcatttcaggctgtccctaatccagaattat

SEQ ID NO: 409794 - DNA, 518 bp, Homo sapiens
caaagtcaaggttgctgctttgaaaagacaaaattggtaaacctctgatgtgattgagaaagaaaagcacaaataatcaaagtcaggaatgaaaattgggaaatcacaacagattccatggcttatttagaagtatattttttaacttccaaacatgggaatttcctagttatatttttgttattgttgttacaaaacatggtccatgtgactgctgtcctttgaattgtgttgagatttgctttatggcccagcatgtgtttaaccttagtgaagatttgtgggcacttgaaaagaatgcatgttctgcagatgccgcatgcagtcatctacataaagccattagattgtaatacgttgttcatatcttctctgctcttaatgaagttttatttgcttctattaatgagacaattgttgagttatctctacttagatatagttctgtgaactttgctttatatatttgaggccacacaaatataaaattgttatatgaattgaaattttatgaagta

SEQ ID NO: 409795 - DNA, 400 bp, Homo sapiens
tgaggtgggaaggtggcttgagcccaggaggtcgaggctgcagtgagccttgtttgcatcaccgctgcactatggcctgggtgacagcgtgagaccctggctcaaaaacataaaataaaaagtttcgactgggcacagtggctcatgcctgtaatcctagcactttgggaggccgaggcaggtggatcatgaggtcaggagttcaagaccagcctggccaagatggtgaaaccccgtctccactaaaaatacaattagctgggcttgatggcgggcggctgtaattccatctacttgggaggctgaggcagagaattacttgaacccaggagatggaggttgcagtgagccgagatagtgccactgcactccagcctgggcaacagcgcgagactctgtc

SEQ ID NO: 409796 - DNA, 304 bp, Homo sapiens
ttttgtctttgtcgggctgcaaaagggctcagcaggaggagcctccagctgaggccagtaaccacacgttgggggttgagggctgcctcacgcttgcctttctggcctgggcagcctgctcactcacatggtacacatcttgtttcccctgtgttttcccagcaatattcagatgtgctggagattactgtaggaagggttggtgagagccagacttttaccatcttaaccatggctatttctggtgagtgtcccttaagatctcagaggataagtagtggtcctggggtgggcagggcaaagc

SEQ ID NO: 409797 - DNA, 350 bp, Homo sapiens
tagcatgagcaaaacagaataaaatccttgccttcatgtagcgtacattctagtggaagaggagacaatatataaataaatgcataataaaatatcacatagtataataataagtatcttgaagaaaaaaacaatgtaaaggaataaagccgtgtggacaactggagccctacctcatatcatatctttttttttttttttttgagatggagtctcgctctgtcacccaggctagagtgcagcggtgtgatcttggctcactgcaagctccgcctcccacgttcacaccattctcctgcctcagcctcctgagtagctgggactacaggcacccaccaccacacccggct

SEQ ID NO: 409798 - DNA, 478 bp, Homo sapiens
ggaaaacatggggctgaaaacagccctggaagtctggattcttagtggaagttgaaacagtctaaaacaaagtctctggctgtcctcagtttgcacttaagaagcagaacactcaacactgaaaagcaggatggcaagcaaaggtcttatatggcctccacactccggatggagacagtggggatcaggatgggctagtggctagagtctagtagaaatagaaaggggttcccaagagactccaggccccaacattgagcttttattgtgacttccagggctgtgtcccaaatgaccctttctgagaccctccacaaccagcctccagggaagcctgtgaaccagggagaagaaggctcactctactgagccactgccaagctttggagtcagcgtaactgagccccatcatcggcatcaatgttttatagctgtgggaactcaggcaagtcattcagcctctcagattcctcatcta

SEQ ID NO: 409799 - DNA, 352 bp, Homo sapiens
ctgtcttgcagatagttccagctggctggaaatatcctgtggaactgttagaatatggcccagggccgggtgcagtggctcatgcctgtaatcccagcgctttggaagaccaaggcaggcagatcacgaggttaggagatcaagaccatcctggctcacatggtgaaaccctgtctctactaagaatacaaaaagttagctgggcttgatggcacccacctgtagtcccagctactccagaggctgaggcaggagcattgcttgaacccaggaggtggaggttgcagtgagctgagatcgcgccactgcactccagcctcatgacagagcaagactccatcttggggaaaaa

SEQ ID NO: 409800 - DNA, 408 bp, Homo sapiens
gcatggtggcacatgcctgtaatcccagctactcaggaggctgaggcaggagaatcacttgaacctgggaggcggaggttgcagtgagccgagatcacgacactgcactccagcctgggtgacagagtaagtctcaaaaaaagaaaaaaaagcaggaattaagataacagtaatatctcattatgtacatatgtacaaaaaataatttttcaaaacaaaaaaaattattgaggagagtggcattgttctacattattttacaaatattttttgatttttcaattttaaattatgttaaaaaacataacataaaattaccatcttaaccattttttttttttttgagactgagtctcactctgtcgcccaggctggagtgcagtggtgcgatctcggctcactgcaagc

SEQ ID NO: 409801 - DNA, 347 bp, Homo sapiens
tggcatgaagcccagccgcggcagcacctctgctctgcgggatccgctatgtccataggatatttgcctcccagaatgaaagggagctcaaagtgacccaaattctcaaagaaaagtttccttgagctacagtgatcaaagtcactgacatttcaggaggttgaaattaaatagaaatttaattgaattaattaatttaaattgaatttaaaatgaaattaaaattgaatcagaagaatttaagcagaagagaactgttcagcagtaccacatggttaatcaggcactaaaagaagaaatcaaagggatgcatggattacagatatttacctctgtccccaaacgct

SEQ ID NO: 409802 - DNA, 174 bp, Homo sapiens
atctgtgcacttcagtttcctcttctataaaatgggatcaatactatcttctaggccaggtgaggtggttcacgcctgtaatcctagcactttggggggccaaggcgggtatattgcctgagctcaggagttcgagaccaccctgggcaacatggtgaaaccctgtctctacta

SEQ ID NO: 409803 - DNA, 724 bp, Homo sapiens
  misc_feature (81)..(81): n is a, c, g, or t
caagaaggcaattctgacacatgctacagcatggatgaaccttgaggacattatgctaagtgaaataagccggtcacaaanagacatgctgtacttttccacttgtatgagggacctagagaagtcaaattcgtagagacagaacgtagaacagtggttgccaggggctggggaaagtggaaggagagaggttgttttcaaagaaatgggacattggctttgaagaggtgacagatggaattatagaaaatgaggctgggtgtggtggctcgtgcctgtaatcccagcactttgggaggccaaggcaggcaggtggatcacctgaggtcaggagttcgagaccagcctggccaacacggtgaaaccccgtctctactaaaactacaaaaattagctgggcgtggtggcatgcgcctgtaatcccagctacttgggaggctgaggcaggagaattgcttgaacccaggaggtagaggtggcagtgagccaagcatctagccgctgcactccagcctgggtgacagagctagactccgtctcaaacaaacaaacacccctgtccttgctcagtcatctataatagctcttagttgcttatttaaaacaaaaatctttaaagcgcatcccaccctaggttacccagcccctactttcagtgcctctctgagctactgtgtctgtaaaatcaaggtattgtactctgccttgcatattggaataattt

SEQ ID NO: 409804 - DNA, 474 bp, Homo sapiens
ttgaaggcagggaaaaggcatgaacaaacacgaatgcacacatctcactgaagatgatgcacagttaatttttaaaaaatgctggtggataaatttcaagcaaattatgtgagtgaaaaaagcaatctcaaaagaagcatatagccaggtgtggtggcatgcgcctgtaatcccagctacttgggaggctgaggcaggagaattgcttgaacccaggaggtagaggtggcagtgagccaagcatctagccgctgcactccagcctgggtgacagagctagactccgtctcaaacaaacaaacacccctgtccttgctcagtcatctataatagctcttagttgcttatttaaaacaaaaatctttaaagcgcatcccaccctaggttacccagcccctactttcagtgcctctctgagctactgtgtctgtaaaatcaaggtattgtactctgccttgcatattggaataattt

SEQ ID NO: 409805 - DNA, 852 bp, Homo sapiens
aattatggcataacaaaattatcaatatggtagcaattttctgtattgattgcctgtatgcatacttatagtggacgagatttgccactgatgtaactcttttctttttttctatttataattttatgggtctgaatctaataaaacatttggacttgtattttgtatgacctttttaacttttatttttccagcagttcattttaattttactttttaaaagtgttggtccatgaaagattgtaattttgaagaaggaaagtggtttttcaccacacatagtctgggcgatctaggccaggcacaatgctcacatctgtaatcctagcactttgggaggccgaggtgggtggatcgcttgagcccaagagtttgagaccagcctgggcaacatggtgaaaccccgtctctgaaaaaagaaatacaaaataatttgcccggtgtggtggccacatacgtgtagtcccagctactcaggaagctgaggtgggaggatctcttgagcccaggaagccgaagccacagtgagctgtgattgcaccactgcactccagtctgggtgacaagagtgagaccccatctcaaaaaaaaaaaaaaaaaagataatctgggagatctgtcctatcgtagttctcatagtatccatcactgaccttattttactgatcatcttgctttattattagttatattcccttttaaccaaaagctctatgaagggcagagtccatgtttgtgtttgctgttacgtcttcagtatccagaacagtgttcgttacttaacacctattcagtagatattggtcgaaagaattaatggtacttttacatttttttcattgtgtgggaata

SEQ ID NO: 409806 - DNA, 398 bp, Homo sapiens
ggatgtggtaacatgatgagaaaatcattctagttgcaatatggagaatggatctgaaggggcctgggataccacttagcaggtcacagagagcaatccttctaaaaggcataaatgaactttcccgtcctcaacattctccacttgtgcgaaagtgaaatctaaactacttagctcaaaaaacagagtcctttctagcactcaataatgtttctagtcttttctaacgcttcctgatgtgcatcctgtgcctggccttgtgttcactgctacttgatcttgccacgctctgtttcttctatctgtactgtcctcttcatccccctttgtgaacctagggaacacctattttccagcaaaacacagctccttcatttcattccaccccagaaaaaaaa

SEQ ID NO: 409807 - DNA, 453 bp, Homo sapiens
ttgtgtggttcctggtgcctgtgctgagggtggagtcgctctccctgcccgattactctccctggctagcagctctccaccactggctcttcccagatctcctgggtgcgcggttctgagctgtcggcattgctttctttcagtcactgccggtgacatcaggtggaccctggtcagaaacattgattaaagccactgtcggtgataagcagttcagaattttcgctggggctccgaagcggcagtggttatagatagagaggtgttccactgcgcacctttgtagttgaatgtgattctttggcgatgccctgtctgtaggctcagctgctctggagccacgtggtgaagccgctgtcaggcagggccagggtcgagcagcacaggcaggagggtggccgctcggcccaagggtgccttgtgtggccttggagatgaggcctaaaaaaagaa

SEQ ID NO: 409808 - DNA, 119 bp, Homo sapiens
ttccttttttttattgagtatattttatggttccattttagttcagctattaccttactaactgttaactcttttttaaaggattattctaggatttgcaccttttatcacagtctacc

SEQ ID NO: 409809 - DNA, 439 bp, Homo sapiens
ggaacatttgtatgctcttctgaggttttgttcatcccccccacctcaacatctaatttacacgttgaattagtcattgactccgcctgccattttgtggtaaagatcaagtcaaatgaggctcatcacagtgcttcacaaaaggggccgggtgtggtggctcatgcctgtaatcccagcactttgggaggctgaggctggcggatcacctgaggtcaggagttcgagaccagactggccaacatagtgaaaccccgtctctactaaaaatacaaaaattagccgggcgtggtggtgggcgccggtaatcccagatacttgggaggttgaggcaggggaatcacttgaaccaggaggtggaggttgcagtgaatcaagattgtgccattgcactccagcctgggcaacaatagtgaaactccgtctcaaaaaaaaaaaa

SEQ ID NO: 409810 - DNA, 330 bp, Homo sapiens
atgtaaagaaagccatgggaaggatacagaaagccattatatagtcaatatatgtaatacagaaagccatttatatagtcagtatgtaaagaaaggcatgggaaggatacagaaaggcgagccctgagccctccagcttttcaaagtcagatggaagaggagtcagcaaaggctcagagttagacctggttgtcggttcttaacctctcagagccacagtttcttcacctgtaaaatggggatattaatacctggtttgcctatttcatagaagtgtggaaaaggcttaactgggatgcccactagaaataaaggttttgttattatgta

SEQ ID NO: 409811 - DNA, 130 bp, Homo sapiens
attacgttttctttaatagtgaaaatctagttcagaaaatttgacgttcactttttctttaaataaaaacatcactctttgaaagcatgacacattgaatacagtttaaaatatacaaattttataatat

SEQ ID NO: 409812 - DNA, 118 bp, Homo sapiens
ctaagactcagcagataaggatggaggcgactcaacatcacactgagacagatatgagccctgcatttctgaatgccttgaaagaaaaaccagcaagttgggagggccgtgtctcctt

SEQ ID NO: 409813 - DNA, 707 bp, Homo sapiens
tttttttttttagagagtcagggtcttgctctgccacccaggcaggaatgcagtgatgtgatcataactcactgcagcctcaacctcctgtgttcatgtaatcctcccatctcagcctcctgagtagctgggactacaggcatgtaccaccatgctcagctaatctttttatctttttttttttttcaggagatgaggtcttgctatgttgcctaggcttaattatttacttttaattaacctaaacttaaaaagctacatgttggtgacatcagccaaaaaaaaaaagtaaggacctctgaaaatcatcttcacaaaaagaatgaaaacatggacaaaaatagtcaaaatcagctttttcagaactttggaaattagccaaaagcttatacacatagcacttattcaagaaaaatagctgaatatcagcaagaacagttatcttcatggtgttttaatttgcgctgtacccatttgttgtcctccagctgtatggtagccttgaaaaccaacaggccacaatcacagtgaaaacctcaggttggcagccactggaggatacaaaatgagtttggatctccttcaatgccccattcccagagaactgtcattatttgacctgctggtagttccctaaaggacgtgcaaggatgtttttatttgactggacacttgaagcttgccctgtatgaacagcccccatcttc

SEQ ID NO: 409814 - DNA, 851 bp, Homo sapiens
cggccacgccttaccgaaaggagtcctgactcagagctgctgtgccgtcccttctcctgtccctgcctggaagaggcctatcaggttgaccaagctttgctcccacctgtggatgagaagggcaggtggccgagagtgggtgtggaggaggaagactggatgccaatgatcctgatctcactctgtcaccaaggctggagtgcagcagcagaatttcagctcactgcaacctcgacttgctgggttcaagggatctcccaagtagctgggactacaggtgcacaccatcatgcctggctaattttttgtagggatggggttttaccatgctgcccaggctggtcttgaacttctgagttcaagcgatcctccctcctgagcctcctaaagtgctgggattacaggtttaaaaaatatcctggactttggaaaatattcttatataaagaagcaaaaagaggatggaatagacttgtgctaacactgaaactccagtcaagttgtaaactgaaaaagaacgtgttgaaacaaggaattgccccatagccttcacaggtaatgctgatgcttcaagtcttggaaccacacttcgagaatcactgttataatgtacagcagaactgcatgatcagctgtatggtagccttgaaaaccaacaggccacaatcacagtgaaaacctcaggttggcagccactggaggatacaaaatgagtttggatctccttcaatgccccattcccagagaactgtcattatttgacctgctggtagttccctaaaggacgtgcaaggatgtttttatttgactggacacttgaagcttgccctgtatgaacagcccccatcttc

SEQ ID NO: 409815 - DNA, 287 bp, Homo sapiens
ctaagcgatgaaatccaaaggtgaatcttttggttggtgattttgatgatagccacaaagcaagcaggctgtatggtagccttgaaaaccaacaggccacaatcacagtgaaaacctcaggttggcagccactggaggatacaaaatgagtttggatctccttcaatgccccattcccagagaactgtcattatttgacctgctggtagttccctaaaggacgtgcaaggatgtttttatttgactggacacttgaagcttgccctgtatgaacagcccccatcttc

SEQ ID NO: 409816 - DNA, 730 bp, Homo sapiens
agcctcccaaagtgctgggattacagacgtgatccaccgcgcctggccagagcttgacagttggattgatgaaacctgagaatgtatgctttatatgttgttcattttaatttgttatatctagaaatttagctcttactgttgactataacacatacatgacgtgagtagaattttatctagattgagttttcagaccgtaattggtttcaagaaaataaataaggtattggaagtgaactaaaattagtaactggctttggcattagactttaatgcacttaaattacatgatctcatctgtgagataatttgacagaggaggacgatggcatgtattatgtccatatgaggaaagggcagagaaatagaccctgcaagattcattagtgttactccttcctcctgttcgttttctttcttcgttttccccccctggtaagcattaaaaaaaattttttttggctgggtgtggtggctcactcctgtactcccagcactttgggaggccatgactcacttgaggtcaggagtttgagaccagcctggccaacatggtgaaaccccgtctctactaaaaatacaaaaaattggccgggcacggtggctcacacctgtaatcccagcactttgggagtccaaggcgggtggatcacgaggtcaggagatcgagaccatcatggctaacatggtgaaaccctgtctctactaaaaatacaaaaaaaaaaaa

SEQ ID NO: 409817 - DNA, 295 bp, Homo sapiens
tccccataaagaaaaatgattattgcaaagattttgttttggtaagcattttcctgtaggattgtgctccaagagttactgtcagtttcactgttctttacttttccctagtaggagtatagcgaatgctacctggaacaggtgccaatgttatttgaaataaaaagtatgcaatttggtatctattcgcccaagctggaggtatcaggggactttaaaacagagatgggcatataagaaataacattgcttattacaaccagaaatgtacactacatacccctccagaaaaaaa

SEQ ID NO: 409818 - DNA, 303 bp, Homo sapiens
ggtgcgacggctgggcgtggtggctcatacctgtaatacgagcactttgggaggcagaggcaggtggattacttgaggccaggagttcgagcccagcccaaatatatcttttaaagcataatacactaaccccaaaactgaagtaatcacttaatgtcattttaacaaattcctagaaatcccagtttaaatgcatttttatgtggaaggcttccctattacctcccagcaaaattcgtagtctttctctatggagttagcaggaactatatataattttgcttctgtatttcgtcttggttt

SEQ ID NO: 409819 - DNA, 337 bp, Homo sapiens
gcacattgagaaaatagatcagcaagttttctaattgctcatatctaattacattcctgctgttgaactgttttgacatcctggaaaagggtgagtcacaaaagaggaaggaactacacttatgatccattgtaaacacttttgggtgtggtgatgtgtttgtgtgtatcctagaacaaattatctcatttaatgcatggaggctatcaggtaggtttttgttgttcattctaacctgtaaggtgaaatttcttgtggttgcttctaactgctagtattgaagatactcctgaaagaggaccaaaagtagtgaaggaatacttttgcattgtgagga

SEQ ID NO: 409820 - DNA, 360 bp, Homo sapiens
tggtagaggcagggtctcaccatcttgcccaggctggacttgaactcctgggctccagcaatcctcctaccttggcatcccaattgtagaatattcagacttagtaccagagagatttcaggacaagactttttggcctccttccatttggcaaccactcccttgtcttcttgtgcttgaggccagccgctagcggctgaaagtgggataacttgggaagacgtgacaattgctctgtcttaaattgtaggtagcaacaggcatcagtaatacatattttatccattttgcatgttttgtgtcttcataatatgttaagttttgttttctgaacatgataaccataattttaaacttcag

SEQ ID NO: 409821 - DNA, 395 bp, Homo sapiens
aagggcacagtatgattatttaaataaaattaaaatcctcaagttttccaggacacacgtttatccctctgaattcaaaaaagtttaaagaagtcttcccatatgcataccttactcaccaagaagtgatacttaattttttaaataagtaagtttcttcttcacaccattttggtgaagatggccacactctaaaacttggaaactcatgtgctgacacaaataaacccatttgtgcctggaaactcaagtcttttaaaaaacagaaaattgaaggcttaatatccaagatatataaggaactcacaccactcgatagcaaaataaataaataaataaataacctggttaaaaaatgatcaaaggcatgaacaggcatttttcccaagacaaca

SEQ ID NO: 409822 - DNA, 422 bp, Homo sapiens
tacaggcgtgagccaccgtgatcggcacatttttacataagcaatcagatatgcgtttgtctcagatgagcagagggtgactttctgtccagcacctgtgaagataagcttttccttgtgggcaaattgtgctttgtagctatcttatttaggaattaaaatgggaggcaggtttgcctgctggagttctcagcttgacttttcccttggcttagtgattttggggtcctgagatttattttcctttcacatttctgtagcctcaagatggcatatgaacttctgtacctcactgtggagcggggtctttgttctgaaggctgctatgtatacatatgaaataaatgtgtgtgatctttcttttaatgtctgttaattaatctgcctcatgtcagtgattttcagtgaacctccagggggcc

SEQ ID NO: 409823 - DNA, 410 bp, Homo sapiens
gggataattgtctttgcagtcagtgagattataaagatatttggatcacattattgaggagccatcatgtggtaaaagtagcagtctctccaaatttggaaatttctgagttgttgggtgatatgaaaggtaaaatttttacatctgatgttatcctgcgtctactacaaatattagcacattgcctcaccaagagcaaataaataagtcagcttcttaaaccataagtttcccagtgggcatattccattctactacaatttatatttttcatatggtttcagtgttctagtgtttactattcattaacatgaaacacagattttaaattgcctttttaaaaattatttctgctgctttgtggttttctttgttttgagggccatgttattcatggagttttcattgtt

SEQ ID NO: 409824 - DNA, 255 bp, Homo sapiens
gattgtctttttgcctatatatggatcacactttcttgttttttcagatgtctaatacattttggttgaaaagtggacattatagataacatgtagtagctttagaatctattgtgttctgaagattattagtcatttgttgtattaggcagttggaagttaactcacctggaatcaaattgcaaactttgtcttccctactattcaaatgctaatatctttgcctgtttttatagtctccagctgctgcttttt

SEQ ID NO: 409825 - DNA, 312 bp, Homo sapiens
aagatagggtctatctctgttgccaggctggagtgaagtggcacaatcatagctcattgcagcctttacctccctggctcaaatgattctcccacttcagcctcccagagttttaaaatgttttgagacttgttttgtgcatagcaaaggaaacaatccaacagagtaaagaaataaccttccttttgaatggtagacaatagttgcaaactatgcatctgacaagaaactaaaaaccagaatatacaaggaactcaaacaactcaacagttaaaacaaaacattcccattaaaaagtgggcaaaagacata

SEQ ID NO: 409826 - DNA, 160 bp, Homo sapiens
aatactatccctcttttacagaaaaggaaactgaagctcatggagaattaagtaatttaaagatcaaataacaagtaaatggtgagactggaatctctgctcttaatactcttaactcaagtcctaaactaatgagaatttgtgttgtaaaaaactcagg

SEQ ID NO: 409827 - DNA, 233 bp, Homo sapiens
gaattaaaggtgaagcccgcactcacctgcgtgggatgcagagccgctaccaccacgctctgcgtagctttggggaagactgtaatttcaattttagcttcgtgcttcccgctttccttatgtgtaatgagctcaccacatgcaatgtaataacaatagccaaattaaaaatgaatgacttggcccagcgcggtggctcatgcctgtaatcccagcattttgggaggccgagg

SEQ ID NO: 409828 - DNA, 767 bp, Homo sapiens
gtcccagctacttggggggtcaaggagattgaggctgcagaactacggacacatcactgtactccagattgtgtgacagaacaagaccctatctcagaaaaaaaaaaaaaagtagagcatatctatagagttgtagaaataaataaggtaaggtgtgttatatgcttataatagcacatgggacataggaaatcttcagtaaatgttagtcattattatcattaccattatttattggctatccagatattggagaaaactgaaatcgaccttaagactgatttgtgtaaagcacagtaagtattcagtgaatgtttattgggtaataaagacatgtcaagtgtatatggaggctttattgaatagattaccatttttcaaaaacaatgaaaggttttaaacagtttatttcagcacctcctcaatgaactggagctcaaagccttaccctagtgccctgtctggatgagtgacacatagccaaattatataataatgttaattatttgaggatattgtatataaacaaacatttagaagtcagtttgctgaccaagtacggaggcttatgcctgtaatcccagcactttgggagcccaggcgggtggatcacttgaggtcaggagtttgagacagcctggccaacatgttgaaaccccatctctactaaaaatacaaaaattagctgagtgtggtggcacgtgcctgtaatcccagctacttgggaggctgaggcaggagaatcgcgtcaacctgggaggtggagg

SEQ ID NO: 409829 - DNA, 863 bp, Homo sapiens
cagctacgtcagcctgaggtgtccttaggcagaacagaaagtgagaatcagagcagtatctcatttctgaacacctggattgtagctttccctggactgactgtcaaaggaggtggttttaaaaagcaagccaaacaggtttccgtcctttaggaagaccctggaacgtgccagttgattctgacaatttctcatgaacagaaacacctaggaagggagaactggtgagtcttttcaagaggaggaagtccctcaaaaggggctgtgtttcgcaaacggcgccccaaaagggctgaaatacttcgatctggaggaaaaagactcaggcactgagggaaggggagggtgcacatctggggtaatttcaaggctttttccgtgttatctgaggtggcaacaagtaaagatttgttcgttttattatttttttaatttttaaaggtgttcttttccccccttttccccctcccggccactccggtttgtgtttgccacaagactcataattcctttagaaagtggagtcgaattcataaaagtgatggggggagagcgcggagagggaaggctgggagccccagggagtcttcactacctacactgccgctcagctccaggcgcgagtggaggtcggtgtggggagacgcgactcctgcccgggatggctgacactctgcgagccccggcggcccgcggccgggccgggtgactaggcggagggcgcggagggtccgcggcgggcgggtggcgctgcagcagcctgggcacggctgccgccgcccgcgggcgagagtgtgcacgggtgtggaaggccggagtgcgggccgtgaggggtgtgcgcgcttgagccggagcggggctcg

SEQ ID NO: 409830 - DNA, 461 bp, Homo sapiens
cagctacgtcagcctgaggtgtccttaggcagaacagaaagtgagaatcagagcagtatctcatttctgaacacctggattgtagctttccctggactgactgtcaaaggaggtggttttaaaaagcaagccaaacaggtttccgtcctttaggaagaccctggaacgtgccagttgattctgacaatttctcatgaacagaaacacctaggaagggagaactggacttatttaatggggatgtgttcaaggcaagaccgaattcagaaggatatcgacgtcgtgatccagaagtccagagctgaggactgcctgtttgcagggcccgcctggcaggacgactgagcaagttcttggaaaaccagagatattagagcggtgaatcgcgctggtcacgttggacacctgcgcgttaggagattctggagccagagggagagaccccagaaacgccccggtcg

SEQ ID NO: 409831 - DNA, 604 bp, Homo sapiens
cagctacgtcagcctgaggtgtccttaggcagaacagaaagtgagaatcagagcagtatctcatttctgaacacctggattgtagctttccctggactgactgtcaaaggaggtggttttaaaaagcaagccaaacaggtttccgtcctttaggaagaccctggaacgtgccagttgattctgacaatttctcatgaacagaaacacctaggaagggagaactggacttatttaatggggatgtgttcaaggcaagaccgaattcagaaggatatcgacgtcgtgatccagaagtccagagctgaggactgcctgtttgcaggtgagttcttgcttttccagaacctcggaccccgcgcccccttcccagttctctgaccgcgacgtgtgtggctgggggtggggtggagggtttgcacgtccgcattccggggttcatttggcgacagtgtctgcaacgaacgcgggagcaaaagcgggagggggcgccactacgccccttcccctcaccccacccccaagtctggggcagctactagctttgagggcagaacccgcgtggcccgagcgggggtctaggcgaaggggcagtgcgtggtatttc

SEQ ID NO: 409832 - DNA, 488 bp, Homo sapiens
gttttggatgggatgcatgacatacaggtagctctcttttttaaaatataggtatctctttgcatatatatacacaacatgtcacaatattttatatatattacatagtatttacaacaaagccccttccatagtatttactatgtaatatatataaaatattgtgacatgttttggatgggatgcatgacatacaggtagctctcttttttaaaatataggtatctctttgcatatatatacacaaggaaagttgaattttcaggagagatcattctgatatcttgcaaatttgtattaaatgtatacagacttccaagtgtgctaattctttacctcctaaacttttagttgcaattgttttgcagtgtaaaattgtacatgtgttaataatcaaaaagtgttgcatttaatgttatttctgtaaactttgagctttgttaataaactattatgcagcatctacactttgaaaatcaagtacttca

SEQ ID NO: 409833 - DNA, 2540 bp, Homo sapiens
aaaaactactatggctgagaaggaggaaaaattacaaaaggaacaaaaggaattacaagatgtatggacagtctcttcgcacattcaacagcagcaagcaggtcatgccaaattcaccaagcacacaattagaagcctcacagcttcaacaaacaccttgcacacaacagccaaacaacgttctcaacacacacataatgcaaacagttcaatccactgtggcttcaccatcaaagcaactaaatgaaaatcagctagtgagaaagcaagatgtattgggaccttctactactccgcctgcacattccagcagcaacacaatcagaagtggaatttctcctaacctgaatgtggttgatggtagactgacttacccaacctgtgggattggttatcctgtctcctctgcatttgcattccagaataccttccctcattcgatatctgccaaaaataccagccaccctggttcaggaacaaaggttcagtttaatttgcagtttacaaaaccaaatgcatcactaggagatgttcagtcaggagcaactattagtatgccttgctcaactgataaggaaaatggtgaaaatgtagggttggaatccaaatacctgaagaaaagggaagatagcattcctttacgcggactcagccagaacctatttagtaattcagaccatcagagagatggcactttaggagcattacatacatcttccaaacccacagcgctcccctctgcgtcttcagcctatttccctgggcagttaccaaacagttaattctagtgtcatgttttactttttattggtattttagaaactcaggtgcttaaaaaatatgtcaacacaaaccagatcctcaaatagcaagtttcaaattttacttgagctgttaaagactggatactttaagtactgcttttatggcagtttataatataggaacaaatttgtacttggggattggtaaagattgtgagtaaatgacattttttggtttgtgaacatggcgttttatagaataatatgaattttattaagctattctttagaaattcagttctaaggaaagagttgatccttatgagggagattctgatcatattaaaaatctgggtaaactaaaacctgctcataacctcatagtatgcaaccaaagaatactaattcattttatcactttcattggtaaaacttttaaattcaacacctgaaaatcatgagggaaaatgattacctcttgagatatattattgatgacatttaaagggaaaagtcctaaatttaccttaaataactgaaatgaattaagccttcatagcgtattttccttgaagcatttaaatttgctagtgatgaatcaaataaatttgatatacttaaaataatttggacagtttttatgtgaccagattaagtgcttttgtcatttgagctgacaagtttttaaaacttcagtgcttcctaaatgtttatactcatctagtttttctcaattgtagttttattatgcagttaaatctgtatcagtggacttttaaaacttggtactactactaaatctactatatcatgaatattcatttatttttatagtatcagaacttgggttgatttcaatgttaataaactaggcaaaacaaataactgttagaaggtacaattttcttctcttccctgtaactgaaagttttaagaattgttccttggggaaaaatttttttaaaattcacctagaatcatagggcctcattttgttttcttattgacaaacaatacctggtagcattctctaaagagtcttctagatcaatttttataaagtactaatgctcatgtgataatttaaaattattttcaactactttattacacagatgaagaaacatttcaagatattgatgtaataacattactgagtcccatggtaagaaagaatctttgctaatttttttttttttttttacgaagccagtatcttgaaactattggcaattgcaagtgtctttaaactagggatctaatctgaaaattcagtaactaatattaggcagttgatactcccccacctcccccatttagatacactactgtattagtgagaatacttggtacagtaacttgaaagcacttgctattctggaaagaagcctcttggtgattttggaaggagctttattgtaaatactatggaaggggctttgttgtaaatactatgtaatatatataaaatattgtgacatgttttggatgggatgcatgacatacaggtagctctcttttttaaaatataggtatctctttgcatatatatacacaaggaaagttgaattttcaggagagatcattctgatatcttgcaaatttgtattaaatgtatacagacttccaagtgtgctaattctttacctcctaaacttttagttgcaattgttttgcagtgtaaaattgtacatgtgttaataatcaaaaagtgttgcatttaatgttatttctgtaaactttgagctttgttaataaactattatgcagcatcta

SEQ ID NO: 409834 - DNA, 2442 bp, Homo sapiens
aaaaactactatggctgagaaggaggaaaaattacaaaaggaacaaaaggaattacaagatgtatggacagtctcttcgcacattcaacagcagcaagcaggtcatgccaaattcaccaagcacacaattagaagcctcacagcttcaacaaacaccttgcacacaacagccaaacaacgttctcaacacacacataatgcaaacagttcaatccactgtggcttcaccatcaaagcaactaaatgaaaatcagctagtgagaaagcaagatgtattgggaccttctactactccgcctgcacattccagcagcaacacaatcagaagtggaatttctcctaacctgaatgtggttgatggtagactgacttacccaacctgtgggattggttatcctgtctcctctgcatttgcattccagaataccttccctcattcgatatctgccaaaaataccagccaccctggttcaggaacaaagtggtgaaaatgtagggttggaatccaaatacctgaagaaaagggaagatagcattcctttacgcggactcagccagaacctatttagtaattcagaccatcagagagatggcactttaggagcattacatacatcttccaaacccacagcgctcccctctgcgtcttcagcctatttccctgggcagttaccaaacagttaattctagtgtcatgttttactttttattggtattttagaaactcaggtgcttaaaaaatatgtcaacacaaaccagatcctcaaatagcaagtttcaaattttacttgagctgttaaagactggatactttaagtactgcttttatggcagtttataatataggaacaaatttgtacttggggattggtaaagattgtgagtaaatgacattttttggtttgtgaacatggcgttttatagaataatatgaattttattaagctattctttagaaattcagttctaaggaaagagttgatccttatgagggagattctgatcatattaaaaatctgggtaaactaaaacctgctcataacctcatagtatgcaaccaaagaatactaattcattttatcactttcattggtaaaacttttaaattcaacacctgaaaatcatgagggaaaatgattacctcttgagatatattattgatgacatttaaagggaaaagtcctaaatttaccttaaataactgaaatgaattaagccttcatagcgtattttccttgaagcatttaaatttgctagtgatgaatcaaataaatttgatatacttaaaataatttggacagtttttatgtgaccagattaagtgcttttgtcatttgagctgacaagtttttaaaacttcagtgcttcctaaatgtttatactcatctagtttttctcaattgtagttttattatgcagttaaatctgtatcagtggacttttaaaacttggtactactactaaatctactatatcatgaatattcatttatttttatagtatcagaacttgggttgatttcaatgttaataaactaggcaaaacaaataactgttagaaggtacaattttcttctcttccctgtaactgaaagttttaagaattgttccttggggaaaaatttttttaaaattcacctagaatcatagggcctcattttgttttcttattgacaaacaatacctggtagcattctctaaagagtcttctagatcaatttttataaagtactaatgctcatgtgataatttaaaattattttcaactactttattacacagatgaagaaacatttcaagatattgatgtaataacattactgagtcccatggtaagaaagaatctttgctaatttttttttttttttttacgaagccagtatcttgaaactattggcaattgcaagtgtctttaaactagggatctaatctgaaaattcagtaactaatattaggcagttgatactcccccacctcccccatttagatacactactgtattagtgagaatacttggtacagtaacttgaaagcacttgctattctggaaagaagcctcttggtgattttggaaggagctttattgtaaatactatggaaggggctttgttgtaaatactatgtaatatatataaaatattgtgacatgttttggatgggatgcatgacatacaggtagctctcttttttaaaatataggtatctctttgcatatatatacacaaggaaagttgaattttcaggagagatcattctgatatcttgcaaatttgtattaaatgtatacagacttccaagtgtgctaattctttacctcctaaacttttagttgcaattgttttgcagtgtaaaattgtacatgtgttaataatcaaaaagtgttgcatttaatgttatttctgtaaactttgagctttgttaataaactattatgcagcatcta

SEQ ID NO: 409835 - DNA, 2893 bp, Homo sapiens
  misc_feature (2692)..(2692): n is a, c, g, or t
aaaaactactatggctgagaaggaggaaaaattacaaaaggaacaaaaggaattacaagatgtatggacagtctcttcgcacattcaacagcagcaagcaggtcatgccaaattcaccaagcacacaattagaagcctcacagcttcaacaaacaccttgcacacaacagccaaacaacgttctcaacacacacataatgcaaacagttcaatccactgtggcttcaccatcaaagcaactaaatgaaaatcagctagtgagaaagcaagatgtattgggaccttctactactccgcctgcacattccagcagcaacacaatcagaagtggaatttctcctaacctgaatgtggttgatggtagactgacttacccaacctgtgggattggttatcctgtctcctctgcatttgcattccagaataccttccctcattcgatatctgccaaaaataccagccaccctggttcaggaacaaagtggtgaaaatgtagggttggaatccaaatacctgaagaaaagggaagatagcattcctttacgcggactcagccagaacctatttagtaattcagaccatcagagagatggcactttaggagcattacatacatcttccaaacccacagcgctcccctctgcgtcttcagcctatttccctgggcagttaccaaacagttaattctagtgtcatgttttactttttattggtattttagaaactcaggtgcttaaaaaatatgtcaacacaaaccagatcctcaaatagcaagtttcaaattttacttgagctgttaaagactggatactttaagtactgcttttatggcagtttataatataggaacaaatttgtacttggggattggtaaagattgtgagtaaatgacattttttggtttgtgaacatggcgttttatagaataatatgaattttattaagctattctttagaaattcagttctaaggaaagagttgatccttatgagggagattctgatcatattaaaaatctgggtaaactaaaacctgctcataacctcatagtatgcaaccaaagaatactaattcattttatcactttcattggtaaaacttttaaattcaacacctgaaaatcatgagggaaaatgattacctcttgagatatattattgatgacatttaaagggaaaagtcctaaatttaccttaaataactgaaatgaattaagccttcatagcgtattttccttgaagcatttaaatttgctagtgatgaatcaaataaatttgatatacttaaaataatttggacagtttttatgtgaccagattaagtgcttttgtcatttgagctgacaagtttttaaaacttcagtgcttcctaaatgtttatactcatctagtttttctcaattgtagttttattatgcagttaaatctgtatcagtggacttttaaaacttggtactactactaaatctactatatcatgaatattcatttatttttatagtatcagaacttgggttgatttcaatgttaataaactaggcaaaacaaataactgttagaaggtacaattttcttctcttccctgtaactgaaagttttaagaattgttccttggggaaaaatttttttaaaattcacctagaatcatagggcctcattttgttttcttattgacaaacaatacctggtagcattctctaaagagtcttctagatcaatttttataaagtactaatgctcatgtgataatttaaaattattttcaactactttattacacagatgaagaaacatttcaagatattgatgtaataacattactgagtcccatggtaagaaagaatctttgctaatttttttttttttttttacgaagccagtatcttgaaactattggcaattgcaagtgtctttaaactagggatctaatctgaaaattcagtaactaatattaggcagttgatactcccccacctcccccatttagatacactactgtattagtgagaatacttggtacagtaacttgaaagcacttgctattctggaaagaagcctcttggtgattttggaaggagctttattgtaaatactatggaaggggctttgttgtaaatactatgtaatatatataaaatattgtgacatgttttggatgggatgcatgacatacaggtagctctcttttttaaaatataggtatctctttgcatatatatacacaaggaaagttgaattttcaggagagatcattctgatatcttgcaaatttgtattaaatgtatacagacttccaagtgtgctaattctttacctcctaaacttttagttgcaattgttttgcagtgtaaaattgtacatgtgttaataatcaaaaagtgttgcatttaatgttatttctgtaaactttgagctttgttaataaactattatgcagcatctaaaaaaaaaaaaaaaaaaaaaaaaaaaaaaaaaaaaaaaaaaaaaaaaaaaaaaaaaaaaaaaaaaaaaacccttggtgggccgcttgggccaagtcatttttaaactggaccaggtttttgcttgcggccgaatttgggcctaattgggccaattccccttatagggagccgattaacaataaatgggccgcggtttaaaaacgtcggaacgggaaaaccccgggggtacccacattaaatcgccggggngaaaatccctttttcgccagttggcgaaataccaaaaaggccccaaccaatcccctttcaaacattgcccaccctaatgggaatggaaaattgaaacctaaatttttggtaaaatccccgtaaatttggaaaacagctatttttaacccaaaggcgaaacggaaaaccctaatataacccgggggtgggggttcccacttg

SEQ ID NO: 409836 - DNA, 1931 bp, Homo sapiens
aaaaactactatggctgagaaggaggaaaaattacaaaaggaacaaaaggaattacaagatgtatggacagtctcttcgcacattcaacagcagcaagcaggtcatgccaaattcaccaagcacacaattagaagcctcacagcttcaacaaacaccttgcacacaacagccaaacaacgttctcaacacacacataatgcaaacagttcaatccactgtggcttcaccatcaaagcaactaaatgaaaatcagctagtgagaaagcaagatgtattgggaccttctactactccgcctgcacattccagcagcaacacaatcagaagtggaatttctcctaacctgaatgtggttgatggtagactgacttacccaacctgtgggattggttatcctgtctcctctgcatttgcattccagaataccttccctcattcgatatctgccaaaaataccagccaccctggttcaggaacaaagtggtgaaaatgtagggttggaatccaaatacctgaagaaaagggaagatagcattcctttacgcggactcagccagaacctatttagtaattcagaccatcagagagatggcactttaggagcattacatacatcttccaaacccacagcgctcccctctgcgtcttcagcctatttccctgggcagttaccaaacagttaattctagtgtcatgttttactttttattggtattttagaaactcaggtgcttaaaaaatatgtcaacacaaaccagatcctcaaatagcaagtttcaaattttacttgagctgttaaagactggatactttaagtactgcttttatggcagtttataatataggaacaaatttgtacttggggattggtaaagattgtgagtaaatgacattttttggtttgtgaacatggcgttttatagaataatatgaattttattaagctattctttagaaattcagttctaaggaaagagttgatccttatgagggagattctgatcatattaaaaatctgggtaaactaaaacctgctcataacctcatagtatgcaaccaaagaatactaattcattttatcactttcattggtaaaacttttaaattcaacacctgaaaatcatgagggaaaatgattacctcttgagatatattattgatgacatttaaagggaaaagtcctaaatttaccttaaataactgaaatgaattaagccttcatagcgtattttccttgaagcatttaaatttgctagtgatgaatcaaataaatttgatatacttaaaataatttggacagtttttatgtgaccagattaagtgcttttgtcatttgagctgacaagtttttaaaacttcagtgcttcctaaatgtttatactcatctagtttttctcaattgtagttttattatgcagttaaatctgtatcagtggacttttaaaacttggtactactactaaatctactatatcatgaatattcatttatttttatagtatcagaacttgggttgatttcaatgttaataaactaggcaaaacaaataactgttagaaggtacaattttcttctcttccctgtaactgaaagttttaagaattgttccttggggaaaaatttttttaaaattcacctagaatcatagggcctcattttgttttcttattgacaaacaatacctggtagcattctctaaagagtcttctagatcaatttttataaagtactaatgctcatgtgataatttaaaattattttcaactactttattacacagatgaagaaacatttcaagatattgatgtaataacattactgagtcccatgtgggcagcaagagaaccgctggaatgcatcaaatgaaaaggcaattccaggcaactggaaaaataaacagcagctaccatttttacagcctatatgtact

SEQ ID NO: 409837 - DNA, 733 bp, Homo sapiens
ctcttcactgggcggctcacttttaatctgccccctggcaagccccggcttgaggctgttgctagagttatcttcccggaatgtgcttgcaaaacctgaggtactgtgtgatgatgcattatagacattcttggtacatgcaagctggtatttcttgtatctggggtactgcgttaacgcgtccttttctgagctctccttggtgtctgtgggcacgtcaggctcgggcagcagggcttcttccttctctgctacggggatggcggcggcctcaaagctgatgggctctggaagcatctggtccctggggcaagccatcttggccgtctctgaatccatcgtctcctcctcttcatcctcctcctctcctgcagagttctcgcagtcctcgtgtgggcgctggcacgcagcatccttccggcacacaaacaggccatcctcactgttcaggagctgggtctgcaggaagctgaagcaggagtcctccaggttgtgcatgcgcaggaactcagcacagcggatgacctcgcggatgttttctctgctgagtaacagcttggcagtgtaggcaaactgtaacagcggcccaaagcccctggctgtgacctgcaaaacaaacagggaaatcgccaacattaccatcagcactgctattgtcccgaatccctcaactgaagcaagataaccagacagtgctaatgtcccagaataaagactgcaaaggggcagttaa

SEQ ID NO: 409838 - DNA, 207 bp, Homo sapiens
atcaaatatcaagtgcttttctaggacagaagtggttaatgtggaatcaccttcagcatcctgcctctgtggatggggaaggcagtctctctactgtcatctttaatcttagcacgtaagaacaatgtgggagtggtggggggcagggagtagtccagataaagggcctagagagtgggtcacatgcttgaatttatgtgggttccc

SEQ ID NO: 409839 - DNA, 496 bp, Homo sapiens
atatgaggtatcagaagaacatggctttggagacaacaatacggtttaaattccaactcacctcactagccatgtgacttttgggcaagtttcttagctcctctgagccttgtatttagaaatctgtagaatggagagaatcatacccatcacaaagggttattgtgaagatgaaacaagatcatgtatggaaagacttgagcacaattgaccgacatgtagttggtattccctaactgttagaaccagagagtagagtgggtcagatcgtgggctctgggtctgaatttgcatttgtgcttttccacttctagccaagtgagctgggacaaattccctcattttctgtatatctgtttctgcatctataaaactggcattaatagtacccaccttattaggacagtctgaagattaagtgagttaatatatacagcacttagaatactgcctgttatgtaataagttttatataagtggcagccactgttctctc

SEQ ID NO: 409840 - DNA, 363 bp, Homo sapiens
ctggactcaagcaatctgtcagacttggcctcccaaagtgctgggattataggcgtgagccaccacccccggccacctttgtcttagtgaatgctattaagttgttaggttagtgatgtagtcatacaacttttttttttttttgagatggattttccctcttgtcattcaggctggagtgcagtggcgtgatcttggctcactgcagcctccgcctcctgggctcaagtgattctcctgcctcagcctcccgagtagctgagactacagacttgggccatcatgcttggctaatttttgtatttttagtagagacagagtttcaccatattagccaggctggtcttcaactcctgacctcag

SEQ ID NO: 409841 - DNA, 332 bp, Homo sapiens
gcctactactactaaattcgcggccgcgtcgacgagtaattagctatagattccactggccttaaacatacaattaagtgtatacatgatatagtgcacacacaaaagccacctttaattattgaaataacctgtattctttttggaaatcatttaagtttggtattgaagtactatattttttgtgcatcaatgtatttttctatttacaagcctatgtaaaagtgaagtgtatcttcagtgaaccatgtgccaattaagctgtaataaaaaagtggtctagtctgtcaaaaaaaaaaaagtcgacgcggccgcgaatttagtagtagtag

SEQ ID NO: 409842 - DNA, 565 bp, Homo sapiens
gtgagccgagattgcgccactgcactccagcctgggcgacagaggagactctgtctcaaaaaaaaaaaaaaaaaaaaagagcagggtcataatcacacagcagtgccttatatagttgccataagacttcagtgcagtacaacataattttacagctacatatcagggcatattctatatggtgtatttgtgttagaataacacattaaatgtctttaaacataaaaataagaatgtttgcatgtttcagttttcaagaaccaaatgagtaattagctatagattccactggccttaaacatacaattaagtgtatacatgatatagtgcacacacaaaagccacctttaattattgaaataacctgtattctttttggaaatcatttaagtttggtattgaagtactatattttttgtgcatcaatgtatttttctatttacaagcctatgtaaaagtgaagtgtatcttcagtgaaccatgtgccaattaagctgtaataaaaaagtggtctagtctgtcaaaaaaaaaaaagtcgacgcggccgcgaatttagtagtagtag

SEQ ID NO: 409843 - DNA, 185 bp, Homo sapiens
tcactctaatttgtttaaagtttggataagttattgtcatgtattgaattctaagtcttactttaggcttctttctgaataacaatatttaaattgctttgacgcttatttttcctacaggatattatgtaagtcattccttcaagatgaatcctttaaaccaagtattcaggggcccgtcgacg

SEQ ID NO: 409844 - DNA, 523 bp, Homo sapiens
actcaaggcactgatttctgcatcttcagcctcctcatttcattaactattaaaattaattccctgtagagataatttgcatcaatcaacagaatagaagaattagaagagcttctgaggcttttctatgactaaaagagcaattcttttattgactaccataaacattagatttactaaaaggaaaaggtgttttaaattgaaccacccctctaatttattcatcttagttctgaaaacatgtaggtaagagttaatcatgttactgaatctaatttaaaaagtgagagggaaagtactgaatatttttcctctttgaaattacatgttgtttgcaatattagcctgcctgtatttttcatgtaaaccttttgtacattgaaaacaaattcaaaataaagaacgtttgttttcaggctcagaccttaagaactgatggtcttttcttttacttctacacaaaagtctaagcagttctgaagaaacactacagtgacattgggtcattgctaaaaaaaaaaaa

SEQ ID NO: 409845 - DNA, 442 bp, Homo sapiens
atgccactctcgtcgacaaaaccctttaatcctcatcatgtacaggatgtaagatccaaactccttgtaaagggcgtatgaaatcctctgcgatctgctccttgtctactcttggatcttgtccttagtaactccaaggcctcacactggatgcctcagctatctcagactacttccctgagatatcaagtaacatcggttggcaagaaagcaagaaaagttatctgccttcctagctaaccagaatctgttcaagaatctgctttccttcagggaaatcttcctgactgtcccctaagctagggtaggtttttttcctttatgctcctgtagaagtgtactgttaacatttatttcagacacaggacttcaccacacaagatttaggttattttaggttaagtatctctccattaggaccataagctgcttaaggttagga

SEQ ID NO: 409846 - DNA, 338 bp, Homo sapiens
ttttttggtatactatgtgagagctgctttggagcaagctcagtgtttagcttatcttttttgtttaccttttattaaaaaaatcacaacccaatttgttaagtcctcataagacatttgctgaattaatggtattttatgtacccacataggcttttcttctttgtgccatagcaatagttcctgagtacgtatcatatgcaaggcatcaatacgaggatgaatgagacaagcaatgtccctaacctggtagaggctgactgcaaacaaacaatacatgagtaaaaatacaaacaatcattcttaagaaggcagacaacagtgtgctattatagaac

SEQ ID NO: 409847 - DNA, 337 bp, Homo sapiens
tttttttagtagaaaaacacttaggatttattgtaagagaaatggacagaaaacagacagaccaattgcaaagtaattgaaagtccagtggtaaaattgcaggggttgaggcctccaatctttgtgacattgtgaaattttattctcaaagcctagatctttgagacacggtaggggaaaatgatgatgatgacacaagtttctaatctggccaacgtaaaaaatagaaaagtgagtgagctgctggtttgtggggaagatgatgtggttgggaccaataaaatctggctatctattatcctccttagattgtggaactgaaagacaagctgtagtg

SEQ ID NO: 409848 - DNA, 427 bp, Homo sapiens
tttttttgttttttggagacagggtcttgcttggtagcccaggctggagtgcagtggcatgatcttggctcacaggaacttctgcctcccaggttcaagtgatcctcctgcctcagcctcccaagtagctgagattacaggcgcccaccaccacacctggctaatttttgtattttcagtggagacatggtttcaccatgttggccaggctggtctggaactcctgacctccagtgatctgcctgccttggcctcccaaagtgctgagattacaggcgtgggtcaccacacctggcctgttcacttctatacaacaaatatttcatgagcttccaccatgtgccagagtgttgggtgctaaaaatacatgaggcactgataaaatggcctgtgactttgtcacctcagctacaggccaccctatatg

SEQ ID NO: 409849 - DNA, 456 bp, Homo sapiens
  misc_feature (19)..(19): n is a, c, g, or t
  misc_feature (21)..(21): n is a, c, g, or t
  misc_feature (37)..(37): n is a, c, g, or t
  misc_feature (41)..(41): n is a, c, g, or t
  misc_feature (45)..(45): n is a, c, g, or t
  misc_feature (56)..(56): n is a, c, g, or t
  misc_feature (63)..(63): n is a, c, g, or t
  misc_feature (65)..(66): n is a, c, g, or t
  misc_feature (70)..(70): n is a, c, g, or t
ccccgttgttcccgccccntngggggcccaagcccgngggnccanccaggccccgngatccgngnnccgnttcccaaaaaaaaaaaaaaaggaatttacatagttgaacaactattctttggacatcttttagtccagtagacggtgttaaacttgaagacaaataacgatttgacctgtgatatttgtttttccctcttatcttctaagcccattcatccagatcattcatcacctttaaaggcatccccagagggaggcaggtctggacagagctgaagattgcacaggccatttgcaggctggattagttctgtggtgacccacctgtctgactcgagttatttttttcccatgtctggacaagactgacctctgcccagcaactcaggcctggatttagtccaagggccctcagtggcttttttttctaataaattggggccgagctcgatt

SEQ ID NO: 409850 - DNA, 1300 bp, Homo sapiens
aacccctatccctggtcgctttccctggggccagaacaatccctttgccctgggccccgggcccaaatccgtgccccgtttccaaaaaaaaaaaaaaaggaatttacatagttgaacaactattctttggacatcttttagtccagtagacggtgttaaacttgaagacaaataacgatttgacctgtgatatttgtttttccctcttatcttctaagcccattcatccagatcattcatcacctttaaaggcatccccagagggaggcaggtctggacagagctgaagattgcacaggccatttgcaggctggattagttctgtggtgacccacctgtctgactcgagttatttttttcccatgtctggacaagactgacctctgcccagcaactcaggcctggatttagtccaagggccctcagtggcttttttgtttgtttgttttttcaggaagtgaagaatttagagggataaaaggcggaaataacttttcagcctctgacctttgtaacaatctagtttccttttaaaggagcattgtttgggcctggggccacctagaccttctgatgctctttccccacccttggaggaggaggaaaggaagaaaatgggccctgagcgatcaccacataccaggccctgggggtctagtggcgaaggaggcaggtagggtctcttgctttcatggagcttctagtcaagcgagacgcactaaacagtaaagggacaaataggattactggaggtagccctaactactgggacagaaacaagatggtaagatagagaaggaagagtggcctgctcagatggggtggtccagaggcctctcgggggaggtgactcctttttattttattttttttgagatggaatctagctctgtcgcccagcctgaagtgcagtcgtgtgtttcatgcgcgtccgtgtgaagagaccaccaaacaggctttgtgtgagcaacatggctgtttatttcacctgggtgcaggcgggctgagtccgaaaagagagtcagcaaagggtggtggattatcattagttcttacaggttttgggatagggggtgaagagccatgttttgcaggcaggggtggatctcacaaagtacattctcaagggtggggagaattacaaagaaccttcttaagggttggggagattacaaagtaccttcttaagggtgggggagattacaaagtacattgaagagttagggtggggcagaaacaaatcacaatggtggaatgtcatcagttaaggctatttttacttcttgtgtggatcttcagt

SEQ ID NO: 409851 - DNA, 887 bp, Homo sapiens
aacccctatccctggtcgctttccctggggccagaacaatccctttgccctgggccccgggcccaaatccgtgccccgtttccaaaaaaaaaaaaaaaggaatttacatagttgaacaactattctttggacatcttttagtccagtagacggtgttaaacttgaagacaaataacgatttgacctgtgatatttgtttttccctcttatcttctaagcccattcatccagatcattcatcacctttaaaggcatccccagagggaggcaggtctggacagagctgaagattgcacaggccatttgcaggctggattagttctgtggtgacccacctgtctgactcgagttatttttttcccatgtctggacaagactgacctctgcccagcaactcaggcctggatttagtccaagggccctcagtggcttttttgtttgtttgttttttcaggaagtgaagaatttagagggataaaaggcggaaataacttttcagcctctgacctttgtaacaatctagtttccttttaaaggagcattgtttgggcctggggccacctagaccttctgatgctctttccccacccttggaggaggaggaaaggaagaaaatgggccctgagcgatcaccacataccaggccctgggggtctagtggcgaaggaggcaggtagggtctcttgctttcatggagcttctagtcaagcgagacgcactaaacagtaaagggacaaataggattactggaggtagccctaactactgggcgacagaatgagactccatctcaaaaaaaaaaaagaaaccaaggatatagaataaaacaagagtgtagatttgggcattgaggccttcaaattggattgttctcaatgtccagaaga

SEQ ID NO: 409852 - DNA, 966 bp, Homo sapiens
aacccctatccctggtcgctttccctggggccagaacaatccctttgccctgggccccgggcccaaatccgtgccccgtttccaaaaaaaaaaaaaaaggaatttacatagttgaacaactattctttggacatcttttagtccagtagacggtgttaaacttgaagacaaataacgatttgacctgtgatatttgtttttccctcttatcttctaagcccattcatccagatcattcatcacctttaaaggcatccccagagggaggcaggtctggacagagctgaagattgcacaggccatttgcaggctggattagttctgtggtgacccacctgtctgactcgagttatttttttcccatgtctggacaagactgacctctgcccagcaactcaggcctggatttagtccaagggccctcagtggcttttttgtttgtttgttttttcaggaagtgaagaatttagagggataaaaggcggaaataacttttcagcctctgacctttgtaacaatctagtttccttttaaaggagcattgtttgggcctggggccacctagaccttctgatgctctttccccacccttggaggaggaggaaaggaagaaaatgggccctgagcgatcaccacataccaggccctgggggtctagtggcgaaggaggcaggtagggtctcttgctttcatggagcttctagtcaagcgagacgcactaaacagtaaagggacaaataggattactggaggtagccctaactactgggacagaaacaagatggtaagatagagaaggaagagtggcctgctcagatggggtggtccagaggcctctcgggggaggtgactcctttttattttattttttttgagatggaatctagctctgtcgcccagcctgaagtgcagtcgtgtgtttcatgcgcgtccaggtgaaataaacagctttattgctcacaaaaa

SEQ ID NO: 409853 - DNA, 497 bp, Homo sapiens
  misc_feature (78)..(78): n is a, c, g, or t
taatattctcatatgctattaatacttcttagtccttcctttaatatggtatgacatacatggagatcaaaagaagtngaattttgcctcccatccctcctcagggctgcctagggcagctacaaaaaccaggccagcctctgaaaggtgctccacatctcattaaaaaccgtgaaatcgcactgccccactatcagaatagctcagaggagaaggtctgccagtaccaagtgctggtggggatacggagaagagcagctcccaggcgctgctggtgcaaatgtgctttgttgcacccacggcaggaaactgaccagcttctcatcaagttaaatacgcatctaccctatggcctagcatttccactcttgcttacacatccaggagaaatgagtccttacatgcacaaaaggatgagtaccgtaatactcacatcagcaaataaacaatacagctgtgtgtcagtagtagaatgaataaattgtggtcgattcata

SEQ ID NO: 409854 - DNA, 1518 bp, Homo sapiens
ccagcgggctcgggagccttaacctggctggctgtgctgattatggttgcatggggctgggaagaggtcccatttctgagccacagaaacaggccacatccagtaggggtcctggaaggctgtgagaacccagaggagaccctgacccagcctgcaggtagaagactgcctttggaggcagctttgaaagatgactcttccagatggaagaatcaggaagggccttcccacgtggaggcaccagcaggagcaaacgtccctggtgtgttcaggcaaagagccacaggagagtgacctcgtggagtgggaagagattgtttcccattcccttgccagggattggttgaggaatggacaaggcttgcagttcacgcaagccagtgaaatgcgagggtgaagtcttgggagtggggtggaggaggtcatctgggaagggtgtccttggtcttaaaaagaggcacaagaggccgggcgcggtggctcttgcctattatcctagcactttgggaggccaaggcagggggatcacttgaggtcaggagttcgagaccagcctggccaacatggtgaaaccccgtctctactaaaaatacaaaaaattagccagacgtggtgccaagcacctgtaatcccagctactcaggaggctgaggcaggagaatcacttgaacccaggaggcagaagttgcagtgagccaagatcgcgccactgcactccagcctgtgtgacaagggcgaaactccatctcaaaaaaaaagggggagggtggcgcaaggagaggacacctctctcctggccctgtcgccatcttccctcatcaatagctaaaaatggcaaagaagaaagagccaggaccccgtgccatcaaatcctccggccttgtgctgccctgtctcggcactgcttgccttaggagatcaggagtgttcctagccactgggagatgggatgcctgccactggcagctctgccgtccatcctcaccatcccaccgtccccccaagacagctctccatcccatcctctgcctcccttctagcctcaacctaactcagggctcccccgtctcacacctgggttgcaggaacatcctcttcaccaacccccctcccatccctcctcagggctgcctagggcagctacaaaaaccaggccagcctctgaaaggtgctccacatctcattaaaaaccgtgaaatcgcactgccccactatcagaatagctcagaggagaaggtctgccagtaccaagtgctggtggggatacggagaagagcagctcccaggcgctgctggtgcaaatgtgctttgttgcacccacggcaggaaactgaccagcttctcatcaagttaaatacgcatctaccctatggcctagcatttccactcttgcttacacatccaggagaaatgagtccttacatgcacaaaaggatgagtaccgtaatactcacatcagcaaataaacaatacagctgtgtgtcagtagtagaatgaataaattgtggtcgattcata

SEQ ID NO: 409855 - DNA, 687 bp, Homo sapiens
tggcccgcggtcgggtgggatcctagccctgtctcctctcctgggaaggagtgagggtgggacgtgacttagacacctacaaatctatttaccaaagaggagcccgggactgagggaaaaggccaaagagtgtgagtgcatgcggactgggggttcaggggaagaggacgaggaggaggaagatgaggtcgatttcctgatttaaaaaatcgtccaagccccgtggtccagcttaaggtcctcggttacatgcgccgctcagagcaggtcactttctgccttccacgtcctccttcaaggaagccccatgtgggtagctttcaatatcgcaggttcttactcctctgcctctataagctcaaacccaccaacgatcgggcaagtaaaccccctccctcgccgacttcggaactggcgagagttcagcgcagatgggcctgtggggagggggcaagatagatgagggggagcggcatggtgcggggtgaccccttggagagaggaaaaaggccacaagaggggctgccaccgccactaacggagatggccctggtagagacctttgggggtctggaacctctggactccccatgctctaactcccacactctgctatcagaaacttaaacttgaggattttctctgtttttcactcgcaataaattcagagcaaacaaaaaaaaaaaa

SEQ ID NO: 409856 - DNA, 614 bp, Homo sapiens
tggcccgcggtcgggtgggatcctagccctgtctcctctcctgggaaggagtgagggtgggacgtgacttagacacctacaaatctatttaccaaagaggagcccgggactgagggaaaaggccaaagagtgtgagtgcatgcggactgggggttcaggggaagaggacgaggaggaggaagatgaggtcgatttcctgatttaaaaaatcgtccaagccccgtggtccagcttaaggtcctcggttacatgcgccgctcagagcaggtcactttctgccttccacgtcctccttcaaggaagccccatgtgggtagctttcaatatcgcaggttcttactcctctgcctctataagctcaaacccaccaacgatcgggcaaatagatgagggggagcggcatggtgcggggtgaccccttggagagaggaaaaaggccacaagaggggctgccaccgccactaacggagatggccctggtagagacctttgggggtctggaacctctggactccccatgctctaactcccacactctgctatcagaaacttaaacttgaggattttctctgtttttcactcgcaataaattcagagcaaacaaaaaaaaaaaa

SEQ ID NO: 409857 - DNA, 330 bp, Homo sapiens
ttagaccgtgcacttttttttccaatcacgtctctgtacacggttgtcagtcatgcctgtgtaacgaagtcttcataaaatcccaagaggatagggttcagggaacctctggacagctgaccaggtggagcttcctggagggtggtgtacccagggagggcatggaagccccttgccccttcccccagcctcaccatacacatcccttcatctgtatcttttgtaatatcttctataatgaatcatttgagcctaggaggtcgtggctacagtgagccgtgattgtgccactatactctagactagacaacagagcaagaccctatctca

SEQ ID NO: 409858 - DNA, 1212 bp, Homo sapiens
  misc_feature (1)..(1): n is a, c, g, or t
  misc_feature (4)..(6): n is a, c, g, or t
  misc_feature (8)..(8): n is a, c, g, or t
ngcnnngncgattcaggggagggagcaactggagcctcaggccctccagagtagtctgcctgaccaccctggagcccacagaagcccaggacgtctcccgcgaggcctccccgtgtgtggctgaggatggctgagcagcagggccgggagcttgaggctgagtgccccgtctgctggaaccccttcaacaacacgttccatacccccaaaatgctggattgctgccactccttctgcgtggaatgtctggcccacctcagccttgtgactccagcccggcgccgcctgctgtgcccactctgtcgccagcccacagtgctggcctcagggcagcctgtcactgacttgcccacggacactgccatgctcgccctgctccgcctggagccccaccatgtcatcctggaaggccatcagctgtgcctcaaggaccagcccaagagccgctacttcctgcgccagcctcaagtctacacgctggaccttggcccccagcctgggggccagactgggccgcccccagacacggcctctgccaccgtgtctacgcccatcctcatccccagccaccactctttgagggagtgtttccgcaaccctcagttccgcatctttgcctacctgatggccgtcatcctcagtgtcactctgttgctcatattctccatcttttggaccaagcagttcctttggggtgtggggtgagtgctgttcccagacaagaaaccaaacctttttcggttgctgctgggtatggtgactacggagcctcatttggtattgtcttcctttgtagtgttgtttattttacaatccagggattgttcaggccatgtgtttgcttctgggaacaatttaaaaaaaaaacaaaaaaacgaaaagcttgaaggactgggagatgtggagcgacctccgggtgtgagtgtggcgtcatggaagggcagagaagcggttctgaccacagagctccacagcaagttgtgccaaagggctgcacagtggtatccaggaacctgactagcccaaatagcaagttgcatttctcactggagctgcttcaaaatcagtgcatatttttttgagttgctcttttactatgggttgctaaaaaaaaaaaaaaaattgggaagtgagcttcaattctgtgggtaaatgtgtgtttgtttctctttgaatgtcttgccactggttgcagtaaaagtgttctgtatt

SEQ ID NO: 409859 - DNA, 1193 bp, Homo sapiens
tggaaggggaagaggctctggaagggctgatctggggactggggcagggaagcttctgcaaggcttccaggacgtctcccgcgaggcctccccgtgtgtggctgaggatggctgagcagcagggccgggagcttgaggctgagtgccccgtctgctggaaccccttcaacaacacgttccatacccccaaaatgctggattgctgccactccttctgcgtggaatgtctggcccacctcagccttgtgactccagcccggcgccgcctgctgtgcccactctgtcgccagcccacagtgctggcctcagggcagcctgtcactgacttgcccacggacactgccatgctcgccctgctccgcctggagccccaccatgtcatcctggaaggccatcagctgtgcctcaaggaccagcccaagagccgctacttcctgcgccagcctcaagtctacacgctggaccttggcccccagcctgggggccagactgggccgcccccagacacggcctctgccaccgtgtctacgcccatcctcatccccagccaccactctttgagggagtgtttccgcaaccctcagttccgcatctttgcctacctgatggccgtcatcctcagtgtcactctgttgctcatattctccatcttttggaccaagcagttcctttggggtgtggggtgagtgctgttcccagacaagaaaccaaacctttttcggttgctgctgggtatggtgactacggagcctcatttggtattgtcttcctttgtagtgttgtttattttacaatccagggattgttcaggccatgtgtttgcttctgggaacaatttaaaaaaaaaacaaaaaaacgaaaagcttgaaggactgggagatgtggagcgacctccgggtgtgagtgtggcgtcatggaagggcagagaagcggttctgaccacagagctccacagcaagttgtgccaaagggctgcacagtggtatccaggaacctgactagcccaaatagcaagttgcatttctcactggagctgcttcaaaatcagtgcatatttttttgagttgctcttttactatgggttgctaaaaaaaaaaaaaaaattgggaagtgagcttcaattctgtgggtaaatgtgtgtttgtttctctttgaatgtcttgccactggttgcagtaaaagtgttctgtatt

SEQ ID NO: 409860 - DNA, 254 bp, Homo sapiens
atgcctggctatttaaattttttttttttgtagaaacaagatctcactgtgttgcccagtctgttcttgaactcctgagctcaagtgatccttctgcctcagcctcgcaaagtgctaggggtacaggcatgagccaccactcccggccacaatatgggatatattttgattacattttcagcttcagataaatgaagcttaattctgttagggaactttaaggacgatattcctagcatatatatctcagaatt

SEQ ID NO: 409861 - DNA, 450 bp, Homo sapiens
attcagtaaaaaacaagatgttgagaatctttgagtaatattctacaaatccaattatttacattaaaaaatactaaaaataaaaaaaatctgtaatgatgtttgttactctaaaccctgaacctactgatgtttaaactttagagtgtttttagtacagtaggaatattttaggttaaggcattattcttcccaagtcatctagaaaatcttcatcatttattctctacttgacaactaatttttttttttttttttaatattttagtctttaaggacacttgtattaggatctgttgcctccttataaaagttaagtggccaggcacggtggctgacacctgtaatcccagcactttgtgagactgaagcaggaggatcgcttgagcccaggagtttcagaccagcctgggcaacattgtgggactcttctctaccaaaaaaaaaaaa

SEQ ID NO: 409862 - DNA, 1006 bp, Homo sapiens
tttttctgctatctaatggattatgctgctctggaacattcatgtgatgcttttgttaattgcttatacattttattaagctaatgagcttggtcatagtaacatataaaatcaagaatcgtttaacttttgcaataaaaatcttgatgttgactctgaagtagtaagatgcaacttcaatgtactgggattgaggcagccatagcaatattaccacaggttttccaaaaattaacacaaatattttctattctagatgtgatatctttggcatcactgttcattcttttcctccttgattaaagtgaaacaattacattaaaatagttttatgatttaaaaatcattctttttttaagctattatttttaatgtaggtcagtgtgttatgtaaattgatgtccactacctgaacatgtgatgctttctcttttattccttggtatttcctccatattctctgagggccttcagtcaatttttttaaaggaaataataagttcaaatatgtatctatgacttagggttacaaagaatattttctttgcctccagtatactttgtattaaaaaaattataaaaggccataggtattcattttcaaatatttgaaaaaaaaaggcatggcacaattaaagcatatgcagaaccaacttggattattgctatatttctttctttctagtgtgtacggatattgatgacatttttaggtggctcttaacaagaacattttcctctctttagatgtgaatgcatagaaaatatctttcatttggaccaggatcgttttaaaacatttcctttattttttgattaaatttttttccttttaaatattaggacttagttttttattaaatttgaacataatatatttaacatacttacggatacatttttgtgggcatatttctctgacaatttctcttattacaaaccaaacttgttagtgacctgattttgtgtgtgtgtgtgtgtgtgtgtgtgtgtgtgtgtgcgcgca

SEQ ID NO: 409863 - DNA, 477 bp, Homo sapiens
ctctatagcaatgcaagaatggcttaatacatctcccctcccctacatgggacaaggccatctgataattaaccttcctagcaactcaggactaagctcctgaacataaagggagccaaaacaatttgcatttttctatgaggccttctttgaaaggtcttgatgaaaaggggagaaatggggaaaaaaatagcacagagcagtctgagctatgtgaggtgtgccaaagttatcaggcccagagagacaggagagtggggctttttgttttgtttttgtttgagacaacatagtgagagcctgtctttataaaaaattttaaaaaattgtccaggcataagggcatgtgcctgtggtcccagctactgaggcaggctgaggagagaggattgcttgagtctgggaggttgaggctgcagtgagctgtgatcacaccactgcactccagactgggtgacagagtgagaccctgtctca

SEQ ID NO: 409864 - DNA, 286 bp, Homo sapiens
ggaattggtctctttagtacttagatgatcatttcctgagcgtgtgtcccgcagcctgtgagcatgtaactggggaagcacatgtttgtggtcacgtgtcccaaccaaaggtaggagctgacatgaacaggctagtggttgaatgcatgttaaaaatctgtggctggccgggcacggtggctcacgcctgtgatcccagcactttgggaggccgaggtgggtggatcacctgaggtcaggaattcaagagcagcctgaccaacatgtagaaatcctgtctctacta

SEQ ID NO: 409865 - DNA, 419 bp, Homo sapiens
acccgggaggcagaggttgcagtgagccaagattgcaccattgcactccagccagtcacactctgggtgaaagagcaaaattctgcctcaaaaaaaaaaaattgcatttttgccattaaaagcagttgcaaaaaccacaattacttttgaaccaacctaatataatcccagtgctttgggacttcaggagttcaggagttctagaccagcttgagcaacatagtgagaacccatctctacaaagtatacaaaaattagccaggcatggtggtgtatgcctgcagtcccagctattcaggaggctgaggcaggaggatcgcttgagaccaggagtttgaggctgcagtgagctatgattacaccacagcactccagcttgggcaacagtgtgagacgctgtctctaaaacaaaaaaaaag

SEQ ID NO: 409866 - DNA, 183 bp, Homo sapiens
aaaagtacaatcgtctgtaagaatattagtttcccaacatattgactctgctccaggataaaattacctcttgaactccaatagaattgcaacacaactttctttttaattgctttagttctgtgaatatgtggtgaagaaaactacagtaaagtagcatttgttcttaaagtgcaattactg

SEQ ID NO: 409867 - DNA, 815 bp, Homo sapiens
acccctctgtttctcagatcctccacagctgaaaactgtggatcatattagtacctgtgtcatagagttattgtgtgaattaaataaagtgattcatttaaagtgcttagtacagtgcctggtacatagtaagtgctcaataaacagtagcttttttttcttaaccaatttaattaggagctaatggctggcagttcatagcttttttgaataataggcttctcctgataattgaatggatgctgtgaaccctctcccttcatatatggtttcagtcagtccaggggcccttgaaggccacactgggtcagtggaccctagtttaggaagggcacatgaaagagatcagttttactggcccaatttcttaaaataattggcttgtatttagggactactttgtattaaaattggctgatttttgagtgtgagagtctttgtaagatctactttggtcctcccaatacacacacacacacacacacacatatacacacacacactcacactcacacacacacggctagatcatttagttttctttctgagaagaatttttatttcccaggtccgcctccatcatctcctctttggtaatagtcgcagaggttgccataatgagtcatttgttaaactaatctgtgtttccatagtccactgtggccctctgtattgagcttgggccactcaatggcgcctttgtcaggctgattaaaatgtaactttgcatgccaaaaaagggcactcctctggcttaaaagtcatcttcctttgttataaatgtttacatttttctattatgctaaaaaaaaaaa

SEQ ID NO: 409868 - DNA, 414 bp, Homo sapiens
tttgcgaaagtgagtttattaagaaagtaaaggaataaagaatggctattccataggcagagtagcccaggcaccttcttgaccactctgttcatacccactattcagttaaccttgttgctcactgattagggttcacttacaagtattttatacatatattttaagtcattgttatttatatctagatactacacaaaacttttattattatcaaaaccaccacatacttactgggctttttgtgggagtattcacatttctttactgaatctgtttgtagaagggaatcacatccagtctggttttagaagtagggctttgatgtcattagagggaaaggctttggcatctgtcctgagctcagcccagaaagcaaagtaatataccaaaatgaacagagatcccacgttc

SEQ ID NO: 409869 - DNA, 700 bp, Homo sapiens
tttttatatagattgattcgtcttgattacttttgccgggagttgctaaaaacaaagattaggtaataaaaatcagaaataccaatgcatcacagatacatgtacagggactagcagaaaggcacagcctgttgaactacacattgttaatgaaggacaacacattgaatctattatgcaatatcatgcaacataccatttattacatatcagtaaacaacttatgtttatcagcccgtgcatccagactttatggtcgtagcttatgcttatttattgacttagtgactgtctcctgcactgtaacacaaattccataaagacagttttatatatcactatctctagtatgtagatgagtttcctcaataaatattttttaataaataaataaaaatgggtcaggcacggtggctcatgcctgttatcccagcactttgggaggccaaggcaggtggatcacctgaggtcaggagtccgagaccagcctggccaacatggtgaaacctcgtctctactaaaaatacaaaattagctgggtgtggtggtgcatgcctgtaatctcagctacttgggaggctgaggcaggagaatcacttgacctgagaggtggaggttaaagtgagccaagattgcaccattgcaatccagcctgggtgacaagagcgaaactctgtctcaaaaaaaaaaaaaaaaaaaa

SEQ ID NO: 409870 - DNA, 1504 bp, Homo sapiens
ccccacggccgcgcctgcgcactggccacgcggacggcgcgatggcggcggctgccgccgagacccccgaagtccttcgggaatgcggttgcaagggcatccggacctgtctgatctgcgagcggcagcgcggcagtgacccgccctgggagctgcccccagcgaaaacataccgtttcatttactgctccgacaccggctgggccgtgggcacagaggagtctgactttgagggctgggccttccccttcccaggagtgatgctgatcgaggactttgtgacccgggaggaagaagccgagttggtgcggctcatggaccgtgacccctggaagctctcccagtctggacggaggaagcaggactatggccccaaagtcaactttcggaaacagaagctaaagaccgagggcttctgcggcctccccagcttcagccgggaggtggtgcggaggatgggcctctacccggggctggagggcttccggcccgtcgagcagtgcaacctggactactgccccgagcggggctctgccattgacccccacctggacgacgcctggctgtggggggagcggctggtcagcctcaacctcctgtcccccaccgtgctgtccatgtgtcgggaggcgcccgggagcctgctcctctgctcggccccgtcggctgccccggaggccttggtggacagcgtgatagcacccagccggtcggtgctatgccaggaggtggaggtggccatccccttacccgcccgctccctgctggtcctcaccggggcggcacggcaccagtggaagcatgccatccaccgcagacacatcgaggcccgccgcgtctgcgtcactttccgggagctgtcggctgagtttggccctggagggaggcagcaagagctgggccaggaactgctgcggatcgccctctccttccagggaagacccgtgtgaaccgcctccttggctccagacttgactgatcccgggattgaaatgaggagcacagaacagggcctcctgcaactcacggggtttcaagagaagatggctgacccctgatgctgtgagcagtgtgagccctgcccaggagcaggttttgatgggaacgtacctccaggcagcccccttccacctggaccgtggccacacttttttggttatttagtttgtcacagtcttggggacatgggatcatttgagcttaaaaaatactgggggccgggcacagtggctcacacctgtaatcctaacactttgggaggctgaggtgggcggatcacttgatgccaggagttcgagaccagcctggccaacacggtgaaaacccgtctctacaaaaactacaaaaattagccgggtgtggtgactcacagccgtaatcccagctactcgggaggctaaggtgggagaattgcttgaacctgggaggcggaggttgcagtgagccaagatcacgccactgcactccagcctcggtgacagagcaagactgttttgaaaaaaaa

SEQ ID NO: 409871 - DNA, 1413 bp, Homo sapiens
ccccacggccgcgcctgcgcactggccacgcggacggcgcgatggcggcggctgccgccgagacccccgaagtccttcgggaatgcggttgcaagggcatccggacctgtctgatctgcgagcggcagcgcggcagtgacccgccctgggagctgcccccagcggagtgatgctgatcgaggactttgtgacccgggaggaagaagccgagttggtgcggctcatggaccgtgacccctggaagctctcccagtctggacggaggaagcaggactatggccccaaagtcaactttcggaaacagaagctaaagaccgagggcttctgcggcctccccagcttcagccgggaggtggtgcggaggatgggcctctacccggggctggagggcttccggcccgtcgagcagtgcaacctggactactgccccgagcggggctctgccattgacccccacctggacgacgcctggctgtggggggagcggctggtcagcctcaacctcctgtcccccaccgtgctgtccatgtgtcgggaggcgcccgggagcctgctcctctgctcggccccgtcggctgccccggaggccttggtggacagcgtgatagcacccagccggtcggtgctatgccaggaggtggaggtggccatccccttacccgcccgctccctgctggtcctcaccggggcggcacggcaccagtggaagcatgccatccaccgcagacacatcgaggcccgccgcgtctgcgtcactttccgggagctgtcggctgagtttggccctggagggaggcagcaagagctgggccaggaactgctgcggatcgccctctccttccagggaagacccgtgtgaaccgcctccttggctccagacttgactgatcccgggattgaaatgaggagcacagaacagggcctcctgcaactcacggggtttcaagagaagatggctgacccctgatgctgtgagcagtgtgagccctgcccaggagcaggttttgatgggaacgtacctccaggcagcccccttccacctggaccgtggccacacttttttggttatttagtttgtcacagtcttggggacatgggatcatttgagcttaaaaaatactgggggccgggcacagtggctcacacctgtaatcctaacactttgggaggctgaggtgggcggatcacttgatgccaggagttcgagaccagcctggccaacacggtgaaaacccgtctctacaaaaactacaaaaattagccgggtgtggtgactcacagccgtaatcccagctactcgggaggctaaggtgggagaattgcttgaacctgggaggcggaggttgcagtgagccaagatcacgccactgcactccagcctcggtgacagagcaagactgttttgaaaaaaaa

SEQ ID NO: 409872 - DNA, 470 bp, Homo sapiens
taaatgattttcacctttattatgcatctattttcatggggtttcccgatatctcactgtccagtcccttcatttggggaatgtgttggattagggaacagggttgaagatttgaagtttagactaaagagctgggaacagcttcagagtcaggctcagcctgactcatgcttgacacccccacgcccagggagggttgggggatgtgaggagggcagggaaatctgagagcctccttccagccccataacgctgttaacaagtaggaaaaattaaagctcccggccaggcgcggtgactcacacctgtaatccgagtactttgcggggctcaggtgggaggattgcttgaggccagcctgggcaacatagtgagacccccatctctacaaaaaatacaaacattagctgggcgtctgggcatggtggccatttccgcatccatcagacactttcctcagcagaccaggc

SEQ ID NO: 409873 - DNA, 1746 bp, Homo sapiens
ccccacggccgcgcctgcgcactggccacgcggacggcgcgatggcggcggctgccgccgagacccccgaagtccttcgggaatgcggttgcaagggcatccggacctgtctgatctgcgagcggcagcgcggcagtgacccgccctgggagctgcccccagcgaaaacataccgtttcatttactgctccgacaccggctgggccgtgggcacagaggagtctgactttgagggctgggccttccccttcccaggagtgatgctgatcgaggactttgtgacccgggaggaagaagccgagttggtgcggctcatggaccgtgacccctggaagctctcccagtctggacggaggaagcaggactatggccccaaagtcaactttcggaaacagaagctaaagaccgagggcttctgcggcctccccagcttcagccgggaggtggtgcggaggatgggcctctacccggggctggagggcttccggcccgtcgagcagtgcaacctggactactgccccgagcggggctctgccattgacccccacctggacgacgcctggctgtggggggagcggctggtcagcctcaacctcctgtcccccaccgtgctgtccatgtgtcgggaggcgcccgggagcctgctcctctgctcggccccgtcggctgccccggaggccttggtggacagcgtgatagcacccagccggtcggtgctatgccaggaggtggaggtggccatccccttacccgcccgctccctgctggtcctcaccggggcggcacggcaccagtggaagcatgccatccaccgcagacacatcgaggcccgccgcgtctgcgtcactttccgggagctgtcggctgagtttggccctggagggaggcagcaagagctgggccaggaactgctgcggatcgccctctccttccagggaagacccgtgtgaaccgcctccttggctccagacttgactgatcccgggattgaaatgaggagcacagaacagggcctcctgcaactcacggggtttcaagagaagatggctgacccctgatgctgtgagcagtgtgagccctgcccaggagcaggttttgatgggaacgtacctccaggcagcccccttccacctggaccgtggccacacttttttggttatttagtttgtcacagtcttggggacatgggatcatttgagcttaaaaaatactgggggccgggcacagtggctcacacctgtaatcctaacactttgggaggctgaggtgggcggatcacttgatgccaggagttcgagaccagcctggccaacacggtgaaaacccgtctctacaaaaactacaaaaaaaaaaaacaaaaaaaaaaaaaaaaaaaaaaaaaaaaaaaaaaaaagaaaaacaaaaacataaaagaaaaaaaagagggggggggcccgcaaacacacaacacacggtggcgccccactgagcaggtcacacagatacgtgtgagagaggtggcccctcatcgtggtggggtgctcataatacaccgcgacaacagcagcagctgtcatctgtataattacaacggtgtggagccagaggggaaacataacggagccttctttccggtgatctttgtgtaggagagcagcacgcaccttcaatctagtcggtgaacggaattattattttctggccgtaaaatcaccgcctacctggacgaataacttcctccgctccctggcgtgcatgataatcatt

SEQ ID NO: 409874 - DNA, 593 bp, Homo sapiens
taaatgattttcacctttattatgcatctattttcatggggtttcccgatatctcactgtccagtcccttcatttggggaatgtgttggattagggaacagggttgaagatttgaagtttagactaaagagctgggaacagcttcagagtcaggctcagcctgactcatgcttgacacccccacgcccagggagggttgggggatgtgaggagggcagggaaatctgagagcctccttccagccccataacgctgttaacaagtaggaaaaattaaagctcccggccaggcgcggtgactcacacctgtaatccgagtactttgcggggctcaggtgggaggattgcttgaggccagcctgggcaacatagtgagacccccatctctacaaaaaatacaaacattagctgggcgtctgggcatggtggcacacacctgtagtcccagctactcgaaaggctgaggcgggaggatggctttaccaccatgtcaaggctgcagtgagctcatgatcataccactgcacttaacttggcaacagagcaagaccctgtccctaaaataaataaaaggaaaacaaaaaaagctcctca

SEQ ID NO: 409875 - DNA, 986 bp, Homo sapiens
ccccacggccgcgcctgcgcactggccacgcggacggcgcgatggcggcggctgccgccgagacccccgaagtccttcgggaatgcggttgcaagggcatccggacctgtctgatctgcgagcggcagcgcggcagtgacccgccctgggagctgcccccagcgaaaacataccgtttcatttactgctccgacaccggctgggccgtgggcacagaggagtctgactttgagggctgggccttccccttcccaggagtgatgctgatcgaggactttgtgacccgggaggaagaagccgagttggtgcggctcatggaccgtgacccctggaagctctcccagtctggacggaggaagcaggactatggccccaaagtcaactttcggaaacagaagctaaagaccgagggcttctgcggcctccccagcttcagccgggaggtggtgcggaggatgggcctctacccggggctggagggcttccggcccgtcgagcagtgcaacctggactactgccccgagcggggctctgccattgacccccacctggacgacgcctggctgtggggggagcggctggtcagcctcaacctcctgtcccccaccgtgctgtccatgtgtcgggaggcgcccgggagcctgctcctctgctcggccccgtcggctgccccggaggccttggtggacagcgtgatagcacccagccggtcggtgctatgccaggaggtggaggattgcttgaggccagcctgggcaacatagtgagacccccatctctacaaaaaatacaaacattagctgggcgtctgggcatggtggcacacacctgtagtcccagctactcgaaaggctgaggcgggaggatggctttaccaccatgtcaaggctgcagtgagctcatgatcataccactgcacttaacttggcaacagagcaagaccctgtccctaaaataaataaaaggaaaacaaaaaaagctcctca

SEQ ID NO: 409876 - DNA, 394 bp, Homo sapiens
ttctgaagataaataagttgcctgcttccctcttgtgtttcatatgtctgcagtgaacagtaatgagtatagctgtaaattagttaagatagaaccgatggggaaattataaatctgaatctaaaacatatttgataagtaagtcaaagtttctccacttaaaggtcatccccttctagtggaagcatatttttctcaaaatttggcaaccttggttttttttttttcctgggaagtctggagatgctcagcttttaaacaactattaaagtgtactttgttaccctgctttcccctgcttcatctttcaactgcagttagatgatcatgagataatcagtaaacagagaccttctatctagccctaagatgactgaaacaaccacagaattag

SEQ ID NO: 409877 - DNA, 551 bp, Homo sapiens
gtggatgtgtaatattaactggcacattgacaccctaatttttgcaaatggtaaagccattccacatatgcatttgttcaagaagctaatgtttattgaaaacctattgtgttctaagccatgaaccatccccaggtaagtgacctcagctctgccattacgagtcctctggggctggccagggaaggtaagagcccaccctcctcatctgtggagttgctatggagatctctgcacctctagacagatactaaggactcaatgcaactggcagaacatttttttgatagcacaagatgaaaaacaatttgcaaggtatttctgaaaagttaatgaaaattgtaggatagttgaaagcaaaagtgaacattatgaggcatatgatactgttaaaatcatcatacactgctgtaaagcagtttcaatatctgtatgtctgccccaggaataatcaaccaggtattacctagaatagtgtttttcaacttctgcaactgtaatctagagcaagagatgacaagttttgcattatggcccagtacgcacatgcc

SEQ ID NO: 409878 - DNA, 544 bp, Homo sapiens
aaggcaaaggggaagcaaacgcatcttcacatggctggcacagaaaagacagggtgaagggggaagtgctacacacactttcaaacaacagatctcgtgagaactcactcactatcacatgaacagcaagggggaaatccgcctccatgatccagtcacctcctaccaggtccctcccccaacattgggaattacaattcaacatgagatttgggtggggatacagagccaaaccatgtcagcttccccagactctcatcagaaacagatgcagcaccacgtttgtacagccagcagaaccaagaaccaactaaattccttttctttaaaaattacccagcctccatcctggtgaacacggtgaaacctcgtctctactaaaaacacaaaaaattagctgggtgtggtggcgggtgcctgcagtcccagctactcgggaggctgaggcaggggaatagcatgaacccctgggggcggagcttgcagtgagccgagatcgcgccactgcactccagcctgagtgacagagcaagactccgtctca

SEQ ID NO: 409879 - DNA, 657 bp, Homo sapiens
ctctcatcctgccttgtgtggtgattatctctttctgcattgtcttctctactagactcatggctccttgagggcaggtacctacctgtctttatatccagcagagacgtggaattgagcagtgttgaataaatgctagtaaaataaactgtcatagcaagcctctcttggacacctatgtgctgaagttaaaaagtttttcaaatttggactgaaaaaatgagaaagcccaaaatgactattaaatatacatgtatgtgtgtgtatacatacacacagtcatgcaccacgtaacgatgtttcagtcagcagctgactgaatatatgacggtggtcccataagattataatggaactaaacaattcctatcacctagcgactcttagccttcgtaatgtcatagcgtaacgcattagtcacgtgtttgtggtgatgttggtgtgaacaaatgtactgtgttgcctgccagtcatataaaatatagtacacaatactggggtaatggtaataaatgactgttactggtttatgttttatttatttcattatttaattttcagtgttctttagctatggtttatgtatttactatcttatagtttttatcattattttatggtgtactcctatttattaaaaaaaatgttaactgtaaa

SEQ ID NO: 409880 - DNA, 1386 bp, Homo sapiens
cagggccagcaggctgtcaggctcacagaggcccgagggtctcccagcgacttgtcgactctggtgtgagtctggcaggaggtaacccagtcccggggagggcggaggctgggcgggcgagttcccctttccccagctgggccgctgcccacccggggagcggcccgccccctccaccctcataaaagcacccccagggccctgcctgggtcagtgtctcagccacagcggcttcaccatgcacagctgggagcgcctggcagttctggtcctcctaggagcggccgcctgcgcggcgccgccccgtggtcggatcctgggcggcagagaggccgaggcgcacgcgcggccctacatggcgtcggtgcagctgaacggcgcgcacctgtgcggcggcgtcctggtggcggagcagtgggtgctgagcgcggcgcactgcctggaggacgcggccgacgggaaggtgcaggttctcctgggcgcgcactccctgtcgcagccggagccctccaagcgcctgtacgacgtgctccgcgcagtgccccacccggacagccagcccgacaccatcgaccacgacctcctgctgctacagctgtcggagaaggccacactgggccctgctgtgcgccccctgccctggcagcgcgtggaccgcgacgtggcaccgggaactctctgcgacgtggccggctggggcatagtcaaccacgcgggccgccgcccggacagcctgcagcacgtgctcttgccagtgctggaccgcgccacctgcaaccggcgcacgcaccacgacggcgccatcaccgagcgcttgatgtgcgcggagagcaatcgccgggacagctgcaagggtgactccgggggcccgctggtgtgcgggggcgtgctcgagggcgtggtcacctcgggctcgcgcgtttgcggcaaccgcaagaagcccgggatctacacccgcgtggcgagctatgcggcctggatcgacagcgtcctggcctagggtgccggggcctgaaggtcagggtcacccaagcaacaaagtcccgagcaatgaagtcatccactcctgcatctggttggtctttattgagcacctactatatgcagaaggggaggccgaggtgggaggatcattggatctcaggagttcgagatcagcatgggccacgtagcgcgactccatctctacaaataaataaaaaattagctgggcaattggcgggcatggaggtgggtgcttgtagttccagctactcaggaggctgaggtgggaggatgacttgaacgcaggaggctgaggctgcagtgagttgtgattgcaccactgccctccagcctgggcaacagagtgaaaccttgtctctctctacaaaaaaaaaaaaaaaa

SEQ ID NO: 409881 - DNA, 975 bp, Homo sapiens
cagggccagcaggctgtcaggctcacagaggcccgagggtctcccagcgacttgtcgactctggtgtgagtctggcaggaggtaacccagtcccggggagggcggaggctgggcgggcgagttcccctttccccagctgggccgctgcccacccggggagcggcccgccccctccaccctcataaaagcacccccagggccctgcctgggtcagtgtctcagccacagcggcttcaccatgcacagctgggagcgcctggcagttctggtcctcctaggagcggccgcctgcgcggcgccgccccgtggtcggatcctgggcggcagagaggccgaggcgcacgcgcggccctacatggcgtcggtgcagctgaacggcgcgcacctgtgcggcggcgtcctggtggcggagcagtgggtgctgagcgcggcgcactgcctggaggacgcggccgacgggaaggtgcaggttctcctgggcgcgcactccctgtcgcagccggagccctccaagcgcctgtacgacgtgctccgcgcagtgccccacccggacagccagcccgacaccatcgacagcgtcctggcctagggtgccggggcctgaaggtcagggtcacccaagcaacaaagtcccgagcaatgaagtcatccactcctgcatctggttggtctttattgagcacctactatatgcagaaggggaggccgaggtgggaggatcattggatctcaggagttcgagatcagcatgggccacgtagcgcgactccatctctacaaataaataaaaaattagctgggcaattggcgggcatggaggtgggtgcttgtagttccagctactcaggaggctgaggtgggaggatgacttgaacgcaggaggctgaggctgcagtgagttgtgattgcaccactgccctccagcctgggcaacagagtgaaaccttgtctctctctacaaaaaaaaaaaaaaaa

SEQ ID NO: 409882 - DNA, 385 bp, Homo sapiens
gctatttaagtgatggacagcaggtgaccttgctgtgtcagctggacctgaggtgctggtggaactctcagaaagggccggaggcccccccgacttgttttcaaatccaggggaggggccagtgggggaggagtaaccacttctgagcacctactatgggcgcagcacgtgtgggattgcttgcattcagcctcactggacccttgcgtccacccaggaggtggcaatgttacccccagtgttgagacccaaagggggacgtgacttgtccacagtcacagaaagtggggagctgggatttgaacccacctctacctggtctcagtccagggatcttctagcccacctcccaggctgtcttggagctccacctctaatccaaagg

SEQ ID NO: 409883 - DNA, 446 bp, Homo sapiens
ccatttcccatctttcttttcagtccttgcgcaccggggaacaaggtcgtgaaaaaaaaggtcttggtgaggtgccgccatttcatctgtcctcattctctgcgcctttcgcagagcttccagcagcggtatgttgggccagagcatccggaggttcacaacctctgtggtccgtaggagccactatgaggagggccctgggaagaatttgccattttcagtggaaaacaagtggtcgttactagctaagatgtgtttgtactttggatctgcatttgctacacccttccttgtagtaagacaccaactgcttaaaacataaggatgtttcagttcctccatttaacagatatgaagagcattttaagaggtgcagcctctggaagtggatcaaactagaactcatatgccatactagatatgtttgtcaataaacttatgacgtg

SEQ ID NO: 409884 - DNA, 434 bp, Homo sapiens
gaattcactagtaatattactagtgggaacaaggtcgtgaaaaaaaaggtcttggtgaggtgccgccatttcatctgtcctcattctctgcgcctttcgcagagcttccagcagcggtatgttgggccagagcatccggaggttcacaacctctgtggtccgtaggagccactatgaggagggccctgggaagaatttgccattttcagtggaaaacaagtggtcgttactagctaagatgtgtttgtactttggatctgcatttgctacacccttccttgtagtaagacaccaactgcttaaaacataaggatgtttcagttcctccatttaacagatatgaagagcattttaagaggtgcagcctctggaagtggatcaaactagaactcatatgccatactagatatgtttgtcaataaacttatgacgtg

SEQ ID NO: 409885 - DNA, 644 bp, Homo sapiens
ccatttcccatctttcttttcagtccttgcgcaccggggaacaaggtcgtgaaaaaaaaggtcttggtgaggtgccgccatttcatctgtcctcattctctgcgcctttcgcagagcttccagcagcggtatgttgggccagagcatccggaggttcacaacctctgtggtccgtaggagccactatgaggagggccctgggaagaatttgccattttcagtggaaaacaagtggtcgttactagctaagatgtgtttgtactttggatctgcatttgctacacccttccttgtagtaagacaccaactgcttaaaacataaggatgtttcagttcctccatttaacagatatgaagagcattttaagaggtgcagcctctggaagtggatcaaactagaactcatatgccatactagatatgtttgtcaataaacttatgacgtgaatgcttaatgcctcttttttgaaatagggaatgtaataattggccatttgcctactttattatttgggtaacattccagtattactctctgtgatttagcttatttaatggtgttaaactgaggttatattaaatttttgattcccaggtcaggattttgttggtaatttatataataaaagggaaatacaaatcga

SEQ ID NO: 409886 - DNA, 448 bp, Homo sapiens
gcggccgcctactactactaaattcgcggccgcgtcgacggaacaaggtcgtgaaaaaaaaggtcttggtgaggtgccgccatttcatctgtcctcattctctgcgcctttcgcagagcttccagcagcggtatgttgggccagagcatccggaggttcacaacctctgtggtccgtaggagccactatgaggagggccctgggaagaatttgccattttcagtggaaaacaagtggtcgttactagctaagatgtgtttgtactttggatctgcatttgctacacccttccttgtagtaagacaccaactgcttaaaacataaggatgtttcagttcctccatttaacagatatgaagagcattttaagaggtgcagcctctggaagtggatcaaactagaactcatatgccatactagatatgtttgtcaataaacttatgacgtg

SEQ ID NO: 409887 - DNA, 729 bp, Homo sapiens
  misc_feature (599)..(599): n is a, c, g, or t
  misc_feature (641)..(641): n is a, c, g, or t
  misc_feature (654)..(654): n is a, c, g, or t
  misc_feature (662)..(662): n is a, c, g, or t
gaattcactagtaatattactagtgggaacaaggtcgtgaaaaaaaaggtcttggtgaggtgccgccatttcatctgtcctcattctctgcgcctttcgcagagcttccagcagcggtatgttgggccagagcatccggaggttcacaacctctgtggtccgtaggagccactatgaggagggccctgggaagaatttgccattttcagtggaaaacaagtggtcgttactagctaagatgtgtttgtactttggatctgcatttgctacacccttccttgtagtaagacaccaactgcttaaaacataaggatgtttcagttcctccatttaacagatatgaagagcattttaagaggtgcagcctctggaagtggatcaaactagaactcatatgccatactagatatgtttgtcaataaacttatgacgtgaaaaaaaaaaaaaaaaaaaaaaaaaaaaaaaaaaaccgagactttctctctctcctcgtgccgaattcggcacgaggaatggctccacgagggttcagctgtctcttacttttaaccagtgaaattgacctgcccgtgaagaggcgggcatgacacagcaagacnagaagaccctatgagctttaattattaatgcaacagtacctncaaacccacagtnctaaactnccaacctgcttaaaccggaaagcgactctttactcaatggccaatactgccaacggaccagttcctt

SEQ ID NO: 409888 - DNA, 414 bp, Homo sapiens
gcggccgcctactactactaaattcgcggccgcgtcgacgtgccgccatttcatctgtcctcattctctgcgcctttcgcagagcttccagcagcggtatgttgggccagagcatccggaggttcacaacctctgtggtccgtaggagccactatgaggagggccctgggaagaatttgccattttcagtggaaaacaagtggtcgttactagctaagatgtgtttgtactttggatctgcatttgctacacccttccttgtagtaagacaccaactgcttaaaacataaggatgtttcagttcctccatttaacagatatgaagagcattttaagaggtgcagcctctggaagtggatcaaactagaactcatatgccatactagatatgtttgtcaataaacttatgacgtg

SEQ ID NO: 409889 - DNA, 538 bp, Homo sapiens
  misc_feature (30)..(30): n is a, c, g, or t
cgcggccggcgacacggctgcgagagacgncgaagaggggaacaaggtcgtgaaaaaaaaggtcttggtgaggtgccgccatttcatctgtcctcattctctgcgcctttcgcagagcttccagcagcggtatgttgggccagagcatccggaggttcacaacctctgtggtccgtaggagccactatgaggagggccctgggaagaatttgccattttcagtggaaaacaagtggtcgttactagctaagatgtgtttgtactttggatctgcatttgctacacccttccttgtagtaagacaccaactgcttaaaacataaggatgtttcagttcctccatttaacagatatgaagagcattttaagaggtgcagcctctggaagtggatcaaactagaactcatatgccatactagatatgtttgtcaataaacttatgacgtgtcaacaaacctattccgcgactccatctcctgcccccgcccttcctcaagaaacccccctccgcccgtctctcgccccccccgcccctccc

SEQ ID NO: 409890 - DNA, 371 bp, Homo sapiens
gcggccgcctactactactaaattcgcggccgcgtcgacggaacaaggtcgtgaaaaaaaaggtcttggtgaggtgccgccatttcatctgtcctcattctctgcgcctttcgcagagcttccagcagcgaatttgccattttcagtggaaaacaagtggtcgttactagctaagatgtgtttgtactttggatctgcatttgctacacccttccttgtagtaagacaccaactgcttaaaacataaggatgtttcagttcctccatttaacagatatgaagagcattttaagaggtgcagcctctggaagtggatcaaactagaactcatatgccatactagatatgtttgtcaataaacttatgacgtg

SEQ ID NO: 409891 - DNA, 596 bp, Homo sapiens
tggctgtgactcgcgcacctgcaaggccgcctccgggctgtggcgtgggagatgatagccagaaaccaggctgagacgcagactagcattccacttagcccaaggaccagtgaggaagctgggcatcctagcgcgtagccgctaaaggaatgggcagaatttgccattttcagtggaaaacaagtggtcgttactagctaagatgtgtttgtactttggatctgcatttgctacacccttccttgtagtaagacaccaactgcttaaaacataaggatgtttcagttcctccatttaacagatatgaagagcattttaagaggtgcagcctctggaagtggatcaaactagaactcatatgccatactagatatgtttgtcaataaacttatgacgtgaatgcttaatgcctcttttttgaaatagggaatgtaataattggccatttgcctactttattatttgggtaacattccagtattactctctgtgatttagcttatttaatggtgttaaactgaggttatattaaatttttgattcccaggtcaggattttgttggtaatttatataataaaagggaaatacaaatcga

SEQ ID NO: 409892 - DNA, 822 bp, Homo sapiens
ccatttcccatctttcttttcagtccttgcgcaccggggaacaaggtcgtgaaaaaaaaggtcttggtgaggtgccgccatttcatctgtcctcattctctgcgcctttcgcagagcttccagcagcggtatgttgggccagagcatccggaggttcacaacctctgtggtccgtaggagccactatgaggagggccctgggaagaatttgccattttcagtggaaaacaagtggtcgttactagctaagatgtgtttgtactttggatctgcatttgctacacccttccttgtagtaagacaccaactgcttaaaacataaggatgtttcagttcctccatttaacagatatgaagagcattttaagaggtgcagcctctggaagtggatcaaactagaactcatatgccatactagatatgtttgtcaataaacttatgacgtgaaaaaaaaaaaaaaaaaaaaaaaaaaaaaaaaaaaaacaaaaaaaaaaaaacaacaaacaaaaaaaaaaaaaaagaaaaaacaacaaaaaacaagagagggggggcgcgcgcgcgcctgtcgaaaaaatgcccccccccgcgggggggcgcgccgccaagacgtgccgcgcgccgcaccccgacgtttttgttgtaaaaaaagagggggcgtccaatatatgggggagcgagccgtattaattaacgagccagcggagacgagcgcgccacggagcgagttcaaacaaacagcgcgtggcggaggaggggaaaaaacacgggcggcaggggggggataatctggaggagagagagagaacacacatatcagggagg

SEQ ID NO: 409893 - DNA, 810 bp, Homo sapiens
gaattcactagtaatattactagtgggaacaaggtcgtgaaaaaaaaggtcttggtgaggtgccgccatttcatctgtcctcattctctgcgcctttcgcagagcttccagcagcggtatgttgggccagagcatccggaggttcacaacctctgtggtccgtaggagccactatgaggagggccctgggaagaatttgccattttcagtggaaaacaagtggtcgttactagctaagatgtgtttgtactttggatctgcatttgctacacccttccttgtagtaagacaccaactgcttaaaacataaggatgtttcagttcctccatttaacagatatgaagagcattttaagaggtgcagcctctggaagtggatcaaactagaactcatatgccatactagatatgtttgtcaataaacttatgacgtgaaaaaaaaaaaaaaaaaaaaaaaaaaaaaaaaaaaaacaaaaaaaaaaaaacaacaaacaaaaaaaaaaaaaaagaaaaaacaacaaaaaacaagagagggggggcgcgcgcgcgcctgtcgaaaaaatgcccccccccgcgggggggcgcgccgccaagacgtgccgcgcgccgcaccccgacgtttttgttgtaaaaaaagagggggcgtccaatatatgggggagcgagccgtattaattaacgagccagcggagacgagcgcgccacggagcgagttcaaacaaacagcgcgtggcggaggaggggaaaaaacacgggcggcaggggggggataatctggaggagagagagagaacacacatatcagggagg

SEQ ID NO: 409894 - DNA, 926 bp, Homo sapiens
ccatttcccatctttcttttcagtccttgcgcaccggggaacaaggtcgtgaaaaaaaaggtcttggtgaggtgccgccatttcatctgtcctcattctctgcgcctttcgcagagcttccagcagcggtatgttgggccagagcatccggaggttcacaacctctgtggtccgtaggagccactatgaggagggccctgggaagaatttgccattttcagtggaaaacaagtggtcgttactagctaagatgtgtttgtactttggatctgcatttgctacacccttccttgtagtaagacaccaactgcttaaaacataaggatgtttcagttcctccatttaacagatatgaagagcattttaagaggtgcagcctctggaagtggatcaaactagaactcatatgccatactagatatgtttgtcaataaacttatgacgtgaaaaaaaaaaaaaactccggggcagggtggggacggtcggggtactcggaaagcaagcctacgtggctcactataacgtataatcctttcctttccaagatgcctgaggaagtgcaccagggagaggaggagggggagactttggccttcaggcagaaatggccaattcatgtccctcatcatagagtaccttctattccaacagggagatttccctccgggagtggactctcctaaggcttactgatgcttgtggacaagatgcgttatgaaagcctgagagacccttcgaatgtgggacggggtaacgagttgaatttggacattttgcccaacactcaaggaaggttcgctgactgggtgagaccaggtcttggttgaccaaggtggttcttaaattttgggaccttgccagttggtataaagttcaaggggcataggcggggaaaattctgatggggagggggaggttatatcggc

SEQ ID NO: 409895 - DNA, 710 bp, Homo sapiens
ccatttcccatctttcttttcagtccttgcgcaccggggaacaaggtcgtgaaaaaaaaggtcttggtgaggtgccgccatttcatctgtcctcattctctgcgcctttcgcagagcttccagcagcggtatgttgggccagagcatccggaggttcacaacctctgtggtccgtaggagccactatgaggagggccctgggaagaatttgccattttcagtggaaaacaagtggtcgttactagctaagatgtgtttgtactttggatctgcatttgctacacccttccttgtagtaagacaccaactgcttaaaacataaggatgtttcagttcctccatttaacagatatgaagagcattttaagaggtgcagcctctggaagtggatcaaactagaactcatatgccatactagatatgtttgtcaataaacttatgacgtgaacaaaaaaaaaaaaacaacaaacaaaaaatagcattaacacacatccaaatgccagtgcaggagtcccggggtccatcaaagagctaaattcaagtgtccactacacactggagccgtccagaatgactggttgtggcaacccaggtgtacccttgccagtccgtgtccggggttggcgctctgggcaatgctgacagggaacgagcaggcaacgggcggtgcccactaagaccttttccccctgttgccggttgcttgtggt

SEQ ID NO: 409896 - DNA, 774 bp, Homo sapiens
ccatttcccatctttcttttcagtccttgcgcaccggggaacaaggtcgtgaaaaaaaaggtcttggtgaggtgccgccatttcatctgtcctcattctctgcgcctttcgcagagcttccagcagcggtatgttgggccagagcatccggaggttcacaacctctgtggtccgtaggagccactatgaggagggccctgggaagaatttgccattttcagtggaaaacaagtggtcgttactagctaagatgtgtttgtactttggatctgcatttgctacacccttccttgtagtaagacaccaactgcttaaaacataaggatgtttcagttcctccatttaacagatatgaagagcattttaagaggtgcagcctctggaagtggatcaaactagaactcatatgccatactagatatgtttgtcaataaacttatgacgtgaaaaactatacgctcactcacagccctacactcatccgcgcacagccgcacaagaaaccaccacccgcgagcaagcttattattcggacggcattacacgctcagtggccattcgccatatggggatagtttaccgtcccgggcggcggtttacaagttctgatgggcaccccgggtttcccactttaatgtcttgcgacatccctttgccggttggttaatcaagggcttaggtctccttcaagggtacgctaattgaaggctatcagatatgggcagcgtaatgtgacaatttcacgaggacgtacgtttgagatcccgatgattc

SEQ ID NO: 409897 - DNA, 842 bp, Homo sapiens
ggctagtacggctggggttgatcggccgaggggaacaaggtcgtgaaaaaaaaggtcttggtgaggtgccgccatttcatctgtcctcattctctgcgcctttcgcagagcttccagcagcggtatgttgggccagagcatccggaggttcacaacctctgtggtccgtaggagccactatgaggagggccctgggaagaatttgccattttcagtggaaaacaagtggtcgttactagctaagatgtgtttgtactttggatctgcatttgctacacccttccttgtagtaagacaccaactgcttaaaacataaggatgtttcagttcctccatttaacagatatgaagagcattttaagaggtgcagcctctggaagtggatcaaactagaactcatatgccatactagatatgtttgtcaataaacttatgacgtgaaaaaaaaaaaaaaaaaaaaaaaaaaaaaaaaaaaaaaaaaaaaaaaaaaaaaaacaaaaaaaaaaaaacaacaaacaaaaaagggggggggcaaaaaaaaaacaccgaggggggacaaaaaagagccaaaaaacaaaataagaaaagagaggcacacaaagagaggaacaaaacaagacgagggggcacgtgaaataaaaagaaggagagaggaacagagagcgaggcgccttgaggacacgccccactcgggggggaaaaaacagacggccacaaccccacacagagaacaaaacagccagaaagaaaacacaacccggagactaagaggataaacaaccacccaagacacggcgacagaaagagaatccagccgaacacacccggaaatcaccagcgga

SEQ ID NO: 409898 - DNA, 828 bp, Homo sapiens
ccatttcccatctttcttttcagtccttgcgcaccggggaacaaggtcgtgaaaaaaaaggtcttggtgaggtgccgccatttcatctgtcctcattctctgcgcctttcgcagagcttccagcagcggtatgttgggccagagcatccggaggttcacaacctctgtggtccgtaggagccactatgaggagggccctgggaagaatttgccattttcagtggaaaacaagtggtcgttactagctaagatgtgtttgtactttggatctgcatttgctacacccttccttgtagtaagacaccaactgcttaaaacataaggatgtttcagttcctccatttaacaggtagttagtggatttctaatcatgttaaagcaggcctttttattaagtagcctcttccccatcacccagaacacacacacaaatacattgttgtgtagggctgattcctgaggttatgtgtagatgtggcattggtggagactagttgtaaacctatataaaaatatttcaataatggccagtgtttattgaatactactgcttatcaggtacactttacatcgatatctcatgttctctagcaagcttgtgaggcggatgatagtaaccccatctgagacacagagatgttaagttgttcaacatctcataactagtataatggtggaccaggactcttgcccaggcagtttcttgttgcagaactcacacttttaaccagatatgaagagcattttaagaggtgcagcctctggaagtggatcaaactagaactcatatgccatactagatatgtttgtcaataaacttatgacgtg

SEQ ID NO: 409899 - DNA, 523 bp, Homo sapiens
cgatctagacgatcccgttatgaagcatctgagttcacaacctctgtggtccgtaggagccactatgaggagggccctgggaagaatttgccattttcagtggaaaacaagtggtcgttactagctaagatgtgtttgtactttggatctgcatttgctacacccttccttgtagtaagacaccaactgcttaaaacataaggatgtttcagttcctccatttaacagatatgaagagcattttaagaggtgcagcctctggaagtggatcaaactagaactcatatgccatactagatatgtttgtcaataaacttatgacgtgaatgcttaatgcctcttttttgaaatagggaatgtaataattggccatttgcctactttattatttgggtaacattccagtattactctctgtgatttagcttatttaatggtgttaaactgaggttatattaaatttttgattcccaggtcaggattttgttggtaatttatataataaaagggaaatacaaatcga

SEQ ID NO: 409900 - DNA, 530 bp, Homo sapiens
gcggccgcctactactactaaattcgcggccgcgtcgacggaacaaggtcgtgaaaaaaaaggtcttggtgaggtgccgccatttcatctgtcctcattctctgcgcctttcgcagagcttccagcagcgaatttgccattttcagtggaaaacaagtggtcgttactagctaagatgtgtttgtactttggatctgcatttgctacacccttccttgtagtaagacaccaactgcttaaaacataaggatgtttcagttcctccatttaacagatatgaagagcattttaagaggtgcagcctctggaagtggatcaaactagaactcatatgccatactagatatgtttgtcaataaacttatgacgtgaaaaaaaaaaaaaaaaaaaaaaaaaaaaaaaaaaatcatataaatataattaatataacaattatatatttatcaaattaaaaaaatctctggggggggcccgtgccccaattcccccttttgggagtatgtttccctccgcttaattgccgttatttt

SEQ ID NO: 409901 - DNA, 1542 bp, Homo sapiens
gcggccgcctactactactaaattcgcggccgcgtcgacggaacaaggtcgtgaaaaaaaaggtcttggtgaggtgccgccatttcatctgtcctcattctctgcgcctttcgcagagcttccagcagcgaatttgccattttcagtggaaaacaagtggtcgttactagctaagatgtgtttgtactttggatctgcatttgctacacccttccttgtagtaagacaccaactgcttaaaacataaggatgtttcagttcctccatttaacaggtagttagtggatttctaatcatgttaaagcaggcctttttattaagtagcctcttccccatcacccagaacacacacacaaatacattgttgtgtagggctgattcctgaggttatgtgtagatgtggcattggtggagactagttgtaaacctatataaaaatatttcaataatggccagtgtttattgaatactactgcttatcaggtacactttacatcgatatctcatgttctctagcaagcttgtgaggcggatgatagtaaccccatctgagacacagagatgttaagttgttcaacatctcataactagtataatggtggaccaggactcttgcccaggcagtttcttgttgcagaactcacacttttaaccaggtaaaactgataaactgattaatgttactctatcttgaacactgttactagaacagtagctgagaatgtgtcttttaaaacactataaacatttccatttcttttagaaagtggtcactgtgctcctagtttttaaattggcttacaatacttgtttaagttgtgaaaaatccctgaagataaaacccttctagtgctccttgatacataagtcccagataattatgcaattgtaaatctgtgcctcaccaactcagccatgttgggaaactcaaacttttaaatatactttcctcattaaggcagtggttcttaaatgaggatgattttacaacacaatggggcatttggcaatgtgagaccattttgatcgttccaacttgggggcaaaattaccagtggtgctgaggttgagaagccttgtgtcaaggggatatgttaatatatgctcaaaggagtcgttcatattggaaggttagcagatttgctgtgtgtggataaaatatttagcttaattgtcatcagagtttctcagagtaatactatagaacactaggatgattggaaagagtgtcatagtttagagggggaataacttatccaagctactaatgcggaaaggttgcggtgcatgtgatgaagcaaatcagtatgaatgaattcatgatactgtaaacgctttctgatgtactactcaaactgatagaaaatattttcatgaaactacatgatttctgttaaatgaatgggatttttaaaatgccattaatttctgtttttattttgcagatatgaagagcattttaagaggtgcagcctctggaagtggatcaaactagaactcatatgccatactagatatgtttgtcaataaacttatgacgtg

SEQ ID NO: 409902 - DNA, 499 bp, Homo sapiens
  misc_feature (48)..(48): n is a, c, g, or t
  misc_feature (51)..(51): n is a, c, g, or t
  misc_feature (56)..(56): n is a, c, g, or t
ggaagagggggttcgcttgggcgccgaccagttatagttttaggaaanggncctgngcggaatttgccattttcagtggaaaacaagtggtcgttactagctaagatgtgtttgtactttggatctgcatttgctacacccttccttgtagtaagacaccaactgcttaaaacataaggatgtttcagttcctccatttaacagatatgaagagcattttaagaggtgcagcctctggaagtggatcaaactagaactcatatgccatactagatatgtttgtcaataaacttatgacgtgaatgcttaatgcctcttttttgaaatagggaatgtaataattggccatttgcctactttattatttgggtaacattccagtattactctctgtgatttagcttatttaatggtgttaaactgaggttatattaaatttttgattcccaggtcaggattttgttggtaatttatataataaaagggaaatacaaatcga

SEQ ID NO: 409903 - DNA, 487 bp, Homo sapiens
ccatttcccatctttcttttcagtccttgcgcaccggggaacaaggtcgtgaaaaaaaaggtcttggtgaggtgccgccatttcatctgtcctcattctctgcgcctttcgcagagcttccagcagcggtatgttgggccagagcatccggaggttcacaacctctgtggtccgtaggagccactatgaggagggccctgggaagattttgccagtgtcagtgtttttctatgtattgctctataggtgtttgctaatctaaaaatgtatttacttgcttagttttctcaaatcaggagaaatctctataggcttgatgtttacagtagacgtggaaacattttctttgttccattttactcgctatctggggactcttagatatccttttcagaacaggagctggagagggatttatcaagtcttgacatagaatcacctgctctgaatcccctaaatatatgtggtcgacgcggccgcgaattta

SEQ ID NO: 409904 - DNA, 440 bp, Homo sapiens
ggctagtacggctggggttgatcggccgaggggaacaaggtcgtgaaaaaaaaggtcttggtgaggtgccgccatttcatctgtcctcattctctgcgcctttcgcagagcttccagcagcggtatgttgggccagagcatccggaggttcacaacctctgtggtccgtaggagccactatgaggagggccctgggaagaatttgccattttcagtggaaaacaagtggtcgttactagctaagatgtgtttgtactttggatctgcatttgctacacccttccttgtagtaagacaccaactgcttaaaacataaggatgtttcagttcctccatttaacagatatgaagagcattttaagaggtgcagcctctggaagtggatcaaactagaactcatatgccatactagatatgtttgtcaataaacttatgacgtg

SEQ ID NO: 409905 - DNA, 447 bp, Homo sapiens
  misc_feature (30)..(30): n is a, c, g, or t
cgcggccggcgacacggctgcgagagacgncgaagaggggaacaaggtcgtgaaaaaaaaggtcttggtgaggtgccgccatttcatctgtcctcattctctgcgcctttcgcagagcttccagcagcggtatgttgggccagagcatccggaggttcacaacctctgtggtccgtaggagccactatgaggagggccctgggaagaatttgccattttcagtggaaaacaagtggtcgttactagctaagatgtgtttgtactttggatctgcatttgctacacccttccttgtagtaagacaccaactgcttaaaacataaggatgtttcagttcctccatttaacagatatgaagagcattttaagaggtgcagcctctggaagtggatcaaactagaactcatatgccatactagatatgtttgtcaataaacttatgacgtg

SEQ ID NO: 409906 - DNA, 519 bp, Homo sapiens
gcggccgcctactactactaaattcgcggccgcgtcgacggaacaaggtcgtgaaaaaaaaggtcttggtgaggtgccgccatttcatctgtcctcattctctgcgcctttcgcagagcttccagcagcggtatgttgggccagagcatccggaggttcacaacctctgtggtccgtaggagccactatgaggagggccctgggaagaatttgccattttcagtggaaaacaagtggtcgttactagctaagatgtgtttgtactttggatctgcatttgctacacccttccttgtagtaagacaccaactgcttaaaacataaggatgtttcagttcctccatttaacagatatgaagagcattttaagaggtgcagcctctggaagtggatcaaactagaactcatatgccatactagatatgtttgtcaataaacttatgacgtgtaaaaaattgagcaagcttatgcatcgggcgcaattcgagtactttggcacattccctttagtgaggcgat

SEQ ID NO: 409907 - DNA, 848 bp, Homo sapiens
ccatttcccatctttcttttcagtccttgcgcaccggggaacaaggtcgtgaaaaaaaaggtcttggtgaggtgccgccatttcatctgtcctcattctctgcgcctttcgcagagcttccagcagcggtatgttgggccagagcatccggaggttcacaacctctgtggtccgtaggagccactatgaggagggccctgggaagaatttgccattttcagtggaaaacaagtggtcgttactagctaagatgtgtttgtactttggatctgcatttgctacacccttccttgtagtaagacaccaactgcttaaaacataaggatgtttcagttcctccatttaacagatatgaagagcattttaagaggtgcagcctctggaagtggatcaaactagaactcatatgccatactagatatgtttgtcaataaacttatgacgtgaaaaaaaaaaaaaaaaaaaaaaaaaaaaaaaaaaaaaaaaaaaaaaaaaaaaaaacaaaaaaaaaaaaacaacaaacaaaaaagggggggggcaaaaaaaaaacaccgaggggggacaaaaaagagccaaaaaacaaaataagaaaagagaggcacacaaagagaggaacaaaacaagacgagggggcacgtgaaataaaaagaaggagagaggaacagagagcgaggcgccttgaggacacgccccactcgggggggaaaaaacagacggccacaaccccacacagagaacaaaacagccagaaagaaaacacaacccggagactaagaggataaacaaccacccaagacacggcgacagaaagagaatccagccgaacacacccggaaatcaccagcgga

SEQ ID NO: 409908 - DNA, 751 bp, Homo sapiens
  misc_feature (600)..(600): n is a, c, g, or t
  misc_feature (642)..(642): n is a, c, g, or t
  misc_feature (655)..(655): n is a, c, g, or t
  misc_feature (663)..(663): n is a, c, g, or t
ccatttcccatctttcttttcagtccttgcgcaccggggaacaaggtcgtgaaaaaaaaggtcttggtgaggtgccgccatttcatctgtcctcattctctgcgcctttcgcagagcttccagcagcggtatgttgggccagagcatccggaggttcacaacctctgtggtccgtaggagccactatgaggagggccctgggaagaatttgccattttcagtggaaaacaagtggtcgttactagctaagatgtgtttgtactttggatctgcatttgctacacccttccttgtagtaagacaccaactgcttaaaacataaggatgtttcagttcctccatttaacagatatgaagagcattttaagaggtgcagcctctggaagtggatcaaactagaactcatatgccatactagatatgtttgtcaataaacttatgacgtgaaaaaaaaaaaaaaaaaaaaaaaaccgagactttctctctctcctcgtgccgaattcggcacgaggaatggctccacgagggttcagctgtctcttacttttaaccagtgaaattgacctgcccgtgaagaggcgggcatgacacagcaagacnagaagaccctatgagctttaattattaatgcaacagtacctncaaacccacagtnctaaactnccaacctgcatttgctaagacttcgaccgtccaaagccaacttctttacttcattgaacccaatacttgaccaacggaccaagttacg

SEQ ID NO: 409909 - DNA, 518 bp, Homo sapiens
ccatttcccatctttcttttcagtccttgcgcaccggggaacaaggtcgtgaaaaaaaaggtcttggtgaggtgccgccatttcatctgtcctcattctctgcgcctttcgcagagcttccagcagcggtatgttgggccagagcatccggaggttcacaacctctgtggtccgtaggagccactatgaggagggccctgggaagaatttgccattttcagtggaaaacaagtggtcgttactagctaagatgtgtttgtactttggatctgcatttgctacacccttccttgtagtaagacaccaactgcttaaaacataaggatgtttcagttcctccatttaacagatatgaagagcattttaagaggtgcagcctctggaagtggatcaaactagaactcatatgccatactagatatgtttgtcaataaacttatgacgtgctagtatggcatatgagttctagtttgatccacttccagaggctgcactcttaaaatgctcttcatatcgtc

SEQ ID NO: 409910 - DNA, 1617 bp, Homo sapiens
ccatttcccatctttcttttcagtccttgcgcaccggggaacaaggtcgtgaaaaaaaaggtcttggtgaggtgccgccatttcatctgtcctcattctctgcgcctttcgcagagcttccagcagcggtatgttgggccagagcatccggaggttcacaacctctgtggtccgtaggagccactatgaggagggccctgggaagaatttgccattttcagtggaaaacaagtggtcgttactagctaagatgtgtttgtactttggatctgcatttgctacacccttccttgtagtaagacaccaactgcttaaaacataaggatgtttcagttcctccatttaacaggtagttagtggatttctaatcatgttaaagcaggcctttttattaagtagcctcttccccatcacccagaacacacacacaaatacattgttgtgtagggctgattcctgaggttatgtgtagatgtggcattggtggagactagttgtaaacctatataaaaatatttcaataatggccagtgtttattgaatactactgcttatcaggtacactttacatcgatatctcatgttctctagcaagcttgtgaggcggatgatagtaaccccatctgagacacagagatgttaagttgttcaacatctcataactagtataatggtggaccaggactcttgcccaggcagtttcttgttgcagaactcacacttttaaccaggtaaaactgataaactgattaatgttactctatcttgaacactgttactagaacagtagctgagaatgtgtcttttaaaacactataaacatttccatttcttttagaaagtggtcactgtgctcctagtttttaaattggcttacaatacttgtttaagttgtgaaaaatccctgaagataaaacccttctagtgctccttgatacataagtcccagataattatgcaattgtaaatctgtgcctcaccaactcagccatgttgggaaactcaaacttttaaatatactttcctcattaaggcagtggttcttaaatgaggatgattttacaacacaatggggcatttggcaatgtgagaccattttgatcgttccaacttgggggcaaaattaccagtggtgctgaggttgagaagccttgtgtcaaggggatatgttaatatatgctcaaaggagtcgttcatattggaaggttagcagatttgctgtgtgtggataaaatatttagcttaattgtcatcagagtttctcagagtaatactatagaacactaggatgattggaaagagtgtcatagtttagagggggaataacttatccaagctactaatgcggaaaggttgcggtgcatgtgatgaagcaaatcagtatgaatgaattcatgatactgtaaacgctttctgatgtactactcaaactgatagaaaatattttcatgaaactacatgatttctgttaaatgaatgggatttttaaaatgccattaatttctgtttttattttgcagatatgaagagcattttaagaggtgcagcctctggaagtggatcaaactagaactcatatgccatactagatatgtttgtcaataaacttatgacgtg

SEQ ID NO: 409911 - DNA, 93 bp, Homo sapiens
tttacaagtgccgaacaatgtttcttgcactgataatacaagggtgtgcaaaactgacaggaatccctgctctcatggagcttacagtaacag

SEQ ID NO: 409912 - DNA, 314 bp, Homo sapiens
atccttgagaaaattaataaaattattaaactttttagccatgttgatcataaaaaaagagatgacataaattgccaagggtcaggaatgagagagttaatgttagttcggattccactaaaggaaaaaagaaaattatgaagatctttatgcctatacatttgacagtgtagatgaaatggaccaattccttgaaagacataaactaccaaaattcaccacagaagaaaccaataacccaaatgaatttgaatttgtagttaaatatcttcatacacatacacaaatttctaggcccagagttcttcactaga

SEQ ID NO: 409913 - DNA, 581 bp, Homo sapiens
agcaacttcacaggtgaatcaaagacaaggcaagattggaaacatggccaaagatgaggatagcaaaaagtctggaaccaaaactgccgacttcacattgttaaatatgaggaagagaagctggaaaaatcagcatcagtcaaaaagatccatgtcaaatctgattccggtcagtacagtgttgggatagggtatctgtcctcagtaacagcctgttgaccacctttatcttgaactggccacaagcctcctacttaatttgacatgatatgcctagaaaatgtacacatgtgttcggtataatatagccacaggggccaaccacaatttttattttcatggcatgcatcaaatttttactatagtaaatccacaagtaaaggaacatcttactaggtaagactgatggcattcagaagccctcttcagtgatattctgatggataccattttggggaaacttgggttgatttattgttttatttaaatctcagggtgttgggccagggacggtggctcacacctgtaatcccagcattttgagaggccgagacaggaggactgcttgagcccaggagttt

SEQ ID NO: 409914 - DNA, 848 bp, Homo sapiens
aacaatcaaggttgatttcttcctcatatcttatgtcctttgcgagttggcaagagctactcattgtggttatttgtgggcctgagctgatgcagctgcccccatcttgtgctaatcatagtgccagaagcaaaaaaaaaaaaattgcacattgataaattaagcagtgatggctaaaagcctcctacccaaagcaacacattctgtttctgctcatgtttcatgagttaaagcctgtaacttcaaaggggtagggaagtgtaatcctaccaggtgtctaggagaagaacctgaactgtttgatgaactgaatacttctaccactgtgttggttttcaaggaaggggtgggaaagtctttgaaaactctcctgtgacccataaagttatatcctagaagccaatcctttctgtgttcataaaatcactggccttttcctgtggccgccaaggttgcagagagcagagctgtttgggaactcacttcaagaagtggtcagagcttgaggagggagggtcaggacaggagcagaggcagatggcatggcactgggccaggttccatatgacctgggtgccagcaaagctggccttggttttgcttatgcttgtatttgttaccaacctatatagcaagtatcacagtagaaaaacttacagaatggcctgactacacagagctcactgttgaaaaacgctgggttgtaactctaagatagcatctgctacattgctaaagaatgttttataacagggcttagatctgttaggaatcttagctgctactgttgcaacaccaatttatggaaagctgtgttatttattttgaaatataaacatgaaaaaaaa

SEQ ID NO: 409915 - DNA, 327 bp, Homo sapiens
agccatttaatctgtctcccaaattgctgagcctctgtgtgcctccacggtttcaaatgtgaaatgaggacaggaataaggcattgatttaaattagttataaatgcacagtacaaagagcggggtgcaggcctgttgatattaacactgtgagtgctcaggagccgtgttctgaatgctgggacagccacacccagaacaattacactacacagttagcagggcgtctgttgacttggaagagtgttggtgacatgtcactcaataagcatgtaagctacacagcaatgtgtacattgggaatctgttcgggttttttttaaagca

SEQ ID NO: 409916 - DNA, 889 bp, Homo sapiens
ataatgaatctactgaactctgttatagaacaagttcattttgcatgaacttctcttattgaagcagaagccacgtcatgagcctgggggctgccctctccccgtctgggagtgggacagaactgttcagtgccttgaaagtcacagatttctgactcctggaaggaactgggcagtcccaccagagcagaaagaaaggaggcaaacttggggagtgagaagccagcctcccagaggcccaggcctcgtgttccccacctccaaccctcccgtgaggagaggggcttggcctgggaccttgtaacttccttgcaagttaagtgagctatcctgtcacaaaagatagaaggaactgccctttgggacttcttttcactggaaacccagcactggttttatgttgagtgagtgggaagctgggactctgttttacagccatctgtactggagcctggacaaaccactggtctctatgggaggccccagcctcacatttccctggcaaggagagagaggtttagccatgtcctgggtctaggattacagcccagagatgggcacttaagaagacctggtcattggtccagacttgggccaaggctctcctctgtgagggatgggttttactggtgaattacctgtgtggagaagctatcagggccatgtttagcacactgaagggaccagtctccaccaagcactttaacatccctccagccagcatagattgatctcgtgttacagagagggcaaggtttttggcccctgtttgcagactccatgtcttaatcagagaccacagttttctctttgttccaatctgcgccacctcggtagccccactttccttgctgtgtggacttgaaacaaaataaaatgtgttgcttca

SEQ ID NO: 409917 - DNA, 836 bp, Homo sapiens
ataatgaatctactgaactctgttatagaacaagttcattttgcatgaacttctcttattgaagcagaagccacgtcatgagcctgggggctgccctctccccgtctgggagtgggacagaactgttcagtgccttgaaagtcacagatttctgactcctggaaggaactgggcagtcccaccagagcagaaagaaaggaggcaaacttggggagtgagaagccagcctcccagaggcccaggcctcgtgttccccacctccaaccctcccgtgaggagaggggcttggcctgggaccttgtaacttccttgcaagttaagtgagctatcctgtcactggttttatgttgagtgagtgggaagctgggactctgttttacagccatctgtactggagcctggacaaaccactggtctctatgggaggccccagcctcacatttccctggcaaggagagagaggtttagccatgtcctgggtctaggattacagcccagagatgggcacttaagaagacctggtcattggtccagacttgggccaaggctctcctctgtgagggatgggttttactggtgaattacctgtgtggagaagctatcagggccatgtttagcacactgaagggaccagtctccaccaagcactttaacatccctccagccagcatagattgatctcgtgttacagagagggcaaggtttttggcccctgtttgcagactccatgtcttaatcagagaccacagttttctctttgttccaatctgcgccacctcggtagccccactttccttgctgtgtggacttgaaacaaaataaaatgtgttgcttca

SEQ ID NO: 409918 - DNA, 529 bp, Homo sapiens
tttttctgtagagacagggtctcactattttgcctaagctggtcttgaactcctggcttcaagtggtccttccaccacagcctctcaaagtgccaggattacaggcatatgtcaccccaccctgctgtctgctatttcgaggagagactgtaggggtgaaagaggaaagccagttaacaaactattgccaaaaacggttaccagaatttgaatgtattaatatatttaatccttgcaacaacaacactaagtggctactattgctacccttattataaaagtgaggaaacttagccacagagaggttaagcaacttgctcagaattccacaatcagcaagctgtggaggcaggatttaaagagggcagcctggctctagggtccatgtggctgaacattatatggtatagacccacccagtataacacactgggagcacgaggcagggagctgtcttcccgacatggggaaatggtaacctactcttttagaagtcttcgagaaagtatataagccaaaagaagtcttt

SEQ ID NO: 409919 - DNA, 180 bp, Homo sapiens
aaattctgtggccgcgtcgacctgctctccagcctgggtgacagagtgagaccctgtctccaaaaaaagaaagtttctgttgggggagaagagcttggagggtcatactctgccattgtgctgacgttgctgtatttgtttttacattcaaactttcttttgtaataaaatatatcttga

SEQ ID NO: 409920 - DNA, 255 bp, Homo sapiens
tatgtctaattatgtttggagttcattcatacatttctgagcatttctaatactgatttatgtctttccattagagagggtacactttcaattgtaccaccatttgccaagtaactactgttaggtattgactttatgggtcattggctaaatgaaatttaaaaaggtgttttagtcaatcttaagctatatataagtcctacaattttggaagaaataaacatgatcttagcattaattaaggcaactgttaca

SEQ ID NO: 409921 - DNA, 351 bp, Homo sapiens
ttttcaaatgcacaggggaccgttaccaaagtaaagtaaatactgggccattaaagaagtctcaatacatttcaaaggttagaaatattacagaatatgttatcgaattacaacaaggctaattagaaatcagtagcagtaaggttttttaaaaaaaaaaaatccctaaatctttagaaatgaagttatatactccataataactcactactaaaatattacttcagaaagtcaactcatgggccaggtacagtggctcacgcctataatcccagcacttttagaggctgaggtgggaggctcacttgaggccaggagtttcagaccaacctgggcaacatggtgaaactc

SEQ ID NO: 409922 - DNA, 369 bp, Homo sapiens
tctctaatcttgtctgcttgccttatttcaggaagatagtcttcaagctctgatattctctctttcgcttggtcaattcagctattgatagttgtctttgcatcacaaagttctcgttctgtgtttttcagctccatcatgtcattctctaaactggttattctagttaacagctcctgtaatcttttatcatggttcttagcttctttgcattgggttagaacataatcctttagctcagcaaaatctgttattactcactttctgaagcccactttaatcagttcatccatctcagcttcagccctattctgtgcccttgctggagaagtgttgtgatcatttggaggaaaagaggctttctggctt

SEQ ID NO: 409923 - DNA, 411 bp, Homo sapiens
ttttttttcctttttgctccggtgtgctgctgaagttgttaaaatgaactcctgacttctccagagccgtttacattcacagacagctgtccagttgttattctttatggagtggtaaaaactgggatctcctactccatactcttgctgatgtcactaccctcaatatattcataagaaattgtatccaataaatttgcataactcatgagctaaattatagaatttaaacatggttagcttctaaaaagatattaacagcaatatatcaggaaataataatttttattcatcttatagtagtaaaactgcaattaaaactgacttaattttttatcaatatatataaaaaagtcccttttgtgttatcaattggctatggttttagaagtttccccttgatcaatttgt

SEQ ID NO: 409924 - DNA, 1247 bp, Homo sapiens
attttacacttaatttataatatttattgagtatattatgtcctcaacaagtaactataaaatgaaatacttaactcggtgaagactattttatgcaaagtttttttttttttttttttttttttttagcaatttcagtgtaatgaaagaatttaagctttgaatttataatttgctgtggtggggttaatttctgtcagtatttgagattgtattatcagtcttgcataatgaaatccttttttggctaagtatttaattcgaacatatttgcctttttaaaaagtgcttggcctaaacttattgtaactgcatgaaataagcatttgcttaaaacttaacattgtaaaattgttctctctgaaatgtgtgcagaatttaaatcatggccaaatgtattactattaccctatttacagtaatttgctttgcagaaaatatttcttcatcatggaactgtgaaatcaaattgaagatcttactggtaaaaatgacaaattaacaaaaggactaagacaagtggtgcccaaacaacctttttattctgcagttccatcatcataatagaccagttaacccaggagtcctaatgttttaaaacatcattgtggtgatcttgtttattctatctcactaaggatatccagtttcctaagctcttactggctagcaatttcgtcttaattttattgctaaatgttcaaattttgcttccaaactcactttatttttgcagatgtgtacatctgctaaatactaattttatgtaaatgattttgttgattatctttccacatcttaaaatgtttctaacagctttgagattttatctcaacaggctctctctgaccccaaagtagtacttaccttcgtgactactgacaaagtcacaaaatgcaggcgatgtcatgtatttcggtacaactaaatctaggaaacggttttttcattgcattactgcatattttcattttcatttaaattatgtcccctttttctcttgcttgaaacagtgctcctcgaactttgtcttccagcacattttaaagagaaccaattaaagaacaatcacacattctgcttattaaaggctatttaaaaagaaacattttgtattagaaaatggccaactttaaaacactattttttacactcataaaaatgttttttaaatcgccttgacaatcatcagcttttgaaatgtgaattcctattgccagagtaaaggtctcgtttttataccacca

SEQ ID NO: 409925 - DNA, 1464 bp, Homo sapiens
attttacacttaatttataatatttattgagtatattatgtcctcaacaagtaactataaaatgaaatacttaactcggtgaagactattttatgcaaagtttttttttttttttttttttttttttagcaatttcagtgtaatgaaagaatttaagctttgaatttataatttgctgtggtggggttaatttctgtcagtatttgagattgtattatcagtcttgcataatgaaatccttttttggctaagtatttaattcgaacatatttgcctttttaaaaagtgcttggcctaaacttattgtaactgcatgaaataagcatttgcttaaaacttaacattgtaaaattgttctctctgaaatgtgtgcagaatttaaatcatggccaaatgtattactattaccctatttacagtaatttgctttgcagaaaatatttcttcatcatggaactgtgaaatcaaattgaagatcttactggtaaaaatgacaaattaacaaaaggactaagacaagtggtgcccaaacaacctttttattctgcagttccatcatcataatagaccagttaacccaggagtcctaatgttttaaaacatcattgtggtgatcttgtttattctatctcactaaggatatccagtttcctaagctcttactggctagcaatttcgtcttaattttattgctaaatgttcaaattttgcttccaaactcactttatttttgcagatgtgtacatctgctaaatactaattttatgtaaatgattttgttgattatctttccacatcttaaaatgtttctaacagctttgagattttatctcaacaggctctctctgaccccaaagtagtacttaccttcgtgactactgacaaagtcacaaaatgcaggcgatgtcatgtatttcggtacaactaaatctaggaaacggttttttcattgcattactgcatattttcattttcatttaaattatgtcccctttttctcttgcttgaaacagtgctcctcgaactttgtcttccagcacattttaaagagaaccaattaaagaacaatcacacattctgcttattaaaggctatttaaaaagaaacattttgtattagaaaatggccaactttaaaacactattttttacactcataaaaatgttttttaaatcgccttgacaatcatcagcttttgaaatgtgaattcctattgccagagtaaaggtctcgtttttataccaccaaaaaaaaacaaaaaaaaaaaaaattgggggggggcgggcccgagagagttttcaaaacccatcgcgttggggcgcgacggccacaggtactgagacacgggcaatggggtcccaggacccgggacagaaagggggggttcccccaaaaaagccggggaacagggtctggacatcacagggtcggaggcaacaggctcacaggggccagagcgattaa

SEQ ID NO: 409926 - DNA, 1012 bp, Homo sapiens
  misc_feature (988)..(988): n is a, c, g, or t
  misc_feature (1001)..(1001): n is a, c, g, or t
attttacacttaatttataatatttattgagtatattatgtcctcaacaagtaactataaaatgaaatacttaactcggtgaagactattttatgcaaagtttttttttttttttttttttttttttagcaatttcagtgtaatgaaagaatttaagctttgaatttataatttgctgtggtggggttaatttctgtcagtatttgagattgtattatcagtcttgcataatgaaatccttttttggctaagtatttaattcgaacatatttgcctttttaaaaagtgcttggcctaaacttattgtaactgcatgaaataagcatttgcttaaaacttaacattgtaaaattgttctctctgaaatgtgtgcagaatttaaatcatggccaaatgtattactattaccctatttacagtaatttgctttgcagaaaatatttcttcatcatggaactgtgaaatcaaattgaagatcttactggtaaaaatgacaaattaacaaaaggactaagacaagtggtgcccaaacaacctttttattctgcagttccatcatcataatagaccagttaacccaggagtcctaatgttttaaaacatcattgtggtgatcttgtttattctatctcactaaggatatccagtttcctaagctcttactggctagcaatttcgtcttaattttattgctaaatgttcaaattttgcttccaaactcactttatttttgcagatgtgtacatctgctaaatactaattttatgtaaatgattttgttgattatctttccacatcttaaaatgtttctaacagctttgagattttatctcaacaggctctctctgaccccaaagtagtacttaccttcgtgactactgacaaagtcacaaaatgcaggcgatgtcatgtatttcggtacaactaaatctaggaaacggttttttcattgcattactgcatattttcattttcatttaaattatgntaccgcgaagggnatcgtctagag

SEQ ID NO: 409927 - DNA, 387 bp, Homo sapiens
aactaaatgagtcatgtaatttccaaatccatttcatacaggtgaagtatatgtgctatgtagacttcatcagagcgtactgttttgagtagggacagcgtgttttgcatgaacacatcacagtcccatttccgtgaaatgagattggcagatctacagaactcccaggtgttctgctgagtgtagccctggaggacagcaagtgctgtattgtcgtcaatccaccatgggctgcttctcagaagcccagtaatcccacaaatgataggcttgtctgtgattgcaagtcactgactatggacccggtcacctttttcttctatgtcactgaaatttattgacttgaagaggagtcatcctctttgtgacccccccacccaagtcaca

SEQ ID NO: 409928 - DNA, 438 bp, Homo sapiens
aactccacaataagaaaacaaatgccttgattaaaaaaatgggccaaataccttcacagacattttacaaaagaaaatataaggcagtgggtaaccatatgaacagatgatccctaatgtatatcagagaaatgcaaattaaaacaacgagatacggctacatacctattagattggtcaaagttcagaacactgacagcaccaatgctggcaaggatgtggagttacaggaactctcgtttattgctggtgggaatgcaaaatgttacagccactttagaagttaaggggagggaaagcattaggagatatacccaatgtaaatgatgagttaatgggtgcagcacaccaacatggcacatgtatacatatgtaacaaacctgcacgttgtgcacatgtaccctagaacttaaagtataataaaaagaaaaaagaag

SEQ ID NO: 409929 - DNA, 532 bp, Homo sapiens
ggtaagaattgcatatgttatgcataccctaatcctgttattcacagtaaggttgttagtataatatactactgccttcttaacaagtgaccacagttcattttcttgatattgaaaatctccttaggaagttctgtctattaccaagttaatgcgttggcattcttggatttattcttttaaaaatatttgctgagatcctgttatatgtcaggtcccatcctaggcacatatttatattaattctctcacatgtagtgaacaagtatttattttcaagctagcaaaaggaaatcaaattgttcatttcaactcatgtttaaaacgtgccacattgttagggcttagtcatactttaaatttagcataagagtttcttgagtcattcaatgctgtatatagtgagttctatatacctggtttaagccttcataataaaggcttgggttttgctgccatttgtaatgatagggttaaaaacaagtacacagttttatacctctatatgaaaatttttcagcaaggtatcttg

SEQ ID NO: 409930 - DNA, 439 bp, Homo sapiens
cattggaagatattgtaggggcaagtctcttaatcctccgtaattaaaactttggataattttataggttccttcctccagtgggtaacagaacagattacatcaatgttttatgttcacttttaccctaattgttcatcttcaatgtgtagactttatgggtatttgcaagaacatgatcaatgatctacagcacttgaaatagaaaaatgaaactgatgaggaattatgactgctcatattattctgtccctgttttgttttgctagtgcaaaactagtgtttcttatcatccttgctcatacattatgttcatggccttttgggtagactaggagggaaagagatagattaaataccctttcttatctgccatcctgtaccatgctcatcatttcctttattttatgaaacagaatttgcttatgttaaaaaaaaa

SEQ ID NO: 409931 - DNA, 625 bp, Homo sapiens
ccaggcatgccccagtccacctcctccacgagagactgatacaccaggtctctgtgctttcctgaaatcagaagcagctgatgcagcagtggattttgtaaacgtcacaggcaggacttggtactaggaacccatgaaggttgccttcatgaacagctatcactgagaatatgttcatggcaacccctagaagcttttgttttaggctatttcttcttgtctcttctggaataacccaagtatgagcactccgatgttatagtccagggagggactttgcaggatcatctagaccatcaccctgctgctccttgaaaaagaaaatagatggctgggcacagtggctcatgccggtaatcccagcactttgagaggccgaggcgggcagatcacctgaggtcaggagttcgagaccagcctggccaagatggtgaaaccctgtctttactaaaaatacaaaaaaaaaaattagccggatgtggtggcgagcacctgtaatcccagctactcgggaggctgaggcaggggaattgcttgaaccagggaggtggtgattacagtgagccgagattgtgccactgcactctagcctgggcaacaaagcaggactgcatctcaaaaaaaa

SEQ ID NO: 409932 - DNA, 536 bp, Homo sapiens
tggcacaggtaaaaaacagcagaaaagtttacagtgcacgaggtaatggggtggaggttcgtggagccagctgtctgaacttcctgcctccaccttccaaccgtagcttagcttacctgtgagcccttccaggctctgtgcttctcactgtctgggaagccctagttgagtgcctcacgagatcttcgggcattagatcttgcccagttaagccattgtatattttattgatttgaagatttgttaaaagtgcttttaaagagaaaaatgtgagaatatttgattcctttaaagacccttcaacaaccacatggaggagttcttctctgtttttatccaaaatggagtatggtttacttgactagattatttgtattaacagtgaagtatttgtgtgtgtgtgtgtgtgtgtgtgtgtgtgtgtgtgtgtgtgtgtgtgtgtttgtttttttttgaaacagagtctcactgtcacccagcctagattgtgccactgcactccagcctcggcaacagagcgaaactccatcacaaaa

SEQ ID NO: 409933 - DNA, 1057 bp, Homo sapiens
ccggtgtccgagctgctgtagcccctacgtggtgagtagatcgtctccacagaaatcagcggaggcttccacagtccctggttggaatggaaccggcggtgaggatgagaggcgctgaagaccagaagacccagggcgtgaacggggcgtgtcatccctggagtttcagtagaatttcaggcctgtctgcttgagcagcagaggaggagtttctgtgtgcctgtgagagactgtgtgtgtgtgtgtgtgtgtgtgtgtgtgtgatgaatgaacagggttgtgtacgtgtgtgtgcgttagacaaatgaacagtgttgtgtacctgtgtgaattgtcactgtgactccaggctctaggctctgcagattcctcagccctatcgcctcacagacacttgggatgtgcagcaggtaaaagagagaagccagattcatggaggcgtgaaggatcccagcaagaaaacacagacttgatcttgagacgagatttttgaaattggttgcggcctcaaggcaggctctgagaagactcgataaagagttctcaggaataggcatccctcctggatatttcccccttggaagcgccgaggagccagctctatgtttgtaaccatagcatttctaaagctccagccccaggaacctgctgtgaattagagacagattccaccctagacatcagtgatcttggcctctcttgtattgggaaggtcaacactgttccagtttctctcctactcccatctggttgtgctcggtgaagtaggtgagcagtgctacccttctgttaaaaaaaaaaaaaaaaaaaagatcctgaaagaggaaagaatttttgctacacatctgaaagctaaagtccagttgaactccagaggagaacacagcccaggtaacccctcgtttgcagcctgtgagaccagcctgaggacagcacccagctaaactccaggtccatggaaactgtgagattttatatatttatgttgttttaagctaaattcgtggtaattggttatggtagcaactgaaaattaatgcagtaagaaagtctaagg

SEQ ID NO: 409934 - DNA, 315 bp, Homo sapiens
aatggaggaagcgtcgacgaatgccaaaacaactatgctgaaaacagaagtcaaatactacagacatgttggcacatagaaatgtgtttatggccaatgattgggtctctacagtataatcacttttgaggctcattcatagcttctctctcttatttataaataaactgagttccaggcttctgacttctgagctcagccacaaggaagccatgctaggtatgcagggctggacatgtattcagttagcaaatattgattgaaggcacaaggttctaggcgttggtcgacgcggctgaacactcaaagaggaaa

SEQ ID NO: 409935 - DNA, 727 bp, Homo sapiens
  misc_feature (674)..(674): n is a, c, g, or t
gccacccgggttcaagcagttctccctgcctcagcctcctgagtagccgggattacaggcacgcgctaccaggcccggctaattttttttttttttcttttttggtagaatcgaggttttgccatgttggccacgttggtctcgaattcctgacctcagttgatccgcccatctcagcctcccaaagtgctgggatttcaagcgttagccaccgcactcgaccaaatgacactgtcttaaatgatttaatgtcttaaatcgggaaaggagagtaagagaaagcactcaatggagtcagaggtgtcttgcagcctagctctttccacagacaagccacatgggcctatcatctaaccttttcaaacttctccaactgcttctgtgatggagggatttgggctagaggatctttttattttattttattttattttattttggtgacagagtctcgcactgtcgcccgggctgaagtgcagtggcacaatctcggcttgctgcaacctctttctcctgggttcatgcgattctcccgcctcagcctcccaactagctgggattacaggcgcacgccaccacacctggcttattttttgtgtttttggtggagacggagtttcactgtgttggcagactggtctcgaactcctgacctcgtgatccgccacctcggnctcccagagtgctgtgattgcaggcatgagccaccgcgcctggccgatgatcc

SEQ ID NO: 409936 - DNA, 447 bp, Homo sapiens
gctattttcatgtcagatgcacgtgatgtattttaatagccccctcatgaattctgttagtcacttctttccaatatataggtacaatctggattaactcaggtgtatgggaaaataggatggaatgagattgtctctgctcttgtagtagaagcaaaactgtgaccatttttctgactgatttattttttgaatattgtacttatattttctcaggtgatgttgatgtacccccaggtcagcactttgaacacttgaacatctatgaaatcacatagtaaagtgataggagatggggctaagcttttaatggcctttagacatagcattagacataacctaagctgaaaggctttgggaagttgttgtgttaaatccccaacacactctcgtgttttcttaggacttgcctcttatttaaaaaaaaaaaaaaaaatctagccaact

SEQ ID NO: 409937 - DNA, 408 bp, Homo sapiens
ggcaggaggagggagagttctggcaccttccatgaggcactcaaaggaagacctgccccttccaggccccgcggttcctcctccacttggtcagctctggcagcagggaagggagccccgggcctggagtcaggatgcggttctgggccagatcagcctctcctaggctgggagagctctaacggggccccggcctctcgttccctagctggagaatgtggaaggttccacaatctcagacccttgcctggtggctctcagccatgactgcctttagaatcacccgcggagtttttaaagatttccgtgtctgaatccgcccaagaccaaaaccaagtcagtctctggggtggccggtcaggggtggttcctcacaaagctctgcaggcaattccagggtgcagccag

SEQ ID NO: 409938 - DNA, 329 bp, Homo sapiens
ggtcatgccattgcactccagcctccaacctgggtgacaagagcgagattccatctcaaaaaaaaaaaaagaaaaaaagatcccttggcctccagagagcccacaatgcatgaaaagtaacagaggaaaagaagcaggtatgtgagatagcagggaggtgaagggagtggacagacaaggttgatgccacaagtcacataagaggggccaggaaatagccactggatctaccagcaagaaggctgatagtcgggaggatcatttgagtccaggagtttgagaccagcctgggcaatgtagtaggactccatctctacaaaaaaaaaaaa

SEQ ID NO: 409939 - DNA, 343 bp, Homo sapiens
ggtcatgccattgcactccagcctccaacctgggtgacaagagcgagattccatctcaaaaaaaaaaaaagaaaaaaagatcccttggcctccagagagcccacaatgcatgaaaagtaacagaggaaaagaagcaggtatgtgagatagcagggaggtgaagggagtggacagacaaggttgatgccacaagtcacataagaggggccaggaaatagccactggatctaccagcaaggcatggtggggacagcttggtctagatgccactgagcctcataggaagctggagaccgtaggattagtgctggtgacatggaggtctcagctagcagcagacagt

SEQ ID NO: 409940 - DNA, 243 bp, Homo sapiens
tttttttgtactgcgtcaacattttcttggtacccttggcttcattacaaaaataatttgcaggctcaaaagacaaatgtctaaactaaaaatcctggaacctgttttcataaatcatgctatcttactatgttggcaatatggtccacctgcttcatggaaaatgttcagtaattcaataacctggagtaaatacaaatagcttccccttggtttgtgctgttgactctgctgggaatttcc

SEQ ID NO: 409941 - DNA, 1012 bp, Homo sapiens
gcggccgcagccgcttgggactcgctgcgagctggtttcggatccatcccgcctcccggcgtctcactgtgtgccctaccctttgaaacacgcccccgcgcccgccctgccgtagaccaggcagcgaggaagcccacagtctccgggggcgctgcgcgcgaagtagcacgtgcttctcgaaacaccgcagcccccgggtcccgccccgcccggcgcgcgcactcgaacccgcccagagagcggtgcgtggcgctgggtgcgagcagggtctagccacccccaccctcaccccaccccaccccaccctgcttttttcaggttcatcaaggtttgcgcagtggatccgcgaatgaagccagcctggaagatccccagtctcgagacagagcctgacaggggcagatgcactggaaggaccctgtctgggtttagcaaccaagcagccatcctggccccacaggtgtgggacttctgggtcttctcctggctggcttcttgctagaggatttcaagagacccagcaagactgtattgtcccactgaatgctcaagatattggttagaagtagaaaaggggagggggtagtatttagcctctgtccccactaaaaattattcccaattgtcatttgtgtcatctgtttagcttacagttttaatccttgtcaaaatgatcatttgccagggtgcataaaacaccctatttgatgagaactggttttaaaggaaaatggggccatcagaaggaagccggttggtgtgaagagacgtctgggaagagcccctggcgagggccctcattccactgggtgacccagaaggagaaaaccgcgatggcgcttctcatttgaaatgttttctttatggacagtgtttagcaattgttataatgtgtacttttgttgattgatctgtatacatatgtaaaataatttgttctctgagttaattttgttggaacaaagactttagtgcttcctacattaaaacattttactgtaaaaaatgcatt

SEQ ID NO: 409942 - DNA, 906 bp, Homo sapiens
gcggccgcagccgcttgggactcgctgcgagctggtttcggatccatcccgcctcccggcgtctcactgtgtgccctaccctttgaaacacgcccccgcgcccgccctgccgtagaccaggcagcgaggaagcccacagtctccgggggcgctgcgcgcgaagtagcacgtgcttctcgaaacaccgcagcccccgggtcccgccccgcccggcgcgcgcactcgaacccgcccagagagcgaatgaagccagcctggaagatccccagtctcgagacagagcctgacaggggcagatgcactggaaggaccctgtctgggtttagcaaccaagcagccatcctggccccacaggtgtgggacttctgggtcttctcctggctggcttcttgctagaggatttcaagagacccagcaagactgtattgtcccactgaatgctcaagatattggttagaagtagaaaaggggagggggtagtatttagcctctgtccccactaaaaattattcccaattgtcatttgtgtcatctgtttagcttacagttttaatccttgtcaaaatgatcatttgccagggtgcataaaacaccctatttgatgagaactggttttaaaggaaaatggggccatcagaaggaagccggttggtgtgaagagacgtctgggaagagcccctggcgagggccctcattccactgggtgacccagaaggagaaaaccgcgatggcgcttctcatttgaaatgttttctttatggacagtgtttagcaattgttataatgtgtacttttgttgattgatctgtatacatatgtaaaataatttgttctctgagttaattttgttggaacaaagactttagtgcttcctacattaaaacattttactgtaaaaaatgcatt

SEQ ID NO: 409943 - DNA, 543 bp, Homo sapiens
ttttttttttttgtagatagggagtctcactgtgttctccaggctggcttcaaactcctgacctcaagtaatcctcccacctcagcctcccatagcactgggattacagccatcacctaccactccaagccatgagtttggctttggatttaagaaggttgaggtgttcatgagttgacaagtggaaaaaacaagaaagaagttgagtgtttaagactgctgtttgaaggagaagtctagcctcaagacaaaagttcaggactcatcagctgagaaatggcgctgaaaattatgcaaatggatgagctcagctagcaaacaagtccagagagagcagcactgggctatgcacctggcctaatgcttccctgctcctcccaatccctgtgttatgccggagagggttcagcctctggtgagtttcaccaaaccgccacatctctttcttctgagaccttctctaaaatcccctcttttatgcttagtgaaatgggattctctttttcccatccagcttaagcaaaaacttttgactatgagaag

SEQ ID NO: 409944 - DNA, 495 bp, Homo sapiens
tagagggtcaaactccttggcgagttcagtctaacagaggacacattactgccctacaaagcagctctggaaaatgacaaccagtggcactaactccaggcaatatctttgtgaggcttgtgggctgtaatatagtctgctcaggctgccataaaaaaaaaatcacaatcaggccaggcactatggctcacacctgtaatcccagcactttgggaggccaaggagggcagatcacctgaggttaggagttcgagaccaggctggccaacatggcaaaaccccgtctctactaaaaatacaaaaattacccggatgtggtagcacgcaccggtagtcccagctactcgtcaggctgaggcaggagaattgcttgaacctgggagaggtggaggttgcagtgggctgagatcacaccactgtactccagcctggacaacagagccactgcactccagcctgggcaacagagagagactccatcttaaaaaaaaaaaa

SEQ ID NO: 409945 - DNA, 764 bp, Homo sapiens
ctaagctgaatgtatctgtgatccggttgactaggtaatatgccatgattcacttctgcagtagcctggcttgcctcccctgggtcactgtgactctgtcatgcccctgagcatgggagaggttgacatcatgcacacatgcacatgtgctagattgtagatctgtagtagtgccacggtgtctgcctctgtagtcccaagaagaccagcattctctctgcaaagtgaaaggagctctcaccagccactagtggtatgggttttggcatttactttatgacaggagggagaatagtgttttgatccatttcttataagcaggttatttgtataattataaagcttttaactcaaggaaacattaacggcttagagaatcccaaacccctcgaaattacatgcacaatgttagagactacatgtgagcatttttttggagagaggtccgtagctttcatgaagttcttagaggggtccattatgttgtgtcttctttccctggagcttcagggtctgtcagagaagactgtgaagagagtagcagccttcagcaagtccttggccacatggcacatgtgagaacaccccacaaatcggtgggttagccggtggaaaggagtcccagcatcttccctggtttttaattcctggcctcaagcaatcctccctccataacctcccaaagtgctgggattacaggcgtgagacaccatgcgcagcctgggtaatagagtgagactccatctcaagaataataaaatttt

SEQ ID NO: 409946 - DNA, 416 bp, Homo sapiens
gtgccacggtgtctgcctctgtagtcccaagaagaccagcattctctctgcaaagtgaaaggagctctcaccagccactagtggtatgaaaagcagaactcttttgtccacaaggctgatgccccttagctaagtggcctgtggttttggcatttactttatgacaggagggagaatagtgttttgatccatttcttataagcaggttatttgtataattataaagcttttaactcaaggaaacattaacggcttagagaatcccaaacccctcgaaattacatgcacaatgttagagactacatgtgagcatttttttggagagaggtccgtagctttcatgaagttcttagaggggtccattatgttgtgtcttctttccctggagcttcagggtctgtcagagaagactgtga

SEQ ID NO: 409947 - DNA, 385 bp, Homo sapiens
ttacatgcacaatgttagagactacatgtgagcatttttttggagagaggtccgtagctttcatgaagttcttagaggggtccattatgttgtgtcttctttccctggagcttcagggtctgtcagagaagactgtgaagagagtagcagccttcagcaagtccttggccacatggcacatgtgagaacaccccacaaatcggtgggttagccggtggaaaggagtcccagcatcttccctggtttttaattcctggcctcaagcaatcctccctccataacctcccaaagtgctgggattacaggcgtgagacaccatgcgcagccagatattttttattgttgttgtttttttttggaaaaggagtttcactcttgttaccca

SEQ ID NO: 409948 - DNA, 418 bp, Homo sapiens
ccaaaagacaatggaatgacataaagtgacctagaatgccagcctagaattaatatatacccagggaatatatcctttaaaaaacgaatgcaaaataaagacattctcaggcagacaaaaactgagaagaatgcattgcctactctacaagaaatgcttttaaagaagtttataagcaggggcatggtggttcatgcctgcaatccaagtgctttgggaggctgaggtgggaggatcgcttgaggccacgagtttgagaccagcctcagcaacacagtgagaccttgtctctacagaacattttttaaaaattagctgggcatggtggcacacacctgtagtcgtggatattcaggaggctgaagctgtgatcacaccactgcacttcagcctaggtgacagtgcaaaaccatgtctc

SEQ ID NO: 409949 - DNA, 1013 bp, Homo sapiens
gaacacaagatagtctttattaatagatatctgggaaatcttttattttttaaacattacaacctgacctaacattgtgaaggaagttttctctgccttctccttttaccttttctcagagtaaccacgaaataaatttgattctcacctctcttcttaccttaccccaagagagaacttatttacatacatatacatataaacacagtctttttcataaagtgtgcaatgggatgatgtgacctgaaataggctataccattttctccaaaggctgaatattatgaaaaacagaaattccccagagaacttttgagcagctgctttgaataatgattactgtttacttaactcaaccattccaacatcacccaatcaaaactcatttctttcttggccttataggtttattggtaaatggctgagacaaggccaataatggacacctgccatctccttttgtgtttgggctggagggcaaggagtggggggcaccctaactgggagctgttatcaactggaccaataacagtgaatccagagagacttcaaagaaataggattcacagggactttaaaagtgaggaactgagaatctgtatatacaatgtgccacgaatcacaggtcgaaccagcatcattttgccaagaaagtcaatcatccttttgtctctaacagtaataattgctgtatgattttctggaagaagtaagcacaacggttatatctgcccagcgttaatgaggaaagaggttgtctagttccaactcagtgaaattgcctgtctgtggcatctttcttgaaataatagatgcatactgtagcaacctatttataacatgcaacatatctttaacatttcatattagtctcatacatatatactaaagatttgctttaaaaacccttcatataagtatttccaaggtgtgtgtcattgcaaatggtagctaatgatgacttcttttttttcactatttgaaaggccactgggtagtctaaaaaaaaaaaa

SEQ ID NO: 409950 - DNA, 506 bp, Homo sapiens
  misc_feature (447)..(447): n is a, c, g, or t
  misc_feature (467)..(467): n is a, c, g, or t
gaacacaagatagtctttattaatagatatctgggaaatcttttattttttaaacattacaacctgacctaacattgtgaaggaagttttctctgccttctccttttaccttttctcagagtaaccacgaaataaatttgattctcacctctcttcttaccttaccccaagagagaacttatttacatacatatacatataaacacagtctttttcataaagtgtgcaatgggatgatgtgacctgaaataggctataccattttctccaaaggctgaatattatgaaaaacagaaattccccagagaacttttgagcagctgctttgaataatgattactgtttacttaactcaaccattccaacatcacccaatcaaaactcatttctttcttggccttataggtttattggtaaatggctgagacaaggccggggtggggctgnggagaagcatcatggatggnctaaaaccatgattggtcaatatgaggtacaaagctggg

SEQ ID NO: 409951 - DNA, 591 bp, Homo sapiens
aggagatttggtgcaggagttaggacaaagactcctgggacagcagccctcacttggggccatagtgaatgaatgggggccttttgcagaagggaaatggaggacatgtgtggtgaaggctttgctgaagcatctcttataaaaggggcaaaagcacttgctctcctcccagctctggctcagcctctctctcttcaagtccctggcatccctggaaaaccatgatttttccattctgcagccagcccaggcacctcctcccacccccgcacactgcagtctggtgtgtgtggtgggcacacatagaacacttgctggtcttgaaaatgaagccatcttttggggcccctagaaatcaaagagacccacttagccaagatatcactcttggacaccagcaagggtgagatcacttgataggtattttgccgtgtgtttctttttaactatataaaaaacaaaagggtggatgtgcaaacccaacccaagaataccttggctcaggctcaactagatgaaacttttaaaaatgatttaatgttatgttagactgttgcatattaaagcgatgtaatgccttctaaaaaaaaa

SEQ ID NO: 409952 - DNA, 614 bp, Homo sapiens
aattcattcagttgagaggcacagttagtctacaagctgagatacaggctgccaaatttaagataacgatcagtgagatactcgctaaccactcctatccctaggttagaaggtgaaacattattatgccaaaggataaaatcaccttaaatccctagcactgaagtcatctacttactgattagttctcactctatcttatcacttttatttaatctccagttcagaataagtttggttgatgaagcagactagaagtagaaagcactaaaaagtgtgggtcaggaagatggaggaaagggagaggaattcgtagacagatataacagtgtaagtgatagctgtacttcttgactttgaagcataaaagggaaaaaaataaacgtatgctgtctatgataattatcctggattattaaaaaatttataattcctatgatctgaataaaaactcaggaaatatacatttctaaaaaaagtttatccacagtggttttgtttgtttgtttcgtatgagaatgataaaactcttagcagtctttaaaaaaaaaaaagtcacctattagaatgtatagtccatccccacacctggctccaggggtactagataaata

SEQ ID NO: 409953 - DNA, 1536 bp, Homo sapiens
acgtggccgtgggggagggagcgggaggcgctttgtccgcctcgcggcccagctcagaccccggggccgctgggctgggaggggtgctgcgccccgtggccctgcccgcttcatcgcggctgtccccgccccgccgcgccccccatgcccccgcgtccctcctctccgctccccctgcggctgagcctgccccgagcgcgaagaaggggccgtctcggttggttttgaggaagaacgacagttcgagtcgggggaggttctcgctttacaaacaggaaaccgaaaaccactgacacactgtagtttttctgattgtagccggaggcggggccggtcccgcatctcgactgtagctccggtccctttctccaacctatttctctcccagcccccgcccccctagcgcccttccacggaggaggagattcactttgtgaacctgagactgagaatttaagaggcactgaaggtttcatgcctgcccaccccgcgtcctcttttcgtgtatttgtacaccccacgcgcatggattgcggagaaatgggctcctttcgggaggctccaaaattcccgtgccacagaatctctcacaacctttggggatcaaggactgctgtggcgtttacctcgccagctgggggaccctggaacaaaagccagtgccgttcccagtgccgggtctctggacacggcaagatgagtagagtttgcgaccagaaactttcggtgtttgggttgtgttctctggtttccgccctggtggagggagggctcgggtgcgcgcgcctggtttgtgatacactcgcaggtggaagcaagcccagcctcctgaccttactgggaagaagacagcaagcccaagccacagcttacttttgaaaatagaaagataatgcttgcttcaatagacagagacatcagctgtagatttcatagtgaatcccagtttagcaaattagcaacaaatagacttgaaagatgactgcctgaaaataaaattttctatcattttatgacaatgatttagcctgttgattagacttacgcactaataaatgccagggctgtgtacagaataggagtgtattttagcttcagctgtttcacatgcatctctcactggtatgtgtgatgagtgtgatgaatgtaatgtaagccttaactcttaagcagagttgcaagtaaattctgtgtaccaaaaaaaaaaaaaaaaaagaaagaaacatgctctacaagttatatttccttttaaaataattagtttaaaagttaaccttggcttctgagagtattttaacagtctgtattgaggtaaaatctcaaaaatagaggttgtaaagaaaacgttgctcttcattttcttgaattgactgcaggattatagttgtactccagtgaggcacagaacaattaaatgtagttctcagattgggcgctctatttggaaagccctaaagaaaaacaatgatcacccacaaccaaataataataacggtgatataaaaataaagatgaataggattctttactgtttca

SEQ ID NO: 409954 - DNA, 253 bp, Homo sapiens
tttcctcctggaagaccaattccctcctctctacttctgtctttaccttatcaagtcctaagtcaaatccaaccttttgcattttttagaaaaaaggtctcgttctgtttgttgtccaggctggagtgcagtggtgcaatcatggctcactgcattctcaaactgtgggctcaaggatcctcctgcctcagcttccagagtagctgagactacaggcacctgccaccatgttcagctaattaaaaaaaaaaaa

SEQ ID NO: 409955 - DNA, 1117 bp, Homo sapiens
ggatgggggaacgaccaaagcaaagccacacagggccgcttcccggaggaagtgtcaggaggcaggtggtctctggggaggcatgcgcgggcgcacacaggcgtgtctgggcagcaagcactcgatggctctttcttctcctcacgctgcccaccatgggatggcaaacccagcccctgacaaggctttggtgggaagccgagactgggtggagggcacaggacccaaaggtctccacactcacagtggctcccagtccccggcagggggcaaagcctgagggaaggctctttgcccagcagccctgtccaagtctgaccctgaaggtccgggggtgataaaaggtaggccagactttggggagaaggtcagagacctgcctggatggggagcaggagtgggagggagggctgtgtatcaggcaccttgtgccttcatttgcaactgcgacagaacctctgggaatcccggtgtgggggaagcggctaccttgggagctggcacggaaccaagagcaacaccagcctgctcagcacgacctggactgggaggcagggctgggtgtcctggagccctgggcaggcagcaggatggggtgggagttaaggaggtctggggaggagaggcttgggcggtacttggcagggagttctctccccagcctgtcaaagcctgctacaccatctcaccagacactcttccgagcccaggcgagccccctactctccccatggcagagcagtcatttggggaaacaggaaggggggcaggctgtagcctgtccccttcaagagaaccagagctctccatgcctgccaaggcccaagagaacacacctcaggatgtctgtcacagggaagaaaggagggggagaagggaccagagagggcaagtctgtcccccttaggagaaagcaccaaagggtggaaggaaggtttccgcatcccctcgctctggaagctgggagctgagggaagaggcaaggggttgaggcctggtgggggcttcaatgtccgcacagcactggaggcagacaagatggtgtgggggaaagggcagggcacaggtgctctctctcagtctctctttccctgcaagctcttgctgatgccagccg

SEQ ID NO: 409956 - DNA, 482 bp, Homo sapiens
ggctggagcagctgggatgcagggctcctgggcctggcctgtgaaaccattttttcctcctaaacttctgggcctgtgatgggagggcctgccttgaagacctctgacacgccctggagacattttccccattgtctttggctcctcattacttacgcaaatttctgcagccactactcaggaggctgaggcaggaggattgcttgagcccaggaggttgaggctgcagtgagccatggttgcagcactgcactccagctttggtgacagagtaagaccctgtctcaaaaaaaaaaaaagaaaaaatacaaaaagatctaacatgctaggagattcagtaaaggtagaggtggtagcagaatgtgttttatgttttagtttaatgaaaaagaaactatgttagcttgtggacataaaattggagtgcagtagcaacaaatgtgaagtgtctacttctgctagtacctacccattagtgtttg

SEQ ID NO: 409957 - DNA, 248 bp, Homo sapiens
tatattagcggccgctcgacccagaagtctagaggtatatttccaatggtcggtcatcttagatagctcataggcttctcacatctaatatgtttgaaatcactcttgatttttcttttttttcaaatctctctcacttagtgtctcccattttaataagtggctttatcatttacccagtaagtcaggccccaaatcttggagttatccttcattttttttcttctctaatttatcaccctgaatcc

SEQ ID NO: 409958 - DNA, 373 bp, Homo sapiens
tgtccaggttggtcttggactcctgggctccagcgatccacccaccttggcctcccaaagtggtgagattacaggcaggagccaccacgcccaggctacatgcattcagtaaataatgttataaacaatgtgaattgtattcacgtaatcatcaaatatctattaaatgcttactgcatggaagggaccataccaattatcacaggagacaaaccgaagggtcagctgagatccctgtcctcaccagggtaatggggagtggcaaggacagttctaaaaacaatgtttatgtcaagggaatgtgatcagtcattcgcgatataaacaaaacaatgccgtagttcagaggagagaaagatcatctgtttggaag

SEQ ID NO: 409959 - DNA, 450 bp, Homo sapiens
gcgtcgacagcctgggcgtggtggctcctgcctgtaatctcaccactttgggaggccaaggtgggtggatcgctggagcccaggagtccaagaccaacctggacaacattgcaagactacatggtactattcacacccaggctacattgtactattaaaacagaaaacaacttttctagcattcagtaaataatgttataaacaatgtgaattgtattcacgtaatcatcaaatatctattaaatgcttactgcatggaagggaccataccaattatcacaggagacaaaccgaagggtcagctgagatccctgtcctcaccagggtaatggggagtggcaaggacagttctaaaaacaatgtttatgtcaagggaatgtgatcagtcattcgcgatataaacaaaacaatgccgtagttcagaggagagaaagatcatctgtttggaag

SEQ ID NO: 409960 - DNA, 230 bp, Homo sapiens
aaatgaggtatatttgagagggtcaaatattctaaaagaatatttcagacaccacctcctccagcaacaaaaatagctacaaaccaatataaatttcatgttagttattttcatacatattgaaaactttactgtacattaaaaggttgtacagacagccctccatatctgtgggtttcacatccatgtattcaaccaagcatggatcaaaaatattcagtaaaaaaaaa

SEQ ID NO: 409961 - DNA, 379 bp, Homo sapiens
tcattagatggtgtaatcagaatgtatgggcgttagaagcagattgaaagtgctacataaatatattactaattaactactttaatagcagcaggatttagactccaaacttcattgattcaaagtggtagaagatgatggaggatctctattcactcccctacacccaccatcttaattctaatggcaaagtagacatttaaaaattttaccctgggggctttcacagtgcctgccctacctcatgaggtcagttcccaaattaaaatttgctactttactcagctgagagttagtagtaataatctattgaagcttaagtagtttttaaaccttttaatagtcacccctcttaacctcccactgccaaaaataaaaa

SEQ ID NO: 409962 - DNA, 259 bp, Homo sapiens
ataataattgagaaaaggaataataaggtggaaattatggaattctagaaagggacaaaaagacatactgagaaataaggaaatatagctctaatacaagttgtcttcagacactgtacacattcaattataattatgtttagcagtctctcccacaagaccaggagttcctcaagagcagggactgttttgaatttactacctatttgggccttggttagttaacatcaaagtttcgtgattaaaaaccagaaaattt

SEQ ID NO: 409963 - DNA, 796 bp, Homo sapiens
aatctccaataatttaccttaacccccgaggccaaagtttccattaacctaaaattgggccccgggcctccaccttgggcccaaaaaaaaaatcccttttcaggggaaaaaaaaaaaaaaaaaaaagctattgttttaactcccaccaattaacccatacaacagccatgcttattctactttcctctttctctctcccattttccatccaatttttattacaacatgtaacatttgtatatttgtcttataacttcaccttagtgtttttgtaatacatttggatatattaaaatcctcagtataataagttcttttggccaggtgtggtggctcactttgggggtactttgggaggttgaggcaggaggatggcttgagcccaggagctcgagaccagcctgggcaacacggggagaccccatctctaccaaaaaaaaaaaaaaaaggccaggtttgtagcatgcatctgtagtcccagctacttgggaggctgaggcaataggattgctcaagccaaggaagtcaaggctgcagtgggctgtgttcatgccactggactccagcctaggcgatagagcagtgggctgctgtgttcacgccactgcactcgaccctaggtgacagagcagtgggctgttcatgccactgcattccagcctaggtggtagagcagtgggctgtgttcacaccactgcactcgaacctaggtgatagagcaagaccctgtctcaggaaaaagttcttttgctgaagtttgtacagttatctgttggttggatgaagcttattctct

SEQ ID NO: 409964 - DNA, 433 bp, Homo sapiens
aactacaaattgtgatgcatactgtgaaggaagagagtacagcaagcagtgatcaagatgacttgcatcacaaaaagaggatgtataaagaccacaagtttaaattaaataccataacaaatttaaattaaataccataaatttcctggtacctctttagctactttttggaacacaacaataaatcttttgtgttctgatttctatttttttccaaagtactggttcattattttatcccccaaattgtgtagcaccacagagcagcatacaaaaatacggcaaaaattaaaaccaatgaattgtatgcttcaagactaaaaatattaattttggctaacttcttatgatttcacttttatcatgtatggtgtaatattttctctctcctttagcatactataatcttttctggtaaataaaagcatcggtg

SEQ ID NO: 409965 - DNA, 150 bp, Homo sapiens
tgggattacaggtgtgagggaatcacattttatattcccttcaaaatacaagtgtgtgaaggaaccggtgttttaatccaagagtgtaagaacgatttcaaacaaatggcaccctttacaaataaagaaactacatacatttaaagcttt

SEQ ID NO: 409966 - DNA, 182 bp, Homo sapiens
gcccaaaacagaaagcaaggcaaatgatcaatggtgcaactattctaaatccaatgacatacatacacacacacacacacacacatatgcccttgctaatattgccattgccccacagtgccttacacatatatggtaagaggtacaaagaatatgtgaggcaaccaagtacaaaaaaatgg

SEQ ID NO: 409967 - DNA, 468 bp, Homo sapiens
tgagacagagtctcactctgttgcccaggctggagtgcaatggtacaatctcggctcactgcaacctcctgagtagctgggaatacagacatgcatcaccatgcccagctaattttgtatttttagtagagatgagggaggtttcaccaggttgcccagactggtctctaactcctgacctcaagtgatccacctgcctcaacctcccaaagtactgggattacaggcatgagacagcacacctggcctcaagtttttcttttaatgcataattttacatatggaaaaccctaaagactgtatgaaaactattagaactaataaatgaattcagtaaagttaaagttaggtgaaatttctgtacactgaaaaccataaaacaccaataaaagaaattgaagaagacataaacaaatggaaagatatcctgtggttatgaattaaaagaattaatatttttaaaatatc

SEQ ID NO: 409968 - DNA, 470 bp, Homo sapiens
tttatttttgttttttgagatagagtctcactctgttgcccaggctggagtgcagtggtgcaatcttggctcgctacatcccctgtctcatgggctaaagtgattctcctgcctcagtctccggaatagctgggatcacaggcatttgccaccatgcccagataattgttctatttttagtagaggcggagtttcaccgtgttggccaggctggtctcgaactcctgacctcaggtgatccacccacctaggcctcccaaagtgctgggattacaggcctgagtcacctttttccacaggcggccgatctatggaaaacattttttgaatttaaaaatgagagcaagtctcagccaggtagagtggctcacacctgaaatcccaacactttgggaggccaaggagggacgattgcttgagaccaggagttcaagcccaccctgggcaataaagctacacctctgtctcta

SEQ ID NO: 409969 - DNA, 547 bp, Homo sapiens
acaatcaaccctgtatgtcagggcccttgagagcagagtagtgtcgggagagtgggtggtatggttgacacaaagacccacaggtatttttatgggttcacttaatgaagcaggggcttagttgagggtagagactgttcattaaaccagcctttgttgaccactccctgcagtatggacaggacatgatcaccatccttaagtcccactatagcaggggggaaacagtatgcttaattaagcttaattataaactctttgagttagaaaactggtgaaagtgttatttcctcctgaagtaattatgtatatatacatgccaattccaatcagaatgctaatttttctttttaaccccagagctgtgcaaaatgtttctcaaatttattcaggaacataaacaacagttggaaaggacaagaactgtctccagcataatggttaagaatgtggaggctgaggcaggacaatggtatgagctgagactgcactgcagcctgggcgacagaggcaagactccgtcttaaccaaaaaaaaaaaaaataat

SEQ ID NO: 409970 - DNA, 476 bp, Homo sapiens
tttttttttaactagaacgaagacaggagtgagattcagaggcagggttttatctacagtgggacactcaggactctacctgtggagggataaagtgctaggcatgctaataaaagcaagaaatatataaatcttttaaaaatacattagatgctacataagattttttccgaattttgtctaattagcatggactttttatatgaaaaatatttaaaatagtgacataacagttttaagctgagataaagttaatatgatctctctctggtttgggcttatgtaacccataagccataaggttatggcttttgacctctgggccattttaaagggacaatgagccttgcttcagctgcctcaagaagcttttactcactgtgaacacaggaaaaggaaggagctgtgaaaatactgccttaatatttcccaggatgtttatttgattagtaacagaaattctaaaaggctatgtg

SEQ ID NO: 409971 - DNA, 278 bp, Homo sapiens
tttcttctttgattttgttttggtatgttatatgtttctaagaatttatccatttcttcttggttatctagttagtccagtagcctatgaaattaccacgtaaaatgaaaacaattctgtgaggatttgttgagttttttcatccagattttataaatgtctttttaaaatcatctgaatagactgtctgatagtatcatgtaacaaggaacaagagattttcagtcatgtgtgatagaaactcaaatcaaactattttttaagtctgttgccttaca

SEQ ID NO: 409972 - DNA, 303 bp, Homo sapiens
acctgttgaaatgacagtattatgcatttattggtttaaatagaaattggtaaaatggatttcactcttttggtctactattaaaatgtagctactagaaaactaaaaattacatgtaatagctcgcatttgtggcccattgaacagtgttcatctagacacagaaaatctagatattgagtgtagacgagagggaagctttcaaaatagggctttgaatgaatatcttttatagaaacacaaaattatacaatgcagctgcgacttgggaaagtgggcattcagatggtcttgatcaaattt

SEQ ID NO: 409973 - DNA, 132 bp, Homo sapiens
ttttttttttctcatctagtatcagattttataagactaatctggacgaatgcctcaattcttgactttattccattcctctcaatggagccttaaaatactgcattgcagctaatcacatcaatgtcgaca

SEQ ID NO: 409974 - DNA, 527 bp, Homo sapiens
  misc_feature (21)..(21): n is a, c, g, or t
  misc_feature (43)..(43): n is a, c, g, or t
  misc_feature (73)..(73): n is a, c, g, or t
  misc_feature (94)..(94): n is a, c, g, or t
cattgccatcagactggtggnttttgggttcctcttttaatgngaatgctaatggtgtgatcctgttttaagnctgttgctgtcatggttgccnccagagaaggatctatccgctattggccaagccttgctggtgaagatacctacacagaggcttttgtagattcgggaggtgataagacttacagtttcctaacagcagtgcaggttcacaaagaaacaaaatctggctgagcatggtggctcatgcgtgcagtctcaccactttgaatggtcttgaactcctggtctcaagcagtcttcccgcttcggcctcccaaagtgctgagattatagacatgagccactgctccggccaggtctggtggactcttaagcacctaaagctagatgagcttaaatctcatctaagccaatatttataaaatgtatttgaccacaacatatggtaaaagctgatgttttatattctgtctttcaaaaatgttgagatctgcaaaatgacccgctgtttgaaaaaaaaaaaa

SEQ ID NO: 409975 - DNA, 472 bp, Homo sapiens
ttactgtgatatctgctgttgaggaccatgtaacagctgatgctcgtaacctgttcgatttcttgcttggttgtacagatctgatagtttttttttttttttttttaaagagacagggtctcactctctgtcgcccaggctacaggctggtgccacaatgcccggctaatttaaaattttttttgtagagacaaggtcttgccacgttccccaggctggtcttgaactcctggtctcaagcagtcttcccgcttcggcctcccaaagtgctgagattatagacatgagccactgctccggccaggtctggtggactcttaagcacctaaagctagatgagcttaaatctcatctaagccaatatttataaaatgtatttgaccacaacatatggtaaaagctgatgttttatattctgtctttcaaaaatgttgagatctgcaaaatgacccgctgtttgaaaaaaaaaaaa

SEQ ID NO: 409976 - DNA, 599 bp, Homo sapiens
cagaccagcctccaagataagatgtctggccaccacctctgcagccaaaaggggtggtgccgggggtggaggtgcagaatctgctgaggttggggagaatgattgaaagagggtctgaggggaattttctgaggtgatgggaatgttctacattttgctttggggggtggctccactgtgtatatcatcgtggaaactcctcaactgaacccttaagaactgcagactttacctaaattaacaaaaagtaccacttcctcagtgtgagggtaggagaggagctggctgtctcacctgtgagttaccaggcaattcacaaagttgtacaagtctgggctggagaaatagcattgaactctcctcccagttcaatgctatttctcaaccagagtcatttttattatgtcatctcatacaaactgataagaatgatacttcattagaagaagggacagaaaatggaacagtaatttacaagagaaatatatatggtcagtggcctctcctgtgaaatcttggttgataactgctaagttaccctcccaggaggttgtatcaggctggccttctacccgacctcccctggcctctagctcccc

SEQ ID NO: 409977 - DNA, 497 bp, Homo sapiens
ttttttttgagacgggatctcactacgtcacccaggctggaatgcaatggcacaatcatggctcactgccgcctcaacctcgcaggttcaagggatcctgctatctaagcttcccgagtagctgggactacaggtaaacaccaccacacccagttaatttttgtattttttagtagagatggggttttgccatgctgtccagggtggtcttaaactcctgggctcaagcaatccttctgtctcagcctcccaaagtactgggattacaggtgttaagctaccatgcccagcctgtatgaagttttaaaccaggaagtgagtcctccaacctttttattctttctcaagattgttttggccatttggcatcccttgagattccaaatgaatttcagaatcatttttctatttttgcaagaaatgttgaaattttgacaggcttgcattgaatctgtatatcccttcgggcaatactgacatgttaacaatattaagtc

SEQ ID NO: 409978 - DNA, 486 bp, Homo sapiens
aggagttcaagatcaacctgagcaagacagaccctatctctactaaagaaatattctaaaaattagctgggcatggtggcacacgcctataatcctagctacttggaaggctgaggcaagaggattgattgagcccagaagttcaaggttgtaatgacctgtgatagctccagcttgggtgacagggagattcccgtcttcttaaaaaatttttttcagccgggcttggtagctctgtaatcgcagcactttgggaggctgaggcaggtggatcacttgaggccaggagttcgagaccagcctggctaacttggcaaaaccccgtctctactaaaaatacaataattagctgggcatggtggcacccacctgtaatcccagctactttggaggctgaggcacgaaaattgcttgaacctgggatttggaggttgcaatgaaccaagatcataccactgcgctccagcctaggagacagtgaaactc

SEQ ID NO: 409979 - DNA, 466 bp, Homo sapiens
taaggagggaagggggaccttccttgaccccgtatattcctcctctagcaggaattaatcttccggcttccattctcagatgaacttcttgaaagagtagtctacatgcaccgccttcacactctcactttcatacattttctcaaaactctacaatacatctactgtccccattaatctactgaaacttctccaaactcaccagtggcttccactgtgccgaactcaacaaaacgtttcagtcttcagctctctagacctctctgcttaatgcaactctgttgataactcactttcctggcttccatgacacctctcagctctcctcccactctgtttcttctccatttccttcatgaactcttcctcctttgcttagcccttaaatatcttgttatttgggattccattctttgcccatgacatttttcaatgtctaaacattccctttgggccattaaatcca

SEQ ID NO: 409980 - DNA, 341 bp, Homo sapiens
gctactactaccaccccaaaggcccgtcgacgcatgcagatcaactgaggtcaggcgtgtgccaccatacctggctaattactgtatttttagtagatacgaggtttcgccatgttggccaggcgggtctcaaactcctgacctcagttgatctgcatgcctcggcctcccaaagtgctgggattaaaggcatgagccaccacgcctgggccaataggtgtattttttacgtagagagagcaaatgacaaagcaaaagagcaatatgttaataatagataaatgtgggcacaggtatgtaggtattctttgtactgttgctgcaacttttcaaaagtttgg

SEQ ID NO: 409981 - DNA, 455 bp, Homo sapiens
gctacaatgagctttgattgcaccactgcactccagcctggccgacagagtgagaccctgtctcaaaataataaagtgaaaaatagtatataaaaatgttttaagaagacatatatatattattcactggagctttccaccaacagaacaggctgatttattaaagaaacgagatgtcctatcatggaaatactctaggtaccacctgctggtgctgctgtgaaagggactttgaaaagttagcctgagtcacagctaagaggtctgtagatgccttttggaagagaggtaaacacataagcaaattccacttacactacgagagttgcacaggagagatttagggagagaataagtagttctggctattttttaaaatagagcctgcttttgccaggcatggtggctcacgcctgtaatcccagcactttgggaggctgaggtgggcggatcac

SEQ ID NO: 409982 - DNA, 495 bp, Homo sapiens
gggcaacaggagcaaaactctggcccaataataaaaataactaacccagattgtgtgacaggagataatggaaatgatctgagtggccacctaatttcagtgaaggaactagccaaggtaagtgacttgctcagtgtaagtccacaactaatttgtggccactcaggacattgaactgggtctcggagcaaattataagataggtaaaacagaggggacacaaacgtggaatagtgagagggtgaggagagtgcagttcaggctgggatcgtgtgtggcatattcgtaggaaaccacagaatctgaagttagttaggtttggatttcatttaccacttacaaactacgtgcatcagagtaagaaatttaatttctctgactgtaggttccttgattatagagatgttgtaaagattaaatgagatgacacgttggaagtttctggcactgtgtaggggacatcacatgttccatgatggcagctgttattgttct

SEQ ID NO: 409983 - DNA, 665 bp, Homo sapiens
tgctgagcgcagtggctcatgcctataatcctagcgctctgagaggccgagatgggagaatcgctaagtccagaagtttgggttagcctgggcgacacagtgggatctcatctcttgttttcctctttttatgagacagctctcaaattcatataaataagagaaataaaaatcaaacaaaaaaatggggctaagatataaacacatcattcacagaaaaggaaaatctaatggttaataaacacatgacatagggtcctactttactagtaataggcaatataaattaaaacactgaattccattttacatccattggagaggccgagtatgggtgagaatgtggaaaaacaggaactagtaaatcatgtgagggtgggtatggcccagtgataagtaatgtgacaacagacactaacggtaaagatacatatacgaacctaaaacctggctagttcacatggagacacacaacacagagaaacacttgctcatgtgcctatgtaaacgtgcacaaggatactcactgcagcatggtttgcgatggtgatgaattataaacaatcttaatgtccataacaagaaaatgattacaaattctgtactattcatacaatagaatacatgtactaactatatagattacaactaagtgggctatggct

SEQ ID NO: 409984 - DNA, 366 bp, Homo sapiens
tgtgagagagagttttgctcttgtcgcccatgctagagtgcagtggcacaatcttggctcactgcaacctccacctcctgggttcaagcaattctcctgcctcagtctcccaagtagctgagattacagacatgcgccactacgcccagctaatttttgttatttttagtagagacagggtttcaccatgttggccaggctgatcttgaactcctgacttgaggtgatccgcctgcttcggcctcccaaagggctgggattatagccatgagccatcgcacctggctaaacacatttctttactgcagaaattaagatcaaatgctgctctgattttctaaaaataataatgatgatgtcgccttt

SEQ ID NO: 409985 - DNA, 410 bp, Homo sapiens
tggatcatcttgtggatttttctaagtaagactctgtaatacatggagaggagcacaaagaaaaagtcatggagattattaaaagtttggaaagtaaaattcacaaaaaaagactgattgattggtattttcggccagaactgaaggctgaggtgtgatttaataacataccccaaatatatgaaggtcttcaccatgtaaaggatgggaaattgaagttcttgatctttaaaaacaaagcaagaggaaatgatttgggctatagatttaagttagaaatatgaacctcctgccaataaagattattaaatcctttctcccttctgatttttttttcctctgacctacaacccttttcaagtcttcctataaaaaaaaaagtcgacgcggccgcgaatttagtagtagta

SEQ ID NO: 409986 - DNA, 470 bp, Homo sapiens
ttttttcttttgagatggagtttccttcttgttgcccaggctggagtgttatggtgtggtctcggctcactgcaacctccgcctcccaggttcaagtgattctcctgtctcagcttccccaagtagctgggattacaggcacccgccacgaggcccagctaatttttgtatttttagtagagacagggtttcaccatgttggccaagctggtctcgaactcctgacctcaggcaatctgcctgccttggcctcccaaagtgctgggattataggcatgagccaccacacctggcctattttagagattttttaatgtgaagaaatgtgtccttgaaatagagtattattgttttacaaataaggaaaacaaggcacagaaaagtttagtaaagtagccaaggtcacacagcaagtatgtagaggagctgggattcatttccagagagtccgactttacagcccatgttaa

SEQ ID NO: 409987 - DNA, 434 bp, Homo sapiens
ccaaaacaaaacaaaatagaggccaggcatggtggctcacacctataatcccagcactttgggaggccgaggagggcagatcacctgaggtcaggagttcaagaccagcctggctaacatggcaaaaccccgtctctactaaaaatataaaaatcagctggccatggtgcctgtaatcccagctactcgggagactgaggcacaagaattgcttgaacccagtaggcagatgttgcagtgagccaagatggtgccactgcactgcagcctgggtgatggagcaagactctgtctccaaaaaaaaaaaaggaacaagaaagagttcttagaaagtaaacattgtaatagctgaaagaaaaattcagtagatgggttgaaagatcaagaaattacccagcaaaggcaaagaagtagaaaacaggaggaaaaaaaaa

SEQ ID NO: 409988 - DNA, 293 bp, Homo sapiens
gtgttttctccatgttggtcaggctggtctcaaacttccgaactcaggtgatcagactgcctcagcctcctaaagtgctgggattacaggcgtgagtcaccgtgcccagcccagttccttcttaattgagtctatttctacattattattagcaacttgcagctcttcttaatttcctttataccccttgcccaagttccctaaatctcctatttgtagccaacaggtctgttccccctgattttctcacttaacacacagtatttccatatcatacttgctaggcttagtct

SEQ ID NO: 409989 - DNA, 219 bp, Homo sapiens
gcatcattcaatacaaacagagtactttcttcccccagaactggtaactaaaaggggagcatgcgtgagaactggctaacagccactggaagtgcctgctggggtcctccctcacttttctttcatttccttattctggagccaaaggggaaaccaaaaaacttcctcccaccaaagactaaactctctgcttgatttgattaccctattttataatag

SEQ ID NO: 409990 - DNA, 184 bp, Homo sapiens
attttacagtgattttaggccataaacaatatacaaactgatttaacatcgtatcgtttaacctaacttgacttggaatgaagtatcttacacacttggattaataataattgaaatgctaaatcatgttttacatctgcttgtaaaaccttactttctaaaatgtgtttggccctaatttacc

SEQ ID NO: 409991 - DNA, 211 bp, Homo sapiens
aacaaggttgatcttattctttcagagaccaaaacataccacaaaaccacaataatgaaagcactgtgatattggcataagaatagaacataggccaggtgtggtggttcaccctgtaatcccagcactttgggaggttaaggcgggaggatcacttgaacccaggaatttgagatcagcctaagtatcatagtgagatccccatctctac

SEQ ID NO: 409992 - DNA, 684 bp, Homo sapiens
tttttttttttcccagagacaggggtcttggtatcttgtccaggctggtctcaaatgcctgtagtcaaatgatcttcccaccttggcctcccaaagtactgggaataccaggtccaccatgagccaccatgctcacctctagtcctctcttctactaagactcactttggttccacctgcacttctccatagccactatcggggccttcagtgttgatcatctcttttcctaaaaaacttgactttctggccaggcacggtggctcatgcctgtaatcccagcactttgggaggccaaaacaggtggatcacctgaggtcaggattttgagaccagcctggcttcaggggatctgcccgcctcggcctcccaaagtattgggattacaggcgtgcgccactgtgcccggccaaacctctgcattactttaaagtcccaagttgttattatcaagtgatgttctctgttctaaaggtacccttagtataaattttttggcatggtttgttacacaccagtagataactgaaaccaacatcatagagtagatgttcttgtcagactattggagaaatagaggtactccatcttccaactcttaaaatctcattgtttgtgacttacccccatgccaagcctctaccctgtgccaaatctcactgccccactgatatctgagatgtc

SEQ ID NO: 409993 - DNA, 4521 bp, Homo sapiens
taggaacaggggagagtgcacctgctaccagtcaagctcagccagactgcaagaggaggcgaggcggagccagccgagggagtgaaccatggacaagttgaaatgcccgagtttcttcaagtgcagggagaaggagaaagtgtcggcttcatcagagaatttccatgttggtgaaaatgatgagaatcaggaccgtggtaactggtccaaaaaatcggattatcttctatctatgattggatacgcagtgggattaggaaatgtgtggagatttccatatctgacctacagcaatggtggaggcgccttcttgataccttatgcaattatgttagcattggctggtttacctttgttctttctggagtgttcactgggacaatttgctagcttaggtccagtttcagtttggaggattcttccattgtttcaaggtgtgggaattacaatggtcctgatctccatttttgtgacaatctattacaatgtcataattgcctatagtctttactacatgtttgcttcttttcaaagtgaactaccatggaaaaattgttcttcgtggtcagataaaaactgtagcagatcaccaatagtaactcactgtaatgtgagtacagtgaataaaggaatacaagagatcatccaaatgaataaaagctgggtagacatcaacaattttacctgcatcaacggcagtgaaatttatcagccagggcagcttcccagtgaacaatattggaataaagtggcgctccaacggtcaagtggaatgaatgagactggagtaattgtttggtatttagcactttgtcttcttctggcttggctcatagttggagcagcactatttaaaggaatcaaatcgtctggcaaggtggtatattttacagctcttttcccctatgtggtcctactcatcctgttagtacgaggtgcaactctggagggtgcttcaaaaggcatttcatactatattggagcccagtcaaattttacaaaacttaaggaagctgaggtatggaaagatgctgccactcagatattttactccctttcagtggcttggggtggcttagttgctctatcatcttacaataagttcaaaaacaactgcttctctgatgccattgtggtttgtttgacaaactgtctcactagcgtgtttgctggatttgctattttttctatattgggacacatggcccatatatctggaaaggaagtttctcaagttgtaaaatcaggttttgatttggcattcattgcctatccagaggctctagcccaactcccaggtggtccattttggtccatattattttttttcatgcttttaactttgggtctcgattctcagtttgcttcgattgaaacgatcacaacaacaattcaagatttatttcccaaagtgatgaagaaaatgagggttcccataactttgggctgctgcttggttttgtttctccttggtctcgtctgtgtgactcaggctggaatttactgggttcatctgattgaccacttctgtgctggatggggcattttaattgcagctatactggagctagttggaatcatctggatttatggagggaacagattcattgaggatacagaaatgatgattggagcaaagaggtggatattctggctatggtggagagcttgctggtttgtaattacgcctatccttttgattgcaatatttatctggtcattggtgcaatttcatagacctaattatggcgcaattccataccctgactggggagttgctttaggctggtgtatgattgttttctgcattatttggattccaattatggctatcataaaaataattcaggctaaaggaaacatctttcaacgccttataagttgctgcagaccagcttctaactggggtccatacctggaacaacatcgtggggaaagatataaagacatggtagatcctaaaaaagaggctgaccatgaaatacctactgttagtggcagcagaaaaccggaatgagatctcattgaaaaaaatatatgattgtataatgtgattttttttagaatagggggaaccttatttatttgtgtgttaactgaataggaaaatgtacatactatgttcatgatagtgtgatttttttcacatttaagcaggaatgcaatataaaaatgtgaatctcttaattctcagccatgtgcttattatatttctttttagattgtctatctgtataacacacacacacacacctaagagtctctatttcacaattatatttttgtaaatagtatatgcatttttaatacattggaggctttattttgaactaatttcttagagaatagttatattttctattacacaagtttaaaaatattattaacttgtattttcttaatatacaatctatcttttccacaaatatgagtgggaaataaatcagcacatttgaaagaaagtgttaaaactgaaggcctcacttaattagaaacgtgataaatatatggacaaatggactatacatactataagaggactgtagtttaatactttttacccaaatatgtttaaaaacatcgtgcatttgttacagctcatgttttctatatgaacttagtcattaatgttctttataaaaagtgaaataagatggaaaaattaggatcctacagccagtacgtgataaatctagaaaattgagttttgagtacctcttttcccatatacaatcttccttccttaggtaatttggaagaaaactatgacccatttaatttctattgtgtttcaccaaattcagtgttgttcattatacctctctgaaatataggtttaatttcaaatagaatatggacttaaatgttaatgagaaactggctttaatcaattctagcattttattactgtaatacagggctgatagagtgattttgtcttatatgagtcagttactacttacaggtgataacttgcatactattggaagataaagttgtcaaacttgtcaagaatgagaaaagccaaattagaaaatcctatgtcctagtttccttaccaaggataattaaatatatcactaagagctttatatattgattatatattgttgacaactggtttaagcatcatagcctatgatgataaacactgcctatatatgtaaatagcttttcatcaattcttaaatttcttaacctaggcttcagggagcatatgaaaccaaaattatatggaacattttctgtgtgtacatgtacatgcatttttctagggagagagtccgtaggtttatcagaatatcaaggaaaactgtgacccaaagaagtttaagaatcacatacagtgctgctggctttttgtgcttggcaaatgagtgacaatagaagaaataatttttcttacacattttaaaacgttttctcttccttgtgattgaagatgaaaggagtaagaaattaaggcatttgtttaatttatactggtaacttatttaggggggaggggacatgaaggtaggtaaataggtaggcctctaattgaaccacctctctaagttatgtacgtatatataagctgaaattgtgtttgacattctgagggttttctttttctttttcctttttttttttttttggtggggggctgggggtcagagtcttgttctgttgcctgggctggagtgcagtggcatgatctcagctcactgcaacctctgccttctggattcaagtgattctcctgcctcagcctcttgagtagctgggactacaggtgcccgccaccacaccagctaatttttgtatttttagtagaggcgaagtttccccatgttggccaggctggtcttgaactcccgacctcaagtgatctgtctacctcggcctcctaaagtgctgagattacaggtgtgagccaccgtgcccggcccattctaagggttttctttgaagacaggtcaaatgctgttagtaagtttcaggagattgttaattcctcagttataccagattttataaaatatttgagaatagatggctaacaagaggttagaaatacttttccttaattttaatccacagtatgttacatgcattctaccactacattttggtgctatttaaggtgtgcaattttctataggtgacttttgcaattcagggaagatttgggcatattaaatgaaagaatatctaattgggggaggtgtgaagggaaagaaattcttttcaaaagctgaccacaaagagtagttaaaagtttttgtcactatcttcacaagtgtgtaaagcacagatttcaacagagtgcttggcatattgtagggtgctcaatggtggtttttattattattactcagattccacagtggcaagaaacatcattctacataatggaaaacatttacatcaaatcccacttactttaatgcgaacttggagataatttatggtattgtattgtaaaccattaatgaaaactttttcacagttgagtgaaattaaaatcactatatctca

SEQ ID NO: 409994 - DNA, 4353 bp, Homo sapiens
taggaacaggggagagtgcacctgctaccagtcaagctcagccagactgcaagaggaggcgaggcggagccagccgagggagtgaaccatggacaagttgaaatgcccgagtttcttcaagtgcagggagaaggagaaagtgtcggcttcatcagagaatttccatgttggtgaaaatgatgagaatcaggaccgtggtaactggtccaaaaaatcggattatcttctatctatgattggatacgcagtgggattaggaaatgtgtggagatttccatatctgacctacagcaatggtggaggcgccttcttgataccttatgcaattatgttagcattggctggtttacctttgttctttctggagtgttcactgggacaatttgctagcttaggtccagtttcagtttggaggattcttccattgtttcaaggtgtgggaattacaatggtcctgatctccatttttgtgacaatctattacaatgtcataattgcctatagtctttactacatgtttgcttcttttcaaagtgaactaccatggaaaaattgttcttcgtggtcagataaaaactgtagcagatcaccaatagtaactcactgtaatgtgagtacagtgaataaaggaatacaagagatcatccaaatgaataaaagctgggtagacatcaacaattttacctgcatcaacggcagtgaaatttatcagccagggcagcttcccagtgaacaatattggaataaagtggcgctccaacggtcaagtggaatgaatgagactggagtaattgtttggtatttagcactttgtcttcttctggcttggctcatagttggagcagcactatttaaaggaatcaaatcgtctggcaaggtggtatattttacagctcttttcccctatgtggtcctactcatcctgttagtacgaggtgcaactctggagggtgcttcaaaaggcatttcatactatattggagcccagtcaaattttacaaaacttaaggaagctgaggtatggaaagatgctgccactcagatattttactccctttcagtggcttggggtggcttagttgctctatcatcttacaataagttcaaaaacaactgcttctctgatgccattgtggtttgtttgacaaactgtctcactagcgtgtttgctggatttgctattttttctatattgggacacatggcccatatatctggaaaggaagtttctcaagttgtaaaatcaggttttgatttggcattcattgcctatccagaggctctagcccaactcccaggtggtccattttggtccatattattttttttcatgcttttaactttgggtctcgattctcagtttgcttcgattgaaacgatcacaacaacaattcaagatttatttcccaaagtgatgaagaaaatgagggttcccataactttgggctgctgcttggttttgtttctccttggtctcgtctgtgtgactcaggctggaatttactgggttcatctgattgaccacttctgtgctggatggggcattttaattgcagctatactggagctagttggaatcatctggatttatggagggaacagattcattgaggatacagaaatgatgattggagcaaagaggtggatattctggctatggtggagagcttgctggtttgtaattacgcctatccttttgattcgccttataagttgctgcagaccagcttctaactggggtccatacctggaacaacatcgtggggaaagatataaagacatggtagatcctaaaaaagaggctgaccatgaaatacctactgttagtggcagcagaaaaccggaatgagatctcattgaaaaaaatatatgattgtataatgtgattttttttagaatagggggaaccttatttatttgtgtgttaactgaataggaaaatgtacatactatgttcatgatagtgtgatttttttcacatttaagcaggaatgcaatataaaaatgtgaatctcttaattctcagccatgtgcttattatatttctttttagattgtctatctgtataacacacacacacacacctaagagtctctatttcacaattatatttttgtaaatagtatatgcatttttaatacattggaggctttattttgaactaatttcttagagaatagttatattttctattacacaagtttaaaaatattattaacttgtattttcttaatatacaatctatcttttccacaaatatgagtgggaaataaatcagcacatttgaaagaaagtgttaaaactgaaggcctcacttaattagaaacgtgataaatatatggacaaatggactatacatactataagaggactgtagtttaatactttttacccaaatatgtttaaaaacatcgtgcatttgttacagctcatgttttctatatgaacttagtcattaatgttctttataaaaagtgaaataagatggaaaaattaggatcctacagccagtacgtgataaatctagaaaattgagttttgagtacctcttttcccatatacaatcttccttccttaggtaatttggaagaaaactatgacccatttaatttctattgtgtttcaccaaattcagtgttgttcattatacctctctgaaatataggtttaatttcaaatagaatatggacttaaatgttaatgagaaactggctttaatcaattctagcattttattactgtaatacagggctgatagagtgattttgtcttatatgagtcagttactacttacaggtgataacttgcatactattggaagataaagttgtcaaacttgtcaagaatgagaaaagccaaattagaaaatcctatgtcctagtttccttaccaaggataattaaatatatcactaagagctttatatattgattatatattgttgacaactggtttaagcatcatagcctatgatgataaacactgcctatatatgtaaatagcttttcatcaattcttaaatttcttaacctaggcttcagggagcatatgaaaccaaaattatatggaacattttctgtgtgtacatgtacatgcatttttctagggagagagtccgtaggtttatcagaatatcaaggaaaactgtgacccaaagaagtttaagaatcacatacagtgctgctggctttttgtgcttggcaaatgagtgacaatagaagaaataatttttcttacacattttaaaacgttttctcttccttgtgattgaagatgaaaggagtaagaaattaaggcatttgtttaatttatactggtaacttatttaggggggaggggacatgaaggtaggtaaataggtaggcctctaattgaaccacctctctaagttatgtacgtatatataagctgaaattgtgtttgacattctgagggttttctttttctttttcctttttttttttttttggtggggggctgggggtcagagtcttgttctgttgcctgggctggagtgcagtggcatgatctcagctcactgcaacctctgccttctggattcaagtgattctcctgcctcagcctcttgagtagctgggactacaggtgcccgccaccacaccagctaatttttgtatttttagtagaggcgaagtttccccatgttggccaggctggtcttgaactcccgacctcaagtgatctgtctacctcggcctcctaaagtgctgagattacaggtgtgagccaccgtgcccggcccattctaagggttttctttgaagacaggtcaaatgctgttagtaagtttcaggagattgttaattcctcagttataccagattttataaaatatttgagaatagatggctaacaagaggttagaaatacttttccttaattttaatccacagtatgttacatgcattctaccactacattttggtgctatttaaggtgtgcaattttctataggtgacttttgcaattcagggaagatttgggcatattaaatgaaagaatatctaattgggggaggtgtgaagggaaagaaattcttttcaaaagctgaccacaaagagtagttaaaagtttttgtcactatcttcacaagtgtgtaaagcacagatttcaacagagtgcttggcatattgtagggtgctcaatggtggtttttattattattactcagattccacagtggcaagaaacatcattctacataatggaaaacatttacatcaaatcccacttactttaatgcgaacttggagataatttatggtattgtattgtaaaccattaatgaaaactttttcacagttgagtgaaattaaaatcactatatctca

SEQ ID NO: 409995 - DNA, 512 bp, Homo sapiens
gaattacaatggtcctgatctccatttttgtgacaatctattacaatgtcataattgcctatagtctttactacatgtttgcttcttttcaaagtgaactaccatggaaaaattgttcttcgtggtcagataaaaactgtagcagatcaccaataggtaaaatttgtcaacacccaaatagttcttttatatatattttttataagcttgaagggtcaaatcattctctaagcaacttaggtacaattttaaatgttccaaaggtcactggtgaaagcagaagatagcatatataatcagaaaaatgattaatacaatgtattaatctctgagagcagtcaggaaggctaaatcatgcctaagagtacttcttccaggcctaagtcttgggcaggagaggagaaactgagaaaatgataaagggagaaaagtgctatctaggatagttgtgtgtgtctcaggagacagtaggtgttgttcatgtcatatgttgctaatctttgggataacgt

SEQ ID NO: 409996 - DNA, 339 bp, Homo sapiens
gcatgcgcaggtctcgcatacagcagtgcagtgccgttattccagtctccgtagaaacgctgggactatggcggagccgactgggctgttggagatgtccgagctccccggagatagcagtgtcccacagaatatgtattctattcacaagactcaacaaaaaaaagtatcggccgggcgcactggcttacgcctgtaatcccagcactttgggaggccacggcgggtggatcacctgaggtcaggaattcaagaccaccctggccaacatggtgaaaccccatctctacgaaaaataaaaaattaactgggtgtggtggcacgcgcttgtagtcccag

SEQ ID NO: 409997 - DNA, 1334 bp, Homo sapiens
gcatgcgcaggtctcgcatacagcagtgcagtgccgttattccagtctccgtagaaacgctgggactatggcggagccgactgggctgttggagatgtccgagctccccggagatagcagtgtcccacaggtgggcaccgcgagtggcgtcagcgacgtactgcggggggcagtcggcggcggggttcgggtgcaggaggcccgggaaggcccagtggccgaagctgcgcggtccatggcgcggatgccgggccctgtgcccgggcccatccccagcagcgtcccgggcctggcctccgcgccagacccccatcagcagctcgctttcttagaaattaaccggcagctgttgttccgcgagtatctggatggtagctccatgattccggtcagattactacgggatttcgaggaacgccgcaggctgtttgtggaaggctgcaaggcgagggaagcagcctttgacgcggatcccccgcagatggacttcgctgctgtcgcgtttacggtagcgctgactgcctccgaggccctcagtcctctggccgactgagtcggctgtgatgatgacattggtggcaaggaatagccaagtgacccttttgggatcaaaagaacaggcaggctgtgccagtttagttaactcagtcattagggggaatgcaaactggaagggaatacggcaatgtgcaattgaaggaggaagcacactccgaaatggaaacagacaagactgttgaatcttgttttctttcttctttttagtattatttaaatagagaagggagtctcggcatccctaggctggtcccgaacgcttggacccgaggcgatcctcccgcttcggcctcccaaagtgctgggataactttacaggcgtgagccaccgcgccccggccgaatcttgttttcaaacaggtcccaagacacttctgacttagcactttgttagcaatgcattttcctgcatttgtgaagaatccttcatgactttcaccataaaggatggttttgcaaagatatgagaaaaaaaaaaatgccaataacagaacccatagaaatgaacctaagtgatgaaagaaaacaaagaaatagagttgtcaggaatccaggtgtacctgagttactaggattggaaggctattgagaggactttgaaatttcacaatttgtggtcatgtcaacaaatcctagtgtaagattcatatttgtgttttctgaggtactttagatgaacagtaaatattcaatagaaaaaaccacgtattatatgatcagtgttttcaagtctatgtgaaattgggtaggtgtggaataaacttgttttttgttaa

SEQ ID NO: 409998 - DNA, 275 bp, Homo sapiens
tgagttactaggattggaaggctattgagaggactttgaaatttcacaatttgtggtcatgtcaacaaatcctagtgtaagattcatatttgtgttttctgaggtactttagatgaacagtaaatattcaatagaaaaaaccacgtattatatgatcagtgttttcaagtctatgtgaaattgggtaggtgtggaataaacttgttttttgttaattttaagctttttattttattctagaatatgtattctattcacaagactcaacaaaaaaa

SEQ ID NO: 409999 - DNA, 778 bp, Homo sapiens
cggatgggctgggacgggttttgggggggtgtccccaattctgactgggagtggaggaacccctcctgagatctcttgtgggggtgccccctccccagggcactccccagtccctgagccagccgagaggaaggaggccagcgatgcgactggggcggctcctttctcctgcaccccaaatgtgagggatgcaccctaaattttgctcttttcaaaataggggaccaggatctcaggggagagtagctgaggccttgctcggagtcccaggagatccacaggtccggcatgaacagtgagaggtcagaggtggaaggctcagcaggagaggagaggaggatcagcagaggtcatgagaaggccagaatccagggtcaggctgtctggaacaggaagtaaaatgggccgagatggagcgagcccccagtgtgcttccaaggccactcccacctccctgaaacaccctgctacgtactgatccaatgccctgcgctgtgtatgagagcaccttctcttctgaaacccctatacaagggaggggcccctgcggagaccgtgccctgccatccagtcctcaaggggattctaaaaaactagtgacaaagtagggaagcagctgagctggaaaggagttctgaggacgatggaaccttgggtaaggaggaagaaggctgcccacccgcccttttctggcagccaccctccctcacactgtccgttccttgatgacacagctgatgtgattaagatcgtccccaaatcgcttcacagcagccct

SEQ ID NO: 410000 - DNA, 688 bp, Homo sapiens
tgcgtttcacagtggcctttatctgggccctgaagaaaagagagaagaggttaggaaaggagtcatcagagagactaacagaagaggggacgggaggggaaggggttctgggagtcccttcataagaatccaggtcggggccccaacccattggtagggttctcactttctcgaagttttacactcactcaggatggatggagtgtggagagtggagtccctgaactgagtagtgggaaaggcccatctcctaattctcttctgggagagacatcaggtagagcttggtgatttacaggtggattgagatttactgatcaactagttcagggtcaccatatccctggaaacactgcagtggggtcctcaaacatttatataaataaccaggggacttccatcatcaaatacaataacagcatctcaggcaacctaaattcacattcttggaaggattaccacagcattttaggaacttctgaccaactgtgacaattctattctttcagtcctcaaggggattctaaaaaactagtgacaaagtagggaagcagctgagctggaaaggagttctgaggacgatggaaccttgggtaaggaggaagaaggctgcccacccgcccttttctggcagccaccctccctcacactgtccgttccttgatgacacagctgatgtgattaagat

SEQ ID NO: 410001 - DNA, 485 bp, Homo sapiens
aaatgccttctgtctcagggaagcccttaccagaacctctaggtagagttagaggctaactccacggcaccctagagtccatagcatgttgttatcatgtgtgtatcgttgcatgtaaaaatattcctatttgttacggtttgcttgtatgtgtttgtcattaatctattaattcattcagtgaagagatgccaacttgtatactagcctgggaaacctctgtgtcctcagtgcctaatttaatactcctttttctatctagtagtaaaatgaatatgaatgtacatgtctgaggtctctataaattaaaaggtaaaaagtcttaagccaggtgtggtggcatgcacctgtattcgcagatatttgggaggttgaggtgggagcattgcttgaggccagaagtttgaggctgtagtgtgcaatgctcttacctgtgaatagccatggccctccaacatgggcaatgcagtgagaccctgtcttta

SEQ ID NO: 410002 - DNA, 332 bp, Homo sapiens
aaagatgaagtagttccaacgagaaggaatgggaattgagaatggctgtttgaggttatctttatggttttcagggttatccaggtcttagaaattacataatgatttctacaaatgatcatcggtagctttagactagtacctactaattctgtaagtgatgatcctcaacccttgctaatttgaatagatcttgttatttcaatgtgccgttaaattgacaaacttctctataaaactacgtagtatgatctttcaggtaacctagtctggtaatctagttatccgtgaactattcatatccatgatttaaaaaaaaaaaaaaaacaact

SEQ ID NO: 410003 - DNA, 798 bp, Homo sapiens
cttgttcatggcatctttagaaacaaactgcaattttatttcatttccttgtcgttcatacaaagattacaagactagcttatgtgtggactgtgactgttttaaggaaaaatcatgtcctcggctgggttatcaagccaagctatttaaaggtgttttaaaagaaaggatggaaggaagacctcttaggaccactgtgtttttggatacaagtggtacatatccattctgtacctattattttgttctcagtataattgttccagataaaactatgatggatggctcgttttcatttaaattattaaatcagcttggaatgattgaagagccaaggctttatgaaaagaacaaaccattttataaacttcaagaagtcaagattcttgctcaattttataatgactttgtaaatatttcaagcattggtttgacatatttccagagctcaaatctgcagtgttccacatgcacatacaagatccagagtctcatgttaaaatcacttacatacccagaaagaccaccactttgcaggtataatattgtacttaaagacagagaggaagtgtttcttaatccaaacacatgtacaccaaagaacacataagatgccttcttccatcaaatgcacttgcttgtgaattaatggacttgtaaatgaaacaatgcaatcagtcttttataatgcactgttcaatttgagattcaagtatttctatttcttggaaaaaattttaagaatcaaaaataaagaaaataaaaaatgcatacagttaaacattccaaaaaaaaact

SEQ ID NO: 410004 - DNA, 329 bp, Homo sapiens
cgccttagtgccaacctgcctccttctcatatcttattcatattgtaattattaccaccactttgcaggtataatattgtacttaaagacagagaggaagtgtttcttaatccaaacacatgtacaccaaagaacacataagatgccttcttccatcaaatgcacttgcttgtgaattaatggacttgtaaatgaaacaatgcaatcagtcttttataatgcactgttcaatttgagattcaagtatttctatttcttggaaaaaattttaagaatcaaaaataaagaaaataaaaaatgcatacagttaaacattccaaaaaaaaact

SEQ ID NO: 410005 - DNA, 336 bp, Homo sapiens
ttctatgagggaatgcatttattattattttgcatttattattttgttctgttataaattacggttttaattattttaataaatactgcaataatattttgtttggccttttccctataattttgttctctgtggcctcccttattaggattatattgattttagaattgagttatgtttcaaattattaatatgctgcgtgtatcaaattttctctctagaaagaacaaaccattttataaacttcaagaagtcaagattcttgctcaattttataatgactttgtaaatatttcaagcattggtttgacatatttccagagctcaaatctgcag

SEQ ID NO: 410006 - DNA, 481 bp, Homo sapiens
ctgtgtccccacccaaatctcatcttgaattcccgcatgttgtgggagggacctggtgggaggtaattgaatcatgggggcaagtttttcccatgctgttctcatgataatgagtaagtcttgcaagatctgactgtttaaaaaacgggagttttcctgcacaagttctctctctctttatctgcttccatccatgtaatatgtgacttgttcctcctttccttccaccatgattgcaagacctccccagccacgtggaactgtgagcccattaaacctctttcttttgtgaatttcccagtctcggatatgtatttatcagcagtgtgagaatggactgatacactctgcctgccttctcttctctttaacctcttcctctttgaccatttctgtcactgtttaagtagacatagtctttccatcttaaaattttaaaaatggggagatgaatggactgataaataaaaaggaaaaaaaa

SEQ ID NO: 410007 - DNA, 631 bp, Homo sapiens
tgaagatatgcgtgcttccccttcacccttctgccatgattgtaagtttcctgaggcttccccagccatgcctcctgtacagcctgtggaacttcaggacctgggagagaaaaaagctaccagcaacattcagactgagagaggccaaaatactaattcataattagcctggtacatatgaaggatcaaaaagaacaggactgtatgtctgacctctgacaggccctaccaccatagtagagactcagtatgtatacttaatgaaggaataatgaatacatcagcaagagaaataagagtgaccatatgttccttaagagaagcaaagagcagctcctgttcctgctggaatgagtctccattccttgcaacagaagtgtcctaagttatagccagaggacgggggcacattgacaaaacataaagcggatatgataataacaaggtaccattccagcaagaacatctgaagaaagaagcagtgttgtttatctttccttcatctattctgaaactaaaatccttaaccaaatttatttccgaagtttaaccctttaataaactggcctctgactccacctggtggagatacataaatctatgaaaataaaccaatccaaatgaagatttt

SEQ ID NO: 410008 - DNA, 579 bp, Homo sapiens
tgaagatatgcgtgcttccccttcacccttctgccatgatttcaggacctgggagagaaaaaagctaccagcaacattcagactgagagaggccaaaatactaattcataattagcctggtacatatgaaggatcaaaaagaacaggactgtatgtctgacctctgacaggccctaccaccatagtagagactcagtatgtatacttaatgaaggaataatgaatacatcagcaagagaaataagagtgaccatatgttccttaagagaagcaaagagcagctcctgttcctgctggaatgagtctccattccttgcaacagaagtgtcctaagttatagccagaggacgggggcacattgacaaaacataaagcggatatgataataacaaggtaccattccagcaagaacatctgaagaaagaagcagtgttgtttatctttccttcatctattctgaaactaaaatccttaaccaaatttatttccgaagtttaaccctttaataaactggcctctgactccacctggtggagatacataaatctatgaaaataaaccaatccaaatgaagatttt

SEQ ID NO: 410009 - DNA, 449 bp, Homo sapiens
taccaccatagtagagactcagtatgtatacttaatgaaggaataatgaatacatcagcaagagaaataagagtgaccatatgttccttaagagaagcaaagagcagctcctgttcctggtaagctctggctgtattttgttccttttccaaaaaagtctgtgatattccttgttgtgtatttataataacattcttttttcttgagccagctggaatgagtctccattccttgcaacagaagtgtcctaagttatagccagaggacgggggcacattgacaaaacataaagcggatatgataataacaaggtaccattccagcaagaacatctgaagaaagaagcagtgttgtttatctttccttcatctattctgaaactaaaatccttaaccaaatttatttccgaagtttaaccctttaataaactggcctctgactccacctgg

SEQ ID NO: 410010 - DNA, 517 bp, Homo sapiens
ttttttttttgagacggagtctcgctctgtttctcaggctggagtgcagtggcgcgatctcggctcactgcaagctccgcctcctgggttcacaccattctcctgcctcagcctcccgagtagctgggactacaggtgcccgccaccacgcccagctaattttttatatttttagtagagacggggtttcaccgtgttggccaggatggtctcgatctcctgatcttgtgatccgcccgcctcagcctcccaaagtgctgggattacaggcatgagcccccacgcccagcctccacgcgcccactctcacatgggtcaactcgtctaacccttcccgaaaccctccgaggcacttagtgagcgcctggtgtgcaaaaaggatgacttcagtcgccgtgggggcaagcctgcagcctcagctggactccagctcttccccctgctgtgtgacccctggcaaatgacttaacctctctgtgtctcaatgtcctcatcctcagtaaaatgaagataaaaa

SEQ ID NO: 410011 - DNA, 665 bp, Homo sapiens
actctggatgggtgctgtttagacaaacgccgtctcctatataagacctgacagcacaggcaccactccgccaggactgcaggcccacctgtctgcaacccagctgaggccatgccctccccagggaccgtctgcagcctcctgctcctcggcatgctctggctggacttggccatggcaggctccagcttcctgagccctgaacaccagagagtccagcagagaaaggagtcgaagaagccaccagccaagctgcagccccgagctctagcaggctggctccgcccggaagatggaggtcaagcagaaggggcagaggatgaactggaagtccggttcaacgccccctttgatgttggaatcaagctgtcaggggttcagtaccagcagcacagccaggccctggggaagtttcttcaggacatcctctgggaagaggccaaagaggccccagccgacaagtgatcgcccacaagccttactcacctctctctaagtttagaagcgctcatctggcttttcgcttgcttctgcagcaactcccacgactgttgtacaagctcaggaggcgaataaatgttcaaactgtatgctgatgttccaaatgggaatttatttcaaagaggaaaagttaatattttactttaaaaaaatcaaaataatac

SEQ ID NO: 410012 - DNA, 433 bp, Homo sapiens
cctcggcatgctctggctggacttggccatggcaggctccagcttcctgagccctgaacaccagagagtccaggtgagacctccccacaaagccccacatgttgttccagccctgccacttagcaaccagctctgtgacctggagcagcagcgccatctctgggcttcagtcttctcccagagcacaaaggactctgggtctgacctcactgtttctggaaggacatgggggcttagagtcctaaacagactgtttcccccttccagcagagaaaggagtcgaagaagccaccagccaagctgcagccccgagctctagcaggctggctccgcccggaagatggaggtcaagcagaaggggcagaggatgaactggaagtccgggtcggtacctctgcagttttatgcttctgtggcagcgaggagggtgggg

SEQ ID NO: 410013 - DNA, 427 bp, Homo sapiens
gccacgggcagcagtggccacaccccagtctccacagcaccgagactgacaccctgagccctctcttggttgttggtcaagtgaagtgaagccaggaagctccctggaggcagagtggagcacggtgaggcccagtcagcagtgggtggggaaggagccactccgaatgtgctcaccggggggtgttcgggattcctgtggctgctggaacaaaccactgttaaaaaaaaatcaccacaaagccaggacttgaaaccacacatcatccttccaggtcctataggtcagaagcctcttgggtaagttttacagacactaagatttgatcacctctattctagacagaatgtgttgttgataagcaaaactggaaccagctgtttgaggccttctctaacccctcaccctgtatcagtgaacatgctcc

SEQ ID NO: 410014 - DNA, 586 bp, Homo sapiens
agatttcataggtttaaaattttatgatgcaagtatattttcgaggaatggaaatataggctgaagagccagaacaaacacctaaaattcaatactaataacttcaagccattatatgaaggtttcaaataggtgatttaaagcagtgcaatgcattttatgctaattttcgttatgctatttgaaaaataaaacccttcttaatgctcaaaatttgaaataatgcaaatgccgcagatttgtttttagcctgaattatacactgcactgatagtatggccacacggtggcattgccgtggctcctgagcagcagccctgcctgcttgcctcaatgccttgcagccagcacttgctcagcccgtgggacttctaacagcactaatgttggttttgtagttattttcctttttacttttgtaatgatttaacttttttcacaccctgtaataagcgtaatagaagcattcattagtaacttccatagttagaaaattctgggtaacaaaatgccctaaaggatgccggacattgtcacagtatgttagagtgctgttaatttggaagagagaactatgaaaaaaaaa

SEQ ID NO: 410015 - DNA, 780 bp, Homo sapiens
tcccattccctcttcctccagtccctgaaaaccaccagtaatttgaatttgactactctgggtaccttatgtaagtggaatcatatagtatttgtctttttgcgagtggcttatttcacttagcataatgacttcaaggttcatccatgttgtaaacatgtatcagaatttcattccttttgaataagggtaaataatattccaccctatggatatatgccacattttgtttatccgtgcatatatcaatagacatttgggttgtttctaccttttgactattgtgaataatgctgctatgaacatgggttcgtgattgaacatatctgttcaagtccttgcttttagttcttttgggcatataccctgaagtagaattgctggataatatggtaattttatttttaattttttgaggaactaccatgtatgatcatgattgcattttgaagttagtgtgatctaaccctaatttattttccaacaggttataaccccctttaccatcaggccaggcaggtgactcatgtctgtaatctcatcacttttggggaggccaaggtgggaggactgcttgagcccaggagtttgagaccagcctgggtaacatagtgagatcctgtctcttaaaaaaaataccgagtgtggtggtacacgccggtagtcctagctacctgggaggctgagatgggaggattgctggagtccaggaggtcatggctgcagtgatccatgatcgtgccactgcactcctgggtgacagagcaagaccttgtctca

SEQ ID NO: 410016 - DNA, 2980 bp, Homo sapiens
  misc_feature (1)..(3): n is a, c, g, or t
  misc_feature (5)..(5): n is a, c, g, or t
  misc_feature (7)..(7): n is a, c, g, or t
  misc_feature (9)..(9): n is a, c, g, or t
  misc_feature (11)..(11): n is a, c, g, or t
  misc_feature (393)..(393): n is a, c, g, or t
  misc_feature (761)..(761): n is a, c, g, or t
  misc_feature (2244)..(2244): n is a, c, g, or t
  misc_feature (2973)..(2973): n is a, c, g, or t
nnnangntncnaaaattcatgctggagtgtgtatcagtacttcattcctttttgtggctgaataacattccattgtatggatgtatcatgctttgtgtatccagtcatcagctgatggacatttgagttgtttctatggtttggctatttttttttttttttttttgagatgagtctcactctagcccaggctggagtgcagtggcgcaatcttggctcactgcaacctccacttccgggtccctgttcaagcaattctcttgcctcagccttccgagtagctgggattacaggtgtgcgccaccacgcccggctaatttttgtattcttagtagagacggggtttcaccacgatggccaggctagtcttgaactcatgatccacccgcctcngccacccaaagtgctgggatttataggcgtgagccaccgtgcccggcccgtttggctattttgaacaatgctgcggtgaacgtttgtgtggaggtttttgtgtggatttgtttgcatttctcttggaataccttgttagaaaagcgtgcttatacgtattactactaaatttattttctgtcattaagctgtgtttcagttcatgcctctgaagtgatgtgctctgttcagcagagtcctatgctgtgccctccccttctggggctctagcttgccctttggagggtgtgtgtttgtgtgtgtgtgtgtgtgtgtgtgtgtgtgtgtggtaggggtcctcattttccttactgcctgtcactctccangtcactgtgggtggccaagagtggtctcatttcctctacccctttgcaaaccgtaaacactggtcacacgtgcttgtgctggaatcatatgctccagtggcttgatggtgggacttcagatttcctgcattaccttaggttttgactttcttgtggttacctctgtcagcattctttggcagaggactatggggagtagaatgacctagaaattatccctgattttcttctccttccaagcctgctgaaccaaaaatggtttttatttttctttgaaaaactacccttcgtaatgaactccattaagaaataggagttcttcaaaggaggagggatgttactgtattcttttgatttctctgaatttactagatttattttccccaagttggtgtgaaattgttgagattggtccttaactagagtcagacaattttttttttttttttttgagacagagtctcactttgtcgcccaggctggagtgcagtggcgcgatctccactcattgcaacctccgccttccggattcaagtgattctcctgcctcagcctccagagtagccaggattacaggcacccgccaccacgcctggctaatttttgtatttttagtagatacagggtttcaccttgttggccaggctggtctcaaactcctgacctcaggtgatctgcctgcctcggcctcccaaaatgctgggattacaggcgtgagccaccgtgcccggctggcaatttttattttttagatacagggtgtcgctgtgttacccaaactggagtgccgtgacgtgaacgcagctcactgcagccttaaccttcctgggctcaagcgatcctcccacctcaccctcccaagtagctgggactagagctgcgcttcaccatgcctggctaatttcaggcaatttttaattgttagaaaaactgtaaggcaacataagagaagtggatggtggggactgcaaatgtcatgtggcctagtggtattgagaagcattttgtgaagcagagagtgcgtgttccgattctgtaggagcacatgtcttggtgtgggtgtctttgccttcctagaacttcctgatgataagaagcctgtaaacaccagtgtgtccgtcagtatttggaatcttgtttattacatagtcctcaggttcattgtcaaaaaattctttactgatggtattaatcagtatttggaatcttatttatttcatagtgctcaaggtcattgtcaaaaaattctttactaatggtattaatcatgcttctcacactccagtttttctggtatggttttctgttccaaattgactcctgtgctcaggtcattagtttggcttactaacaggagccctgacagctatattcaatatttttctctgcagtggccaagtagccaagaatttactagtttagacacccacctcagtttagaaggtaggtgtgagtgtgtgtgtgtgtgtgtgtgtgtgtgtgngagagagagagatagagagagagagagaatatctaagaaggagttaatattttaaactttgcattgtttaactggaaatctgtgttctgccgggccgcttttatgtggtgtacctataacctatacacatacttgtgcctttcaaaggctaacgccacatccctcctactaaaattgcttattagagctaattttaagaattgagttagaactgccctataatgtaatgcagaatatttcccaataatgcctaggttaacaatgatagtcttgctgtattgtgcaaaaaaggcttctgttcagacccagctgggtttcaggcttaattcattgctctatggtgggatcaccacagctgctgtggggcctttacaaatgcaaaaaagctgtcagtgtttgtttcatcagctgcataagtgatgaggccaagttgaggaatccattccagtgcgcagtgtgcaggctgtagctattattgtttacagaattagtgtgttggagctttaaaatagttggcacatcgtctgccctttaaaagcacaagactaaggaatgagaccagttggttgtccttgtaatgttggccggatccagcccagcccttgtcttttaacagctactgctccgggctgtgctgtgggacttgactactctttggaggaagtgggggtgcttgctgagttcttgtctctgtagttctgcatcccaaacttaggtttgcattaaaanaaaaaaa

SEQ ID NO: 410017 - DNA, 2926 bp, Homo sapiens
  misc_feature (1)..(3): n is a, c, g, or t
  misc_feature (5)..(5): n is a, c, g, or t
  misc_feature (7)..(7): n is a, c, g, or t
  misc_feature (9)..(9): n is a, c, g, or t
  misc_feature (11)..(11): n is a, c, g, or t
  misc_feature (393)..(393): n is a, c, g, or t
  misc_feature (761)..(761): n is a, c, g, or t
  misc_feature (2190)..(2190): n is a, c, g, or t
  misc_feature (2919)..(2919): n is a, c, g, or t
nnnangntncnaaaattcatgctggagtgtgtatcagtacttcattcctttttgtggctgaataacattccattgtatggatgtatcatgctttgtgtatccagtcatcagctgatggacatttgagttgtttctatggtttggctatttttttttttttttttttgagatgagtctcactctagcccaggctggagtgcagtggcgcaatcttggctcactgcaacctccacttccgggtccctgttcaagcaattctcttgcctcagccttccgagtagctgggattacaggtgtgcgccaccacgcccggctaatttttgtattcttagtagagacggggtttcaccacgatggccaggctagtcttgaactcatgatccacccgcctcngccacccaaagtgctgggatttataggcgtgagccaccgtgcccggcccgtttggctattttgaacaatgctgcggtgaacgtttgtgtggaggtttttgtgtggatttgtttgcatttctcttggaataccttgttagaaaagcgtgcttatacgtattactactaaatttattttctgtcattaagctgtgtttcagttcatgcctctgaagtgatgtgctctgttcagcagagtcctatgctgtgccctccccttctggggctctagcttgccctttggagggtgtgtgtttgtgtgtgtgtgtgtgtgtgtgtgtgtgtgtgtggtaggggtcctcattttccttactgcctgtcactctccangtcactgtgggtggccaagagtggtctcatttcctctacccctttgcaaaccgtaaacactggtcacacgtgcttgtgctggaatcatatgctccagtggcttgatggtgggacttcagatttcctgcattaccttaggttttgactttcttgtggttacctctgtcagcattctttggcagaggactatggggagtagaatgacctagaaattatccctgattttcttctccttccaagcctgctgaaccaaaaatggtttttatttttctttgaaaaactacccttcgtaatgaactccattaagaaataggagttcttcaaaggaggagggatgttactgtattcttttgatttctctgaatttactagatttattttccccaagttggtgtgaaattgttgagattggtccttaactagagtcagacaattttttttttttttttttgagacagagtctcactttgtcgcccaggctggagtgcagtggcgcgatctccactcattgcaacctccgccttccggattcaagtgattctcctgcctcagcctccagagtagccaggattacaggcacccgccaccacgcctggctaatttttgtatttttagtagatacagggtttcaccttgttggccaggctggtctcaaactcctgacctcaggtgatctgcctgcctcggcctcccaaaatgctgggattacaggcgtgagccaccgtgcccggctggcaatttttattttttagatacagggtgtcgctgtgttacccaaactggagtgccgtgacgtgaacgcagctcactgcagccttaaccttcctgggctcaagcgatcctcccacctcaccctcccaagtagctgggactagagctgcgcttcaccatgcctggctaatttcaggcaatttttaattgttagaaaaactgtaaggcaacataagagaagtggatggtggggactgcaaatgtcatgtggcctagtggtattgagaagcattttgtgaagcagagagtgcgtgttccgattctgtaggagcacatgtcttggtgtgggtgtctttgccttcctagaacttcctgatgataagaagcctgtaaacaccagtgtgtccgtcagtatttggaatcttgtttattacatagtcctcaggttcattgtcaaaaaattctttactgatggtattaatcagtatttggaatcttatttatttcatagtgctcaaggtcattgtcaaatggttttctgttccaaattgactcctgtgctcaggtcattagtttggcttactaacaggagccctgacagctatattcaatatttttctctgcagtggccaagtagccaagaatttactagtttagacacccacctcagtttagaaggtaggtgtgagtgtgtgtgtgtgtgtgtgtgtgtgtgtgngagagagagagatagagagagagagagaatatctaagaaggagttaatattttaaactttgcattgtttaactggaaatctgtgttctgccgggccgcttttatgtggtgtacctataacctatacacatacttgtgcctttcaaaggctaacgccacatccctcctactaaaattgcttattagagctaattttaagaattgagttagaactgccctataatgtaatgcagaatatttcccaataatgcctaggttaacaatgatagtcttgctgtattgtgcaaaaaaggcttctgttcagacccagctgggtttcaggcttaattcattgctctatggtgggatcaccacagctgctgtggggcctttacaaatgcaaaaaagctgtcagtgtttgtttcatcagctgcataagtgatgaggccaagttgaggaatccattccagtgcgcagtgtgcaggctgtagctattattgtttacagaattagtgtgttggagctttaaaatagttggcacatcgtctgccctttaaaagcacaagactaaggaatgagaccagttggttgtccttgtaatgttggccggatccagcccagcccttgtcttttaacagctactgctccgggctgtgctgtgggacttgactactctttggaggaagtgggggtgcttgctgagttcttgtctctgtagttctgcatcccaaacttaggtttgcattaaaanaaaaaaa

SEQ ID NO: 410018 - DNA, 651 bp, Homo sapiens
gaacacgaggaagaggtgggaaaatagccaagaaaatgaaatgtgcatgcagaaatggccccttttgccattttcttttgagtcttttcttcaagtttcttttcagggaaggaaattcctaaactttctgcattgtcttgattcctacatgttttgttgttgttgttgttgttgttgttttgtttgaatcactgggagaaactccatgaagtttaatcctatccctcatgccacagcttatctgctttctgcgtagatacaaaaggctttttacctggccaaatgattcatgcgggaatacacctcagcttctctctgcaaactcttttttccctactgcccccaaacccttcccttctccttcttttcatttctgcccacgtatccttgtgccaaaccctttgacagtttttgagtctacactgggtttcaaggactggtcataagaggtacctcactggaagtaggggaggggggcaccaatagcagcagtgttgatagattcttagacctggtatagaagtgacctattttcagccgggagcggtggctcacacctgtaatcccagcactttgagaggccaaggcgggtggatcatgaggtcaggagttcgagaccagcctggccaagatggtgaaaccccgtcttta

SEQ ID NO: 410019 - DNA, 252 bp, Homo sapiens
attcgcggccgcgtcgacaaactggtaacttattggcaaattgatgtagttgctataatacaagatgccatatgattaagttagcagtttgagtcaaattagttaatgtcactttctactttagaattttaattggtataactcaaaaagtataggcttaacaccaagcctcaaaacacgttgatttcaaacacatttttattaaattggtgggaaagtagatggcttctcactttcatttttaaagtttat

SEQ ID NO: 410020 - DNA, 624 bp, Homo sapiens
aattatctacttttttttttttttttttttgagatggagtctcactctgtccccaggctggagtacagtggcacaatttcagctcactgcaagctccacctccctggttctcctgcctcagcctcccaagtagctgggactacaggcacccaccagcacactcggctaattttttgtatttttagtagagacggggtttcaccatgttagccaggatggtctcgatctcctgacctcgtgatccgcctgcagacatcattagcattgctagaaatggaaagaccaggcacaaggcagccttcaagaaaggatgtaagtgcctctggagtaccaggacctaaagtttaagaagctcccttatggaaagaaaaatttaccaaaaaaccggttatcccattggtcactgggcagatgcaagcccctttatcctctgaggaatcccaccccatgtatcaggaagctggctgatgatctcagccaagtatctaagaataaacccagttgaagtaattcacactaaagtgtaaatgactgatatgtttagatcagcacgacatggtttgtcgtatcaaaaaagtatgtcctcctggaatatgaaggtagatctttttttttttttttttt

SEQ ID NO: 410021 - DNA, 524 bp, Homo sapiens
aggagagcttatggtatatcaaagtaagaaatgagtttgaaactgggttagaagctcaggaaaatatgaagtggtcttgaactcctgacctcaagtgatcatcctggccaacatggtgaaaccccgtctgtactaaaaataccaaaaattagccaggcgtgatagcaggcgcctgtggttccagctatgggaggctgaggcaggagaatcagatgaacctgggagacggaggttgcagtgagctgagatcgcgccactgcactccagcctggtgacagagtgacactccgtctcaaaaaaaaaaagaaacgatcacatccagatgtcctgttactggaagggcaccatagtttatcctgcacctaacactaatacacctactctgggaattcttctacctacaactatttatttatctgatcccatctggtattaaagttctaaaagttaacagaattcttaaaggttcccaatgcctcccagaaaccccatcatctcaaaatcactagctattaaaagaagca

SEQ ID NO: 410022 - DNA, 558 bp, Homo sapiens
aggagagcttatggtatatcaaagtaagaaatgagtttgaaactgggttagaagctcaggaaaatatgaagtggtcttgaactcctgacctcaagtgatcatcctggccaacatggtgaaaccccgtctgtactaaaaataccaaaaattagccaggcgtgatagcaggcgcctgtggttccagctatgggaggctgaggcaggagaatcagatgaacctgggagacggaggttgcagtgagctgagatcgcgccactgcactccagcctggtgacagagtgacactccgtctcaaaaaaaaaaagaaacgatcacatccagatgtcctgttactggaagggcaccatagtttatcctgcacctaacactaatacacctactctgggaattcttctacctacaactatttatttatctgatcccatctggtattaaagttctaaaagttaacagaattcttaaaggttcccaatgcctcccagaaaccccatcatctcaaaaaaacaaaagaaacgatcacatccagatgtcctgttactggaagggcaccatagttt

SEQ ID NO: 410023 - DNA, 1924 bp, Homo sapiens
actggccgctgagagaagaatcgggtggagcagagagcagctgctgcagggcagacagccggacccccaaatctgcacgtaccagcagtcagccgccccacgcagggaccggcttacccctcgctccccgccctcactcactttctcccgccctcggcccggcctcccagctctctacttcgcgtgtctacaaactcaactcccggtttccgtgcctctccaccgctcgagttctctactctccatatccgaggggcccctcccagcatctacccccctcccaacctcgggggacctagccaagctaggggggactggatccgacgggtggagcagccaggtgagccccgaaaggtggggcggggcaggggcgctcccagccccaccccgggatctggtgacgctggggctggaatttgacaccggacggctgcggcggcgggcaggaggctgctgagggatggagttgggcccggcccccagacaaggcccgggggctccgccagcagcaggtccctcgggccccagccctcgctgccacccgggcctggagccccacacccgagggtgcagactggctgccaaggccacacttttggctaaaagaggcactgccaggtgtacagtcctgggcatgcgctgtttgagcttcgggggagagcccagcactggtccccggaaaggtgcctagaagaacaaggtgcaggaccccgtgctgcctcaacaggagggtgggggaacagctcaacaatggctgatgggcgctcctggtgttgatagagatggaacttggacttggaggcctctccacgctgtcccactgcccctggcctaggcggcagcctgccctgtggcccaccctggccgctctggctctgctgagcagcgtcgcagaggcctccctgggctccgcgccccgcagccctgccccccgcgaaggccccccgcctgtcctggcgtcccccgccggccacctgccggggggacgcacggcccgctggtgcagtggaagagcccggcggccgccgccgcagccttctcggcccgcgcccccgccgcctgcacccccatctgctcttccccgcgggggccgcgcggcgcgggctgggggcccgggcagccgcgctcgggcagcgggggcgcggggctgccgcctgcgctcgcagctggtgccggtgcgcgcgctcggcctgggccaccgctccgacgagctggtgcgtttccgcttctgcagcggctcctgccgccgcgcgcgctctccacacgacctcagcctggccagcctactgggcgccggggccctgcgaccgcccccgggctcccggcccgtcagccagccctgctgccgacccacgcgctacgaagcggtctccttcatggacgtcaacagcacctggagaaccgtggaccgcctctccgccaccgcctgcggctgcctgggctgagggctcgctccagggctttgcagactggacccttaccggtggctcttcctgcctgggaccctcccgcagagtcccactagccagcggcctcagccagggacgaaggcctcaaagctgagaggcccctaccggtgggtgatggatatcatccccgaacaggtgaagggacaactgactagcagccccagagccctcaccctgcggatcccagcctaaaagacaccagagacctcagctatggagcccttcggacccacttctcacagactctggcactggccaggcctcgaacctgggacccctcctctgatgaacactacagtggctgaggcatcagcccccgcccaggccctgtagggacagcatttgaaggacacatattgcagttgcttggttgaaagtgcctgtgctggaactggcctgtactcactcatgggagctggcccctatttattatttctaagttatttatttacttc

SEQ ID NO: 410024 - DNA, 1440 bp, Homo sapiens
ctctgagcttctctgagccttgtttgctcatctggaaaaaggggattaaaccatttacctcatggagttgtgaaagaatagctgcaaagcacctaacacatagtaaggttcccagtgcagctacttctgctgggttgagtctagctgtgtaggccccttgttcctcacctggagaaactggggtggcaggccggtcccccacaaaagataactcatctcttaatttgcaagctgcctcaacaggagggtgggggaacagctcaacaatggctgatgggcgctcctggtgttgatagagatggaacttggacttggaggcctctccacgctgtcccactgcccctggcctaggcggcagcctgccctgtggcccaccctggccgctctggctctgctgagcagcgtcgcagaggcctccctgggctccgcgccccgcagccctgccccccgcgaaggccccccgcctgtcctggcgtcccccgccggccacctgccggggggacgcacggcccgctggtgcagtggaagagcccggcggccgccgccgcagccttctcggcccgcgcccccgccgcctgcacccccatctgctcttccccgcgggggccgcgcggcgcgggctgggggcccgggcagccgcgctcgggcagcgggggcgcggggctgccgcctgcgctcgcagctggtgccggtgcgcgcgctcggcctgggccaccgctccgacgagctggtgcgtttccgcttctgcagcggctcctgccgccgcgcgcgctctccacacgacctcagcctggccagcctactgggcgccggggccctgcgaccgcccccgggctcccggcccgtcagccagccctgctgccgacccacgcgctacgaagcggtctccttcatggacgtcaacagcacctggagaaccgtggaccgcctctccgccaccgcctgcggctgcctgggctgagggctcgctccagggctttgcagactggacccttaccggtggctcttcctgcctgggaccctcccgcagagtcccactagccagcggcctcagccagggacgaaggcctcaaagctgagaggcccctaccggtgggtgatggatatcatccccgaacaggtgaagggacaactgactagcagccccagagccctcaccctgcggatcccagcctaaaagacaccagagacctcagctatggagcccttcggacccacttctcacagactctggcactggccaggcctcgaacctgggacccctcctctgatgaacactacagtggctgaggcatcagcccccgcccaggccctgtagggacagcatttgaaggacacatattgcagttgcttggttgaaagtgcctgtgctggaactggcctgtactcactcatgggagctggcccctatttattatttctaagttatttatttacttc

SEQ ID NO: 410025 - DNA, 1402 bp, Homo sapiens
ctctgagcttctctgagccttgtttgctcatctggaaaaaggggattaaaccatttacctcatggagttgtgaaagaatagctgcaaagcacctaacacatagtaaggttcccagtgcagctacttctgctgggttgagtctagctgtgtaggccccttgttcctcacctggagaaactggggtggcaggccggtcccccacaaaagataactcatctcttaatttgcaagctgcctcaacaggagggtgggggaacagctcaacaatggctgatgggcgctcctggtgttgatagagatggaacttggacttggaggcctctccacgctgtcccactgcccctggcctaggcggcagcctgccctgtggcccaccctggccgctctggctctgctgagcagcgtcgcagaggcctccctgggctccgcgccccgcagccctgccccccgcgaaggccccccgcctgtcctggcgtcccccgccggccacctgccggggggacgcacggcccgctggtgcagtggaagagcccggcggccgccgccgcagccttctcggcccgcgcccccgccgcctgcacccccatctgctcttccccgcgggggccgcgcggcgcgggctgggggcccgggcagccgcgctcgggcagcgggggcgcggggctgccgcctgcgctcgcagctggtgccggtgcgcgcgctcggcctgggccaccgctccgacgagctggtgcgtttccgcttctgcagcggctcctgccgccgcgcgcgctctccacacgacctcagcctggccagcctactgggcgccggggccctgcgaccgcccccgggctcccggcccgtcagccagccctgctgccgacccacgcgctacgaagcggtctccttcatggacgtcaacagcacctggagaaccgtggaccgcctctccgccaccgcctgcggctgcctgggctgagggctcgctccagggctttgcagactggacccttaccggtggctcttcctgcctgggaccctcccgcagagtcccactagccagcggcctcagccagggacgaaggcctcaaagctgagaggcccctaccggtgggtgatggatatcatccccgaacaggtgaagggacaactgactagcagccccagagccctcagctatggagcccttcggacccacttctcacagactctggcactggccaggcctcgaacctgggacccctcctctgatgaacactacagtggctgaggcatcagcccccgcccaggccctgtagggacagcatttgaaggacacatattgcagttgcttggttgaaagtgcctgtgctggaactggcctgtactcactcatgggagctggcccctatttattatttctaagttatttatttacttc

SEQ ID NO: 410026 - DNA, 1507 bp, Homo sapiens
tcctacctggtactgaggaaaggcggcttgactggtgagggagagcagggcttggcttgggcagcggttaggtgtgggagggaaaatggtcagggagggaccaggtgaatgggaggaggagcgggacttctctgaatggtcggtgcactcaggtgattcctcccctgggctcccagaggcagcaaacccattatactggaacctaggcccttcctgagtttcccctccacacagctaggagcccatgcccggcctgatctcagcccgaggacagcccctccttgaggtccttcctccccaagcccacctgggtgccctctttctccctgaggctccacttggtctctccgcgcagcctgccctgtggcccaccctggccgctctggctctgctgagcagcgtcgcagaggcctccctgggctccgcgccccgcagccctgccccccgcgaaggccccccgcctgtcctggcgtcccccgccggccacctgccgggtaggtgagagggcgagggggcggggcggggctggcccgggacaccgcgcgtgactgggtctcattccagggggacgcacggcccgctggtgcagtggaagagcccggcggccgccgccgcagccttctcggcccgcgcccccgccgcctgcacccccatctgctcttccccgcgggggccgcgcggcgcgggctgggggcccgggcagccgcgctcgggcagcgggggcgcggggctgccgcctgcgctcgcagctggtgccggtgcgcgcgctcggcctgggccaccgctccgacgagctggtgcgtttccgcttctgcagcggctcctgccgccgcgcgcgctctccacacgacctcagcctggccagcctactgggcgccggggccctgcgaccgcccccgggctcccggcccgtcagccagccctgctgccgacccacgcgctacgaagcggtctccttcatggacgtcaacagcacctggagaaccgtggaccgcctctccgccaccgcctgcggctgcctgggctgagggctcgctccagggctttgcagactggacccttaccggtggctcttcctgcctgggaccctcccgcagagtcccactagccagcggcctcagccagggacgaaggcctcaaagctgagaggcccctaccggtgggtgatggatatcatccccgaacaggtgaagggacaactgactagcagccccagagccctcaccctgcggatcccagcctaaaagacaccagagacctcagctatggagcccttcggacccacttctcacagactctggcactggccaggcctcgaacctgggacccctcctctgatgaacactacagtggctgaggcatcagcccccgcccaggccctgtagggacagcatttgaaggacacatattgcagttgcttggttgaaagtgcctgtgctggaactggcctgtactcactcatgggagctggcccctatttattatttctaagttatttatttacttc

SEQ ID NO: 410027 - DNA, 1437 bp, Homo sapiens
tcctacctggtactgaggaaaggcggcttgactggtgagggagagcagggcttggcttgggcagcggttaggtgtgggagggaaaatggtcagggagggaccaggtgaatgggaggaggagcgggacttctctgaatggtcggtgcactcaggtgattcctcccctgggctcccagaggcagcaaacccattatactggaacctaggcccttcctgagtttcccctccacacagctaggagcccatgcccggcctgatctcagcccgaggacagcccctccttgaggtccttcctccccaagcccacctgggtgccctctttctccctgaggctccacttggtctctccgcgcagcctgccctgtggcccaccctggccgctctggctctgctgagcagcgtcgcagaggcctccctgggctccgcgccccgcagccctgccccccgcgaaggccccccgcctgtcctggcgtcccccgccggccacctgccggggggacgcacggcccgctggtgcagtggaagagcccggcggccgccgccgcagccttctcggcccgcgcccccgccgcctgcacccccatctgctcttccccgcgggggccgcgcggcgcgggctgggggcccgggcagccgcgctcgggcagcgggggcgcggggctgccgcctgcgctcgcagctggtgccggtgcgcgcgctcggcctgggccaccgctccgacgagctggtgcgtttccgcttctgcagcggctcctgccgccgcgcgcgctctccacacgacctcagcctggccagcctactgggcgccggggccctgcgaccgcccccgggctcccggcccgtcagccagccctgctgccgacccacgcgctacgaagcggtctccttcatggacgtcaacagcacctggagaaccgtggaccgcctctccgccaccgcctgcggctgcctgggctgagggctcgctccagggctttgcagactggacccttaccggtggctcttcctgcctgggaccctcccgcagagtcccactagccagcggcctcagccagggacgaaggcctcaaagctgagaggcccctaccggtgggtgatggatatcatccccgaacaggtgaagggacaactgactagcagccccagagccctcaccctgcggatcccagcctaaaagacaccagagacctcagctatggagcccttcggacccacttctcacagactctggcactggccaggcctcgaacctgggacccctcctctgatgaacactacagtggctgaggcatcagcccccgcccaggccctgtagggacagcatttgaaggacacatattgcagttgcttggttgaaagtgcctgtgctggaactggcctgtactcactcatgggagctggcccctatttattatttctaagttatttatttacttc

SEQ ID NO: 410028 - DNA, 2018 bp, Homo sapiens
actggccgctgagagaagaatcgggtggagcagagagcagctgctgcagggcagacagccggacccccaaatctgcacgtaccagcagtcagccgccccacgcagggaccggcttacccctcgctccccgccctcactcactttctcccgccctcggcccggcctcccagctctctacttcgcgtgtctacaaactcaactcccggtttccgtgcctctccaccgctcgagttctctactctccatatccgaggggcccctcccagcatctacccccctcccaacctcgggggacctagccaagctaggggggactggatccgacgggtggagcagccaggtgagccccgaaaggtggggcggggcaggggcgctcccagccccaccccgggatctggtgacgctggggctggaatttgacaccggacggctgcggcggcgggcaggaggctgctgagggatggagttgggcccggcccccagacaaggcccgggggctccgccagcagcaggtccctcgggccccagccctcgctgccacccgggcctggagccccacacccgagggtgcagactggctgccaaggccacacttttggctaaaagaggcactgccaggtgtacagtcctgggcatgcgctgtttgagcttcgggggagagcccagcactggtccccggaaaggtgcctagaagaacaaggtgcaggaccccgtgctgcctcaacaggagggtgggggaacagctcaacaatggctgatgggcgctcctggtgttgatagagatggaacttggacttggaggcctctccacgctgtcccactgcccctggcctaggcggcaggctccacttggtctctccgcgcagcctgccctgtggcccaccctggccgctctggctctgctgagcagcgtcgcagaggcctccctgggctccgcgccccgcagccctgccccccgcgaaggccccccgcctgtcctggcgtcccccgccggccacctgccgggtaggtgagagggcgagggggcggggcggggctggcccgggacaccgcgcgtgactgggtctcattccagggggacgcacggcccgctggtgcagtggaagagcccggcggccgccgccgcagccttctcggcccgcgcccccgccgcctgcacccccatctgctcttccccgcgggggccgcgcggcgcgggctgggggcccgggcagccgcgctcgggcagcgggggcgcggggctgccgcctgcgctcgcagctggtgccggtgcgcgcgctcggcctgggccaccgctccgacgagctggtgcgtttccgcttctgcagcggctcctgccgccgcgcgcgctctccacacgacctcagcctggccagcctactgggcgccggggccctgcgaccgcccccgggctcccggcccgtcagccagccctgctgccgacccacgcgctacgaagcggtctccttcatggacgtcaacagcacctggagaaccgtggaccgcctctccgccaccgcctgcggctgcctgggctgagggctcgctccagggctttgcagactggacccttaccggtggctcttcctgcctgggaccctcccgcagagtcccactagccagcggcctcagccagggacgaaggcctcaaagctgagaggcccctaccggtgggtgatggatatcatccccgaacaggtgaagggacaactgactagcagccccagagccctcaccctgcggatcccagcctaaaagacaccagagacctcagctatggagcccttcggacccacttctcacagactctggcactggccaggcctcgaacctgggacccctcctctgatgaacactacagtggctgaggcatcagcccccgcccaggccctgtagggacagcatttgaaggacacatattgcagttgcttggttgaaagtgcctgtgctggaactggcctgtactcactcatgggagctggcccctatttattatttctaagttatttatttacttc

SEQ ID NO: 410029 - DNA, 1953 bp, Homo sapiens
actggccgctgagagaagaatcgggtggagcagagagcagctgctgcagggcagacagccggacccccaaatctgcacgtaccagcagtcagccgccccacgcagggaccggcttacccctcgctccccgccctcactcactttctcccgccctcggcccggcctcccagctctctacttcgcgtgtctacaaactcaactcccggtttccgtgcctctccaccgctcgagttctctactctccatatccgaggggcccctcccagcatctacccccctcccaacctcgggggacctagccaagctaggggggactggatccgacgggtggagcagccaggtgagccccgaaaggtggggcggggcaggggcgctcccagccccaccccgggatctggtgacgctggggctggaatttgacaccggacggctgcggcggcgggcaggaggctgctgagggatggagttgggcccggcccccagacaaggcccgggggctccgccagcagcaggtccctcgggccccagccctcgctgccacccgggcctggagccccacacccgagggtgcagactggctgccaaggccacacttttggctaaaagaggcactgccaggtgtacagtcctgggcatgcgctgtttgagcttcgggggagagcccagcactggtccccggaaaggtgcctagaagaacaaggtgcaggaccccgtgagatggaacttggacttggaggcctctccacgctgtcccactgcccctggcctaggcggcaggctccacttggtctctccgcgcagcctgccctgtggcccaccctggccgctctggctctgctgagcagcgtcgcagaggcctccctgggctccgcgccccgcagccctgccccccgcgaaggccccccgcctgtcctggcgtcccccgccggccacctgccgggtaggtgagagggcgagggggcggggcggggctggcccgggacaccgcgcgtgactgggtctcattccagggggacgcacggcccgctggtgcagtggaagagcccggcggccgccgccgcagccttctcggcccgcgcccccgccgcctgcacccccatctgctcttccccgcgggggccgcgcggcgcgggctgggggcccgggcagccgcgctcgggcagcgggggcgcggggctgccgcctgcgctcgcagctggtgccggtgcgcgcgctcggcctgggccaccgctccgacgagctggtgcgtttccgcttctgcagcggctcctgccgccgcgcgcgctctccacacgacctcagcctggccagcctactgggcgccggggccctgcgaccgcccccgggctcccggcccgtcagccagccctgctgccgacccacgcgctacgaagcggtctccttcatggacgtcaacagcacctggagaaccgtggaccgcctctccgccaccgcctgcggctgcctgggctgagggctcgctccagggctttgcagactggacccttaccggtggctcttcctgcctgggaccctcccgcagagtcccactagccagcggcctcagccagggacgaaggcctcaaagctgagaggcccctaccggtgggtgatggatatcatccccgaacaggtgaagggacaactgactagcagccccagagccctcaccctgcggatcccagcctaaaagacaccagagacctcagctatggagcccttcggacccacttctcacagactctggcactggccaggcctcgaacctgggacccctcctctgatgaacactacagtggctgaggcatcagcccccgcccaggccctgtagggacagcatttgaaggacacatattgcagttgcttggttgaaagtgcctgtgctggaactggcctgtactcactcatgggagctggcccctatttattatttctaagttatttatttacttc

SEQ ID NO: 410030 - DNA, 1948 bp, Homo sapiens
actggccgctgagagaagaatcgggtggagcagagagcagctgctgcagggcagacagccggacccccaaatctgcacgtaccagcagtcagccgccccacgcagggaccggcttacccctcgctccccgccctcactcactttctcccgccctcggcccggcctcccagctctctacttcgcgtgtctacaaactcaactcccggtttccgtgcctctccaccgctcgagttctctactctccatatccgaggggcccctcccagcatctacccccctcccaacctcgggggacctagccaagctaggggggactggatccgacgggtggagcagccaggtgagccccgaaaggtggggcggggcaggggcgctcccagccccaccccgggatctggtgacgctggggctggaatttgacaccggacggctgcggcggcgggcaggaggctgctgagggatggagttgggcccggcccccagacaaggcccgggggctccgccagcagcaggtccctcgggccccagccctcgctgccacccgggcctggagccccacacccgagggtgcagactggctgccaaggccacacttttggctaaaagaggcactgccaggtgtacagtcctgggcatgcgctgtttgagcttcgggggagagcccagcactggtccccggaaaggtgcctagaagaacaaggtgcaggaccccgtgctgcctcaacaggagggtgggggaacagctcaacaatggctgatgggcgctcctggtgttgatagagatggaacttggacttggaggcctctccacgctgtcccactgcccctggcctaggcggcaggctccacttggtctctccgcgcagcctgccctgtggcccaccctggccgctctggctctgctgagcagcgtcgcagaggcctccctgggctccgcgccccgcagccctgccccccgcgaaggccccccgcctgtcctggcgtcccccgccggccacctgccggggggacgcacggcccgctggtgcagtggaagagcccggcggccgccgccgcagccttctcggcccgcgcccccgccgcctgcacccccatctgctcttccccgcgggggccgcgcggcgcgggctgggggcccgggcagccgcgctcgggcagcgggggcgcggggctgccgcctgcgctcgcagctggtgccggtgcgcgcgctcggcctgggccaccgctccgacgagctggtgcgtttccgcttctgcagcggctcctgccgccgcgcgcgctctccacacgacctcagcctggccagcctactgggcgccggggccctgcgaccgcccccgggctcccggcccgtcagccagccctgctgccgacccacgcgctacgaagcggtctccttcatggacgtcaacagcacctggagaaccgtggaccgcctctccgccaccgcctgcggctgcctgggctgagggctcgctccagggctttgcagactggacccttaccggtggctcttcctgcctgggaccctcccgcagagtcccactagccagcggcctcagccagggacgaaggcctcaaagctgagaggcccctaccggtgggtgatggatatcatccccgaacaggtgaagggacaactgactagcagccccagagccctcaccctgcggatcccagcctaaaagacaccagagacctcagctatggagcccttcggacccacttctcacagactctggcactggccaggcctcgaacctgggacccctcctctgatgaacactacagtggctgaggcatcagcccccgcccaggccctgtagggacagcatttgaaggacacatattgcagttgcttggttgaaagtgcctgtgctggaactggcctgtactcactcatgggagctggcccctatttattatttctaagttatttatttacttc

SEQ ID NO: 410031 - DNA, 1775 bp, Homo sapiens
actggccgctgagagaagaatcgggtggagcagagagcagctgctgcagggcagacagccggacccccaaatctgcacgtaccagcagtcagccgccccacgcagggaccggcttacccctcgctccccgccctcactcactttctcccgccctcggcccggcctcccagctctctacttcgcgtgtctacaaactcaactcccggtttccgtgcctctccaccgctcgagttctctactctccatatccgaggggcccctcccagcatctacccccctcccaacctcgggggacctagccaagctaggggggactggatccgacgggtggagcagccaggtgagccccgaaaggtggggcggggcaggggcgctcccagccccaccccgggatctggtgacgctggggctggaatttgacaccggacggctgcggcggcgggcaggaggctgctgagggatggagttgggcccggcccccagacaaggcccgggggctccgccagcagcaggtccctcgggccccagccctcgctgccacccgggcctggagccccacacccgagctgcctcaacaggagggtgggggaacagctcaacaatggctgatgggcgctcctggtgttgatagagatggaacttggacttggaggcctctccacgctgtcccactgcccctggcctaggcggcagcctgccctgtggcccaccctggccgctctggctctgctgagcagcgtcgcagaggcctccctgggctccgcgccccgcagccctgccccccgcgaaggccccccgcctgtcctggcgtcccccgccggccacctgccggggggacgcacggcccgctggtgcagtggaagagcccggcggccgccgccgcagccttctcggcccgcgcccccgccgcctgcacccccatctgctcttccccgcgggggccgcgcggcgcgggctgggggcccgggcagccgcgctcgggcagcgggggcgcggggctgccgcctgcgctcgcagctggtgccggtgcgcgcgctcggcctgggccaccgctccgacgagctggtgcgtttccgcttctgcagcggctcctgccgccgcgcgcgctctccacacgacctcagcctggccagcctactgggcgccggggccctgcgaccgcccccgggctcccggcccgtcagccagccctgctgccgacccacgcgctacgaagcggtctccttcatggacgtcaacagcacctggagaaccgtggaccgcctctccgccaccgcctgcggctgcctgggctgagggctcgctccagggctttgcagactggacccttaccggtggctcttcctgcctgggaccctcccgcagagtcccactagccagcggcctcagccagggacgaaggcctcaaagctgagaggcccctaccggtgggtgatggatatcatccccgaacaggtgaagggacaactgactagcagccccagagccctcaccctgcggatcccagcctaaaagacaccagagacctcagctatggagcccttcggacccacttctcacagactctggcactggccaggcctcgaacctgggacccctcctctgatgaacactacagtggctgaggcatcagcccccgcccaggccctgtagggacagcatttgaaggacacatattgcagttgcttggttgaaagtgcctgtgctggaactggcctgtactcactcatgggagctggcccctatttattatttctaagttatttatttacttc

SEQ ID NO: 410032 - DNA, 1396 bp, Homo sapiens
tccccctagcgcagagggctcctaaggctgccctgcctgcctttccctccatcacggacaacagtcactggcctggctcggaggccttgattccacttagccaagaggcacacaccaggacctggaggacaaccccgggaaggcctgggggtctgttccacagctgcctcaacaggagggtgggggaacagctcaacaatggctgatgggcgctcctggtgttgatagagatggaacttggacttggaggcctctccacgctgtcccactgcccctggcctaggcggcaggctccacttggtctctccgcgcagcctgccctgtggcccaccctggccgctctggctctgctgagcagcgtcgcagaggcctccctgggctccgcgccccgcagccctgccccccgcgaaggccccccgcctgtcctggcgtcccccgccggccacctgccggggggacgcacggcccgctggtgcagtggaagagcccggcggccgccgccgcagccttctcggcccgcgcccccgccgcctgcacccccatctgctcttccccgcgggggccgcgcggcgcgggctgggggcccgggcagccgcgctcgggcagcgggggcgcggggctgccgcctgcgctcgcagctggtgccggtgcgcgcgctcggcctgggccaccgctccgacgagctggtgcgtttccgcttctgcagcggctcctgccgccgcgcgcgctctccacacgacctcagcctggccagcctactgggcgccggggccctgcgaccgcccccgggctcccggcccgtcagccagccctgctgccgacccacgcgctacgaagcggtctccttcatggacgtcaacagcacctggagaaccgtggaccgcctctccgccaccgcctgcggctgcctgggctgagggctcgctccagggctttgcagactggacccttaccggtggctcttcctgcctgggaccctcccgcagagtcccactagccagcggcctcagccagggacgaaggcctcaaagctgagaggcccctaccggtgggtgatggatatcatccccgaacaggtgaagggacaactgactagcagccccagagccctcaccctgcggatcccagcctaaaagacaccagagacctcagctatggagcccttcggacccacttctcacagactctggcactggccaggcctcgaacctgggacccctcctctgatgaacactacagtggctgaggcatcagcccccgcccaggccctgtagggacagcatttgaaggacacatattgcagttgcttggttgaaagtgcctgtgctggaactggcctgtactcactcatgggagctggcccctatttattatttctaagttatttatttacttc

SEQ ID NO: 410033 - DNA, 170 bp, Homo sapiens
tgtttattagcagtcaaattaaagtgaagtaacagtgattttctactttttccatcattgaacaaagctgaaaataaattagttacctagagtttggaaacataagacagatttttcaataatacaaataggagtgtaatttgcataatcttcttggagaatgtacttta

SEQ ID NO: 410034 - DNA, 1699 bp, Homo sapiens
  misc_feature (1624)..(1624): n is a, c, g, or t
  misc_feature (1627)..(1627): n is a, c, g, or t
  misc_feature (1677)..(1677): n is a, c, g, or t
acgcggcggggaggggaggggccgggccgggccgggcgggaggagccgctcgccggttttgccgcctccgcctttgccttcgcagccgcctccagtgttgtacattataaaccggggctgctgatgaggagtggggaactggctctctggaacgtgtgacagcaggcagaaggggtgagagtgaaatccaatccactttccatttagccgacctccgcttcaagctgccctgatatcatgggcaatttgcatatttctccaaagaaccatccagaacctgagcagcctgtcttcagacagagagaggcccacggctgtttcttgaaatctggcgctgggaatggccatgtggaacaggccatgccagaggctgcctcagcagcctctggtagctgagcccactgcagagggggagccacacctgcccacgggccgggagctgactgaggccaaccgcttcgcctatgctgccctctgtggcatctccctgtcccagttatttcctgaacccgaacacagctccttctgcacagagttcatggcaggcctggtgcagtggctggagttgtctgaagctgtcttgccaaccatgactgcttttgcgagcggcctgggaggtgaaggagcagatgtgtttgttcaaattttactgaaggaccccatcttgaaggacgacccgacggtgatcactcaggaccttctgagcttctcactcaaggatgggcactatgacgcccgggccagagtcctcgtttgccacatgacctccctgctccaagtgcccttggaggagctggatgtccttgaagagatgttcctggagagcctgaaggaaatcaaagaagaggaatctgaaatggccgaggcatcccgaaagaagaaagaaaaccggaggaaatggaagcgttatctcctgataggcctggcgactgtcggaggcggaacggtgatcggtgtgactggaggtctagctgcaccccttgttgccgctggagcagcgacgattattggcagcgccggggcagcggctctgggctcagcagccggcatagccatcatgacctcgctgtttggtgcagctggagctggcctgacaggatacaagatgaagaagcgagtgggagccattgaagagttcacgtttctgcctctgacggagggcaggcagctgcacatcaccatcgccgtcacggggtggctcgcttctggcaaataccgcaccttcagtgccccgtgggctgccctggcccacagccgtgagcagtactgcctggcctgggaagccaagtacctgatggagctcggcaatgccctggagaccatcctcagtggtctcgccaacatggtggcccaggaggccctaaagtacacagtgttgtctggcattgtggctgccctgacctggccagcctcactcctcagtgtcgccaatgtcatcgacaacccctggggggtgtgtctccatcgatcagcagaggttggcaagcacctggcccacatcctgctctcccggcagcaggggcgacgacctgtcaccttgattggcttcagcctgggagccagagtcatctacttctgtctgcaggagatggctcaagagaaagattgccaaggaatcatcgangangtcatcctgcctggtgcgcctgtggaggggagagccaagcattgggagcnttccggaagtggtgtccgggag

SEQ ID NO: 410035 - DNA, 1554 bp, Homo sapiens
  misc_feature (1479)..(1479): n is a, c, g, or t
  misc_feature (1482)..(1482): n is a, c, g, or t
  misc_feature (1532)..(1532): n is a, c, g, or t
acgcggcggggaggggaggggccgggccgggccgggcgggaggagccgctcgccggttttgccgcctccgcctttgccttcgcagccgcctccagggcaatttgcatatttctccaaagaaccatccagaacctgagcagcctgtcttcagacagagagaggcccacggctgtttcttgaaatctggcgctgggaatggccatgtggaacaggccatgccagaggctgcctcagcagcctctggtagctgagcccactgcagagggggagccacacctgcccacgggccgggagctgactgaggccaaccgcttcgcctatgctgccctctgtggcatctccctgtcccagttatttcctgaacccgaacacagctccttctgcacagagttcatggcaggcctggtgcagtggctggagttgtctgaagctgtcttgccaaccatgactgcttttgcgagcggcctgggaggtgaaggagcagatgtgtttgttcaaattttactgaaggaccccatcttgaaggacgacccgacggtgatcactcaggaccttctgagcttctcactcaaggatgggcactatgacgcccgggccagagtcctcgtttgccacatgacctccctgctccaagtgcccttggaggagctggatgtccttgaagagatgttcctggagagcctgaaggaaatcaaagaagaggaatctgaaatggccgaggcatcccgaaagaagaaagaaaaccggaggaaatggaagcgttatctcctgataggcctggcgactgtcggaggcggaacggtgatcggtgtgactggaggtctagctgcaccccttgttgccgctggagcagcgacgattattggcagcgccggggcagcggctctgggctcagcagccggcatagccatcatgacctcgctgtttggtgcagctggagctggcctgacaggatacaagatgaagaagcgagtgggagccattgaagagttcacgtttctgcctctgacggagggcaggcagctgcacatcaccatcgccgtcacggggtggctcgcttctggcaaataccgcaccttcagtgccccgtgggctgccctggcccacagccgtgagcagtactgcctggcctgggaagccaagtacctgatggagctcggcaatgccctggagaccatcctcagtggtctcgccaacatggtggcccaggaggccctaaagtacacagtgttgtctggcattgtggctgccctgacctggccagcctcactcctcagtgtcgccaatgtcatcgacaacccctggggggtgtgtctccatcgatcagcagaggttggcaagcacctggcccacatcctgctctcccggcagcaggggcgacgacctgtcaccttgattggcttcagcctgggagccagagtcatctacttctgtctgcaggagatggctcaagagaaagattgccaaggaatcatcgangangtcatcctgcctggtgcgcctgtggaggggagagccaagcattgggagcnttccggaagtggtgtccgggag

SEQ ID NO: 410036 - DNA, 1579 bp, Homo sapiens
  misc_feature (1504)..(1504): n is a, c, g, or t
  misc_feature (1507)..(1507): n is a, c, g, or t
  misc_feature (1557)..(1557): n is a, c, g, or t
acgcggcggggaggggaggggccgggccgggccgggcgggaggagccgctcgccggttttgccgcctccgcctttgccttcgcagccgcctccagtgttgtacattataaaccggggctgctgatgaggagtggggaactggctctctggaacgtgtgacagcaggcagaaggggtgagagtgaaatccaatccactttccatttagccgacctccgcttcaagctgccctgatatcatgggcaatttgcatatttctccaaagaaccatccagaacctgagcagcctgtcttcagacagagagaggcccacggctgtttcttgaaatctggcgctgggaatggccatgtggaacaggccatgccagaggctgcctcagcagcctctggtagctgagcccactgcagagggggagccacacctgcccacgggccgggagctgactgaggccaaccgcttcgcctatgctgccctctgtggcatctccctgtcccagttatttcctgaacccgaacacagctccttctgcacagagttcatggcaggcctggtgcagtggctggagttgtctgaagctgtcttgccaaccatgactgcttttgcgagcggcctgggaggtgaaggagcagatgtgtttgttcaaattttactgaaggaccccatcttgaaggacgacccgacggtgatcactcaggaccttctgagcttctcactcaaggatgggcactatgacgcccgggccagagtcctcgtttgccacatgacctccctgctccaagtgcccttggaggagctggatgtccttgaagagatgttcctggagagcctgaaggaaatcaaagaagaggaatctgaaatggccgaggcatcccgaaagaagaaagaaaaccggaggaaatggaagcgttatctcctgataggcctggcgactgtcggaggcggaacggtgatcggtgtgactggaggtctagctgcaccccttgttgccgctggagcagcgacgattattggcagcgccggggcagcggctctgggctcagcagccggcatagccatcatgacctcgctgtttggtgcagctggagctggcctgacaggcaccttcagtgccccgtgggctgccctggcccacagccgtgagcagtactgcctggcctgggaagccaagtacctgatggagctcggcaatgccctggagaccatcctcagtggtctcgccaacatggtggcccaggaggccctaaagtacacagtgttgtctggcattgtggctgccctgacctggccagcctcactcctcagtgtcgccaatgtcatcgacaacccctggggggtgtgtctccatcgatcagcagaggttggcaagcacctggcccacatcctgctctcccggcagcaggggcgacgacctgtcaccttgattggcttcagcctgggagccagagtcatctacttctgtctgcaggagatggctcaagagaaagattgccaaggaatcatcgangangtcatcctgcctggtgcgcctgtggaggggagagccaagcattgggagcnttccggaagtggtgtccgggag

SEQ ID NO: 410037 - DNA, 1234 bp, Homo sapiens
  misc_feature (1159)..(1159): n is a, c, g, or t
  misc_feature (1162)..(1162): n is a, c, g, or t
  misc_feature (1212)..(1212): n is a, c, g, or t
taggctaggtcgaggccggtgtaatcggccgaggattcctgaacccgatcacagctccttctgcacagagttcatggcaggcctggtgcagtggctggagttgtctgaagctgtcttgccaaccatgactgcttttgcgagcggcctgggaggtgaaggagcagatgtgtttgttcaaattttactgaaggaccccatcttgaaggacgacccgacggtgatcactcaggaccttctgagcttctcactcaaggatgggcactatgacgcccgggccagagtcctcgtttgccacatgacctccctgctccaagtgcccttggaggagctggatgtccttgaagagatgttcctggagagcctgaaggaaatcaaagaagaggaatctgaaatggccgaggcatcccgaaagaagaaagaaaaccggaggaaatggaagcgttatctcctgataggcctggcgactgtcggaggcggaacggtgatcggtgtgactggaggtctagctgcaccccttgttgccgctggagcagcgacgattattggcagcgccggggcagcggctctgggctcagcagccggcatagccatcatgacctcgctgtttggtgcagctggagctggcctgacaggatacaagatgaagaagcgagtgggagccattgaagagttcacgtttctgcctctgacggagggcaggcagctgcacatcaccatcgccgtcacggggtggctcgcttctggcaaataccgcaccttcagtgccccgtgggctgccctggcccacagccgtgagcagtactgcctggcctgggaagccaagtacctgatggagctcggcaatgccctggagaccatcctcagtggtctcgccaacatggtggcccaggaggccctaaagtacacagtgttgtctggcattgtggctgccctgacctggccagcctcactcctcagtgtcgccaatgtcatcgacaacccctggggggtgtgtctccatcgatcagcagaggttggcaagcacctggcccacatcctgctctcccggcagcaggggcgacgacctgtcaccttgattggcttcagcctgggagccagagtcatctacttctgtctgcaggagatggctcaagagaaagattgccaaggaatcatcgangangtcatcctgcctggtgcgcctgtggaggggagagccaagcattgggagcnttccggaagtggtgtccgggag

SEQ ID NO: 410038 - DNA, 1243 bp, Homo sapiens
  misc_feature (1168)..(1168): n is a, c, g, or t
  misc_feature (1171)..(1171): n is a, c, g, or t
  misc_feature (1221)..(1221): n is a, c, g, or t
acgcggcggggaggggaggggccgggccgggccgggcgggaggagccgctcgccggttttgccgcctccgcctttgccttcgcagccgcctccagtgttgtacattataaaccggggctgctgatgaggagtggggaactggctctctggaacgtgtgacagcaggcagaaggggtgagagtgaaatccaatccactttccatttagccgacctccgcttcaagctgccctgatatcatgggcaatttgcatatttctccaaagaaccatccagaacctgagcagcctgtcttcagacagagagaggcccacggctgtttcttgaaatctggcgctgggaatggccatgtggaacaggccatgccagaggctgcctcagcagcctctggtagctgagcccactgcagagggggagccacacctgcccacgggccgggagctgactgaggccaaccgcttcgcctatgctgccctctgtggcatctccctgtcccagttatttcctgaacccgaacacagaatggccgaggcatcccgaaagaagaaagaaaaccggaggaaatggaagcgttatctcctgataggcctggcgactgtcggaggcggaacggtgatcggtgtgactggaggtctagctgcaccccttgttgccgctggagcagcgacgattattggcagcgccggggcagcggctctgggctcagcagccggcatagccatcatgacctcgctgtttggtgcagctggagctggcctgacaggcaccttcagtgccccgtgggctgccctggcccacagccgtgagcagtactgcctggcctgggaagccaagtacctgatggagctcggcaatgccctggagaccatcctcagtggtctcgccaacatggtggcccaggaggccctaaagtacacagtgttgtctggcattgtggctgccctgacctggccagcctcactcctcagtgtcgccaatgtcatcgacaacccctggggggtgtgtctccatcgatcagcagaggttggcaagcacctggcccacatcctgctctcccggcagcaggggcgacgacctgtcaccttgattggcttcagcctgggagccagagtcatctacttctgtctgcaggagatggctcaagagaaagattgccaaggaatcatcgangangtcatcctgcctggtgcgcctgtggaggggagagccaagcattgggagcnttccggaagtggtgtccgggag

SEQ ID NO: 410039 - DNA, 186 bp, Homo sapiens
gcaccttcagtgccccgtgggctgccctggcccacagccgtgagcagtactgcctggcctgggaagccaagtacctgatggagctcggcaatgccctggagaccatcctcagtggtctcgccaacatggtggcccaggaggccctaaagtacacagtgttgtctggtaagtgcccccacctgcccc

SEQ ID NO: 410040 - DNA, 514 bp, Homo sapiens
aatacagctaacattttaatttggactccaagaatttgtaatccgtgataatgaccaacagagctaaaaattacctttaaacattacacgggaaaaaaagtacttgttctttaagccagaggttttaaacctagttgtacattgaaatcatctggagaagtaaaataacaagaatttagcttaaaaataatagatttcctggttttatcccaggccttctgaatcaaaatctctgtgatgcaggcttgagaatctgggattaaagcttctcaggtgattcttttgcagtcagccttggggaatcattgctgtaaattagtgactttatagtactgacaacacattagaatcaaatgggaaactctaaaaagtaataaacagaaatactatatgactgagcctaacctttaaaaaacaaaaacattctctggagggagaccccatagactgtgttttaaaaaaaggtcctctaagtgattttgatgcaagatctggcttaaaaaaaaaaaaaaag

SEQ ID NO: 410041 - DNA, 412 bp, Homo sapiens
gtgtgagcaactccacagcctcccctgctcgacgtccctccaacctctgcctgcaaccctgtcatgtgtacctactgatgtccttggaaaagttgtttaaagcatgttatcacacagcatgaaaatgttccagaagggaagcgcagacttgtaaaactgtgtcggtatttcctgattatctttttttttttggaggtcaagcccttcattttgacacttaatgaataaaatgcctgcactgcgagaaatagggtaatgaattataaaaagacataatcagcaatgactaaataattaagagaattgatatgcagagtcatctgggaatgcattaataataacacgatttgttccatatgctaaagaattctgtttttagaaaatcagtcatcacacatgctccatggcaaaa

SEQ ID NO: 410042 - DNA, 2939 bp, Homo sapiens
aacggctgcggcttcgggcggccgggtttctccggtctcccaacgccgaggagagcttgtaacaggcgctggagctggcccgccaccgccgcgtcagggacggcgctggagtcctccgttcccctcagcctctgagctgaggccccacaccagagtagggggcggcgcggcacccgtgccccggcatggcgacaccggacgcggggctccctggggctgagggcgtggagccggcgccctgggcgcagctggaggcccccgcccgcctcctgctgcaggcgctgcaggcggggcctgagggggcgcggcgcggcctgggggtgctccgggcgctgggcagccgcggctgggagcccttcgactggggtcgcttgctcgaggccctgtgccgggaggagccggtcgtgcaggggcctgacggccgtctggagctgaaaccactgttgctgcgattgccccggatatgccagaggaacctgatgtccctgctgatggccgttcggccatcgctgccggaaagtgggctcctctctgtgctgcagattgcccagcaggacctagcccctgaccccgatgcctggctccgtgccctgggggaattgctgcgaagggatttgggggtggggacctccatggagggagcttctccactgtctgaaagatgccagagacagctccaaagtctatgtagggggctgggcctggggggcaggaggttgaaatccccccaggctccagaccctgaagaagaggagaacagggactcccagcagcctgggaaacgcagaaaggactcagaggaagaggctgccagtcctgaggggaagagggtccccaaaagattacggtgttgggaagaggaagaagatcatgagaaggagagacccgaacataagtcactggaatccctggcagatggaggaagtgcatctcctattaaggaccagcctgtcatggcagttaagactggcgaggacggttcgaatctggatgatgctaaaggtctggctgagagtttggagttgcccaaagctatccaggaccagcttcccaggctgcagcagctgctgaagaccttggaggaggggttagagggattggaggatgcccccccagttgagctacagcttcttcacgaatgtagtcccagccagatggacttgctgtgtgcccagctgcagctccctcagctctcagacctcggtctcctgcggctctgcacctggctgctggccctttcacctgatctcagcctcagcaatgctactgtgctgaccagaagcctctttcttggacggatcctctccttgacttcctcagcctcccgcctgcttacaactgccctgacctccttctgtgccaaatatacataccctgtctgcagcgccctccttgaccctgtgctccaggccccaggcacaggtcctgctcaaacagagttactgtgttgccttgtgaagatggagtccctggagccagatgcacaggttctaatgctgggacagatcttggagctgccctggaaggaggaaactttcttggtgttgcagtcactcctagagcggcaggtggagatgacccctgagaagttcagtgtcttaatggagaagctctgtaaaaaggggctggcagccaccacctccatggcctatgccaagctcatgctgacagtgatgaccaagtatcaggctaacatcactgagacccagaggctgggcctggctatggccctagaacctaacaccaccttcctgaggaagtccctgaaggccgccttgaaacatttgggcccctgaccatccaccaagggaccaccctcttggtgctccatcaccagcttcctgaagggcatttctttcttcaccaccttgtcttgagccctagcctgaggataaaggctgagcctggccatcccagattgcaactgcctccctgttacaggctgcatagggaatattggcttcccagccagcagggaggctcctgggctaagggagctcagctatattttctttttcatttcttttgtttttgagagaaggtattgctctgtcatccaggctggagtgcagtgatgcgattgatcatggctcactgtaacctctgcctcccaggctcgatcctcccatgtcagcctcccaagtagctgggactacatgcacatgacactatgcccagctaattttttattttgtagataatatgctggtcagggctggtcttgaactcctgagctcaagtgatcttcctgccttggcacccaaagtgttgagatttacaggtgtgagccaccacaccaggccagagctatatttccaaaggctgctggccccaggcacactcctcatcaattctcaggctgcagggacaaactttccgatagggctcagtaggatcaagccgacccagagtgggcatgggatgctccaggaggtctggggtaccagtgggctcagatgaagctcttgtgctcatgtatattatgaccttctgtgtttttgtttctgacttgaataatttatcaatggtgttgaataaaagcaagttcaataatgaaaaaaaaaaaaaaaaaaaaaaaaaaaaaaaaaaaacacaacaaaacaaaaaaaaaaaaaaaaaacaaaaaaaaaaaaaaaaaaaaaaaaaaacacaacaaacaaagaaaaaaaaaaagaagaggagaggaaaaaaggagaagaagccgagagagacggagagcagccaagacagagcaaaagagaggaacggaaggacgaagaagagagggaagagaggagagggggagggagcagaggagacggcgcgggcgcgacagagaggaggaaagagggcagaaaggaggagggcaagaagaggaagaaaaagaagaaaaggaggagaggcacagaaggacgagcggcagaagaagagaaggcgaggagagggagacaaaggacaac

SEQ ID NO: 410043 - DNA, 3142 bp, Homo sapiens
aacggctgcggcttcgggcggccgggtttctccggtctcccaacgccgaggagagcttgtaacaggcgctggagctggcccgccaccgccgcgtcagggacggcgctggagtcctccgttcccctcagcctctgagctgaggccccacaccagagtagggggcggcgcggcacccgtgccccggcatggcgacaccggacgcggggctccctggggctgagggcgtggagccggcgccctgggcgcagctggaggcccccgcccgcctcctgctgcaggcgctgcaggcggggcctgagggggcgcggcgcggcctgggggtgctccgggcgctgggcagccgcggctgggagcccttcgactggggtcgcttgctcgaggccctgtgccgggaggagccggtcgtgcaggggcctgacggccgtctggagctgtaagtcctcgcccgcggccccttagcaggtatgggaggcggggggctgtcgggggaacgacacacacagaggtgaaataagccccttcagcgacggcctgccgcgcaccctatgagcaggggcacccttcactgagcacttgctgtgtgcgggacatcgaggatccgggaactcgaggcacacgccttctgttcgctgtaaggaaaccactgttgctgcgattgccccggatatgccagaggaacctgatgtccctgctgatggccgttcggccatcgctgccggaaagtgggctcctctctgtgctgcagattgcccagcaggacctagcccctgaccccgatgcctggctccgtgccctgggggaattgctgcgaagggatttgggggtggggacctccatggagggagcttctccactgtctgaaagatgccagagacagctccaaagtctatgtagggggctgggcctggggggcaggaggttgaaatccccccaggctccagaccctgaagaagaggagaacagggactcccagcagcctgggaaacgcagaaaggactcagaggaagaggctgccagtcctgaggggaagagggtccccaaaagattacggtgttgggaagaggaagaagatcatgagaaggagagacccgaacataagtcactggaatccctggcagatggaggaagtgcatctcctattaaggaccagcctgtcatggcagttaagactggcgaggacggttcgaatctggatgatgctaaaggtctggctgagagtttggagttgcccaaagctatccaggaccagcttcccaggctgcagcagctgctgaagaccttggaggaggggttagagggattggaggatgcccccccagttgagctacagcttcttcacgaatgtagtcccagccagatggacttgctgtgtgcccagctgcagctccctcagctctcagacctcggtctcctgcggctctgcacctggctgctggccctttcacctgatctcagcctcagcaatgctactgtgctgaccagaagcctctttcttggacggatcctctccttgacttcctcagcctcccgcctgcttacaactgccctgacctccttctgtgccaaatatacataccctgtctgcagcgccctccttgaccctgtgctccaggccccaggcacaggtcctgctcaaacagagttactgtgttgccttgtgaagatggagtccctggagccagatgcacaggttctaatgctgggacagatcttggagctgccctggaaggaggaaactttcttggtgttgcagtcactcctagagcggcaggtggagatgacccctgagaagttcagtgtcttaatggagaagctctgtaaaaaggggctggcagccaccacctccatggcctatgccaagctcatgctgacagtgatgaccaagtatcaggctaacatcactgagacccagaggctgggcctggctatggccctagaacctaacaccaccttcctgaggaagtccctgaaggccgccttgaaacatttgggcccctgaccatccaccaagggaccaccctcttggtgctccatcaccagcttcctgaagggcatttctttcttcaccaccttgtcttgagccctagcctgaggataaaggctgagcctggccatcccagattgcaactgcctccctgttacaggctgcatagggaatattggcttcccagccagcagggaggctcctgggctaagggagctcagctatattttctttttcatttcttttgtttttgagagaaggtattgctctgtcatccaggctggagtgcagtgatgcgattgatcatggctcactgtaacctctgcctcccaggctcgatcctcccatgtcagcctcccaagtagctgggactacatgcacatgacactatgcccagctaattttttattttgtagataatatgctggtcagggctggtcttgaactcctgagctcaagtgatcttcctgccttggcacccaaagtgttgagatttacaggtgtgagccaccacaccaggccagagctatatttccaaaggctgctggccccaggcacactcctcatcaattctcaggctgcagggacaaactttccgatagggctcagtaggatcaagccgacccagagtgggcatgggatgctccaggaggtctggggtaccagtgggctcagatgaagctcttgtgctcatgtatattatgaccttctgtgtttttgtttctgacttgaataatttatcaatggtgttgaataaaagcaagttcaataatgaaaaaaaaaaaaaaaaaaaaaaaaaaaaaaaaaaaacacaacaaaacaaaaaaaaaaaaaaaaaacaaaaaaaaaaaaaaaaaaaaaaaaaaacacaacaaacaaagaaaaaaaaaaagaagaggagaggaaaaaaggagaagaagccgagagagacggagagcagccaagacagagcaaaagagaggaacggaaggacgaagaagagagggaagagaggagagggggagggagcagaggagacggcgcgggcgcgacagagaggaggaaagagggcagaaaggaggagggcaagaagaggaagaaaaagaagaaaaggaggagaggcacagaaggacgagcggcagaagaagagaaggcgaggagagggagacaaaggacaac

SEQ ID NO: 410044 - DNA, 2870 bp, Homo sapiens
aacggctgcggcttcgggcggccgggtttctccggtctcccaacgccgaggagagcttgtaacaggcgctggagctggcccgccaccgccgcgtcagggacggcgctggagtcctccgttcccctcagcctctgagctgaggccccacaccagagtagggggcggcgcggcacccgtgccccggcatggcgacaccggacgcggggctccctggggctgagggcgtggagccggcgccctgggcgcagctggaggcccccgcccgcctcctgctgcaggcgctgcaggcggggcctgagggggcgcggcgcggcctgggggtgctccgggcgctgggcagccgcggctgggagcccttcgactggggtcgcttgctcgaggccctgtgccgggaggagccggtcgtgcaggggcctgacggccgtctggagctgaaaccactgttgctgcgattgccccggatatgccagaggaacctgatgtccctgctgatggccgttcggccatcgctgccggaaagtgggctcctctctgtgctgcagattgcccagcaggacctagcccctgaccccgatgcctggctccgtgccctgggggaattgctgcgaagggatttgggggtggggacctccatggagggagcttctccactgtctgaaagatgccagagacagctccaaagtctatgtagggggctgggcctggggggcaggaggttgaaatccccccaggctccagaccctgaagaagaggagaacagggactcccagcagcctgggaaacgcagaaaggactcagaggaagaggctgccagtcctgaggggaagagggtccccaaaagattacggtgttgggaagaggaagaagatcatgagaaggagagacccgaacataagtcactggaatccctggcagatggaggaagtgcatctcctattaaggaccagcctgtcatggcagttaagactggcgaggacggttcgaatctggatgatgctaaaggtctggctgagagtttggagttgcccaaagctatccaggaccagcttcccaggctgcagcagctgctgaagaccttggaggagatggacttgctgtgtgcccagctgcagctccctcagctctcagacctcggtctcctgcggctctgcacctggctgctggccctttcacctgatctcagcctcagcaatgctactgtgctgaccagaagcctctttcttggacggatcctctccttgacttcctcagcctcccgcctgcttacaactgccctgacctccttctgtgccaaatatacataccctgtctgcagcgccctccttgaccctgtgctccaggccccaggcacaggtcctgctcaaacagagttactgtgttgccttgtgaagatggagtccctggagccagatgcacaggttctaatgctgggacagatcttggagctgccctggaaggaggaaactttcttggtgttgcagtcactcctagagcggcaggtggagatgacccctgagaagttcagtgtcttaatggagaagctctgtaaaaaggggctggcagccaccacctccatggcctatgccaagctcatgctgacagtgatgaccaagtatcaggctaacatcactgagacccagaggctgggcctggctatggccctagaacctaacaccaccttcctgaggaagtccctgaaggccgccttgaaacatttgggcccctgaccatccaccaagggaccaccctcttggtgctccatcaccagcttcctgaagggcatttctttcttcaccaccttgtcttgagccctagcctgaggataaaggctgagcctggccatcccagattgcaactgcctccctgttacaggctgcatagggaatattggcttcccagccagcagggaggctcctgggctaagggagctcagctatattttctttttcatttcttttgtttttgagagaaggtattgctctgtcatccaggctggagtgcagtgatgcgattgatcatggctcactgtaacctctgcctcccaggctcgatcctcccatgtcagcctcccaagtagctgggactacatgcacatgacactatgcccagctaattttttattttgtagataatatgctggtcagggctggtcttgaactcctgagctcaagtgatcttcctgccttggcacccaaagtgttgagatttacaggtgtgagccaccacaccaggccagagctatatttccaaaggctgctggccccaggcacactcctcatcaattctcaggctgcagggacaaactttccgatagggctcagtaggatcaagccgacccagagtgggcatgggatgctccaggaggtctggggtaccagtgggctcagatgaagctcttgtgctcatgtatattatgaccttctgtgtttttgtttctgacttgaataatttatcaatggtgttgaataaaagcaagttcaataatgaaaaaaaaaaaaaaaaaaaaaaaaaaaaaaaaaaaacacaacaaaacaaaaaaaaaaaaaaaaaacaaaaaaaaaaaaaaaaaaaaaaaaaaacacaacaaacaaagaaaaaaaaaaagaagaggagaggaaaaaaggagaagaagccgagagagacggagagcagccaagacagagcaaaagagaggaacggaaggacgaagaagagagggaagagaggagagggggagggagcagaggagacggcgcgggcgcgacagagaggaggaaagagggcagaaaggaggagggcaagaagaggaagaaaaagaagaaaaggaggagaggcacagaaggacgagcggcagaagaagagaaggcgaggagagggagacaaaggacaac

SEQ ID NO: 410045 - DNA, 2013 bp, Homo sapiens
tgtgggaaatgtgggaggggattttgttgttttctctctcagcgataggggtcaccctgtgtagtatcttttagcccttggttccttcccctagggcagctctcccagactttctttgccctggagtatctttgccctgctctgtctgctgtccagttgcttgagacagcctagcagaggcagagtgcatgtcccggtgtcctctctccccccgcactctgtaagcagatggacttgctgtgtgcccagctgcagctccctcagctctcagacctcggtctcctgcggctctgcacctggctgctggccctttcacctgatctcagcctcagcaatgctactgtgctgaccagaagcctctttcttggacggatcctctccttgacttcctcagcctcccgcctgcttacaactgccctgacctccttctgtgccaaatatacataccctgtctgcagcgccctccttgaccctgtgctccaggccccaggcacaggtcctgctcaaacagagttactgtgttgccttgtgaagatggagtccctggagccagatgcacaggttctaatgctgggacagatcttggagctgccctggaaggaggaaactttcttggtgttgcagtcactcctagagcggcaggtggagatgacccctgagaagttcagtgtcttaatggagaagctctgtaaaaaggggctggcagccaccacctccatggcctatgccaagctcatgctgacagtgatgaccaagtatcaggctaacatcactgagacccagaggctgggcctggctatggccctagaacctaacaccaccttcctgaggaagtccctgaaggccgccttgaaacatttgggcccctgaccatccaccaagggaccaccctcttggtgctccatcaccagcttcctgaagggcatttctttcttcaccaccttgtcttgagccctagcctgaggataaaggctgagcctggccatcccagattgcaactgcctccctgttacaggctgcatagggaatattggcttcccagccagcagggaggctcctgggctaagggagctcagctatattttctttttcatttcttttgtttttgagagaaggtattgctctgtcatccaggctggagtgcagtgatgcgattgatcatggctcactgtaacctctgcctcccaggctcgatcctcccatgtcagcctcccaagtagctgggactacatgcacatgacactatgcccagctaattttttattttgtagataatatgctggtcagggctggtcttgaactcctgagctcaagtgatcttcctgccttggcacccaaagtgttgagatttacaggtgtgagccaccacaccaggccagagctatatttccaaaggctgctggccccaggcacactcctcatcaattctcaggctgcagggacaaactttccgatagggctcagtaggatcaagccgacccagagtgggcatgggatgctccaggaggtctggggtaccagtgggctcagatgaagctcttgtgctcatgtatattatgaccttctgtgtttttgtttctgacttgaataatttatcaatggtgttgaataaaagcaagttcaataatgaaaaaaaaaaaaaaaaaaaaaaaaaaaaaaaaaaaacacaacaaaacaaaaaaaaaaaaaaaaaacaaaaaaaaaaaaaaaaaaaaaaaaaaacacaacaaacaaagaaaaaaaaaaagaagaggagaggaaaaaaggagaagaagccgagagagacggagagcagccaagacagagcaaaagagaggaacggaaggacgaagaagagagggaagagaggagagggggagggagcagaggagacggcgcgggcgcgacagagaggaggaaagagggcagaaaggaggagggcaagaagaggaagaaaaagaagaaaaggaggagaggcacagaaggacgagcggcagaagaagagaaggcgaggagagggagacaaaggacaac

SEQ ID NO: 410046 - DNA, 1640 bp, Homo sapiens
caaaaggaaggtagctgtcacagtagagtgtctgtgaacctcagttttctcctctgtaaaatgggagggtcttgaggattatatacagcaatgcatatatatgatgtatatgtatgtttgtatatggattgatgcatataaagtgctgccacatagtaaacacacaatgattgtcaactgttactaatgtggccggcttagtaaattgtgcagctagtatttggcaccaggtctacctcgttaaccatggtgaaataatgagattagattgctcaggagtctcctcctctttccatcctcctggcctcctctctcctcaatagagcccctggggtagtcgggagacgggagggatcagttgctggagtcctgacatgatttttccttctccccagatcactgagacccagaggctgggcctggctatggccctagaacctaacaccaccttcctgaggaagtccctgaaggccgccttgaaacatttgggcccctgaccatccaccaagggaccaccctcttggtgctccatcaccagcttcctgaagggcatttctttcttcaccaccttgtcttgagccctagcctgaggataaaggctgagcctggccatcccagattgcaactgcctccctgttacaggctgcatagggaatattggcttcccagccagcagggaggctcctgggctaagggagctcagctatattttctttttcatttcttttgtttttgagagaaggtattgctctgtcatccaggctggagtgcagtgatgcgattgatcatggctcactgtaacctctgcctcccaggctcgatcctcccatgtcagcctcccaagtagctgggactacatgcacatgacactatgcccagctaattttttattttgtagataatatgctggtcagggctggtcttgaactcctgagctcaagtgatcttcctgccttggcacccaaagtgttgagatttacaggtgtgagccaccacaccaggccagagctatatttccaaaggctgctggccccaggcacactcctcatcaattctcaggctgcagggacaaactttccgatagggctcagtaggatcaagccgacccagagtgggcatgggatgctccaggaggtctggggtaccagtgggctcagatgaagctcttgtgctcatgtatattatgaccttctgtgtttttgtttctgacttgaataatttatcaatggtgttgaataaaagcaagttcaataatgaaaaaaaaaaaaaaaaaaaaaaaaaaaaaaaaaaaacacaacaaaacaaaaaaaaaaaaaaaaaacaaaaaaaaaaaaaaaaaaaaaaaaaaacacaacaaacaaagaaaaaaaaaaagaagaggagaggaaaaaaggagaagaagccgagagagacggagagcagccaagacagagcaaaagagaggaacggaaggacgaagaagagagggaagagaggagagggggagggagcagaggagacggcgcgggcgcgacagagaggaggaaagagggcagaaaggaggagggcaagaagaggaagaaaaagaagaaaaggaggagaggcacagaaggacgagcggcagaagaagagaaggcgaggagagggagacaaaggacaac

SEQ ID NO: 410047 - DNA, 1994 bp, Homo sapiens
  misc_feature (905)..(905): n is a, c, g, or t
gtgttaggtgcttttgcccaactttagactaatttaagtgttctgatcacatttaaggtaggctaggctaagctatgacgtttagtagtagatattttcaactcatgatgggtttgtcaggatgtaaccccatcataagtcaaagagcatctgtaaagacaaagtactttagaaaaaaatacagtgataggatgacaagatcagaaaagagattaagcataggtaggtttgctgtagtgctgttgaaatctaaccttctaaaaacggtctgccaaacctgcatctgctcctccttgtaaaagaagtgaaaggtaatataatattatcaagaatataaaattaaacagacgggaactcttgtaactcagtacacaaaatttctaaaacatggccttaaaggctaagcatgtctgtatttttcctttctgtcttgacagaaaaaatctaacctttctataggtcagactaagcaagttctattaattagcccaaacttcaataggacagattatctgagaatgttcttacttgtagggcactttaattgaaataagactaattctgactcctgattttacgggtgagaaagttgagatccaacaaaattaattaccataaagaacaaaaatctgattgccatttttgttcctttttcaatatacttagtagcccttcctcaaagaaagttttagcacaaaatgtattctcttacttggaattacttctgctgtttgtttctgtatgtaatctgaataaatataatgttaacactggaaaagttcctagaaattagctgttcttcatcttttttggatcaaagatcattttgagaattggataaaatgtgtttgctatgccctgtccatagactactgacttagatatgtaataatttctgacatagntggaaaaacccaagaccaggagatggtaattgtttgaagattcaaaagcaggtcaatgttagaagaaattagaatggtctactcatgcattacccataatagttaagttcttcatattataataatgagatagttttctttcctgtttgccttcccctcctctacactttacaatactagtatcagttttctgagttaatctgcatgttctctgctatatggagacttcttcagtgtatcctcatcatagttagaacttgatttttactcttatttacacatttagttttgccttaatgactgcattgttttccattttatgaaagtcccatttgtttaacctgtctccaatatagaagcttaaatttaaaatatatatgtatgttacattcagtactatggtaaacattctggtacataactgttctgcaagtatatgtgccagaaattcctagaaataaaattgctgggtgaaagaggaagcacaaaaaaaaatttctatgaattactgtttgccttccaaaaagattgaaccaatttgtacctaaccagcaaaacatacagttcatgtttctgtgtaacctcgccatttttaacccttcttttgtgatctttgcaagtctggtaactggaggtatcttacttttatttaatctgtatgtcattaagtattagtgcaattgagctcaatattgttaagatgtcagtttgccccagtgtgacatatatattcagtgtaatcatgatcaaaatcccagcatattttttgtagatattgacaagctaattctaaaacttatgtggaaaggcaagtgaactagaagagcccccaaaatttgaaatggaaaaagaggaacaaagttgagaattcacactacccaattttaatataaggctacataagtcaagccagtggggtcctggccaaaggataaacatataattcagtgagacagaatagagagctcagaaatagacccacacaaatattatcaactgactgttggcagaagctaaaaagaaattccacaggaaaagggtagttttttcaataaatggtactggaacaatgaacagctttatgcaaaa

SEQ ID NO: 410048 - DNA, 214 bp, Homo sapiens
ggttacacaaatttatacgcaccttcaaactcagaactggataccaaaagcaaagcaaacactgtgaacatgtatcatatggtggttgcatgggggtatatatatatttgtccagattaactaagcatttaaaattgatgaatttactaatctgggcaacatagtgagaacctgactctacaaaaaattaagaagaaaaaaaaaataccaggcg

SEQ ID NO: 410049 - DNA, 386 bp, Homo sapiens
gagctcggtacccgactgcaaccaacgccgctgactgcatccaacgccgctgactgcatccaacgccgcctgactgcatccaacgccgcctgactgcatccaacgccgcctgactgcatcccacgccgcctgactgcatcccacgccgctgtgctttggctttagaaagggatggatgagaagacagacctgagaccaatctgggtagaagcaaaaagttgaaccttttaaagtgctgaacacaaatccaaattcgaatggttcaagcagccgtgaaatcgctcttcataaagtgggcttaattctctagtttaagttcttttgatggaatgaattaattaatgtctccgcggctgttgatgcagtcgggatcctctacgatctca

SEQ ID NO: 410050 - DNA, 2099 bp, Homo sapiens
tactccagcaccattggccgatcaatatttaatgcttggagattctgactctgcgggagtcatgtcaggggaccttgggagccaatctgcttgagcttctgagtgataattattcatgggctcctgcctcttgctctttctctagcacggtcccactctgcagactcagtgccttattcagtcttctctctcgctctctccgctgctgtagccggaccctttgccttcgccactgctcagcgtctgcacatccctacaatggctaaaacagcaatggcctacaaggaaaaaatgaaggagctgtccatgctgtcactgatctgctcttgcttttacccggaacctcgcaacatcaacatctatacttacgatgatatggaagtgaagcaaatcaacaaacgtgcctctggccaggcttttgagctgatcttgaagccaccatctcctatctcagaagccccacgaactttagcttctccaaagaagaaagacctgtccctggaggagatccagaagaaactggaggctgcagaggaaagaagaaagtctcaggaggcccaggtgctgaaacaattggcagagaagagggaacacgagcgagaagtccttcagaaggctttggaggagaacaacaacttcagcaagatggcggaggaaaagctgatcctgaaaatggaacaaattaaggaaaaccgtgaggctaatctagctgctattattgaacgtctgcaggaaaaggagaggcatgctgcggaggtgcgcaggaacaaggaactccaggttgaactgtctggctgaagcaagggagggtctggcacgccccaccaatagtaaatccccctgcctatattataatggatcatgcgatatcaggatggggaatgtatgacatggtttaaaaagaactcattataaaaaaaaaaaaacaaaaaaaatcaaaaattaaaaaaaatcaatgcggtctctttgcagaatgttttgcttgatgtttaaaaaataccttggatcttattttgtaaatacttacatttttgttaaaaaatacaagtattgcattatgcaagttatttcataatcttacatgtcctgtaacaggcttttgatgttgtgtctttccactcaaatgaatttgctaggtctgttctttttgaagctccccatgtctaactccattccaaaagaaaaatgaggtcagtagacagtctatggtgctagaaacccaccattgcctaatgacctagaaggctttgttgtctctgagcttgactaagaccatacctagatcacaggtattatgactccacatgaaccttcacatttgttcgctcataatctacttactgcctaaaaactacaaaaccaggctaagaaataccaccagtcatagcatttacttctgcttctcctggattatgtgctacaaatgtgctttggctttagaaagggatggatgagaagacagacctgagaccaatctgggtagaagcaaaaagttgaaccttttaaagtgctgaacacaaatccaaattcgaatggttcaagcagccgtgaaatcgctcttcataaagtgggcttaattctctagtttaagttcttttgatggaatgaattaattaatgtgtcaggtggcttatttgtggatgccatgattgatgatgttcattttaagctcttacctatagtacaagtacatgatgctactgaatatttttccacttggaaactgtgagctggttgttgcattaaaacacacatacaaacaaaatcaaaaacactgcggactttcactcaagctggtctttcttccccagtgtaaggcaatcctgcctactaacaacaccaacaacaaaacactccatctgtgaagctgacgcagttaagggggctaggcagggcatttgtgccaactaagaatcaccagatacccaccataagtacctatcgcagttttgaagtcgtttctccccaactcccaactcctgaaggttgctgcctgcatatttactcttcattagtgctattttcctgtatgtcattgtgagcaagctgtgattaataaagaattggagttctgtgaactaataaaggtttggtctgtt

SEQ ID NO: 410051 - DNA, 2045 bp, Homo sapiens
tactccagcaccattggccgatcaatatttaatgcttggagattctgactctgcgggagtcatgtcaggggaccttgggagccaatctgcttgagcttctgagtgataattattcatgggctcctgcctcttgctctttctctagcacggtcccactctgcagactcagtgccttattcagtcttctctctcgctctctccgctgctgtagccggaccctttgccttcgccactgctcagcgtctgcacatccctacaatggctaaaacagcaatggcctacaaggaaaaaatgaaggagctgtccatgctgtcactgatctgctcttgcttttacccggaacctcgcaacatcaacatctatacttacgatgatatggaagtgaagcaaatcaacaaacgtgcctctggccaggcttttgagctgatcttgaagccaccatctcctatctcagaagccccacgaactttagcttctccaaagaagaaagacctgtccctggaggagatccagaagaaactggaggctgcagaggaaagaagaaagtctcaggaggcccaggtgctgaaacaattggcagagaagagggaacacgagcgagaagtccttcagaaggctttggaggagaacaacaacttcagcaagatggcggaggaaaagctgatcctgaaaatggaacaaattaaggaaaaccgtgaggctaatctagctgctattattgaacgtctgcaggaaaaggagaggcatgctgcggaggtgcgcaggaacaaggaactccaggttgaactgtctggctgaagcaagggagggtctggcacgccccaccaatagtaaatccccctgcctatattataatggatcatgcgatatcaggatggggaatgtatgacatggtttaaaaagaactcattataaaaaaaaaaaaacaaaaaaaatcaaaaattaaaaaaaatcaatgcggtctctttgcagaatgttttgcttgatgtttaaaaaataccttggatcttattttgtaaatacttacatttttgttaaaaaatacaagtattgcattatgcaagttatttcataatcttacatgtcctgtaacaggcttttgatgttgtgtctttccactcaaatgaatttgctaggtctgttctttttgaagctccccatgtctaactccattccaaaagaaaaatgaggtcagtagacagtctatggtgctagaaacccaccattgcctaatgacctagaaggctttgttgtctctgagcttgactaagaccatacctagatcacaggtattatgactccacatgaaccttcacatttgttcgctcataatctacttactgcctaaaaactacaaaaccaggctaagaaataccaccagtcatagcatttacttctgcttctcctggattatgtgctacaaatgtgctttggctttagaaagggatggatgagaagacagacctgagaccaatctgggtagaagcacagccgtgaaatcgctcttcataaagtgggcttaattctctagtttaagttcttttgatggaatgaattaattaatgtgtcaggtggcttatttgtggatgccatgattgatgatgttcattttaagctcttacctatagtacaagtacatgatgctactgaatatttttccacttggaaactgtgagctggttgttgcattaaaacacacatacaaacaaaatcaaaaacactgcggactttcactcaagctggtctttcttccccagtgtaaggcaatcctgcctactaacaacaccaacaacaaaacactccatctgtgaagctgacgcagttaagggggctaggcagggcatttgtgccaactaagaatcaccagatacccaccataagtacctatcgcagttttgaagtcgtttctccccaactcccaactcctgaaggttgctgcctgcatatttactcttcattagtgctattttcctgtatgtcattgtgagcaagctgtgattaataaagaattggagttctgtgaactaataaaggtttggtctgtt

SEQ ID NO: 410052 - DNA, 2024 bp, Homo sapiens
  misc_feature (2004)..(2004): n is a, c, g, or t
tactccagcaccattggccgatcaatatttaatgcttggagattctgactctgcgggagtcatgtcaggggaccttgggagccaatctgcttgagcttctgagtgataattattcatgggctcctgcctcttgctctttctctagcacggtcccactctgcagactcagtgccttattcagtcttctctctcgctctctccgctgctgtagccggaccctttgccttcgccactgctcagcgtctgcacatccctacaatggctaaaacagcaatggcctacaaggaaaaaatgaaggagctgtccatgctgtcactgatctgctcttgcttttacccggaacctcgcaacatcaacatctatacttacgatgatatggaagtgaagcaaatcaacaaacgtgcctctggccaggcttttgagctgatcttgaagccaccatctcctatctcagaagccccacgaactttagcttctccaaagaagaaagacctgtccctggaggagatccagaagaaactggaggctgcagaggaaagaagaaagtctcaggaggcccaggtgctgaaacaattggcagagaagagggaacacgagcgagaagtccttcagaaggctttggaggagaacaacaacttcagcaagatggcggaggaaaagctgatcctgaaaatggaacaaattaaggaaaaccgtgaggctaatctagctgctattattgaacgtctgcaggaaaaggagaggcatgctgcggaggtgcgcaggaacaaggaactccaggttgaactgtctggctgaagcaagggagggtctggcacgccccaccaatagtaaatccccctgcctatattataatggatcatgcgatatcaggatggggaatgtatgacatggtttaaaaagaactcattataaaaaaaaaaaaacaaaaaaaatcaaaaattaaaaaaaatcaatgcggtctctttgcagaatgttttgcttgatgtttaaaaaataccttggatcttattttgtaaatacttacatttttgttaaaaaatacaagtattgcattatgcaagttatttcataatcttacatgtcctgtaacaggcttttgatgttgtgtctttccactcaaatgaatttgctaggtctgttctttttgaagctccccatgtctaactccattccaaaagaaaaatgaggtcagtagacagtctatggtgctagaaacccaccattgcctaatgacctagaaggctttgttgtctctgagcttgactaagaccatacctagatcacaggtattatgactccacatgaaccttcacatttgttcgctcataatctacttactgcctaaaaactacaaaaccaggctaagaaataccaccagtcatagcatttacttctgcttctcctggattatgtgctacaaatgtgctttggctttagaaagggatggatgagaagacagacctgagaccaatctgggtagaagcaaaaagttgaaccttttaaagtgctgaacacaaatccaaattcgaatggttcaagcagccgtgaaatcgctcttcataaagtgggcttaattctctagtttaagttcttttgatggaatgaattaattaatgtgtcaggtggcttatttgtggatgccatgattgatgatgttcattttaagctcttacctatagtacaagtacatgatgctactgaatatttttccacttggaaactgtgagctggttgttgcattaaaacacacatacaaacaaaatcaaaaacactgcggactttcactcaagctggtctttcttccccagtgtaaggcaatcctgcctactaacaacaccaacaacaaaacactccatctgtgaagctgacgcagttaagggggctaggcagggcatttgtgccaactaagaatcaccagatacccaccataagtacctatcgcagttttgaagtcgtttctccccaactcccaactcctgaaggttgctgcctgcatattcncccccccccacccccccccc

SEQ ID NO: 410053 - DNA, 1786 bp, Homo sapiens
tactccagcaccattggccgatcaatatttaatgcttggagattctgactctgcgggagtcatgtcaggggaccttgggagccaatctgcttgagcttctgagtgataattattcatgggctcctgcctcttgctctttctctagcacggtcccactctgcagactcagtgccttattcagtcttctctctcgctctctccgctgctgtagccggaccctttgccttcgccactgctcagcgtctgcacatccctacaatggctaaaacagcaatggcctacaaggaaaaaatgaaggagctgtccatgctgtcactgatctgctcttgcttttacccggaacctcgcaacatcaacatctatacttacgatgatatggaagtgaagcaaatcaacaaacgtgcctctggccaggcttttgagctgatcttgaagccaccatctcctatctcagaagccccacgaactttagcttctccaaagaagaaagacctgtccctggaggagatccagaagaaactggaggctgcagaggaaagaagaaagtctcaggaggcccaggtgctgaaacaattggcagagaagagggaacacgagcgagaagtccttcagaaggctttggaggagaacaacaacttcagcaagatggcggaggaaaagctgatcctgaaaatggaacaaattaaggaaaaccgtgaggctaatctagctgctattattgaacgtctgcaggaaaaggagaggcatgctgcggaggtgcgcaggaacaaggaactccaggttgaactgtctggctgaagcaagggagggtctggcacgccccaccaatagtaaatccccctgcctatattataatggatcatgcgatatcaggatggggaatgtatgacatggtttaaaaagaactcattataaaaaaaaaaaaacaaaaaaaatcaaaaattaaaaaaaatcaatgcggtctctttgcagaatgttttgcttgatgtttaaaaaataccttggatcttattttgtaaatacttacatttttgttaaaaaatacaagtattgcattatgcaagttatttcataatcttacatgtcctgtaacaggcttttgatgttgtgtctttccactcaaatgaatttgctaggtctgttctttttgaagctccccatgtctaactccattccaaaagaaaaatgaggtcagtagacagtctatggtgctagaaacccaccattgcctaatgacctagaaggctttgttgtctctgagcttgactaagaccatacctagatcacaggtattatgactccacatgaaccttcacatttgttcgctcataatctacttactgcctaaaaactacaaaaccaggctaagaaataccaccagtcatagcatttacttctgcttctcctggattatgtgctacaaatgtgctttggctttagaaagggatggatgagaagacagacctgagaccaatctgggtagaagcaaaaagttgaaccttttaaagtgctgaacacaaatccaaattcgaatggttcaagcagccgtgaaatcgctcttcataaagtgggcttaattctctagtttaagttcttttgatggaatgaattaattaatgtgtcaggtggcttatttgtggatgccatgattgatgatgttcattttaagctcttacctatagtacaagtacatgatgctactgaatatttttccacttggaaactgtgacaagctgtgattaataaagaattggagttctgtgaactaataaaggtttggtctgtt

SEQ ID NO: 410054 - DNA, 1768 bp, Homo sapiens
gattgcatcagggtgaacctactatatgtgacgagtgagactgggagtgagtcacacggagcaatcggtgctactgaggctcggacatttcgtaaactcgagcgttgatagctgttatctcagaagccccacgaactttagcttctccaaagaagaaagacctgtccctggaggagatccagaagaaactggaggctgcagaggaaagaagaaagtctcaggaggcccaggtgctgaaacaattggcagagaagagggaacacgagcgagaagtccttcagaaggctttggaggagaacaacaacttcagcaagatggcggaggaaaagctgatcctgaaaatggaacaaattaaggaaaaccgtgaggctaatctagctgctattattgaacgtctgcaggaaaaggagaggcatgctgcggaggtgcgcaggaacaaggaactccaggttgaactgtctggctgaagcaagggagggtctggcacgccccaccaatagtaaatccccctgcctatattataatggatcatgcgatatcaggatggggaatgtatgacatggtttaaaaagaactcattataaaaaaaaaaaaacaaaaaaaatcaaaaattaaaaaaaatcaatgcggtctctttgcagaatgttttgcttgatgtttaaaaaataccttggatcttattttgtaaatacttacatttttgttaaaaaatacaagtattgcattatgcaagttatttcataatcttacatgtcctgtaacaggcttttgatgttgtgtctttccactcaaatgaatttgctaggtctgttctttttgaagctccccatgtctaactccattccaaaagaaaaatgaggtcagtagacagtctatggtgctagaaacccaccattgcctaatgacctagaaggctttgttgtctctgagcttgactaagaccatacctagatcacaggtattatgactccacatgaaccttcacatttgttcgctcataatctacttactgcctaaaaactacaaaaccaggctaagaaataccaccagtcatagcatttacttctgcttctcctggattatgtgctacaaatgtgctttggctttagaaagggatggatgagaagacagacctgagaccaatctgggtagaagcaaaaagttgaaccttttaaagtgctgaacacaaatccaaattcgaatggttcaagcagccgtgaaatcgctcttcataaagtgggcttaattctctagtttaagttcttttgatggaatgaattaattaatgtgtcaggtggcttatttgtggatgccatgattgatgatgttcattttaagctcttacctatagtacaagtacatgatgctactgaatatttttccacttggaaactgtgagctggttgttgcattaaaacacacatacaaacaaaatcaaaaacactgcggactttcactcaagctggtctttcttccccagtgtaaggcaatcctgcctactaacaacaccaacaacaaaacactccatctgtgaagctgacgcagttaagggggctaggcagggcatttgtgccaactaagaatcaccagatacccaccataagtacctatcgcagttttgaagtcgtttctccccaactcccaactcctgaaggttgctgcctgcatatttactcttcattagtgctattttcctgtatgtcattgtgagcaagctgtgattaataaagaattggagttctgtgaactaataaaggtttggtctgtt

SEQ ID NO: 410055 - DNA, 1859 bp, Homo sapiens
tactccagcaccattggccgatcaatatttaatgcttggagattctgactctgcgggagtcatgtcaggggaccttgggagccaatctgcttgagcttctgagtgataattattcatgggctcctgcctcttgctctttctctagcacggtcccactctgcagactcagtgccttattcagtcttctctctcgctctctccgctgctgtagccggaccctttgccttcgccactgctcagcgtctgcacatccctacaatggctaaaacagcaatggcctacaaggaaaaaatgaaggagctgtccatgctgtcactgatctgctcttgcttttacccggaacctcgcaacatcaacatctatacttacgatgaggctttggaggagaacaacaacttcagcaagatggcggaggaaaagctgatcctgaaaatggaacaaattaaggaaaaccgtgaggctaatctagctgctattattgaacgtctgcaggaaaaggagaggcatgctgcggaggtgcgcaggaacaaggaactccaggttgaactgtctggctgaagcaagggagggtctggcacgccccaccaatagtaaatccccctgcctatattataatggatcatgcgatatcaggatggggaatgtatgacatggtttaaaaagaactcattataaaaaaaaaaaaacaaaaaaaatcaaaaattaaaaaaaatcaatgcggtctctttgcagaatgttttgcttgatgtttaaaaaataccttggatcttattttgtaaatacttacatttttgttaaaaaatacaagtattgcattatgcaagttatttcataatcttacatgtcctgtaacaggcttttgatgttgtgtctttccactcaaatgaatttgctaggtctgttctttttgaagctccccatgtctaactccattccaaaagaaaaatgaggtcagtagacagtctatggtgctagaaacccaccattgcctaatgacctagaaggctttgttgtctctgagcttgactaagaccatacctagatcacaggtattatgactccacatgaaccttcacatttgttcgctcataatctacttactgcctaaaaactacaaaaccaggctaagaaataccaccagtcatagcatttacttctgcttctcctggattatgtgctacaaatgtgctttggctttagaaagggatggatgagaagacagacctgagaccaatctgggtagaagcaaaaagttgaaccttttaaagtgctgaacacaaatccaaattcgaatggttcaagcagccgtgaaatcgctcttcataaagtgggcttaattctctagtttaagttcttttgatggaatgaattaattaatgtgtcaggtggcttatttgtggatgccatgattgatgatgttcattttaagctcttacctatagtacaagtacatgatgctactgaatatttttccacttggaaactgtgagctggttgttgcattaaaacacacatacaaacaaaatcaaaaacactgcggactttcactcaagctggtctttcttccccagtgtaaggcaatcctgcctactaacaacaccaacaacaaaacactccatctgtgaagctgacgcagttaagggggctaggcagggcatttgtgccaactaagaatcaccagatacccaccataagtacctatcgcagttttgaagtcgtttctccccaactcccaactcctgaaggttgctgcctgcatatttactcttcattagtgctattttcctgtatgtcattgtgagcaagctgtgattaataaagaattggagttctgtgaactaataaaggtttggtctgtt

SEQ ID NO: 410056 - DNA, 1932 bp, Homo sapiens
tactccagcaccattggccgatcaatatttaatgcttggagattctgactctgcgggagtcatgtcaggggaccttgggagccaatctgcttgagcttctgagtgataattattcatgggctcctgcctcttgctctttctctagcacggtcccactctgcagactcagtgccttattcagtcttctctctcgctctctccgctgctgtagccggaccctttgccttcgccactgctcagcgtctgcacatccctacaatggctaaaacagcaatggcctacaaggaaaaaatgaaggagctgtccatgctgtcactgatctgctcttgcttttacccggaacctcgcaacatcaacatctatacttacgatgatatggaagtgaagcaaatcaacaaacgtgcctctggccaggcttttgagctgatcttgaagccaccatctccaggctttggaggagaacaacaacttcagcaagatggcggaggaaaagctgatcctgaaaatggaacaaattaaggaaaaccgtgaggctaatctagctgctattattgaacgtctgcaggaaaaggagaggcatgctgcggaggtgcgcaggaacaaggaactccaggttgaactgtctggctgaagcaagggagggtctggcacgccccaccaatagtaaatccccctgcctatattataatggatcatgcgatatcaggatggggaatgtatgacatggtttaaaaagaactcattataaaaaaaaaaaaacaaaaaaaatcaaaaattaaaaaaaatcaatgcggtctctttgcagaatgttttgcttgatgtttaaaaaataccttggatcttattttgtaaatacttacatttttgttaaaaaatacaagtattgcattatgcaagttatttcataatcttacatgtcctgtaacaggcttttgatgttgtgtctttccactcaaatgaatttgctaggtctgttctttttgaagctccccatgtctaactccattccaaaagaaaaatgaggtcagtagacagtctatggtgctagaaacccaccattgcctaatgacctagaaggctttgttgtctctgagcttgactaagaccatacctagatcacaggtattatgactccacatgaaccttcacatttgttcgctcataatctacttactgcctaaaaactacaaaaccaggctaagaaataccaccagtcatagcatttacttctgcttctcctggattatgtgctacaaatgtgctttggctttagaaagggatggatgagaagacagacctgagaccaatctgggtagaagcaaaaagttgaaccttttaaagtgctgaacacaaatccaaattcgaatggttcaagcagccgtgaaatcgctcttcataaagtgggcttaattctctagtttaagttcttttgatggaatgaattaattaatgtgtcaggtggcttatttgtggatgccatgattgatgatgttcattttaagctcttacctatagtacaagtacatgatgctactgaatatttttccacttggaaactgtgagctggttgttgcattaaaacacacatacaaacaaaatcaaaaacactgcggactttcactcaagctggtctttcttccccagtgtaaggcaatcctgcctactaacaacaccaacaacaaaacactccatctgtgaagctgacgcagttaagggggctaggcagggcatttgtgccaactaagaatcaccagatacccaccataagtacctatcgcagttttgaagtcgtttctccccaactcccaactcctgaaggttgctgcctgcatatttactcttcattagtgctattttcctgtatgtcattgtgagcaagctgtgattaataaagaattggagttctgtgaactaataaaggtttggtctgtt

SEQ ID NO: 410057 - DNA, 1953 bp, Homo sapiens
  misc_feature (19)..(20): n is a, c, g, or t
  misc_feature (140)..(140): n is a, c, g, or t
  misc_feature (147)..(147): n is a, c, g, or t
  misc_feature (152)..(152): n is a, c, g, or t
  misc_feature (154)..(154): n is a, c, g, or t
  misc_feature (179)..(179): n is a, c, g, or t
  misc_feature (182)..(182): n is a, c, g, or t
  misc_feature (233)..(233): n is a, c, g, or t
  misc_feature (258)..(258): n is a, c, g, or t
  misc_feature (264)..(264): n is a, c, g, or t
  misc_feature (281)..(281): n is a, c, g, or t
  misc_feature (300)..(300): n is a, c, g, or t
  misc_feature (327)..(327): n is a, c, g, or t
  misc_feature (360)..(360): n is a, c, g, or t
  misc_feature (377)..(378): n is a, c, g, or t
  misc_feature (384)..(384): n is a, c, g, or t
  misc_feature (401)..(401): n is a, c, g, or t
  misc_feature (408)..(408): n is a, c, g, or t
  misc_feature (414)..(414): n is a, c, g, or t
  misc_feature (422)..(422): n is a, c, g, or t
  misc_feature (430)..(431): n is a, c, g, or t
  misc_feature (450)..(450): n is a, c, g, or t
  misc_feature (459)..(459): n is a, c, g, or t
  misc_feature (462)..(462): n is a, c, g, or t
  misc_feature (464)..(464): n is a, c, g, or t
gctcaaggatccttaattnnttaatcccccccccctcttctctctcgctctctccgctgctgtagccggaccctttgccttcgccactgctcagcgtctgcacatccctacaatggctaaaacagcaatggaaaaaaagnaaaaaanaaagnanaagtaaatgaagaaaataaaaaganaangaataaaaaagaaaaatagaaaaaaaaaaaaaaaaaaaaaaaaaaaaaagnaaataaaaaaaaataaaaaaaagtnaataangaaaggattaaaaaaanaaaaaaaagaaaaaaaatnaaaaaaaaaaagaaaaaaaaaataaanaatataaaaaaaaaaaaaaaaagaaaatgaagnaaaaaaaaaaaaaaaannaggatnaaaaaaaaaaaaaaaanaaaaaanaggacnaggagaanaaaaaatnngaaaaaaagagggaaaaanaaaaaaaanaantnaaaaggctttggaggagaacaacaacttcagcaagatggcggaggaaaagctgatcctgaaaatggaacaaattaaggaaaaccgtgaggctaatctagctgctattattgaacgtctgcaggaaaaggagaggcatgctgcggaggtgcgcaggaacaaggaactccaggttgaactgtctggctgaagcaagggagggtctggcacgccccaccaatagtaaatccccctgcctatattataatggatcatgcgatatcaggatggggaatgtatgacatggtttaaaaagaactcattataaaaaaaaaaaaacaaaaaaaatcaaaaattaaaaaaaatcaatgcggtctctttgcagaatgttttgcttgatgtttaaaaaataccttggatcttattttgtaaatacttacatttttgttaaaaaatacaagtattgcattatgcaagttatttcataatcttacatgtcctgtaacaggcttttgatgttgtgtctttccactcaaatgaatttgctaggtctgttctttttgaagctccccatgtctaactccattccaaaagaaaaatgaggtcagtagacagtctatggtgctagaaacccaccattgcctaatgacctagaaggctttgttgtctctgagcttgactaagaccatacctagatcacaggtattatgactccacatgaaccttcacatttgttcgctcataatctacttactgcctaaaaactacaaaaccaggctaagaaataccaccagtcatagcatttacttctgcttctcctggattatgtgctacaaatgtgctttggctttagaaagggatggatgagaagacagacctgagaccaatctgggtagaagcaaaaagttgaaccttttaaagtgctgaacacaaatccaaattcgaatggttcaagcagccgtgaaatcgctcttcataaagtgggcttaattctctagtttaagttcttttgatggaatgaattaattaatgtgtcaggtggcttatttgtggatgccatgattgatgatgttcattttaagctcttacctatagtacaagtacatgatgctactgaatatttttccacttggaaactgtgagctggttgttgcattaaaacacacatacaaacaaaatcaaaaacactgcggactttcactcaagctggtctttcttccccagtgtaaggcaatcctgcctactaacaacaccaacaacaaaacactccatctgtgaagctgacgcagttaagggggctaggcagggcatttgtgccaactaagaatcaccagatacccaccataagtacctatcgcagttttgaagtcgtttctccccaactcccaactcctgaaggttgctgcctgcatatttactcttcattagtgctattttcctgtatgtcattgtgagcaagctgtgattaataaagaattggagttctgtgaactaataaaggtttggtctgtt

SEQ ID NO: 410058 - DNA, 1145 bp, Homo sapiens
  misc_feature (974)..(974): n is a, c, g, or t
tactccagcaccattggccgatcaatatttaatgcttggagattctgactctgcgggagtcatgtcaggggaccttgggagccaatctgcttgagcttctgagtgataattattcatgggctcctgcctcttgctctttctctagcacggtcccactctgcagactcagtgccttattcagtcttctctctcgctctctccgctgctgtagccggaccctttgccttcgccactgctcagcgtctgcacatccctacaatggctaaaacagcaatggcctacaaggaaaaaatgaaggagctgtccatgctgtcactgatctgctcttgcttttacccggaacctcgcaacatcaacatctatacttacgatgatatggaagtgaagcaaatcaacaaacgtgcctctggccaggcttttgagctgatcttgaagccaccatctcctatctcagaagccccacgaactttagcttctccaaagaagaaagacctgtccctggaggagatccagaagaaactggaggctgcagaggaaagaagaaagtctcaggaggcccaggtgctgaaacaattggcagagaagagggaacacgagcgagaagtccttcagaaggctttggaggagaacaacaacttcagcaagatggcggaggaaaagctgatcctgaaaatggaacaaattaaggaaaaccgtgaggctaatctagctgctattattgaacgtctgcaggaaaaggagaggcatgctgcggaggtgcgcaggaacaaggaactccaggttgaactgtctggctgaagcaagggagggtctggcacgccccaccaatagtaaatccccctgcctatattataatggatcatgcgatatcaggatggggaatgtatgacatggtttaaaaagaactggtgtccccacatagcctttcctctgtgtgttctcagagagagagcacgtaagcccagaagtgagtnagctcttgtctttttctcttcttataaggacaccagctctatcaaattaggggcccgctgttatagcctcatttaaccttaattacttctttaaagaccctatctgtaaaatggagtcacattgtggggtcagggcctcagcatatgaaattttcaagggggcaaatttca

SEQ ID NO: 410059 - DNA, 1242 bp, Homo sapiens
ttaattaattataattaattaattaattaattaattaattataattaattaattaattaattaattaattataattaattaattaattaattaattaattataattaattaattaattaattaattaattataattaattaattaattaattaattaattataattaattaattaattaattaattaattataattaattaattaattaattaattaattataattaattaattaattaattaattaattataattaattaattaattaattaattaattataattaattaattaattaattaattaattataattaattaattaattaattaattaattataattaattaattaattaattaattaattataattaattaattaattaattaattaattataattaattaattaattaattaattaattataattaattaattaattaattaattaattataattaattaattaattaattaattaattataattaattaattaattaattaattaattataattaattaattaattaattaattaattataattaattaattaattaattaattaattataattaattaattaattaattaattaattataattaattaattaattaattaattaattataattaattaattaattaattaattaattataattaattaattaattaattaattaattataattaattaattaattaattctctagtttaagttcttttgatggaatgaattaattaatgtgtcaggtggcttatttgtggatgccatgattgatgatgttcattttaagctcttacctatagtacaagtacatgatgctactgaatatttttccacttggaaactgtgagctggttgttgcattaaaacacacatacaaacaaaatcaaaaacactgcggactttcactcaagctggtctttcttccccagtgtaaggcaatcctgcctactaacaacaccaacaacaaaacactccatctgtgaagctgacgcagttaagggggctaggcagggcatttgtgccaactaagaatcaccagatacccaccataagtacctatcgcagttttgaagtcgtttctccccaactcccaactcctgaaggttgctgcctgcatatttactcttcattagtgctattttcctgtatgtcattgtgagcaagctgtgattaataaagaattggagttctgtgaactaataaaggtttggtctgtt

SEQ ID NO: 410060 - DNA, 816 bp, Homo sapiens
tactccagcaccattggccgatcaatatttaatgcttggagattctgactctgcgggagtcatgtcaggggaccttgggagccaatctgcttgagcttctgagtgataattattcatgggctcctgcctcttgctctttctctagcacggtcccactctgcagactcagtgccttattcagtcttctctctcgctctctccgctgctgtagccggaccctttgccttcgccactgctcagcgtctgcacatccctacaatggctaaaacagcaatggcctacaaggaaaaaatgaaggagctgtccatgctgtcactgatctgctcttgcttttacccggaacctcgcaacatcaacatctatacttacgatgatatggaagtgaagcaaatcaacaaacgtgcctctggccaggcttttgagctgatcttgaagccaccatctcctatctcagaagccccacgaactttagcttctccaaatcaaaaacactgcggactttcactcaagctggtctttcttccccagtgtaaggcaatcctgcctactaacaacaccaacaacaaaacactccatctgtgaagctgacgcagttaagggggctaggcagggcatttgtgccaactaagaatcaccagatacccaccataagtacctatcgcagttttgaagtcgtttctccccaactcccaactcctgaaggttgctgcctgcatatttactcttcattagtgctattttcctgtatgtcattgtgagcaagctgtgattaataaagaattggagttctgtgaactaataaaggtttggtctgtt

SEQ ID NO: 410061 - DNA, 1953 bp, Homo sapiens
  misc_feature (19)..(20): n is a, c, g, or t
gctcaaggatccttaattnnttaatcccccccccctcttctctctcgctctctccgctgctgtagccggaccctttgccttcgccactgctcagcgtctgcacatccctacaatggctaaaacagcaatggcctacaaggaaaaaatgaaggagctgtccatgctgtcactgatctgctcttgcttttacccggaacctcgcaacatcaacatctatacttacgatgatatggaagtgaagcaaatcaacaaacgtgcctctggccaggcttttgagctgatcttgaagccaccatctcctatctcagaagccccacgaactttagcttctccaaagaagaaagacctgtccctggaggagatccagaagaaactggaggctgcagaggaaagaagaaagtctcaggaggcccaggtgctgaaacaattggcagagaagagggaacacgagcgagaagtccttcagaaggctttggaggagaacaacaacttcagcaagatggcggaggaaaagctgatcctgaaaatggaacaaattaaggaaaaccgtgaggctaatctagctgctattattgaacgtctgcaggaaaaggagaggcatgctgcggaggtgcgcaggaacaaggaactccaggttgaactgtctggctgaagcaagggagggtctggcacgccccaccaatagtaaatccccctgcctatattataatggatcatgcgatatcaggatggggaatgtatgacatggtttaaaaagaactcattataaaaaaaaaaaaacaaaaaaaatcaaaaattaaaaaaaatcaatgcggtctctttgcagaatgttttgcttgatgtttaaaaaataccttggatcttattttgtaaatacttacatttttgttaaaaaatacaagtattgcattatgcaagttatttcataatcttacatgtcctgtaacaggcttttgatgttgtgtctttccactcaaatgaatttgctaggtctgttctttttgaagctccccatgtctaactccattccaaaagaaaaatgaggtcagtagacagtctatggtgctagaaacccaccattgcctaatgacctagaaggctttgttgtctctgagcttgactaagaccatacctagatcacaggtattatgactccacatgaaccttcacatttgttcgctcataatctacttactgcctaaaaactacaaaaccaggctaagaaataccaccagtcatagcatttacttctgcttctcctggattatgtgctacaaatgtgctttggctttagaaagggatggatgagaagacagacctgagaccaatctgggtagaagcaaaaagttgaaccttttaaagtgctgaacacaaatccaaattcgaatggttcaagcagccgtgaaatcgctcttcataaagtgggcttaattctctagtttaagttcttttgatggaatgaattaattaatgtgtcaggtggcttatttgtggatgccatgattgatgatgttcattttaagctcttacctatagtacaagtacatgatgctactgaatatttttccacttggaaactgtgagctggttgttgcattaaaacacacatacaaacaaaatcaaaaacactgcggactttcactcaagctggtctttcttccccagtgtaaggcaatcctgcctactaacaacaccaacaacaaaacactccatctgtgaagctgacgcagttaagggggctaggcagggcatttgtgccaactaagaatcaccagatacccaccataagtacctatcgcagttttgaagtcgtttctccccaactcccaactcctgaaggttgctgcctgcatatttactcttcattagtgctattttcctgtatgtcattgtgagcaagctgtgattaataaagaattggagttctgtgaactaataaaggtttggtctgtt

SEQ ID NO: 410062 - DNA, 2044 bp, Homo sapiens
tactccagcaccattggccgatcaatatttaatgcttggagattctgactctgcgggagtcatgtcaggggaccttgggagccaatctgcttgagcttctgagtgataattattcatgggctcctgcctcttgctctttctctagcacggtcccactctgcagactcagtgccttattcagtcttctctctcgctctctccgctgctgtagccggaccctttgccttcgccactgctcagcgtctgcacatccctacaatggctaaaacagcaatggcctacaaggaaaaaatgaaggagctgtccatgctgtcactgatctgctcttgcttttacccggaacctcgcaacatcaacatctatacttacgatgatatggaagtgaagcaaatcaacaaacgtgcctctggccaggcttttgagctgatcttgaagccaccatctcctatctcagaagccccacgaactttagcttctccaaagaagaaagacctgtccctggaggagatccagaagaaactggaggctgcagaggaaagaagaaagtctcaggaggcccaggtgctgaaacaattggcagagaagagggaacacgagcgagaagtccttcagaaggctttggaggagaacaacaacttcagcaagatggcggaggaaaagctgatcctgaaaatggaacaaattaaggaaaaccgtgaggctaatctagctgctattattgaacgtctgcaggaaaaggagaggcatgctgcggaggtgcgcaggaacaaggaactccaggttgaactgtctggctgaagcaagggagggtctggcacgccccaccaatagtaaatccccctgcctatattataatggatcatgcgatatcaggatggggaatgtatgacatggtttaaaaagaactcattataaaaaaaaaaaaacaaaaaaaatcaaaaattaaaaaaaatcaatgcggtctctttgcagaatgttttgcttgatgtttaaaaaataccttggatcttattttgtaaatacttacatttttgttaaaaaatacaagtattgcattatgcaagttatttcataatcttacatgtcctgtaacaggcttttgatgttgtgtctttccactcaaatgaatttgctaggtctgttctttttgaagctccccatgtctaactccattccaaaagaaaaatgaggtcagtagacagtctatggtgctagaaacccaccattgcctaatgacctagaaggctttgttgtctctgagcttgactaagaccatacctagatcacaggtattatgactccacatgaaccttcacatttgttcgctcataatctacttactgcctaaaaactacaaaaccaggctaagaaataccaccagtcatagcatttacttctgcttctcctggattatgtgctacaaatgtgctttggctttagaaagggatggatgagaagacagacctgagaccaatctgggtagaagcaaaaagttgaaccttttaaagtgctgaacacaaatccaaattcgaatggttcaagcagccgtgaaatcgctcttcataaagtgggcttaattctctagtttaagttcttttgatggaatgaattaattaatgtgtcaggtggcttatttgtggatgccatgattgatgatgttcattttaagctcttacctatagtacaagtacatgatgctactgaatatttttccacttggaaactgtgagctggttgttgcattaaaacacacatacaaacagcaatcctgcctactaacaacaccaacaacaaaacactccatctgtgaagctgacgcagttaagggggctaggcagggcatttgtgccaactaagaatcaccagatacccaccataagtacctatcgcagttttgaagtcgtttctccccaactcccaactcctgaaggttgctgcctgcatatttactcttcattagtgctattttcctgtatgtcattgtgagcaagctgtgattaataaagaattggagttctgtgaactaataaaggtttggtctgtt

SEQ ID NO: 410063 - DNA, 1296 bp, Homo sapiens
tactccagcaccattggccgatcaatatttaatgcttggagattctgactctgcgggagtcatgtcaggggaccttgggagccaatctgcttgagcttctgagtgataattattcatgggctcctgcctcttgctctttctctagcacggtcccactctgcagactcagtgccttattcagtcttctctctcgctctctccgctgctgtagccggaccctttgccttcgccactgctcagcgtctgcacatccctacaatggctaaaacagcaatggcctacaaggaaaaaatgaaggagctgtccatgctgtcactgatctgctcttgcttttacccggaacctcgcaacatcaacatctatacttacgatgatatggaagtgaagcaaatcaacaaacgtgcctctggccaggcttttgagctgatcttgaagccaccatctcctatctcagaagccccacgaactttagcttctccaaagaagaaagacctgtccctggaggagatccagaagaaactggaggctgcagaggaaagaagaaagtctcaggaggcccaggtgctgaaacaattggcagagaagagggaacacgagcgagaagtccttcagaaggctttggaggagaacaacaacttcagcaagatggcggaggaaaagctgatcctgaaaatggaacaaattaaggaaaaccgtgaggctaatctagctgctattattgaacgtctgcaggaaaaggagaggcatgctgcggaggtgcgcaggaacaaggaactccaggttgaactgtctggctgaagcaagggagggtctggcacgccccaccaatagtaaatccccctgcctatattataatggatcatgcgatatcaggatggggaatgtatgacatggtttaaaaagaactcattataaaaaaaaaaaaacaaaaaaaatcaaaaattaaaaaaaatcaatgcggtctctttgcagaatgttttgcttgatgtttaaaaaataccttggatcttattttgtaaatacttacatttttgttaaaaaatacaagtattgcattatgcaagttatttcataatcttacatgtcctgtaacaggcttttgatgttgtgtctttccactcaaatgaatttgctaggtctgttctttttgaatcgtttctccccaactcccaactcctgaaggttgctgcctgcatatttactcttcattagtgctattttcctgtatgtcattgtgagcaagctgtgattaataaagaattggagttctgtgaactaataaaggtttggtctgtt

SEQ ID NO: 410064 - DNA, 2050 bp, Homo sapiens
tactccagcaccattggccgatcaatatttaatgcttggagattctgactctgcgggagtcatgtcaggggaccttgggagccaatctgcttgagcttctgagtgataattattcatgggctcctgcctcttgctctttctctagcacggtcccactctgcagactcagtgccttattcagtcttctctctcgctctctccgctgctgtagccggaccctttgccttcgccactgctcagcgtctgcacatccctacaatggctaaaacagcaatggcctacaaggaaaaaatgaaggagctgtccatgctgtcactgatctgctcttgcttttacccggaacctcgcaacatcaacatctatacttacgatgatatggaagtgaagcaaatcaacaaacgtgcctctggccaggcttttgagctgatcttgaagccaccatctcctatctcagaagccccacgaactttagcttctccaaagaagaaagacctgtccctggaggagatccagaagaaactggaggctgcagaggaaagaagaaagtctcaggaggcccaggtgctgaaacaattggcagagaagagggaacacgagcgagaagtccttcagaaggctttggaggagaacaacaacttcagcaagatggcggaggaaaagctgatcctgaaaatggaacaaattaaggaaaaccgtgaggctaatctagctgctattattgaacgtctgcaggaaaagtgtctggctgaagcaagggagggtctggcacgccccaccaatagtaaatccccctgcctatattataatggatcatgcgatatcaggatggggaatgtatgacatggtttaaaaagaactcattataaaaaaaaaaaaacaaaaaaaatcaaaaattaaaaaaaatcaatgcggtctctttgcagaatgttttgcttgatgtttaaaaaataccttggatcttattttgtaaatacttacatttttgttaaaaaatacaagtattgcattatgcaagttatttcataatcttacatgtcctgtaacaggcttttgatgttgtgtctttccactcaaatgaatttgctaggtctgttctttttgaagctccccatgtctaactccattccaaaagaaaaatgaggtcagtagacagtctatggtgctagaaacccaccattgcctaatgacctagaaggctttgttgtctctgagcttgactaagaccatacctagatcacaggtattatgactccacatgaaccttcacatttgttcgctcataatctacttactgcctaaaaactacaaaaccaggctaagaaataccaccagtcatagcatttacttctgcttctcctggattatgtgctacaaatgtgctttggctttagaaagggatggatgagaagacagacctgagaccaatctgggtagaagcaaaaagttgaaccttttaaagtgctgaacacaaatccaaattcgaatggttcaagcagccgtgaaatcgctcttcataaagtgggcttaattctctagtttaagttcttttgatggaatgaattaattaatgtgtcaggtggcttatttgtggatgccatgattgatgatgttcattttaagctcttacctatagtacaagtacatgatgctactgaatatttttccacttggaaactgtgagctggttgttgcattaaaacacacatacaaacaaaatcaaaaacactgcggactttcactcaagctggtctttcttccccagtgtaaggcaatcctgcctactaacaacaccaacaacaaaacactccatctgtgaagctgacgcagttaagggggctaggcagggcatttgtgccaactaagaatcaccagatacccaccataagtacctatcgcagttttgaagtcgtttctccccaactcccaactcctgaaggttgctgcctgcatatttactcttcattagtgctattttcctgtatgtcattgtgagcaagctgtgattaataaagaattggagttctgtgaactaataaaggtttggtctgtt

SEQ ID NO: 410065 - DNA, 815 bp, Homo sapiens
ggtcccgcccctctccccaagcgcgggcccggccagcggaagcccctgcgcccgcgccatgtcaaagaaaaaaggactgagtgcagaagaaaagagaactcgcatgatggaaatattttctgaaacaaaagatgtatttcaattaaaagacttggagaagattgctcccaaagagaaaggcattactgctatgtcagtaaaagaagtccttcaaagcttagttgatgatggtatggttgactgtgagaggatcggaacttctaattattattgggcttttccaagtaaagctcttcatgcaaggaaacataagttggaggttctggaatctcagttgtctgagggaagtcaaaagcatgcaagcctacagaaaagcattgagaaagctaaaattggccgatgtgaaacggaagagcgaaccaggctagcaaaagagctttcttcacttcgagaccaaagggaacagctaaaggcagaagtagaaaaatacaaagactgtgatccgcaagttgtggaagaaatacgccaagcaaataaagtagccaaagaagctgctaacagatggactgataacatattcgcaataaaatcttgggccaaaagaaaatttgggtttgaagaaaataaaattgatagaacttttggaattccagaagactttgactacatagactaaaatattccatggtggtgaaggatgtacaagcttgtgaatatgtaaattttaaactattatctaactaagtgtactgaattgtcgtttgcctgtaactgtgtttatcattttattaatgttaaataaagtgtaaaatgca

SEQ ID NO: 410066 - DNA, 467 bp, Homo sapiens
tacaatattatgtcactatttcagcttttttcatagccattttatacataaattttataaaaattttgttcatatgaaaaaatacaaatgtatacatagctaaagatcattttgtgtgtatatatatatatatatatataaatacatttcattttatatatataattttttttcaggccaagcaaataaagtagccaaagaagctgctaacagatggactgataacatattcgcaataaaatcttgggccaaaagaaaatttgggtttgaagaaaataaaattgatagaacttttggaattccagaagactttgactacatagactaaaatattccatggtggtgaaggatgtacaagcttgtgaatatgtaaattttaaactattatctaactaagtgtactgaattgtcgtttgcctgtaactgtgtttatcattttattaatgttaaataaagtgtaaaatgca

SEQ ID NO: 410067 - DNA, 421 bp, Homo sapiens
gaaattccccgggttcgacctactacatactactaaattcgcggccgcgtcgacagataacatattcgcaataaaatcttgggccaaaagaaaatttgggtttgaagaaaataaaattgatagaacttttggaattccagaagactttgactacatagactaaaatattccatggtggtgaaggatgtacaagcttgtgaatatgtaaattttaaactattatctaactaagtgtactgaattgtcgtttgcctgtaactgtgtttatcattttattaatgttaaataaagtgtaaaatgcagatgttcttcaccccttttggtagaacaaaagcaggatgataaccatatccccccagtgctcatcaaagtaggacaataaaaatccatccatctcagtcaaagtcgagcatttacaaat

SEQ ID NO: 410068 - DNA, 934 bp, Homo sapiens
ggtcccgcccctctccccaagcgcgggcccggccagcggaagcccctgcgcccgcgccatgtcaaagaaaaaaggactgagtgcagaagaaaagagaactcgcatgatggaaatattttctgaaacaaaagatgtatttcaattaaaagacttggagaagattgctcccaaagagaaaggcattactgctatgtcagtaaaagaagtccttcaaagcttagttgatgatggtatggttgactgtgagaggatcggaacttctaattattattgggcttttccaagtaaagctcttcatgcaaggaaacataagttggaggttctggaatctcagttgtctgagggaagtcaaaagcatgcaagcctacagaaaagcattgagaaagctaaaattggccgatgtgaaacggaagagcgaaccaggctagcaaaagagctttcttcacttcgagaccaaagggaacagctaaaggcagaagtagaaaaatacaaagactgtgatccgcaagttgtggaagaaatacgccaagcaaataaagtagccaaagaagctgctaacagatggactgataacatattcgcaataaaatcttgggccaaaagaaaatttgggtttgaagaaaataaaattgatagaacttttggaattccagaagactttgactacatagactaaaatattccatggtggtgaaggatgtacaagcttgtgaatatgtaaattttaaactattatctaactaagtgtactgaattgtcgtttgcctgtaactgtgtttatcattttattaatgttaaataaagtgtaaaatgcagatgttcttcaccccttttggtagaacaaaagcaggatgataaccatatccccccagtgctcatcaaagtaggacaataaaaatccatccatctcagtcaaagtcgagcatttacaaat

SEQ ID NO: 410069 - DNA, 1095 bp, Homo sapiens
ggtcccgcccctctccccaagcgcgggcccggccagcggaagcccctgcgcccgcgccatgtcaaagaaaaaaggactgagtgcagaagaaaagagaactcgcatgatggaaatattttctgaaacaaaagatgtatttcaattaaaagacttggagaagattgctcccaaagagaaaggcattactgctatgtcagtaaaagaagtccttcaaagcttagttgatgatggtatggttgactgtgagaggatcggaacttctaattattattgggcttttccaagtaaagctcttcatgcaaggaaacataagttggaggttctggaatctcaggaccctggctgctgcttccatgaaataattaaagtctcctattatagaaaattctggctgggcgcagtggctcacgcctgtaatcccagcactttgggaggctgaggcgggcagatcacgaggtgactttcccccacccccacatgaagtgcaagatggagttgtctgagggaagtcaaaagcatgcaagcctacagaaaagcattgagaaagctaaaattggccgatgtgaaacggaagagcgaaccaggctagcaaaagagctttcttcacttcgagaccaaagggaacagctaaaggcagaagtagaaaaatacaaagactgtgatccgcaagttgtggaagaaatacgccaagcaaataaagtagccaaagaagctgctaacagatggactgataacatattcgcaataaaatcttgggccaaaagaaaatttgggtttgaagaaaataaaattgatagaacttttggaattccagaagactttgactacatagactaaaatattccatggtggtgaaggatgtacaagcttgtgaatatgtaaattttaaactattatctaactaagtgtactgaattgtcgtttgcctgtaactgtgtttatcattttattaatgttaaataaagtgtaaaatgcagatgttcttcaccccttttggtagaacaaaagcaggatgataaccatatccccccagtgctcatcaaagtaggacaataaaaatccatccatctcagtcaaagtcgagcatttacaaat

SEQ ID NO: 410070 - DNA, 819 bp, Homo sapiens
ggtcccgcccctctccccaagcgcgggcccggccagcggaagcccctgcgcccgcgccatgtcaaagaaaaaaggactgagtgcagaagaaaagagaactcgcatgatggaaatattttctgaaacaaaagatgtatttcaattaaaagacttggagaagattgctcccaaagagaaaggcattactgctatgtcagtaaaagaagtccttcaaagcttagttgatgatggtatggttgactgtgagaggatcggaacttctaattattattgggcttttccaagtaaagctcttcatgcaaggaaacataagttggaggttctggaatctcagttgtctgagggaagtcaaaagcatgcaagcctacagaaaagcattgagaaagctaaaattggccgatgtgaaacggccaagcaaataaagtagccaaagaagctgctaacagatggactgataacatattcgcaataaaatcttgggccaaaagaaaatttgggtttgaagaaaataaaattgatagaacttttggaattccagaagactttgactacatagactaaaatattccatggtggtgaaggatgtacaagcttgtgaatatgtaaattttaaactattatctaactaagtgtactgaattgtcgtttgcctgtaactgtgtttatcattttattaatgttaaataaagtgtaaaatgcagatgttcttcaccccttttggtagaacaaaagcaggatgataaccatatccccccagtgctcatcaaagtaggacaataaaaatccatccatctcagtcaaagtcgagcatttacaaat

SEQ ID NO: 410071 - DNA, 934 bp, Homo sapiens
ggtcccgcccctctccccaagcgcgggcccggccagcggaagcccctgcgcccgcgccatgtcaaagaaaaaaggactgagtgcagaagaaaagagaactcgcatgatggaaatattttctgaaacaaaagatgtatttcaattaaaagacttggagaagattgctcccaaagagaaaggcattactgctatgtcagtaaaagaagtccttcaaagcttagttgatgatggtatggttgactgtgagaggatcggaacttctaattattattgggcttttccaagtaaagctcttcatgcaaggaaacataagttggaggttctggaatctcaggcttggtgttcacgcctgttatcccaggactttgggagactgtggcaggaggatcgcatgagaccaggagtctgagaccagcctgggcaacatagtgagaactcgtctctacaaaaaaaaaaaaaaatttaattagccgggtatgatggtgcatacctgtagtcctagctactcgggaggctggagcaggaggatcacttgagcccaggagttttgaggctacaatgagctatgattgcactagtgcattccagcctgagcaacagtgggagactgtggatcatgaggtcaggagtttgagaccaacctgaccaacatcgtgaaaccctatctctactaaaaatacaaaaattagtcaggcgtggtggcatacccctgtaatcccagctactcaggaggctgaggcaggagaaccacttgaacccgggaggtggaggttgcagtgagctgagatcacaccactgcactccagcttgggcgacagagcaagactccatctcaacaacaacaacaacaaaaaagaaatcaaagtagacctaactatatatgcagatgtggaaatttctctgaaaatagcaaggcataagacactaagtaaag

SEQ ID NO: 410072 - DNA, 867 bp, Homo sapiens
gttccctttgggaataggagcaactttaattcctgaggcaacagtcctggcctctgctgtggaaatgtagaagagacaccattaacctgtccctgtttttctattattcttaagtctggtatttagcagcaagcagcttacagaatttttaaatatgagatctattaacttgttcaaaatagtatttaaatactttttttttttttgatacggagtgtcactcctgttgcccaggctggagtgcaatggtgtgatctcggctcaccacaacctccgcctcccaggttcaaacgattctcctgcctcagcctcccgagtagctgggattacaggtgcccgccaccaaccatgcctggctaatttttgtatttttagtagagatgggtttcaccatattggccaggctggtctcaaactcctgacctcatgatcaccctgcctcggcctcccaaagtgctggaattacaggcatgagccaccgcacctggccttaagtactttttaattagttgccattactcttaaaaatacagaaaactccttattttgatatatctgaaagttaatagaaggaagtaaaagaacaatgaagataattatacttgaaatgttttatgattgtgtttttctcaaaattatttctcaattttctttatagataacataataacatattcgcaataaaatcttgggccaaaagaaaatttgggtttgaagaaaataaaattgatagaacttttggaattccagaagactttgactacatagactaaaatattccatggtggtgaaggatgtacaagcttgtgaatatgtaaattttaaactattatctaactaagtgtactgaattgtcgtttgcctgta

SEQ ID NO: 410073 - DNA, 375 bp, Homo sapiens
ttaaagctgtgaaagacaggcactctgccatgcaattctttgtgatttttcttttttctttttggagttggggtcttgcactgtcacccagactggggtgcagtggtgtggtcatagctcactgcggcctcaaactcaagctcaagcgatcctcttaccttgcctttcaaattgctgggattataagcatgagccactgcatctggcctatgtgacacaattctgttttttgtcttttttttttgggggggggggatggaaaactcatactactacaaagcaggataggagggggcgaaatcaaggaataaagaaaaatagactggttagggggaaactaattatgattggcagaatcgttcaaatagatgggga

SEQ ID NO: 410074 - DNA, 357 bp, Homo sapiens
ttaaagctgtgaaagacaggcactctgccatgcaattctttgtgatttttcttttttctttttggagttggggtcttgcactgtcacccagactggggtgcagtggtgtggtcatagctcactgcggcctcaaactcaagctcaagcgatcctcttaccttgcctttcaaattgctgggattataagcatgagccactgcatctggcctatgtgacacaattctgttttttgtcttttttttagagacggggtttcactgtgttagccaggatggtctcgatctcctgacctcgtgatctgcccgccttggcctcccaaagtgctaggattacaggcgtgagccaccgcgcccagcc

SEQ ID NO: 410075 - DNA, 802 bp, Homo sapiens
tatggaaggaaatgacttcgtctacttctaggttaaaaacagttaaaaaaaaatcagacctttactgataaactataaaagactttttgaaggatgctgaaaaaaatgatgttttcaggtacctgagttgaacaaattacattggcatatactactgacttgttctgtttcagacccatcccatcaaggggctacctgcacacagatctaggtatcttacttaaggtatcataattattgttgcagaaaagctacagccatcttatgaactgtggatgcagttgaaagctagaattctgacttatcatcctcttattagttttgtagatttttgtttggaaattgaaccactgtgattttgcatagaatgtgtttagataccatcactcttgattgaaagctcatactgtcgcttgtgtagagtaggggaaatataaaaacaaaagccaagaattaatatctcaggaatgaatataagaactagctactttaattaggttttaaaaaatgttaatatatttgtgagttctaatccatattagagcatcattaatcctttctgcattcatattgtgtattaagataggtggttgggactttgccaaacttctcgaaattattatactagccaacatatttgttggagaaatgaatcctactgtatatattaaagattcttggctgagcatggtggctcatgtctgtcatctcagcaatttgggaggcaagggcaggaggatagtttgagcccatgagtttgagaccagcctggacaacatagtgagaccccatctcagcaaaa

SEQ ID NO: 410076 - DNA, 512 bp, Homo sapiens
tgagacagcatctcgctctgttcaagttggccttgaactcctggcctcaagtgatcctcccaccttggcctcccaaagtgttggaattacaggtgtgaaccattgcaatggccttattactactttatatttgtggagtgctttaaagttgacaaagtttttagttaatcctcacactattaccttgtggcgttgaagaacagatttcaggagcgtgaaagtgaagacaccaaaaaggaagttcttgcaatatttcaacaaagagatgaagatttggattagattccagttctacctttttggcaccagggagctgttctgtgaaagacaattttccacagggctcggggggtgggcatgaggcagaggatggtttcggaatgaaactgttgcacctcaagatcatcaattagatttccataaggagtgtgcaatctagattcctcacaggtgcagttcaaaataggttttgagttcctgtgagaatctaatgctctccttgatctgacagg

SEQ ID NO: 410077 - DNA, 1113 bp, Homo sapiens
taatgcattattgttcctaattttctttattactatatgctactctccagctattttaatattgaataattgttattttcacaaaagctggatataggaggtaaagggcattagttaacaaaatttggtaaaacattggtagttgaatagtacagacattcatacactatattttccatcttttcaaagataataattgattttattttcagatatatatcgtcaaaataaacagtatagaagatccctccctccagtcacctgtgttcatgccgatctaatattttaatttatccagtaacttttatgcaaatttttaaactcgagatgttgagaactttttctatagtaatgtctggattgcttctgtcaggtggttgaagattacgttggaagatggcaggtccctttgccacagcttcaggttcttcagactgccctttgttgttttacaacagccagtgcatcattcccagatgaatgtgagcatgtacaatatgttttgagtagcctgctgtggagtttcttcgagttgctgctgttctttggaagaggtgagttttatgaagagcccttaaaggatattcttggatcattccaggaatgccagaatcacctccgcagatatggaaatgtgaatctggaactggtgactcgaatcattagagatggtggcccatgggaagatccagtgttgcaagctgtccttaaagctcagccagcatctcaggagatagtgaacaaatatttaagttctgaaaatccactgttctttgaactacgtgccagatacctaattgcttgtgaacgcatacccgaagcaatggctcttattaaatcttgtataaatcacccagaaatcagtaaagacttatacttccatcaagcactcttcacatgtctgtttatgtcacctgtagaagatcagctattccgggagcatttattgaaaactgattgtaagagtggaattgatatcatctgtaatgctgaaaaagaaggcaaaactatgttagccttgcaactctgtgaatcctttcttattccacagctccagaatggggatatgtactgtatctgggagttgattttcatatggagtaaactacagct

SEQ ID NO: 410078 - DNA, 363 bp, Homo sapiens
tctttaatataaactatcgctgtgaaactctttttctttcctatgtatattattatattcagtaaacttatgtgtttaattagatgtaaaattagacgttattcttgatctttggcttcccaatttcattagatgggattagaattgtcccttttgtgtctttgatatattgtggttatctcatccctttcttgactcatcagcaccaaggttagattcattaagttagattcattaagatcattaaatttatatgaaacccacagctttaaagtagaagaaaaccctacaaatcagccaaaacagatgtttagaattgattgttgtgttttaaaactttatttttttgtttatatatattgt

SEQ ID NO: 410079 - DNA, 396 bp, Homo sapiens
ggcctcccaaagtgctgggattacaggtgtgagccactgcgcctggcccccatcacataattttaactcttaagtaggctgggaagttaaagatgaacattgtatttcctagagcagccacttaaaaaataatttatcaagagaatgagaaaacaagccacaacctgggagaagatacttgcaaaagacttatctgatgaaggactttgtatattttacccaaaatatacaaagaactcttaaaacccaacaataagaaaaggagcagttttaggccaggtgtggtggctcacaccggtaatcccaatactttgggaggccaaagtgggaggatcctttgagccgaggagttcaagatcagcttgagcaacatggtaagacccctctccacaaaaa

SEQ ID NO: 410080 - DNA, 554 bp, Homo sapiens
aaaattagtagacaaataatgcttccctggagttctggagcatcatatctcaaagttttttatgttaagcattatatcttagaagattagtaaatgctaaataaggaaaagagtgaggagtttgcagactcttcaaatataggaaacaatggactgagtaaaagtaaaaggattccttcttaaatctttttatatactaatgtgcatcatgaactctcaagagggacatatagtgagcagcactttcaaaaattatttgaccaccagaccactttttaactgaacatcactaccagtatggaacatgttttctgaaacactgtcctcctaagtgtttctaagtgagaaaaaaagaaaaatgatatgcatatagaataatctaccttacatatctgtcataaaatgttgtatataataagatgccatgagaaaaggcacccacgtcgtcatcatagagcttacatgttaggggaaaaactttataaataagctgacagatacaataaataattgtactccatgatatgtgctatgagggaaacaaacagggagtt

SEQ ID NO: 410081 - DNA, 466 bp, Homo sapiens
tgctgccaaagtattcctccagtaaaattcatatagtttgctgcccataaggagcaaaaaatatttatcttgggcttatttgaatgattaggatgagatttaaaacagaacttttcagttccgttatctccagtgccgtttcatgctttagagtgagtcacgtgcagggagtgtgaacgtcagaggtggtttattatccagtctgccttatccttaatctgttcacagatatttatttactaatgctttcgttcttaagagttgtgggatagaggctgggcgcagtgtctcacacctgtaaacccagcactttgggaggctgaggcgggtggatcacctgaggtcaggagttcaaaaaaaagagttgtgagataggaaaatgaagcgcttttcatttactaaatgattgttaactccagtttttcatcaaaataaaattccattgttttaatgtttctgaccaaac

SEQ ID NO: 410082 - DNA, 2883 bp, Homo sapiens
tttgtaacttcacttcagcctcccattgatcgctttctgcaaccattcagactgatctcgggctcctatttcatttacattgtgtgcacaccaagtaaccagtgggaaaactttagagggtacttaaaccccagaaaattctgaaaccgggctcttgagccgctatcctcgggcctgctcccaccctgtggagtgcactttcgttttcaataaatctctgcttttgttgcttcattctttccttgctttgtttgtgtgtttgtccagttctttgttcaacacgccaagaacctggacactcttcactggtaacatattttggcaagccaaccaggagaaaagaatttctgcttggacactgcatagctgctgggaaaatgaacatcagtgttgatttggaaacgaattatgccgagttggttctagatgtgggaagagtcactcttggagagaacagtaggaaaaaaatgaaggattgtaaactgagaaaaaagcagaatgaaagggtctcacgagctatgtgtgctctgctcaattctggagggggagtgatcaaggctgaaattgagaatgaagactatagttatacaaaagatggaataggactagatttggaaaattcttttagtaacattctgttatttgttcctgagtacttagacttcatgcagaatggtaactactttctgatttttgtgaagtcatggagcttgaacacctctggtctgcggattaccaccttgagctccaatttgtacaaaagagatataacatctgcaaaagtcatgaatgccactgctgcactggagttcctcaaagacatgaaaaagactagagggagattgtatttaagaccagaattgctggcaaagaggccctgtgttgatatacaagaagaaaataacatgaaggccttggccggggttttttttgatagaacagaacttgatcggaaagaaaaattgacctttactgaatccacacatgttgaaattaaaaacttctcgacagaaaagttgttacaacgaattaaagagattctccctcaatatgtttctgcatttgcaaatactgatggaggatatttgttcattggtttaaatgaagataaagaaataattggctttaaagcagagatgagtgacctcgatgacttagaaagagaaatcgaaaagtccattaggaagatgcctgtgcatcacttctgtatggagaagaagaagataaattattcatgcaaattccttggggtatatgataaaggaagtctttgtggatatgtctgtgcactcagagtggagcgcttctgctgtgcagtgtttgctaaagagcctgattcctggcatgtgaaagataaccgtgtgatgcagttgaccaggaaggaatggatccagttcatggtggaggctgaaccaaaattttccagttcatatgaagaggtgatctctcaaataaatgcgtcattacctgctccccacagttggcctcttttggaatggcaacggcagagacatcactgtccagggctatcaggaaggataacgtatactccagaaaacctttgcagaaaactgttcttacaacatgaaggacttaagcaattaatatgtgaagaaatggactctgtcagaaagggctcactgatcttctctaggagctggtctgtggatctgggcttgcaagagaaccacaaagtcctctgtgatgctcttctgatttcccaggacagtcctccagtcctatacaccttccacatggtacaggatgaggagtttaaaggctattctacacaaactgccctaaccttaaagcagaagctggcaaaaattggtggttacactaaaaaagtgtgtgtcatgacaaagatcttctacttgagccctgaaggcatgacaagctgccagtatgatttaaggtcgcaagtaatttaccctgaatcctactattttacaagaaggaaatacttgctgaaagccctttttaaagccttaaagagactcaagtctctgagagaccagttttcctttgcagaaaatctataccagataatcggtatagattgctttcagaagaatgataaaaagatgtttaaatcttgtcgaaggctcacctgatggaaaatggactgggctactgagatatttttcattatatatttgataacattctctaattctgtgaaaatatttctttgaaaactttgcaagttaagcaacttaatgtgatgttggataattgggttttgtctattttcacttctccctaaataatcttcacagatattgtttgagggatattaggaaaattaatttgttaactcgtctgtgcacagtattatttactctgtctgtagttcctgaataaattttcttccatgcttgaactgggaaaacaaaaacatacatcacaaaaaaacaaaaaaggggcgggggcacggctcaaagatgtttcccctcgcggggggggcgccccaagttttaacgcgcgttcacccagtcttttctttgtgaccaaggtgggtgccccctaataaggaggagcgccgtattatataacggctaggcgctttgggcccgcgcatcgttttacacaactgttctgcggactcgtggaaacctctgtcactccttgggcacacctttgggcaagggaaccccttatactctcggcgcgggggggcgccccattctgttgggacacactctaccctcaacagagatatcttacaccgcttccaaggggacacctcttctacaccttcttcaaccgtgcatatatccgggttctttccaccctaaccctgctcaaattgccttgtcgctcctacaccaaaattctcggccccccacggcactttcctctctcggaacacttttttttccg

SEQ ID NO: 410083 - DNA, 3000 bp, Homo sapiens
gagcccgcggactgtagcctgggcctcgccaagttcctttgttctttgttttctttaaattaccttttttctttttgtcttagaaaatacacatgggtgaaaaagaaacgagagctccctagagatcactcagagctgttttcgtgggtttttaacttccagttgctcaagggtccacgctggcatctggggtgtgctcgcacctgcgaagaatccagcttctagggagcaccgcgagctgttctttgttcaacacgccaagaacctggacactcttcactggtaacatattttggcaagccaaccaggaggttttcgatgtttgcatgcagccatctctagaatgtcaaatggtctctcttcaactggaatgatgagaagtgaaacaaatatgcgaccatgaggacactgtaacctatggatggtgtgctgagactggaaagccaaaatgatgaaaagaatttctgcttggacactgcatagctgctgggaaaatgaacatcagtgttgatttggaaacgaattatgccgagttggttctagatgtgggaagagtcactcttggagagaacagtaggaaaaaaatgaaggattgtaaactgagaaaaaagcagaatgaaagggtctcacgagctatgtgtgctctgctcaattctggagggggagtgatcaaggctgaaattgagaatgaagactatagttatacaaaagatggaataggactagatttggaaaattcttttagtaacattctgttatttgttcctgagtacttagacttcatgcagaatggtaactactttctgatttttgtgaagtcatggagcttgaacacctctggtctgcggattaccaccttgagctccaatttgtacaaaagagatataacatctgcaaaagtcatgaatgccactgctgcactggagttcctcaaagacatgaaaaagactagagggagattgtatttaagaccagaattgctggcaaagaggccctgtgttgatatacaagaagaaaataacatgaaggccttggccggggttttttttgatagaacagaacttgatcggaaagaaaaattgacctttactgaatccacacatgttgaaattaaaaacttctcgacagaaaagttgttacaacgaattaaagagattctccctcaatatgtttctgcatttgcaaatactgatggaggatatttgttcattggtttaaatgaagataaagaaataattggctttaaagcagagatgagtgacctcgatgacttagaaagagaaatcgaaaagtccattaggaagatgcctgtgcatcacttctgtatggagaagaagaagataaattattcatgcaaattccttggggtatatgataaaggaagtctttgtggatatgtctgtgcactcagagtggagcgcttctgctgtgcagtgtttgctaaagagcctgattcctggcatgtgaaagataaccgtgtgatgcagttgaccaggaaggaatggatccagttcatggtggaggctgaaccaaaattttccagttcatatgaagaggtgatctctcaaataaatgcgtcattacctgctccccacagttggcctcttttggaatggcaacggcagagacatcactgtccagggctatcaggaaggataacgtatactccagaaaacctttgcagaaaactgttcttacaacatgaaggacttaagcaattaatatgtgaagaaatggactctgtcagaaagggctcactgatcttctctaggagctggtctgtggatctgggcttgcaagagaaccacaaagtcctctgtgatgctcttctgatttcccaggacagtcctccagtcctatacaccttccacatggtacaggatgaggagtttaaaggctattctacacaaactgccctaaccttaaagcagaagctggcaaaaattggtggttacactaaaaaagtgtgtgtcatgacaaagatcttctacttgagccctgaaggcatgacaagctgccagtatgatttaaggtcgcaagtaatttaccctgaatcctactattttacaagaaggaaatacttgctgaaagccctttttaaagccttaaagagactcaagtctctgagagaccagttttcctttgcagaaaatctataccagataatcggtatagattgctttcagaagaatgataaaaagatgtttaaatcttgtcgaaggctcacctgatggaaaatggactgggctactgagatatttttcattatatatttgataacattctctaattctgtgaaaatatttctttgaaaactttgcaagttaagcaacttaatgtgatgttggataattgggttttgtctattttcacttctccctaaataatcttcacagatattgtttgagggatattaggaaaattaatttgttaactcgtctgtgcacagtattatttactctgtctgtagttcctgaataaattttcttccatgcttgaactgggaaaacaaaaacatacatcacaaaaaaacaaaaaaggggcgggggcacggctcaaagatgtttcccctcgcggggggggcgccccaagttttaacgcgcgttcacccagtcttttctttgtgaccaaggtgggtgccccctaataaggaggagcgccgtattatataacggctaggcgctttgggcccgcgcatcgttttacacaactgttctgcggactcgtggaaacctctgtcactccttgggcacacctttgggcaagggaaccccttatactctcggcgcgggggggcgccccattctgttgggacacactctaccctcaacagagatatcttacaccgcttccaaggggacacctcttctacaccttcttcaaccgtgcatatatccgggttctttccaccctaaccctgctcaaattgccttgtcgctcctacaccaaaattctcggccccccacggcactttcctctctcggaacacttttttttccg

SEQ ID NO: 410084 - DNA, 2787 bp, Homo sapiens
gagcccgcggactgtagcctgggcctcgccaagttcctttgttctttgttttctttaaattaccttttttctttttgtcttagaaaatacacatgggtgaaaaagaaacgagagctccctagagatcactcagagctgttttcgtgggtttttaacttccagttgctcaagggtccacgctggcatctggggtgtgctcgcacctgcgaagaatccagcttctagggagcaccgcgagctgaaaagaatttctgcttggacactgcatagctgctgggaaaatgaacatcagtgttgatttggaaacgaattatgccgagttggttctagatgtgggaagagtcactcttggagagaacagtaggaaaaaaatgaaggattgtaaactgagaaaaaagcagaatgaaagggtctcacgagctatgtgtgctctgctcaattctggagggggagtgatcaaggctgaaattgagaatgaagactatagttatacaaaagatggaataggactagatttggaaaattcttttagtaacattctgttatttgttcctgagtacttagacttcatgcagaatggtaactactttctgatttttgtgaagtcatggagcttgaacacctctggtctgcggattaccaccttgagctccaatttgtacaaaagagatataacatctgcaaaagtcatgaatgccactgctgcactggagttcctcaaagacatgaaaaagactagagggagattgtatttaagaccagaattgctggcaaagaggccctgtgttgatatacaagaagaaaataacatgaaggccttggccggggttttttttgatagaacagaacttgatcggaaagaaaaattgacctttactgaatccacacatgttgaaattaaaaacttctcgacagaaaagttgttacaacgaattaaagagattctccctcaatatgtttctgcatttgcaaatactgatggaggatatttgttcattggtttaaatgaagataaagaaataattggctttaaagcagagatgagtgacctcgatgacttagaaagagaaatcgaaaagtccattaggaagatgcctgtgcatcacttctgtatggagaagaagaagataaattattcatgcaaattccttggggtatatgataaaggaagtctttgtggatatgtctgtgcactcagagtggagcgcttctgctgtgcagtgtttgctaaagagcctgattcctggcatgtgaaagataaccgtgtgatgcagttgaccaggaaggaatggatccagttcatggtggaggctgaaccaaaattttccagttcatatgaagaggtgatctctcaaataaatgcgtcattacctgctccccacagttggcctcttttggaatggcaacggcagagacatcactgtccagggctatcaggaaggataacgtatactccagaaaacctttgcagaaaactgttcttacaacatgaaggacttaagcaattaatatgtgaagaaatggactctgtcagaaagggctcactgatcttctctaggagctggtctgtggatctgggcttgcaagagaaccacaaagtcctctgtgatgctcttctgatttcccaggacagtcctccagtcctatacaccttccacatggtacaggatgaggagtttaaaggctattctacacaaactgccctaaccttaaagcagaagctggcaaaaattggtggttacactaaaaaagtgtgtgtcatgacaaagatcttctacttgagccctgaaggcatgacaagctgccagtatgatttaaggtcgcaagtaatttaccctgaatcctactattttacaagaaggaaatacttgctgaaagccctttttaaagccttaaagagactcaagtctctgagagaccagttttcctttgcagaaaatctataccagataatcggtatagattgctttcagaagaatgataaaaagatgtttaaatcttgtcgaaggctcacctgatggaaaatggactgggctactgagatatttttcattatatatttgataacattctctaattctgtgaaaatatttctttgaaaactttgcaagttaagcaacttaatgtgatgttggataattgggttttgtctattttcacttctccctaaataatcttcacagatattgtttgagggatattaggaaaattaatttgttaactcgtctgtgcacagtattatttactctgtctgtagttcctgaataaattttcttccatgcttgaactgggaaaacaaaaacatacatcacaaaaaaacaaaaaaggggcgggggcacggctcaaagatgtttcccctcgcggggggggcgccccaagttttaacgcgcgttcacccagtcttttctttgtgaccaaggtgggtgccccctaataaggaggagcgccgtattatataacggctaggcgctttgggcccgcgcatcgttttacacaactgttctgcggactcgtggaaacctctgtcactccttgggcacacctttgggcaagggaaccccttatactctcggcgcgggggggcgccccattctgttgggacacactctaccctcaacagagatatcttacaccgcttccaaggggacacctcttctacaccttcttcaaccgtgcatatatccgggttctttccaccctaaccctgctcaaattgccttgtcgctcctacaccaaaattctcggccccccacggcactttcctctctcggaacacttttttttccg

SEQ ID NO: 410085 - DNA, 549 bp, Homo sapiens
gcctcggagaagtccaggagctaggtcaaggcagagggttgggggccacagacaaggccaaggcggggcatggaacagcaggggtcagatgttaggggaagtacgtcggcacccgggtggggatcttgaatactatgtcaggcacccacaacaagagctttgggtgctttgtgtctagggccgggtacccttgtttctgctgctgatgccgtgtttccagtctggattttagcaaaattaactgacccatccttctatctgatgcctgttttcttctctctcattagggagttctgggtccagcttttagcccacttatctgcctccagctttcagcctacttatctgccttccttaatcttttcccccttctaacctcttttgctggcctgtgctcccagagttcccagagtctgtctacacaactccctgtatgtccttggcctaggaattttttcctgtgtttctctaaccagctccttagaacctggaacttgtttccatggtctatacttcttttctctatttatccatctgtcttctgattga

SEQ ID NO: 410086 - DNA, 444 bp, Homo sapiens
gcctcggagaagtccaggagctaggtcaaggcagagggttgggggccacagacaaggccaaggcggggcatggaacagcaggggtcagatgttaggggaagtacgtcggcacccgggtggggatcttgaatactatgtcaggcacccacaacaagagctttgggtgctttgtgtctagggccgggtacccttgtttctgctgctgatgccgtgtttccagtctggattttagcaaaattaactgacccatccttctatctgatgcctgttttcttctctctcattagggagttctgggtccagcttttagcccacttatctgcctccagctttcagcctacttatctgccttccttaatcttttcccccttctaacctcttttgctggcctgtatcccggggagcacaggccagcaaaagaggttagaagggggaaaagtaagg

SEQ ID NO: 410087 - DNA, 762 bp, Homo sapiens
agtagattccagtgcaggttggcctttgttagagcccactccattagccaatatgccttcctgccgtccttcaggtttgtggcttaatgttttaattttccatatgcaaaagtttgtctaccttatgttagctgtcccagaagacagaatagcagagaacagtaagtgtgtgtgtgtgtgtgtgtgtgtctatgttctctttggatggtgtctgtaaatttgttttcaatgtcttttcaatgacaaagggaatgacagcaggagtgagactgtcttaatgttacactcagctctaggaaaaggaagaggtaagaaatcaaaacaaatctatgaaaagtagagtgagggagaaattactcctcagattcttgcaaatactcttaagtgcatgtaatcaaacatttgaaaagaacctagtactaaaggggtgtcactgttttcatcccctccccttcatgttctctctccttctctttagcaggaccccaacttcagagggtgcagcctctgaaagagactgtgaatctatatataccatttctgggacgaattcatcttctgaggcctcacacactccacatcttccatctgaattgcctcctagatatgaagaaaaagaaaatgctgcagctacattcttgcctctatcttctgagccttccccaccgtaaactatggactctagttcagttttatatgcaatggatcactattttatttaattttttttaaataaaaaatacaatagcattggcaatattc

SEQ ID NO: 410088 - DNA, 502 bp, Homo sapiens
tatataattaattttgcttttgctaatttgcttccatttattacccacctgttgtcaactaaatattgttttgccttaggtgactcggtaataatatttccaccccctccaccaccttactttcctgaatcttcagcttctgcggtcgctgagagtcctggaactaacagtctgcttccgaatgaaaaccccccttcatattacagtattttcaactatgggaccccaacttcagagggtgcagcctctgaaagagactgtgaatctatatataccatttctgggacgaattcatcttctgaggcctcacacactccacatcttccatctgaattgcctcctagatatgaagaaaaagaaaatgctgcagctacattcttgcctctatcttctgagccttccccaccgtaaactatggactctagttcagttttatatgcaatggatcactattttatttaattttttttaaataaaaaatacaatagcattggcaatattc

SEQ ID NO: 410089 - DNA, 1204 bp, Homo sapiens
agcggaggacgcgcggtgggtagggtgcagggcggccggcgcagccgaggccgcgtgcggaggcggacgccgcgcccagccagtgcccacagcagcgcggtcagccaggcgccggacccagcttcagagctgctgaaatcttggagggaagaaaacacatcccaccctgcctccgggaaggggcctctcctggacatgtctcctgcagctgctgctgagccagatggggaccagcaggacagacacgtcagcaaactcatcttctgcttctttgtcttcggcgccgtcttgttgtgtgtgggagtcctgctctccatctttgggttccaggcatgccaatataagcccctcccagactgccccatggtgctcaaggtggcggggcctgcatgtgccgtggttgggcttggggctgtgatcctggcccgctcccgggcgcaacttcagctccgtgcagggctgcagagaggtcagcagatggaccccgaccgagccttcatctgtggagagagccgccagtttgcccagtgccttatctttgggtttctgttcttgacaagcggcatgctcatcagcgtcctgggcatttgggtccctggatgtggctccaactgggcgcaggaaccgctaaacgagacagacactggcgactcagagccccggatgtgtgggttcctttctctgcagatcatggggcccttgattgtgcttgtgggattgtgtttcttcgtggttgcccatgttaagaagagaaacacgctgaatgctggccaggatgcctctgagagagaagagggacagatccagattatggagcctgtccaggtcactgtaggtgactcggtaataatatttccaccccctccaccaccttactttcctgaatcttcagcttctgcggtcgctgagagtcctggaactaacagtctgcttccgaatgaaaaccccccttcatattacagtattttcaactatgggaccccaacttcagagggtgcagcctctgaaagagactgtgaatctatatataccatttctgggacgaattcatcttctgaggcctcacacactccacatcttccatctgaattgcctcctagatatgaagaaaaagatatggactctagttcagttttatatgcaatggatcactattttatttaattttttttaaataaaaaatacaatagcattggcaatattc

SEQ ID NO: 410090 - DNA, 1258 bp, Homo sapiens
agcggaggacgcgcggtgggtagggtgcagggcggccggcgcagccgaggccgcgtgcggaggcggacgccgcgcccagccagtgcccacagcagcgcggtcagccaggcgccggacccagcttcagagctgctgaaatcttggagggaagaaaacacatcccaccctgcctccgggaaggggcctctcctggacatgtctcctgcagctgctgctgagccagatggggaccagcaggacagacacgtcagcaaactcatcttctgcttctttgtcttcggcgccgtcttgttgtgtgtgggagtcctgctctccatctttgggttccaggcatgccaatataagcccctcccagactgccccatggtgctcaaggtggcggggcctgcatgtgccgtggttgggcttggggctgtgatcctggcccgctcccgggcgcaacttcagctccgtgcagggctgcagagaggtcagcagatggaccccgaccgagccttcatctgtggagagagccgccagtttgcccagtgccttatctttgggtttctgttcttgacaagcggcatgctcatcagcgtcctgggcatttgggtccctggatgtggctccaactgggcgcaggaaccgctaaacgagacagacactggcgactcagagccccggatgtgtgggttcctttctctgcagatcatggggcccttgattgtgcttgtgggattgtgtttcttcgtggttgcccatgttaagaagagaaacacgctgaatgctggccaggatgcctctgagagagaagagggacagatccagattatggagcctgtccaggtcactgtaggtgactcggtaataatatttccaccccctccaccaccttactttcctgaatcttcagcttctgcggtcgctgagagtcctggaactaacagtctgcttccgaatgaaaaccccccttcatattacagtattttcaactatgggaccccaacttcagagggtgcagcctctgaaagagactgtgaatctatatataccatttctgggacgaattcatcttctgaggcctcacacactccacatcttccatctgaattgcctcctagatatgaagaaaaagaaaatgctgcagctacattcttgcctctatcttctgagccttccccaccgtaaactatggactctagttcagttttatatgcaatggatcactattttatttaattttttttaaataaaaaatacaatagcattggcaatattc

SEQ ID NO: 410091 - DNA, 397 bp, Homo sapiens
ccctccatactgtgagctccttgagggccttgtctgcacctggggcatccgggaaaccccagtcccagcccaggggatccatcggaggcccctgaatgagtgaccccacaattgcagattcaactctggtttagatggtaaagggatctgggagctgggttgccagtgtggagaccgaattcaaagcaggatccagaaaggtattaattgttattattattacatttaaacagtgtttacaagctcagagaggaatttcccttagcctattttacacatatttttcactatttcataagtgaggaagctgagtaaaaagtaccttaagggcccggtgcggtggctcacgagtgtaatcccagcactttgggaggccaaggcaggcagatcacgaggt

SEQ ID NO: 410092 - DNA, 583 bp, Homo sapiens
atataatactagttgatatcccatacatttgtagacaggattgagttaattctgtgaagcacttagactaatgtgaatattgtatgaactggttattatcttctgttaaaacatttactttatagtgtgatttttctgcttttatgtattgaggctctctaaattgcagtacagatgcattaatgatacccagtaaaggaatcctcatttaccatggtatcttacatacccatccagtgtctttttgtctttttcatctattcattcatttggcaaatattttcagagatgccactgtgtaccaggtagtggtggctcatgcctgtaatctcagcactttgggagaccaaggtggatggatcacgaggtcaggagtttgagaccagcctggccaacatagtgaaatcccatatctactaaaaatacaaaaaattagctgggcgtggtggtgtgtgcctataatcccagctactcgggaggctgaggcaggagaattgcgtgaacctgggaggcggaggttgcagtgagccgagatggcgccattgcactccagcccgggcgacagtgcgagactgtctggaga

SEQ ID NO: 410093 - DNA, 479 bp, Homo sapiens
aatatggcaaagtgtcagccaagtctacttgggagacagaattgctgcctgttaaaagggaaggtgataaatatgtctgatttgttactgtgatcaagtaggcaaaatacttcattaaaccataaatttgtctaaaagcatattggaaaactatttgtcccagacagcttcaccaagggatagtatatttctaacgctgtctctgaccaaatgcttttataagtactgccctttctggaaatttgggaaaatgttgaattctggatctttctgctctaaaagccttaagtcattttagaataggaggcacatgaatatattttgaaagcaacatgctaaccaattagagttttaacatagtcaaaattgtgaagtgatgaaagtttgtcttaggcatcttgtgataaccacctaggattttttagttctacctgggagggattttttcaagaatataggtttttgtttttgtattttct

SEQ ID NO: 410094 - DNA, 838 bp, Homo sapiens
tcaggaagtttacagtcatggtggaaggtgaaggaggaaacaggcataccacatggcacatgagcgacagggaaagagaaggtcccagactcttttaaacaaccagatctcatgtgaactgagtgagaactcactcatcaccaaggggatggcactaaaccattcatgagggatccattccagtgatccaatacctcccgctaggccccacctccaacattggggatcacatttcaacatgagatttagaggggatgcccatcccaactatatcaagtagtttgttggcaagtgatggttctggagctgttggggcttaggaagagtgtgtttactctttgctcaacagtttgttctagtgaaggacttgaagcaggagagtaacaagctcatgttttttttcctatacttgtaaaaattattcagctttccactctttaaatatactaaaatgggcacctaaatgttgtacgataagaattggtttcttttctctaacagcagaagggcttgggatactgaaggaaatgtgacttttctgcctttgtctattgggtaagtggctcatgcctataatcccagcactttgggaggccaaggtgggcagatcacgaggtcaggagtttgagaccagcctgaccaacagggtgaaaccccgtctctactacaaatacagaaaattagccaggcatggtggtgcacacctgtaatcccagctactcaggaggctgaggcaggagaactgcctgaacccggaaggcagaggttgcagtgagccgagatcatgccactgcactccagcctgggcgacagagtgagactctgtctcaaaaaaaga

SEQ ID NO: 410095 - DNA, 519 bp, Homo sapiens
gcctcctgggttcaagcgattctcctgcctcagcctcccgagtagctgggattacaggtgctcgctaccacgtccagctaacttttttgtatttttagtagagacggggtttcaccatgttggccaggatggtctctatctcttgaccttgtgatctgcccggcttggcctcccaaagtgctgggattacaggcgtgaagcacgcctggcctttattttctttatggcttttctcattataagatactgccttgtttatttatttgcttatttattgagacacatggcccccctcacccccaaaaagaatgtaaactgctaacaacagattatttgttttgttcaccactgcatcctcagcacctagaagaaggcatggaacatagaaagtgctgtaattgtcagggtgtgctggcttatgcctgtaatcccagcgctatggtaggccaaggtggaaagattgcttgagtccaggagttggagaccagcctgggcaacatagtgagacccccatctcta

SEQ ID NO: 410096 - DNA, 420 bp, Homo sapiens
catactctgttaaaaacacaacaaaagaacttctcttgtcaataggtaatctttatataatttaaaactgtattccttgctttctgaattcatatattattttcatgattaaagaaattaatctggccgggagtggtggttcacgcctgtaatcctagcactttgggagcctgaggcaggtggatcacgaggtcgggagttgaagaccagcctggccaagatggtgaaaccttatctctactaaaaatacaaaaattatccaggcgtggtggcaggcgcctgtaatcccagctacttgggaggctgcggcaggagaatcgcttgacccagggggcagaggttgcagtgagccaagatctgccactgcactccagcatgggtgacagagtgagactctgactcaaaaaaaaaaagaaaaag

SEQ ID NO: 410097 - DNA, 493 bp, Homo sapiens
caccctcaagaaatctttcattaaaagcggtccttattttgtaggaaattgaataatttatacaatgaactagctgcatctgaggctggacacagtgggtcacacctgtaatcccaaagtactggggttacaggtgtgagccaccgcaccccgcctgaaatagttcttaaattcaaattcaattttgtgtattccaacagtattatctcagcagtttagttttttccagttcacatccatccatctgcctgaggagaccaatgctgtcagctttccttattctcacaggtgtccatctaatcaagaatagttcccaccaggcttctgattggcccaggttaggtcacatgcatatcctcaaatgcatcgccataacaacagggatggaatcctttcagcacttgcttggtcttatgtctactgctgtaggtaggtaggttgtttgtataggaggtgtggcacaatggtaggagaaggagattattccccatac

SEQ ID NO: 410098 - DNA, 493 bp, Homo sapiens
tgaggaggtgtcatgcaacttgctgccccagccctccccttctaaggaactcccacacctgccctgtcttcctgctacagtctctgagaaaagccctttcatctgtcaagaactacagaagtcattctttaagcctgtgagcagaaccagaagggacactctcacagcctgttcaccacggaatccaggaggcaggtcaattttggtggctgtctccacaacatggctttttccccttgaagaccatcaggagaagagcctgtatctccgcatctgtggaaatcgtctttgccatgtaatgtgccataaccacgggagtgacatcgcatcacatcccagggccaccgctaaggaggagggtgaggatcttgaccctcatcttagaattctgccctgcctggcttccacttgtcctcttctaaatctgtcttaactcattcctttggtgcctgtttttgctgcctaaattttggcaataaagggaggaataaaa

SEQ ID NO: 410099 - DNA, 358 bp, Homo sapiens
tgaggaggtgtcatgcaacttgctgccccagccctccccttctaaggaactcccacacctgccctgtcttcctgctacagtctctgagaaaagccctttcatctgtcaagaactacagaagtcattctttaagcagtgctaaataaacaatgaaacagacacaaagttaaagttacctgatccaaaaaggagtgaagcctagaccccagcccactgactcagtctctaagtcccctcactcaaatcttcaatcaacagtggagatggctgtgagctcttctgattccagatgacaatactcctgcctttaattccttgatatgtttaattatgtaagtaaatttaatataaaaatcat

SEQ ID NO: 410100 - DNA, 628 bp, Homo sapiens
cttaatatttttcttttggcagagtggtttgggttccaacgtttttattttcctttcactgctttcagggagcaaaagagaaaaacctacattactatcttaatgcagaaaaatacttgataacatttcacacctattcagggtaaaaattctcagtaaatgaggaatagaaagaatttcccttaatgaaacaaaggttatgtgtgacagccggctgcaatcatcatatttaatggtgaagtgtgttcacactaagatcaggaacaagcattaatgttgattcttatcactcttatttagcattatcctagaataactagctaacctgttaaggtattaaaaaggaataaaaggcataaacgttgaaacagaaaaaaaaattttttattcacagaagatgtgagtatgtacatggaagaatagttaaacaactagatactagtaacacacagtttaggaacttcagaaaataaggtcagtatttttaaaaagcacttgtatttctgtaacctagcagcaaacagttaaaaaatgaaatacatatttatactaccatcaaaaacaacatatttaaacttctaagagtaaatgtaggggaatatctttgtgactttggaataggtaaaga

SEQ ID NO: 410101 - DNA, 318 bp, Homo sapiens
tgaaacagaaaaaaaaattttttattcacagaagatgtgagtatgtacatggaagaatagttaaacaactagatactagtaacacacagtttaggaacttcagaaaataaggtcagtatttttaaaaagcacttgtatttctgtaacctagcagcaaacagttaaaaaatgaaatacatatttatactaccatcaaaaacaacatatttaaacttctaagagtaaatgtaggggaatatctttgtgactttggaataggtaaagatagcacagatgggacatgaaaggtaaactatttatgtaagtatatagaaagaa

SEQ ID NO: 410102 - DNA, 497 bp, Homo sapiens
aatctccattccctccctgccagcctatttttctgccatccctcttctctgtctgctcagttcttgcatctctccttctgtgtttccaggtttctctatatttcttttgcctgtgtagtctctctgtcgttaggccttttatctatgcctgtgtgtctcactgtctagctgcttgtctccctgcctgtcactttcattgtggggcatcagtctctgccttcttctgtctttcagtacttcaaaaaataaaaattaaataaaaaatttaaattccttatgattaatgggtacaggagaatattttttttgttttaatgagaagactattaaggtgagaacaaagaactcaaatattcagctgtgaaatgcaaatgaagaaaaatttttaagggactctcaagccaagaataagattatttaacgcaaaagcaagaaacatatctaaagcaataatttctaaccttttaggatcgtagaaagttagaaactttctccag

SEQ ID NO: 410103 - DNA, 297 bp, Homo sapiens
atacaaaaacaataggaaaaaaccccagtaaaacaaagagttggttctctgaaagatgtgattgaaaaccccttaaccagtgggagaaaaaaaaagagagaaggctgaaataaaagcagaaacataagagtagtcataataaagatgccacaggaataaaaagataagaaactaccatgaaaattacttattagcaaatgggacaacctagaataaatgaacaaattcctagaaccataaaacctgtcaagcgtgaatcaagaagaaatagaaagcctgaacagacgaataataata

SEQ ID NO: 410104 - DNA, 198 bp, Homo sapiens
gatgtttctgtgaaggtatttatggatgagactaatatttaaattggtggactttgagtaaagcacatggccctccgtaatgcgggtaggcctcacccaatcagttgaaggcctgaatagaaccgaagagggaatgccacagcagatggccttcagacttacactgcaccaccggctcttctctgggtctccagcctg

SEQ ID NO: 410105 - DNA, 379 bp, Homo sapiens
atctacacatatttatagtaatttggtcaatattaattttagtatctgtgacacatgcacacacatacagtatattcacacacttccatttttagtaaaatgccacaggattcattccagccatctccatttccatgtttgtgattctgttctctgttagagaatcagaacagaatgagaaatgtggctcccacttatttgctcattttcccttttatgtaacaaattgcttcattacataaaatcgagcttttatgtaaaattttctatgtattttagtacataaaagcccattggtccaggccctcttgagctcagccatgtttttggttgtgactgtctctatttttaaatttattttattttttgatacagtctg

SEQ ID NO: 410106 - DNA, 689 bp, Homo sapiens
gcaagcccaaggctcagaaagttaatttctaactttaaatagctagtaaatggctgacacaggactaaactcagctctgctcaactcagacacctgtttttctatttctcccaagttgattctcaaactgcaggaaatctttgtgttttccccttttaagtaagaagcagaccactattagggtgagtgggtagagggagcataaggtgaagtaagccattcctaaaataattgggatataattggaagcatttgctgaccctttccacctcatggttgtaggatattacaagtatgttttctttaagaatgctcaataagccaacatagataaatttgaattttaaacatagataattaatagagtgattatattaattaatcagaaccagtattataggtctcatctactgaacatttcttttaactttcagctcttttggtgcacttctgttctggataaaatataattgtatgctcagaggacagaaaaattttacaaatgagcttaggcttccctgccagaaaagaaaggatgaaatagaaatgaaaatgaaaattaagtaatccctgaaatgataatatagttaaatgtgaaaatatgcctttgataataccaaactgggatttgcacccaaaacacattaattggattaacctgttttagtttgtcttgtatctgttgccga

SEQ ID NO: 410107 - DNA, 1729 bp, Homo sapiens
  misc_feature (692)..(692): n is a, c, g, or t
  misc_feature (697)..(698): n is a, c, g, or t
  misc_feature (701)..(701): n is a, c, g, or t
  misc_feature (723)..(724): n is a, c, g, or t
  misc_feature (737)..(737): n is a, c, g, or t
  misc_feature (820)..(820): n is a, c, g, or t
  misc_feature (1404)..(1405): n is a, c, g, or t
  misc_feature (1609)..(1609): n is a, c, g, or t
  misc_feature (1640)..(1640): n is a, c, g, or t
  misc_feature (1645)..(1645): n is a, c, g, or t
catgaatgtttatggcagctttatccataattgccaaaacttggaagcgatcaagccatgaaaagacattgctgagaagaagccaatctgaaaaggctacacatcctgtataattccagccgtattctggaaaaggcaaagctgtggagacagtcaaaagatcaggagttgccaggggtttgttgtcagtggttgccaaaggcaaggatgaataaggagaacacaggggattttatgtgataagtatcatacctaaaaatcccctgtgttcatatcatgtataaataaatgtacatagacatatacacatatatatatataaatcatgtgtatgcaatgacatgtatctatcctgtcattctgtattggtcaaaatatcaaaatccacagaatgtacaacacaaagagtgaactctaatgtaaactgtggactttagttaatactaatgtgtcaatattggcttatcagttctaacaaatgtaccacactaatgcaatagtaggaaaaactgtccaatctaaacactgggcaaaggattttaaaagatatttcacaaaggaagatatgaaaatggcaaatcagcatgtgaaaagatggttaatatctttttttttttttttttgagtctctctgttgcctaggctggagtgcaatggcatgattgccgcccgctgcgacctctgcctctcangttcnngcnattctcgtgcctcagccttccnngtagctgggattncaggtgtgcaccactatgcctggataattttttttgtattttcagtagagatggggtttctccattttggccaggctggtctngaacttctggcctcaagtgatccacccgccttggcttcccaaagtgccaggattacaggtgtgacccactgctcccggccaagatacttaacatctttaatcatcaaggaaatgcaaattaaaactacagtgcaataccactgcatacccattagaatgcccaaaattttaaaaactgaccataccaagtgatggcaagtgatggcaagggtgtggaacaatttgaacttttacattgctaatggcatgtaaagtggtatagcaaatttggaacattgttcagcaatttctcataaagttaatcatacatttaccatgtaacccaacagttcaacttttaggtatttaaccaagagaaatgaaagtccacgtccataaagatacttgactacaaatatccatacagttttattcaaaatagccccaaactgggtgggcgcggtggctcacacctgtaatcccaacattttgggaggctgaggcgggcagatcacttgaggtcaggagttcaagaccagtctggccaacatggtgaaactccatctctactaaaaaaaaatacaaaactaggctaacatggtgannccccatctctactaaaactacaaaaaaaaaaaaaacaaatcagccgggcggctactcaggaggctgaggcaggagaatggcctgaacccgggaggcagagctggcagtgagccgagatcgcgccactgcaccccagcctgggcgacagaatgagactctgtctcaaaaaaaaaaaaaagccaggtgtggtggcgggcgcctgtnatcacagcttctagggaggctgaggcacganaatcncttgaacctgggaggtggaggttgcagttagccgagatcgcaccattgcattccagcctgtactacaaagtgagactctgtccc

SEQ ID NO: 410108 - DNA, 4978 bp, Homo sapiens
cacgctcacaccacacgcacaccacaaaacaaagaacaggtaaaaagggcacacatacacttttaccgtttacaccaaaccagaatcaaaatccaaatcagagtatccagaaatccaagccaggtcaaaaccaaaacgaaagtatcaagcaatccaaatcaagtcaaaaacaaaaaccaaagtgccggtacaggcatgccgtgggtgatcaggccacccttccactcaaatggagtgggcaagttccaaagactagtcttaccaagtttcagatgtccggactccaagtgcctgttccttcccagtgttcagccgctgcattgatcctctgtgggggcctgccacacgccactctggcgaggtgttccactggggcaattgcctacccgggagtgctctcaggttctgcgtccctcaagctggccagagtcccctgtagggatgctccacagggcaggcctaagctgcctaaggggctgcctcgactatctgttaatcacctggcttcccagtcagggaaccaagaaatgtagcaggacaagccgcagggctgtattcagcctggagctttggcaagactcacatctccaactaccaagctccccaagtgaggaattcctgtcccttttaagggcttacaactctaagggggtccacatgagaggtttgtgatcgattgagcaagcagggggtacacgactgggggctgcatgcagtggtaatcagaacggaacagaacaggacagggattttcacaatgcttttccatacaatgtctggaatccatagataacataaccggtttggtcaggggtcgatctttaaccaggcccagggttggcacctggctgtctgcctgtggatttcatttctgccttttagtttttacttgtttctttggaggcagaaattgggcataaaacaatatgagaggtggtctcctcccttaacagcacaaacgcttaattaacatttctttttcttttgagacaggttctgtcgcccaggctggagtgcagtggtgcagtcatagctcagtgcagcctggaccacctgggctcaagcagtcctgacacctcagcctctcaaaatttgggattacaggcgcgcgccaccgtgcgggtcaggaggcttccctgagggccccggaggtggagctgggcttttccttccgaagcgcccctgggaatctctctctttacggccttggaacctgggaaactacattacccagaaagctctgcgtcaaatgacagcacggcagagccagtgagagttcacattgaaggcgtttccgtgtgcgcaagtaaggtagaggcgggactcccggcgccctttagtagcgaccatttccattggcgttagggagtccttggagcgctgtgttgggaccgtggtggtgactggatccaggaggtcgagagtcgttcttctctttgcacagacgtgactctgcagctctttaacggcgcccgctgctctcaacccagcttaccccacgtggtcccatggcggcggccgcgctaaggttccccgttcaggtaattgtggcgccttccgtgctctccggtcacctcctagtcacacaagtcctaaagcagcgagggagcggcacctgcttacggctctgcaacccggacccggcgtcgggacactgaggcgctctcgggagggatccctgtttcagacacccgtgggatgcggtggggagagcgacaggtacagggaggggcgcgggcaatggcctggagatggacggatccgggaggatggaacctggggtccacaggcgcctgtagggaacaacctgtgaggcggaactcctcctggaaaagcaaggaggctgggggctgtgaaatcattgcgaggacactagaaataggagaatttccaagaaagaagggactggatcaaagtccaggcttttaaagtttcctaaaggccaaataaataacagagtagagaggggatgacgttggggccctttgagattgaatccttgtagatcatataggtggtagagatgacactttgtgctgagacacgcaggttagacaatagtccaaggtcacctggctccgtggacacaaaagcgttcagggaggcctgagcttaccagatcctatcagggacacagtcctgtaaagtcagcctcttccctcaggcctttatggctgtagaagcatttaaggaacgcatacaagaaagtggagggtggggccgggtgcagtggctcactcctgtaatcccagcactttgggaggcctaggcgggttggtccggaggtagagaccagcctgaccaaccatggagaaaccctgtctctactaaaaatacaaaattagccaggcgtggtggcgcatgcctgtaatcccagctacttgggaaactgaggcagcagactcgcttgaacccgggaggcggaggttgcgtgagccgagatcgcgccattgcactccaccctgggtgacagagcgagactccgtatcaaaaaaaaaaaaaaaaaaaaaaaaaaaagaatgaggtgcgttcagagagggtatctctgctgtgctgaaggtgccacattgggctttccatgacctcggccatactaggggaagtgcctgtcaggagggggtggactcttatatcacagccaccgcacagatacctatttgttcaactaactattgttgttggtggctgtaccccatgaccagtgggcctagtttctcctatgtttgaggaccttgagaggaggatgtgcgagagtagatgtgtgggagagatggattgtgatacctcagcataggggtggtttgtggtttcatctgtcaacatcataacagggcacagtgacttttgaagacgtggctgtgaaatttacccaggaggaatggaatctccttagtgaggctcagagatgcctgtaccgtgatgtgacgctggagaacctggcacttatgtcctccctgggttgttggtgtggagtggaagatgaggcggcaccttctaagcagagtatttatatacaaagagagactcaggtcaggactcctatggcaggtgtgtctcccaagaaggcccacccctgtgagatgtgtggcccgatcttgggagacattttgcatgtggcagatcatcagggaacacatcacaagcagaaactgcacaggtgtgaggcctgggggaataaattgtatgacagtggaaactttcatcagcaccagaatgagcacattggagagaaaccctacagagggagtgttgaggaggcgttgtttgcgaagaggtgtaagttgcatgtgtcaggggagtcatctgtcttcagtgagagtgggaaagactttttgctcaggtcaggattactccagcaagaggccactcacactgggaagtcaaacagcaaaactgagtgtgtgtctctgtttcatgggggaaaaagccattacagctgtggaggatgcatgaaacattttagcaccaaagatatactcagtcagcacgagagactgctccctacagaagaaccttctgtgtggtgtgaatgtgggaaatcctctagcaaatatgacagcttcagtaatcatcaaggagttcacactagagaaaaaccttatacgtgtgggatatgtgggaaattatttaacagtaagtcccacctccttgtacaccagagaattcacactggagagaagccatatgagtgtgaggtttgtcagaaattttttaggcacaagtaccacctcattgcacaccagagagttcacactggagaaaggccatatgaatgcagtgattgtgggaagtcatttacccacagctctacattccgtgttcataagagagttcacactggtcagaagccttatgagtgcagtgaatgtgggaaatcttttgccgaaagctccagtctcactaaacacaggagagttcacactggagaaaagccttacgggtgcagtgaatgtgaaaaaaaatttaggcaaatctcttcacttcgtcatcatcagagagttcacaaaagaaagggcttatgagtgcagtgagtccagtctcattaaatattggagaatacacacctgagtaagatcctgtgattgcagcaaatgtggaaaatgtttacccaaaggtctgctctccttggatattggagagttcacactagagaagagtccttacaagtaaaataaatttgggcagttttgtagccacacctctgtattccttcaggattatagttaacactgaatgaaggccttactagtgtgacaaatacaggatatttatccagaagtctggctgcataactcacaggagagctgtcatgtgggaggattgctacatgggaggatttgcttgagcctgggaggcagaggttgcagtgagccgagattgcaacactgcagtccagtctggaccacagagtgagaccctgtttcaaaaataaaatatataaatgacatccaataaagtatgcatatttgagctgtaggataagtcttgaattttctttttcttttttttgagacagcctcgctctgtcacccaggctggagtacagtggcataatctcggctcactgcaagccctgcctcctgggttcatgccattctcctgcctcagcctccctaatagctgggactacaggcaaccaccaccactcctaccttttttgtatttttagtagagatggggtttcaccctgttagccaggaagttctcaatctcctgacctcgtgatctgcccgccttggcctctcaaagtgttgggattgcaggcgtgagccactgctcctggcttgaattttcttataatcccatgaaaccatcatcagagtcacaataatgaatttatctaatctatcacctttgtattcacctggagcctttataaagtttttctctatgcagacaaccattgatttactctgctgtataatactttccattttctagaattttctgactgatgtaataaagtgtttcctcttat

SEQ ID NO: 410109 - DNA, 3689 bp, Homo sapiens
cacgctcacaccacacgcacaccacaaaacaaagaacaggtaaaaagggcacacatacacttttaccgtttacaccaaaccagaatcaaaatccaaatcagagtatccagaaatccaagccaggtcaaaaccaaaacgaaagtatcaagcaatccaaatcaagtcaaaaacaaaaaccaaagtgccggtacaggcatgccgtgggtgatcaggccacccttccactcaaatggagtgggcaagttccaaagactagtcttaccaagtttcagatgtccggactccaagtgcctgttccttcccagtgttcagccgctgcattgatcctctgtgggggcctgccacacgccactctggcgaggtgttccactggggcaattgcctacccgggagtgctctcaggttctgcgtccctcaagctggccagagtcccctgtagggatgctccacagggcaggcctaagctgcctaaggggctgcctcgactatctgttaatcacctggcttcccagtcagggaaccaagaaatgtagcaggacaagccgcagggctgtattcagcctggagctttggcaagactcacatctccaactaccaagctccccaagtgaggaattcctgtcccttttaagggcttacaactctaagggggtccacatgagaggtttgtgatcgattgagcaagcagggggtacacgactgggggctgcatgcagtggtaatcagaacggaacagaacaggacagggattttcacaatgcttttccatacaatgtctggaatccatagataacataaccggtttggtcaggggtcgatctttaaccaggcccagggttggcacctggctgtctgcctgtggatttcatttctgccttttagtttttacttgtttctttggaggcagaaattgggcataaaacaatatgagaggtggtctcctcccttaacagcacaaacgcttaattaacatttctttttcttttgagacaggttctgtcgcccaggctggagtgcagtggtgcagtcatagctcagtgcagcctggaccacctgggctcaagcagtcctgacacctcagcctctcaaaatttgggattacaggcgcgcgccaccgtgcgggtcaggaggcttccctgagggccccggaggtggagctgggcttttccttccgaagcgcccctgggaatctctctctttacggccttggaacctgggaaactacattacccagaaagctctgcgtcaaatgacagcacggcagagccagtgagagttcacattgaaggcgtttccgtgtgcgcaagtaaggtagaggcgggactcccggcgccctttagtagcgaccatttccattggcgttagggagtccttggagcgctgtgttgggaccgtggtggtgactggatccaggaggtcgagagtcgttcttctctttgcacagacgtgactctgcagctctttaacggcgcccgctgctctcaacccagcttaccccacgtggtcccatggcggcggccgcgctaaggttccccgttcaggggcacagtgacttttgaagacgtggctgtgaaatttacccaggaggaatggaatctccttagtgaggctcagagatgcctgtaccgtgatgtgacgctggagaacctggcacttatgtcctccctgggttgttggtgtggagtggaagatgaggcggcaccttctaagcagagtatttatatacaaagagagactcaggtcaggactcctatggcaggtgtgtctcccaagaaggcccacccctgtgagatgtgtggcccgatcttgggagacattttgcatgtggcagatcatcagggaacacatcacaagcagaaactgcacaggtgtgaggcctgggggaataaattgtatgacagtggaaactttcatcagcaccagaatgagcacattggagagaaaccctacagagggagtgttgaggaggcgttgtttgcgaagaggtgtaagttgcatgtgtcaggggagtcatctgtcttcagtgagagtgggaaagactttttgctcaggtcaggattactccagcaagaggccactcacactgggaagtcaaacagcaaaactgagtgtgtgtctctgtttcatgggggaaaaagccattacagctgtggaggatgcatgaaacattttagcaccaaagatatactcagtcagcacgagagactgctccctacagaagaaccttctgtgtggtgtgaatgtgggaaatcctctagcaaatatgacagcttcagtaatcatcaaggagttcacactagagaaaaaccttatacgtgtgggatatgtgggaaattatttaacagtaagtcccacctccttgtacaccagagaattcacactggagagaagccatatgagtgtgaggtttgtcagaaattttttaggcacaagtaccacctcattgcacaccagagagttcacactggagaaaggccatatgaatgcagtgattgtgggaagtcatttacccacagctctacattccgtgttcataagagagttcacactggtcagaagccttatgagtgcagtgaatgtgggaaatcttttgccgaaagctccagtctcactaaacacaggagagttcacactggagaaaagccttacgggtgcagtgaatgtgaaaaaaaatttaggcaaatctcttcacttcgtcatcatcagagagttcacaaaagaaagggcttatgagtgcagtgagtccagtctcattaaatattggagaatacacacctgagtaagatcctgtgattgcagcaaatgtggaaaatgtttacccaaaggtctgctctccttggatattggagagttcacactagagaagagtccttacaagtaaaataaatttgggcagttttgtagccacacctctgtattccttcaggattatagttaacactgaatgaaggccttactagtgtgacaaatacaggatatttatccagaagtctggctgcataactcacaggagagctgtcatgtgggaggattgctacatgggaggatttgcttgagcctgggaggcagaggttgcagtgagccgagattgcaacactgcagtccagtctggaccacagagtgagaccctgtttcaaaaataaaatatataaatgacatccaataaagtatgcatatttgagctgtaggataagtcttgaattttctttttcttttttttgagacagcctcgctctgtcacccaggctggagtacagtggcataatctcggctcactgcaagccctgcctcctgggttcatgccattctcctgcctcagcctccctaatagctgggactacaggcaaccaccaccactcctaccttttttgtatttttagtagagatggggtttcaccctgttagccaggaagttctcaatctcctgacctcgtgatctgcccgccttggcctctcaaagtgttgggattgcaggcgtgagccactgctcctggcttgaattttcttataatcccatgaaaccatcatcagagtcacaataatgaatttatctaatctatcacctttgtattcacctggagcctttataaagtttttctctatgcagacaaccattgatttactctgctgtataatactttccattttctagaattttctgactgatgtaataaagtgtttcctcttat

SEQ ID NO: 410110 - DNA, 2563 bp, Homo sapiens
aaatcctttaactgatttgtacatgagcttgtagtctgatatttattcccctgaataatcttcacatctctggacctcacatcttaattttattcacatcttcatctgcagtggtttccagtattagcatacaggttttgtgttagcaaatgtgtacactttgttaaactgtcctcaagcagaagctgctgtgttgtgcttgtgttttccttggcctggacaaatccctctctacagcactcgcatgtcatgaggacataaattctgcagatgagtggtttgcagatgcagggattgtagaccctgcctctactccctgtgttacatacatggttgtgtcctttatgttatgaggcctcctacattctgtgaccattatagtccagtaataatacatagcaccatcttccacctgaagccaacatcctgttcctccaagtacttccttggagtaattcctcagtttttcagatacacttgtgggtggtctgtgccttcccaccagagttaacatgcacttcaccagcattttcttgctttcaggttgttggtgtggagtggaagatgaggcggcaccttctaagcagagtatttatatacaaagagagactcaggtcaggactcctatggcaggtgtgtctcccaagaaggcccacccctgtgagatgtgtggcccgatcttgggagacattttgcatgtggcagatcatcagggaacacatcacaagcagaaactgcacaggtgtgaggcctgggggaataaattgtatgacagtggaaactttcatcagcaccagaatgagcacattggagagaaaccctacagagggagtgttgaggaggcgttgtttgcgaagaggtgtaagttgcatgtgtcaggggagtcatctgtcttcagtgagagtgggaaagactttttgctcaggtcaggattactccagcaagaggccactcacactgggaagtcaaacagcaaaactgagtgtgtgtctctgtttcatgggggaaaaagccattacagctgtggaggatgcatgaaacattttagcaccaaagatatactcagtcagcacgagagactgctccctacagaagaaccttctgtgtggtgtgaatgtgggaaatcctctagcaaatatgacagcttcagtaatcatcaaggagttcacactagagaaaaaccttatacgtgtgggatatgtgggaaattatttaacagtaagtcccacctccttgtacaccagagaattcacactggagagaagccatatgagtgtgaggtttgtcagaaattttttaggcacaagtaccacctcattgcacaccagagagttcacactggagaaaggccatatgaatgcagtgattgtgggaagtcatttacccacagctctacattccgtgttcataagagagttcacactggtcagaagccttatgagtgcagtgaatgtgggaaatcttttgccgaaagctccagtctcactaaacacaggagagttcacactggagaaaagccttacgggtgcagtgaatgtgaaaaaaaatttaggcaaatctcttcacttcgtcatcatcagagagttcacaaaagaaagggcttatgagtgcagtgagtccagtctcattaaatattggagaatacacacctgagtaagatcctgtgattgcagcaaatgtggaaaatgtttacccaaaggtctgctctccttggatattggagagttcacactagagaagagtccttacaagtaaaataaatttgggcagttttgtagccacacctctgtattccttcaggattatagttaacactgaatgaaggccttactagtgtgacaaatacaggatatttatccagaagtctggctgcataactcacaggagagctgtcatgtgggaggattgctacatgggaggatttgcttgagcctgggaggcagaggttgcagtgagccgagattgcaacactgcagtccagtctggaccacagagtgagaccctgtttcaaaaataaaatatataaatgacatccaataaagtatgcatatttgagctgtaggataagtcttgaattttctttttcttttttttgagacagcctcgctctgtcacccaggctggagtacagtggcataatctcggctcactgcaagccctgcctcctgggttcatgccattctcctgcctcagcctccctaatagctgggactacaggcaaccaccaccactcctaccttttttgtatttttagtagagatggggtttcaccctgttagccaggaagttctcaatctcctgacctcgtgatctgcccgccttggcctctcaaagtgttgggattgcaggcgtgagccactgctcctggcttgaattttcttataatcccatgaaaccatcatcagagtcacaataatgaatttatctaatctatcacctttgtattcacctggagcctttataaagtttttctctatgcagacaaccattgatttactctgctgtataatactttccattttctagaattttctgactgatgtaataaagtgtttcctcttat

SEQ ID NO: 410111 - DNA, 5402 bp, Homo sapiens
cacgctcacaccacacgcacaccacaaaacaaagaacaggtaaaaagggcacacatacacttttaccgtttacaccaaaccagaatcaaaatccaaatcagagtatccagaaatccaagccaggtcaaaaccaaaacgaaagtatcaagcaatccaaatcaagtcaaaaacaaaaaccaaagtgccggtacaggcatgccgtgggtgatcaggccacccttccactcaaatggagtgggcaagttccaaagactagtcttaccaagtttcagatgtccggactccaagtgcctgttccttcccagtgttcagccgctgcattgatcctctgtgggggcctgccacacgccactctggcgaggtgttccactggggcaattgcctacccgggagtgctctcaggttctgcgtccctcaagctggccagagtcccctgtagggatgctccacagggcaggcctaagctgcctaaggggctgcctcgactatctgttaatcacctggcttcccagtcagggaaccaagaaatgtagcaggacaagccgcagggctgtattcagcctggagctttggcaagactcacatctccaactaccaagctccccaagtgaggaattcctgtcccttttaagggcttacaactctaagggggtccacatgagaggtttgtgatcgattgagcaagcagggggtacacgactgggggctgcatgcagtggtaatcagaacggaacagaacaggacagggattttcacaatgcttttccatacaatgtctggaatccatagataacataaccggtttggtcaggggtcgatctttaaccaggcccagggttggcacctggctgtctgcctgtggatttcatttctgccttttagtttttacttgtttctttggaggcagaaattgggcataaaacaatatgagaggtggtctcctcccttaacagcacaaacgcttaattaacatttctttttcttttgagacaggttctgtcgcccaggctggagtgcagtggtgcagtcatagctcagtgcagcctggaccacctgggctcaagcagtcctgacacctcagcctctcaaaatttgggattacaggcgcgcgccaccgtgcgggtcaggaggcttccctgagggccccggaggtggagctgggcttttccttccgaagcgcccctgggaatctctctctttacggccttggaacctgggaaactacattacccagaaagctctgcgtcaaatgacagcacggcagagccagtgagagttcacattgaaggcgtttccgtgtgcgcaagtaaggtagaggcgggactcccggcgccctttagtagcgaccatttccattggcgttagggagtccttggagcgctgtgttgggaccgtggtggtgactggatccaggaggtcgagagtcgttcttctctttgcacagacgtgactctgcagctctttaacggcgcccgctgctctcaacccagcttaccccacgtggtcccatggcggcggccgcgctaaggttccccgttcaggtaattgtggcgccttccgtgctctccggtcacctcctagtcacacaagtcctaaagcagcgagggagcggcacctgcttacggctctgcaacccggacccggcgtcgggacactgaggcgctctcgggagggatccctgtttcagacacccgtgggatgcggtggggagagcgacaggtacagggaggggcgcgggcaatggcctggagatggacggatccgggaggatggaacctggggtccacaggcgcctgtagggaacaacctgtgaggcggaactcctcctggaaaagcaaggaggctgggggctgtgaaatcattgcgaggacactagaaataggagaatttccaagaaagaagggactggatcaaagtccaggcttttaaagtttcctaaaggccaaataaataacagagtagagaggggatgacgttggggccctttgagattgaatccttgtagatcatataggtggtagagatgacactttgtgctgagacacgcaggttagacaatagtccaaggtcacctggctccgtggacacaaaagcgttcagggaggcctgagcttaccagatcctatcagggacacagtcctgtaaagtcagcctcttccctcaggcctttatggctgtagaagcatttaaggaacgcatacaagaaagtggagggtggggccgggtgcagtggctcactcctgtaatcccagcactttgggaggcctaggcgggttggtccggaggtagagaccagcctgaccaaccatggagaaaccctgtctctactaaaaatacaaaattagccaggcgtggtggcgcatgcctgtaatcccagctacttgggaaactgaggcagcagactcgcttgaacccgggaggcggaggttgcgtgagccgagatcgcgccattgcactccaccctgggtgacagagcgagactccgtatcaaaaaaaaaaaaaaaaaaaaaaaaaaaagaatgaggtgcgttcagagagggtatctctgctgtgctgaaggtgccacattgggctttccatgacctcggccatactaggggaagtgcctgtcaggagggggtggactcttatatcacagccaccgcacagatacctatttgttcaactaactattgttgttggtggctgtaccccatgaccagtgggcctagtttctcctatgtttgaggaccttgagaggaggatgtgcgagagtagatgtgtgggagagatggattgtgatacctcagcataggggtggtttgtggtttcatctgtcaacatcataacagggcacagtgacttttgaagacgtggctgtgaaatttacccaggaggaatggaatctccttagtgaggctcagagatgcctgtaccgtgatgtgacgctggagaacctggcacttatgtcctccctgggttgttggtgtggagtggaagatgaggcggcaccttctaagcagagtatttatatacaaagagagactcaggtcaggactcctatggcaggtgtgtctcccaagaaggcccacccctgtgagatgtgtggcccgatcttgggagacattttgcatgtggcagatcatcagggaacacatcacaagcagaaactgcacaggtgtgaggcctgggggaataaattgtatgacagtggaaactttcatcagcaccagaatgagcacattggagagaaaccctacagagggagtgttgaggaggcgttgtttgcgaagaggtgtaagttgcatgtgtcaggggagtcatctgtcttcagtgagagtgggaaagactttttgctcaggtcaggattactccagcaagaggccactcacactgggaagtcaaacagcaaaactgagtgtgtgtctctgtttcatgggggaaaaagccattacagctgtggaggatgcatgaaacattttagcaccaaagatatactcagtcagcacgagagactgctccctacagaagaaccttctgtgtggtgtgaatgtgggaaatcctctagcaaatatgacagcttcagtaatcatcaaggagttcacactagagaaaaaccttatacgtgtgggatatgtgggaaattatttaacagtaagtcccacctccttgtacaccagagaattcacactggagagaagccatatgagtgtgaggtttgtcagaaattttttaggcacaagtaccacctcattgcacaccagagagttcacactggagaaaggccatatgaatgcagtgattgtgggaagtcatttacccacagctctacattccgtgttcataagagagttcacactggtcagaagccttatgagtgcagtgaatgtgggaaatcttttgccgaaagctccagtctcactaaacacaggagagttcacactggagaaaagccttacgggtgcagtgaatgtgaaaaaaaatttaggcaaatctcttcacttcgtcatcatcagagagttcacaaaagaaagggcttatgagtgcagtgagtccagtctcattaaatattggagaatacacacctgagtaagatcctgtgattgcagcaaatgtggaaaatgtttacccaaaggtctgctctccttggatattggagagttcacactagagaagagtccttacaagtaaaataaatttgggcagttttgtagccacacctctgtattccttcaggattatagttaacactgaatgaaggccttactagtgtgacaaatacaggatatttatccagaagtctggctgcataactcacaggagagctgtcatgtgggaggattgctacatgggaggatttgcttgagcctgggaggcagaggttgcagtgagccgagattgcaacactgcagtccagtctggaccacagagtgagaccctgtttcaaaaataaaatatataaatgacatccaataaagtatgcatatttgagctgtaggataagtcttgaattttctttttcttttttttgagacagcctcgctctgtcacccaggctggagtacagtggcataatctcggctcactgcaagccctgcctcctgggttcatgccattctcctgcctcagcctccctaatagctgggactacaggcaaccaccaccactcctaccttttttgtatttttagtagagatggggtttcaccctgttagccaggaagttctcaatctcctgacctcgtgatctgcccgccttggcctctcaaagtgttgggattgcaggcgtgagccactgctcctggcttgaattttcttataatcccatgaaaccatcatcagagtcacaataatgaatttatctaatctatcacctttgtattcacctggagcctttataaagtttttctctatgcagacaaccattgatttactctgctgtataatactttccattttctagaattttctgactgatgtaataaagtgtttcctcttataatccctgggtgctctcctgcatcatgcttattttgatatcaatgtagacatgagttaatttgttgtatattgctgagaagtatagtctgccatgaaatgtcattatatattcattcatccgtttatggatatttgagttgctgcttgtgtttttttgtgttttttttttgaggtggagtctcactctgtcccccaggctggagtgcagtggggcaatctcaggtcactgcaagctctgccttccgggttcacgccattgtcctgcctcagccagtcctgtggactacaggcgcccgcaaacacgcctggctaattttttgtatttttagtagagacagggtttcactgtgttagccaggatcgtctcgatctcctgaccttgtgatccgcccatctcggcctcccatagtgctagcattacag

SEQ ID NO: 410112 - DNA, 3741 bp, Homo sapiens
cacgctcacaccacacgcacaccacaaaacaaagaacaggtaaaaagggcacacatacacttttaccgtttacaccaaaccagaatcaaaatccaaatcagagtatccagaaatccaagccaggtcaaaaccaaaacgaaagtatcaagcaatccaaatcaagtcaaaaacaaaaaccaaagtgccggtacaggcatgccgtgggtgatcaggccacccttccactcaaatggagtgggcaagttccaaagactagtcttaccaagtttcagatgtccggactccaagtgcctgttccttcccagtgttcagccgctgcattgatcctctgtgggggcctgccacacgccactctggcgaggtgttccactggggcaattgcctacccgggagtgctctcaggttctgcgtccctcaagctggccagagtcccctgtagggatgctccacagggcaggcctaagctgcctaaggggctgcctcgactatctgttaatcacctggcttcccagtcagggaaccaagaaatgtagcaggacaagccgcagggctgtattcagcctggagctttggcaagactcacatctccaactaccaagctccccaagtgaggaattcctgtcccttttaagggcttacaactctaagggggtccacatgagaggtttgtgatcgattgagcaagcagggggtacacgactgggggctgcatgcagtggtaatcagaacggaacagaacaggacagggattttcacaatgcttttccatacaatgtctggaatccatagataacataaccggtttggtcaggggtcgatctttaaccaggcccagggttggcacctggctgtctgcctgtggatttcatttctgccttttagtttttacttgtttctttggaggcagaaattgggcataaaacaatatgagaggtggtctcctcccttaacagcacaaacgcttaattaacatttctttttcttttgagacaggttctgtcgcccaggctggagtgcagtggtgcagtcatagctcagtgcagcctggaccacctgggctcaagcagtcctgacacctcagcctctcaaaatttgggattacaggcgcgcgccaccgtgcgggtcaggaggcttccctgagggccccggaggtggagctgggcttttccttccgaagcgcccctgggaatctctctctttacggccttggaacctgggaaactacattacccagaaagctctgcgtcaaatgacagcacggcagagccagtgagagttcacattgaaggcgtttccgtgtgcgcaagtaaggtagaggcgggactcccggcgccctttagtagcgaccatttccattggcgttagggagtccttggagcgctgtgttgggaccgtggtggtgactggatccaggaggtcgagagtcgttcttctctttgcacagacgtgactctgcagctctttaacggcgcccgctgctctcaacccagcttaccccacgtggtcccatggcggcggccgcgctaaggttccccgttcaggtaattgtggcgccttccgtgctctccggtcacctcctagtcacacaagtcctaaagcagcgagggagcggcacctgcttacggctctgcaacccggacccggcgtcgggacactgaggcgctctcgggagggatccctgtttcagacacccgtgggatgcggtggggagagcgacaggtacagggaggggcgcgggcaatggcctggagatggacggatccgggaggatggaacctggggtccacaggcgcctgtagggaacaacctgtgaggcggaactcctcctggaaaagcaaggaggctgggggctgtgaaatcattgcgaggacactagaaataggagaatttccaagaaagaagggactggatcaaagtccaggcttttaaagtttcctaaaggccaaataaataacagagtagagaggggatgacgttggggccctttgagattgaatccttgtagatcatataggtggtagagatgacactttgtgctgagacacgcaggttagacaatagtccaaggtcacctggctccgtggacacaaaagcgttcagggaggcctgagcttaccagatcctatcagggacacagtcctgtaaagtcagcctcttccctcaggcctttatggctgtagaagcatttaaggaacgcatacaagaaagtggagggtggggccgggtgcagtggctcactcctgtaatcccagcactttgggaggcctaggcgggttggtccggaggtagagaccagcctgaccaaccatggagaaaccctgtctctactaaaaatacaaaattagccaggcgtggtggcgcatgcctgtaatcccagctacttgggaaactgaggcagcagactcgcttgaacccgggaggcggaggttgcgtgagccgagatcgcgccattgcactccaccctgggtgacagagcgagactccgtatcaaaaaaaaaaaaaaaaaaaaaaaaaaaagaatgaggtgcgttcagagagggtatctctgctgtgctgaaggtgccacattgggctttccatgacctcggccatactaggggaagtgcctgtcaggagggggtggactcttatatcacagccaccgcacagatacctatttgttcaactaactattgttgttggtggctgtaccccatgaccagtgggcctagtttctcctatgtttgaggaccttgagaggaggatgtgcgagagtagatgtgtgggagagatggattgtgatacctcagcataggggtggtttgtggtttcatctgtcaacatcataacagggcacagtgacttttgaagacgtggctgtgaaatttacccaggaggaatggaatctccttagtgaggctcagagatgcctgtaccgtgatgtgacgctggagaacctggcacttatgtcctccctgggttgttggtgtggagtggaagatgaggcggcaccttctaagcagatttagtagagatggggtttcaccctgttagccaggaagttctcaatctcctgacctcgtgatctgcccgccttggcctctcaaagtgttgggattgcaggcgtgagccactgctcctggcttgaattttcttataatcccatgaaaccatcatcagagtcacaataatgaatttatctaatctatcacctttgtattcacctggagcctttataaagtttttctctatgcagacaaccattgatttactctgctgtataatactttccattttctagaattttctgactgatgtaataaagtgtttcctcttataatccctgggtgctctcctgcatcatgcttattttgatatcaatgtagacatgagttaatttgttgtatattgctgagaagtatagtctgccatgaaatgtcattatatattcattcatccgtttatggatatttgagttgctgcttgtgtttttttgtgttttttttttgaggtggagtctcactctgtcccccaggctggagtgcagtggggcaatctcaggtcactgcaagctctgccttccgggttcacgccattgtcctgcctcagccagtcctgtggactacaggcgcccgcaaacacgcctggctaattttttgtatttttagtagagacagggtttcactgtgttagccaggatcgtctcgatctcctgaccttgtgatccgcccatctcggcctcccatagtgctagcattacag

SEQ ID NO: 410113 - DNA, 3232 bp, Homo sapiens
cacgctcacaccacacgcacaccacaaaacaaagaacaggtaaaaagggcacacatacacttttaccgtttacaccaaaccagaatcaaaatccaaatcagagtatccagaaatccaagccaggtcaaaaccaaaacgaaagtatcaagcaatccaaatcaagtcaaaaacaaaaaccaaagtgccggtacaggcatgccgtgggtgatcaggccacccttccactcaaatggagtgggcaagttccaaagactagtcttaccaagtttcagatgtccggactccaagtgcctgttccttcccagtgttcagccgctgcattgatcctctgtgggggcctgccacacgccactctggcgaggtgttccactggggcaattgcctacccgggagtgctctcaggttctgcgtccctcaagctggccagagtcccctgtagggatgctccacagggcaggcctaagctgcctaaggggctgcctcgactatctgttaatcacctggcttcccagtcagggaaccaagaaatgtagcaggacaagccgcagggctgtattcagcctggagctttggcaagactcacatctccaactaccaagctccccaagtgaggaattcctgtcccttttaagggcttacaactctaagggggtccacatgagaggtttgtgatcgattgagcaagcagggggtacacgactgggggctgcatgcagtggtaatcagaacggaacagaacaggacagggattttcacaatgcttttccatacaatgtctggaatccatagataacataaccggtttggtcaggggtcgatctttaaccaggcccagggttggcacctggctgtctgcctgtggatttcatttctgccttttagtttttacttgtttctttggaggcagaaattgggcataaaacaatatgagaggtggtctcctcccttaacagcacaaacgcttaattaacatttctttttcttttgagacaggttctgtcgcccaggctggagtgcagtggtgcagtcatagctcagtgcagcctggaccacctgggctcaagcagtcctgacacctcagcctctcaaaatttgggattacaggcgcgcgccaccgtgcgggtcaggaggcttccctgagggccccggaggtggagctgggcttttccttccgaagcgcccctgggaatctctctctttacggccttggaacctgggaaactacattacccagaaagctctgcgtcaaatgacagcacggcagagccagtgagagttcacattgaaggcgtttccgtgtgcgcaagtaaggtagaggcgggactcccggcgccctttagtagcgaccatttccattggcgttagggagtccttggagcgctgtgttgggaccgtggtggtgactggatccaggaggtcgagagtcgttcttctctttgcacagacgtgactctgcagctctttaacggcgcccgctgctctcaacccagcttaccccacgtggtcccatggcggcggccgcgctaaggttccccgttcaggtaattgtggcgccttccgtgctctccggtcacctcctagtcacacaagtcctaaagcagcgagggagcggcacctgcttacggctctgcaacccggacccggcgtcgggacactgaggcgctctcgggagggatccctgtttcagacacccgtgggatgcggtggggagagcgacaggtacagggaggggcgcgggcaatggcctggagatggacggatccgggaggatggaacctggggtccacaggcgcctgtagggaacaacctgtgaggcggaactcctcctggaaaagcaaggaggctgggggctgtgaaatcattgcgaggacactagaaataggagaatttccaagaaagaagggactggatcaaagtccaggcttttaaagtttcctaaaggccaaataaataacagagtagagaggggatgacgttggggccctttgagattgaatccttgtagatcatataggtggtagagatgacactttgtgctgagacacgcaggttagacaatagtccaaggtcacctggctccgtggacacaaaagcgttcagggaggcctgagcttaccagatcctatcagggacacagtcctgtaaagtcagcctcttccctcaggcctttatggctgtagaagcatttaaggaacgcatacaagaaagtggagggtggggccgggtgcagtggctcactcctgtaatcccagcactttgggaggcctaggcgggttggtccggaggtagagaccagcctgaccaaccatggagaaaccctgtctctactaaaaatacaaaattagccaggcgtggtggcgcatgcctgtaatcccagctacttgggaaactgaggcagcagactcgcttgaacccgggaggcggaggttgcgtgagccgagatcgcgccattgcactccaccctgggtgacagagcgagactccgtatcaaaaaaaaaaaaaaaaaaaaaaaaaaaagaatgaggtgcgttcagagagggtatctctgctgtgctgaaggtgccacattgggctttccatgacctcggccatactaggggaagtgcctgtcaggagggggtggactcttatatcacagccaccgcacagatacctatttgttcaactaactattgttgttggtggctgtaccccatgaccagtgggcctagtttctcctatgtttgaggaccttgagaggaggatgtgcgagagtagatgtgtgggagagatggattgtgatacctcagcataggggtggtttgtggtttcatctgtcaacatcataacagggcacagtgacttttgaagacgtggctgtgaaatttacccaggaggaatggaatctccttagtgaggctcagagatgcctgtaccgtgatgtgacgctggagaacctggcacttatgtcctccctgggttgttggtgtggagtggaagatgaggcggcaccttctaagcagatgttgggattgcaggcgtgagccactgctcctggcttgaattttcttataatcccatgaaaccatcatcagagtcacaataatgaatttatctaatctatcacctttgtattcacctggagcctttataaagtttttctctatgcagacaaccattgatttactctgctgtataatactttccattttctagaattttctgactgatgtaataaagtgtttcctcttat

SEQ ID NO: 410114 - DNA, 844 bp, Homo sapiens
  misc_feature (588)..(588): n is a, c, g, or t
agaaatccctattgttgggggggttgaacctcacacaaacctccagtagtaagaaaaatattcagaactccccttttctttcttctcagggaaagaaacagtagctccactcctgccggtccctcccctaggggagagggaagcagaggagaaaacagcagcataggtggctggcaaagacaaaggaaagaccagtagaagagaaagaaaccaaaaacagcaagcgcagagccaaacagccaggcaggtaggccaaaggttaagtccctctccccagccctgcggtttgtgaaaaagagggtgggcaccggctccgggaggagagcagaggaggtgaaaaggcgtaattcttgcaatttgcggcaggcatatctgccaagcctctaggctagtgactgcccggggcccagactgcagccacgcaaatcccactcagcccaagaaactaagtgtaaaaagaaaaggaaaaaaaaaaaagtaagaggggaaatcagggggaaaaaaaagaaaaacagcagcgcggggtcgggggcggggccttgtacgcgtacaaggccccgcaggatggagctgggtcaaggaccaggnagccctgactcccagaggttgccaccggggagaagcagcggtcctccatccagaacctaggggctgaagcaaaggcttgccaggacccttgaagatgcttttggctcacctcatttcaccccacgctctgctggctggcagaggagaaggcagtcgtttcctctctgaagagtatattttccggattgccctctggttagggtgcccatataaatcaggagtaatatatgaccgcgtgtgcatgcccaagtgtgtg

SEQ ID NO: 410115 - DNA, 808 bp, Homo sapiens
atgtcgcgtccggtaacggaggagacaatcatttcattattgctcgatgctcctacttagtgtatactagtttagtagagatggggtttcaccctgttagccaggaagttctcaatctcctgacctcgtgatctgcccgccttggcctctcaaagtgttgggattgcaggcgtgagccactgctcctggcttgaattttcttataatcccatgaaaccatcatcagagtcacaataatgaatttatctaatctatcacctttgtattcacctggagcctttataaagtttttctctatgcagacaaccattgatttactctgctgtataatactttccattttctagaattttctgactgatgtaataaagtgtttcctcttataatccctgggtgctctcctgcatcatgcttattttgatatcaatgtagacatgagttaatttgttgtatattgctgagaagtatagtctgccatgaaatgtcattatatattcattcatccgtttatggatatttgagttgctgcttgtgtttttttgtgttttttttttgaggtggagtctcactctgtcccccaggctggagtgcagtggggcaatctcaggtcactgcaagctctgccttccgggttcacgccattgtcctgcctcagccagtcctgtggactacaggcgcccgcaaacacgcctggctaattttttgtatttttagtagagacagggtttcactgtgttagccaggatcgtctcgatctcctgaccttgtgatccgcccatctcggcctcccatagtgctagcattacag

SEQ ID NO: 410116 - DNA, 3309 bp, Homo sapiens
cacgctcacaccacacgcacaccacaaaacaaagaacaggtaaaaagggcacacatacacttttaccgtttacaccaaaccagaatcaaaatccaaatcagagtatccagaaatccaagccaggtcaaaaccaaaacgaaagtatcaagcaatccaaatcaagtcaaaaacaaaaaccaaagtgccggtacaggcatgccgtgggtgatcaggccacccttccactcaaatggagtgggcaagttccaaagactagtcttaccaagtttcagatgtccggactccaagtgcctgttccttcccagtgttcagccgctgcattgatcctctgtgggggcctgccacacgccactctggcgaggtgttccactggggcaattgcctacccgggagtgctctcaggttctgcgtccctcaagctggccagagtcccctgtagggatgctccacagggcaggcctaagctgcctaaggggctgcctcgactatctgttaatcacctggcttcccagtcagggaaccaagaaatgtagcaggacaagccgcagggctgtattcagcctggagctttggcaagactcacatctccaactaccaagctccccaagtgaggaattcctgtcccttttaagggcttacaactctaagggggtccacatgagaggtttgtgatcgattgagcaagcagggggtacacgactgggggctgcatgcagtggtaatcagaacggaacagaacaggacagggattttcacaatgcttttccatacaatgtctggaatccatagataacataaccggtttggtcaggggtcgatctttaaccaggcccagggttggcacctggctgtctgcctgtggatttcatttctgccttttagtttttacttgtttctttggaggcagaaattgggcataaaacaatatgagaggtggtctcctcccttaacagcacaaacgcttaattaacatttctttttcttttgagacaggttctgtcgcccaggctggagtgcagtggtgcagtcatagctcagtgcagcctggaccacctgggctcaagcagtcctgacacctcagcctctcaaaatttgggattacaggcgcgcgccaccgtgcgggtcaggaggcttccctgagggccccggaggtggagctgggcttttccttccgaagcgcccctgggaatctctctctttacggccttggaacctgggaaactacattacccagaaagctctgcgtcaaatgacagcacggcagagccagtgagagttcacattgaaggcgtttccgtgtgcgcaagtaaggtagaggcgggactcccggcgccctttagtagcgaccatttccattggcgttagggagtccttggagcgctgtgttgggaccgtggtggtgactggatccaggaggtcgagagtcgttcttctctttgcacagacgtgactctgcagctctttaacggcgcccgctgctctcaacccagcttaccccacgtggtcccatggcggcggccgcgctaaggttccccgttcaggtaattgtggcgccttccgtgctctccggtcacctcctagtcacacaagtcctaaagcagcgagggagcggcacctgcttacggctctgcaacccggacccggcgtcgggacactgaggcgctctcgggagggatccctgtttcagacacccgtgggatgcggtggggagagcgacaggtacagggaggggcgcgggcaatggcctggagatggacggatccgggaggatggaacctggggtccacaggcgcctgtagggaacaacctgtgaggcggaactcctcctggaaaagcaaggaggctgggggctgtgaaatcattgcgaggacactagaaataggagaatttccaagaaagaagggactggatcaaagtccaggcttttaaagtttcctaaaggccaaataaataacagagtagagaggggatgacgttggggccctttgagattgaatccttgtagatcatataggtggtagagatgacactttgtgctgagacacgcaggttagacaatagtccaaggtcacctggctccgtggacacaaaagcgttcagggaggcctgagcttaccagatcctatcagggacacagtcctgtaaagtcagcctcttccctcaggcctttatggctgtagaagcatttaaggaacgcatacaagaaagtggagggtggggccgggtgcagtggctcactcctgtaatcccagcactttgggaggcctaggcgggttggtccggaggtagagaccagcctgaccaaccatggagaaaccctgtctctactaaaaatacaaaattagccaggcgtggtggcgcatgcctgtaatcccagctacttgggaaactgaggcagcagactcgcttgaacccgggaggcggaggttgcgtgagccgagatcgcgccattgcactccaccctgggtgacagagcgagactccgtatcaaaaaaaaaaaaaaaaaaaaaaaaaaaagaatgaggtgcgttcagagagggtatctctgctgtgctgaaggtgccacattgggctttccatgacctcggccatactaggggaagtgcctgtcaggagggggtggactcttatatcacagccaccgcacagatacctatttgttcaactaactattgttgttggtggctgtaccccatgaccagtgggcctagtttctcctatgtttgaggaccttgagaggaggatgtgcgagagtagatgtgtgggagagatggattgtgatacctcagcataggggtggtttgtggtttcatctgtcaacatcataacagggcacagtgacttttgaagacgtggctgtgaaatttacccaggaggaatggaatctccttagtgaggctcagagatgcctgtaccgtgatgtgacgctggagaacctggcacttatgtcctccctgggtaagttgcccacactcacccctgtgacctgagctagtctctgtctttccccctctttttctattggcaagactttctcatgtcaggagcatggacacagcttcctacttcagttcttggttggtaggactgaggtatgcatactgccctctccattcttggagcagccccaacacctgctattgagctcccagggaagaattcagagtcagaagtcttacaggcaacttaatgcaggctaccttgtttgtcctgtggatgtttgtgtgatttcatccagatttcaggttcgggatctaattcattctacctgttatttcttcatgcctccctgtgccaggaattgtcttc

SEQ ID NO: 410117 - DNA, 3867 bp, Homo sapiens
cacgctcacaccacacgcacaccacaaaacaaagaacaggtaaaaagggcacacatacacttttaccgtttacaccaaaccagaatcaaaatccaaatcagagtatccagaaatccaagccaggtcaaaaccaaaacgaaagtatcaagcaatccaaatcaagtcaaaaacaaaaaccaaagtgccggtacaggcatgccgtgggtgatcaggccacccttccactcaaatggagtgggcaagttccaaagactagtcttaccaagtttcagatgtccggactccaagtgcctgttccttcccagtgttcagccgctgcattgatcctctgtgggggcctgccacacgccactctggcgaggtgttccactggggcaattgcctacccgggagtgctctcaggttctgcgtccctcaagctggccagagtcccctgtagggatgctccacagggcaggcctaagctgcctaaggggctgcctcgactatctgttaatcacctggcttcccagtcagggaaccaagaaatgtagcaggacaagccgcagggctgtattcagcctggagctttggcaagactcacatctccaactaccaagctccccaagtgaggaattcctgtcccttttaagggcttacaactctaagggggtccacatgagaggtttgtgatcgattgagcaagcagggggtacacgactgggggctgcatgcagtggtaatcagaacggaacagaacaggacagggattttcacaatgcttttccatacaatgtctggaatccatagataacataaccggtttggtcaggggtcgatctttaaccaggcccagggttggcacctggctgtctgcctgtggatttcatttctgccttttagtttttacttgtttctttggaggcagaaattgggcataaaacaatatgagaggtggtctcctcccttaacagcacaaacgcttaattaacatttctttttcttttgagacaggttctgtcgcccaggctggagtgcagtggtgcagtcatagctcagtgcagcctggaccacctgggctcaagcagtcctgacacctcagcctctcaaaatttgggattacaggcgcgcgccaccgtgcgggtcaggaggcttccctgagggccccggaggtggagctgggcttttccttccgaagcgcccctgggaatctctctctttacggccttggaacctgggaaactacattacccagaaagctctgcgtcaaatgacagcacggcagagccagtgagagttcacattgaaggcgtttccgtgtgcgcaagtaaggtagaggcgggactcccggcgccctttagtagcgaccatttccattggcgttagggagtccttggagcgctgtgttgggaccgtggtggtgactggatccaggaggtcgagagtcgttcttctctttgcacagacgtgactctgcagctctttaacggcgcccgctgctctcaacccagcttaccccacgtggtcccatggcggcggccgcgctaaggttccccgttcaggtaattgtggcgccttccgtgctctccggtcacctcctagtcacacaagtcctaaagcagcgagggagcggcacctgcttacggctctgcaacccggacccggcgtcgggacactgaggcgctctcgggagggatccctgtttcagacacccgtgggatgcggtggggagagcgacaggggcacagtgacttttgaagacgtggctgtgaaatttacccaggaggaatggaatctccttagtgaggctcagagatgcctgtaccgtgatgtgacgctggagaacctggcacttatgtcctccctgggttgttggtgtggagtggaagatgaggcggcaccttctaagcagagtatttatatacaaagagagactcaggtcaggactcctatggcaggtgtgtctcccaagaaggcccacccctgtgagatgtgtggcccgatcttgggagacattttgcatgtggcagatcatcagggaacacatcacaagcagaaactgcacaggtgtgaggcctgggggaataaattgtatgacagtggaaactttcatcagcaccagaatgagcacattggagagaaaccctacagagggagtgttgaggaggcgttgtttgcgaagaggtgtaagttgcatgtgtcaggggagtcatctgtcttcagtgagagtgggaaagactttttgctcaggtcaggattactccagcaagaggccactcacactgggaagtcaaacagcaaaactgagtgtgtgtctctgtttcatgggggaaaaagccattacagctgtggaggatgcatgaaacattttagcaccaaagatatactcagtcagcacgagagactgctccctacagaagaaccttctgtgtggtgtgaatgtgggaaatcctctagcaaatatgacagcttcagtaatcatcaaggagttcacactagagaaaaaccttatacgtgtgggatatgtgggaaattatttaacagtaagtcccacctccttgtacaccagagaattcacactggagagaagccatatgagtgtgaggtttgtcagaaattttttaggcacaagtaccacctcattgcacaccagagagttcacactggagaaaggccatatgaatgcagtgattgtgggaagtcatttacccacagctctacattccgtgttcataagagagttcacactggtcagaagccttatgagtgcagtgaatgtgggaaatcttttgccgaaagctccagtctcactaaacacaggagagttcacactggagaaaagccttacgggtgcagtgaatgtgaaaaaaaatttaggcaaatctcttcacttcgtcatcatcagagagttcacaaaagaaagggcttatgagtgcagtgagtccagtctcattaaatattggagaatacacacctgagtaagatcctgtgattgcagcaaatgtggaaaatgtttacccaaaggtctgctctccttggatattggagagttcacactagagaagagtccttacaagtaaaataaatttgggcagttttgtagccacacctctgtattccttcaggattatagttaacactgaatgaaggccttactagtgtgacaaatacaggatatttatccagaagtctggctgcataactcacaggagagctgtcatgtgggaggattgctacatgggaggatttgcttgagcctgggaggcagaggttgcagtgagccgagattgcaacactgcagtccagtctggaccacagagtgagaccctgtttcaaaaataaaatatataaatgacatccaataaagtatgcatatttgagctgtaggataagtcttgaattttctttttcttttttttgagacagcctcgctctgtcacccaggctggagtacagtggcataatctcggctcactgcaagccctgcctcctgggttcatgccattctcctgcctcagcctccctaatagctgggactacaggcaaccaccaccactcctaccttttttgtatttttagtagagatggggtttcaccctgttagccaggaagttctcaatctcctgacctcgtgatctgcccgccttggcctctcaaagtgttgggattgcaggcgtgagccactgctcctggcttgaattttcttataatcccatgaaaccatcatcagagtcacaataatgaatttatctaatctatcacctttgtattcacctggagcctttataaagtttttctctatgcagacaaccattgatttactctgctgtataatactttccattttctagaattttctgactgatgtaataaagtgtttcctcttat

SEQ ID NO: 410118 - DNA, 2346 bp, Homo sapiens
tgcggccgccgccatgggaccacgtggggtaagctgggttgagagcagcgggcgccgttaaagagctgcagagtcacgtctgtgcaaagagaagaacgactctcgacctcctggatccagtcaccaccacggtcccaacacagcgctccaaggactccctaacgccaatggaaatggtcgcgctaaggttccccgttcgggcacagtgacttttgaagacgtggctgtgaaatttacccaggaggaatggaatctccttagtgaggctcagagatgcctgtaccgtgatgtgacgctggagaacctggcacttatgtcctccctgggttgttggtgtggagtggaagatgaggcggcaccttctaagcagagtatttatatacaaagagagactcaggtcaggactcctatggcaggtgtgtctcccaagaaggcccacccctgtgagatgtgtggcccgatcttgggagacattttgcatgtggcagatcatcagggaacacatcacaagcagaaactgcacaggtgtgaggcctgggggaataaattgtatgacagtggaaactttcatcagcaccagaatgagcacattggagagaaaccctacagagggagtgttgaggaggcgttgtttgcgaagaggtgtaagttgcatgtgtcaggggagtcatctgtcttcagtgagagtgggaaagactttttgctcaggtcaggattactccagcaagaggccactcacactgggaagtcaaacagcaaaactgagtgtgtgtctctgtttcatgggggaaaaagccattacagctgtggaggatgcatgaaacattttagcaccaaagatatactcagtcagcacgagagactgctccctacagaagaaccttctgtgtggtgtgaatgtgggaaatcctctagcaaatatgacagcttcagtaatcatcaaggagttcacactagagaaaaaccttatacgtgtgggatatgtgggaaattatttaacagtaagtcccacctccttgtacaccagagaattcacactggagagaagccatatgagtgtgaggtttgtcagaaattttttaggcacaagtaccacctcattgcacaccagagagttcacactggagaaaggccatatgaatgcagtgattgtgggaagtcatttacccacagctctacattccgtgttcataagagagttcacactggtcagaagccttatgagtgcagtgaatgtgggaaatcttttgccgaaagctccagtctcactaaacacaggagagttcacactggagaaaagccttacgggtgcagtgaatgtgaaaaaaaatttaggcaaatctcttcacttcgtcatcatcagagagttcacaaaagaaagggcttatgagtgcagtgagtccagtctcattaaatattggagaatacacacctgagtaagatcctgtgattgcagcaaatgtggaaaatgtttacccaaaggtctgctctccttggatattggagagttcacactagagaagagtccttacaagtaaaataaatttgggcagttttgtagccacacctctgtattccttcaggattatagttaacactgaatgaaggccttactagtgtgacaaatacaggatatttatccagaagtctggctgcataactcacaggagagctgtcatgtgggaggattgctacatgggaggatttgcttgagcctgggaggcagaggttgcagtgagccgagattgcaacactgcagtccagtctggaccacagagtgagaccctgtttcaaaaataaaatatataaatgacatccaataaagtatgcatatttgagctgtaggataagtcttgaattttctttttcttttttttgagacagcctcgctctgtcacccaggctggagtacagtggcataatctcggctcactgcaagccctgcctcctgggttcatgccattctcctgcctcagcctccctaatagctgggactacaggcaaccaccaccactcctaccttttttgtatttttagtagagatggggtttcaccctgttagccaggaagttctcaatctcctgacctcgtgatctgcccgccttggcctctcaaagtgttgggattgcaggcgtgagccactgctcctggcttgaattttcttataatcccatgaaaccatcatcagagtcacaataatgaatttatctaatctatcacctttgtattcacctggagcctttataaagtttttctctatgcagacaaccattgatttactctgctgtataatactttccattttctagaattttctgactgatgtaataaagtgtttcctcttat

SEQ ID NO: 410119 - DNA, 3713 bp, Homo sapiens
  misc_feature (3457)..(3457): n is a, c, g, or t
cacgctcacaccacacgcacaccacaaaacaaagaacaggtaaaaagggcacacatacacttttaccgtttacaccaaaccagaatcaaaatccaaatcagagtatccagaaatccaagccaggtcaaaaccaaaacgaaagtatcaagcaatccaaatcaagtcaaaaacaaaaaccaaagtgccggtacaggcatgccgtgggtgatcaggccacccttccactcaaatggagtgggcaagttccaaagactagtcttaccaagtttcagatgtccggactccaagtgcctgttccttcccagtgttcagccgctgcattgatcctctgtgggggcctgccacacgccactctggcgaggtgttccactggggcaattgcctacccgggagtgctctcaggttctgcgtccctcaagctggccagagtcccctgtagggatgctccacagggcaggcctaagctgcctaaggggctgcctcgactatctgttaatcacctggcttcccagtcagggaaccaagaaatgtagcaggacaagccgcagggctgtattcagcctggagctttggcaagactcacatctccaactaccaagctccccaagtgaggaattcctgtcccttttaagggcttacaactctaagggggtccacatgagaggtttgtgatcgattgagcaagcagggggtacacgactgggggctgcatgcagtggtaatcagaacggaacagaacaggacagggattttcacaatgcttttccatacaatgtctggaatccatagataacataaccggtttggtcaggggtcgatctttaaccaggcccagggttggcacctggctgtctgcctgtggatttcatttctgccttttagtttttacttgtttctttggaggcagaaattgggcataaaacaatatgagaggtggtctcctcccttaacagcacaaacgcttaattaacatttctttttcttttgagacaggttctgtcgcccaggctggagtgcagtggtgcagtcatagctcagtgcagcctggaccacctgggctcaagcagtcctgacacctcagcctctcaaaatttgggattacaggcgcgcgccaccgtgcgggtcaggaggcttccctgagggccccggaggtggagctgggcttttccttccgaagcgcccctgggaatctctctctttacggccttggaacctgggaaactacattacccagaaagctctgcgtcaaatgacagcacggcagagccagtgagagttcacattgaaggcgtttccgtgtgcgcaagtaaggtagaggcgggactcccggcgccctttagtagcgaccatttccattggcgttagggagtccttggagcgctgtgttgggaccgtggtggtgactggatccaggaggtcgagagtcgttcttctctttgcacagacgtgactctgcagctctttaacggcgcccgctgctctcaacccagcttaccccacgtggtcccatggcggcggccgcgctaaggttccccgttcaggtaattgtggcgccttccgtgctctccggtcacctcctagtcacacaagtcctaaagcagcgagggagcggcacctgcttacggctctgcaacccggacccggcgtcgggacactgaggcgctctcgggagggatccctgtttcagacacccgtgggatgcggtggggagagcgacaggtacagggaggggcgcgggcaatggcctggagatggacggatccgggaggatggaacctggggtccacaggcgcctgtagggaacaacctgtgaggcggaactcctcctggaaaagcaaggaggctgggggctgtgaaatcattgcgaggacactagaaataggagaatttccaagaaagaagggactggatcaaagtccaggcttttaaagtttcctaaaggccaaataaataacagagtagagaggggatgacgttggggccctttgagattgaatccttgtagatcatataggtggtagagatgacactttgtgctgagacacgcaggttagacaatagtccaaggtcacctggctccgtggacacaaaagcgttcagggaggcctgagcttaccagatcctatcagggacacagtcctgtaaagtcagcctcttccctcaggcctttatggctgtagaagcatttaaggaacgcatacaagaaagtggagggtggggccgggtgcagtggctcactcctgtaatcccagcactttgggaggcctaggcgggttggtccggaggtagagaccagcctgaccaaccatggagaaaccctgtctctactaaaaatacaaaattagccaggcgtggtggcgcatgcctgtaatcccagctacttgggaaactgaggcagcagactcgcttgaacccgggaggcggaggttgcgtgagccgagatcgcgccattgcactccaccctgggtgacagagcgagactccgtatcaaaaaaaaaaaaaaaaaaaaaaaaaaaagaatgaggtgcgttcagagagggtatctctgctgtgctgaaggtgccacattgggctttccatgacctcggccatactaggggaagtgcctgtcaggagggggtggactcttatatcacagccaccgcacagatacctatttgttcaactaactattgttgttggtggctgtaccccatgaccagtgggcctagtttctcctatgtttgaggaccttgagaggaggatgtgcgagagtagatgtgtgggagagatggattgtgatacctcagcataggggtggtttgtggtttcatctgtcaacatcataacagggcacagtgacttttgaagacgtggctgtgaaatttacccaggaggaatggaatctccttagtgaggctcagagatgcctgtaccgtgatgtgacgctggagaacctggcacttatgtcctccctggggaaagaaacagtagctccactcctgccggtccctcccctaggggagagggaagcagaggagaaaacagcagcataggtggctggcaaagacaaaggaaagaccagtagaagagaaagaaaccaaaaacagcaagcgcagagccaaacagccaggcaggtaggccaaaggttaagtccctctccccagccctgcggtttgtgaaaaagagggtgggcaccggctccgggaggagagcagaggaggtgaaaaggcgtaattcttgcaatttgcggcaggcatatctgccaagcctctaggctagtgactgcccggggcccagactgcagccacgcaaatcccactcagcccaagaaactaagtgtaaaaagaaaaggaaaaaaaaaaaagtaagaggggaaatcagggggaaaaaaaagaaaaacagcagcgcggggtcgggggcggggccttgtacgcgtacaaggccccgcaggatggagctgggtcaaggaccaggnagccctgactcccagaggttgccaccggggagaagcagcggtcctccatccagaacctaggggctgaagcaaaggcttgccaggacccttgaagatgcttttggctcacctcatttcaccccacgctctgctggctggcagaggagaaggcagtcgtttcctctctgaagagtatattttccggattgccctctggttagggtgcccatataaatcaggagtaatatatgaccgcgtgtgcatgcccaagtgtgtg

SEQ ID NO: 410120 - DNA, 2389 bp, Homo sapiens
cacgctcacaccacacgcacaccacaaaacaaagaacaggtaaaaagggcacacatacacttttaccgtttacaccaaaccagaatcaaaatccaaatcagagtatccagaaatccaagccaggtcaaaaccaaaacgaaagtatcaagcaatccaaatcaagtcaaaaacaaaaaccaaagtgccggtacaggcatgccgtgggtgatcaggccacccttccactcaaatggagtgggcaagttccaaagactagtcttaccaagtttcagatgtccggactccaagtgcctgttccttcccagtgttcagccgctgcattgatcctctgtgggggcctgccacacgccactctggcgaggtgttccactggggcaattgcctacccgggagtgctctcaggttctgcgtccctcaagctggccagagtcccctgtagggatgctccacagggcaggcctaagctgcctaaggggctgcctcgactatctgttaatcacctggcttcccagtcagggaaccaagaaatgtagcaggacaagccgcagggctgtattcagcctggagctttggcaagactcacatctccaactaccaagctccccaagtgaggaattcctgtcccttttaagggcttacaactctaagggggtccacatgagaggtttgtgatcgattgagcaagcagggggtacacgactgggggctgcatgcagtggtaatcagaacggaacagaacaggacagggattttcacaatgcttttccatacaatgtctggaatccatagataacataaccggtttggtcaggggtcgatctttaaccaggcccagggttggcacctggctgtctgcctgtggatttcatttctgccttttagtttttacttgtttctttggaggcagaaattgggcataaaacaatatgagaggtggtctcctcccttaacagcacaaacgcttaattaacatttctttttcttttgagacaggttctgtcgcccaggctggagtgcagtggtgcagtcatagctcagtgcagcctggaccacctgggctcaagcagtcctgacacctcagcctctcaaaatttgggattacaggcgcgcgccaccgtgcgggtcaggaggcttccctgagggccccggaggtggagctgggcttttccttccgaagcgcccctgggaatctctctctttacggccttggaacctgggaaactacattacccagaaagctctgcgtcaaatgacagcacggcagagccagtgagagttcacattgaaggcgtttccgtgtgcgcaagtaaggtagaggcgggactcccggcgccctttagtagcgaccatttccattggcgttagggagtccttggagcgctgtgttgggaccgtggtggtgactggatccaggaggtcgagagtcgttcttctctttgcacagacgtgactctgcagctctttaacggcgcccgctgctctcaacccagcttaccccacgtggtcccatggcggcggccgcgctaaggttccccgttcaggggcacagtgacttttgaagacgtggctgtgaaatttacccaggaggaatggaatctccctaatagctgggactacaggcaaccaccaccactcctaccttttttgtatttttagtagagatggggtttcaccctgttagccaggaagttctcaatctcctgacctcgtgatctgcccgccttggcctctcaaagtgttgggattgcaggcgtgagccactgctcctggcttgaattttcttataatcccatgaaaccatcatcagagtcacaataatgaatttatctaatctatcacctttgtattcacctggagcctttataaagtttttctctatgcagacaaccattgatttactctgctgtataatactttccattttctagaattttctgactgatgtaataaagtgtttcctcttataatccctgggtgctctcctgcatcatgcttattttgatatcaatgtagacatgagttaatttgttgtatattgctgagaagtatagtctgccatgaaatgtcattatatattcattcatccgtttatggatatttgagttgctgcttgtgtttttttgtgttttttttttgaggtggagtctcactctgtcccccaggctggagtgcagtggggcaatctcaggtcactgcaagctctgccttccgggttcacgccattgtcctgcctcagccagtcctgtggactacaggcgcccgcaaacacgcctggctaattttttgtatttttagtagagacagggtttcactgtgttagccaggatcgtctcgatctcctgaccttgtgatccgcccatctcggcctcccatagtgctagcattacag

SEQ ID NO: 410121 - DNA, 431 bp, Homo sapiens
gagtaatagtcaaaaggtatcccatgccctaaaaacatcaattgcgtcctgtacagaagggcaacaaagtgaaagtgtgactctcagcagtcatttaataattttattagacagtggtaaatgttctgaaatcatggagaaatctaaaataatttatcctccacttaaaaaaaacctctaaaaagaaaaggaaaagtggccaataagataaaaattgattgtaaaccaacttgtaggacaaatgagccaattcaaatatttagtgtagtctaggtccagggagtgaaagtgaccaaaattcatataacttaccctttcagaggaaacagttttgggtacctttgactttggcatttgtatcagtacctaagacaggggtcaaagctttaagaacaagcatattacgaatggatgtatagactcttttggaa

SEQ ID NO: 410122 - DNA, 270 bp, Homo sapiens
cagcgggggagttggttacagctgcagaatcccggccccaccccgcctccagagcacgagcctgcgctagaaggatatcaccaggggatgggggggaatgcgaggggggcggggaggtggtcacggatgcagaggctgtcctggctgctgaggcaaaaagcccgtcccaagccctgcatgggctcctactgcacttcaggatttgggggaatgcagaatcgtggtctttgagttttcattaattcaataaagatttctcaaaagcctaaa

SEQ ID NO: 410123 - DNA, 837 bp, Homo sapiens
ccatatactaatatatgggatagaaacctaagaatagtatcattaaattgcatgatatattcatatttatcagttttaagaaaaggccaaactattttccaaagcggtgatactattttatatttccatcagcattgtaaagggccctcatttagccacatcttcatggacatattttatcactggtcatttttattatagttattctagtgtgtgttaagtggcttctcattgtggttttaatttgcatttcactaatgactaatgattctgataatcttttcatctgtttatgcccattcacatattttctttggtgaaatgtgtactcaaatcttttgcctgttatcttatttattaacaaattattaattataaattgataaattatagttgtcttatttattgggtacaaagtgatgttatgatttatgaattcaatgtggaataattagatcatggtaattcacacaccaatcacctaaaatcattatttttttgtcttgagaatggttgaaatgtattcttttggcaatttcaaaatgtataatacattttttactatattcaccatgctgtgcagtatatcttaaagaaaccttattctcctgtccagttgaggctttgtactgtttgaccatgatatccttatccctttaccatccccaggctctggtaaccactgttctactctctgcttatttgagtttgattgttttagattccacaaataagtgaaacatgtaatatttgcagcaacaaagatggaattggagaacattaggctaagtgaaataagcctgccacagaaagacaaatgtcgacgcggccgcgaat

SEQ ID NO: 410124 - DNA, 976 bp, Homo sapiens
tgcggccgctaggtggaaggggacttcggttccgcacgtcgtcatgttgttggatggcaccagtatgtgacgttcctaggaacttagctctgaggaaaaaacaaagcaaaccggggaagtacgtagccttgaaccggagtaaccagggacagaaaggaaggaaaagggtttcataccttcacggaacgacgctcacttcgtccgcctgaggaggaaaaataagtttaaacctttctgtgaaaaagaacgtggagccctttctgccgaatggaaacccgctaaaccccgttatggagtctgctacaattaagcatctaaccaggaattgtctatggacacaactctccaggcaattcatgcagaaagtgtgttgacgatttcctgtttcttgcagagcgcttcaccgttaaggctcttagtagctggcgattgtaaagcacattttccgcttcatgaaaatacagtgctcttcttgtgtttgtaaccttggaaagtaagtctgctatgataagtttagggaagtggcggggagctactttcctaacatatctgtgattgttttgatacttctcagtttctcgcgggcatttcctgcgttctctatagggctctcttgcactgaataaggaaaggaggaattctctctgcattgaggctattatcgcacattgtgcggtggatatagtcacgcgctgggtcgtagtagcgtgtcgtttatttcagtccagctcactcttggtagaatccctttattcgttttgttgtttttgatagtctctctctgcttcccaggctagagtgcaatggcgctatctcgactcactgtagcctccgccttgagggctcaagcgatcctctcacctcagcctcccgagtagctgggaccgtagacgcctgctccccatccccgctatattcgttctttaatacagtctctcagcttgttcagctgccacttctgtgcagctcattagcc

SEQ ID NO: 410125 - DNA, 516 bp, Homo sapiens
caagtgaaaggcctgtgggggtcagtgaaggggagccccctgttctgagaccgtgtgggaccccgcgtcctggggttctttctgggtttactcaatggagaagcctggctttggtgatagggcgcctggcggtcagtaattaagagactggaagatattaacgaccgactgtcaaggtttatggtcgttgagggaatgccgtgggaatcagtggttgagaaacggggtaggaaagtgtgtatcagtgaatgaacttggtgtccattccgggtttgcaatttaatgtgatagagaagcttggggctggagaatgttttagtgaaagaggttttagtttgcggtttcagatttaatttggagtcaatgtttgaggaggcctgtacatgtctgtggtttaggggcctgaagaggctggagctttggaggcccaagggccctggagagtggatgggttgaggcttaataattgactgctggttacagttgtgattaaactacatttacctagtgaatcta

SEQ ID NO: 410126 - DNA, 800 bp, Homo sapiens
ccagtgtgcccttgccattgctccatctgcaagactcacccttctatagaagtaaatttgccttgctggagtgttaacttgttgttggagtgctaactcttctttgtggcaccaaaaagttatttccaacacgaagctgcacccttggtggagggaacatctgacgaagttcaatgtttggggaaaacaatatctggaaagattgaagagtcagcaggagaaacacctaggaaaattacaaggcctgtgaaagaaacatctgagaaatttgcatggccacaagaaagacctacaaagaccacatgggaggaaaaagaaacatctgtaaagactgaatgcgtggcaggagtaacatctaataaaactgaagttttggaagaaggaacatctaagatgatcacatgtcctacaaaaaaacagctacaaaagcaagtacacatggacaagaagaaccaagaaagtcctgaagaagaacagagctcaagaatgtataccatcagatgtctccaactttattacaattaaaataagatggtattagcaggacatacaaatagagaaacaaaaaacaaactcatacttacaccatcacctgatttatgacaagggtgaaactgcagtgcagtgaggaaataataatcttctcaataaatggtggtagataatttagatatcaatatgggagaataaaagactttaacccttgtcttgtgtcacaaacaaaagtcaatcgtaggtgggttataaagctcaatctgaaatgttaaaaattttaaaaaaaagcttctgtaacatagaag

SEQ ID NO: 410127 - DNA, 713 bp, Homo sapiens
agttctaatttgtacatgtacaaattagagtacaccatggaatgttatgcagccataaaaaatcatgagttcatgttctttgcagggacatggatgaaactagaagccatcattgtcagcaaactaacacaggaacagaacaccaaacagtgcatgttctcactcataaatgggagttgaacaatgagaacacatggacacatggaggggaacatcacacacagaggcctgtcaggggttggaggggaagaggagggagagcattagacaaatacctcatgtatgtggggcttaaaacttagattacaggttgatagatggagcgaaccaccacagcacatgtatacctatgtaacaaacctgtacattctgcacatgtatcccagaaagagctcaagaatgtataccatcagatgtctccaactttattacaattaaaataagatggtattagcaggacatacaaatagagaaacaaaaaacaaactcatacttacaccatcacctgatttatgacaagggtgaaactgcagtgcagtgaggaaataataatcttctcaataaatggtggtagataatttagatatcaatatgggagaataaaagactttaacccttgtcttgtgtcacaaacaaaagtcaatcgtaggtgggttataaagctcaatctgaaatgttaaaaattttaaaaaaaagcttctgtaacatagaag

SEQ ID NO: 410128 - DNA, 641 bp, Homo sapiens
ccagtgtgcccttgccattgctccatctgcaagactcacccttctatagaagtaaatttgccttgctggagtgttaacttgttgttggagtgctaactcttctttgtggcaccaaaaagttatttccaacacgaagctgcacccttggtggagggaacatctgacgaagttcaatgtttggggaaaacaatatctggaaagattgaagagtcagcaggagaaacacctaggaaaattacaaggcctgtgaaagaaacatctgagaaatttgcatggccacaagaaagacctacaaagaccacatgggaggaaaaagaaacatctgtaaagactgaatgcgtggcaggagtaacatctaataaaactgaagttttggaagaaggaacatctaagatgatcacatgtcctacaaaaaaacagctacaaaagcaagtacacatggaaggatgcattagtctttcacctgttcagtatgatgttggctgaggatttgtctcatatggctgttattattttgagatgccacaatttctgctacagcaatggggatatgggccacactaacttgtccctactaaatccaaccattggaatggacctccctttggaataaagtttgaactcaactctcatgaatgtat

SEQ ID NO: 410129 - DNA, 520 bp, Homo sapiens
agttctaatttgtacatgtacaaattagagtacaccatggaatgttatgcagccataaaaaatcatgagttcatgttctttgcagggacatggatgaaactagaagccatcattgtcagcaaactaacacaggaacagaacaccaaacagtgcatgttctcactcataaatgggagttgaacaatgagaacacatggacacatggaggggaacatcacacacagaggcctgtcaggggttggaggggaagaggagggagagcattagacaaatacctcatgtatgtggggcttaaaacttagattacaggttgatagatggagcgaaccaccacagcacatgtatacctatgtaacaaacctgtacattctgcacatgtatcccagaacttaaagtaaaatttttaaaacagatataaatattgtatacataaaaaagacacacaatgtttatgaatagaaagattttatattgtaaataagtcatttctactcattaaattatggttgaatgcaatcct

SEQ ID NO: 410130 - DNA, 566 bp, Homo sapiens
attcgcggccgcgtcgaccttgacaatcttgtggtttccacaagcaaccctctgtgggtgatttccagaaagacactggagagacaggagaactggtaaggtcatcttcttctacattcagcagagagggtcacggtttcaacagacatcgatgaacaaccaccatctttcccgtgagaagagaaactaccagcattttgcagatgatgaaacagactcaggaagagggggaggtggccaaagtgtttgccacttagaaagtggcaatgtcaggattcaaacacagatcccagggagttccaggcaccacatggcactgaccctagggagggagttccaggaaataccagaggaggagggggagaagttggcaggaacaggaggggtcaatggagccaatactggagtctgggaaagtattagttggcgcaaaagtaattgcagtttttgccattgaaagtaatgtctaaaatagcaattacttttgcaccaacctaatacagtgctcttgagaactaagaggtcacaagcaacctttgaaagaacagcatcaacagagttgagga

SEQ ID NO: 410131 - DNA, 424 bp, Homo sapiens
atcaggagatccaagtcgccactgttttatctccaactgggtttcagggcagggtcaacttgagaaattaggtaccatcccagttttggaacacccgggaatatcatgaagatcaagctacacactttaattcacaccaaattaccaaggtatagcaggaatttgtaacctttgaaaagatagtcctttctctttcacaccccacttagggctgagagggctgccagtgagggtgagctgggaggtctgcaaagacaactaactagtaccgagggagagcgtatgtcaagcctcagctctaacgtactagtcagcagtttccagctgacacaacctgccatttgacaagatcaatagctgtgttttccacaacacagagaactctttaggatacactctacagagattttctgtcttctctgaa

SEQ ID NO: 410132 - DNA, 188 bp, Homo sapiens
gaaatatggggtcattgctagcgggtatgaggtttctttttagggtaatgaaaatgttcagaaattaaagtgtttctaatatatattctcaaatgtatatataatctatacacacatatagtctgtgactactgaattgaatacatttatggcgtgtgaatgtaatttttaaaaagtgactacacttg

SEQ ID NO: 410133 - DNA, 852 bp, Homo sapiens
atcagaggtgcttattgtgtgtcaggcaccagacattgatttttctttttagacattgattttatattaactattagtttccatgttactttaccttgaattgggtcagtagatgagaaattttcctggggagacacactcttcagaaaaggtctaatttagggaggtgttttgaataagattaatttcccaaatttcaacaaaactttgtccaagaacatcatacaaagtgtctaccctacgcttttattccaatcatcaaatcctttagagagattccaaggattatgtttcactgagactgattttatttgctaatgccaattttgggattcaatcaatttaaattagaaatctggaagggcccttcaggattggagactagattggtttctagctagacactcccacctttgcagtttcagggtaaactttctttcccaagaaataaaagcatgtattaagaatgctgcttctgccaagactctgtgtagacccagccaccattgccagatagtctgaaaaagtataaaaaaattagccgcccctcagtgtgtggtcatgaagcagggccaggggcactctttaggtatacagcataaagtatgtcatagatagtaaatactggagtttagaatccatttgtaaagaactgtcagcttgagtgtattaaggcacaaaagcaacttctgaaacacaggcttgatatttgttgctggggctctgaatcattttggagtaccaggacacttagcaataggtgggattattttttcagggaaaataatggtgttccattcttagggtcatagatgactagaaaaagaaaggtccaaggcttagaagaaagat

SEQ ID NO: 410134 - DNA, 362 bp, Homo sapiens
ccccgatcacgaggacgtccatcccgtcgagaaccagtccgtgatgtgggaaggcgtcgaccagaagattatgatattcataacagcagaaagaaaccaaggattgactatccccctgagtttcaccagagaccagggtatttaaaggatccacgataccaggaagtggacagacgattttcaggagttcgccgagatgtgtttttaaatgggtcctacaatgattatgtgagggaatttcataacatgggaccaccaccaccttggcaaggaatgccccttacccaggaatggaacaacctccacaccatccttactatcagcaccatgctccacctcctcaagctcatcccccgtcgacc

SEQ ID NO: 410135 - DNA, 710 bp, Homo sapiens
atcttaagatgttgctttgttggtcaaaatccgattttaaaagttgagactggtgcagtggttttgggaattaacacatggtaaacagctctgttcccagcccccaattctccatgactccgcgtgggggtagctggtgttgtagcgcatgtttgaggacgtggatgtggcaacgggaagcgtgcttcacatggggtgggtccacagagcctagcatggttggctgggtggtgcttcttcagaaaaatctgcgcccactccttaacctcttcatgttttactcatactctgctattgtgggtttaggtttggcaataatgctgctacttacattgagaacctaatagggaaaaaagactgggctttgtagttgcaacgattgctgggaagatgcaacaagtttttctagcttcttattatggtttactgtgatccattctcttaaaactattctttcttataatcctctctctctctccttaacagatgaggagttgatcatgccactgccctgctcacaatccctgagtggcttctgttgtggttagagtaaatacatactcctccccgtggctcagagtcattggtgtctgtcccctgcctgccatgtaaacctcctttctcgttgtgactccatgcacaagggcctcccagtgtttttcaagcttccaactttgtctgtctcaggctctgtacagatgttcttcctt

SEQ ID NO: 410136 - DNA, 1332 bp, Homo sapiens
aaaggttgccattgagcctaaaacgtcagcgatagatggcaactccattagatcggacgcatcatcaagttagctcgagtcacgtaaaaacgcacaaaagacattagatagcaacaacaagtactgtcccgaacctgcacatgtgagccatccgcatagcaatggtccaccgtgcgactgactaaagactgcgatcatgaaaagaaatcgaatcacccacctttcttggtgggtaccctgactgcgccttacggtatcccgtggacatctcttttgaagtggtgggaaggagaactaaatctcatgggctcctgagactgtgtcctagaactttcagaggtcaatgtaccccaactgaaaaactgtttttgaaaatggctttaaaaaaaaacgatcttcaaaataaagacacacacaaaaaagattctattttgcttgaatttgagcagctctatggtcccagattgaaaacactactggaacagagagaacactggtctgaagtcagggagtctttattctcaattctgccaccaagctcagtagtcacctgaaaaaaaaaatcaattcatttctccaggcctcttttctctaagggtgctccactttcccactaaacaacactgtcctaagcattcacaaatcatccttttaataacccattctagaattctgcccacaagtagcataaagctcctagtctacagtttttaagcccacattcctcactctcgaaaatcagaatgtcatttacctgtcttcataattccaacaatttctcactcttcaaaattccataaaaataaaaattaacaatgaattatccctgggttctttcagtgtcctggaacagaatgcttctggatcaaaaatccaaaacccattttgaacaactaaacaatcttttacaatccattcaactttcgcaagctttaatttaatgttactaatgttttttctggcctgttcaaaataaatattcctgcctttcatttattgactttacgagtacttgtcaaggacctactgtgtatgacaacacactaggaatacggatgagctgtaaaaaagatatgtaaatgctgtccttgcttgcaaaaggctgacactagcaataagtgaaagacaataaactagcatataactaagcaggacaatttcaggtagtaaagaatgatataacaataaagctatatttgagagcaatatcatgctccagatactcttctaaatagtaactagtttaatcctcttaacaactctacgaagtatgtacctctttcattaaccccacctttatacatgagaaaatagagaaaaagaacagtcagt

SEQ ID NO: 410137 - DNA, 458 bp, Homo sapiens
aaggggtttgatttttctgccttgcaatatccagtaagaaacctcttgggggaagagaggtaaaaagatcagcacgacactggattgccagtctcacatcatctgcatcaacattaggtttcttagcatggctcgaataaatttttgcatcatccagaattgtagtcacatttcggaaagcaaattccaaaatttgatttataacctttggtttgtagtctgtgattcccatatccttcgagatctgtgccatcaccaaggcatccctaggagcgttcttgggaagtgccatcttgcccaattccatgttatccagccactcgttatccggagagagagcctattggtagtctttaacttagttggtcatttcatggtttttctcctgctgcaagtggttcaagtgctgacccagttgctcgtatcaaaaaaaaaaaagtcgacgcgtcatctctaat

SEQ ID NO: 410138 - DNA, 330 bp, Homo sapiens
tgtaagggaagagatttggctttaaacagaaggaaggacctttgttgcagtccggaaggataaaagcagatgaagataactttttaagtggaggacaggaaactgacataatcatatctgatgaatttaatattctcaataaaacaggagacaagaccttctgcttaaatgaggggatgggattggatagcaaacttaaagagaagagtaaagtcttagaacagcttaaagggagtgagatggaaaggtaaataagaggactgttgaacaaccttgaaagcacacctgcagttgaagactgtacatctgttacatttttctggaaaaccc

SEQ ID NO: 410139 - DNA, 294 bp, Homo sapiens
ggtatcaaagaagaactaaataaatgaagagataatccatgttcatgaagaggagaactcaatattgtcaagatgtcagtgcgtcccagcttgttctaatgcaattccaatcaaaatcccaggaagttattttgtggatatcaacaaagtaatttgaaacttcctatgaaaaaacaaacgactcagaatagcaaacccaatatcgaagggaaagaatagagcaagaggactgaaatcacttgagttcaagacttactatgaagccacagtgatcaagacaatgtggtattggcc

SEQ ID NO: 410140 - DNA, 274 bp, Homo sapiens
acaacaataacaaatagtccaggaacaacaagcccctctccgatttatttataataaaaagcaccctagaaatattttcacaatgagcaaaagcttttatatagcatattatgttaaaaatggtatttttacataactggcagaaagatgaatcaaatgaatcaaattttaaaattttttaagtaaaacataggttttattatttttttaatcctgtatttctcccaggacactggcagatactagtaatctgaaattttacctaatcttcaaa

SEQ ID NO: 410141 - DNA, 477 bp, Homo sapiens
acttgctagttatgttactaacctcactgtgcctcagttttgtcacctattaaatggaaagaaaaatagtacctacctcattgggttaccagaatgaaatgatctttgggggataacagtaaccaccatgagttagtgcttttgagcaccatagtttcattcttaagtttcattcaaaaccctgcaattctaagacatcactgatgattacattttttttggtgtgaaagtcaagtctaattgtttctggagaacattgtgtcccactgtttggttttggatttatcccttgcagactgagaggtttttgttttgtctgtttatcttcttaatgtagtgtttagaaatttaatggagcaatttagtttccatttactgaagtagattatcaaaggaaacaggaacactaaagactaggttagcatcccagagtattgcctcacatatgatgtgatttttcatgttttcctgacaaaa

SEQ ID NO: 410142 - DNA, 229 bp, Homo sapiens
atcagagatgtctctatatatttatatatagagagaaatatgttatagatattggcatatagatataaacaacttatagagatatattggtatagatagctatatctatagatacagatatctagagagagagaaagcacacttttggagaaaatggaaacaatgtaattcgtgtgcaagactttatacagataagaaataggttttttaaattaacctccttagggtc

SEQ ID NO: 410143 - DNA, 225 bp, Homo sapiens
tcatccccaaactctcaaccaaagaggcaaattgcctctcaatactttcagaagcatcttctacacaggttccatcttcttggagacaaatctctcctgggagctgcctgttctccaactcccatctggacaggctgccctctgggcctgcaatgtggctggcatcctaggactggcaggcagcaatatcctgtgcacccctcagcattctctcctgtgtttgag

SEQ ID NO: 410144 - DNA, 370 bp, Homo sapiens
gtcttcaagatccttggccatgtgaccccgtcctgctatcccaatcccattcccattcccatccccagcctccccacctcatccaactccagccacattggatcaccccaggagaggatgtcatgtattagtactctggtgcctttgagtcaaaactcactgttttgccagttcagaggttgagccctttttgaagaatcccctcttcttccacagcccaggtaagttctaccccaggcataatgagctgttatccccctgggatctgagggcattcagaataccaacacaatgctctccagatacctctatgctattcaaatccatgcatctcacacctgctcatcttaaaatctctgtgcctcacatg

SEQ ID NO: 410145 - DNA, 320 bp, Homo sapiens
ctctgcctcctgggttcaagcaattctcatgcttcagccacccaagtagctgggattacaggcatgcgccaccatgcccagctaatttttctatttttagtagagatggggttttgccatgttggccaggctggtcttgaaccaggttggccagaaggcctcaagtgatctgcccgccttggcctcccagagtgctgggattacaggtgtgagccactgtgccctgccagatgtccatacttaatattgtactccttgattctcttaagatgtccaggcagaacctgcttcctgctattgctctgaggcaataggtcagt

SEQ ID NO: 410146 - DNA, 353 bp, Homo sapiens
agtcgactgaaaagctagaaagagaaaaagagaatatggttaaatgcctttgcactatattcagaaggaattggcctaaaacagagcctatatggaaggagaacaaagttgggagactggcactatccaacttcaagacaaagctacagtaatcaaggcagtttggcactggcaaaaaaataaacaaataggcctacgggacagaatagagagctccaaaatagatccacataaatatagtcaactgatctttgacaaactagcaaaggcaaaacaatggagaaaagctagtcttcccaacaaatggtactggaacaactcaacatccacatggcaaatagtgaatgtcgacg

SEQ ID NO: 410147 - DNA, 187 bp, Homo sapiens
tactaaagtggaagctaaaaagtctaaatgattcaacatatattttaaggaacagtgtaaatatgcaaaacggtgccagattgctaactctcttttcatcagaactactgataggaatgctcccaagagggaataaattatacagagactctggtctctttggaggtgactttgaactgttctttgt

SEQ ID NO: 410148 - DNA, 182 bp, Homo sapiens
tcagtgtactgtaagtttgtgactttcaaaaggaatcaaagtgatatgctaatacatataagggtggctgccataagtgcaacagaaaaagcagctcagaaatcagaagagccctttcctttcctatctctgagctatcaaggaagtatcttgttgaaagaactctaaattcttatgagggg

SEQ ID NO: 410149 - DNA, 182 bp, Homo sapiens
gatatagtcatttgtcctttggtgagggagtaaataacacaactagtagggaagcaaagccagatactcaacattcccctgtgaacatagcttcattctctacagagcattggtgatactctgacttgtatttgccaaactaagtggataaacacttagtttctttgtggaaaatttatccc

SEQ ID NO: 410150 - DNA, 278 bp, Homo sapiens
tttcccaggaggacaaagcccccagtgacaagagcagggtcaacaagttccaagcaaagagaacagcaagtgctgaagcctaaggctaatgcacttacagaaaaatccttaatgactaagtgtgttgcctctgtttgcgcagagatcacaaaacgtgtcccgcagaagggagagaaaaagggaccccaggagagggtggcggggcttcaggtcctggagaaaggcagcaagcatggctaacacattccttggtccaccctgcagggtaatactgcacc

SEQ ID NO: 410151 - DNA, 588 bp, Homo sapiens
ctagagtcattcaggttcctcctgagagagacctgaagggttgactccaacccctctccccatttgacagaagagggaaccaagacccagaaagatgtggcggtgacttgctcggggttacggagaggttctcagtgaggctgaaaccttgtatgatgaggagagtggtcccggtgtctcagggtggggctccgaggacatgacacacttagagttctgggccagtgccaggcacaaggaggctctgcgtctccctggccctcgcagccaggactctccatccccgtctccgtgcggcctcaggctacgtccagcatctctgatcccccagctgctccctccctctctttgctcctccagggctggctctggaaccctcctgtcagagaggcaaagagaatggccctggagagcctcgggagtgcccacccctgggctgacaacagcctagcgggggctctggagggttttgtaagttgagacctgctggaaaggtaggcagccgtgtaattctgaacctgccgtggaatctgaggacgatgccctagatccctgtctcccgcctagcacagccttgcaggccctgtc

SEQ ID NO: 410152 - DNA, 440 bp, Homo sapiens
gctgccgcctactactactaaattcgcggccgctcgacggggcgggtttaaggtcatgagaacatggtcaggattagcattctgaaagttactgtagctagagggtaaagagtagatagggacaggccatttagtaggctactgtgagatactaggtaaggaaataaaaggctggattagggaaatgttattggtagctaagatggagattttgatgtacgagagaaaaattagtagacaaaatcaagaaaatgtgatgatggattagatgtctcaaaaacgattctgaggttttctgccttacataaatgaacagacaacagggccattcactgaaaaaggaaacagactagttcaggtggcaaagctcctaagttgttttgggcatgttgaagtgtaggtgactgagagacatctaagagatacaattaggaagtaga

SEQ ID NO: 410153 - DNA, 377 bp, Homo sapiens
caacatcagtcactttggctgagtgtacactgctggtttcattccaaagcctggcatgttgtgttgtgtggatggggtgttcaaggtggagagggcaaagactcaacatctgatacatttacttccatttggggtgcatgagcaaagatcatttcagtctcgggcttcttcgtgggaacttgacttgccgggtagctccccctggggttcagatctctgttcattgtttctcttcaagccctgggaagtgccatgttatctggaaagctttccctaacatgttctgtctgcatttatacttcacccatgtgcccctcaactattcatcatagcccttgtcccaccataatgaaaatgtctctcattatttttctggc

SEQ ID NO: 410154 - DNA, 350 bp, Homo sapiens
gatgagtattttctgcctttttctttcttcttatgcctctaatactttcccttctcaccctcagttggtctcgcttcctatctcactaagagaaaataaaagcagtcagaagagaactcccagtctcccattgcctcacatatcctcccccctgcatctgtgcctgatgttctgcttcttcctgctgtgagtgaaccatccacactcttagggagaccaagccttccatttgtgcgctgcattccattttctttggcctactgaaggacatccatctctgctagatgtttcgtatcagcatataaacatgccacaactgcatttctctcttcccagtctctctctctctc

SEQ ID NO: 410155 - DNA, 388 bp, Homo sapiens
atgcttaaaagtacaggttttaacatctactatctaggttcaaatctcaactccaccacatacaagttgttaaacattggacagttacttaacctctctgtttcctcacaggaaaaccaaggacatccatgtaggaatgacatctgctcattagcttgcaagaattaaaagacttggtaccaatgaggaggaaacaaaaatcaggaggcagttcttattataaagtatccatacagatggtgtagagtatgtttttgttaaatttttatattagcatttaaacaaaaatacattaaatattcttgctgagaacttgggcatcccataaatacatctgtgtacccaaagggctgcaatctgtcatctaggaaacactgcactccacagc

SEQ ID NO: 410156 - DNA, 441 bp, Homo sapiens
gagatttgaggctgatggaggcagatttacattatataagggactttgtaagacagaaaggctttgggttcaaatctcagctcagccaccatttagctgtgcaactgtaggcaagttacttaagctctgggaacctcagtttccacatctgtaaaatgggaaaaataaaatcaactctgtaagatttttgtaggccagacacgttggctcatgcctgtcatcccagcactttgagaggccaatgtgggaggatcgcatacaatttttttttttttaaactgggcatggtggcatgtgactgtagccccagctactagggatactaagggggaataatggcttaagctaggagtttgaggcctgcggcgagctgacggcatcactgcactccaacctgggcgacaatgtgagaccccgtctcaaataaataaataataaaga

SEQ ID NO: 410157 - DNA, 489 bp, Homo sapiens
gagatttgaggctgatggaggcagatttacattatataagggactttgtaagacagaaaggctttgggttcaaatctcagctcagccaccatttagctgtgcaactgtaggcaagttacttaagctctgggaacctcagtttccacatctgtaaaatgggaaaaataaaatcaactctgtaagatttttgtaggccagacacgttggctcatgcctgtcatcccagcactttgagaggccaatgtgggaggatcgcatacaatttttttttttttaaactgggcatggtggcatgtgactgtagccccagctactagggatactaagggggaataatggcttaagctaggagtttgaggcctgcggcgagctgacggcatcactgcactccaacctgggcgacaatgtgagaccccgtctcaaataaataaataataaagattgctgtgtgtgagaatatggggctcagcagacgtcgacagtcgaaat

SEQ ID NO: 410158 - DNA, 293 bp, Homo sapiens
gttcaactaaccgtcgacgaaaatatgaagtaattactttttgtattttaaaaaacacaatattgtacaagctaaatacctctatggcaaaaatctctacatacagaaaaattatataaagaggagtgccagaagaggtgccatgctatgtcagaactctatgaaatcaagcaaaattctatatgacagaaaaatttttctaggtccttgggagttttgttttgccttattgatttttctgctgagattcattttgtatttgtaagcattagcaaaaatttatatatgggggg

SEQ ID NO: 410159 - DNA, 303 bp, Homo sapiens
tctggcctttcactatatattctaatcatatatcctgtatgaacaaccataacacaaatctttcttcacttacccagatacgaaatggtatatactcagaggtccttttaatcaaatgatcatgaagtaaagttttacaaaatatgtgtagtcttctaattgatttcattagtttcattttgggtttttttttttttttttcttttttgagatggagtctcgctctgtcgcccaggctggagtgcaatagcgccatctcggctcactacaacctctgcctcccaggttcaagcgattcttctg

SEQ ID NO: 410160 - DNA, 965 bp, Homo sapiens
gaggaacctggaagatattatgctaggtgaaatcagccaggcacagaaagacaaatacccagtgatctcacttatacatgggatctaaaacagttggactcatagaaggagagattaaaatggtggttacctggggctggggtgtcgaagcgggtggggtaggtgtaggaaatggtaagatgttggttaaaaggctcagagtatcaaacagaaggaattaaattcaaaggaaaaaaaaagggaaaactatcaacaagtcacaagaaaaatagggaaaggatgtgaacaaatggttcaaaatgtgtaaaagtattttaataggtaacccactgatacggttcggcaacaaagtacaaaagaatgcttagtgtaaaatcttctcccatcccagtccctggcaccaagcaacccacaccagaggcctctgacgctgttagcttcttgtatgatctttttgagatgttttatgtaaaaataagcgtatttgtgcctgtgagagtgtgatgggtaatttcccttttttggttacactaatggtagtatactataaaaacaattataattatacacctaggttttgttatacttttaatatattgaggaaatcattccatatttatatttattatagagctacccagtattaaaacctgcctagcattctatgctaatagtgccatattaacatttaatacatgttgtttgctgtattttgccgctacaaattacactacaaataggccaggcgcggtatctcacacgtgtagtcctagcactttgggaggtgcggcgggcagatcttttagctcaggagttcgagaccagcctggaaaacatggtgaaaccccatctctacaaaaaatacaacaacagtaaaaataattagctaagcatgatacacgtgcctgtagtctcagctacttgggaggctgaggtaggaggacagattgagtctgggaggcaga

SEQ ID NO: 410161 - DNA, 393 bp, Homo sapiens
gtaacattgagcactgcctcttggctctgagttactttgtgaaactggaatcaatataagagtttatcgaaagaatgacttctcctacaaagtaagtgttgattttctaatttcttggacagagaaagtcaaatcacaccatgtctggtagaaaatatattgaactaatatattgcaaagttattgctattaagagaaatgcaggtttttaaaattagctctttgtttaggctttttcaaaaaagatagaaaacaacaacaacaaccagccagggacagtgtctcacacctgtaatcccagtgctttgagatgccaaagtgggaggatcgcttgaggccaggagttctagaccagcctggacaacatagcaagaccacatctgtacacaaatt

SEQ ID NO: 410162 - DNA, 560 bp, Homo sapiens
taatcgagctcggcccctttgcttagaagttgtggagaaatggggggctgattctgctcagattcatcaggatgagtagaaggcacccagctctcaccctggcctgacatgtgtgtccctgagcaggttacagtcctctctgagcctctgcttcccatctggaccctgctgggcagggcttctgagctccttagcactagcaggaggggctccaggggccctccctccatggcagccaggacaggactctcaaatgaggacagcagagctcgtggggggctcccacggacccgccgtgggcccaggggaggcagagcctgagccaacagcagtggtgctgtggaccgtggatcctgagggtggcctggggcaagtaccggctgagggtccaggtgggctttgtgtacctttgggtcctggggccctggtgacttggactccaggttagagtcaagtgacaggagaaaggctggtggggccctgtgcttccgacttcatttcgagtgatggcagttcccaggaaggaatccacaacttctaaggttaagggggatcctcta

SEQ ID NO: 410163 - DNA, 1234 bp, Homo sapiens
taatcgagctcggcccctttgcttagaagttgtggagaaatggggggctgattctgctcagattcatcaggatgagtagaaggcacccagctctcaccctggcctgacatgtgtgtccctgagcaggttacagtcctctctgagcctctgcttcccatctggaccctgctgggcagggcttctgagctccttagcactagcaggaggggctccaggggccctccctccatggcagccaggacaggactctcaaatgaggacagcagagctcgtggggggctcccacggacccgccgtgggcccaggggaggcagagcctgagccaacagcagtggtgctgtggaccgtggatcctgagggtggcctggggcaagtaccggctgagggtccaggtgggctttgtgtacctttgggtcctggggccctggtgacttggactccaggttagagtcaagtgacaggagaaaggctggtggggccctgtgcttccgacttcatttcgagtgatggcagttcccaggaaggaatccacagctgacggtggctgacagatcagagaatggaaggcgaggcaggcgggcgtctgcgtgacctcaggtgcttggggcccagcagacccagagaaccatttccactaggccagggtgccggaagtgtccacaggtcttagattccctgttcagatgaaaagatttgtgcctttaatgataaaagtgatctgcatagagtcaaaaattcaagccatgggtataaaatgcaagtaaaatccctgccctcacctatcccaccctactacacagagatgtcctctcgagtttcctagactcactctggaaatttctgtatacacacagaagcttgtgcctctgctcgtgaaggcagagggagggagagctgaagggccagcaccttctcacctgtgggccccctcagtgctcggtcccagagcatgcaggactgtgcctcgtgttcagtttgctggtctgacttcatgctccttgggcaggatatgcatgtgccatgctaggagacatgtggatgtgaagctgggggacaatgtcccctggctatgcctttacaagggaagtaaggaaggtaggaggtgagcctgggagggagggagggaggcgcggagccgccgcaggtgtttcttttactgagtgcagcccatggccgcactcaggttttgcttttcaccttcccatctgtgaaagagtgagcaggaaaaagcaaa

SEQ ID NO: 410164 - DNA, 204 bp, Homo sapiens
tgtgtgtgtgtgtgtgtgtaaaagagagaagttgtggagaaatggggggctgattctgctcagattcatcaggatgagtagaaggcacccagctctcaccctggcctgacatgtgtgtccctgagcaggttacagtcctctctgagcctctgcttcccatctggaccctgctgggcagggcttctgagctccttagcactagca

SEQ ID NO: 410165 - DNA, 445 bp, Homo sapiens
ttttttttttgagatggagtctctcgctctgtcatccaggctggagtgcagtggcacgatctcagctcactgcagcctccgcctcccaggttcaagtgattctcttgcctcagcctcccaagtagctgggactacaggcatgtgccaccaggcctggctaatttttgtatttttaatggagacagagtttcaccatgttggccaggatggtctcaatctcctgacctcgtgatccacctgcctcagcctcccaaagtgctgggatcacaggcgtgagccaccatgccccgccaaaagtgcattttttttttttttttagtaaaaggctattaagtcctatatgacacatccattttggggtgatattttttcctcttttctctgagtcacactccctctttaatatcctgtaacttaaatactgagctatatggctagccactat

SEQ ID NO: 410166 - DNA, 479 bp, Homo sapiens
aaccagccttgtcgattagagggtcagcattttcagccccacttcacctccagggagggaaaaggggctggaaatttgagttcaatcccttatggccaattgtttaatcaatcatgactatgtaatgggatctccacaaaacccctaaacaacaaggctcagagtgcttttgggttggtgaacacatccgcttactgggagggtgggacactctgcctccatgggaacagaagatctcatgctcaggaccctttaaaaccttgctctatatacttcttcatctggctattcatctgtatctgttgcaatatcctttataataagctattctttgtaataaactagtaactgtaaataataaactagttcatctgtgtcctttgtgatatcctttataataaactagtaactgtaaataagtgtttgtgagctgttatagcaaattagcaaggagttagcatcagaattgaattgtagga

SEQ ID NO: 410167 - DNA, 589 bp, Homo sapiens
gggcctctgcatcctgcagtggaaattccacagcatgcccgtgtgcaccatcagcagcctgccccaggtggatgatgtgctcgcgtccctgcagatctcttcgcacaactgtaaagtgatgtactacaccaaagtgataggctccgaggatttcagaggttccatgacgagcctggagtccagccacagtggcttctcccagttgagtgcaccaccaccttctccagccagtctcactccagctccatgatttccagctagtgccgcaccacctgcacctagtgtgcagaggagatggccgcccctcctcggacagccagctccaccctcccgccgagcagagacattgtatggactcctctcacctctagagagcaaatagctctccagatggtaaacatagtcatttcatcccaaaactatcttggcaggtagttttaactctgatcctaccttaactcaacagccatagattttgtatatgttgtgcacaaaatcaaaccagagcacaagggctctcttgaaataaaagtagtttctataccaattaaaagattgacgtggtctcaggaaaaaaaaaaaaaaaaag

SEQ ID NO: 410168 - DNA, 182 bp, Homo sapiens
atcctcactgggtgctcactactgctcactgcatcacccggtgagtggggacctggggtctggggaggggtgtctgtgccccacaggaataacagttgggcatttcccctcagatgaggctggggacagagggagagagacagggaaggttctggttcaggttgcatgaacaggcattgggg

SEQ ID NO: 410169 - DNA, 274 bp, Homo sapiens
actacgtcttaaaaaaaaaagagagagagagagaagaatccagctctcattcattcttcttcccccaagaggggagtggtaaagacagctaacaatgactaagtatgccttgcgtatttttagcatttcacatgtattaattaattccatcctcactgttatctccattttacagataaggaagctcaagcatagacaggtgacgtaattcctccaacattacccaagtagtaaatagcacggctgagattcagtcccagacggtgttcaggcc

SEQ ID NO: 410170 - DNA, 425 bp, Homo sapiens
tactactactactaaattgcggccgcgtcgacacctcccaccaggcccctcctccaacactggtaattacaatttgacatcagatttaggtggagacacagagccaattcttatcaggaacaaacagggtcttcagggtaacagtttccctaacctcctggagaggacatttaaaatttttctgggaggccgaggtgggtggatcatgaggtcaggagtttgagacctgcctggccaatatagtgaaaccccatctctactaaaaatgcaaaaaaaaaatagctgggcatggtggcacgtgcctataatcccagctactcgcgaggctgaggcagaagaatcgcttgaagccaggaggcgaaggctgcagtgagctgagatcgtgccactgcactccagcctgggtgacagagtgagactccatc

SEQ ID NO: 410171 - DNA, 671 bp, Homo sapiens
acagcagtgcacacatacacacacacacaccgataggagatggaggcagtgcacacctgctcacacacagcagtgcacacatacacacacacaccgataggagatggaggcagtgcacacctgctcacacacagcagtgcacacatacacacacacaccgataagagatggaggcagtgcacacctgctcacacacagcggtgcacacatacactcgcacattgataggagatggaggcagtgcacacctgctcacacacagcggtgcacacatacacacacacacaccgataggagatggaggcagtgcacacctgctcacacacagcggtgcacacatacactcacacacacaccgataagagatggaggcagtgtaccacaatatcataggtgtgcctttctggatgctgggataagtgggcacttttatttccaactatatcgtatcttttatttttcgtatttaatgagtctgtattacttttataatcagaaacatgccataagtatatgaaaatgcatctttttttctttatgctgttgaaaaggagagtatcacctgctgttagactcttctccgtcacgtgacgctcacgaaatgaagataacgctgtcttgtccatctgttccgaaaagaaacgcctgtgttaaggcgatgcttgattaaa

SEQ ID NO: 410172 - DNA, 521 bp, Homo sapiens
gtaagtgtgatgcgaggccctcattgcggggtcagggtaacttatggaagcaaacagccttctttattttttaatacatcactgtcacctgcgcttatgccaggggttattagaagaagaggggctctgggtggccatgtgttcatggctatgatgactgaaaaggccacagcatgcaacagagtcctcagatttacccccaaatgcttctcccaccctctattctctcttagcatctctccctgaacctctttcgccaaccccctaccaaacaaggtccagaattgaggtgttctggaattccagccttgctaagctctgggattaaggccagtcatttggaaaggggatgggggaagaggcaaaaacaaaacaaaaaaaaaaaccaaaaaccaaaaaaaacaaaaacaaaacaaaaaaaaccaactgaacattaaccctttgggtccatagcactgagaagacctcaccatttcggccactggcaaatcagcatctcttggccatatccctgaaacctg

SEQ ID NO: 410173 - DNA, 460 bp, Homo sapiens
ctgaaagatgtaggaaatcttaatactgttagtgataaaaaatgatagctctttcaaagtgctgggattacaggcgtgcccggcctgacataatttatattaaccaactcttgagatacaattttgagagccaaacctgggaggatgctaaaaagtcctctggatattatagggattcctaagtttattaccacatcattacaaggtacgtgggagcgacctttggttattagctatcacaacagcagactcaacctatgtaggtaggtttcttttactttgtctttgtgggcagatgatttatgttagctgcactcttgtagaacttgagtaataatgacactaaactcttgtgtcttttaatgttgaaaatatcttcatacaccaaatatttcaagtattttttgtgtgtgtttgttttgagaaagagtctgggcaacagagcaagactccatctcag

SEQ ID NO: 410174 - DNA, 639 bp, Homo sapiens
ctgaaagatgtaggaaatcttaatactgttagtgataaaaaatgatagctctttcaaagtgctgggattacaggcgtgcccggcctgacataatttatattaaccaactcttgagatacaattttgagagccaaacctgggaggatgctaaaaagtcctctggatattatagggattcctaagtttattaccacatcattacaaggtacgtgggagcgacctttggttattagctatcacaacagcagactcaacctatgtaggtaggtttcttttactttgtctttgtgggcagatgatttatgttagctgcactcttgtagaacttgagtaataatgacactaaactcttgtgtcttttaatgttgaaaatatcttcatacaccaaatatttcaagtattttttgtgtgtgtttgttttgagaaagagtctggctctgtcacccaggctggagtgcagtggcacaatcatgagtcactgcagcctcaatctcccaggctcaaattatcatctcacctcagctacttgggaggctgagggaggagaattgcttgaacctgggaggtaaaggttgcagtgtgctgagatcacgccactgcagtccagcctgggtgacagagggagactccatctcaaaa

SEQ ID NO: 410175 - DNA, 491 bp, Homo sapiens
tctacgagagtctgattcatgcccagagaaccactgaagccaatggttattttaggcagggagataaaagccacagagggcccagttggcgaggggagtccggcaggagctgcctaagcagaaggctgtgtttacatacacagacgacttctctgcccagcctggcctagtgtggggagatgggaacattcaggcgtcactgcctggctgccttgtgaagttgcggattaaccagtgatgcagcggctggtctagccgtctggtccctgcagatggatggatgaagagaggactgaaaagacagcagagcagtgccagcttctggaagtgaagtgctggctgggtggagtgggcacctgggctgggaatgtgagtgcaaggaaatgtttgtgatctgacagcagacagcaggtgaaattctgctgggtctggcttggggggttatgaggtcttcataacagtccctgttttaaatggaaaaactgttgaaa

SEQ ID NO: 410176 - DNA, 402 bp, Homo sapiens
gaggagttcgacaaatcccacaaacctttgtactggcacactggggatacagagatcggtaccataacttccctggcctagtgtggggagatgggaacattcaggcgtcactgcctggctgccttgtgaagttgcggattaaccagtgatgcagcggctggtctagccgtctggtccctgcagatggatggatgaagagaggactgaaaagacagcagagcagtgccagcttctggaagtgaagtgctggctgggtggagtgggcacctgggctgggaatgtgagtgcaaggaaatgtttgtgatctgacagcagacagcaggtgaaattctgctgggtctggcttggggggttatgaggtcttcataacagtccctgttttaaatggaaaaactgttgaaa

SEQ ID NO: 410177 - DNA, 328 bp, Homo sapiens
gtagagcaagggttatggagtaggaccttagtttgaaaaccatttctgccacctcctgtcccagggtccccagggaaaaattatttaacctctctgaacatcattttctgcctctgtaagatggtggtggtagaatcaacttcagagggttttgaagatgaaaggtaattatatatataaagcacttagcccagcacctggcaaaatggaagtgctgaatcaacaatgtgtgctaccactattggtgtgcttattgatattaacttaattctcctgacacgggcatggatatacttcaacattttttttttgagaccgaatcttactc

SEQ ID NO: 410178 - DNA, 495 bp, Homo sapiens
catgagtgttgtgcagtgcaaggccggaggaggaggggccggcgcgcgcgtccgtgcgggcgcgggggcgcgcgagagtcggcggcggcgggagcggcgcgaagagggagagcgcgctcgctcgttcgcttgctcgctctgcacgcgcggccggctcggctttctcctgccctacacaatagctggtgactaactgctccgaagtggcattagcatttcacaagcaggctatccagccgctgcggtaccgtggcaagacattattttttccccctctgtcgtttattttgttttccttaaattcagtcctgggttttttgttggaaggattctgatgtgtgatgatagttggtcagtgcttcgtcttgcatttactaaaacacatctttgcagaagtgtaaagcctgtaattccctaaaaccagaagtttagtaggctttttttaattcttatggtatgcctctcgtttaattaaaaattattattggagtacac

SEQ ID NO: 410179 - DNA, 618 bp, Homo sapiens
tggaatgtttccatcatcatagaacattctgttggacagtgctgtttgaaggcttcagagcagtggttttcaacaaaggatgattttgcccccaggctacttgtggcaacatttagagactttttggttgtcacaacccagaggatattactggcacctacaggatagaagccagggatgctactaaatctactatgtcacaggacagcacatcatgatgaagaattacccggtccaaagtgtcaagagaactaagattgagaaatcctgctttagaggcacaatctcattgaatatcctcaataatcttatgaggccaggtgtggctcacgcctgtaatcctaagcacttaaggaggcagaggcaggagggaggatagcttgagctggggaatttaagacctgcctgggcaacatagcaagactctgtttaaaaaaaaaatcttataaggtacatactattcttttttataaatgaggaaacaggcctggtgagcttgaggaacttgaccaaggtcacacagctattaagctgcagagatgagacttaaacctaaagctgtgattttaaacctcttgctctgaaacactaaactgaaggtgactgtgtcagagccac

SEQ ID NO: 410180 - DNA, 1425 bp, Homo sapiens
tgcttccaaccctggacacgaaggcccccaccggccggagaacgaaaccctggggtcgtctgaagaggagggccaggagtccccagggccagacagcgaagccccagagctgctgcggagctgaacaccgaggtccccaagccctccgcaaaggacgtggagatcctggagcaagagagcgaagtcctcgagccatcagtcgagcaggacgcagagagccccgggctgtccacagctgcgggctttgagagtcctgagccaggcagagacgaccctgggccgtccgaagcgcaaagggcggaggtccaggggcagcatccccctccaggccctaagacctcctcctccaggtcaggctcggaagccccccacctgcgttttccgccgtgccccgaggctccccagcgtcccccggaggagcggttcatggagacgcccatcgagcgcgaaatccgccgcagctgcgaacgcgaggagagcctgcgccggagccggggcctgagcccgggccgcgcaggccgtgaactcgtcgagctgcgcgtgcggccggtgctcaacctgccgggtcctggccccgcgctcccgcgcgccctggagcgggcgcgggcgggcgcgcagatgcagcgggacatcgagcgggaggcccaccggcaggcggcgctggcgcgccccgcggtccccgagccgcgcgcccggtcgccgccgcagccgctgggcgaactcaagcgcttcttcgaggccgcggcggggagcggctcctcggcgggggcgggggacggcgcgggcccgcagaggctgccagagcctgggggacggccgcgctcggccgtgcagggcgggtgccgggtgctgggcagcgccccgccgcctttcactccgtcactgctggagcaggaggtgcgcgccgtgcgcgagcgcgagcaggaactgcagcgccagcggcgcagcgtctatggcaccgcggagttcaaggagcctacgccgagcctcaccgcgagcaggggcgacggaaagttggtggtgatctggcccccccgcagaaaggtctcggagaacggcctggagcaggaggagcgcaaaccttgaggtttgaaaaggctgggacccccggccggaagtaacgtacgcgtcagaggaacagggcggggggcgtctagcattaggcctggagaagggtcggctctctgcattggggaagatgaaatcgacttgcctttgtgaaattgaccagccccctctataaaacttacagtcccccattgggaaactgaccaccacccacaactccgccagtgaaactgcccagcccttctctgcctaattgcaaactgaactaccctctcccttgactgttaagagggccggagttaccgcctcgattgccccactccccccacccccaataaagcctcttctttcagggca

SEQ ID NO: 410181 - DNA, 2179 bp, Homo sapiens
tgcttccaaccctggacacgaaggcccccaccggccggagaacgaaaccctggggtcgtctgaagaggagggccaggagtccccagggccagacagcgaagccccagagctgctgcggagctgaacaccgaggtccccaagccctccgcaaaggacgtggagatcctggagcaagagagcgaagtcctcgagccatcagtcgagcaggacgcagagagccccgggctgtccacagctgcgggctttgagagtcctgagccaggcagagacgaccctgggccgtccgaagcgcaaagggcggaggtccaggggcagcatccccctccaggccctaagacctcctcctccaggtcaggctcggaagccccccacctgcgttttccgccgtgccccgaggctccccagcgtcccccggaggagcggttcatggagacgcccatcgagcgcgaaatccgccgcagctgcgaacgcgaggagagcctgcgccggagccggggcctgagcccgggccgcgcaggccgtgaactcgtcgagctgcgcgtgcggccggtgctcaacctgccgggtcctggccccgcgctcccgcgcgccctggagcgggcgcgggcgggcgcgcagatgcagcgggacatcgagcgggaggcccaccggcaggcggcgctggcgcgccccgcggtccccgagccgcgcgcccggtcgccgccgcagccgctgggcgaactcaagcgcttcttcgaggccgcggcggggagcggctcctcggcgggggcgggggacggcgcgggcccgcagaggctgccagagcctgggggacggccgcgctcggccgtgcagggcgggtgccgggtgctgggcagcgccccgccgcctttcactccgtcactgctggagcaggaggtgcgcgccgtgcgcgagcgcgagcaggaactgcagcgccagcggcgcagcgtctatggcaccgcggagttcaaggagcctacgccgagcctcaccggtaagccgcgggcgtagcaacgccgggacccccagggttccagccgcccccaccgattgcccaacttcagtggcccctcctgtggccctccgattctcggggtctctccctccaagctcccagaccccctctcaattttgtctcttgcctaccccttctggagctccattactcgctgtgatccacccctccaccgggagtgatggactctctgatccacaccacccaggctgcgcgggggtgggggcattccagatgtcttcctttttgtcgggttccagggaaccctgactgggttctggcactcctgggtcctccctctgaattttcgggctcctgcttctccattctgggttcacctccctcctccctcgggttcctgggtgcctggagttgaatggaggctttcatggggaggcggagggtgaacgcctgtgtgtgtttaaggggtgcggccggcctttcatcctggctgccgccagctggtgagctgagcgccccttcccccgcagcgagcaggggcgacggaaagttggtggtgatctggcccccccgcagaaaggtctcggagaacggcctggagcaggtgggagcccccttacccgtgtgcctctagcgcttgtcggtccccccacccctccggtgccaggacgcttggtggggaaaagtgcatcctccctggagggccactctggtcagaactcagtctgggacgcatccccggggtgaagaggagacggtggtcttgaggcccaaaccgccaccccgagcctggatgcagtgcgcaggtccctgaggccggccttccttctggtcctctgtccccaggaggagcgcaaaccttgaggtttgaaaaggctgggacccccggccggaagtaacgtacgcgtcagaggaacagggcggggggcgtctagcattaggcctggagaagggtcggctctctgcattggggaagatgaaatcgacttgcctttgtgaaattgaccagccccctctataaaacttacagtcccccattgggaaactgaccaccacccacaactccgccagtgaaactgcccagcccttctctgcctaattgcaaactgaactaccctctcccttgactgttaagagggccggagttaccgcctcgattgccccactccccccacccccaataaagcctcttctttcagggca

SEQ ID NO: 410182 - DNA, 1490 bp, Homo sapiens
tgcttccaaccctggacacgaaggcccccaccggccggagaacgaaaccctggggtcgtctgaagaggagggccaggagtccccagggccagacagcgaagccccagagctgctgcggagctgaacaccgaggtccccaagccctccgcaaaggacgtggagatcctggagcaagagagcgaagtcctcgagccatcagtcgagcaggacgcagagagccccgggctgtccacagctgcgggctttgagagtcctgagccaggcagagacgaccctgggccgtccgaagcgcaaagggcggaggtccaggggcagcatccccctccaggccctaagacctcctcctccaggtcaggctcggaagccccccacctgcgttttccgccgtgccccgaggctccccagcgtcccccggaggagcggttcatggagacgcccatcgagcgcgaaatccgccgcagctgcgaacgcgaggagagcctgcgccggagccggggcctgagcccgggccgcgcaggccgtgaactcgtcgagctgcgcgtgcggccggtgctcaacctgccgggtcctggccccgcgctcccgcgcgccctggagcgggcgcgggcgggcgcgcagatgcagcgggacatcgagcgggaggcccaccggcaggcggcgctggcgcgccccgcggtccccgagccgcgcgcccggtcgccgccgcagccgctgggcgaactcaagcgcttcttcgaggccgcggcggggagcggctcctcggcgggggcgggggacggcgcgggcccgcagaggctgccagagcctgggggacggccgcgctcggccgtgcagggcgggtgccgggtgctgggcagcgccccgccgcctttcactccgtcactgctggagcaggaggtgcgcgccgtgcgcgagcgcgagcaggaactgcagcgccagcggcgcagcgtctatggcaccgcggagttcaaggagcctacgccgagcctcaccggggtgcggccggcctttcatcctggctgccgccagctggtgagctgagcgccccttcccccgcagcgagcaggggcgacggaaagttggtggtgatctggcccccccgcagaaaggtctcggagaacggcctggagcaggaggagcgcaaaccttgaggtttgaaaaggctgggacccccggccggaagtaacgtacgcgtcagaggaacagggcggggggcgtctagcattaggcctggagaagggtcggctctctgcattggggaagatgaaatcgacttgcctttgtgaaattgaccagccccctctataaaacttacagtcccccattgggaaactgaccaccacccacaactccgccagtgaaactgcccagcccttctctgcctaattgcaaactgaactaccctctcccttgactgttaagagggccggagttaccgcctcgattgccccactccccccacccccaataaagcctcttctttcagggca

SEQ ID NO: 410183 - DNA, 441 bp, Homo sapiens
catccctcactcttgtttttgagagcacctcctgacaaacctcaaatctctgcctcagaatccgtttcctagggaacttgacccagaataagtactacggattgcgtaactcagcacagtaaggtagaaggctgcctgccttacttagttgcagatgtggggcatgaatctatagttatttctaacacatttgcaaaggcactgtcctcttggggaaagaaggaacacatagaatgcgatagatacactatactgacctgtaaagactgtttgcctagccaggtagaccaagcataaaacaaagtaaggttaaaccacattaaaaacttcagtcgaggccaggggcagtggtcacgcctgtaatcccagcactttgggaggcgaagatcggtgggtgggagtttgagaccaacatggcaaaaccgcttcctactaaaaata

SEQ ID NO: 410184 - DNA, 665 bp, Homo sapiens
gtgacagagtgagtctctgttcttcccccaaccccccaaaaaaacactaaaagggataattggccaggcacagtggctcacgcctgtaatcccagcactttgggaggccgaggtggatggatcacctgagactgggagtttgagaccagcctgaccaacatggaaaaaacccatctctactaaaaatacaaaaattagccgggcatggtggcacatgcctgtaatcccagctactcaggaggctgaggcaggagaattgcctgactctgggaggtggaggttgctgtgagccaagatcgcaccattgcactctagcctgggcaataacagcaaaactccgtctcaaaaaaaaaaaaaaaaaaaattataactgggcagtggaattgaaaatcattttaaaaaatatccaaaatacctaaggaacttgtataaataaataggaaaaaaaaagagaaaaaaagaagcccacaaaaaagcagatttgtaaatgggcaatggatttgaatagacatttagccatagaaggcatccagttggtgaaaaggcattatggaaaggtgctcagcatcactgattatcaggaaaatgaaaatgaaaaccgccacgagtggtttagaccatagcggcatgcatgaaagttttcagacctccagttgttgggagtg

SEQ ID NO: 410185 - DNA, 771 bp, Homo sapiens
caggcacccgccaccacgcccagctaatttttgtattttttagtaaagatggggtttcaccatgttggccaggctggtcttgaactcctgacctcaagtgatccgcacacctcggccttccaaagtgctgggattacaggcgtgagccactgcgtctggccctctttcttgtaatatatttaacagataattttgtgtgaatgataggtgtgttccccagaatactgatgttttcctcatactcactcactatcactgtaaatgactagtctggagtaccacctcttttttctttttaattagtacaacaggaagctgttagaccagttggagaagtgaaatgtggaggtaatttagcttattaatgacataactcagattagaaaaagaaatccaagtttcctgactctgttggttttttttgcttatgataccagcattttcctaggtatgttctgaagaatacagtttctttagaataatactatttcccaaagatttttaataggtgttagagaaaaaaagagttttgggctcatctaagtgaggaaattctgagttgatagacctggttttccgtcttctctttggcggacgccagtttgttatagatgattatttttttagtttagaaataactggatacagcttaatttacaaaaaaagtttacatcaatatttgagccaagaagtttcagagaaagatttatccttaaagtagtgtgtaattcttcatgatctcaagttttaaaaaatagacttaaggctggg

SEQ ID NO: 410186 - DNA, 372 bp, Homo sapiens
aaaaagtttacatcaatatttgagccaagaagtttcagagaaagatttatccttaaagtagtgtgtaattcttcatgatctcaagttttaaaaaatagacttaaggctgggtgcagtggctcatgcctgtaatcccagcactttgggaggctgaggcaggcggatcacttgaggtcaggagttcgagaccagcttggccaacatggtgaaactctgtgtctactaaaaatacaaaaattagccgggtgtggttgcgcatgcctgtaattccgcctactcgggaggcttgaactcaggaggcggaggctgtggcgagctgaggtcacgccagtgcactccagcctgggtgacagagcgagactccgtctccaa

SEQ ID NO: 410187 - DNA, 390 bp, Homo sapiens
tgaaaacatgaaaaacagcaaaatccaagggtgaactttgacctagattgataaccaaatctagcaaacccacatgtatatataaaatcagagtgaacactagccggggcggtggctcgcccctgtaatcttagcactttgggaggccaaggcaggtggatcacgaggtcaggagatcaagaccatcctggccagcatggtaaaaccatgtctctactaaaatacaaaaaattagccgggcatggtggtgcatgcctgtggtcccagctactcgggcggctgagacaggggaatcgcttgaatctgcagggtggaggttgcagtgagctgagattgtgccactgcactccagcctggcaacagaatgagactctatctcaaaaaaaaaaa

SEQ ID NO: 410188 - DNA, 462 bp, Homo sapiens
gttccaggcctgcttccacctctactaaacgaggaattcagactaaagggtccttgggagccatttcagctctacagctctgttttgctgctgtttccaaagctggaaatcccttttccttggagataggaacagggacagtgacagtgccttaagatctgagagaacaggccgggcacggtgactcacgcctgtaatcccagcactttgggaggccgaggcggctgatcacttgaggccaggagtttgagaccagcctggccaacatggtgaaaccccatctctactaaaaatacaaaaatcagccaggtgtggcggtgtgtgcctgtagtctcagctactggggagactgaggcaggagaattacttgaacccgggaggcccaggttgcagtgagctgagagtgcgccactgcactccagcctgggtgacatagcaagactccctctcaaaaaaggggaa

SEQ ID NO: 410189 - DNA, 2623 bp, Homo sapiens
  misc_feature (1096)..(1096): n is a, c, g, or t
  misc_feature (1500)..(1500): n is a, c, g, or t
  misc_feature (1741)..(1741): n is a, c, g, or t
ccagagcaggggacagtcctgggggctgcaggtcagtgcaatgaaacctagcccactggctcttacccttaaaagaaatactctgtgtcaaatggaaaactatgttcctcattctaatcaccaggataaccacagtcctctttggaatagcattttaaaagttgcaacatggttatgacacacttgcttgtcagtgtcttaaaactacccttcacaaggaagcagagtatcctcgtttccactgaaaatgaaacggagacttctgcctgggaagtgtagtccctggaataggccaggtcctctggcccctcggtcccacatgagctggaaggctcagctcctgccccattcccactcccacccctcccccacggtgccaagcccagcaggacggcttcctgggcaactccaccatgggcacacccctggccctcagggctgttgcctggagaactcattggcctcctgggaggtccccagttgccaggacaaggctatgtgggatggcttctccaacaacaactcgacatctcctctgcaggggtgcccctgacacaacagctggccactgggcctcccggcacccaccctgtctatgcacggggcttgtcattctgatctcagcagtcttctcaaggagcaataatcttggctcagctcttatcgtgctggactgatgaatgggggtgcctggtgaggccccaacctttccacagagtccacacatcacttcaggtgagtgtgggaatcaagtttggagacccacgctggacaggcttatctaaatcgtaagtagctcttgggcaatgcggaactcctttttacagcccaccctgctctcctcccctatatgtaggattcatggttgtagcaagtgtgaggatggacaggctcacacctgtgaccactgtgtcagagaccacatagacacagggctcccggcaagctccaacctgaccacaggctgctgtcccagcccagccttcctgcaggtcagccaaggaagcgtgtaggaaacccagtgaccagagaccctaacatgtggccttagagctgatttagaaactggagagtgaaggcatggagtgaagacacnagcagagtcaggcccgtgaaggtgaggttagggaagtaagattccccaaggagggaaaagtggagctgccgtttctccttcaggggctggcattacctttggtctatctgtgtgtgctctgccatttattgacttgggtgtctttagacacgtcatggtcacttctctgaccttccattttctcagctataaaccaggctattgttgacaataataataatagtaatacatttagcattctttaaagagttaaaggaaataatgcaggaggccaaagtgggcggatcacctgaggccaggagttcaagaccagcctggccaacgtggtgaaacctcgtctatactaaaaatacaaaaattggctgggtgtggtggcacacacctgtgtgtccagaattggtggnttcttggtctcgctgacctcaagaatgaagccgtggaccctcgcagtgagtgttacagttcttaaagatggtgtgtctggagtttgttccttcagatattcagatgtgtctggagtttcttccttctggtgggttcgtggtctcgctgacttcaagagtgaagctgcagacttttgcggtgagtgttacagctcttaaaggtggcgtgtctggagctgctggttccttctggtgggttcgnggtctcactggcttcaggagtgaaggtgcagaccttcgcggtgagtgttacagctcataaaggcggcgcacacccagagagtgagcagcagcaagatttattgcaaacagttaaagaacaaagcttccacagcgtgaaaggggaccctagcaggttgcagctgctggcacaaatagcctgcttctattcccttatctggccccacccacatcctgctgattggtccattttacagagagctgattggtccgttttacagagagctgattggtccgttttgacagagcgcagatcggtgcgtttacaaacctttagctagacacagagtgctgattggtgcgtttacaatcctttagctagacagaaaagttccccaagtccccatcggtaggagaagtccagccggcttctctcactggcactcgccatgggactttgcagcacctagcttgggcactccagccacccagagggagctcatcccctgatcaagcccagcaggcacttgctgagcccacgctcacctagaacccgtgtgtgcgcacagccctggctcctgcccacacctttccctccacacctccccgcaatcagagggaaccagctccggcctcagccagccccagagagggacccccacagcggcagctgcgagctgaagggctccttgagcgtggccagagtggacgccaatgccaaagaggcaccgagagtgagcgagggctgctagcacgttgtcacctctcacctgcactcccagctactcgggaggctcaggcaggagaatcacttgaacctgggaggtagaggttgcagtgagccgagaccataccactgcattccagcctgggtgacagagcgagactgtctcaaaaaaaaaaa

SEQ ID NO: 410190 - DNA, 300 bp, Homo sapiens
tttgatatattagccttggcagattaaaaaaaaaagatttattttggagagtaaaggaggcagaaaatagggccatggaaattgcagggtacactatggctctggggagtgtggcatgtactgggacacacctgtccctcctatattgggacaggactgataaggcttagtacactgtatcttaatttccccatctgcagaataaggggtacacctgctaatctctggccccttctagctctgagttcttagattctgacaacgttgtgtcactgtgccatttttctcaataccattctg

SEQ ID NO: 410191 - DNA, 823 bp, Homo sapiens
gcacgagagacgacgtgctgagctgccagcttagtggaagctctgctctgggtggagagcagcctcgctttggtgacgcacagtgctgggaccctccaggagccccgggattgaaggatggtggcggccgtcctgctggggctgagctggctctgctctcccctgggagctctggtcctggacttcaacaacatcaggagctctgctgacctgcatggggcccggaagggctcacagtgcctgtctgacacggactgcaataccagaaagttctgcctccagccccgcgatgagaagccgttctgtgctacatgtcgtgggttgcggaggaggtgccagcgagatgccatgtgctgccctgggacactctgtgtgaacgatgtttgtactacgatggaagatgcaaccccaatattagaaaggcagcttgatgagcaagatggcacacatgcagaaggaacaactgggcacccagtccaggaaaaccaacccaaaaggaagccaagtattaagaaatcacaaggcaggaagggacaagagggagaaagttgtctgagaacttttgactgtggccctggactttgctgtgctcgtcatttttggacgaaaatttgtaagccagtccttttggagggacaggtctgctccagaagagggcataaagacactgctcaagctccagaaatcttccagcgttgcgactgtggccctggactactgtgtcgaagccaattgaccagcaatcggcagcatgctcgattaagagtatgccaaaaaatagaaaagctataaatatttcaaaataaagaagaatccacattgc

SEQ ID NO: 410192 - DNA, 430 bp, Homo sapiens
gtaaggctgctagggaggggggcgaggtacgggactgctgacagctggggtgttttgtttaggctttagtaagtcattctgattcatgtatgaaatgtcttacctagcaggtaaattgaattggtttcggatttgggagggcatcctggtaggatcagtggccttagtgtgaatgtatgaaataaacacagtggcttttcacatcattcggccatacgtttgtctataaatcacgaaataaacgaacactttggaagctctactatgtgccagctcttttacatgtaatacgtcatgtactcttcctcacaatttgagataggtgaaacattccctaattccagatgaggaaataagactcagagatgttgaagagcttacccaagctcacacagccagcaagcaaacatgggaatgagaatttaaacag

SEQ ID NO: 410193 - DNA, 1272 bp, Homo sapiens
tccaaagatggcatacctgtactatgcagtgcaaggtgctgttcagtgctattaagggaatactgtactattttataaagataaggccatatactctcattaccataatgattattagaagtaccaaaggagtttgagggaggagagacactgattttaactgtgttgatcagagaaagctttgttgaggactttgtatttgagtggaaccctacagattgggcagaatggtggtgagtagactcatggcaggctgtattagctagagtaaggtggaggaggactaggtgtgtccagggaggattgaggggaggttgcacacgtgtacaggagctgagtgcctgctgagtagtttgtattgctatggtagacggtggggacctgttgaaaatttgatggcagtgcagtgagaattttgatatggcagtggtgcagaggaggacttggtgggggggcactgattaaaggaagaattgagagacaggcaggccaattaggggataaaaggactgttatgaaaggtcctgctataaggctatggccatgcaactagggaccaggtttttaaggtgaatgatgggaatcttcaaccaaaaggaagatgacgcattccaggtcagacttactgaattggagaatttggtgggacttggcaatggaactggttagcaggcagctggcagtgtggatctgcagcttgagaaagaggtcagaagtggagataaagacttggaaggcttccacgtggaagtgatagtcgaaggtaagggagaggatgaggtcaccatgggactgtaaagaatagaaaaaagaactgagaatgagaccttggggacgggaagagaaagaggacctgggaaaggataaaaagaacggtggctctgaaggacagtcattcctcatcacagaagatgagggaagaactgttcgatcacaggtgtgggcagcagttcaaatgctgcacaggaagaaaagtatttggttatggcaacattcccgaacctggtgttgggaggtgttccagtgttggtatgggaatcattcgatggcgccagcaccgcccagtaggaacagaatgcaagccacgtgtgttattttaaattttccaggagtcacattaaaaaagtaaacagtccaggcacggtggctcacacctgtaatcccagcactttgggaggccgaggtgagcggatcacaaggtcaggagatcgagaccatcctggccaacatggtgaaaccccgtctctactaaaaatacaaaaattagccggg

SEQ ID NO: 410194 - DNA, 453 bp, Homo sapiens
agaacattctcctggttcctgctctccattcgcagggtgagcgcccactggaagcctcgctgtgcttctgctttctcctgtagtccttggaagcaaggacttcttgttcgttctttaggaacggaagcaaacgttctcgttcagatatgtgcctctccctggtgaaggaagacctcacttcctgggatttttctgtgggatggagcagccagggaccccatctctggtgggggcggggcggaggggggtgcaccatgggcttagagcccctctgggccagtgctgcctagcctgctgcatagcccatttgttttgtagacttgcagtgccaaatttcagctttctgggctccaactatgggcttgagctcagtgctgccctagagggtcctgaatgccttcacttatggaaccttagagttgcagagaccatcagagatgatccactttcctt

SEQ ID NO: 410195 - DNA, 428 bp, Homo sapiens
tgggtgctgtcttatagagaaggcattcgaagcccagagaggtgaagcagttccctcaaggacacacagcaaggaagcggttgccccaggactcagctcaggtttgtgtaaccccaggaccgtgttccttgtcgtgggcagcgagaggccccaggcaacatagcgactccagagcagcagcaccagcacctgacggacagtaagcaagcctggatctgagagagatatcatcttgcaaggatgcctgctttacaaacatccttgaaacaacaatccagaaaaaaaaaggtgttgctgtctttgctcagaagacacacagatacgtgacagaaccatggagaattgcctcccaacgctgttcagccagagccttccacccttgtctgcaggacagtctcaacgttccaccattaaatacttcttctgtc

SEQ ID NO: 410196 - DNA, 393 bp, Homo sapiens
tatatcacgtaatcccctcacaatcttcttcttattcctttatacctgaggaaaccagagctcaaggaggttaagtaaccttgacaagctcacaacgccagtaagatggagatagggcttgaacccaggtttcctgttaagaggtctttgacaatgctgggtcttataaactccatctaagcaatttttggtaatataacccttcaaagttttgcaacttataaaaatcactgaaacctcacctttcgaggcaagaaaatggccaggcacagtggctcatgcctgtaatcgcagcactttgggaggctgaggcaggaggatcaccaggaggatcacttgagcccaggagttcatgaccagcttgagcaacatagtaagaccctttctctccta

SEQ ID NO: 410197 - DNA, 332 bp, Homo sapiens
ccaagcaactttctcacttttattcttgaagactaaatggcatccttaaaatctgatggttttctttgtacctttctggttgagtaaagaataagatagtctttttcttttttggaaaaatcgtatggctagtacaggaaatcaaggagatttttagctaatttagtaaaaaagtcagaggtggaacagaaaatacaccggctgaaaaaggagatgattgatttctaggaaatgggagattgtttggtatatttacagtaatgaagaagagttcttcctggaacaaaagtactgaataaataacaacaagagacaaaaaagaaaaatgcatt

SEQ ID NO: 410198 - DNA, 444 bp, Homo sapiens
atgtggtcgatgccacgcccctggaagtgttcttgctgtctcagcacctggaagaattcctgcctatcttcaagagagagcagattgatctagaagctctgctgctctgctctgatgaggaccttcagagcatacaaatgcagctgggtcccaggaagaaagttctgaatgctatcaacaggaggaagcaggtgcttcaacagcctgggcagctggtcgacaccagcctgtgatggagagttttggcctggagcattggggtgatgctgtggcccgctggcagcactccaggcggcaccccctctttacccaatgccagaccactgggaatggattctagggcatcggaaatgcctacctgagagagagacccaaactttactctgggaggtaggctatgcccatccaaataaatctccatgagaaacttgaggagacttcata

SEQ ID NO: 410199 - DNA, 608 bp, Homo sapiens
atgtggtcgatgccacgcccctggaagtgttcttgctgtctcagcacctggaagaattcctgcctatcttcaagagagagcagattgatctagaagctctgctgctctgctctgatgaggaccttcagagcatacaaatgcagctgggtcccaggaagaaagttctgaatgctatcaacaggaggaagcaggtgcttcaacagcctgggcagctggtcgacaccagcctgtgatggagagttttggcctggagcattggggtgatgctgtggcccgctggcagcactccaggcggcaccccctctttacccaatgccagaccactgggaatggattctagggcatcggaaatgcctacctgagagagagacccaaactttactctgggaggtaggctatgcccatccaaataaatctccatgagaaacttgaggagacttcataacaagaatctggcatttctcttcagttatcttatatgtacatataattgtttttgtggttgttttgttttgttttgttttgttttttggagatgaaggtctcagtctcttacccactgcactctagcccaggcggtaagagagactccatctcaaaaaaaaaaa

SEQ ID NO: 410200 - DNA, 554 bp, Homo sapiens
gggcagctggtcgacaccagcctgtgatggagagttttggcctggagcattggggtgatgctgtggcccgctggcagcactccaggcggcaccccctctttacccaatgccagaccactgggaatggattctagggcatcggaaatgcctacctgagagagagacccaaactttactctgggaggtaggctatgcccatccaaataaatctccatgagaaacttgaggagacttcataacaagaatctggcatttctcttcagttatcttatatgtacatataattgtttttgtggttgttttgttttgttttgttttgttttttggagatgaaggtctcagtctcttacccaggctagggtgcagtggtatgatcatagttcactgtattctcaacctcctgggctcaaatgatctcctcccacctcagcctcccaagtagctgagactacaggttcacaccccccacacctggcttattttgtatgttttagtagaggtggggtcttgccacattgcccaggctggtctcaaactcctggcctcaagcaatc

SEQ ID NO: 410201 - DNA, 1133 bp, Homo sapiens
aagtgtattggtagtgaacccagcataagtgaacacataccttctctggaggaactctccttaaaccaaggctcaaagattcccctcagatagagtcctaatgacttcattctaatataaatggacctatgtggaaacaagctaccctgagacagtcagcaaatacaacaaattacctaaactctcaaagagattacagatattagaattaccaggtgtagactaaaataagaggagatagaaaatatgatgtgggatgaagagaatcaaagttggccaagtaggtttggaaccaaagggatttgtaaatgatacatatatggtaatttaaaatttacagtgtaacatattgattaagcagattagatacagtgaaagggatgacaaaatgaaagatacacctaaagagacctagatgaaaaatagagaagaaagggtaagagatctggaggaatagaatgcaaaggtcttacgtgttgaatcagcatcccatagaaaggtacgaggatggaggatgcccagtatgcaaaggtggctgaggacttctacaaattggtgagtcctcagatagaagaagccaatgaatactaaactagagcaataaaaggtaatcctagtactagacacaatgcagtaaaactagaatattgattgatgggggcaggaggagaggaagcagttacagagaaaagacagattacccagaaagaactggctgacagatggcttatattttaacagcaaaagcagaagccagaagatagcgcaatgatagcctcaaagcgatgagaaaaaaagtcatcaatttagaattctgtactcaggaataccatcattcaagaatgaatgtaggctgggcacagtggctcatgtctgtaatcccagcactttgggaggccgaggcaggcaggtcactcgaggtcaggagtttgaggccagcctgggcaacacggtgaaaccctgtctctactaaaaatacaaaaattagccaggcatgatggcaggcgcctctaatccctgctacttgggaggctgaggcaggagaattgcttgaacccaggaggcggaggttgcagtgagctcagattgggccactgaactccagcctgggtgacagagtgagactctgtctc

SEQ ID NO: 410202 - DNA, 390 bp, Homo sapiens
ttgacaacattaacgataataaaagcatctcctgccttcaatgtgctcttcctctttagtttgaaagaaacacgagaagggaaccctggaaaggcattgggaagcctgagtcctgccctccatattgtcaaataggacttgtggcacttttgtaaagctacttaatcttttggaatcttagtgtccttacctgcacaatggacatggtagtgcctgactcatggtgttacaaagattaaagattattatttaaattagggttcagcaaggtagctggaagaaagcaataatttggtcttttttgctatcctgttaaaaataatggccacacagagcaatgaatggggtaatacagatacttaccaatgcttctggaactgagaaagtgta

SEQ ID NO: 410203 - DNA, 299 bp, Homo sapiens
ttttgaattctctttgttttcagaacatgctcaaaaaaagagttaaacttgagaccacaggtatggacaggtctaggtattcagtctgtttggctgttctgcagggtgctataaatgctaccctggtatcagtgtattctgataccaggttagtccaagtggccaatgatgggaagtgaagaactatgtgaaagaactggaatttcaggtttgggtagtgagtaattgtggccctgccttcagagtcctggaacttttcacctggttgtcagcaaaaaggcaaacacatagaaaagtca

SEQ ID NO: 410204 - DNA, 314 bp, Homo sapiens
ttttttttttaatgtgctgaacattatttagaacaacctcggaaattgctggtgtcttttattaaatatacttgctttaaggtttacgctcacatacaattatgttctttggatagaatgttacttatattccattagttaaacacagcactcatttgaaatccactttaaaactgcgtaacaacaactcccaatattcaaacacttccatgtgctagtaacctggtttctagtctttgattagcaaacatctgatgaacaaaagcaaccatggatccttttaaaacaattttgtattttatttgccataatat

SEQ ID NO: 410205 - DNA, 173 bp, Homo sapiens
tattcacctttatgtctttgtgcacagtaatctctaggttagagaatgttgacggacatgttgataattcatgacctagcttgaaagtaaacttaaagtttacatacagctggtcaatattgtgccagtggacaggagtgtcatcgatatatttaaagtgcaaatgttcatac

SEQ ID NO: 410206 - DNA, 423 bp, Homo sapiens
catgttggtggtgggctacgttcccagggccagaactcctcacctgaggtcatgagttctacaccagcctagcctggggtcagattgcttgagtttgagagagcctgggcaacgtggtcagaccctgtctcaaatttaaaaaaataaaaataaaaaacattcaacatatatgtttggagcacctactatgtgccaggcctcaaggtcatgagaaacaaaggtggatgaatgattcgaagacccgcctctggcctccccagcactgacagggtgggcttatgaaagggcttctagactgctcaccggcctgcacgtgggacacggaacctcctctgggacatggagcctactctgagggcagagattgagcatggtttacagcaggtgtgccaccctccaagccagaacagggcctaatgaaaa

SEQ ID NO: 410207 - DNA, 516 bp, Homo sapiens
tgttggaattacaggcgtgagccactgtgcctggccagtaaattctttaatatgctttttttagtttatcatttcagtttacattgttgttgattccactgttctgaaccgttgagtttgatttcattattatgtgttttatttccaagtgtgcttctctactatttttttccttttttttctgtatagtttctcttcttgtcatctgctgtttctgtagcagtttctcttgctttgtcaatgtaatatccttttaaatcccctgttaactctcaccgaggttgttgattagaatttttaaaaaagttttctgtgctttcttgccttgacttaactctttttgaggactgcttggtctcctttacagctcctgattgtcgtttataacacctagtcattttccattgtctttgcctacttacaatgaaagtctagactagtttaaattggtaatttgtattctttaatgattgttagcccccgagtgagcctcactttcatagctttccttccctc

SEQ ID NO: 410208 - DNA, 279 bp, Homo sapiens
cctcagtgcccccatacggtaggtgacattatccttgtgtgatagcttaggacacagaggagacttggctataggccaggcaaggagtcaagccaaggtctggggacccccaggtccctgcattcttggatactttgcatctttggagaaagtcattggttggccctggcactcttgaactcaggctccaaggctcagctctggggttaccttactggtgtatgtactggcttttctctagatttgttctctgcccaccaattcctgctctatgcctgg

SEQ ID NO: 410209 - DNA, 334 bp, Homo sapiens
gctcctttttttgtttttttttaaatctacgtaatcctgttttgctgagaagctttattaataacttctgagcattccctcactaatccccacagagcatctatatgtaagatctatattgcatgacactgtttaaagcaaggcaaactgaggcacaggcagaagagggagggaatcaatcccagacctccagataacaagctcagaatgttgctccccaggcctgcttgcccttctcctggtccaggaagtaccaagcaaggtggatttcttcaggaagccactgggcagcataatctagtagactgcctgggctcaaagcctgactaagccc

SEQ ID NO: 410210 - DNA, 293 bp, Homo sapiens
acccgatcccagccaggcaaagtgactgacgcaaggtcacccagcagacagttggtggagcagggagagctgtgagcattgcattgctgtgagcatagcattgtaggttcttttctgacacttcagcatcccagaagggtaggccgcagccatgataataggaacagtttgtgatcctctctgtctgccaggagctaaggctctgtgtaaaccacctcacttaatcctctcggcagccctcatgaattggtttgtaattagtatcctcacttttcatgaagaaaatccaagac

SEQ ID NO: 410211 - DNA, 175 bp, Homo sapiens
gaaataaatatggcttcctggtttttttttgtttgtttattttgttttttgacagctaaaaaacctgttcagatatctcaaggtgtgagggttgctggaaaggccaagtttcttcccttctctacctcatatggggcttaattttaaaatatcttacccttcttacctttatgcc

SEQ ID NO: 410212 - DNA, 337 bp, Homo sapiens
ctatgggtaacaagtcattatgcataaccatagatgtatattgctgtactgttcaatgtttgtattttcatattctatttcagattcctagtgtgccaataaattatgttcctaaagtgctttgcaaattgtactttagttttcttatcaaaatcagtgtagaaatcgtcaacatttttttctgtttagaaagtgtgttattagttcctacttgaagaacccattctccttcctatatattaatgataagaataatggagttcccccgcccccttttttccttccttaatccatcataacagcaaggagtgatgaggaagtcctcagtgttagtaga

SEQ ID NO: 410213 - DNA, 803 bp, Homo sapiens
tatttaaaaatgcagatttcaggccacaacccaacctaattaatctgtatctcaaaagggaaggcctacagagctgtattttttaaagggtcccctgtaacccttacatgcaaccattatttggggccaatttcaagtagctttgaaaaaatatagaccaaacaactttttaaaatttctcatcaagtccaagtaagactcccatcctgctccaattatctcctataaatgctaagggtattccaaagtttatgcttcctacaaaaactatttcagctgcagagatgtgaggggtaaaaagagagatgtgaagaaatcacagaggactctaggtagcacacctgtcttattgctctcctacaattcaaatagaaaagcagagagaatctttcatcatagttcaatacagaaagaacgtgccaaaacaagatcagggcacactgcagttatgtggggaaaagagggaggcaactaggttgcagcacacaaaggcatttttcctacagaactgacacaaaggaaaaggagtaatatcaataaagtgggggaaaaggaaaatgggatttcttcttcttcttttttgagacagagttttgctcttgtcgcccaggctggagtgcaatggtgcgatctctgctcactgcaaccctccacctcccaggttcaagtgattctcctgcctcagcctcctgagtagctgggaatacaggatgaagtgctgactctcaagcttcgtgcttcctgcatctggaaattggaagtctgcctgccagttttaagaacctattaatgtgatgaacgga

SEQ ID NO: 410214 - DNA, 415 bp, Homo sapiens
tgttggagaaaggccacactaaggatacggaggtcattgcagtaatccccaggagaattacaagggttttaaagacagttgcagtgggacgggaggagaaaagatttgatagctctaaggaggtagaatacaccataccacagcattaatcagtaagaaatatgtagaagtaaactctgtctcttgaggtttccagccgatgactatcttttgaagaaatgtccagcatattctttttttttaactgcacaagttgctttgcagaccataattggaatcccagtttatcagggggaagttgtcacatgtactgagggtatcgaaatctgaatggttaaataatcatatgataagactcaaattttcttgtaatccaggaaatgcacattgaaactataattagatcattgtatgt

SEQ ID NO: 410215 - DNA, 455 bp, Homo sapiens
aatctggatgttgcctactggcccacaaagcccaaaacatttactatatagctccctaagaaaaagtttttcaattcctcgtctatacattcagtgcaatcccaaacaaaatccctccacctcccaggttcaaacagttctcctgtctcagcctcccgagtggctgggactgcaggcacgtgccaccatgcccggctaattttttgtatttttagtagagacggggtttccccgtattggtcggttgttcttgaactcctgaccttaggtgatccacccacctcagcctcccaaagtgctgggattacaggcatgagccatcacacccagcccaccatggtttttagtataaattaacaagctagcactgtatacctatgtaacaaacctgcatgttctgcacatatatccatttttttagaagaaataaaagcaaaaattaaaaaaaaagaaat

SEQ ID NO: 410216 - DNA, 719 bp, Homo sapiens
tgactttgtccctttgcaccactgtgattgcaccactgcactctagcccaggcaacgtcgcaagtttgtgatatgcattccttagttggtgttgaacaagagtgactgatggcacgtgtcatgtcatacctatacacggcttggaaatagcttaaattattttttaaggttcaaaggttacaaagtcaggcatacagctgagtttttattattttcttttaaacacttgcttagcccttgaaaacttcctgggtgccatcatttgccctgggttaagagctcccagagcagagtgaatgtgctgaggccaccatggcctccacagctcaggggtgctccagccgtatgtgtcctggctagtccaggaggatggacatggtgaaggtgaggggagaggacactgtgacagcctctgatctgctcaagtacccatgacactgaattaatttcctttcattaatgatagtatatatcatcgtatatattctcaaagaattcacacataggcaatctcatttaatactcaaaatgttctcatttaagactcaaggctaggcacagtggctcatgcccataatgctaagacttttagaggccaaggctggaggattacttgagctcaggagtttgagaccagcctgggcaacagagtaagacctcgtctctacacaaaattttaaaagttagccgggtgtggtggtgtgcatctgtagttccag

SEQ ID NO: 410217 - DNA, 344 bp, Homo sapiens
aaggacaaaaaacagaaaatggtgccagagaccagtagttgagtgcacagatttttaaattcattttaattaggttttaagctgcttttgttttgggacttttaaaacaaaatccaaattaggcctactattcaatgtccacctgcaagaaaggaaaactttcaggccaggtgtggtggttcatgcctgtaatctcagcactttgggaggctaaggcgggtggatcacttgaggttaggagtttgagaccagcctggccaacatggcaaaatcccgtctctactaaaaatacaaaaattagccaggcatggtggcgcacgcctgtaatcccagctactcaggag

SEQ ID NO: 410218 - DNA, 306 bp, Homo sapiens
ttcactttcccatggcctgggtcccggcgacattgcctctgctcctgggaagtcccctgaataatcttgctcaaggatggtagctttgaagaggttcactaggggctttgattataagaacctgaagtacatggggattgcattttggatgctgatccggggaaccgggtgacaccacagacaccttgctgtggggcttgccgcagtaaacatcactgtcccaattccaggtagaaatgagtacatacctgtcaagggcatgtatttgtgatgaagttggcatatccgcaaaagggtccgtgctag

SEQ ID NO: 410219 - DNA, 250 bp, Homo sapiens
ctagccccaatcttactgaatttgctgcttattgtctaggggcccttgcagcttcaaagctgtcaggttcctaaatagcagttttgcatttttgtaaaggagattggtaacagaactgatataaccaaaaacagggctctgctgaatgcacagttaactaaccttttcataccatgaagagtattttttactagaggttgatctttgagttgactttctgctgtgcaaagtttactccttctgctccaaa

SEQ ID NO: 410220 - DNA, 262 bp, Homo sapiens
cctctagtctaggccgaaggggagacctagccctgcccttcccaacactaagtttgatggggtgataaggcagagtgctgtgggggaaacaggcagagtgtcaggctgtgcctcgctaggagtgtgcagatcagtggttcagaagcctctatagagcacagctcaccccgctacagtgctggccaccaatgggagaggtggaagggttggcctcagagagcttgctgcccaactaactggaaaaacaaggctgataggtgtg

SEQ ID NO: 410221 - DNA, 373 bp, Homo sapiens
actgacaagggagcttagaacatttaaagtccgtttactgtctcctgacttgggtacaattatcccccgaggccatttctcttattattttagtcatcattcattccattcctcccacatatttacctttctttgtctttgtttctggtagtttcttttagaggtttacttgggacaatctctttttgttgacagccaatgactttatgttgccttgttcatgaaatgcgtttttactcttcttagacgtcttggctgtgggccgtggctcacccctgtaatcccagtgctttgggaggctgaggtgggaggatcccttgagcccaggagttcaagatcagtctgggtaacatagtgagaacttgtctgtacc

SEQ ID NO: 410222 - DNA, 440 bp, Homo sapiens
tgtctgccagcacgcccagctaattatgtgttttcagtagagatggggtttcaccgtgttggccagggtggtctcaaactcctgacctcaagtgatccaccggcctcaggctcccaaagtgctgagattacaggcatgagcccctgcgcccagccacaagagccatcttgaacatagaataaatgtctctgtaagacgttgttagctagtcacattttctgatgtagcattagacttccagagtgacaacttagtagctattctctgtgtcacttactcttggaagttccttaaattaatttttgtttttctttttgagatgaagtcacactctgttacccaggctggaatgcattggtgccatcatggcttactgcagcctcgacctcccaggctcaagcaatccttctgccttggcctcccaaagtgctgggacaaca

SEQ ID NO: 410223 - DNA, 422 bp, Homo sapiens
gctcttgtttaaccagacaaggtgtcaggccttagcattggactcctgactgatctcttctgattcaacggttgagccagattcctcaagtgctctgttcactttgtgtccctttcacattttaggagactccaactatttttggtaggaaaacaaatatcctccaggctgccagcgagttttccaagacacatcctgattcattatacagctaccaagatacaaagccctaaaaatagggaacttgcttaaatctttcatttggcatcaggatgctaagttcatgttaactgcagtcagtattttagactgatttcatttgatttcctgggtattatgctctttggctgcggagggcaacttcttgtttatcttcatctctgcttggcttcagattaaggctttgtgctaaaaaaaaaaaa

SEQ ID NO: 410224 - DNA, 206 bp, Homo sapiens
tttaaagagctatctaaaaaatataaagaccaataggtttccaattaagtacagatggtaaataatagttgatattcagatgtgtaaaaattacacaaaaagcaatacttattttaaacttcccaaatgtgatcttcatagtttaagaacacactgtctctactgaacatacaaaaattagccagtcatggtggtgggtgcctgta

SEQ ID NO: 410225 - DNA, 387 bp, Homo sapiens
ttctgaatgaagacttaaaagatcttatccatgtttatttgtaaactataccagtattgaaactgatttagttccgttattccacaacccaatagataaaacacgtttgcaaatttgtacaaaagaccaaaaaagtactgcctaagataatataacactaactaataaatatacaagatagtaaaattagactttcaagtatgtatgaatgattgccctaagctgcaatatagcagagtattttttcccctgtaaagagttgttattttaaggaaataattcttgtattttaagaaaaacacacattctgaccagatgggaaactatacagtgtgtaactcaggtgtcctttttccttcagggcaggacctgttcttagctataagt

SEQ ID NO: 410226 - DNA, 548 bp, Homo sapiens
gtgaggttactattgaatgtaaaacaaggtactggacatcaagcatggtgctgttttctatccagcctgtccaaactgtcatctcagcaaagaagtaaggctgaaacctggggttattggaaagtaattctaatctgctttgaccattgacctgggaatgtcctgaaagatttatgtgattttgtggaatgtttcatttacattcagtggaagtagctcttcttcccaaccgtgaatttgggaaataaggtaacagtttgtctactagttgtccttcctctataagtatttctggaatagtgctgaaaagcttaacaaaaatctagttgttaaaaaatgtgattatgttgaaaataccaactttttagaattatttatgacatcatccatatatgatttaaatcgtgaatattacgacatttgtaatgctttaccagttacagagtgctttcatttactgttacataatttgaaatcagctcttggagatgaaatgattctctaagtcattgtggtgtctggaaaaaaaaaaaaaaaaaggccggcac

SEQ ID NO: 410227 - DNA, 604 bp, Homo sapiens
cccctagaaggggccggaggggcagagccccgtcagcctcccgaccctctgcaggaaatgtctgtgggaagaattcggagagcagggctgtcgcgtcccgagggtgggtcacgtggctgttgtcattccgcaaacactgttttgtacaaagctctgacccaggcccctcccgcgccgcctcacaccatcgtgtgcgcctcagattctcctcgtggctggagctcagcgccttcttctttagggatagggccagcttcctcaggggtcctggagtttcggggcagggcaggggcagccggctggtgtgtcctcttaatggctcgtgggcgtcggaaatcctcagaaatgcccaccagccctggtaccacagggagaggcgtctccgggggtttagaaatggagtctcagggctgggctcacacctgtcctccccgcactttgggaggccgaggcaggcagatcacatgaggtcaggagtttgagaccagcctggccaacatggtgaaaccccgtctctactaaaaatacaaaaattagccaggcatggtggcatgtgcctgtagtcctagctacttgggaggctgaggcaggagaatcgcttgaa

SEQ ID NO: 410228 - DNA, 463 bp, Homo sapiens
gcttctctgatttttttttccaacagttgttctgaatctttagcatgtccagtaattttttaataactttttattattgtagtaaaaacataaaattaatgatcttaaccatatttaagtgtacaatagtgtcaatattcaaacatattattcaaaaaataatcaaaatataaaagcattttagtgcgatagtatttattggagtatgtatagcagctactccagccacagttttctttctctgtaacactcaatgattcctgaagtagaaagattcccagtacatatgtttaaatgaatgctatttttaaagatacctaatccagatggtatggctagggcctattttatagcctgtttaaaaaaataaaataaaataaaattgggtggtttgtatgtggtagaagtgaattccagcaaaaggagaattcattcatttagacctttttttttgtttgagacg

SEQ ID NO: 410229 - DNA, 461 bp, Homo sapiens
ggcagggaggcggagcttgcagtaagctgagatggtgccactgcactccagcctgggcaacaaagcgagactctgtctcaaaaaaaaaattgtgaaggcttctctgatttttttttccaacagttgttctgaatctttagcatgtccagtaattttttaataactttttattattgtagtaaaaacataaaattaatgatcttaaccatatttaagtgtacaatagtgtcaatattcaaacatattattcaaaaaataatcaaaatataaaagcattttagtgcgatagtatttattggagtatgtatagcagctactccagccacagttttctttctctgtaacactcaatgattcctgaagtagaaagattcccagtacatatgtttaaatgaatgctatttttaaagatacctaatccagatggtatggctagggcctattttatagcctgtttaaaa

SEQ ID NO: 410230 - DNA, 480 bp, Homo sapiens
  misc_feature (44)..(44): n is a, c, g, or t
attcgcggccgcgtcgacgttagcccagtttatcctttcttgtnatgagctaacaaactgctacaaactgaaggaccttttcaaaaaagcaaactgaaggaccttttcaaaaaagcaagctcaatggaaaattccctgattggtaaattttccagatacaaaatttccaagcatctcaagaccatagttctcctaagtcactacttctgggatatgggaagtttccttcatgtactgtaagctgctgacatcatgcacataaatgtaaaccaaaacatgtatttcatcaaagtaactaacatgatgatgagaaacaggatattttgaaacatatttataagcaaaacatataggtcagattaagccattgaagcatctcctcagattttttagattactctgaataagaaatattttcaaaaatgatggaaatatctgtagttttacatgtgtggctgctattgaaatctctattaaccc

SEQ ID NO: 410231 - DNA, 785 bp, Homo sapiens
cccatgtctactaaaaatacaaaaatggtggtgggcccctgtaatcccagctacttgggacgctgaggcaggagaatcgcttgaacctgggaggcagaagttgcagtgagccgagatcgcaccactgcactccagcctgggagatagagcaagactccatctaaaaaaaaaaaaaaaaattaaaacaatacattagcaaaacgaggaaaaccatatgggcacgtcattcgatgtagaaaaacatttgccaacacttctacctctattcacagcaaaaactctgcacaaaccaggaatggaaggaaacatcttcagccttatgagacgcatccgggaaacagtgcagctcccatcatactcatcagtgaaagagtgagtgcttcccctcggcatgttctatacagcactggatgggagtctgcccaggcaggaggcggctgtcagagaaaatcagaactgccttgatgggcagacgacagggccatcgatgtcataaaggttgtaaggcctctacaaaacagtactagagctaaagagtaagagagttcagagaggtcacaggactcaagctcattcttgttctcggcacgggccagctccccgggaatgtcctaatttcaggcatctctcctccctggtggcagcgccgccccattccccagcccttatgttctcattccaggatgatcttgtcctccacgctcctcgctccaacctacaaggtgggccgtgcatccctgtgggtcgagaagaacccagctgttctctcttcaaaacagacatct

SEQ ID NO: 410232 - DNA, 1527 bp, Homo sapiens
gggctggaaagctcattcttcttcttcctcccagcagctctgcctggaagtcccccaatccctgtgctcctgcccccagatcgtgggcttgggggacagcaagaaagctgcaaaggactcagctggggcggctccacaaggaccccacaggcttgaggtgttgccaggattctatcccagggggttttctgggtcccccagagccctctcaagcacggggaggcagaagggtcctcgcccatttcaggaatctgcagcctggaagccacagccatggcaggcccccgatacccagtttcagtgcaaggggcagccctggtgcagatcaagaggctccaaacgtttgccttctctgtgcgctggtcagacggcagcgacaccttcgtgcgcaggagttgggacgaattcaggcagctcaagaccctcaaggagaccttcccggtggaggcgggcctgctgcggagatctgaccgcgttctcccaaagcttctcgatgcaccactgttgggacgcgtggggcgcacgagccgcggcctggcgcgcctgcagctgttggaaacctattctcggaggctgctggcgactgcagagcgcgtggcacggagcccgacgatcactggcttcttcgcaccgcaacccctggacctggagcccgcgctgccacccggcagccgggtgatcctgcccaccccagaggagcagcctctttctcgcgctgcgggccgcctctccatccacagtctggaggctcagagcctgcgctgcctgcagcccttctgtacccaggacacgcgggataggccttttcaggcgcaggcccaggagagcctggacgtgctgctgcggcacccctcaggctggtggctggtggagaacgaagaccggcagaccgcctggtttccagcgccctacctggaggaggcggccccgggccaaggccgggagggaggcccgtccctagggagcagcggtccccagttctgtgcttcccgcgcctacgagagcagccgcgcagatgagctgtccgtgcccgcgggggcgcgcgtgcgcgtgttggaaacgtcagaccgcggctggtggctatgcaggtacggcgaccgggcgggcctactccccgcggtgctgctgcggccggaagggctgggcgctctcctgagcgggacggggttccgtggaggagacgacccggcgggtgaggcccggggcttccctgaaccctcccaggccaccgcccctccccccaccgtgcccacccgaccttcgccgggcgccatccagagccgctgctgcaccgtcacacgcagggccctggagcggcgcccacggcgccagggccgccctcgagggtgcgtggactctgtgccgcaccccacgacggagcagtgagcgcgaggatcccgatgaggggatggaccgcgccatcccagggctggggaggagcggggagggcggatctccctggccagcagggatgggagggggccatttgctgttcctctgagtaaagcttgttctgcatgaccccca

SEQ ID NO: 410233 - DNA, 658 bp, Homo sapiens
ccccccgtcagcagactcaagcaaggagaatgtggagaagggtgcgggcgggcctcgtcctctgtggccccgcggtgactccaaacacccactcccaccaggtccccagttctgtgcttcccgcgcctacgagagcagccgcgcagatgagctgtccgtgcccgcgggggcgcgcgtgcgcgtgttggaaacgtcagaccgcggctggtggctatgcaggtacggcgaccgggcgggcctactccccgcggtgctgctgcggccggaagggctgggcgctctcctgagcgggacggggttccgtggaggagacgacccggcgggtgaggcccggggcttccctgaaccctcccaggccaccgcccctccccccaccgtgcccacccgaccttcgccgggcgccatccagagccgctgctgcaccgtcacacgcagggccctggagcggcgcccacggcgccagggccgccctcgagggtgcgtggactctgtgccgcaccccacgacggagcagtgagcgcgaggatcccgatgaggggatggaccgcgccatcccagggctggggaggagcggggagggcggatctccctggccagcagggatgggagggggccatttgctgttcctctgagtaaagcttgttctgcatgaccccca

SEQ ID NO: 410234 - DNA, 555 bp, Homo sapiens
gggctggaaagctcattcttcttcttcctcccagcagctctgcctggaagtcccccaatccctgtgctcctgcccccagatcgtgggcttgggggacagcaagaaagctgcaaaggactcagctggggcggctccacaaggaccccacaggcttgaggtgttgccaggattctatcccagggggttttctgggtcccccagagccctctcaagcacggggaggcagaagggtcctcgcccatttcaggaatctgcagcctggaagccacagccatggcaggcccccgatacccagtttcagtgcaaggggcagccctggtgcagatcaagaggctccaaacgtttgccttctctgtgcgctggtcagacggcagcgacaccttcgtgcgcaggagttgggacgaattcaggcagctcaagaccctcaaggagaccttcccggtggaggcgggcctgctgcggagatctgaccgcgttctcccaaagcttctcggtcaggccagcctgggtacgggagcggggaaggcggtggcttgcctgggggcgccagggacc

SEQ ID NO: 410235 - DNA, 478 bp, Homo sapiens
gatttgagtccctgcccgcttcttgcgcacaggctggtggctggtggagaacgaagaccggcagaccgcctggtttccagcgccctacctggaggaggcggccccgggccaaggccgggagggaggcccgtccctagggagcagcggtatgcgcctaaccccacccctcacgccaccactgcggcttgaccgtgtggcaagactgggccagaagcaccgcgggcagggcgggccaggagcccgtgcttggtctccgcacctagaggaagccccgaaccggtcttagagcggccccccgtcagcagactcaagcaaggagaatgtggagaagggtgcgggcgggcctcgtcctctgtggccccgcggtgactccaaacacccactcccaccaggtccccagttctgtgcttcccgcgcctacgagagcagccgcgcagatgagctgtccgtgcccgcgggggcgcgcgtgcgcgtgttg

SEQ ID NO: 410236 - DNA, 622 bp, Homo sapiens
gcggctgcctcccactggactgcctcccatcagtgactcccactggaggcccttcgtccctgctgaagctcccagcccctgccatccgggtgagggaccccgccctctcaagggtgcacagtgggctctggaagaccaatgccctggttcccgccctcagaagaccctcaaggagaccttcccggtggaggcgggcctgctgcggagatctgaccgcgttctcccaaagcttctcggtcaggccagcctgggtacgggagcggggaaggcggtggcttgcctgggggcgccagggaccagtgaagcccaaagcggcgtatcacagtacgtttttgtggtgccttaagatgcaccactgttgggacgcgtggggcgcacgagccgcggcctggcgcgcctgcagctgttggaaacctattctcggaggctgctggcgactgcagagcgcgtggcacggagcccgacgatcactggcttcttcgcaccgcaacccctggacctggagcccgcgctgccacccggcaggtgcctgactcgccccaaactcccagcatgcagcggcgtttggagctgggagaggtccagggtgggggggaacagccagcgaataggggcagagagt

SEQ ID NO: 410237 - DNA, 3929 bp, Homo sapiens
  misc_feature (2517)..(2517): n is a, c, g, or t
  misc_feature (3291)..(3291): n is a, c, g, or t
  misc_feature (3504)..(3504): n is a, c, g, or t
gaggccaccatgcaggatgtccaaggcccccgtcccggaagccccggggatgctgaagaccggcgggagctgggcttgcacaggggcgaggtcaactttggagggtctgggaagaagcgaggcaagtttgtacgggtgccgagcggagtggccccgtctgtgctctttgacctgctgcttgctgagtggcacctgccggcccccaacctggtggtgtccctggtgggtgaggagcagcctttcgccatgaagtcctggctgcgggatgtgctgcgcaaggggctggtgaaggcggctcagagcacaggagcctggatcctgaccagtgccctccgcgtgggcctggccaggcatgtcgggcaggccgtgcgcgaccactcgctggccagcacgtccaccaaggtccgtgtggttgctgtcggcatggcctcgctgggccgcgtcctgcaccgccgcattctggaggaggcccaggaggattttcctgtccactaccctgaggatgacggcggcagccagggccccctctgttcactggacagcaacctctcccacttcatcctggtggagccaggccccccggggaagggcgatgggctgacggagctgcggctgaggctggagaagcacatctcggagcagagggcgggctacgggggcactggcagcatcgagatccctgtcctctgcttgctggtcaatggtgatcccaacaccttggagaggatctccagggccgtggagcaggctgccccgtggctgatcctggtaggctcggggggcatcgccgatgtgcttgctgccctagtgaaccagccccacctcctggtgcccaaggtggccgagaagcagtttaaggagaagttccccagcaagcatttctcttgggaggacatcgtgcgctggaccaagctgctgcagaacatcacctcacaccagcacctgctcaccgtgtatgacttcgagcaggagggctccgaggagctggacacggtcatcctgaaggcgctggtgaaagcctgcaagagccacagccaggagcctcaggactatctggatgagctcaagctggccgtggcctgggaccgcgtggacatcgccaagagtgagatcttcaatggggacgtggagtggaagtcctgtgacctggaggaggtgatggtggacgccctggtcagcaacaagcccgagtttgtgcgcctctttgtggacaacggcgcagacgtggccgacttcctgacgtatgggcggctgcaggagctctaccgctccgtgtcacgcaagagcctgctcttcgacctgctgcagcggaagcaggaggaggcccggctgacgctggccggcctgggcacccagcaggcccgggagccacccgcggggccaccggccttctccctgcacgaggtctcccgcgtactcaaggacttcctgcaggacgcctgccgaggcttctaccaggacggccggccaggggaccgcaggagggcggagaagggcccggccaagcggcccacgggccagaagtggctgctggacctgaaccagaagagcgagaacccctggcgggacctgttcctgtgggccgtgctgcagaaccgccacgagatggccacctacttctgggccatgggccaggaaggtgtggcagccgcactggccgcctgcaaaatcctcaaagagatgtcgcacctggagacggaggccgaggcggcccgagccacgcgcgaggcgaaatacgagcggctggcccttgacctcttctccgagtgctacagcaacagtgaggcccgcgccttcgccctgctggtgcgccggaaccgctgctggagcaagaccacctgcctgcacctggccaccgaggctgacgccaaggccttctttgcccacgacggcgttcaggccttcctgaccaggatctggtggggggacatggccgcaggcacgcccatcctgcggctgctaggagccttcctctgccccgccctcgtctataccaacctcatcaccttcagtgaggaagctcccctgaggacaggcctggaggacctgcaggacctggacagcctggacacggagaagagcccgctgtatggcctgcagagccgggtggaggagctggtggaggcgccgagggctcagggtgaccgaggcccacgtgctgtcttcctgctcacacgctggcggaaattctggggcgctcccgtgactgtgttcctggggaacgtggtcatgtacttcgccttcctcttcctgttcacctacgtcctgctggtggacttcaggccgcccccccagggcccctcagggcccgaggtcaccctctacttctgggtctttacgctggtgctggaggaaatccggcagggcttcttcacagacgaggacacacacctggtgaagaagttcacactgtatgtgggggacaactggaacaagtgtgacatggtggccatcttcctgttcatcgtgggtgtcacctgcaggatgctgccgtcggcgtttgaggctggccgcacngtcctcgccatggacttcatggtgttcacgctgcggctgatccatatctttgccatacacaagcagctgggccccaagatcatcgtggtagagcgcatgatgaaggacgtcttcttcttcctcttctttctgagcgtgtggctcgtggcctacggtgtcaccacccaggcgctgctgcacccccatgacggccgcctggagtggatcttccgccgggtgctctaccggccctacctgcagatcttcggccagatcccactggacgagattgatgaagcccgtgtgaactgctccacccacccactgctgctggaggactcaccatcctgccccagcctctatgccaactggctggtcatcctcctgctggtcaccttcctgttggtcaccaatgtgctgctcatgaacctgctcatcgccatgttcagctacacgttccaggtggtgcagggcaacgcagacatgttctggaagttccagcgctacaacctgattgtggagtaccacgagcgccccgccctggccccgcccttcatcctgctcagccacctgagcctgacgctccgccgggtcttcaagaaggaggctgagcacaagcgggagcacctggagagagacctgccagaccccctggaccagaaggtcgtcacctgggagacagtccagaaggagaacttcctgagcaagatggagaagcggaggagggacagcgagggggaggtgctgcggaaaaccgcccacagagtggacttcattgccaagtacctcgggggnctgagagagcaagaaaagcgcatcaagtgtctggagtcacagatcaactactgctcggtgctcgtgtcctccgtggctgacgtgctggcccagggtggcggcccccggagctctcagcactgtggcgagggaagccagctggtggctgctgaccacagaggtggtttagatggctgggaacaacccggggctggccagcctccctcggacacntgagctgcttggcctgccacgtgtggggccacctctcctcagctggccaccctgcacgttgtgcactgacctttgccgacctccagcggaaccccccagggggcaccagccccccagcagacaatggccctcctggtgcctcaccacagaccctcacccaaaggaaccgctccttgtccctcctggcctccccggaggcacagcagtgtcatggggctgtctcccctgacaggcacaactccccgggcagaaaacgtgccccaccgcatccctacctggaaactgaccagcctgcactgtggaaaagctggccctgtggcgtgacgggggagcacccccatccagactgcgaagctgctctggggtctgcacccacccctgccctgacttgtgttgcctgacaagagactcatctttttttgaaa

SEQ ID NO: 410238 - DNA, 3199 bp, Homo sapiens
  misc_feature (2517)..(2517): n is a, c, g, or t
gaggccaccatgcaggatgtccaaggcccccgtcccggaagccccggggatgctgaagaccggcgggagctgggcttgcacaggggcgaggtcaactttggagggtctgggaagaagcgaggcaagtttgtacgggtgccgagcggagtggccccgtctgtgctctttgacctgctgcttgctgagtggcacctgccggcccccaacctggtggtgtccctggtgggtgaggagcagcctttcgccatgaagtcctggctgcgggatgtgctgcgcaaggggctggtgaaggcggctcagagcacaggagcctggatcctgaccagtgccctccgcgtgggcctggccaggcatgtcgggcaggccgtgcgcgaccactcgctggccagcacgtccaccaaggtccgtgtggttgctgtcggcatggcctcgctgggccgcgtcctgcaccgccgcattctggaggaggcccaggaggattttcctgtccactaccctgaggatgacggcggcagccagggccccctctgttcactggacagcaacctctcccacttcatcctggtggagccaggccccccggggaagggcgatgggctgacggagctgcggctgaggctggagaagcacatctcggagcagagggcgggctacgggggcactggcagcatcgagatccctgtcctctgcttgctggtcaatggtgatcccaacaccttggagaggatctccagggccgtggagcaggctgccccgtggctgatcctggtaggctcggggggcatcgccgatgtgcttgctgccctagtgaaccagccccacctcctggtgcccaaggtggccgagaagcagtttaaggagaagttccccagcaagcatttctcttgggaggacatcgtgcgctggaccaagctgctgcagaacatcacctcacaccagcacctgctcaccgtgtatgacttcgagcaggagggctccgaggagctggacacggtcatcctgaaggcgctggtgaaagcctgcaagagccacagccaggagcctcaggactatctggatgagctcaagctggccgtggcctgggaccgcgtggacatcgccaagagtgagatcttcaatggggacgtggagtggaagtcctgtgacctggaggaggtgatggtggacgccctggtcagcaacaagcccgagtttgtgcgcctctttgtggacaacggcgcagacgtggccgacttcctgacgtatgggcggctgcaggagctctaccgctccgtgtcacgcaagagcctgctcttcgacctgctgcagcggaagcaggaggaggcccggctgacgctggccggcctgggcacccagcaggcccgggagccacccgcggggccaccggccttctccctgcacgaggtctcccgcgtactcaaggacttcctgcaggacgcctgccgaggcttctaccaggacggccggccaggggaccgcaggagggcggagaagggcccggccaagcggcccacgggccagaagtggctgctggacctgaaccagaagagcgagaacccctggcgggacctgttcctgtgggccgtgctgcagaaccgccacgagatggccacctacttctgggccatgggccaggaaggtgtggcagccgcactggccgcctgcaaaatcctcaaagagatgtcgcacctggagacggaggccgaggcggcccgagccacgcgcgaggcgaaatacgagcggctggcccttgacctcttctccgagtgctacagcaacagtgaggcccgcgccttcgccctgctggtgcgccggaaccgctgctggagcaagaccacctgcctgcacctggccaccgaggctgacgccaaggccttctttgcccacgacggcgttcaggccttcctgaccaggatctggtggggggacatggccgcaggcacgcccatcctgcggctgctaggagccttcctctgccccgccctcgtctataccaacctcatcaccttcagtgaggaagctcccctgaggacaggcctggaggacctgcaggacctggacagcctggacacggagaagagcccgctgtatggcctgcagagccgggtggaggagctggtggaggcgccgagggctcagggtgaccgaggcccacgtgctgtcttcctgctcacacgctggcggaaattctggggcgctcccgtgactgtgttcctggggaacgtggtcatgtacttcgccttcctcttcctgttcacctacgtcctgctggtggacttcaggccgcccccccagggcccctcagggcccgaggtcaccctctacttctgggtctttacgctggtgctggaggaaatccggcagggcttcttcacagacgaggacacacacctggtgaagaagttcacactgtatgtgggggacaactggaacaagtgtgacatggtggccatcttcctgttcatcgtgggtgtcacctgcaggatgctgccgtcggcgtttgaggctggccgcacngtcctcgccatggacttcatggtgttcacgctgcggctgatccatatctttgccatacacaagcagctgggccccaagatcatcgtggtagagcgcatgatgaaggacgtcttcttcttcctcttctttctgagcgtgtggctcgtggcctacggtgtcaccacccaggcgctgctgcacccccatgacggccgcctggagtggatcttccgccgggtgctctaccggccctacctgcagatcttcggccagatcccactggacgagattgatgaagcccgtgtgaactgctccacccacccactgctgctggaggactcaccatcctgccccagcctctatgccaactggctggtcatcctccagccccccagcagacaatggccctcctggtgcctcaccacagaccctcacccaaaggaaccgctccttgtccctcctggcctccccggaggcacagcagtgtcatggggctgtctcccctgacaggcacaactccccgggcagaaaacgtgccccaccgcatccctacctggaaactgaccagcctgcactgtggaaaagctggccctgtggcgtgacgggggagcacccccatccagactgcgaagctgctctggggtctgcacccacccctgccctgacttgtgttgcctgacaagagactcatctttttttgaaa

SEQ ID NO: 410239 - DNA, 774 bp, Homo sapiens
cagccctttgagtttggtgttgttcccatttatcaggtacagaaagtgaggaacagaatgtttgcggctagacagatttggcactggttcagggtcacccacagtaagcaggggaactggaatctgagcctgcatctctccagctccaaagcctgggtgcacagcctccacgccaccctgctttctgcttgtcaggaagcatagctggcccaggcaggtgctgccactgaaatgaccactttgaaacaaccctgcaggcaaatccttgtgaaagaatttgagagaagcctttccctgcctgtcctccctaagcctggaaggccaatccctccatgcaaatgggctgggctctgagcttcagccctttcagggttaaacagtaacctttccactgcttgtggttgagcaaatgctagcaaggaacaagcccagccttgagcaaacaagacactgggccctggcccccctccttccaccagccacccggtctggggacttagagattttctttcgtcttgaagttcccaatctgatttcttagctttagggcaattgctctacaaagttggatgggaaaatacccagttattatgaaaaaggaaagaaggtttgacttgaggttgttttctttctctgagggtgagaatcaaagagcttttcagaaaaggaacttatgatcagtatagtcaccatctgtaaattttcaagtggggaaactgaggcccagcatcatttctggttcaggctatccacagagctagtgacgctcctcat

SEQ ID NO: 410240 - DNA, 291 bp, Homo sapiens
ctctgtgtgtgtgtgtgatctgctttatttgattatgtaagataaccctggaaggtcacttaagaaactgataggccaggcgtggtggctcatgcctgtaatcccagcactttgcgaagctgaggcaggaggatcacctgaggtcaggagttcaagaccagcctggccaacatggcaaaaccccacctctactaaaaatacaaaacttagcggggtgtggtggctcatgcctgtaatcccagctacttgggaggcggaggtgggagaatcgcttgaacctgggaggcggag

SEQ ID NO: 410241 - DNA, 344 bp, Homo sapiens
attgtggtagcgtcgacaaataaaatattattcattgataaacagaaatagctatcaagccacaaaaagaaatggatgaatcttaagtgcatattgctaagtgaaaggctacatactctatggttccaattatatgatattctggaaaagtgactgtagtaatagtaaaactattagtggttgctggcagaggaagcagggttgagtaggtgaagtacagagaattttttagggtggtgatgctattttgtatgatattgtaattatggatatatgatactatgtatttgttaaaacccatagaactttatagtacacagagtgaaccttaatgtatgcaaatg

SEQ ID NO: 410242 - DNA, 269 bp, Homo sapiens
ctggttcttgagcatttctagctgcggcagattcatctctgtgatagtcttggaagttttatttataaaagcctaaaactggaaaaaatcaaatatctatctatagatgacagataaacagattatggcatacccatacaatgaaatgctactcagcaattaaaaaaagaaccattatagatatgtgcagcaatgtgggtgaatttcaaattatgctgaatgagagaagcagctggaccaggaaatggagttcttgtccaccgtcgacg

SEQ ID NO: 410243 - DNA, 619 bp, Homo sapiens
tgggatttggcagatgcttctcatccttagtcttggcttgtgtgtgttttgaggaggaggaccacagagcttaagaatcattctcagcactctgtatcaggcacgcattctctcaagatgacttgccgctattgaagttgactttgatcacctggctgaggtagtgtctgtccgtgttctccactgtaaagttactctctcctctcttttcacactgtactctttggaagagagtcactatgcacagcccacacttaggatgtgggaagtccgctccacctccttgacgatggaatagctatataatttacctggggccgggcacggtggctcacacctgtcatcccagcacttgaatgggaggccgaggagggtgatcacttgaggtcaggagtttgagaccaacctggtcaacatggtgaaaccccgcctctactaaaaatacaaaaaattagccgagtgtggcagcgcatgcctgtgatcccagctactcgggaggctgaggcacaagaatcgcttgaacctgggaggtggaggttgcagtaagccaagattacatcactgcactccaacctgggcaacagagcaagaccctgtgtaaaaaaaaaaaattaaataa

SEQ ID NO: 410244 - DNA, 4935 bp, Homo sapiens
tccaaacccggcaatgttggtggctcttgcattcctctggatgagcgaatctagttggggggttcccgaaggggaaggcgcctgggctttcaatacatcctcctgaatcatactgcgtttcaggttccttagaaaaatttggatgtgtaaaaagaactcttaacggcgatgcaggtcttccacagctaaggaaccaacataaagagaaatgcagacgatataaccagtaatgaccatggtgaagataaagatattcatgaacagaacagtaagaagcctgttatggtctatatccatgggggatcttacatggagggaaccggtaacatgattgatggcagcattttggccagctatgggaacgtcatcgttatcaccattaactaccgtctgggaatactagggtttttaagtaccggtgaccaggcagcaaaaggcaactatgggctcctggatcagattcaagcactgaggtggattgaggagaatgtcggagcctttggcggggaccccaagagagtgactatctttggctcgggggctggggcctcctgtgtcagcctgttgaccctgtcccactactcagaaggtctcttccagaaggccatcattcagagcggcactgccctgtccagctgggcagtgaactaccagccggccaagtacactcggatattggcagacaaggtcggctgcaacatgctggacaccacggacatggtagaatgtctgaagaacaagaactacaaggagctcatccagcagaccatcaccccggccacctaccacatagcctttgggccggtgatcgacggcgacgtcatcccagacgacccccagatcctgatggagcaaggcgagttcctcaactacgacatcatgctgggcgtcaaccaaggggaaggcctgaagttcgtggacggcatcgtggataacgaggacggtgtgacgcccaacgactttgacttctccgtgtccaacttcgtggacaacctttacggctaccctgaagggaaagacactttgcgggagactatcaagttcatgtacacagactgggccgataaggaaaacccggagacgcggcggaaaaccctggtggctctctttactgaccatcagtgggtggcccccgccgtggccaccgccgacctgcacgcgcagtacggctcccccacctacttctatgccttctatcatcactgccaaagcgaaatgaagcccagctgggcagattcggcccatggcgatgaagtcccctatgtcttcggcatccccatgatcggtcccacagagctcttcagttgtaatttctccaagaacgacgtcatgctcagtgccgtggtgatgacctactggacgaacttcgccaaaactggtgatccaaaccaaccagttcctcaggataccaagttcattcatacaaaacccaatcgctttgaagaagtggcctggtccaagtataatcccaaagaccagctctatctgcatattggcttgaaacccagagtgagagatcactaccgggcaacgaaagtggctttctggttggaattggttcctcatttgcacaacttgaacgagatattccagtatgtttcaacaaccacaaaggttcctccaccagacatgacatcatttccctatggcacccggcgatctcccgccaagatatggccaaccaccaaacgcccagcaatcactcctgccaacaatcccaaacactctaaggaccctcacaaaacagggcccgaggacacaactgtcctcattgaaaccaaacgagattattccaccgaattaagtgtcaccattgccgtcggggcgtcgctcctcttcctcaacatcttagcctttgcggcgctgtactacaaaaaggacaagaggcgccatgagactcacaggcaccccagtccccagagaaacaccacaaatgatatcactcacatccagaacgaagagatcatgtctctgcagatgaagcagctggaacacgatcacgagtgtgagtcgctgcaggcacacgacacgctgaggctcacctgccctccagactacaccctcacgctgcgccggtcgccggatgacatcccatttatgacgccaaacaccatcaccatgattccaaacacattgatggggatgcagcctttacacacttttaaaaccttcagtggaggacaaaacagtacaaatttaccccacggacattccaccactagagtatagcttttccctatttcccctcctatccctctgcccctactgctcagcaatgtaaaagagacaaataaggagaaagaaaatctccaaaccaggaatgtttttgtgccactgactttagataaaaatgcaaaagggcagtcatcctgtcccagcagacccttctcattggcattttccagtattgtgagatcaatttctgaccatatgaaatgtgaaaagtatatgtttctgttacaatactgctttaagatttaaaccatgccaacagatgtttcgtgtgactaggacatcaccatttcaaggaactgtgtgtttccaacatcatggtagcagcacacacttccaaagctcagccagggacacttaatattttttaattacaatggaaatttaaacatttttatgtgggctacacaatggatggctcttcttaagtgaagaaagactctataggcttttacacagcacatgaagcagtaatccagaaagaaggaaatgcagaattttattatcaaagtaagcgaattgactgtgcagaaaaattgtagggttctgtggaaggaggtattctgccagcctgaactatatttaagaaactttgtaaaaaataaaaatgtatatagctgtgagctcaaacaaaaactgcagacaaacaaaaaagagaaaagcttttatttgtgttttcagtttgaaagaacttttagcaaggttgtgctttcaaacacatattagtcctaccaccttagttcctctacagcaaaagaggcttttcttcttaattacatgtaaacaaagacatgggattttctgacgtaagattttcatttgtaggaatatgtgatgtcaaatggaagactcagaagttttgtgtggcctatttctccctgtcaggttgcacagatgcatgtagagcattcttaggagaccattgttttagaaaactttgatttgtacatgttagttttcatgaaattgcaacacagagataggtcctaaaagtggaatgtatttaaaacttgttgaattagacacacacacacagacacacacaaagaatcagcagagaaaacaaaatacaagtcctgttctgtagttcttgccctttgaatatatttgggaagagttgcttcctatttcaggaccctgccaaaaaagaagaaagcttgcctttggtggggctatgccccttggagtaaatacagctctgtgttccctagcagctgccggaggatttggctgatgaagtacctgctcagcttagctaatcagattaaaggaagacatgtatgtcttttgtttaagcacctagtcccttatgtatcagtaaacaggtttttaaaaatcttttatgtcatttataggataaaacatatgcttgtctgaaaatatcaccttttgtggatttatctgatcaccaaataataaatattaagaagaatgggggaaaaaggatagaatattaaaactgctttgcataggtttttggggaaattaggatatcttcactgacaagacactgaatggaatttattcacccattttaaattggttacttggggatcagagatttgtctctccaacagcttgtggttttcttattactcattttcaggaaagtttgtagtattacaaggcagaaggaaacacagtagcaatggttgctctatattttgtctttcaaagattactgcattaccaagaaacagtagccaaagatgtttgaagatcatgtcccttagctgcattgtgggttattctagaaatccaatgttaaatgcctctactaaagtggggattccccataaaaattgtccagctacctgactcttttgcaataacaactttgattactgaatccatacactcaaactatagtgatatatcagtgtttgggagtgacctctagaaaaaagaaaactgtttttagaaatacataaaatcacttccaaatcctgttgcttatgttgggttaaatttgaaagcaattctctatatataaatatgtgaaatattatgatctgaacttagcacacatgaagcaacatttctttgctacacagaggtgtcttggaaagatttcattcccaattcatttttcatagatctataatcaggcaatttctgcaagcaatgtatgaccccacctgagcaaccacaaataggctctccatgaaactgcaaaggaactgatgtgtggcatccatgctggttttgtctgtctataatatgaattcaagtatctgttcatatttccaattgtctcctgctagcaatatgtgccacaacatgacagtcttgtgacatcttaaggaaaagaagagttcctgttaaatgaatagctttagcttttacaggggattatgattaaaagtgatttagtacatcttacatgatatctcatttctacgtgaaaagaagttatagaatcttcatagagttccatgagaaaaatatacttgctatttatagaaaacgagaaaaaagaaaaaaatgagaaacaagtaagaaaaaatcctttcctaggcttttccttgatcttcagaggcacacagggtttaatggttccttaggttattattttgaggttttgttctttcttttgccttaagtaatgacagaagatatatatggccagacacatatgtataaacttttcagcagcattttaataataaaatatcacactattttctaatgctttgtacaaac

SEQ ID NO: 410245 - DNA, 718 bp, Homo sapiens
gttaaactccaatgttcttctgtggataactgctcttgccatcaagttcaccctcattgacagccaagcacagtatccagttgtcaacacaaattatggtaaaatccagggcctaagaacaccattacccagtgagatcttgggtccagtggagcagtacttaggggtcccctatgcctcacccccaactggagagaggcggtttcagccaccagaatccccatcctcctggactggcatccgaaatgctactcagttttctgctgtgtgcccccagcacctggatgaaagattcttattgcatgacatgctgcccatctggtttaccaccagtttggatactttgatgacctatgttcaagatcaaaatgaagactgcctttacttaaacatctatgtgcccatggaagatggaaccaacataaagagaaatgcagacgatataaccagtaatgaccatggtgaagataaagatattcatgaacagaacagtaagaagcctgttatggtctatatccatgggggatcttacatggagggaaccggtaacatgattgatggcagcattttggccagctatgggaacgtcatcgttatcaccattaactaccgtctgggaatactaggtatgcaagaggcacgtttgtgtgggagctcaaaaatgtttaattattttaaatctcctttcactaatttaataaattttttttgagttcag

SEQ ID NO: 410246 - DNA, 532 bp, Homo sapiens
gaaccttatttgacccagcagcttccggtttctaaaaccctactcatgcagtgccaggaggaaaataaccaattggcatcacttaatgtttagtgatagaaaaagaaaagcatgcctttgttcattttctactcttctcatttcctgcctcaccattcatcaaatgaaacagtacattttcattttctctatatgacttgtagcatttttgggaatagatgatgcgcttaacatattgctgttcatttatgtgaaaagatatttctgctattgtccaaagagagtgtccatttgcaaaatatctagtgtatgaagacaagttttattttcatttttcccttgtctttatattttaaatgtagttataaaatgagagaacatgggttcacaaagaaacatgaaattcataattaataaatgtgattttctatttgttttaggtatgcaagaggcacgtttgtgtgggagctcaaaaatgtttaattattttaaatctcctttcactaatttaataaattttttttgagttcag

SEQ ID NO: 410247 - DNA, 184 bp, Homo sapiens
ttttaggttcacagtaaaatctagaaaaaggtgcagagagttcccatatatccctgtatacccacagcctttcccactgtcatgctctatgggttttgacaaatgtataatgacatgtattcaccactgtagtattatacaaagtagtttcactgccctaaacatcctttgtttcacctttcca

SEQ ID NO: 410248 - DNA, 578 bp, Homo sapiens
tcattttagtgcagtgacatgctgtgcaccaaaataaattctaggtggatttcaaagagttaaacatttttaaatggaaacaaaactagaagataaaagagaatagtcttcaaatttgtttgggagaaagatttctaactgtcagactacattgtacttttgcagatgatcatgaatatcacatgaagtgagagatgtacaaatacatccccagttacttgtcttcctgtactgacagagaacatttcctttgtcttttataagggaagaaaagactacaattcctttaggatattgcccctaatgcatgctgttctgcctcacagacatttaaaaatctgggctttgtgcagaagcatccagattttcaggaaaacagtgagaacagtagggatagatggatgccaaattacaggtcagaataagactctgctggtacaactataaaccttaacgatggctggtcactgtggctcatgcctataatcccggcaccttgggaagtggaggtgggagattgcttgagtttaggagtttgagatcaccttgggcaacatagggagatctcatctctatgg

SEQ ID NO: 410249 - DNA, 452 bp, Homo sapiens
gacaactggaatccatatgcataagaatgaagttgaaccctaaccctgcaccatatgcaaaatgttaccaccaaatggattaaagacttaaatgtaaactaaagcagtcaaactcttagaagaaatcatgggcacaagtagttgtgactttggattagactgtgatttcttggatgtgacaccaaaagcacaagtggtaaaaagaaagttgataaattgtatttaatcagaatttaaaaattttgtggtttagacaataccaacaagaatggaggccaggtgcagtggctcatacctgtaatcccagcactttgggaggctgaggtgggtagatcacctgaggtcaggagttcgagaccagcctggccaacatggtgaaaccccatctctactaaaaaacaaaaattagccaggcgtggtgctgggcgcctgtaatcccagctacttgggag

SEQ ID NO: 410250 - DNA, 629 bp, Homo sapiens
caggataaagggagcataacaaatcttggctcttaaagcttctgcaagaagtgatgctttggttaaaagaagccacagatccatgcttacctccaaaggggacaaggaagtgcaatccaacaatggacctggaatatttgtgaacaatactagagacaatcacaccaagcctatacattaacctaaaagtaatcaggatcattgaaatccctagtccagagtattcagctgaagagagaaatagtcaaccagaatataaatatgaggaaatctcacaatctgaggagagaaaacatgaaagaccaacttagagacaggatcaagcaaccagggccacctatgtctgagaggaattctggaagataaggctagaaaaaaattggggaaagacaatagtggatgagagaatagatgagaatttttctagaattgaagacaaacctgagacttaagattgaaaaataacacaaaattccaagcaagaaacatacacacacacacacacacacacacacacacacacacacacacacacacaggcccactttggagaaactgcaaaacatcaaagatcaaaagaaaattttaaaagcagctggagagaaataacaggttacttacaaagaaaa

SEQ ID NO: 410251 - DNA, 689 bp, Homo sapiens
aagcaattctcctgcctcagcctcctgagtagctgggaccacaggaggcacacggcatcacgcccggctaatttttgtaattttagtagagacagagtttttcaccgtattggtcaggctggtcttgaactcctgacctcaggtgatccacccacctcagccttccaaagtgctgggattacagactcgagccaccgtgcctggcaaccctaggggttttggccttagcagcagcagtgatagaagctgtatcagctgagatgagcaagttgggagtaggcataatacagtcactgggaatataaggagggttgttttcaccatgctcagaccctgagatgcttgtccacataggttgggatatctgggaaggaattgatattggagacatccagtatatgatagctaatgtgtggactaaggtgcgttagccatgggtcccattttggagggcacacttcataataaggtagtaaatcttttagggaaccagaaaggactgattggaggctgaggactagatgttttgcctgggtccctggcggacattattggcattcataacctgtgttatgcattcacacaggagagggaggtaagtgacaatgaatgtagggtgtatcagagggcatagcttgtcgtggggcagacttccatggagataatagagatgagatgcaggcagaagt

SEQ ID NO: 410252 - DNA, 608 bp, Homo sapiens
aagcaattctcctgcctcagcctcctgagtagctgggaccacaggaggcacacggcatcacgcccggctaatttttgtaattttagtagagacagagtttttcaccgtattggtcaggctggtcttgaactcctgacctcaggtgatccacccacctcagccttccaaagtgctgggattacagactcgagccaccgtgcctggcaaccctaggggttttggccttagcagcagcagtgatagaagctgtatcagctgagatgagcaagttgggagtaggcataatacagtcactgggaatataaggagggttgttttcaccatgctcagaccctgagatgcttgtccacataggttgggatatctgggaaggaattgatattggagacatccagtatatgatagctaatgtgtggactaaggtgcgttagccatgggtcccattttggagggcacacttcataataaggtagtaaatcttttagggaaccagaaaggactgattggaggctgaggactagatgttttgcctgggtccctggcggacatcattgtcacttacctccctctcctgtgtgaatgcataacacaggttatgaatgccaata

SEQ ID NO: 410253 - DNA, 504 bp, Homo sapiens
agacagagagctcaggccatggccccactatgaacaaagtggtcttaggacacagaaaaagagtgattggtctggcttgggagggctagaaaggcattatggatgagggaaaatttgaatcaggccttgacagatgagtagggtttcaggagctttgggaagtgatggttaaatgtgggagtgctaggtagaggcaataaagacgtagaggtggccaagctcagtgtctcacacctataattgcagcactttgggaggccgaggtggtcggatcacctaaggtcaggagttcgagaccagcctgaccaacatggagaaaccctgtctctactaaaaatacaaaattagctgggtgtggtggtgcatgcctgtaagcccagctactcgggaggatgaagcaggagaattgcttgaacctggaaggtggagtttgcagtgagccaagattgtgccattgcactccagcctgggcaacaagagtgaaactccatcttaaaaaaaaaa

SEQ ID NO: 410254 - DNA, 533 bp, Homo sapiens
agagatttctaagcatgacacagcattggtggctcaaagatgggggccgtggaaaatgtgagaagaaatgaattcaaccaacagtgagccccagggtgtttttcctgaatgtgccatttgattccatcatggagcggctgactctgagaagaattgatccagtcactggggaaaggtaccacctcatgtacaagccacctcccaccatggagatccaggctcgcctcctgcagaacccaaaggatgctgaagagcaggtcaagctgaaaatggacctgttctacaggaactcagctgacttggagcagttgtatgggtcggccatcaccctcaatggggaccaggacccatacacagtcttcgaatacatcgagagtgggatcattaatcccctgcccaagaaaatcccctgatgggttcagagccaggagcgctgccccagggaaagagttaatcccctgcccccagccccccagcctcggcacagctcccctaaaaagccaataaagcctgctggatacaaactcatacga

SEQ ID NO: 410255 - DNA, 476 bp, Homo sapiens
gagctcatccagcccttctttgaaaaggagatggcagggtgtttttcctgaatgtgccatttgattccatcatggagcggctgactctgagaagaattgatccagtcactggggaaaggtaccacctcatgtacaagccacctcccaccatggagatccaggctcgcctcctgcagaacccaaaggatgctgaagagcaggtcaagctgaaaatggacctgttctacaggaactcagctgacttggagcagttgtatgggtcggccatcaccctcaatggggaccaggacccatacacagtcttcgaatacatcgagagtgggatcattaatcccctgcccaagaaaatcccctgatgggttcagagccaggagcgctgccccagggaaagagttaatcccctgcccccagccccccagcctcggcacagctcccctaaaaagccaataaagcctgctggatacaaactcatacga

SEQ ID NO: 410256 - DNA, 503 bp, Homo sapiens
atgtcacagcatcataaaatacaggaaataaaaaccattattaatatggtttatttccttatagggtgtttttcctgaatgtgccatttgattccatcatggagcggctgactctgagaagaattgatccagtcactggggaaaggtaccacctcatgtacaagccacctcccaccatggagatccaggctcgcctcctgcagaacccaaaggatgctgaagagcaggtcaagctgaaaatggacctgttctacaggaactcagctgacttggagcagttgtatgggtcggccatcaccctcaatggggaccaggacccatacacagtcttcgaatacatcgagagtgggatcattaatcccctgcccaagaaaatcccctgatgggttcagagccaggagcgctgccccagggaaagagttaatcccctgcccccagccccccagcctcggcacagctcccctaaaaagccaataaagcctgctggatacaaactcatacga

SEQ ID NO: 410257 - DNA, 464 bp, Homo sapiens
accgcctgggctacaatcccaacagggtgtttttcctgaatgtgccatttgattccatcatggagcggctgactctgagaagaattgatccagtcactggggaaaggtaccacctcatgtacaagccacctcccaccatggagatccaggctcgcctcctgcagaacccaaaggatgctgaagagcaggtcaagctgaaaatggacctgttctacaggaactcagctgacttggagcagttgtatgggtcggccatcaccctcaatggggaccaggacccatacacagtcttcgaatacatcgagagtgggatcattaatcccctgcccaagaaaatcccctgatgggttcagagccaggagcgctgccccagggaaagagttaatcccctgcccccagccccccagcctcggcacagctcccctaaaaagccaataaagcctgctggatacaaactcatacga

SEQ ID NO: 410258 - DNA, 411 bp, Homo sapiens
tgcatccagaaaggctgggtgctacacggcgtcccgcgggacctcgaccaggcacacctgctgaaccgcctgggctacaatcccaacaggtgagctgccccagccaagccagcagccctggccaagcccctgggcaccccctctccagggctcagctgaaggggtccaggttacacaagccttcacgtgttcctgaagtggaatgtctcctggtcatccccattcccacccatcccatctgcccggtggactaggagtcaggcttgggttcaaatcctggctttcaccctccttgatggaccctcatctgtaaaacagtaataaataccagtcttgccttccttggggaattgttatacaaatcaatggatgttttcttctactatttttacagtttcatttttatattta

SEQ ID NO: 410259 - DNA, 399 bp, Homo sapiens
  misc_feature (383)..(384): n is a, c, g, or t
acaaaagcgtctgccaacccctgtgttaggtaatgaaaaaaaaaaacaattcatctttgaatttataacagtagctaatctttgaacagcactttagagtttacaaagtctgaccatgttatgttgtaataggtattattatcttcacttaactgatgaagaaattgccgacttttcttcttcttttaaattatactttaagttctagggtacaagtgcacaacgtgcaggtttgttacatatgtatacatgtgtcatgttggtgtgctgcacccattaactcgtcattcacattaggtattcctcctaatgctatctgtccccactgcccccaccccatgacaggccccggtgtgtgatgttccccacgtcgacgcggccgnnaatttagtagtagta

SEQ ID NO: 410260 - DNA, 439 bp, Homo sapiens
atgaagtttttacattaatttttggggtagaaaatacactgacaggattcaacgttgaaaaaaatgaaaagatgtactacagagtgtcttagtcccaccccagctcacagctacttagttctcctccctcaagcaaccatgttattagtttcttaggtatctttccattgaaagaaaatacatattcatatatatatataattttaacagctttttgagataaaattaacatgcatacaattcatccatttaaagtgtaattcaagccaggcgcggtggctcacatctgtaattccaacactttgagattacaggcaggaggatcgcttgagcccaagagtttgggaccaatctgagcaatatagcaagaccccatctctacaaagaataaagaaaaattagactagcttggtggcatgtgcctgtggtcccagctact

SEQ ID NO: 410261 - DNA, 216 bp, Homo sapiens
gtgtgagccaccgcgcccagcttcaacatgcattttaaccatgagaaaatcaaggaaaacccaatttatctgacttcaaatttcttgccctttcaatgaagctccctctagattacacttttttgcagaggtaagaaatggtttcagagaatggattcccctgaagtcacaggagacaaagttttaccaggctgggtaggagggaagggggtggaa

SEQ ID NO: 410262 - DNA, 509 bp, Homo sapiens
gtccagacccccagtccctcctccttcaggcccaggagtccagacccccagcccctcctccctcagacccaggagtccagaccccagcccctcctccctcagactcaggagtccaggcccccagcccctcctccctcagacccaggagtccagaccccagcccctccttctccccggccagagggagagcttggtctctggacctgccttaggaaggagagggagggcaggaaggaaaagaaaggacttggaggtggcaggagtccgagccctgctccttgtgggcgctcacactgcccccggagcctgctgggagtggggccagccgtggacagctgaggttggggtcaatgcctcctgggcacccttgcctcgccccagaccggcccgtccagtccccatcacacctcggcggcctttatttattctgttcccccagctcggccacttctctgaaggagggctgggttctgggcctgtatcgaataaacacaaacctggatggcgca

SEQ ID NO: 410263 - DNA, 2261 bp, Homo sapiens
gcggggttagacgctgtcagcctgtccagaccgttcctctgttttcgcttgttcctactaacagcgagcttccgccaatacttgttctcgttcttggttccgagcgtcccgggagccgggaagggaaggattgtctgcagggattggagcaaatatccagtggggggaaagccgggacttccgcgtcttgccggaagtgacgtgacaatcgcggccaccgccaggtggaacggcaggtgggttcaggtaccagcctggccgggacccggctgtgggaccaacgcttccggtgagcgacagaggcagctccccagggcctggagacccgtggggcggactctgggatctgagcctatcgccctggcctggagcccccctttgtacctattccccattcccctaccgagctgggcagttagccagcccactccaactctcggaaccatgtttgcagacttggattatgacatcgaagaggataaactcggaatcccgactgtgcctgggaaggtgaccctgcagaaggatgctcagaacctgatcgggatcagcattggaggaggggcccagtactgtccctgcctctatatcgtccaggtatttgacaacaccccagcagccttggacggcacagtggcagctggcgatgagatcaccggtgtcaatggcaggtcaatcaaagggaaaactaaggtggaggtggcgaagatgattcaggaggtgaagggggaggtgaccatccactacaacaagctgcaggcggaccccaagcagggcatgtccctggacattgtgttgaagaaagtcaagcaccggctggtggagaacatgagttcagggaccgcagatgctctgggcctgagccgggccatcctgtgcaatgatgggcttgtcaagaggctagaggagctggagcggaccgctgagctatacaaagggatgacggaacacaccaagaacctcctacgggccttttatgagctgtcgcagactcaccgggcctttggggacgtgttctccgtgatcggggtgcgggagccccagccagctgcgagcgaggcttttgtgaagttcgccgatgcccaccgcagcatcgagaagttcggcattcggcttctgaaaaccatcaagccgatgctgacggatctgaacacgtacctcaacaaagccatcccggacactcgcctcaccatcaagaagtacctggacgtgaagtttgagtacctgtcgtactgcctgaaggtgaaggagatggatgacgaggaatacagctgcattgccctaggcgagcccctttaccgggtgagcaccggcaactatgagtaccgcctgatcctgcgctgccgccaggaggcgcgcgcccgcttctcccagatgcgcaaggatgtgctggagaagatggagctgctggaccagaagcacgtccaggacatcgtgttccagctgcagcgcctcgtgtccaccatgtccaagtactacaacgactgctacgcagtgctgcgggatgccgacgtcttccccatcgaggtagacctggcgcacaccacattggcctatggcctcaaccaggaggagttcacagatggggaggaggaggaggaggaggaagacacggcagctggggagccgtccagggatacacgaggggctgctgggcccttggacaagggtggaagctggtgtgactcctgagtgccccgcggctgtggtgccgggggcagggtgcgtgggaggacggagcctgggagcggggcggggccgccgcgcaagggggcgacgcataaaggcctgctggcttggggcgcctgcctccctgctcctctgtcctcgcacagcgaacctgggctcctgcccaggacaggcaccagggtcatggcctgggacctggacactggcccctccaccctccctcccctcccggctccccggccagagggagagcttggtctctggacctgccttaggaaggagagggagggcaggaaggaaaagaaaggacttggaggtggcaggagtccgagccctgctccttgtgggcgctcacactgcccccggagcctgctgggagtggggccagccgtggacagctgaggttggggtcaatgcctcctgggcacccttgcctcgccccagaccggcccgtccagtccccatcacacctcggcggcctttatttattctgttcccccagctcggccacttctctgaaggagggctgggttctgggcctgtatcgaataaacacaaacctggatggcgca

SEQ ID NO: 410264 - DNA, 2163 bp, Homo sapiens
gcggggttagacgctgtcagcctgtccagaccgttcctctgttttcgcttgttcctactaacagcgagcttccgccaatacttgttctcgttcttggttccgagcgtcccgggagccgggaagggaaggattgtctgcagggattggagcaaatatccagtggggggaaagccgggacttccgcgtcttgccggaagtgacgtgacaatcgcggccaccgccaggtggaacggcaggtgggttcaggtaccagcctggccgggacccggctgtgggaccaacgcttccgttccccattcccctaccgagctgggcagttagccagcccactccaactctcggaaccatgtttgcagacttggattatgacatcgaagaggataaactcggaatcccgactgtgcctgggaaggtgaccctgcagaaggatgctcagaacctgatcgggatcagcattggaggaggggcccagtactgtccctgcctctatatcgtccaggtatttgacaacaccccagcagccttggacggcacagtggcagctggcgatgagatcaccggtgtcaatggcaggtcaatcaaagggaaaactaaggtggaggtggcgaagatgattcaggaggtgaagggggaggtgaccatccactacaacaagctgcaggcggaccccaagcagggcatgtccctggacattgtgttgaagaaagtcaagcaccggctggtggagaacatgagttcagggaccgcagatgctctgggcctgagccgggccatcctgtgcaatgatgggcttgtcaagaggctagaggagctggagcggaccgctgagctatacaaagggatgacggaacacaccaagaacctcctacgggccttttatgagctgtcgcagactcaccgggcctttggggacgtgttctccgtgatcggggtgcgggagccccagccagctgcgagcgaggcttttgtgaagttcgccgatgcccaccgcagcatcgagaagttcggcattcggcttctgaaaaccatcaagccgatgctgacggatctgaacacgtacctcaacaaagccatcccggacactcgcctcaccatcaagaagtacctggacgtgaagtttgagtacctgtcgtactgcctgaaggtgaaggagatggatgacgaggaatacagctgcattgccctaggcgagcccctttaccgggtgagcaccggcaactatgagtaccgcctgatcctgcgctgccgccaggaggcgcgcgcccgcttctcccagatgcgcaaggatgtgctggagaagatggagctgctggaccagaagcacgtccaggacatcgtgttccagctgcagcgcctcgtgtccaccatgtccaagtactacaacgactgctacgcagtgctgcgggatgccgacgtcttccccatcgaggtagacctggcgcacaccacattggcctatggcctcaaccaggaggagttcacagatggggaggaggaggaggaggaggaagacacggcagctggggagccgtccagggatacacgaggggctgctgggcccttggacaagggtggaagctggtgtgactcctgagtgccccgcggctgtggtgccgggggcagggtgcgtgggaggacggagcctgggagcggggcggggccgccgcgcaagggggcgacgcataaaggcctgctggcttggggcgcctgcctccctgctcctctgtcctcgcacagcgaacctgggctcctgcccaggacaggcaccagggtcatggcctgggacctggacactggcccctccaccctccctcccctcccggctccccggccagagggagagcttggtctctggacctgccttaggaaggagagggagggcaggaaggaaaagaaaggacttggaggtggcaggagtccgagccctgctccttgtgggcgctcacactgcccccggagcctgctgggagtggggccagccgtggacagctgaggttggggtcaatgcctcctgggcacccttgcctcgccccagaccggcccgtccagtccccatcacacctcggcggcctttatttattctgttcccccagctcggccacttctctgaaggagggctgggttctgggcctgtatcgaataaacacaaacctggatggcgca

SEQ ID NO: 410265 - DNA, 2110 bp, Homo sapiens
gcggggttagacgctgtcagcctgtccagaccgttcctctgttttcgcttgttcctactaacagcgagcttccgccaatacttgttctcgttcttggttccgagcgtcccgggagccgggaagggaaggattgtctgcagggattggagcaaatatccagtggggggaaagccgggacttccgcgtcttgccggaagtgacgtgacaatcgcggccaccgccaggtggaacggcagttccccattcccctaccgagctgggcagttagccagcccactccaactctcggaaccatgtttgcagacttggattatgacatcgaagaggataaactcggaatcccgactgtgcctgggaaggtgaccctgcagaaggatgctcagaacctgatcgggatcagcattggaggaggggcccagtactgtccctgcctctatatcgtccaggtatttgacaacaccccagcagccttggacggcacagtggcagctggcgatgagatcaccggtgtcaatggcaggtcaatcaaagggaaaactaaggtggaggtggcgaagatgattcaggaggtgaagggggaggtgaccatccactacaacaagctgcaggcggaccccaagcagggcatgtccctggacattgtgttgaagaaagtcaagcaccggctggtggagaacatgagttcagggaccgcagatgctctgggcctgagccgggccatcctgtgcaatgatgggcttgtcaagaggctagaggagctggagcggaccgctgagctatacaaagggatgacggaacacaccaagaacctcctacgggccttttatgagctgtcgcagactcaccgggcctttggggacgtgttctccgtgatcggggtgcgggagccccagccagctgcgagcgaggcttttgtgaagttcgccgatgcccaccgcagcatcgagaagttcggcattcggcttctgaaaaccatcaagccgatgctgacggatctgaacacgtacctcaacaaagccatcccggacactcgcctcaccatcaagaagtacctggacgtgaagtttgagtacctgtcgtactgcctgaaggtgaaggagatggatgacgaggaatacagctgcattgccctaggcgagcccctttaccgggtgagcaccggcaactatgagtaccgcctgatcctgcgctgccgccaggaggcgcgcgcccgcttctcccagatgcgcaaggatgtgctggagaagatggagctgctggaccagaagcacgtccaggacatcgtgttccagctgcagcgcctcgtgtccaccatgtccaagtactacaacgactgctacgcagtgctgcgggatgccgacgtcttccccatcgaggtagacctggcgcacaccacattggcctatggcctcaaccaggaggagttcacagatggggaggaggaggaggaggaggaagacacggcagctggggagccgtccagggatacacgaggggctgctgggcccttggacaagggtggaagctggtgtgactcctgagtgccccgcggctgtggtgccgggggcagggtgcgtgggaggacggagcctgggagcggggcggggccgccgcgcaagggggcgacgcataaaggcctgctggcttggggcgcctgcctccctgctcctctgtcctcgcacagcgaacctgggctcctgcccaggacaggcaccagggtcatggcctgggacctggacactggcccctccaccctccctcccctcccggctccccggccagagggagagcttggtctctggacctgccttaggaaggagagggagggcaggaaggaaaagaaaggacttggaggtggcaggagtccgagccctgctccttgtgggcgctcacactgcccccggagcctgctgggagtggggccagccgtggacagctgaggttggggtcaatgcctcctgggcacccttgcctcgccccagaccggcccgtccagtccccatcacacctcggcggcctttatttattctgttcccccagctcggccacttctctgaaggagggctgggttctgggcctgtatcgaataaacacaaacctggatggcgca

SEQ ID NO: 410266 - DNA, 1456 bp, Homo sapiens
gcggggttagacgctgtcagcctgtccagaccgttcctctgttttcgcttgttcctactaacagcgagcttccgccaatacttgttctcgttcttggttccgagcgtcccgggagccgggaagggaaggattgtctgcagggattggagcaaatatccagtggggggaaagccgggacttccgcgtcttgccggaagtgacgtgacaatcgcggccaccgccaggtggaacggcaggtgggttcaggtaccagcctggccgggacccggctgtgggaccaacgcttccggtgagcgacagaggcagctccccagggcctggagacccgtggggcggactctgggatctgagcctatcgccctggcctggagcccccctttgtacctattccccattcccctaccgagctgggcagttagccagcccactccaactctcggaaccatgtttgcagacttggattatgacatcgaagaggataaactcggaatcccgactgtgcctgggaaggtgaccctgcagaaggatgctcagaacctgatcgggatcagcattggaggaggggcccagtactgtccctgcctctatatcgtccaggtatttgacaacaccccagcagccttggacggcacagtggcagctggcgatgagatcaccggtgtcaatggcaggtcaatcaaagggaaaactaaggtggaggtggcgaagatgattcaggaggtgaagggggaggtgaccatccactacaacaagctgcaggcggaccccaagcagggcatgtccctggacattgtgttgaagaaagtcaagcaccggctggtggagaacatgagttcagggaccgcagatgctctgggcctgagccgggccatcctgtgcaatgatgggcttgtcaagaggctagaggagctggagcggaccgctgagctatacaaagggatgacggaacacaccaagaacctcctacgggccttttatgagctgtcgcagactcaccgggcctttggggacgtgttctccgtgatcggggtgcgggagccccagccagctgcgagcgaggcttttgtgaagttcgccgatgcccaccgcagcatcgagaagttcggcattcggcttctgaaaaccatcaagccgatgctgacggatctgaacacgtacctcaacaaagccatcccggacactcgcctcaccatcaagaagtacctggacgtgaagtttgagtacctgtcgtactgcctgaaggtgaaggagatggatgacgaggaatacagctgcattgtgagtgttggagggggtggggggcttgtacttccccccacctggtctgccagggatagcaggtggctcaggccaacccgggagagaccggggggacttggctggactctcgttcctggagatttagggccatcttcccagtcccgctcgctgggcctcggggtgctgggcacccggc

SEQ ID NO: 410267 - DNA, 1836 bp, Homo sapiens
ggtcaggtacgaggcctgggtttggttgagactggattatgacatcgatgaggataaactcggaatcccgactgtgcctgggaaggtgaccctgcagaaggatgctcagaacctgatcgggatcagcattggaggaggggcccagtactgtccctgcctctatatcgtccaggtatttgacaacaccccagcagccttggacggcacagtggcagctggcgatgagatcaccggtgtcaatggcaggtcaatcaaagggaaaactaaggtggaggtggcgaagatgattcaggaggtgaagggggaggtgaccatccactacaacaagctgcaggcggaccccaagcagggcatgtccctggacattgtgttgaagaaagtcaagcaccggctggtggagaacatgagttcagggaccgcagatgctctgggcctgagccgggccatcctgtgcaatgatgggcttgtcaagaggctagaggagctggagcggaccgctgagctatacaaagggatgacggaacacaccaagaacctcctacgggccttttatgagctgtcgcagactcaccgggcctttggggacgtgttctccgtgatcggggtgcgggagccccagccagctgcgagcgaggcttttgtgaagttcgccgatgcccaccgcagcatcgagaagttcggcattcggcttctgaaaaccatcaagccgatgctgacggatctgaacacgtacctcaacaaagccatcccggacactcgcctcaccatcaagaagtacctggacgtgaagtttgagtacctgtcgtactgcctgaaggtgaaggagatggatgacgaggaatacagctgcattgccctaggcgagcccctttaccgggtgagcaccggcaactatgagtaccgcctgatcctgcgctgccgccaggaggcgcgcgcccgcttctcccagatgcgcaaggatgtgctggagaagatggagctgctggaccagaagcacgtccaggacatcgtgttccagctgcagcgcctcgtgtccaccatgtccaagtactacaacgactgctacgcagtgctgcgggatgccgacgtcttccccatcgaggtagacctggcgcacaccacattggcctatggcctcaaccaggaggagttcacagatggggaggaggaggaggaggaggaagacacggcagctggggagccgtccagggatacacgaggggctgctgggcccttggacaagggtggaagctggtgtgactcctgagtgccccgcggctgtggtgccgggggcagggtgcgtgggaggacggagcctgggagcggggcggggccgccgcgcaagggggcgacgcataaaggcctgctggcttggggcgcctgcctccctgctcctctgtcctcgcacagcgaacctgggctcctgcccaggacaggcaccagggtcatggcctgggacctggacactggcccctccaccctccctcccctcccggctccccggccagagggagagcttggtctctggacctgccttaggaaggagagggagggcaggaaggaaaagaaaggacttggaggtggcaggagtccgagccctgctccttgtgggcgctcacactgcccccggagcctgctgggagtggggccagccgtggacagctgaggttggggtcaatgcctcctgggcacccttgcctcgccccagaccggcccgtccagtccccatcacacctcggcggcctttatttattctgttcccccagctcggccacttctctgaaggagggctgggttctgggcctgtatcgaataaacacaaacctggatggcgca

SEQ ID NO: 410268 - DNA, 1041 bp, Homo sapiens
gcacagtgcggtgcgaggccgtccctgagcaggcactcctgtcccacccccgccccaggccctaggcgagcccctttaccgggtgagcaccggcaactatgagtaccgcctgatcctgcgctgccgccaggaggcgcgcgcccgcttctcccagatgcgcaaggatgtgctggagaagatggagctgctggaccagaagcacgtccaggacatcgtgttccagctgcagcgcctcgtgtccaccatgtccaagtactacaacgactgctacgcagtgctgcgggatgccgacgtcttccccatcgaggtagacctggcgcacaccacattggcctatggcctcaaccaggaggagttcacagatggggaggaggaggaggaggaggaagacacggcagctggggagccgtccagggatacacgaggggctgctgggcccttggacaagggtggaagctggtgtgactcctgagtgccccgcggctgtggtgccgggggcagggtgcgtgggaggacggagcctgggagcggggcggggccgccgcgcaagggggcgacgcataaaggcctgctggcttggggcgcctgcctccctgctcctctgtcctcgcacagcgaacctgggctcctgcccaggacaggcaccagggtcatggcctgggacctggacactggcccctccaccctccctcccctcccggctccccggccagagggagagcttggtctctggacctgccttaggaaggagagggagggcaggaaggaaaagaaaggacttggaggtggcaggagtccgagccctgctccttgtgggcgctcacactgcccccggagcctgctgggagtggggccagccgtggacagctgaggttggggtcaatgcctcctgggcacccttgcctcgccccagaccggcccgtccagtccccatcacacctcggcggcctttatttattctgttcccccagctcggccacttctctgaaggagggctgggttctgggcctgtatcgaataaacacaaacctggatggcgca

SEQ ID NO: 410269 - DNA, 805 bp, Homo sapiens
gcggggttagacgctgtcagcctgtccagaccgttcctctgttttcgcttgttcctactaacagcgagcttccgccaatacttgttctcgttcttggttccgagcgtcccgggagccgggaagggaaggattgtctgcagggattggagcaaatatccagtggggggaaagccgggacttccgcgtcttgccggaagtgacgtgacaatcgcggccaccgccaggtggaacggcaggtgggttcaggtaccagcctggccgggacccggctgtgggaccaacgcttccggtgagcgacagaggcagctccccagggcctggagacccgtggggcggactctgggatctgagcctatcgccctggcctggagcccccctttgtacctattccccattcccctaccgagctgggcagttagccagcccactccaactctcggaaccatgtttgcagacttggattatgacatcgaagaggataaactcggaatcccgactgtgcctgggaaggtgaccctgcagaaggatgctcagaacctgatcgggatcagcattggaggaggggcccagtactgtccctgcctctatatcgtccaggtatttgacaacaccccagcagccttggacggcacagtggcagctggcgatgagatcaccggtgtcaatggcaggtcaatcaaagggaaaactaaggtggaggtggcgaagatgattcaggaggtgaaggtaagggctgctgcagagcaggtgtccagaggcagcaacacatgtttctgagacctccaggctgccagaggtcccagca

SEQ ID NO: 410270 - DNA, 2482 bp, Homo sapiens
gcgtccgcccacgcgtccgctcggtccccggggccggcggacccgcgggcaggcactgcccgggctggacgacgtctggccggctcccggcgaagggcagcggaggagcggcccagagcgcgcagctagggcactggcgaaaccccgggacagtccctctccgtgcgggggcggcgcagagcagtcccatccccggggtcccgggcgcggctgactgccggctggttccctgcgcgcagtagctccccgagccgggctgcaccggaggcggcgagatggtcgcgcgcgtcggcctcctgctgcgcgccctgcagctgctactgtggggccacctggacgcccagcccgcggagcgcggaggccaggagctgcgcaaggaggcggaggcattcctagagaagtacggatacctcaatgaacaggtccccaaagctcccacctccactcgattcagcgatgccatcagagcgtttcagtgggtgtcccagctacctgtcagcggcgtgttggaccgcgccaccctgcgccagatgactcgtccccgctgcggggttacagataccaacagttatgcggcctgggctgagaggatcagtgacttgtttgctagacaccggaccaaaatgaggcgtaagaaacgctttgcaaagcaaggtaacaaatggtacaagcagcacctctcctaccgcctggtgaactggcctgagcatctgccggagccggcagttcggggcgccgtgcgcgccgccttccagttgtggagcaacgtctcagcgctggagttctgggaggccccagccacaggccccgctgacatccggctcaccttcttccaaggggaccacaacgatgggctgggcaatgcctttgatggcccagggggcgccctggcgcacgccttcctgccccgccgcggcgaagcgcacttcgaccaagatgagcgctggtccctgagccgccgccgcgggcgcaacctgttcgtggtgctggcgcacgagatcggtcacacgcttggcctcacccactcgcccgcgccgcgcgcgctcatggcgccctactacaagaggctgggccgcgacgcgctgctcagctgggacgacgtgctggccgtgcagagcctgtatgggaagcccctagggggctcagtggccgtccagctcccaggaaagctgttcactgactttgagacctgggactcctacagcccccaaggaaggcgccctgaaacgcagggccctaaatactgccactcttccttcgatgccatcactgtagacaggcaacagcaactgtacatttttaaagggagccatttctgggaggtggcagctgatggcaacgtctcagagccccgtccactgcaggaaagatgggtcgggctgccccccaacattgaggctgcggcagtgtcattgaatgatggagatttctacttcttcaaagggggtcgatgctggaggttccggggccccaagccagtgtggggtctcccacagctgtgccgggcagggggcctgccccgccatcctgacgccgccctcttcttccctcctctgcgccgcctcatcctcttcaagggtgcccgctactacgtgctggcccgagggggactgcaagtggagccctactacccccgaagtctgcaggactggggaggcatccctgaggaggtcagcggcgccctgccgaggcccgatggctccatcatcttcttccgagatgaccgctactggcgcctcgaccaggccaaactgcaggcaaccacctcgggccgctgggccaccgagctgccctggatgggctgctggcatgccaactcggggagcgccctgttctgaaggcacctcctcacctcagaaactggtggtgctctcagggcaaaatcatgttccccacccccggggcagaacccctcttagaagcctctgagtccctctgcagaagaccgggcagcaaagcctccatctggaagtctgtctgcctttgttccttgaagaatgcagcattgtctttgtctgtccccaccacatggaggtgggggtgggatcaatcttaggaaaagcaaaaaagggtcccagatcccttggccctttcctccgaggacttctatcctccccaggcctttgtttcttcggctaaaggtacagttcctttcaagaggtaacagcactgggatccaagcagggggatgaaaaactcagcagagaaattcgagaccattttgcaagactgtgcccttctcctcaggaccccctggctcagttcttgaaaaacggtgtcatatttagtcagaggccccacccccaggaagcatggatggggatgaaggcacaggcgtctccaacctcagaggccctttgtggggtcaggacacagagtgggagggagactgatgcaggcctaccagtccctggctttttgtctggggctggaataaaaaggtgccttcagctggtgggccgagaggcaggaagcagcctta

SEQ ID NO: 410271 - DNA, 2545 bp, Homo sapiens
gcgtccgcccacgcgtccgctcggtccccggggccggcggacccgcgggcaggcactgcccgggctggacgacgtctggccggctcccggcgaagggcagcggaggagcggcccagagcgcgcagctagggcactggcgaaaccccgggacagtccctctccgtgcgggggcggcgcagagcagtcccatccccggggtcccgggcgcggctgactgccggctggttccctgcgcgcagtagctccccgagccgggctgcaccggaggcggcgagatggtcgcgcgcgtcggcctcctgctgcgcgccctgcagctgctactgtggggccacctggacgcccagcccgcggagcgcggaggccaggagctgcgcaaggaggcggaggcattcctagagaagtacggatacctcaatgaacaggtccccaaagctcccacctccactcgattcagcgatgccatcagagcgtttcagtgggtgtcccagctacctgtcagcggcgtgttggaccgcgccaccctgcgccagatgactcgtccccgctgcggggttacagataccaacagttatgcggcctgggctgagaggatcagtgacttgtttgctagacaccggaccaaaatgaggcgtaagaaacgctttgcaaagcaaggtaacaaatggtacaagcagcacctctcctaccgcctggtgaactggcctgagcatctgccggagccggcagttcggggcgccgtgcgcgccgccttccagttgtggagcaacgtctcagcgctggagttctgggaggccccagccacaggccccgctgacatccggctcaccttcttccaaggggaccacaacgatgggctgggcaatgcctttgatggcccagggggcgccctggcgcacgccttcctgccccgccgcggcgaagcgcacttcgaccaagatgagcgctggtccctgagccgccgccgcgggcgcaacctgttcgtggtgctggcgcacgagatcggtcacacgcttggcctcacccactcgcccgcgccgcgcgcgctcatggcgccctactacaagaggctgggccgcgacgcgctgctcagctgggacgacgtgctggccgtgcagagcctgtatgggaagcccctagggggctcagtggccgtccagctcccaggaaagctgttcactgactttgagacctgggactcctacagcccccaaggaaggcgccctgaaacgcagggccctaaatactgccactcttccttcgatgccatcactgtagacaggcaacagcaactgtacatttttaaagggagccatttctgggaggtggcagctgatggcaacgtctcagagccccgtccactgcaggaaagatgggtcgggctgccccccaacattgaggctgcggcagtgtcattgaatgatggagatttctacttcttcaaagtgcaatccgtttgattgatatgaataccaaccatcgtgggctccagcttaaaggagagcagagggggtcgatgctggaggttccggggccccaagccagtgtggggtctcccacagctgtgccgggcagggggcctgccccgccatcctgacgccgccctcttcttccctcctctgcgccgcctcatcctcttcaagggtgcccgctactacgtgctggcccgagggggactgcaagtggagccctactacccccgaagtctgcaggactggggaggcatccctgaggaggtcagcggcgccctgccgaggcccgatggctccatcatcttcttccgagatgaccgctactggcgcctcgaccaggccaaactgcaggcaaccacctcgggccgctgggccaccgagctgccctggatgggctgctggcatgccaactcggggagcgccctgttctgaaggcacctcctcacctcagaaactggtggtgctctcagggcaaaatcatgttccccacccccggggcagaacccctcttagaagcctctgagtccctctgcagaagaccgggcagcaaagcctccatctggaagtctgtctgcctttgttccttgaagaatgcagcattgtctttgtctgtccccaccacatggaggtgggggtgggatcaatcttaggaaaagcaaaaaagggtcccagatcccttggccctttcctccgaggacttctatcctccccaggcctttgtttcttcggctaaaggtacagttcctttcaagaggtaacagcactgggatccaagcagggggatgaaaaactcagcagagaaattcgagaccattttgcaagactgtgcccttctcctcaggaccccctggctcagttcttgaaaaacggtgtcatatttagtcagaggccccacccccaggaagcatggatggggatgaaggcacaggcgtctccaacctcagaggccctttgtggggtcaggacacagagtgggagggagactgatgcaggcctaccagtccctggctttttgtctggggctggaataaaaaggtgccttcagctggtgggccgagaggcaggaagcagcctta

SEQ ID NO: 410272 - DNA, 1044 bp, Homo sapiens
gcgtccgcccacgcgtccgctcggtccccggggccggcggacccgcgggcaggcactgcccgggctggacgacgtctggccggctcccggcgaagggcagcggaggagcggcccagagcgcgcagctagggcactggcgaaaccccgggacagtccctctccgtgcgggggcggcgcagagcagtcccatccccggggtcccgggcgcggctgactgccggctggttccctgcgcgcagtagctccccgagccgggctgcaccggaggcggcgagatggtcgcgcgcgtcggcctcctgctgcgcgccctgcagctgctactgtggggccacctggacgcccagcccgcggagcgcggaggccaggagctgcgcaaggaggcggaggcattcctagagaagtacggatacctcaatgaacaggtccccaaagctcccacctccactcgattcagcgatgccatcagagcgtttcagtgggtgtcccagctacctgtcagcggcgtgttggaccgcgccaccctgcgccagatgactcgtccccgctgcggggttacagataccaacagttatgcggcctgggctgagaggatcagtgacttgtttgctagacaccggaccaaaatgaggcgtaagaaacgctttgcaaagcaaggtgagcactgttaaaatccggctaggccaagatttcccaatgtcttgaagccaatggctaggaaaacagctgagcctgggactggactttgtcagtaacctctcttccctagggcacgggaggagtgggtgaataggacctcttggcttgaggaccatgattgtgaatacagacatttaattcagaatgacacctacattgatgaattttcattgtacaagtgtttttccagatcaaacacaaaacccatgtaattccttgataaattttcaatgcagggcagataaactgttgctaacatttttcatttatatttactgaagttattttcatcagaattcattctttttcataagttattaaacaaatgtgtgatctattgaaatactt

SEQ ID NO: 410273 - DNA, 1616 bp, Homo sapiens
gcgtccgcccacgcgtccgctcggtccccggggccggcggacccgcgggcaggcactgcccgggctggacgacgtctggccggctcccggcgaagggcagcggaggagcggcccagagcgcgcagctagggcactggcgaaaccccgggacagtccctctccgtgcgggggcggcgcagagcagtcccatccccggggtcccgggcgcggctgactgccggctggttccctgcgcgcagtagctccccgagccgggctgcaccggaggcggcgagatggtcgcgcgcgtcggcctcctgctgcgcgccctgcagctgctactgtggggccacctggacgcccagcccgcggagcgcggaggccaggagctgcgcaaggaggcggaggcattcctagagaagtacggatacctcaatgaacaggtccccaaagctcccacctccactcgattcagcgatgccatcagagcgtttcagtgggtgtcccagctacctgtcagcggcgtgttggaccgcgccaccctgcgccagatgactcgtccccgctgcggggttacagataccaacagttatgcggcctgggctgagaggatcagtgacttgtttgctagacaccggaccaaaatgaggcgtaagaaacgctttgcaaagcaaggtaacaaatggtacaagcagcacctctcctaccgcctggtgaactggcctgagcatctgccggagccggcagttcggggcgccgtgcgcgccgccttccagttgtggagcaacgtctcagcgctggagttctgggaggccccagccacaggccccgctgacatccggctcaccttcttccaaggggaccacaacgatgggctgggcaatgcctttgatggcccagggggcgccctggcgcacgccttcctgccccgccgcggcgaagcgcacttcgaccaagatgagcgctggtccctgagccgccgccgcgggcgcaacctgttcgtggtgctggcgcacgagatcggtcacacgcttggcctcacccactcgcccgcgccgcgcgcgctcatggcgccctactacaagaggctgggccgcgacgcgctgctcagctgggacgacgtgctggccgtgcagagcctgtatgggaagcccctagggggctcagtggccgtccagctcccaggaaagctgttcactgactttgagacctgggactcctacagcccccaaggaaggcgccctgaaacgcagggccctaaatactgccactcttccttcgatgccatcactgtagacaggcaacagcaactgtacatttttaaagggagccatttctgggaggtggcagctgatggcaacgtctcagagccccgtccactgcaggaaagatgggtcgggctgccccccaacattgaggctgcggcagtgtcattgaatgatggagatttctacttcttcaaagcctgaggacaaagttctgggagatcggcattgactatgtaagtaacaacaacggcctaaagaagcaacaagaagggaaccgagtgcctggagaacttcatggagcagagccacttgcctactttggatcatctgtctctaagagagggaaataaacatttcttttgtgtgagc

SEQ ID NO: 410274 - DNA, 340 bp, Homo sapiens
gggaccacaacgatgggctgggcaatgcctttgatggcccaggtgctggcacaaagcctccctcccgcacagcaggaggggaacccaacttggagaagcagtttgggggtggcaatgaagcattcaccctccctgtggccttggctgaggcacatctccctgcagagaaccctcagtctcctcatcctaaaatgggaacagtggtccctgccctattatgtgtcacatgtctgaagggacagtcagatgaagctctgcaagggaagtgctttgcaaattctcaagagtattatgcattctgggagaatctcccgaggttccatcatccatcctctgcctc

SEQ ID NO: 410275 - DNA, 587 bp, Homo sapiens
gttcagaaatattgagtgacttgcctgagatcatcagctagtcagtggtgacctggaattgagtccaggtccttttgactttaatcccagaactcattctgctatagcttatagaccctcttgggcaaaagacaagaggtgagactgggcaggatgtatgtgccctgggcccttggggaccaagggaggggaaaggatgctatggaaaaagcagatattcctctctcccgcaggcattcctagagaagtacggatacctcaatgaacaggtccccaaagctcccacctccactcgattcagcgatgccatcaggtagggtggagggatgtggaggacttggggtaggggtgctaggatgccaagctctgaccatttcctccctcctcctggaagcctggctggctacaccccagggaggcagacttccctgccctcacccttaccactcaccctccccttgcggtcctttcctcctgacagagcgtttcagtgggtgtcccagctacctgtcagcggcgtgttggaccgcgccaccctgcgccagatgactcgtccccgctgcggggttacagataccaacagttat

SEQ ID NO: 410276 - DNA, 1239 bp, Homo sapiens
gaatcagccctggttctcctttccccgatctggcctcacaggaggagttggcggggagccttgggcccctctggcctcagccggatttcccagccaaacgcagagagagatgccctggaccatcttgctctttgcagctggctccttggcgatcccagcaccatccatccggctggtgcccccgtacccaagcagccaagaggaccccatccacatcgcatgcatggcccctgggaacttcccgggggcgaatttcacactgtatcgaggggggcaggtggtccagctcctgcaggcccccacggaccagcgcggggtgacatttaacctgagcggcggcagcagcaaggctccagggggacccttccactgccagtatggagtgttaggtgagctcaaccagtcccagctgtcagacctcagcgagcccgtgaacgtctccttcccagtgcccacttggatcttggtgctctccctgagcctggctggtgccctcttcctccttgctgggctggtggctgttgccctggtggtcagaaaagttaaactcagaaatttacagaagaaaagagagatcgagaatcctgctgggcccagattaacttcgacagcacagacatgtccttcgataactccctgtttaccgtctccgcgaaaacgatgccagaagaagacccggccaccttggatgatcactcaggcaccactgccacccccagcaactccaggacccggaagaggcccacttccacgtcctcctcgcctgagacccccgaattcagcactttccgggcctgccagtgaggctgaggactgggggacccctctgtctccaggcattcgggggcctgaggtccctccagctacttctgggggggctctgtcagccactttctcagggaattggacagaggaaaggaaggggaaccctggccttgggattttcatcacagaggagtgggagaggggacacaggcatgggcctggcactatacagacaacaggaagttcccctctcgaccttcggctcctcaggaccaccagagaaggagatgtcaggaccccttcttgtcccccagctgggccataagacgtcccaggtctctgcacacccgtggaattcctcccttccccagtgggtttttgagcatagggtgcccttgggtgtgttgtgtgtctgcctgctggcttgcttaagttattaattataacacgggtcaaggtgttcccaggcctcta

SEQ ID NO: 410277 - DNA, 1239 bp, Homo sapiens
gaatcagccctggttctcctttccccgatctggcctcacaggaggagttggcggggagccttgggcccctctggcctcagccggatttcccagccaaacgcagagagagatgccctggaccatcttgctctttgcagctggctccttggcgatcccagcaccatccatccggctggtgcccccgtacccaagcagccaagaggaccccatccacatcgcatgcatggcccctgggaacttcccgggggcgaatttcacactgtatcgaggggggcaggtggtccagctcctgcaggcccccacggaccagcgcggggtgacatttaacctgagcggcggcagcagcaaggctccagggggacccttccactgccagtatggagtgttaggtgagctcaaccagtcccagctgtcagacctcagcgagcccgtgaacgtctccttcccagtgcccacttggatcttggtgctctccctgagcctggctggtgccctcttcctccttgctgggctggtggctgttgccctggtggtcagaaaaggtaacagcacgcaaagcctggcacacaaagagatcgagaatcctgctgggcccagattaacttcgacagcacagacatgtccttcgataactccctgtttaccgtctccgcgaaaacgatgccagaagaagacccggccaccttggatgatcactcaggcaccactgccacccccagcaactccaggacccggaagaggcccacttccacgtcctcctcgcctgagacccccgaattcagcactttccgggcctgccagtgaggctgaggactgggggacccctctgtctccaggcattcgggggcctgaggtccctccagctacttctgggggggctctgtcagccactttctcagggaattggacagaggaaaggaaggggaaccctggccttgggattttcatcacagaggagtgggagaggggacacaggcatgggcctggcactatacagacaacaggaagttcccctctcgaccttcggctcctcaggaccaccagagaaggagatgtcaggaccccttcttgtcccccagctgggccataagacgtcccaggtctctgcacacccgtggaattcctcccttccccagtgggtttttgagcatagggtgcccttgggtgtgttgtgtgtctgcctgctggcttgcttaagttattaattataacacgggtcaaggtgttcccaggcctcta

SEQ ID NO: 410278 - DNA, 362 bp, Homo sapiens
ggttgcagtgagccaagattgagccactgcactccagcctgggtgaaagaatgagactctgtctaaaaaaaaaaaaaaaaaaaaaaaaaacagaaattgccggatacaattaggaccaaaatctaacacatgctcatttcttttttgttccagttaaactcagaaatttacagaagaaaaggtgagatcatccctggagacccacagagggtggtttggggaaagaaggacacttccctggcagggtgggcactccatgccccccacaaacagcgcctcctggtgggcatgctgcgtaataggaacaggagccatttattaagtgcctcctgtgtgctggaggactgagctgggactctctg

SEQ ID NO: 410279 - DNA, 544 bp, Homo sapiens
ccagcagagacctcagacaaatcatatccctcctggggtgaccaggtgcagatcttccagggagccgtctaatggaatttcctggttaatggacacagagaaccactgctaagaacgatttccttttctctttcaatctgcagtactttttatgaagactggtcttttgtgatggatgaagagaggtccagtatgcttcctaccatggcagcaggtccgaactccatactctttgcgattaacattgacaacaaggatttgaacgggcagagtaagtttgctcccaccgtttcagacctcttaaaggagtcaacgcagaatgtgaccttgctgaaggagtccacgcaaggagtgagcagcgtgttcagggagatcacagcctcctctgccatctccatcctcatcaaacctgaacaggagaccgaccccttgcccgtcgtgtccaggaatgtcagtgctgatgccaaatgcaaaaaggagcggaagaagaaaaagcaagtgaccaacattaactcatttgatgatgaggaagatgagcagaact

SEQ ID NO: 410280 - DNA, 399 bp, Homo sapiens
gtcttgctctgtcacccaggctggagtgcagtggcacgatctcggctccctgcaacctctgtgtggcaggtccgaactccatactctttgcgattaacattgacaacaaggatttgaacgggcagagtaagtttgctcccaccgtttcagacctcttaaaggagtcaacgcagaatgtgaccttgctgaaggagtccacgcaaggagtgagcagcgtgttcagggagatcacagcctcctctgccatctccatcctcatcaaacctgaacaggagaccgaccccttgcccgtcgtgtccaggaatgtcagtgctgatgccaaatgcaaaaaggagcggaagaagaaaaagcaagtgaccaacattaactcatttgatgatgaggaagatgagcagaact

SEQ ID NO: 410281 - DNA, 528 bp, Homo sapiens
gtcttgctctgtcacccaggctggagtgcagtggcacgatctcggctccctgcaacctctgtgtggcaggtatttttatacctatttaagatcaacgtgtctcctcttctgtaatctgttgtctgcagctgtcttctcttattggtggtatgactgcccatcagcaagcactccagacttttccctttttttggacaggtccgaactccatactctttgcgattaacattgacaacaaggatttgaacgggcagagtaagtttgctcccaccgtttcagacctcttaaaggagtcaacgcagaatgtgaccttgctgaaggagtccacgcaaggagtgagcagcgtgttcagggagatcacagcctcctctgccatctccatcctcatcaaacctgaacaggagaccgaccccttgcccgtcgtgtccaggaatgtcagtgctgatgccaaatgcaaaaaggagcggaagaagaaaaagcaagtgaccaacattaactcatttgatgatgaggaagatgagcagaact

SEQ ID NO: 410282 - DNA, 506 bp, Homo sapiens
gtgggcatggctgagcatgcagtgggaggcagaacaaagccagagtcccacaggtaaccttctggccagtgcctggttcacgcagctttaaggtgctccaagaggactgggagacccctcaggaccacgggagccttgggagaaaataaagtaatgcctgccaaggtgccaagccagtgtcaagcaggtgggcccaggaagtaactcagtctcaacctgcttatgccaggactcctggtgagcccacagcctgggagggcatacgagtaggtcctgtcccataatagattactcagtcctgactcatatagggggcttatgagagaaggaatcctaaggccttcccaggtggcctgcaggagcctcaaagtcagcattgcagggaacactcattcccccttcctgaagtttctttccttcaggagggagctccactggtgcagtgctgtggttctcccaccccagcccacatctccgcagagccagggtgatgcacccagtggcta

SEQ ID NO: 410283 - DNA, 621 bp, Homo sapiens
tatctagagattccagtagaaccttccagggacatggcgaggggaagggtctgataccatctccttgtgtggttagttcttcctgctgggggcccttccctcatgcccctgcccctccctcatgtgtggactgctttggttgtggagctgattgcagaagcactgggctcagagcagtaaaagatttcctccccggctgggctggcatcttctgcctcgccctccccagagctgtccaggctgtgggagctagtgtgcctggcacttcaggcatggggggaacccagcatgtgctgagcctggcacagccctgcctcctctcagcaggcacctaggttccctaaaggacacgggcacaggctgggtcgagtccccactcacttggccatgcctcaagatcaacagaggcaagagggaaactgggccccctgcctgagaagcctggggggactgctgtggcctgtcttcctggaatcggtgaccagcaaacatccctattccccttagcacttggctttgcctggcagagccccgattgccctggcagcctgagattctggcctcaggatttctgaacaagaaaaggggtttcttgcttagatgaggtgaggggcaggcagg

SEQ ID NO: 410284 - DNA, 471 bp, Homo sapiens
tatataataatattgctgaaatattcccttttctatgacctaacagtgcagtcttcctgctcttattgcaccattttatctgtaattatatcttactgaagagtttttaaatgctctgctaaaatcaagctgtactgtgagtataacactcacctagtcaacatgacattttgtctcagatttaagaaaaaaattgtgaggaaattttgacagtactttaaaaccttaaattcttttttttttattactaagtatcatgtgtacaggtacatttaccacatcatgactttaaccatctatgttcttcaaggaagatagaggcttatgaatggggacagaaatagaacgaaggtcaagaacagagtgggagaaaattaaagagtaggggagcaaggtaaggatgtctattgtgacctttatcctgcaatgaaaatacttggtagtttgtcgttcttttgtttaattgttaag

SEQ ID NO: 410285 - DNA, 1389 bp, Homo sapiens
ctaattttttttgtatttttagtagagacggggtgtcaccgtattagccaggatggtctcgatctcctgacctcgtgatccgcccgcctcagcctcccaaagtgctaggattacaggcgtgagccaccgtggctggccttttttttttttttaaagacagggtctcggtatgttgcccaggccagtctcaaactcctggcctcaggcagtcctccccgaagggctgggattataggcaggaggcgccgggcctggcctctatttctttaatacctgccctcagagccgtcctgcttttaaactgatgcaaatggcagcagtgaataatcaattcatgggttcgcttgctttgggatttagtacaagattattttaagaaataacaaaggagaaaagattgagctggattttgctgattctcaggtatctgtaccccagggtcaaccctgagattggcccaatctgccagaacctaagatgccattttgaccccagtggcagcttccagagccacaagcctgcatttgggaggaggtgcgcagcctccagggctggactccaaactcgagctgaaggaacatgctggcaggtagctctctcagggtccacctggggttccagctgctccaagacacagcacatttagccataaacatggaagggctgggacctacaggaggctcctttgtgtagaggccagggcaggcgtgtgaccttgaaccaggtggacatgaggtcccttgaactcccttctctctctggcttgttcccctgaagcactggccccccagtgctgggcttatttggccatcctgtgccagccccctggtcacccaccgtcacagtggaagctgctccctcctcttacaatggtgttccttgctctggggtctggggacaagaccatctctttccactcctggacgacactgtgcactcagtcagccgcctcctacctgccctcctgcacagggtcagaacctcctgacctggacttcgccctgggcagcttccttggaacttgttgcagcttagcatctttggaagggagcactggactaggagtcagaaggtggagttctgggtgctgttttcccactcttgggccctgggcatgttctgttctgtgcatcagatgttttctgcctgcctccccctgagctgccaccagagccacctgtagacccctgcttctcctgcccctcctgtcccttgccaggcctctggactcagtgcttcctgtcccaaggacctgttgtgtgcccagcttggaagacagtggccactcacatccaggtctctgcctggctatttgctccatgaacccatctcagatgcccctgcccccagggagccaggtgacagggtgaggtcaagtgacaagcagta

SEQ ID NO: 410286 - DNA, 431 bp, Homo sapiens
tcagcctcccaagtagctggaattacaggtgtgcactaccacgcccagctgttttttgtagagatggggttagtagagatttgtttaatagagatggggtttcaccatggtctctgctaaaccctgtctctactaaaaatacaaaaattacccaggcgtggtggcacatgcctgtagtcccagctactcaagaggctgaggcaggagaataacttgaacctgagaggtggaggttgcagtgacccaaaatcatgcactctagcctggggtctcgcttttgcccaagttagagtgcagtggcacaatcacagtggctcactgcagcctcaaactcctgggctgaagggaatcctcccacctcagcctcccaagtagctaggactataggcatgtgccatcctggcgagttaattttttgtgtgtttttattc

SEQ ID NO: 410287 - DNA, 409 bp, Homo sapiens
ctctctaaggtagtgagaggaggagagaggacatctcttcccgagcaggggaagatgtcaagtctctcacctattcagctgggtaagaggagattctttctttcaggtagaaataccattgtcatcccactccctttttagctttgtataagtaaatgcctgagtgtgctaacctatctaggtcttttgttcagcaccgtgaagctttgctattgtagacaaaaacactgaatgtactgaaactcttctgcttgtaagtgtgtattgggataaggtgtggagggaggaatcttgaatattttagaacagggttgtccaatcttttggcttccctgggccacattggaagaagaagaattgtcttggggcacacataaaatacactaacactaacgattgctgatgagct

SEQ ID NO: 410288 - DNA, 422 bp, Homo sapiens
gcccagagataggaagggagagagcaaacagcagaggaaagaaaatggggcaatggaaaaagatctacctccccccacactactaacctagtggaagtgggggaaatgggggagacactcccagactccagagagtagtaacaatcaaccaacccccacctatttacccagatctctcaggatccctggggagagaaccctcagggttagggcgcagagagagaatctgcagtctcagagcctggagagcctaaggcccaatccagcccctttgcctctgcagcagagggatggaaagaaagatatgcctgaaaggggaagtgctcaatggggaatgggtgggccacgggtggtgagctgcgaggagcaggtctgataggaactaaatgggaagagaaggagcctggcaggatacaagggga

SEQ ID NO: 410289 - DNA, 320 bp, Homo sapiens
gcacgatctcggctcactgcaacctctacctcctgggttcaagcgattctcctgcctgagaggcagggtgtcactttgttgctcaggctggagtgcagtgattccaccactgatcagttatagttttgaatttctatgtttgtgacctaggccagttcacatctccttaggcaacctagtctagtggtctcctattcccaggaggttaccatttatttatttatttatttatttatttaattttattttatttgtttatttttttttaagacagactctcaggctggagtgcagtggcacgatctcggctcactgcagtc

SEQ ID NO: 410290 - DNA, 316 bp, Homo sapiens
gggactccacgatccttccaggtcaattggattccaggcgaaggcatctgaacatgccgtatttcctgttgctttctttctgtccaattatggcaagcctgccaacaacacgttcctagcggcatgaggaaattagtccctcagaggccccaaacgtggagaaggcgaaacccaggaacatgcatgtgttcagagaagacgtcccgagtacccttgagccagcaacctgccttgggaagggcattagtccgttccacttcatggaaggctgagtggaggcgctttgatccagttaatgcccaagacgcgatctttt

SEQ ID NO: 410291 - DNA, 887 bp, Homo sapiens
aagtatttcagtttaagatatgagcctctaaaaaagtcagcagtgtgtttacatctctttatgattatgcagagaattagattaaccaagacttccttcgccataatttgaagataagacatgtagatttacagcagttggacataaagacaatttcgtgaaaacattaaactaatgtgataaatcaagagtaaatgcaaggtaccaacatacataatttacacattaagccaaattaaggatatgaactatggctgtttgatgtcaggaggggtctgtacccattttcctctcctcaataatattaaaaagttttatagaggaagttatgggcaaagataaaatggatctaggaatgaggcagaaaaattaattgtagacccgtttgataggtgttatagtgagcattaccatatagggtttgttttctaatagccctttcatccctcgagaggataaaatagaaatcacagcattgaagtggttatggaaatagggtcattatctgcaaatattttaaacctggagcccttggttgtatattcagcacattattccaaggagggtagactaaacgtttaaacctatatgacagatagattatggctgatttctttgatcacgtaaatagccccagaaattggcatttgatttagtatgtttgtattatgaacttctcccctgcaggaattatgtaattcctgtatcaatttgtatgaaaacattttcatatgtcttttgaacttttaaagaaatttattgatcagaaatttaagttaagcattaattgggttccagctttgaattctttaaattttaggagcatttttacctgatattatactagttcattgaacagagctctagcctgacattttcccatttcc

SEQ ID NO: 410292 - DNA, 311 bp, Homo sapiens
ttcattacccactaatggatcataaactgcaatttgaaaaatactgatgaataatagctgggtgcagtggctcacacctgtaatcccagtactttgggaggctgaggcgggaagatcgcttgagagtaggagttcgagactagcctgggcaacatagtgagactatgtctctaaaaaacaaaaaacggggcatgggtcatggtggcttgcacctgtagtcgtagctccacaggaggctgaggtgggaggactgcttgagcccaggagtttgaggctgcagtgaggtatgactgcatcactacactccagtc

SEQ ID NO: 410293 - DNA, 444 bp, Homo sapiens
aaaccattctgctttcattgaagtaacaaaactgctgcatttgaaagacaccataaggaaagggattcttacaagctgccccatggtgccctctttcaggattctcttcgtgaccatactaaaatacccagctcatctgtgttcacatgagacattgctttattttgatccatagatggtcactgtgggagcctggctgagtcatatggacattttaaaaagtgagacatctattggctaaatctgcagggtatctggtgctggactagggacaatgcattctggccaagggctaggctgagaaaagcactccaggtcccaccatcccccacctttggttgaatccaactctatatccaaagtgccatgggcatcaggaaccaaaggaaactgcagtggccaaaccccgggagagcttgctcccccacgctgatccattcaagg

SEQ ID NO: 410294 - DNA, 306 bp, Homo sapiens
cctttactttcttcataaacttactttcactttactctatggacttgtcttgaattctttcttgcatgagattcaagaaccatctcttggggtctggactgggactcttttccataacatgaggacttgttaagatcacccttggtgccttctgcagggaaacaagaaggaattctatgtattgtctaaagatccagacaggcagtgaaggcttcctggaggaggtaagcctgagcttagctttgatgcttagctggtgcggaggtgggcagtgcaggaagggagagcaggacatccagtctctat

SEQ ID NO: 410295 - DNA, 396 bp, Homo sapiens
gttgggttttttaattaacttttattttaggtttggggatacatatgaaggtttcttacataggtaaacacgtgtcacaggagtttgttgaacagattattttgtcaataagcaatactattttgaacagaatcttttcttttttctgagcaggagaatctgtggggctggtgggaatctgtggacaatccgtgggaaggcttggtgggcagcaggtgcgggtgaggcagggaggtggcagagagagcttgtggagatgttctggataccagagccctggcctgatcctgtaccgtccccaccttctctggatgactggggccaacctaacctgttccgaagaaaataaatactcggacataatcctttgttgtgagattaatttgttgttttgtt

SEQ ID NO: 410296 - DNA, 501 bp, Homo sapiens
gatctcacttacagtggaatctaaaaaagttgatctcacagattcatggagttaaatggtggttaccaggggtctggggatggtggggatttaaacaaagggtacaatttcctttcgactatataaataaatcatagagctttgttgtatagcatggtgactatagttaataacatcatattgtttgtttgaaaaatactaggagaatagattttgaatgttctcatcacaaaacagtatgtgaggtgagaaataggttaattagctttatttaatcattgtacagtatgtatgtgtactcaaaatactgcattgtgcaccacaaatatatacttttcatttgtcaattaaaacatttaaaaataagaattttcttgaaagttcctctatcttaatgttcaaaatgcagtgtcttgatcctctgcatttctgttccctgaattttatttctactgagtttcttaggaaacccttgttcttgtttgtaacagaaaagctgcg

SEQ ID NO: 410297 - DNA, 362 bp, Homo sapiens
atcttcaaggagaccccctcagaagacactgtgtcgctacaactccctgtcccagccatttccaatgctgctgtttttcccttcattttcatcatttcatcttcctaatacatagtattgttcaactgagtgtgctgtttatgtgcctctctccctttctcctttagagagtaagttcctcaaccactggacttttgtctgttttgttcatgaatacattcccaggatctagaacactgcccagcacagagtgagttccatgaatacatgattaagaaaggagtggtaacgggaagttatatcatctcaagacatactttccatcaagaagtcacttgctttttgctaacagagaagtcagg

SEQ ID NO: 410298 - DNA, 625 bp, Homo sapiens
gtcaatcactgagacaatgaatgttgccatgaaagaagtatttcactgggtgctgcagccaaggagaatgggagataaagtctcaaatccctgaccaactacaactggggaggcttacatagtgagggaaggaattaaggggggtaaagaagcaattatgatgaatgagggggtctggcatcttatttcgatgtggtgatctggtgagtttaagtcccttgcctgaggatcagttccctgagggaggaactcagatgagacaaatgtaaatttcaagttttaagacctgaagggtcaatttccatgtgtgttccaaaacttttaaatgtcatttctatgggacagttggaacagtttcacttctaggtatttactgatttgaaaacttgtccacataaaaacagcacacacgtgttcataacaaggttataattggttaaaacttgaagcaacacacatttcttcaataagtgaatggataaacaaactggtacatccatatgatggaatactattcaacaataaagaaatgagctatcgagccacagaaagtcctgtatgaaccttaaatgcatactgttaagtgagagaagtcattctgaacaggctgcatactatatgagtc

SEQ ID NO: 410299 - DNA, 254 bp, Homo sapiens
cactccagccgctaatcacctcagactctctaaagcctgaagacaacagctaaggctgctaaacagcagaagtggtggtccacccctctctttgggagctctgttccagggaggtttgaaactgttgctagccaaaaaacactggtgcaggtggctggaaaccctggtcaaaaggtcctgtccactgaggaggaatgggattagggattcaagtaaaaaagcagtctggccactttttcatagagcagttgtgc

SEQ ID NO: 410300 - DNA, 385 bp, Homo sapiens
tccagtatgaatcttctcatgtttactaagggttgaggatgaaataaaggctttgccacatttatcacacttgtatggtttctctccagtatgagttttgttatgtgaagaaagggttgcaggatgtttaaaagctttgccacattctttacatttgtagggttgctctccagtatgagttatcttatgaatagcaagctgtgagggccagttaaaggctttgccacactcttcacatttgtaggatttctctccagtatggattatcttatgttcagtaagcgtagaggaatacttaaagccattgccacattcttcacatttgtagggtttctctccagtatgagttatcttatgtgtagttaggtgtgaggaccatctgaag

SEQ ID NO: 410301 - DNA, 427 bp, Homo sapiens
ccttgggttcaacattgtgctttatggtttgggttctaagagagatttactagaaaggtttcgaaccactatgctgcaagattccattcacgttgtcatcaatggcttctttcctggaatcagtgtgaaatcagtcctgaattctataacagaagaagtcctcgatcatatgggtacttggtgggggcaggggagggaatatattataatactattcagttgggataatgggaaaaacagagtatatagggtatctacccagcctagaaagcacaggaacaatacgtcatatatttggaacagttattgtctgtgccatgaccttcatgataccagtgagaagccaggctagagaaataaaatcctgaattacattttagtaattgttttcaagacaacaaaaaataaaacatttcattattcttgt

SEQ ID NO: 410302 - DNA, 424 bp, Homo sapiens
gcaaactacacataacataaaatttagcatgttaaccatttctaactgtgtcattcagtggtactgagtacattcacaatgttgtgcagtcatcacactatccaactccagaagtttctgtcatctgaaatagaaactctgtacacggtcagcacggtggcttacgcctgtaatcccaacagtgtgggaggctgaggcgggcagatcatgaggtcaagagatccagaccatcctgcccaacatggtgaaaccccatctctactaaaaatacaaaaattagctgggcgtgtaatcccagctactcaggaggctgaggcaggagaattgcttgaacccaggaggcggagattgcagtgagccgagatcgagtcgagccactgcactccagcctggtgacagagcgagactctgtctcaaaaaaaaa

SEQ ID NO: 410303 - DNA, 320 bp, Homo sapiens
gcggccgcctactactactactactactactaattacgcgcgctcgcatgggtggataactatcaccaacaaaaccagggtgtgtgactctgaggctcatccccacatctcaggccttgggagcagggatatagctatgagtttgattgtgggaggaagggtgcagcattgacatggctttgggaaaaaagtgtgatctcgggcttgggtcctggagatcagggcatagctacagttctggtcccagaactaacagggcacagcagcaactcaagccccaggggattggggtaccacacaatggcgactttgggaggacg

SEQ ID NO: 410304 - DNA, 539 bp, Homo sapiens
tttgttttaggttcaggggtgcatgtgtaggtttgttatacaggtaaattacatgtcatgggggatgggtgtatgaattattttgtcaaccaggtaataagcatagtacctcataggtagtttttcagtcctcactcctcttccacgctccactctaaagtaggccccagtgtctagggtttaaactaatgaatgtttttacaattgagttttcatttactttctatgttctggcttcaacaggttactgaagctgagtctctctcctcacaggcatctaggcctgacaatcagctgtgatgatgtatctttgaacagttgtatctctaagaggaggctataattaaccttgaaattaatatcttaatatatcaaaagtcaattgatttattttaaatgcttagtttttcaactcatttttcatttactttctagtgttcattccctatgattaaaaatacatatgaatatgtatatacaggtataaatgtacatgttataaacatacatacaaatttcattttctattacctgagcac

SEQ ID NO: 410305 - DNA, 409 bp, Homo sapiens
gaactgaattctgccagcaaccgaaatggacaaggagacagacccgaacacaggccagccaacacctttcttctagcccaatgagtcctttgtttgacttcaggcctatagaactgagagataataaatttgtcttgtttaagccactaagtttctgcttgttgttatggcagttatagaaaactgataacagatagtttcacacatgtatctggcatttggcaggctatttggcttcagctgggatgacttgtctcctttctattcaccagtaaactaacctgtgcttcttcacatagtgtctcagggttgtgtgtgtgacggaatctcgctctgtcgcccaggctggagtgccgtgattgcgccattgcactccagcctgggcaacaagagcgaaactccatctcca

SEQ ID NO: 410306 - DNA, 499 bp, Homo sapiens
gaactgaattctgccagcaaccgaaatggacaaggagacagacccgaacacaggccagccaacacctttcttctagcccaatgagtcctttgtttgacttcaggcctatagaactgagagataataaatttgtcttgtttaagccactaagtttctgcttgttgttatggcagttatagaaaactgataacagatagtttcacacatgtatctggcatttggcaggctatttggcttcagctgggatgacttgtctcctttctattcaccagtaaactaacctgtgcttcttcacatagtgtctcagggttgtgtgtgtgacggaatctcgctctgtcgcccaggctggagtgccgtggtgtagtctcagctcactgcaacctccgcctcctgggttcaagtgattctcctgcctcagcctccctagtagctgggattacaggcgcctgccactacacctggctaatttttgtatttttagtagagacagggtttcacc

SEQ ID NO: 410307 - DNA, 202 bp, Homo sapiens
ctagcagttgttgtgattatggcctgttaccatttaaggtctttatcagtgctgtccgatagaaatataatatgaactacatatgtcatttaaaaaagtaaagaatcaggcaaaattaatttataatataccgtattttatttgacactgtgtctaaaacattcattgcagatataatgaatattaaaacatttataatgag

SEQ ID NO: 410308 - DNA, 593 bp, Homo sapiens
acccactgcccttccatgtgaaaatggttttttaaacaaccttggttatagttttaaacttcgctggaagaattaggtcatccaaaatatgtgtggggtgtgaagttttgttttctgcacaaagacttgtcatgagtctaaacatttctctctcaagtaatttacaatttaattaccttgtgttatgttccctcaggaaggggaggagaagggaaaggaagaaaaggcaaaaaaaaaagttttaaaaatgtgtgctgcattcaggatttagatttcaccttataaagtttttattacagcgtcctcctcccctcattgtgccatgaaatagtgaatcactctgcttggtctctgaggacagatgctgttctcatgttttatcctgacacctccgagatgagctttccatatgaaggaagggaggacatttgatgtgtccagtgttgttctggggcctccccttctctggaagtcactgacacgtgtagttttggcattgaagcccagcgggagacgacatttggccaattcccctgctgattaatgtgcctgagggtccatgccaccctttgcccccttccagtgcattagtt

SEQ ID NO: 410309 - DNA, 2524 bp, Homo sapiens
gaaagaatcaaagcgcacatcttgtactttgatgcccataggaagggctctcctctggcccctctggctttgtttggagcagaaaacaacaaatagctgcagctgaggacagccaccctttcttcgtctctgctgagcgaaggctacacggcccttcctccttgcagctgtttcaccttctaccttgcgtggagccaggcttttgcaccgaatctgagatgccattttaaacagaagactccatcctcttgaagatgggaaattcttacgctggacagctgaagacgacacgctttgaagaggtcttgcacaattccatcgaggcatccctgcggtccaacaacctggtgcccaggcccatcttttcccagctgtacctggaagctgagcagcagcttgccgctctagaaggtggtagccgagtggacaatgaggaagaggaagaagagggagaaggagggctggaaacaaatggccccccaaaccctttccagctgcaccctctgcctgaaggatgctgtaccacagacgggttttgccaggccgggaaggacctgcgccttgtctccatttccaacgagcccatggatgtccctgcgggctttctcctcgtgggggtcaagtcccccagcctgccggaccatctcctggtgtgcgccgttgacaagaggttcttgccagatgacaatggccacaatgctcttcttggtttctctgggaattgtgttggctgtggaaagaaaggcttctgttacttcacggaattctccaatcatataaatctgaaactgaccactcaacccaagaagcagaaacacttgaagtattacctggtccgtaatgcacaagggactctaaccaaaggacctttaatctgttggaaaggctcagagtttagaagccggcagatccccgccagtacttgttccagttccctcttcccagccctggagagcacggctgccttccccagcgagcccgttcctgggacgaaccccagcatcctgatgggagctcagcaggcaggaccagcttctgatcacccctcactaaacgcagcaatgggtccggctgttttcaacggcaaagattccccgaagtgccaacaactggcaaagaataacctgttggccctgccgcgaccatcggctttaggtatcttgtcaaactccgggccccccaaaaaacgccacaaagggtggtctccagaatctccatcagctccagatggtggctgcccccaaggtggtgggaacagagctaagtatgagagcgcaggcatgtcctgcgtgccgcaggttggcttggtgggaccagcttcagtcacctttccagtggtggcctctggagaaccagtgtctgttcctgacaacttgctgaaaatatgcaaggccaagccagtgatatttaaaggccatgggaacttcccttacctctgtgggaacctgaatgacgtcgtggtcagccccctcttgtacacgtgctaccagaattcccagtctgtctcacgggcatacgagcagtacggcgcctctgccatccagcccatctccgaggagatgcagctcctgcttaccgtctactacctggtccagctggcacatcaaatacgaaatccggacgtataaaccagacaattcataaaagagaaaataccagaaggaaacaaatattgaaaagtattcagtctcactcatcatcaaagacatgcaaatcacaaatcaagtcatctttttctgaattaataacccaaatgatggtacccagtggtgcttaggtgcggtaaaaccagcgcttgtccgatgcaccgttcgcgtggtaaactgacgcattcaggctcttgggaagcaagctgatgatatgtagtagctggttctgtaaatccacctttgagaatttaggcgaaggaagtaacgttctatacgtcaagatgtgcattgcagagggatttataaaggtgaatatttggaagaaataagagaatccacaatagagaccttgctaagtaaacggtggtgctcacgtatgatgggacattatggacacactaacagcactctttatgttggctgaaaatggcactgaaactgatgatagggtcatggttaaggaaagaatgcaagacccaaagtttatactgacaatcattgcagctatttgtaaggacagttttaatactaattccagcaatacatgtttttattccctgtcctggagtaggagaaagcctatattcccaggctgaatgttctacacatttaccactgtatatgcacatagggacagtgtaacctgtctataccaccgtagttccagtcctaactttctgaattctgtttaaagaccttctctaacaagctatgggaatttggcctcctactttttttttcttttttttttttttttaacaacagcagtgttttgggtgataattctggattgatacttattcctttttctgggttttgttggctttttgaaaaattgtctttccaacttataattggtgagtggcttggatagc

SEQ ID NO: 410310 - DNA, 2456 bp, Homo sapiens
tttggttgttgttgtagctctgggagcagatactagctctgaaacttttcccctggctggcttggctgcctctccctgccgggcaggggccaggaagcctgggtgtcaggcagacccgagccaggctctgcacagcagggcattacgcgccccacgcatcctcttccatccccaggcacagatcaaaggcgcagcccaggaggcgggagcccctgcacactttccacctctgctgggcttagcctcttggctggttggtctgtggagtgcctgaagtgaccagctttttgtaagtagctgcagctgaggacagccaccctttcttcgtctctgctgagcgaaggctacacggcccttcctccttgcagctgtttcaccttctaccttgcgtggagccaggcttttgcaccgaatctgagatgccattttaaacagaagactccatcctcttgaagatgggaaattcttacgctggacagctgaagacgacacgctttgaagaggtcttgcacaattccatcgaggcatccctgcggtccaacaacctggtgcccaggcccatcttttcccagctgtacctggaagctgagcagcagcttgccgctctagaaggtggtagccgagtggacaatgaggaagaggaagaagagggagaaggagggctggaaacaaatggccccccaaaccctttccagctgcaccctctgcctgaaggatgctgtaccacagacgggttttgccaggccgggaaggacctgcgccttgtctccatttccaacgagcccatggatgtccctgcgggctttctcctcgtgggggtcaagtcccccagcctgccggaccatctcctggtgtgcgccgttgacaagaggttcttgccagatgacaatggccacaatgctcttcttggtttctctgggaattgtgttggctgtggaaagaaaggcttctgttacttcacggaattctccaatcatataaatctgaaactgaccactcaacccaagaagcagaaacacttgaagtattacctggtccgtaatgcacaagggactctaaccaaaggacctttaatctgttggaaaggctcagagtttagaagccggcagatccccgccagtacttgttccagttccctcttcccagccctggagagcacggctgccttccccagcgagcccgttcctgggacgaaccccagcatcctgatgggagctcagcaggcaggaccagcttctgatcacccctcactaaacgcagcaatgggtccggctgttttcaacggcaaagattccccgaagtgccaacaactggcaaagaataacctgttggccctgccgcgaccatcggctttaggtatcttgtcaaactccgggccccccaaaaaacgccacaaagggtggtctccagaatctccatcagctccagatggtggctgcccccaaggtggtgggaacagagctaagtatgagagcgcaggcatgtcctgcgtgccgcaggttggcttggtgggaccagcttcagtcacctttccagtggtggcctctggagaaccagtgtctgttcctgacaacttgctgaaaatatgcaaggccaagccagtgatatttaaagtatttgtaaatggtgctacccaaatggtagcccttggtccggcagaacctgcatcgccccggagcttatgagaggcgtgaattcatggacccatcctggaatcagaatcaggccccacttctgcatcagaagccctgggtggcaccagcaagtgtttggcaagcccttgagaagcagtgtctttgagaacgtgacctgtgccccaggcaccagctttactccccgagcccagcaggacatctgcatataacacacagccgaagtcagaaaatatatttttggtgactaaatggagtacctggagtacaagataacacacacacacacacacacacacacacacacacacacacacacgccacctttgggagctcagcagccccgagaggatttgatagcttcaccgcttcacctggttttacaaatgcggagactgaggtttagggcagttaagcttcttgcttagcatcatgtaggtaaagaatggtggaaagatatttgaacccgacctgggcaattccacctctgagggctgtcctcagaatgaatcttctgatgggctgggcacggtggctcacgcctgtaatcccagaactttgagaggccgaggcgggtagatcactttaggtcagaagttcaagatcagcctgggcaacatggtgaaaccttgtctctactaaaaatacaaaaattggccgggtgtggtggtgatgcgcacctgtcatcccagctactcgggaggctgaggtgggagaatcacttgaacttgggaggcagaggttgtggtgagccgagatcacgccactgcactccagcccggggacagagcaagacactgtctc

SEQ ID NO: 410311 - DNA, 471 bp, Homo sapiens
tttggttgttgttgtagctctgggagcagatactagctctgaaacttttcccctggctggcttggctgcctctccctgccgggcaggggccaggaagcctgggtgtcaggcagacccgagccaggctctgcacagcagggcattacgcgccccacgcatcctcttccatccccaggcacagatcaaaggcgcagcccaggaggcgggagcccctgcacactttccacctctgctgggcttagcctcttggctggttggtctgtggagtgcctgaagtgaccagctttttgtaaggtacggtttatttgactttgcaagcgagcacctgctttgggggttggagaggtttgtgttgacttacgaagacagctgtggcctgtgttcagcagaataatggcaaagcattggcccttctaataaggtgcaggggagcagtaaaccgagacaagtccacttaatgaacgggtgtcc

SEQ ID NO: 410312 - DNA, 3484 bp, Homo sapiens
aaataaagttttttcaatggaaggcttgcagctcttgaggacctgccaaatggaagaaggacagagacctggagccctatggaaagttctgacaccatgtgtggaaggacatggcttttaacacgtgtggtgactggagtagctgcagctgaggacagccaccctttcttcgtctctgctgagcgaaggctacacggcccttcctccttgcagctgtttcaccttctaccttgcgtggagccaggcttttgcaccgaatctgagatgccattttaaacagaagactccatcctcttgaagatgggaaattcttacgctggacagctgaagacgacacgctttgaagaggtcttgcacaattccatcgaggcatccctgcggtccaacaacctggtgcccaggcccatcttttcccagctgtacctggaagctgagcagcagcttgccgctctagaaggtggtagccgagtggacaatgaggaagaggaagaagagggagaaggagggctggaaacaaatggccccccaaaccctttccagctgcaccctctgcctgaaggatgctgtaccacagacgggttttgccaggccgggaaggacctgcgccttgtctccatttccaacgagcccatggatgtccctgcgggctttctcctcgtgggggtcaagtcccccagcctgccggaccatctcctggtgtgcgccgttgacaagaggttcttgccagatgacaatggccacaatgctcttcttggtttctctgggaattgtgttggctgtggaaagaaaggcttctgttacttcacggaattctccaatcatataaatctgaaactgaccactcaacccaagaagcagaaacacttgaagtattacctggtccgtaatgcacaagggactctaaccaaaggacctttaatctgttggaaaggctcagagtttagaagccggcagatccccgccagtacttgttccagttccctcttcccagccctggagagcacggctgccttccccagcgagcccgttcctgggacgaaccccagcatcctgatgggagctcagcaggcaggaccagcttctgatcacccctcactaaacgcagcaatgggtccggctgttttcaacggcaaagattccccgaagtgccaacaactggcaaagaataacctgttggccctgccgcgaccatcggctttaggtatcttgtcaaactccgggccccccaaaaaacgccacaaagggtggtctccagaatctccatcagctccagatggtggctgcccccaaggtggtgggaacagagctaagtatgagagcgcaggcatgtcctgcgtgccgcaggttggcttggtgggaccagcttcagtcacctttccagtggtggcctctggagaaccagtgtctgttcctgacaacttgctgaaaatatgcaaggccaagccagtgatatttaaaggccatgggaacttcccttacctctgtgggaacctgaatgacgtcgtggtcagccccctcttgtacacgtgctaccagaattcccagtctgtctcacgggcatacgagcagtacggcgcctctgccatccagcccatctccgaggagatgcagctcctgcttaccgtctactacctggtccagctggccgcggaccaggtgcccttgatggaggacctggagcagatcttcctgcgctcttggcgcgagtcgcacctgaccgagatccggcagtaccagcaggcgccgccgcagcccttcccgcccgcgcccagcgccgcggcacccgtgacctccgcgcagctgccctggctggccagcctggccgccagctcctgcaacgacagcgtgcacgtcatcgagtgtgcttactccctggccgagggcctctccgagatgttccggctgttggtcgagggcaagcttgccaagaccaactacgtggtcatcatctgcgcctgccgcagcgcggccatcgactcctgcatcgccgtcaccggaaaataccaagcccggattctttccgagagccttctcactcctgcggagtaccagaaggaagtcaattacgagctggttacggggaaggtagactcgctgggggccttctttagcaccctctgtccagagggtgacattgacattttgctggacaaatttcaccaggaaaatcaaggccatatttcttcctcactcgctgcctcttctgtcactaaagcagcatccctggatgtcagtgggacaccggtgtgcacaagttacaatctggagccacacagcatccggcccttccagctggcagtagcgcagaagctcctctcccatgtgtgttccattgcggattccagcacccaaaatctggacctgggatcctttgagaaggtggactttctcatttgcattcccccctcagaagtgacctaccagcagactctgctccacgtgtggcattcaggggttttgctggagcttggtctgaagaaagagcacatgacgaagcagagggtggaacagtatgttctgaagctagacacggaggcacagacaaaatttaaggcttttctgcaaaactccttccagaacccgcatacactttttgtcctaatccatgaccatgcgcactgggatcttgtgagtagcactgttcataacctctattctcaaagtgacccgtcggtgggattggtggaccgattgctcaactgcagggaggtgaaggaggcccccaacattgtgacacttcacgtgacctccttcccgtatgcactgcagacacagcacaccctcatcagcccctacaacgagatccactggcctgcctcctgcagtaatggagtggacttatatcatgaaaataagaagtacttcgggctgtcggagtttattgaatccaccctttcaggacacagcctccccttgctcagatacgatagctcctttgaggccatggtcactgcattaggaaaaaggttcccccgcctgcacagcgcggtgatcaggacctttgttctcgtgcagcactacgcggccgccctgatggccgtaagcggcctcccgcagatgaagaactacacgtcggtggagacgctggagatcacgcagaacctcctcaactccccgaagcagtgcccctgcggccacgggctcatggtcctgctgcgggtgccctgttcgcccctggcggtggtggcctatgagcggctggcccacgtgcgggcccggctggcgctggaggagcactttgagatcatcctgggcagtcccagctcaggcgtcaccgtggggaagcacttcgtaaagcagctcaggatgtggcagaaaatcgaggatgtggagtggagaccccagacttacttggagctggagggtctgccttgcatcctgatcttcagtgggatggacccgcatggggagtccttgccgaggtctttgaggtactgtgacctgcgattgataaactcctcctgcttggtgagaacagccttgg

SEQ ID NO: 410313 - DNA, 2836 bp, Homo sapiens
ggtcgagctgtagaggatcgcctgacagtaaaatgaacacatctcctggtgtgcgccgttgacaagaggttcttgccagatgacaatggccacaatgctcttcttggtttctctgggaattgtgttggctgtggaaagaaaggcttctgttacttcacggaattctccaatcatataaatctgaaactgaccactcaacccaagaagcagaaacacttgaagtattacctggtccgtaatgcacaagggactctaaccaaaggacctttaatctgttggaaaggctcagagtttagaagccggcagatccccgccagtacttgttccagttccctcttcccagccctggagagcacggctgccttccccagcgagcccgttcctgggacgaaccccagcatcctgatgggagctcagcaggcaggaccagcttctgatcacccctcactaaacgcagcaatgggtccggctgttttcaacggcaaagattccccgaagtgccaacaactggcaaagaataacctgttggccctgccgcgaccatcggctttaggtatcttgtcaaactccgggccccccaaaaaacgccacaaagggtggtctccagaatctccatcagctccagatggtggctgcccccaaggtggtgggaacagagctaagtatgagagcgcaggcatgtcctgcgtgccgcaggttggcttggtgggaccagcttcagtcacctttccagtggtggcctctggagaaccagtgtctgttcctgacaacttgctgaaaatatgcaaggccaagccagtgatatttaaaggccatgggaacttcccttacctctgtgggaacctgaatgacgtcgtggtcagccccctcttgtacacgtgctaccagaattcccagtctgtctcacgggcatacgagcagtacggcgcctctgccatccagcccatctccgaggagatgcagctcctgcttaccgtctactacctggtccagctggccgcggaccaggtgcccttgatggaggacctggagcagatcttcctgcgctcttggcgcgagtcgcacctgaccgagatccggcagtaccagcaggcgccgccgcagcccttcccgcccgcgcccagcgccgcggcacccgtgacctccgcgcagctgccctggctggccagcctggccgccagctcctgcaacgacagcgtgcacgtcatcgagtgtgcttactccctggccgagggcctctccgagatgttccggctgttggtcgagggcaagcttgccaagaccaactacgtggtcatcatctgcgcctgccgcagcgcggccatcgactcctgcatcgccgtcaccggaaaataccaagcccggattctttccgagagccttctcactcctgcggagtaccagaaggaagtcaattacgagctggttacggggaaggtagactcgctgggggccttctttagcaccctctgtccagagggtgacattgacattttgctggacaaatttcaccaggaaaatcaaggccatatttcttcctcactcgctgcctcttctgtcactaaagcagcatccctggatgtcagtgggacaccggtgtgcacaagttacaatctggagccacacagcatccggcccttccagctggcagtagcgcagaagctcctctcccatgtgtgttccattgcggattccagcacccaaaatctggacctgggatcctttgagaaggtggactttctcatttgcattcccccctcagaagtgacctaccagcagactctgctccacgtgtggcattcaggggttttgctggagcttggtctgaagaaagagcacatgacgaagcagagggtggaacagtatgttctgaagctagacacggaggcacagacaaaatttaaggcttttctgcaaaactccttccagaacccgcatacactttttgtcctaatccatgaccatgcgcactgggatcttgtgagtagcactgttcataacctctattctcaaagtgacccgtcggtgggattggtggaccgattgctcaactgcagggaggtgaaggaggcccccaacattgtgacacttcacgtgacctccttcccgtatgcactgcagacacagcacaccctcatcagcccctacaacgagatccactggcctgcctcctgcagtaatggagtggacttatatcatgaaaataagaagtacttcgggctgtcggagtttattgaatccaccctttcaggacacagcctccccttgctcagatacgatagctcctttgaggccatggtcactgcattaggaaaaaggttcccccgcctgcacagcgcggtgatcaggacctttgttctcgtgcagcactacgcggccgccctgatggccgtaagcggcctcccgcagatgaagaactacacgtcggtggagacgctggagatcacgcagaacctcctcaactccccgaagcagtgcccctgcggccacgggctcatggtcctgctgcgggtgccctgttcgcccctggcggtggtggcctatgagcggctggcccacgtgcgggcccggctggcgctggaggagcactttgagatcatcctgggcagtcccagctcaggcgtcaccgtggggaagcacttcgtaaagcagctcaggatgtggcagaaaatcgaggatgtggagtggagaccccagacttacttggagctggagggtctgccttgcatcctgatcttcagtgggatggacccgcatggggagtccttgccgaggtctttgaggtactgtgacctgcgattgataaactcctcctgcttggtgagaacagccttgg

SEQ ID NO: 410314 - DNA, 2897 bp, Homo sapiens
ataatgatggtagtgaagatgatgatgatgtgggtaattctggctaccttattgggtccaagctccccacaattcgttgcacaaagcactctacatacattctctttagtcctgatcaaaccacctttcagagtaggatttagtgtcctattttaaagatgaaggagctcgggctcagagagagatcgtttagacacacacacaactttggaatgaaacatttacagccgggcgcggtggcgcgtgcctgtagtcccagctacttgggaggctgaggctggaggatcgcttgagtccaggagttctgggctgtagtgcgctatgccgatcgggtgtccgcactaagtttggcatcaatatggtgacctcccgggagtggaggaccaccaggttgcctaaggaggggtgaaccggtccaggtcggaatgaaacatttacaaaaattgacatttccttatgcatagatatttcactaggtccttaaaacccacgtgaatctgtgattagaaaaaaaaaaacaaaacaaaacagatcattgttctccaaaccaagggtaaattttattggagccctgtcctggtgatagcctaatccacactctgaatattgtctaggtatcttgtcaaactccgggccccccaaaaaacgccacaaagggtggtctccagaatctccatcagctccagatggtggctgcccccaaggtggtgggaacagagctaagtatgagagcgcaggcatgtcctgcgtgccgcaggttggcttggtgggaccagcttcagtcacctttccagtggtggcctctggagaaccagtgtctgttcctgacaacttgctgaaaatatgcaaggccaagccagtgatatttaaaggccatgggaacttcccttacctctgtgggaacctgaatgacgtcgtggtcagccccctcttgtacacgtgctaccagaattcccagtctgtctcacgggcatacgagcagtacggcgcctctgccatccagcccatctccgaggagatgcagctcctgcttaccgtctactacctggtccagctggccgcggaccaggtgcccttgatggaggacctggagcagatcttcctgcgctcttggcgcgagtcgcacctgaccgagatccggcagtaccagcaggcgccgccgcagcccttcccgcccgcgcccagcgccgcggcacccgtgacctccgcgcagctgccctggctggccagcctggccgccagctcctgcaacgacagcgtgcacgtcatcgagtgtgcttactccctggccgagggcctctccgagatgttccggctgttggtcgagggcaagcttgccaagaccaactacgtggtcatcatctgcgcctgccgcagcgcggccatcgactcctgcatcgccgtcaccggaaaataccaagcccggattctttccgagagccttctcactcctgcggagtaccagaaggaagtcaattacgagctggttacggggaaggtagactcgctgggggccttctttagcaccctctgtccagagggtgacattgacattttgctggacaaatttcaccaggaaaatcaaggccatatttcttcctcactcgctgcctcttctgtcactaaagcagcatccctggatgtcagtgggacaccggtgtgcacaagttacaatctggagccacacagcatccggcccttccagctggcagtagcgcagaagctcctctcccatgtgtgttccattgcggattccagcacccaaaatctggacctgggatcctttgagaaggtggactttctcatttgcattcccccctcagaagtgacctaccagcagactctgctccacgtgtggcattcaggggttttgctggagcttggtctgaagaaagagcacatgacgaagcagagggtggaacagtatgttctgaagctagacacggaggcacagacaaaatttaaggcttttctgcaaaactccttccagaacccgcatacactttttgtcctaatccatgaccatgcgcactgggatcttgtgagtagcactgttcataacctctattctcaaagtgacccgtcggtgggattggtggaccgattgctcaactgcagggaggtgaaggaggcccccaacattgtgacacttcacgtgacctccttcccgtatgcactgcagacacagcacaccctcatcagcccctacaacgagatccactggcctgcctcctgcagtaatggagtggacttatatcatgaaaataagaagtacttcgggctgtcggagtttattgaatccaccctttcaggacacagcctccccttgctcagatacgatagctcctttgaggccatggtcactgcattaggaaaaaggttcccccgcctgcacagcgcggtgatcaggacctttgttctcgtgcagcactacgcggccgccctgatggccgtaagcggcctcccgcagatgaagaactacacgtcggtggagacgctggagatcacgcagaacctcctcaactccccgaagcagtgcccctgcggccacgggctcatggtcctgctgcgggtgccctgttcgcccctggcggtggtggcctatgagcggctggcccacgtgcgggcccggctggcgctggaggagcactttgagatcatcctgggcagtcccagctcaggcgtcaccgtggggaagcacttcgtaaagcagctcaggatgtggcagaaaatcgaggatgtggagtggagaccccagacttacttggagctggagggtctgccttgcatcctgatcttcagtgggatggacccgcatggggagtccttgccgaggtctttgaggtactgtgacctgcgattgataaactcctcctgcttggtgagaacagccttgg

SEQ ID NO: 410315 - DNA, 2515 bp, Homo sapiens
ctggtctctgtggtgatatattgtcccaactcaccttgccagacagccctgggagaatgcagggcagaatcctccctgcttggagtcagggaggcaagacctggcaggcagcacccagtgaagctctggaaggtgctctgcccacaaggtgtcccattggtggtgctggaggagtgacaggtggcggctgcttggctctgggcaagtccctccctccagccccctcacttgtaaaaaataagaggattggacgaaatgaaccagcaagtggcacagccccattggttagaaaaggtgactcctctcatcctaggctccaggagggtgagcaggtgcactcaatgagcaaggcttcccaggacagggcactcgagggacctggcgcagctcacctatctccttcagtgccctcacccccagagaacccacatgtatgggaccgtaagctgtgcacaagactgggtgccaagtcgctgctgttcctctgcaggccatgggaacttcccttacctctgtgggaacctgaatgacgtcgtggtcagccccctcttgtacacgtgctaccagaattcccagtctgtctcacgggcatacgagcagtacggcgcctctgccatccagcccatctccgaggagatgcagctcctgcttaccgtctactacctggtccagctggccgcggaccaggtgcccttgatggaggacctggagcagatcttcctgcgctcttggcgcgagtcgcacctgaccgagatccggcagtaccagcaggcgccgccgcagcccttcccgcccgcgcccagcgccgcggcacccgtgacctccgcgcagctgccctggctggccagcctggccgccagctcctgcaacgacagcgtgcacgtcatcgagtgtgcttactccctggccgagggcctctccgagatgttccggctgttggtcgagggcaagcttgccaagaccaactacgtggtcatcatctgcgcctgccgcagcgcggccatcgactcctgcatcgccgtcaccggaaaataccaagcccggattctttccgagagccttctcactcctgcggagtaccagaaggaagtcaattacgagctggttacggggaaggtagactcgctgggggccttctttagcaccctctgtccagagggtgacattgacattttgctggacaaatttcaccaggaaaatcaaggccatatttcttcctcactcgctgcctcttctgtcactaaagcagcatccctggatgtcagtgggacaccggtgtgcacaagttacaatctggagccacacagcatccggcccttccagctggcagtagcgcagaagctcctctcccatgtgtgttccattgcggattccagcacccaaaatctggacctgggatcctttgagaaggtggactttctcatttgcattcccccctcagaagtgacctaccagcagactctgctccacgtgtggcattcaggggttttgctggagcttggtctgaagaaagagcacatgacgaagcagagggtggaacagtatgttctgaagctagacacggaggcacagacaaaatttaaggcttttctgcaaaactccttccagaacccgcatacactttttgtcctaatccatgaccatgcgcactgggatcttgtgagtagcactgttcataacctctattctcaaagtgacccgtcggtgggattggtggaccgattgctcaactgcagggaggtgaaggaggcccccaacattgtgacacttcacgtgacctccttcccgtatgcactgcagacacagcacaccctcatcagcccctacaacgagatccactggcctgcctcctgcagtaatggagtggacttatatcatgaaaataagaagtacttcgggctgtcggagtttattgaatccaccctttcaggacacagcctccccttgctcagatacgatagctcctttgaggccatggtcactgcattaggaaaaaggttcccccgcctgcacagcgcggtgatcaggacctttgttctcgtgcagcactacgcggccgccctgatggccgtaagcggcctcccgcagatgaagaactacacgtcggtggagacgctggagatcacgcagaacctcctcaactccccgaagcagtgcccctgcggccacgggctcatggtcctgctgcgggtgccctgttcgcccctggcggtggtggcctatgagcggctggcccacgtgcgggcccggctggcgctggaggagcactttgagatcatcctgggcagtcccagctcaggcgtcaccgtggggaagcacttcgtaaagcagctcaggatgtggcagaaaatcgaggatgtggagtggagaccccagacttacttggagctggagggtctgccttgcatcctgatcttcagtgggatggacccgcatggggagtccttgccgaggtctttgaggtactgtgacctgcgattgataaactcctcctgcttggtgagaacagccttgg

SEQ ID NO: 410316 - DNA, 2749 bp, Homo sapiens
gagtctcgctctgtcgcccaggctggagtgcagtggcgcgatctcggctcactgcaagctccgcctcccgggttcacgccattctcctgcctcagcctcctgtagtcccagctacttgggaggctgaggctggaggatcgcttgagtccaggagttctgggctgtagtgcgctatgccgatcgggtgtccgcactaagtttggcatcaatatggtgacctcccgggagtggaggaccaccaggttgcctaaggaggggtgaaccggtccaggtcggaatgaaacatttacaaaaattgacatttccttatgcatagatatttcactaggtccttaaaacccacgtgaatctgtgattagaaaaaaaaaaacaaaacaaaacagatcattgttctccaaaccaagggtaaattttattggagccctgtcctggtgatagcctaatccacactctgaatattgtctaggtatcttgtcaaactccgggccccccaaaaaacgccacaaagggtggtctccagaatctccatcagctccagatggtggctgcccccaaggtggtgggaacagagctaagtatgagagcgcaggcatgtcctgcgtgccgcaggttggcttggtgggaccagcttcagtcacctttccagtggtggcctctggagaaccagtgtctgttcctgacaacttgctgaaaatatgcaaggccaagccagtgatatttaaaggccatgggaacttcccttacctctgtgggaacctgaatgacgtcgtggtcagccccctcttgtacacgtgctaccagaattcccagtctgtctcacgggcatacgagcagtacggcgcctctgccatccagcccatctccgaggagatgcagctcctgcttaccgtctactacctggtccagctggccgcggaccaggtgcccttgatggaggacctggagcagatcttcctgcgctcttggcgcgagtcgcacctgaccgagatccggcagtaccagcaggcgccgccgcagcccttcccgcccgcgcccagcgccgcggcacccgtgacctccgcgcagctgccctggctggccagcctggccgccagctcctgcaacgacagcgtgcacgtcatcgagtgtgcttactccctggccgagggcctctccgagatgttccggctgttggtcgagggcaagcttgccaagaccaactacgtggtcatcatctgcgcctgccgcagcgcggccatcgactcctgcatcgccgtcaccggaaaataccaagcccggattctttccgagagccttctcactcctgcggagtaccagaaggaagtcaattacgagctggttacggggaaggtagactcgctgggggccttctttagcaccctctgtccagagggtgacattgacattttgctggacaaatttcaccaggaaaatcaaggccatatttcttcctcactcgctgcctcttctgtcactaaagcagcatccctggatgtcagtgggacaccggtgtgcacaagttacaatctggagccacacagcatccggcccttccagctggcagtagcgcagaagctcctctcccatgtgtgttccattgcggattccagcacccaaaatctggacctgggatcctttgagaaggtggactttctcatttgcattcccccctcagaagtgacctaccagcagactctgctccacgtgtggcattcaggggttttgctggagcttggtctgaagaaagagcacatgacgaagcagagggtggaacagtatgttctgaagctagacacggaggcacagacaaaatttaaggcttttctgcaaaactccttccagaacccgcatacactttttgtcctaatccatgaccatgcgcactgggatcttgtgagtagcactgttcataacctctattctcaaagtgacccgtcggtgggattggtggaccgattgctcaactgcagggaggtgaaggaggcccccaacattgtgacacttcacgtgacctccttcccgtatgcactgcagacacagcacaccctcatcagcccctacaacgagatccactggcctgcctcctgcagtaatggagtggacttatatcatgaaaataagaagtacttcgggctgtcggagtttattgaatccaccctttcaggacacagcctccccttgctcagatacgatagctcctttgaggccatggtcactgcattaggaaaaaggttcccccgcctgcacagcgcggtgatcaggacctttgttctcgtgcagcactacgcggccgccctgatggccgtaagcggcctcccgcagatgaagaactacacgtcggtggagacgctggagatcacgcagaacctcctcaactccccgaagcagtgcccctgcggccacgggctcatggtcctgctgcgggtgccctgttcgcccctggcggtggtggcctatgagcggctggcccacgtgcgggcccggctggcgctggaggagcactttgagatcatcctgggcagtcccagctcaggcgtcaccgtggggaagcacttcgtaaagcagctcaggatgtggcagaaaatcgaggatgtggagtggagaccccagacttacttggagctggagggtctgccttgcatcctgatcttcagtgggatggacccgcatggggagtccttgccgaggtctttgaggtactgtgacctgcgattgataaactcctcctgcttggtgagaacagccttgg

SEQ ID NO: 410317 - DNA, 1305 bp, Homo sapiens
tttggttgttgttgtagctctgggagcagatactagctctgaaacttttcccctggctggcttggctgcctctccctgccgggcaggggccaggaagcctgggtgtcaggcagacccgagccaggctctgcacagcagggcattacgcgccccacgcatcctcttccatccccaggcacagatcaaaggcgcagcccaggaggcgggagcccctgcacactttccacctctgctgggcttagcctcttggctggttggtctgtggagtgcctgaagtgaccagctttttgtaagtagctgcagctgaggacagccaccctttcttcgtctctgctgagcgaaggctacacggcccttcctccttgcagctgtttcaccttctaccttgcgtggagccaggcttttgcaccgaatctgagatgccattttaaacagaagactccatcctcttgaagatgggaaattcttacgctggacagctgaagacgacacgctttgaagaggtcttgcacaattccatcgaggcatccctgcggtccaacaacctggtgcccaggcccatcttttcccagctgtacctggaagctgagcagcagcttgccgctctagaaggtggtagccgagtggacaatgaggaagaggaagaagagggagaaggagggctggaaacaaatggccccccaaaccctttccagctgcaccctctgcctgaaggatgctgtaccacagacggtgagcctctgccagctcctggccaggcagtgcctgccatgctgcccggaggcagtggccaggcgggtgactgggcctgtgactgtgtgctgcaggggtcctctttgctcttcctctttgctttccctgaggtgtgagccatgcccctgggcccgcagcaggtgctggcccggcctgccctcctgaaacaggagctccagagacaccatcctgggatgctaaggcaggcctctgtgccactctttggacagtctcaactttaccagtggcttgggagccagacattcatttttctgtgttggttgcttggaacctagaatacattttccctactcaggcctgtttgcacagcatattgaactcacaagtgattaggaggaataatctttctttctttcttttttttttttgacggaatctcactctgttgcccaggctggagtgcagtggtgcaatctcagatcactgcaacctccgcctcccaggttcaagcaattctcctgcctcagcctcccaagtagctgggattataggcacatgccaccatgcctggctaatttttgtatttttagt

SEQ ID NO: 410318 - DNA, 942 bp, Homo sapiens
catttccatattgattgctggtggttctcctgtttctagtaggaaccagaggcaacttagtcccctcctcagagagctgcacattgtgctgatagagacaaaataggcatttataccatttattcatctgctcattcattggacaaatatttattgagcagctactaagtgccaaatgctggaaaaacgtaataacaacaaacctatgtttttgttttccagctggaaaaaacaaaggactgtataatttgatttctaaagaaggcttctcattcaggttcccacaaccaccttccagaggcaacacaactgcgtataatgccggagttgcctgtggtagagtgacggatgtcttgggtgacttggcagcagcaggccggtgggcgcggccgtcacagacatggtctctctgtgttccttgcaggttcccccgcctgcacagcgcggtgatcaggacctttgttctcgtgcagcactacgcggccgccctgatggccgtaagcggcctcccgcagatgaagaactacacgtcggtggagacgctggagatcacgcagaacctcctcaactccccgaagcagtgcccctgcggccacgggctcatggtcctgctgcgggtgccctgttcgcccctggcggtggtggcctatgagcggctggcccacgtgcgggcccggctggcgctggaggagcactttgagatcatcctgggcagtcccagctcaggcgtcaccgtggggaagcacttcgtaaagcagctcaggatgtggcagaaaatcgaggatgtggagtggagaccccagacttacttggagctggagggtctgccttgcatcctgatcttcagtgggatggacccgcatggggagtccttgccgaggtctttgaggtactgtgacctgcgattgataaactcctcctgcttggtgagaacagccttgg

SEQ ID NO: 410319 - DNA, 328 bp, Homo sapiens
gagaaagaatcaaagcgcacatcttgtactttgatgcccataggaagggctctcctctggcccctctggctttgtttggagcagaaaacaacaaagtgagttcaggtaatacctggggcagtgggaattagctaattagttttctggaattctaacagcggtggcatcccaggggcctaaattaaagccgcagatgtgtttatttggtacacctggggctttaaatgctaatccaaatgctttcagacaggacctcagtctatttcttgacaatcctctctgtaaccttaagcatgtggtcttccttttcctcgtctactgtctcttt

SEQ ID NO: 410320 - DNA, 406 bp, Homo sapiens
atcctcttgaagatgggaaattcttacgctggacagctgaagacgacacgctttgaagaggtcttgcacaattccatcgaggcatccctgcggtccaacaacctggtgcccaggcccatcttttcccagctgtacctggaagctgagcagcagcttgccgctctagaaggtgggagacgcacgttgcttttatctgtgtatttcttttattgtgcgcagttaatgttagcaccagaacttgaaactcttttctttatgtagataacgttgaatctagcagaaaagaattattagaaaaagaaaactgggtacaagttcttactttggctaaaatgtaaataagtttcagccataaaattgcaagaagtaaaattattcattgaatcagtaggagaaaggaagagga

SEQ ID NO: 410321 - DNA, 462 bp, Homo sapiens
caaagaccaggatgtggtggcagcttgtgtggctgtctccatagctcactgtcctgtaggacacgttccactccaggaactcatttcgtagttgttggagaagagcgagttggttttcacgtgtgcaccttgcccccttagagtttagaagccggcagatccccgccagtacttgttccagttccctcttcccagccctggagagcacggctgccttccccagcgagcccgttcctgggacgaaccccagcatcctgatgggagctcagcaggcaggtgaggtggtggagacacaccagagctgctaaacccacagagctggcactgtctccgatgtgtccggttgactatgccgtcaagcattcttcaaaataaatcagggggctgttatctttttctataacacctttactttcatcttgaatttgtaatacttttcaacaaagaatgctaggtttttca

SEQ ID NO: 410322 - DNA, 711 bp, Homo sapiens
agagcacttgccattgcttttatcaagtgcttgctagccatggatgccaactaacttcttcaattgaaggccggaggatcatatcgggttccaggagcctcttgagcaggtcctggcaatcggccgagatgctcagatgagtggggaaggacacccccttctgctgctgccacagcatcttggggatgtctgtgtcgtcaaaagagacctgcccggctccgcctggaccggagcgttctcccgcggccagggctccggcagctgcttctagcctgggaccggtctcaaccgccgggagagcgccccggggcttggacatgagcgcccaggagcccccgcagggtcggagattccccattgaggccggagactcccgtggccttgccgccgcccccgagtcccaggacagcccggaggcggtagcgacggagcacaacccggtcaggccgcttcgtcgctgccctggatgccactgcctgacgctgctgcacgtgcccatcgacgtctacctcgccatgggcgggagcccccgggcccgcgccacgtgagtgcgcctgctccctgcggctccgcgggagctgggcgggaacgaggcccccagcgggccaccacgctgaggtcgcatgcgccgagcacgagacaatgatgcacattttaaaataaaagaatgatgcacattttaataaagcacagcacaaactgttctttcca

SEQ ID NO: 410323 - DNA, 960 bp, Homo sapiens
ggtgcaattgtgatgtagatgctgtgtgacccttggccaaaatgggcagtgcccctacctgccctcactaccaccaccaaactcagcccggattaagtcaccgccgagcccgcccccgtgccaggcattgagttgtagtcccgcctgggagggcgctccgccgcgtctgtgtggaccgggaatgcgcggctcctcggcgtggacgccgcctcgcggcgggttgccctggcctgctgcgcccccctcgggtgtccggggtctgcgcgaccccgtctccaggcgccatggccagaggcctccagtccccgattctggcccgcgctgagtgccaggggcggcagggggcaccgttgggggttctccagtgggaggaacgtgctctgtgaggtcagcgcgccgcggcccgggtcacaatgctgccctcctcgacgcccgggcccgggcacgccacagagacctgcccggctccgcctggaccggagcgttctcccgcggccagggctccggcagctgcttctagcctgggaccggtctcaaccgccgggagagcgccccggggcttggacatgagcgcccaggagcccccgcagggtcggagattccccattgaggccggagactcccgtggccttgccgccgcccccgagtcccaggacagcccggaggcggtagcgacggagcacaacccggtcaggccgcttcgtcgctgccctggatgccactgcctgacgctgctgcacgtgcccatcgacgtctacctcgccatgggcgggagcccccgggcccgcgccacgtgagtgcgcctgctccctgcggctccgcgggagctgggcgggaacgaggcccccagcgggccaccacgctgaggtcgcatgcgccgagcacgagacaatgatgcacattttaaaataaaagaatgatgcacattttaataaagcacagcacaaactgttctttcca

SEQ ID NO: 410324 - DNA, 1111 bp, Homo sapiens
ggtgcaattgtgatgtagatgctgtgtgacccttggccaaaatgggcagtgcccctacctgccctcactaccaccaccaaactcagcccggattaagtcaccgccgagcccgcccccgtgccaggcattgagttgtagtcccgcctgggagggcgctccgccgcgtctgtgtggaccgggaatgcgcggctcctcggcgtggacgccgcctcgcggcgggttgccctggcctgctgcgcccccctcgggtgtccggggtctgcgcgaccccgtctccaggcgccatggccagaggcctccagtccccgattctggcccgcgctgagtgccaggggcggcagggggcaccgttgggggttctccagtgggaggaacgtgctctgtgaggtcagcgcgccgcggcccgggtcacaatgctgccctcctcgacgcccgggcccgggcacgccacagagacctgcccggctccgcctggaccggagcgttctcccgcggccagggctccggcagctgcttctagcctgggaccggtctcaaccgccgggaggtgagcgacggcccagggggcgggcgcgaggcggcggcgcccggcgacccgggagaggcctgaccgccactccccgcgcagagcgccccggggcttggacatgagcgcccaggagcccccgcagggtcggagattccccattgaggccggagactcccgtggccttgccgccgcccccgagtcccaggacagcccggaggcggtagcgacggagcacaacccggtcaggccgcttcgtcgctgccctggatgccactgcctgacgctgctgcacgtgcccatcgacgtctacctcgccatgggcgggagcccccgggcccgcgccacgtgagtgcgcctgctccctgcggctccgcgggagctgggcgggaacgaggcccccagcgggccaccacgctgaggtcgcatgcgccgagcacgagacaatgatgcacattttaaaataaaagaatgatgcacattttaataaagcacagcacaaactgttctttccaaaaaaaaccgcaagcacagaaaacgagagcacaacaacaacacacagacacaccaaccacacaaaaagag

SEQ ID NO: 410325 - DNA, 1041 bp, Homo sapiens
ggtgcaattgtgatgtagatgctgtgtgacccttggccaaaatgggcagtgcccctacctgccctcactaccaccaccaaactcagcccggattaagtcaccgccgagcccgcccccgtgccaggcattgagttgtagtcccgcctgggagggcgctccgccgcgtctgtgtggaccgggaatgcgcggctcctcggcgtggacgccgcctcgcggcgggttgccctggcctgctgcgcccccctcgggtgtccggggtctgcgcgaccccgtctccaggcgccatggccagaggcctccagtccccgattctggcccgcgctgagtgccaggggcggcagggggcaccgttgggggttctccagtgggaggaacgtgctctgtgaggtcagcgcgccgcggcccgggtcacaatgctgccctcctcgacgcccgggcccgggcacgccacagagacctgcccggctccgcctggaccggagcgttctcccgcggccagggctccggcagctgcttctagcctgggaccggtctcaaccgccgggaggtgagcgacggcccagggggcgggcgcgaggcggcggcgcccggcgacccgggagaggcctgaccgccactccccgcgcagagcgccccggggcttggacatgagcgcccaggagcccccgcagggtcggagattccccattgaggccggagactcccgtggccttgccgccgcccccgagtcccaggacagcccggaggcggtagcgacggagcacaacccggtcaggccgcttcgtcgctgccctggatgccactgcctgacgctgctgcacgtgcccatcgacgtctacctcgccatgggcgggagcccccgggcccgcgccacgtgagtgcgcctgctccctgcggctccgcgggagctgggcgggaacgaggcccccagcgggccaccacgctgaggtcgcatgcgccgagcacgagacaatgatgcacattttaaaataaaagaatgatgcacattttaataaagcacagcacaaactgttctttcca

SEQ ID NO: 410326 - DNA, 1235 bp, Homo sapiens
ggtgcaattgtgatgtagatgctgtgtgacccttggccaaaatgggcagtgcccctacctgccctcactaccaccaccaaactcagcccggattaagtcaccgccgagcccgcccccgtgccaggcattgagttgtagtcccgcctgggagggcgctccgccgcgtctgtgtggaccgggaatgcgcggctcctcggcgtggacgccgcctcgcggcgggttgccctggcctgctgcgcccccctcgggtgtccggggtctgcgcgaccccgtctccaggcgccatggccagaggcctccagtccccgattctggcccgcgctgagtgccaggggcggcagggggcaccgttgggggttctccagtgggaggaacgtgctctgtgaggtcagcgcgccgcggcccgggtcacaatgctgccctcctcgacgcccgggcccgggcacgccacagagacctgcccggctccgcctggaccggagcgttctcccgcggccagggctccggcagctgcttctagcctgggaccggtctcaaccgccgggaggtgagcgacggcccagggggcgggcgcgaggcggcggcgcccggcgacccgggagaggcctgaccgccactccccgcgcagagcgccccggggcttggacatgagcgcccaggagcccccgcagggtcggagattccccattgaggccggagactcccgtggccttgccgccgcccccgagtcccaggacagcccggaggcggtagcgacggagcacaacccggtcaggtaaggcccgcgccccacccccgcctccgcccgtcccgcggccccgccctccgtcccacttggcgcccccagcagtcaggaccccgcatccacgtccggacccccggggaccccaggtgcactccctgggtgcgccccacaggatgggccaagcccctgcctcagcggcccctgtcgcgcgtcaatttccccaggccgcttcgtcgctgccctggatgccactgcctgacgctgctgcacgtgcccatcgacgtctacctcgccatgggcgggagcccccgggcccgcgccacgtgagtgcgcctgctccctgcggctccgcgggagctgggcgggaacgaggcccccagcgggccaccacgctgaggtcgcatgcgccgagcacgagacaatgatgcacattttaaaataaaagaatgatgcacattttaataaagcacagcacaaactgttctttcca

SEQ ID NO: 410327 - DNA, 1391 bp, Homo sapiens
ggtgcaattgtgatgtagatgctgtgtgacccttggccaaaatgggcagtgcccctacctgccctcactaccaccaccaaactcagcccggattaagtcaccgccgagcccgcccccgtgccaggcattgagttgtagtcccgcctgggagggcgctccgccgcgtctgtgtggaccgggaatgcgcggctcctcggcgtggacgccgcctcgcggcgggttgccctggcctgctgcgcccccctcgggtgtccggggtctgcgcgaccccgtctccaggcgccatggccagaggcctccagtccccgattctggcccgcgctgagtgccaggggcggcagggggcaccgttgggggttctccagtgggaggaacgtgctctgtgaggtcagcgcgccgcggcccgggtcacaatgctgccctcctcgacgcccgggcccgggcacgccacagagacctgcccggctccgcctggaccggagcgttctcccgcggccagggctccggcagctgcttctagcctgggaccggtctcaaccgccgggaggtgagcgacggcccagggggcgggcgcgaggcggcggcgcccggcgacccgggagaggcctgaccgccactccccgcgcagagcgccccggggcttggacatgagcgcccaggagcccccgcagggtcggagattccccattgaggccggagactcccgtggccttgccgccgcccccgagtcccaggacagcccggaggcggtagcgacggagcacaacccggtcaggccgcttcgtcgctgccctggatgccactgcctgacgctgctgcacgtgcccatcgacgtctacctcgccatgggcgggagcccccgggcccgcgccacgtgagtgcgcctgctccctgcggctccgcgggagctgggcgggaacgaggcccccagcgggccaccacgctgaggtcgcatgcgccgagcacgagacaatgatgcacattttaaaataaaagaatgatgcacattttaataaagcacagcacaaactgttctttccactccgggctggcagtgtatgtctatccgtcgggcccaccagctgctctgcccagtccaataacactttcccttccgcagcctcctcgtttggacccagccttaggggcccgcccttccgcctttcaacctacgccacttcactcctctcgtatcttgctggtcctgacccctcctgggcagcctttcccttgggccctgccctggtccatctctctaaccctctggtgattctccggtgaaattcacatcactgtgctggaccctggcaacccacagaagcggggaacaggaggaagaggtggaccgacaagtaacatagaatacagccataggccacccacaccaggct

SEQ ID NO: 410328 - DNA, 740 bp, Homo sapiens
agagcacttgccattgcttttatcaagtgcttgctagccatggatgccaactaacttcttcaattgaaggccggaggatcatatcgggttccaggagcctcttgagcaggtcctggcaatcggccgagatgctcagatgagtggggaaggacacccccttctgctgctgccacagcatcttggggatgtctgtgtcgtcaaaagagacctgcccggctccgcctggaccggagcgttctcccgcggccagggctccggcagctgcttctagcctgggaccggtctcaaccgccgggagagcgccccggggcttggacatgagcgcccaggagcccccgcagggtcggagattccccattgaggccggagactcccgtggccttgccgccgcccccgagtcccaggacagcccggaggcggtagcgacggagcacaacccggtcagcggcccctgtcgcgcgtcaatttccccaggccgcttcgtcgctgccctggatgccactgcctgacgctgctgcacgtgcccatcgacgtctacctcgccatgggcgggagcccccgggcccgcgccacgtgagtgcgcctgctccctgcggctccgcgggagctgggcgggaacgaggcccccagcgggccaccacgctgaggtcgcatgcgccgagcacgagacaatgatgcacattttaaaataaaagaatgatgcacattttaataaagcacagcacaaactgttctttcca

SEQ ID NO: 410329 - DNA, 1396 bp, Homo sapiens
caagatagccaggattcctactctcagagtcttgcattttaagggagagacagacaataaagatatcgtatcagaggaaaataatcatgaaagtcagggaggagcttttcccagagtaactgacagtatcaaatagcaagagagttaggatgaggactgaacagaagacatcagatttgaaaattagaaaatcagtgctgctataggaagaatagtccccaaagatacccaggtcctaattcctggaacctgtcacttatatgcataaaggactttgcagatttaagttaaggatcttgagatgggaaaattatattgcattatctaagcaggtcctaatgtaatcacaggtgtctctataagagggagtcagaaggagatttgactagggaaaagagagtaggaaattcgacaatggaagcaaaaggttggagtgatacaagaaagcagccatgagccaaggaatgtgaatggcctccagaagctaagaaaagaaaaagaaaacagattatcccctatagcctcccgaaggagcaagccctgctgacacgtttactttagttctgtgaaactgatttctgacttctggcctatagaactatgagagaataaatttgtgttgttttaagccaagtttgtgataatttggtacagcagcaatagaaaatgaatacaaatgtttccttgaccttattgagaacaacttttgtggagagggaagaggtaaactaaaagaaaattgtggtgggatgataactgaaagatacagaaaagacagcaaagtatccattttttaggaagtttttatatatctcatttgacccactaagaaacgacatccagaaaggagctaaagaccagaggtaattgattagctcagcacccaaaaatggcaggcagtgttggggcagtactagaatgaggtagccggccgggcacggtggctcatgcctgtaatgccagctctcagggaggcaagaggtgggagtatagcttgagcccaggagttcgagacctgcctgggcaatatagcaagaccccgttctccagaaaaaggaaaaaaaaaaaaaaaaaagcatagaatgaggtagccataacattctacctggcttttggctgaattgtggggaggagagttcagaggcctcaaaagtgaccctgacactggagagtaaaccatagtaacccattatagtccacagatatgcgcaccagacccatgactcttgttcaccatagagacaggatactttgatgctgtgacccaaaatcctgcacctggaacagatttggtacctctctattgacacagaaattcatgttgagcatggagacataatcaagagagaatggcctcattcgatcggtcttcagcttaggcactgacattttgcat

SEQ ID NO: 410330 - DNA, 1723 bp, Homo sapiens
aaggcgggcagatcacttgaggtcaggagtttgagaccagcctgaccaacatggtgaaaccccatctctactaaaaatacaaaaattagccaggtgtaatgatgcacgcctgtaatcccagctacttgggaggctgaggcacaagaatcacttgaactcaggaggtagagactgcagtgagccgagatggcgccactgcacttcagcctgggcgacagagcaagactctgtctcacaaataaaataaaataaaataaaataaaatggagataacagtaattaactcatgacattgttgtgaagatcatgcttataatctgtttaaaacaatgcccagccataataagctcgctaaatgttggtggttatttttatcctgtcaatggcatctctgtccaatcaagaacaagtcaaactcacacctgtaattcctgtaatctttggaggtcagaggtagggggcattgcttaagtccaggagtttgagactagcctgggcaacatggcaaaaccccatctctaccaaaaatacaaaaaaaaattagctgggtgttgtggggcacgcctgtggtcccagctactcgagaggctgagatgggagaattgcttgagcccagaagacagaggtggcagtgagctgatatcatgccactgcactgcagcctgggtgacagagtgagaccccatctcaaagaaaaagaacaagtctaagatcttggagtataccaaaacttccgctccagggtctctttttatctttacttacagaataactgaatcttgacatccaagaatctagtataattatttgtacatagtaggtcctcgatgtacgggctgaatgaaagtgttaattccctatgcttttacacgaatgatacgtccacatcacctttcatctggtctattacaacagcctaactgctctccttcacttcagtctccatccagtccctcttcatcctgctcttggtgatgacactaccctcttcaaaacccttggaggtctctctgctgcattcatgataaagtccaaactccatatcctggtattcaaggtataatataccttattttaaagtttcctcattgtaccctttcctgctgcctctatacacccgctgccccaactccttacacaaagcgatgctagtccactacctccaggaagcctttcctggctgttagcccacacagaccttcctctaaaatagcaatgcttagcaggcctcttccttggctattctcctaaaaggcctcacttgattcagctttttctggtctaggcccacaggagctcttcctcccctgtctcctctcaacttggctgggggctcagccagtaatgggatggtggtatgtacagcagtggtaggggagggagaaggggaaagggagattcagtaaactgtcaattgttttagggggaagaggccacacgggaagaagttcctccagagccttaccccttttccctccaacctgctcccctctagttagccatctcttcttgcagccacaggaattctcatccccagttacccacaaactcctctcttcctttctccattcttcttaagccgggattttccttgcttctttctagcctgcacctttaatgctgctgcttcccaacctgggcctccgcacccagtcatcttcctttttagccagtcttagcatcccagaagctccaggcggaaaagccagaccctctctgcctt

SEQ ID NO: 410331 - DNA, 421 bp, Homo sapiens
accttattgaattgctgattcgcattcctagagattctgattctgtaggggtaggctggagcctaggaacctaccttttaaactagttccataggtgattctgatgtacatatagagtgtgacagccatcactatagagaatagattgataaattacaacccacgcgtcaaatctggcttgctgtcttattttgtaaataaagttttattggaatagagcaacattcacttgtttacatattgtccatggccgcttttgtgctacaatggcagagttgaatgattatagaagaccatatggctggttaagtccaaaatatttactagctggccctttacagaaaaagttggctgaccccttctctaaatcaacatttctccttggtaactgaaactctattacagtcctgacaattccagc

SEQ ID NO: 410332 - DNA, 303 bp, Homo sapiens
taggcatatatacccaaaggattataaatcattctacaataaagacacatgcacacgtatgtttattggcggcactattcacaatagcaaagactgggaaccaacccaaatgtccatcaatgatagactagattacaggcgtgagccaccgcgcccggcctcagtgccttttttaacttgagggtgtagaggtcctccacgcttgtttgcctgaaagtaatataatgatgctgtctgaacaggttttactgcttgctttccaagtaaaggttaattatgataataaagagatttggaaatgaa

SEQ ID NO: 410333 - DNA, 1324 bp, Homo sapiens
agctgcgccggcgccgccgggagcgctaggcctggtccctcttcctaggatagcgttgcgcgcatgcgccttgacgagtgagccggggagccatggacaactgtttggcggccgcagcgctgaatggggtggaccgacgttccctgcagcgttcagcaaggctggctctagaagtgctggagagggccaagaggagggcggtggactggcatgccctggagcgtcccaaaggctgcatgggggtccttgcccgggaggcgccccacctagagaaacagccggcagccggcccgcagcgcgttctcccgggagagagagaagagagacccccaacccttagtgcttccttcagaacaatggctgaattcatggactatacttcaagtcagtgtgggaaatattattcatctgtgccagaggaaggaggggcaacccatgtctatcgttatcacagaggcgagtcgaagctgcacatgtgcttggacatagggaatggtcagagaaaagacagaaaaaagacatcccttggtcctggaggcagctatcaaatatcagagcatgctccagaggcatcccagcctgctgagaacatctctaaggacctctacatagaagtatatccagggacctattctgtcactgtgggctcaaatgacttaaccaagaagactcatgtggtagcagttgattctggacaaagcgtggacctggtcttccctgtgtgatgttgaccatcactgccatcacatcacctttttttaagtagtaagaataaagccactgtatgattctcttaatagctatacattaatcctgtttttagtgctgactgggtcagccttccgggaactggagtctgtctctttcagtgcttttttgtttgtttggttggtttttttttgagacagtctcgctctgttgcccaggctggagtgcagtggcgtgatctcggctcactgcaagttccgcctcccgggttcacaccattctcctgcctcagcctcccgagtagctggcactacaggcacccgccaccatgcccggctattttttttgtatttttagtagagacggggtttcaccatgttggccaggatggtctcgatctcttgacctcgtgatccacccaccttggcctcccaaagtgttgggattacaggcgtgagccaccgcgcccggcctcagtgccttttttaacttgagggtgtagaggtcctccacgcttgtttgcctgaaagtaatataatgatgctgtctgaacaggttttactgcttgctttccaagtaaaggttaattatgataataaagagatttggaaatgaa

SEQ ID NO: 410334 - DNA, 1243 bp, Homo sapiens
agctgcgccggcgccgccgggagcgctaggcctggtccctcttcctaggatagcgttgcgcgcatgcgccttgacgagtgagccggggagccatggacaactgtttggcggccgcagcgctgaatggggtggaccgacgttccctgcagcgttcagcaaggctggctctagaagtgctggagagggccaagaggagggcggtggactggcatgccctggagcgtcccaaaggctgcatgggggtccttgcccgggaggcgccccacctagagaaacagccggcagccggcccgcagcgcgttctcccgggagagaaatattattcatctgtgccagaggaaggaggggcaacccatgtctatcgttatcacagaggcgagtcgaagctgcacatgtgcttggacatagggaatggtcagagaaaagacagaaaaaagacatcccttggtcctggaggcagctatcaaatatcagagcatgctccagaggcatcccagcctgctgagaacatctctaaggacctctacatagaagtatatccagggacctattctgtcactgtgggctcaaatgacttaaccaagaagactcatgtggtagcagttgattctggacaaagcgtggacctggtcttccctgtgtgatgttgaccatcactgccatcacatcacctttttttaagtagtaagaataaagccactgtatgattctcttaatagctatacattaatcctgtttttagtgctgactgggtcagccttccgggaactggagtctgtctctttcagtgcttttttgtttgtttggttggtttttttttgagacagtctcgctctgttgcccaggctggagtgcagtggcgtgatctcggctcactgcaagttccgcctcccgggttcacaccattctcctgcctcagcctcccgagtagctggcactacaggcacccgccaccatgcccggctattttttttgtatttttagtagagacggggtttcaccatgttggccaggatggtctcgatctcttgacctcgtgatccacccaccttggcctcccaaagtgttgggattacaggcgtgagccaccgcgcccggcctcagtgccttttttaacttgagggtgtagaggtcctccacgcttgtttgcctgaaagtaatataatgatgctgtctgaacaggttttactgcttgctttccaagtaaaggttaattatgataataaagagatttggaaatgaa

SEQ ID NO: 410335 - DNA, 1162 bp, Homo sapiens
agctgcgccggcgccgccgggagcgctaggcctggtccctcttcctaggatagcgttgcgcgcatgcgccttgacgagtgagccggggagccatggacaactgtttggcggccgcagcgctgaatggggtggaccgacgttccctgcagcgttcagcaaggctggctctagaagtgctggagagggccaagaggagggcggtggactggcatgccctggagcgtcccaaaggctgcatgggggtccttgcccgggaggcgccccacctagagaaacagccggcagccggcccgcagcgcgttctcccgggagagaaatattattcatctgtgccagaggaaggaggggcaacccatgtctatcgttatcacagaggcgagtcgaagctgcacatgtgcttggacatagggaatggtcaggctgagaacatctctaaggacctctacatagaagtatatccagggacctattctgtcactgtgggctcaaatgacttaaccaagaagactcatgtggtagcagttgattctggacaaagcgtggacctggtcttccctgtgtgatgttgaccatcactgccatcacatcacctttttttaagtagtaagaataaagccactgtatgattctcttaatagctatacattaatcctgtttttagtgctgactgggtcagccttccgggaactggagtctgtctctttcagtgcttttttgtttgtttggttggtttttttttgagacagtctcgctctgttgcccaggctggagtgcagtggcgtgatctcggctcactgcaagttccgcctcccgggttcacaccattctcctgcctcagcctcccgagtagctggcactacaggcacccgccaccatgcccggctattttttttgtatttttagtagagacggggtttcaccatgttggccaggatggtctcgatctcttgacctcgtgatccacccaccttggcctcccaaagtgttgggattacaggcgtgagccaccgcgcccggcctcagtgccttttttaacttgagggtgtagaggtcctccacgcttgtttgcctgaaagtaatataatgatgctgtctgaacaggttttactgcttgctttccaagtaaaggttaattatgataataaagagatttggaaatgaa

SEQ ID NO: 410336 - DNA, 605 bp, Homo sapiens
agctgcgccggcgccgccgggagcgctaggcctggtccctcttcctaggatagcgttgcgcgcatgcgccttgacgagtgagccggggagccatggacaactgtttggcggccgcagcgctgaatggggtggaccgacgttccctgcagcgttcagcaaggctggctctagaagtgctggagagggccaagaggagggcggtggactggcatgccctggagcgtcccaaaggctgcatgggggtccttgcccgggaggcgccccacctagagaaacagccggcagccggcccgcagcgcgttctcccgggagagaaatattattcatctgtgccagaggaaggaggggcaacccatgtctatcgttatcacagaggcgagtcgaagctgcacatgtgcttggacatagggaatggtcagagaaaagacagaaaaaagacatcccttggtcctggaggcagctatcaaatatcagagcatgctccagaggcatcccagcctgtgagtacggaactgcttacgcactgggtttcaccaccgttgcaactccatgaaccagttgacatggttcttagagggctatttgaattgagtctatagtatttt

SEQ ID NO: 410337 - DNA, 301 bp, Homo sapiens
ggggtggaccgacgttccctgcagcgttcagcaaggctggctctagaagtgctggagagggccaagaggagggcggtggactggcatgccctggagcgtcccaaaggctgcatgggggtccttgcccgggaggcgccccacctagagaaacagccggcagccggcccgcagcgcgttctcccgggagaggtgagggtcgctgtgccgggggccgccccagtccttcgcgccgcggtagcccgctgggagccaggggtgcgcagcgcagaagcagctgaggaaaccttcccttagcggaagc

SEQ ID NO: 410338 - DNA, 286 bp, Homo sapiens
ctgtgctctatgtccgcacaagggacgcaggggcgtccaggacgcaggggcgagtgaggcagggctgcccttccaggaccctaggttccccaggatgctcctcctattggggtcctctggcttccagttacgcatctgggcagtgtcccaaggccggtccgggagttggatgagaggattggagttccctggagacctccagacctgcactgctacccttccgtgttcttgcctcctggcctctgtgcaatgctgacaataaacctgtctctgcgtcccagaatgc

SEQ ID NO: 410339 - DNA, 300 bp, Homo sapiens
aatgtagtgttcttcttcctgtgccccaacgaccggctcgtgcccgatgtgccagccctggctaccaagataactgcgcgagcgctacctggccaagcaggcggtggcagacaaccgggagacgctgtttcagtcagcaagttacgcatctgggcagtgtcccaaggccggtccgggagttggatgagaggattggagttccctggagacctccagacctgcactgctacccttccgtgttcttgcctcctggcctctgtgcaatgctgacaataaacctgtctctgcgtcccagaatgc

SEQ ID NO: 410340 - DNA, 475 bp, Homo sapiens
gacgccactgtaccgtgggagccatggtattatactcagttccctgttccgagaagctgccccagggattagtcaccctcacccttgggtgggcagcttaacttctgcccacacagaccctgggggtggttctgccttacggcggtgtcccagttatcagctgggctgcagcttctggggccagggcgcccaccgtgggtcccatgtttggccttggtgtgctctttctgcacgtgaggcagcagtgaggtgctggctaagagggcgtgtggtgggagttggaccctctcgcatggctgcagtgtgcagaacgtgctgggagaccccaggactacagacggtggctcctgtgccctgagaaggacccggcttcttcacgaggagatgcccaaggctctgcagggtaacccagagcccttggtctgcaacgtccggggaactgtgtgttcctgggcgttcatgtgcctgtgcactc

SEQ ID NO: 410341 - DNA, 322 bp, Homo sapiens
gctttgtctttctgcttgcacctgtcacggctcgcttcagggaacagcgcagacccgcatgctcagctctcagtccggctccctgctacccctgtgaccaggagcaccttcatgtctgctcgccctgtgatttggagagtgtgtttgatgcgcttggcttctgctgatggcctatcctcccagttctggccagaggcagatgcggtgggggcctcttctccactgcccccctgcctgcacctccagcaggtggcccagtcctatatttccattgctttgctctttcttgctttaaaataaacaacaaaggcaacagactcta

SEQ ID NO: 410342 - DNA, 417 bp, Homo sapiens
ctcccacctcagcctcctgagtagctgggactacatagcaagccaccatgcctggcttttttttttgtttgtttgtttgtttgtttgtattttttgtagagacgagattttaccatgttgctcaggctggtctcgaactcctagactcaagcaatctgcccacttagccccgaagagctgagattacaggcgtgagccactgtgccctgctagtctttaaaattctgcaataggtttagcagtgtcttagcagaaagtgctatttgagtgctggcgactggcttgcatagtggaaatatactggcctgagctctgcccacctgaccacatactgatgtcattatcctcccttcatcaaccccctctgcttcacatagtcttgtctgaagggaatgggtcagctggaagaaaaaaaaa

SEQ ID NO: 410343 - DNA, 335 bp, Homo sapiens
cttcagcagtgtctgaggagtgtgacaacacagatgctgggttatttaagaaaggagagtttcaaaaattgtagcttacattgtagtcattgtgtgctattttttgtatgtatgtatgtatttatacacacagaaatggggtcttgctctgtcacccgggtggcgtgcagtggagccatcacagcttgcagctcaggatccttctgcctcagcctcccagctactgacgtggctgaagcaggagaatcgtttgaacctgggaggtgtaggctgcagtgtgctgagattgcaccactgcaccccagcctgggcaagagagcagagctcagtctcaa

SEQ ID NO: 410344 - DNA, 380 bp, Homo sapiens
taagaatcaatagttggtcagtttgtcaaaaagttagttaaaagatagaggagtataaagatgatgtatacataccttcattattttattcaaataggccgggtgcagtggctcatgcctgtaatcccagcactttgggaggtcaaagtgggcagatcacttgaggccaggagttcgagaccagtctagccaacatggtgaaacccagtctctactaaaaatacgaaaattagctgagtgttatgacgcatgcctgtggtcccagctactgacgtggctgaagcaggagaatcgtttgaacctgggaggtgtaggctgcagtgtgctgagattgcaccactgcaccccagcctgggcaagagagcagagctcagtctcaa

SEQ ID NO: 410345 - DNA, 446 bp, Homo sapiens
taagaaaacagaatttcaaagaaggtaggggacttgcccagggatacatagctagcaagtggcagcgctggattgagtctgggccttgtctgaggctcgggtcctgtcatgctctgcggttgctatgttgacatgcaaagggagaggcagctgctgggagtctaggtgggtttctctttgagaatgctaacgtgaaccctcaaggtgaatcagaatccttttgcaagtgaataatcagatgtaggttcctgtgtctccctgtaaaatgaaagcctcttttttccaaggtccagtatagacctgaagctgggttactctggaatttccctctctggctggagtgactgaggccttgcacgtgacattggtgaggactcgcagcctcaggtctggcttcccttagcaacccccctttcctgtctctgcctctggagttcaccattaaa

SEQ ID NO: 410346 - DNA, 333 bp, Homo sapiens
gattttcgtttttgaagtgactcgcatttgtgatttttgtttttgttttgaagggacaggtgtggctcctgtgagaacagcttgttagagatgagtggaggcaaggagactgttaaaacactactgcaggccgggtgcggtggctcatgcctctaatcccagcactttgggaggctgaggtgggcagattacttgaggccaggaattcaagaccagcctggccaacatggcaaaaccccatctctgaagcatgaggatcacttgaacccaagaggaggaggttgcagtgagccaagatagcggccactgcactagtgagacactgtctcaaaa

SEQ ID NO: 410347 - DNA, 467 bp, Homo sapiens
aaaaatgtgcctgtacagtttgagaaaaggaggcactggtgtttctcaaacttctcaggccaactacccaaaggtttcatgagcatctcaacaacagagtgggctcttctgtgctacatattttgataaaatggtgatgggcttcacaataacaatgggcaggatggggaagaagaccaggtcatttctgattgtctcagggtcgttgaaatgaggctaaggcttgggagaaccagcctgtcctggaggtaggggtggaggctccagcaacatttccagtctcactggagagcttccccacatcggaaattcctcatcagcctccttaccgctgagaagagggaatagtggggtggtgtttgcaacttaggatccttgaaattggaacagagctctgccctctcctcaatgaatcctagtggagaccctacaaggtagactaggtgggaatcattgctctaactttc

SEQ ID NO: 410348 - DNA, 513 bp, Homo sapiens
gactccatctaaaaagattaaaaaagagagagagatattagttgtttggcataactgctacccctgccccttttggtaaatcattagccagaaaaccatgcaattactatttaatttttattcttttagaattacctttgcatcctgattctgctgtctgatattttttgttgttttgttttgtttttttgagacagagtctcactctgtcgcctgggctagagtgctgtggcataatctcggctcactgtaacctccgcctccctggttcaagcgattatcccgcctcagcttcccaagtagctgggattacaggtgcctcccccccatgcctgggtaatttttgtatttttagtagagatgggatttcatcatgctggccaggctggtctcgaactcctgacttcaagtgatctgcctccctcagcctcccaaagtgctgagattacaggcatgagccactatgcccagccattctaattttttaatatcccgtttccattcctatctctt

SEQ ID NO: 410349 - DNA, 697 bp, Homo sapiens
cccggtaggcagccacgccgggctccacacaggtacagacagctgtgcccaccaccagggcacctggtgggggtgtggcatccaaaactacatccacaccagcgcctggcaccccctcatagaaagtcagggctcggtcaccagggaactgcacgcccaggtcctggcttcggcgcacctggcgcaccacagccggcaggaaaaggccatcaccacgccgagccagcacccgctgggaccgcagctgccgcaggtcatagctgccactggtgctgccagggggccaagggcctggaccacaagcctcagccggctcatcctccaggtccgccgagtgctcgctggctgtgtcagtggaggaggaacgagtggaggtgggtggccgtggaggcacccccaggccactggcctcctcaggggtccgcacccgctcttcaggggccccagccaccccactgctgccagctccgtgctcctccacatacttcttcttgggcgctcgagacttgaacgtggctgtcttgcggctgagtgagggctcccagcggcctgcctccccatcccctttggggtcctctgctgggcctggagccgggtcgccagggtgcagctccagtggaggaccttcagccccagggccccgctcagcctcctcctcctccccttcctcagcctcttcgggcccggactgtggttg

SEQ ID NO: 410350 - DNA, 442 bp, Homo sapiens
gctgcaggccactcatcttttcccttcccccactttgaccccacaaccacaaagacttggtcccagagggtagacagtatagcatggggccaagtcttggctgtgtgacccaggcaagtcacccagcctctctgagtctccttgtaaaacaaggccattgaggcacctgcttctcaggtccggagggggcatctacccacagtggctcacagcacagcaggagcgaggccccagtaggaatttggtgtcactgcagtgtctaggccagcagtcttcaaggaggggaggctggcagagatggggggatctggatgtcacaatgacaagggagcatggctgacgagcaggcagggatgtgccatgggggactgccaggcaggacagccccacccacaacacaaacagtgccctgctgagaaaccctctccaagcccagctggtc

SEQ ID NO: 410351 - DNA, 449 bp, Homo sapiens
ttgtcttattttaaagaactgccacagacaacccaacattcagcaatcattaccctgaccagtcagcagatgtcgacattgaggctaaacccctcgctaataagaagattattatttgctgaaggctcaggtgatcattagcttttttgttgttgttgttagtaataaactatttttaaatcaaggtatttacatagctgtgagggaaatggctgcgcttcagtcaggagcaggctgaggtggccttctggtgcagcatgactcagcgggtttgtggtgcaggtgcacagctctgcacattatgcaaccacaccacgtgaggagcattagatgatgacctatgtgagctcatgcttggctcaaagccactattgtctgtaaaaggtataattaccccggtaatgctgcacatatggctcacttgcacccagagagagagtaaagccatg

SEQ ID NO: 410352 - DNA, 390 bp, Homo sapiens
caaatctcatattgaactgtagctcccacaattcccacgtgttgtgggagggactcggtaggtaactgaatcacagggctgggccttcccgtgctgctctcgtcctgacagtgaataagtctcacaagacctgatggttttctaagggggagttccccttcataagctctcttgcctgccatcatccacgtaagatgtgactttgctcctccttgccttccaccatgattgtgaggcctctgcagccatgtggaaatgtgagtcaattaaacctctctttatacatttcctagtcccaggtatgtctttattagcagcatgaaaatggactaacacaagatcagagcaggtctctccacgtgcagaacaccccaggacccaacacttcac

SEQ ID NO: 410353 - DNA, 362 bp, Homo sapiens
tcaggcttattaaactgccttaataacatgccttttttttcccctcattaactatttcaaagttagtgactttgtgggatcctgggggaagctgtaaaaggcagatcaaacgaaacagtctctgcccatcccagtccctccaccctctgagctccctgcccgtccattaccgtagaatgctgtttacagcccttttcatctctcactacctgcttctgaagaggaatggggtcggcaagaaaagggcaggaggaaggaagtctgaagccatcgaaggctgggcataaagacagcaaatgaggcagaagcgagcaaagggaagatccctcctgcctggggctgaattccccattctctccagc

SEQ ID NO: 410354 - DNA, 316 bp, Homo sapiens
tgtgtcggctccgtgcctccagcggtgtttgtctttagggcaaatacccactccgccctgggctgccacatctcacaatggggaagtggggaaggggggtttgcaggggtggttgcagggtgagggtgtgtctggctgcacagatttacacgcccgtgggctgggtgggagtgcggtaggccaggtctcactaacgtgggcctccatgaccagtttcagtactgagggagttaaaagccagtgcccttatacaaaggctggaatgtaacagaagcataccaagagttttgcctagccctttcctgggccttaaagc

SEQ ID NO: 410355 - DNA, 510 bp, Homo sapiens
cttaggcatacttttctcccttgcaaatgaaagagccttctctgagatagcttggcatgaaagtgatgtactggaaagagttccagcaggaaacagagggcacactcaacctgggtgctggggaggggttgatgaggggactgttgaggacagcagggcagcgtggagggacctgcaggcatgctgtggaaccagccaggggctgaaccagaacccaggggaagctctggttgtaggaagagcagctcagagaagtcagggcttcagttagagggcacagctcttgtaagggaaatggctgcacttcagtcaggagtaggtcgaggtggccctctggcacagcatgactcagtgggtttggagtgaaggtgtacaactccacacattatataaccatgccatgtgagatgcattaagtgaccactcacacgagctcgtggttggcccggagctgctattgtctgtaaaatgtactgctggcgctgtacgtatggctcacgcccagagaga

SEQ ID NO: 410356 - DNA, 320 bp, Homo sapiens
catataccccgctaaactttctctgctactgtggaataggtggaacatgtatagtgggaaccacaagctgtcactgccacattcttgcatgtctcaagaagctactggcaggcttcccctttttgccttattggccagaaaagtattgcatgcccgcgcctaagccaaccatgacaagggaatggtaggtaccatcatgattagcttacatcaatcaagactcccaatctaagcttggagttgggactagcctctcctgaaggatatgacttccagtaaaagagcaggtacctgggtgaagtcagaattcttaggaagaa

SEQ ID NO: 410357 - DNA, 361 bp, Homo sapiens
aatatctatccagaaaacttgcttaaattctgatatggtttatttagtttcccatcacacatcttttctggcatttaggataccatgctattcaaaagaataataaattatcatagtgtgcaacaaaaggaaatgcaaattcattctggacaattcctgatgggtgaataaatgattaaagcttcctatctgaaaccttggcaaaatatgtgttttaaagattattttaaaatataataaaggaaatgcagctcaacctccttcttgagattatttataccagattgctgatcacctgacccactggactgatggatttgttagaagcaccctaggagagcaccttgtatacagcgttcat

SEQ ID NO: 410358 - DNA, 164 bp, Homo sapiens
gctgagcagacttatccctaatggccggaagcgctcctctctttgcccaccaaccccagctccaaagcagatgcaagtgtctccatttccctggtcttactttactcctctgcctcctgggatcagaataataatttctagttctctggattggctctgctttg

SEQ ID NO: 410359 - DNA, 259 bp, Homo sapiens
gtctcagaggttgtagtgccactgggagttagttcagaattctggaattccttcctggatgttcaggttagaacctaccattctggcttttccaaaaatttcgaaagtatctaattctctattaagtctctctttggtgggtcagtgcagtggatcatgcctggaatcccagcattttgggaggctgaggtaggaggatcacttgagcccagaagtttgagaccagcctgggcaatataggaagacctcccatttctac

SEQ ID NO: 410360 - DNA, 247 bp, Homo sapiens
tctaacagttggtttcctaataaatttcttgcatatttaattttattctgggatcccaccttctctgaggacctggactaacacatccccaaatctgtttatgcctgttgcaggtgctactgtaattacataatttaactaagccataactaaaccatagaaatatggacacagaaggaaagtgagttgttatttctatgaaaaccaagtagactgctttagaaagttttgaaaagggtatttgctt

SEQ ID NO: 410361 - DNA, 432 bp, Homo sapiens
actactaaatttgcggccggtcgacttcagcctgctggctcctggtatgaatgtttgctgcattggcagccagatttgaatggaaggatggagtatttttaaacataaaaactaataagcacctggaaacgtaactttgtgggtggtgctgatgcagtgtatttctttatatatcagtaggctagtttttcagtgattcatcaaactaattagcatgggagcaccagaggtgacaaacccatgggttaactctggcttgatgtggtttgtttggcctgtaccaacgatatttaaaatgttattttaggccaggtgcggtggctcaccctgtaatttcagcactttgggaggctgaagcaggcgtatcacaaggtcaggagttcgagaccagcctagccagcatagtgaaaccccatctctactaaaaataca

SEQ ID NO: 410362 - DNA, 386 bp, Homo sapiens
aagctaccaccatttctgtgaccccatctttctcatgacctccccacctgactacagcatttccttcttagaatccacagacctctcggtcaagaccttggcaggaatataaactttatgaaaagagactttcagagaggaaaaagctttatgatatcaggttgggaaggttcatacagacccccttgggcagggcaggtaaatgttagctcagagttgggatccaggactttgcagtgagaatcaagcatgtgctaaaggctaatggccccagaaaaggggcaaaaatttagagttagagttctatgtcctaaaagaaaaatatcaaggataaaagaacatggctcactgggcagactatcaagacaggtattcaaaaaaaaaaa

SEQ ID NO: 410363 - DNA, 375 bp, Homo sapiens
gggatgtgagtaaataggacattcaagtgcttgaggtattctacgcactggcctaggaaatggtcacataggtatgtgccctttgaaagaattaacttagtcataaatataagacaagtatttttgtatatgtattttatgtacaaatatatgtgttacgtaaatttacttcaaagatgccatgtaaagaatggaagccaccattctgaataattctacctaaatatcctaggaacgaccccacccttagaagaaaccacgtagtgaatataagtagtttggtttttatttgtgtcattcagaaaattgactcatttctcccaccacactctgtataatctcaaaataatgagttatttctgcatgctatatagt

SEQ ID NO: 410364 - DNA, 351 bp, Homo sapiens
tttttttttctcatcagctattgttagtgttaatatattgtatgtgtggcccaagacaattcttctttttccaacatggcccagggaaggcaaaagcttggacacccctgctctaagagttcaccatcaggatggggcagcagcctgtaagcaactgtctgtggcagccagagggagagagagggtttagaaagggctcaggaaactaggatacatggatgcagaggagggccccctgagaccacaggggcagagcctacagtgatgcagccacaagccagggaacaccgggagcctctggaagtgggaaggggtaggaaggaaggctcttttcctggagcttccggggcc

SEQ ID NO: 410365 - DNA, 396 bp, Homo sapiens
tattttatttatttattttaatttatgtatgtatgtatgtatgtatgtatgtatttatttatgtatttatttttgagacggagtttcgctcttgttgctcagactggagtgcgatggcgcaatctcggctcactgcaacctccgcttcccaggttcaagcgattctcctgcctcagccttcctagcagctgggattataggcatgtgccaccgcgcccggctagttttgtattttcaattgagacgggatttctccatgttggtcgggcttgtctccaactcccgacttcaggtgatgcgtccacctcggcatcccaaagtgacgggatgacaggcatgagccaccgccccggcgtattgtattgtattgtattgtattgtattgtacgtgagtgg

SEQ ID NO: 410366 - DNA, 407 bp, Homo sapiens
tttttagtaaagacgggatttcaccatgttagccaggctggtctcaaactcctgacttcatgatccatccgcctcggcctcccaaagtgctgggattacaggcatgagccaccatgcccatcctagagctccattttataatgcctggttgagaagctcataaatggcaaagcaacacattaaagagagagaggaggaaggtggtgaaagcgaggtggcagggatgtatctgggaagataaataagggaaatgaatggcctttacctaggtgagaacagcagctcagtgcaggctgtgatttgcccactgaagcactgctcctcctgctgatacacaaattgcatgttgctttcttttaagaggctgtcttggtcaaaaatagcatctctttttttcctctctctcc

SEQ ID NO: 410367 - DNA, 441 bp, Homo sapiens
gctttggcctcccaaagtgctgggattaacaagcatgagccaccatgctggccagtttttgtacaccttaattgtttgcctcagtctcagctaatacagttcacttctgatattttaatatactttatattatatggagacataaaattacattgtgtagataaaaattttctactctgataactttgtcagcagttgaaataaggagaaatatattgtaaatttctacattcctacttaaaggacacagaaattttaactgaaaagtatttattaagcattcttgtaattaccaatttactggttgtccctgggagatcgtaagtgctgtgagggcaggtgtctaaggctgtggtgtcattctgtagcacatcagagtcagatgtactaagacagagcttaaccctgaggtgttcaatacatgttgaatgaatgagcact

SEQ ID NO: 410368 - DNA, 447 bp, Homo sapiens
tctgcctcttaccagcagcgtgaccttggacaagctatttcacctctgagaaccttagtctcttcatttgaaagttgagagtatgattatctatctcttcaggccattgagaggattaaataagaacagagtatctctactaaaaatacaaaaattagccaggcgtagtggcgggcgcctgtagtcccagctacttgggaggctgaggcaggagaatggcgtgaacccgggaggcggagcttgcagtgagccgagatcccgccactgcactccagcctgggcgacagagcgagactccgtctcaaaaaaaaaaaaaaaaaaaaaaaaaaaagaacagagtagcacataagttccactgtacgtaagtgcttaattaaatattcgctgtcatcatcaacatcatcgatatctcttgccttctaacttctaactgtgcccccgccccca

SEQ ID NO: 410369 - DNA, 1915 bp, Homo sapiens
  misc_feature (1231)..(1231): n is a, c, g, or t
  misc_feature (1442)..(1442): n is a, c, g, or t
gtacaaaaggacatgatattccatgttagctatatttctctctgaaaaaaaaattccttcttttagaaaagtttatcaaacatttaatctaggagaataaactattgacaactacagaatttgttcccgcagaaaatacctaaagtctctgctcatttcatgtttactaatatttcattagtcaaagcaagtcacttaaccaagctcaaagccaagagacagagatatatatcccatctcccacattaacacatactctactgagagttacattcaagtcatatggtaaagtttatggatgtaaagttctattatagagagggagtgaagaattagagaaagtaatccggtctatcacatatattattggtttggactcagaaacaaatggtttgaataaacaacttaagaagcctgatgagttataagggacttttgtgttagtgattgataccacatttacaatcacagtctctctaatcactttcaggggttttcatcatagattacttttgaattcatcaattatggtaagcactgaatagaaaataagggtcagataaaacacagtaggttagagatgaagagtgcgaattctattccagctctatcactgagggtgaaatctcacacatttctactgattttctcccccctcagtattatgatctcaaaaaaaggagtactactcttcttttttattttttcttagtatagaaagcatacaaaaggcattgtagaattctgtgcgtagcataaattacaagaggacgattaaaatccccacaatcgtctagaagtaatttgttttcaaactttggggatatacctttctaatcattttttttcctgtgcatatataccctttttgtttttggtaaaacactgtgaacactgtttctacttttgtctcttaaatctgtgttgtgagtaacattctatgcctttaaataatcttcagtgtcatttttgtgaagatttattccacattcaccatcctttttttgtgaaatttaaatcagatgtcataaagtctttaaaaagcagaattactttgaaaataaaggtattattattatagaattttagagattaaagaaaaaacagaaactaacatttaatgaagacctactctgtgccatgccatgtgcttagaactttgtttaagccatttcatttaataacctttcaacctaatgaagcaatatagcatgatggttaaactctgtgngctataggctgtcaagttcagctgcacagcggctaactagctttatgacttttcaaatgtttatcttctttttggcttagtttctctgttacaaagtggcaataataataatagcactcacttccaaaagattgttgtaggattaaatgattggataggttcaaaatgttaggaacagtagtattcaataaacatagttattatttgctanctttcccactactccataaaccctctattaaaatacaaatccacattgattttaactgctttggtgtagaagtggattctaagaagaggcaatgtgaaataaatggaaaagccaaggattttatgttttttaatcctggctcccagccttctaataattttgcctctgggaattttgtcaagatttacaggctgggcgtggtggctcacgcctgtaatcccagcactttgggaggccaagggaggtggatcacctgaagtcaggagtttgagaccagcctagccaacatggcaaaaccccaactctactaacaatacaaaaattaaccgggcgtggtggcacacgcctaatagtcccagctactttggaggctaaggcagaaggatcgcttaaacccgggagacggaggttgcagtgagccaagatcgcaccactgcactgcaatctgggttacggagtgagactccgtctca

SEQ ID NO: 410370 - DNA, 442 bp, Homo sapiens
atccaatggggggaaataaaaccttccaaaagggatttggcctccccttcattcaaggaaccgtgggtctcgaatttgggtgagagttcctgactctctactgtagtggctcagacaagttcactagacctggagttatttgttcatttttggttatttaaatcaaaacaggccgggcatggtggctcacacctgtagtcccagcactttgggaggccgaggcgcgtagattgcttcagatcaagagttcgagaccagcctggccaacatgcgaaactttgtactaaaaatacaaagaaaaaaattaaaattagccggtgtggtggtgcatgcttgtaattccagctacttgggaggctgaagcaggagaatcacttgaaccctgggggtggaagttgtggtaaactgagatcatgccattgcactccagcctgggtgacag

SEQ ID NO: 410371 - DNA, 923 bp, Homo sapiens
tttttttttttgaaataaaatatttatttcagataaagttaatatttccataattaaggtaaagcaaacatatatgcttgagtccattatttaaggactataaaatgacttccatgaatattagagttcctgaatgtcatttgagtatctgcctacatgcttgttggaagcttctgtagccttttctttgtaggaattccagtttttctgaattcttccctttccttcaggtattccattttgcattcttcataaaaggctggatcattatagctatgagaaggaaatgaaaatattttcaagtaaataatcctgcatgtgttaaatgtaagcttactttaattactaatattcagacatctggttcatcaggctcaatctttagaagtacacttttagtaatggttaaaaattcactgttaactttatgctaccaaactaaagaccaaatcattcatttttatatagcactgtcacagaatagagcaatgagaagcacagctcctgtcctgggaacccacggtgtaaaggacaagtaaagactggattaaaattaaatctacaaaatactgtgacagaggtatggcccagtgcaccatggaaacaaggaagaaatggggagggcagaggtttcaaggggaaatgcttgcgttgtattttgaaagaccaacagaaatccatatagaaggcaagtgtgggaagacacatggatgaggaaaaattaatgcaggaaaacctgccaagtagataggtaccactatagcagattatgcacataggagaaaaggcctgaaatgaagatggaatgggcaaaagtcaaatcatgatgtgccatttatgctatactcagaaattaaaatcaatcctgaagaaaatggggcacaattaatagagcacctcacctgtaagatcagttttgtgtc

SEQ ID NO: 410372 - DNA, 635 bp, Homo sapiens
ttccattgcgcattcttaataaaggcttggttcataatggttatgagaagaaaatacttaatattcagacatctggttcatcaggctcaatctttagaagtacacttttagtaatggttaaaaattcactgttaactttatgctaccaaactaaagaccaaatcattcatttttatatagcactgtcacagaatagagcaatgagaagcacagctcctgtcctgggaacccacggtgtaaaggacaagtaaagactggattaaaattaaatctacaaaatactgtgacagaggtatggcccagtgcaccatggaaacaaggaagaaatggggagggcagaggtttcaaggggaaatgcttgcgttgtattttgaaagaccaacagaaatccatatagaaggcaagtgtgggaagacacatggatgaggaaaaattaatgcaggaaaacctgccaagtagataggtaccactatagcagattatgcacataggagaaaaggcctgaaatgaagatggaatgggcaaaagtcaaatcatgatgtgccatttatgctatactcagaaattaaaatcaatcctgaagaaaatggggcacaattaatagagcacctcacctgtaagatcagttttgtgtc

SEQ ID NO: 410373 - DNA, 441 bp, Homo sapiens
tctgaagagcagagatctccaaaaactaagcatttcaagtgataatatgcagcatgcatactgggaactgaagagagaaatgtctaatttacatctggtgactcaagtacaagctgaactactaagaaaactgaaaacctcaactgcaatcaagaaagcactgtcacagaatagagcaatgagaagcacagctcctgtcctgggaacccacggtgtaaaggacaagtaaagactggattaaaattaaatctacaaaatactgtgacagagctactctcatgaactactctggtccctccttctgaccactggctgccctagttccagactctgccacccctcatctactgtaagtaagcaactatttccaagtgagatcttaaacatcgtccttacaaagaagctgtaggcaaaaaaatgaaaataaaaataaattgtgta

SEQ ID NO: 410374 - DNA, 813 bp, Homo sapiens
atgggccctgaaaatacagacatatcagtttgagtccctgccctcagagggcttatactcattgggatcattagctcgactgcagaagcatcaaaacttgatgcaggaattattactaaaagatttgttcgtgaaaaattttgagtatcttatacattccatatggttgttataagttgggaatataaaaagtgaccaaaacatgttaaatgctaacatgaaggtacaaaccataaaatgcagtaggactaggaggttcggaatcccaggggaatctggattgcatgaagaggtgactggcataagctggatcttctcatcttgagattttcttaaggtaagaagagggagaatggccttgctatgaagagggcattgaatagtgaaaatggctgaaacagtgtgggagaggtctagtggaatatgagaccacaaagcaagactggagtcagacttgaagaacttgaaatgccgtattttaaaaggcagagttaatagggcataaagattcaaccaagtgttctacctacttggtggccgagcgtggtggctcatgcctgtaatcccagcactttgggaggccgaggcaggcagatcacaaggtcaggaaatcgagaccatcctggctaacatggtgaaaccctgtctttactaaacagaaaattagcctggcgtggtggcgggcacctgttgtcccagctactggggaggctgaggcaggagaatggcgtgaacccaggaggcgtagcttgcagtgagccgagatcatgccactgcactccagcctgagcgacagagcgagactccgtctca

SEQ ID NO: 410375 - DNA, 535 bp, Homo sapiens
gctactgatgttattttagaatctattaattttggattcagagcagcaaaaaacaattgatagtatatatcctagggtttcttcaagattttgaggcatggaaatctgatttaaaagattttatattttcctagcctttgaaaatgagcattttgcccatggcattcaaaagtagctttctctttctgagtggggtacataattattgatctcttattttctatcaggagcttaagaattgtgttttcggctgggtgcggtggctcacgcctgtaatcccagcactttgggaggccgaggtgggcagatcacaaggtcaggagttcgagagcagcctggccaacatagtgaaaccccgtctctactaaaaaatacaaaaagtaagccaggcgtggtggcgggcgcctgtaatcccagctactcaggaggctgaggcaggagaatcgcttgaacccaggaggcggagattgcaatgagcagagattgtgccattgcactccagcccgggcaatagtgtgagactctgtctcaaaaa

SEQ ID NO: 410376 - DNA, 446 bp, Homo sapiens
tgaaacatggctagtctgaattgagatgtgctacaagtgtaaaattcacactagagttcaaacgcttagtacaaagccaaaaaatataaaatatctgactcataacctttgaaatattgaatatatgtttaggtgataatattttggatctaggcctggcacggtggctcacgcctgtaatcccagcactttgggaggccaaggcgggtggatcacctgaggtcaggagtttgagatcagcctgaccatcatggtgaaacctggtctctactaaaaatacaaaaagtagctgggcatggtggcgcatacctgtaatcccagctattcaggaggctgaggcacaagaatcgcttgaatccgggagaaagaggttgtagtgagcagagattgcgccattgcattccagcctgggcaacatgagtgaaactccgtctcaaaaaaaaaaa

SEQ ID NO: 410377 - DNA, 446 bp, Homo sapiens
accactaaatagcaagctctagctgctaagcactctctaaagtggaacaactctttggataaaacataatagtatttctgttttgcattacagattatactgttctgctgataagagctttcacatttattatgtcacagcttccttgtgggtcagaggctgggcgcggtggctcacacctgtaatcccagcactttgggaggccgaggcaggcgaatcacgaggtcaggagatcgagaccatcctgactaacacagtgaaaccccgtctctactaaaaaaaaatataataaaattagccgggtgtggtggtgggcgcctgtagtcccagctactcggtaggctgaggcaggagaatggcatgaacctgggaggcaggggttgctgtgagctgagatcgcgccactgcactccagcctgggtgacagagtgagactccatctcaaa

SEQ ID NO: 410378 - DNA, 476 bp, Homo sapiens
aatttaattataagaggatatgtgcagtttttgttattggtatattgtttattttagcttattttttaattttattagaattctggcacaatatagcccttgtttgcttttaaaaagatgggctgttagattgcctggattttcccctttatccactacctatgagcaaattacttccctcagctttagtttcattttgtagaaaatgggattatttttgtacctcatacgtataatagtagcaacaaaaactttgcctagttagtacttaatacttttttcttgccgagattaaataagctgatgtagcttccatgcttaacactatgcccttcattggctttggcttcacatacgctttggttctgatcctagttctactgtgagtttacaggttaatttctctgagccttctttacttaatcagccaaaaataaaaataaaaaaaaaaaggtgggggggatcatgatgcctgg

SEQ ID NO: 410379 - DNA, 451 bp, Homo sapiens
aggctatggtctcgggcccaagttcaaggtcccagtggagtcattgttggtggaaggatctgaacccaccaatcggccagctctgtatgagaagacaaggacctttctccatgatcctttcgtccctgtagcccagcctacagcagaaagatggggctgcacccctgccgtgggctgaggctgggaaggaacgcggacggggaggaggacccaggcagcacctccccgcggaccagaactcgaacccacagctctggacttagccgggggctctggcgctcgcctccgcctccgagcggatgtgccggatatttgttgccctaagttcctgaatcacctcctgagaaatgcattgtggtgggcgtgtgtgttcctctggggactccgtgcttgggcttaaagcatttaggaaatcaataaaataaatactctctaagcctcaaaaaactgg

SEQ ID NO: 410380 - DNA, 289 bp, Homo sapiens
gggcactcacaaataaaaccacactgtcaggctatccctagagatgagtccagagaaaggtcccttcatgagattggaattaggagatttggtcttgacagagaacttgaaagtctgcattggcagtgtacttgaaaatctgcataggcaagacatgcctaattaaatgtgatggtttttttctaagagtgtactttaggttgacgtaatgtttctgccaggttgtataaaggaaaatgcctgttaggtttgctgcttgaaatacattatacctggaagagtttaaagt

SEQ ID NO: 410381 - DNA, 464 bp, Homo sapiens
gctgaggcaagaggatcgctagagcccaggagtttgaggctgtggtgagatatcatggcactccagcatgggcaacagagcaagaccctgtctgggaaaaaaaaaaaaaaagctggcttgattttcctctagagtttcccacaatctagattttgctgattgcatccctgtggtgctgtttaacatgttcctctgtcctctgaatttcccggaagctggtagctgatctagagctgtgctgtgcagtgccatggccaccagccatatgaggctactgagcacttgaaatgcagttgatccaaattgcaatgtgctggaattgtaaaatacagcccaggtttaaagacttcatatgagaaaagaacagaagctatttcattgatcactttttctactgattatatcctggaatgctaatatttttgatatattgagttaaataaaatatattattaaaatcgact

SEQ ID NO: 410382 - DNA, 344 bp, Homo sapiens
actggcaagacgacccatttttaaagggccaatttttaacagctggaaacaataaacgtcgtgggaggtgaagatgctgggaggactgatttctccttcgctgttttcaaaagtcaaaagatgctgggtgtaatggcaacagccacagaaagttagcacaactcctgccacggagcagctgtgtgatggtggcttccccagtccccctccctgggcctcggttcttacagctgcaaaatgaggaggtagaatgagatgctctttaatatccctttcatcttcaactttctacaattcttgtaagctggaaagatgtacacagaacttcatcttgattttattac

SEQ ID NO: 410383 - DNA, 631 bp, Homo sapiens
tagaggcaccacacagggagagcagtgtgtggccacatgcttcagcccattttttctgattctcttgcttgcaaattaagagtattctccaaatcacttgactttccttttctcagagttatagttctccagagatgtcaccagatgattcacattaaaggtacatttccagttgacttttttatttcagatattagtaaatgattaccagagaactaattcaaactgtcatggttggaaatactctgatgctcaactccctaatctatagagtgagttaaggtctatactcttttgcaagcattgttctagtggcagtgaccctgttcatgattcagcctgacatttactatgctgccctgaaaaccaactagatgggagcttgtttctctctgcattgtgtagtgagtggtgtcacccaggactttcatgtgagaaaaagcaccttgcttttaatctgggaattttgagtgttttttgtaatgcctcagtttattcttatttatggttgattatatgtgatttagaacacttgctatttatgtctgatcccacaaatcagcactcactttatttgcaaagcaccaaatttcgtgtaagaggtgtagtaattgggaatgtgaagctaagt

SEQ ID NO: 410384 - DNA, 438 bp, Homo sapiens
tgccgcgggagtcagagaaaacctggggtcctgatgatgttgttgagctgctgaatcaaccatccctaaaccctatgctcccaagacttcttgtcatactactacaacagcttcttcatgatgtccaaaccccaatttggcctctctctgatccttcatctatgctgctgtcacatgggccttccggtgatcttatctgaagcattaaaagcaagaacacacttttgcagacttcttttcctggctctctggtaaccagctacatgtcttccacatgaagcctcctgagttcatcagtacatcattgcatcattgacatgaccctgctgaactatgccacgtctgcctttgcttaagtgggtaggactgaacctgcagcaaactttggagcactcatttgggtcacaatgataaaaataataatacttaataataaaa

SEQ ID NO: 410385 - DNA, 584 bp, Homo sapiens
agacccctacctgactgtcatcctctctcagtggcgagtccatctagttcagactcagacaggtggaagaagtcaactcctaactagggtataatgaagcatgatggaagtatttgacccagcggctcttctatacccaggaggccctgactgccacattcaccagttgattttccagggaacataatcagaggcagaatcgtctggtggttaaaagtacaatctggagttagactgcttgattttcaatcccagctcttccactcatcagctttgttatcttagccattttctcagggccaggtaactagattgaagcagagtccatgaagaactaaccatgcctcactccacccctgcagatggctccttcatgaagatctccccatttggaacacaacatctgtttcctgctgggaccctgactgacacaagggtcaaaataagctcctccatgggaagcattgagagaggcagaaaataaagagaaggaagataatactatccattcattgcagtcgtctatgtgctaaacactgtgtgaagcattttgcatgtattcaataaatatttactcaatgctt

SEQ ID NO: 410386 - DNA, 421 bp, Homo sapiens
agacccctacctgactgtcatcctctctcagtggcgagtccatctagttcagactcagacaggtggaagaagtcaactcctaactagggtataatgaagcatgatggaagtatttgacccagcggctcttctatacccaggtaactagattgaagcagagtccatgaagaactaaccatgcctcactccacccctgcagatggctccttcatgaagatctccccatttggaacacaacatctgtttcctgctgggaccctgactgacacaagggtcaaaataagctcctccatgggaagcattgagagaggcagaaaataaagagaaggaagataatactatccattcattgcagtcgtctatgtgctaaacactgtgtgaagcattttgcatgtattcaataaatatttactcaatgctt

SEQ ID NO: 410387 - DNA, 429 bp, Homo sapiens
acttaactcactgatgggcatgtagtaaatgctcaagaagcaatagagagggtgataatagctaatttgtcatcactcattcagcaaactttgactgatgtcgattatacaaggcactattctaaaatctagttttgttttttttttcctggatgagcaatgtacccctacagtcctccaggaagtcgtaatttgatgggagacaaagaaacatagccaaggatacaattttaaggtcaccttgaatccttcctggaaaaaagcaggtcataaataataatggttgttggagaaaggtctctaggaaagatgaagaacttttaaattcctagaagcatcttagaaaagataacacaaaaactttatttaatgtaaaaataagagctgagagtcagttaaataaacattgttaacagttgaatttttctg

SEQ ID NO: 410388 - DNA, 609 bp, Homo sapiens
tcatcaaaggtcacagagctaagagtggcagagtcaggcctggagcccaggaagtctggtttcgaatttcatgcttctaacctgagcactgtactgcttggtggagttctctgctagtcctacctttcaggcagaggagttgaagagcaattccctccagtttccattagaaatgcttcttcttccatatcaaatattgtgagatagcctgaaacacctttcaacactttactacccttctccaaaattcaacagatatgatttccacggactttactcacaggggcttcagtagaagaggaagaggcttgggtttaattgaaggtggcctgagacatctgtgaggaacagcccttttagagacatatcccctacaaataaagcatcagaattattatcctaataaatgaacatccatggttccttcagcaccatcgtaatgcagagaccatggggagatgcagggagagggctctgcacagcatggccaacttgccgggttgaaaacagacaacctccatggagcagggacttcaattagttaattccccatccccactgtcacttactaacatgggattctgattaaaaattagattctctgcaaga

SEQ ID NO: 410389 - DNA, 557 bp, Homo sapiens
tcatcaaaggtcacagagctaagagtggcagagtcaggcctggagcccaggaagtctggtttcgaatttcatgcttctaacctgagcactgtactgcttggtggagttctctgctagtcctacctttcaggcagaggtgatgcagcaagaaagctgccaccagatgcagccccttgatctcggactgcccagcctctagaactatatgatttccacggactttactcacaggggcttcagtagaagaggaagaggcttgggtttaattgaaggtggcctgagacatctgtgaggaacagcccttttagagacatatcccctacaaataaagcatcagaattattatcctaataaatgaacatccatggttccttcagcaccatcgtaatgcagagaccatggggagatgcagggagagggctctgcacagcatggccaacttgccgggttgaaaacagacaacctccatggagcagggacttcaattagttaattccccatccccactgtcacttactaacatgggattctgattaaaaattagattctctgcaaga

SEQ ID NO: 410390 - DNA, 529 bp, Homo sapiens
tcatcaaaggtcacagagctaagagtggcagagtcaggcctggagcccaggaagtctggtttcgaatttcatgcttctaacctgagcactgtactgcttggtggagttctctgctagtcctacctttcaggcagaggtgatgcagcaagaaagctgccaccagatgcagccccttgatctcggactgcccagcctctagaactgggcttcagtagaagaggaagaggcttgggtttaattgaaggtggcctgagacatctgtgaggaacagcccttttagagacatatcccctacaaataaagcatcagaattattatcctaataaatgaacatccatggttccttcagcaccatcgtaatgcagagaccatggggagatgcagggagagggctctgcacagcatggccaacttgccgggttgaaaacagacaacctccatggagcagggacttcaattagttaattccccatccccactgtcacttactaacatgggattctgattaaaaattagattctctgcaaga

SEQ ID NO: 410391 - DNA, 676 bp, Homo sapiens
tcatcaaaggtcacagagctaagagtggcagagtcaggcctggagcccaggaagtctggtttcgaatttcatgcttctaacctgagcactgtactgcttggtggagttctctgctagtcctacctttcaggcagaggtgatgcagcaagaaagctgccaccagatgcagccccttgatctcggactgcccagcctctagaactgagttgaagagcaattccctccagtttccattagaaatgcttcttcttccatatcaaatattgtgagatagcctgaaacacctttcaacactttactacccttctccaaaattcaacagatatgatttccacggactttactcacaggggcttcagtagaagaggaagaggcttgggtttaattgaaggtggcctgagacatctgtgaggaacagcccttttagagacatatcccctacaaataaagcatcagaattattatcctaataaatgaacatccatggttccttcagcaccatcgtaatgcagagaccatggggagatgcagggagagggctctgcacagcatggccaacttgccgggttgaaaacagacaacctccatggagcagggacttcaattagttaattccccatccccactgtcacttactaacatgggattctgattaaaaattagattctctgcaaga

SEQ ID NO: 410392 - DNA, 2437 bp, Homo sapiens
gaagactgcgcgtttgagtgtccctggcaacgccacgcttccgccttctggaagcctgcactccagcttcgagtggaacgatgcctctggaggtggtggtggagctgcagatccgggcgatttcttgcccaggagtgttcctgcctggcaaacaagatgtgtacctcggggtctacctcatgaatcagtacctggagaccaacagctttccctctgcgttccccattatgattcaggagagcatgagatttgaaaaggtatttgaaagtgcagtagatcctggagctgtagtagaccttttggaaatgtgggatgagttggcctactacgaagaaaacacacgagattttcttttcccagagcccaagctgacaccttcgcaccctaggaggtgtagggaggtgctcatgaagacggctctgggttttccaggcattgctcccaaaatagagttttctacaaggacagccatcagagaatgtgtgtttctgcatagaaacagatttcttggctggggaaacaaagggaagatgttggttcagcaagaacacagaagcttaaagaagaaactgaacagaaatgggacccagacctctggagaagggctgctttcctggatgcttcttcaggaattcgaaggaagaaagacatgagtcacggaggcctttatctacatcacatgaaccaatatttcccttaaatactataaagatgaaactaaaggagaataatctcaacagactgcccaaaggcatgcaagcccgggcgccctctcaatattctaccaggcatttcttccaggaccagccagctcagttgaaccttggaaataatttcaaaatctctggaggaagcaagcctccatttgttgttagacacgtgagcctaaaattattttttagagcattttgcaatagtgaggatatggatgagggtggaagaaaggaaggttgagttataacaacaaatgaataatattcaataaaaaggtggacagtgcaaagccctttggtgagaatatttcagagcatcatttgaggaggtctggaagaaaatctaagttttcagactttccgtttccaacgagaagaggttccatcctggttctcagtccacatggaagaatatccatgagagggtatgcagtcttctgacatcccacagagcacagctgcaccaaaacaaggaagattctacctctgaagtaaattatatcattgaaagaccaagctaccctctgaagaaatactcactgcatgaacagagatatttttaaggggaaattaatgaaagcttaaggagaatcatgaagagctcactcactgagacaattgaagcatccttaaagaaatgaacactttttgttgtctgtgttgagtcactgatgtctaatcccctttaaaccaaaccctgtactcagtcttttgtgcccaggttttaagctccatgaaggcaggagacctagctatctgcttgttcacgaatgtatactcagtgcccagcacataggagatgctcagtaaacatgctgattgaatgactaacaggtatttaagtatggctgactgccctggatccctctcccaggctctggccccttggcagcagagtgttgccagaacaaaacttgccagttccagctgctgcccttatgatctgtgtgatcttgaaaaagtggcttaatctgtcttcaacctcctgtttccttatctctaaagatggagttaaggtcccacctacttgatgacttcatagggctgctatgaggattaaataaacaggttcatgatttttaaattccaaaatgtttcttttattccccagagaaaacaaggcaggatatgatcttactttgttaatccagggcatagggaaatctctgcagccttgattagtactccctggatgttcaaagggaaaggaagaggcaaagaggagcatgcaaaatctttctgtgcatgcatcacctatgacatctacttttcttagagacatgaagaactctcttaaaataggtaatatcaccactctaggctatttggtgatgttaacaaaataaactggtccttgagcagaatcagctaaaggtccccttgaagcctctgtcagctggtccacatttgaagttcaaaacatgcatcaagaagcagtgggctctccaggtgcagtggttcatgcctgtaatcccagcactttgggaggctgaggcaagtggatcacttgaggtcaggagttcaagaccagcctggccaacatggtgtaacctcatctctactaaaaatacaaaaattagccggtggtggtggcacacacctatagtcccagctacttgggaggctgaggcaggagaatcgcttgaacccaggaggtggaggttgcaagtgagctgagatcgcaccactgcactccagcctgggcaacacagtgagactctgtc

SEQ ID NO: 410393 - DNA, 1669 bp, Homo sapiens
gacccgtcccggtgggagggacctgggctgggggggacggtaggggaacaagggcgtgggactggggaagcttctgggaacatttgctctaggtattcagctaaactaagaaaaattggtccaaggctcggcacaaaaggatcttctcattccagtcctttcgcccacgcagggaacgatgcctctggaggtggtggtggagctgcagatccgggcgatttcttgcccaggagtgttcctgcctggcaaacaagatgtgtacctcggggtctacctcatgaatcagtacctggagaccaacagctttccctctgcgttccccattatgattcaggagagcatgagatttgaaaaggtatttgaaagtgcagtagatcctggagctgtagtagaccttttggaaatgtgggatgagttggcctactacgaagaaaacacacgagattttcttttcccagagcccaagctgacaccttcgcaccctaggaggtgtagggaggtgctcatgaagacggctctgggttttccaggcattgctcccaaaatagagttttctacaaggacagccatcagagaatgtgtgtttctgcatagaaacagatttcttgaagaaagacatgagtcacggaggcctttatctacatcacatgaaccaatatttcccttaaatactataaagatgaaactaaaggagaataatctcaacagactgcccaaaggcatgcaagcccgggcgccctctcaatattctaccaggcatttcttccaggaccagccagctcagttgaaccttggaaataatttcaaaatctctggaggaagcaagcctccatttgttgttagacacgtgagcctaaaattattttttagagcattttgcaatagtgaggatatggatgagggtggaagaaaggaaggttgagttataacaacaaatgaataatattcaataaaaaggtggacagtgcaaagccctttggtgagaatatttcagagcatcatttgaggaggtctggaagaaaatctaagttttcagactttccgtttccaacgagaagagcttcttctcttgacagccttgcagctaacgtaaaggttatcaaagagccagatgaacggattgttttaaggagtgactcatcatcatgtttagattcaagtcagtttggaaagtcttcatcccagtaaacaaggggatgctgatttccacgggaaagcttcatttgccacctaccagcattccacctctcctggccccttggatcagccccttctcagagaaaggttccatcctggttctcagtccacatggaagaatatccatgagagggtatgcagtcttctgacatcccacagagcacagctgcaccaaaacaaggaagattctacctctgaagtaaattatatcattgaaagaccaagctaccctctgaagaaatactcactgcatgaacagagatatttttaaggggaaattaatgaaagcttaaggagaatcatgaagagctcactcactgagacaattgaagcatccttaaagaaatgaacactttttgttgtctgtgttgagtcactgatgtctaatcccctttaaaccaaaccctgtactcagtcttttgtgcccaggtaagagttgttgattaaagtgtttgctgtttgggggctcaca

SEQ ID NO: 410394 - DNA, 1735 bp, Homo sapiens
gacccgtcccggtgggagggacctgggctgggggggacggtaggggaacaagggcgtgggactggggaagcttctgggaacatttgctctagggaacgatgcctctggaggtggtggtggagctgcagatccgggcgatttcttgcccaggagtgttcctgcctggcaaacaagatgtgtacctcggggtctacctcatgaatcagtacctggagaccaacagctttccctctgcgttccccattatgattcaggagagcatgagatttgaaaaggtatttgaaagtgcagtagatcctggagctgtagtagaccttttggaaagcttcctagccaggtttgaattaatacagctagttcctccagtgtgggatgagttggcctactacgaagaaaacacacgagattttcttttcccagagcccaagctgacaccttcgcaccctaggaggtgtagggaggtgctcatgaagacggctctgggttttccaggcattgctcccaaaatagagttttctacaaggacagccatcagagaatgtgtgtttctgcatagaaacagatttcttgttgattccaaatcttggctattgtgaatagtgctgcagtaaacatggggccacctttcttttgctgaggctgatgctcggattgtattcatggtccgtctttggaagaaagacatgagtcacggaggcctttatctacatcacatgaaccaatatttcccttaaatactataaagatgaaactaaaggagaataatctcaacagactgcccaaaggcatgcaagcccgggcgccctctcaatattctaccaggcatttcttccaggaccagccagctcagttgaaccttggaaataatttcaaaatctctggaggaagcaagcctccatttgttgttagacacgtgagcctaaaattattttttagagcattttgcaatagtgaggatatggatgagggtggaagaaaggaaggttgagttataacaacaaatgaataatattcaataaaaaggtggacagtgcaaagccctttggtgagaatatttcagagcatcatttgaggaggtctggaagaaaatctaagttttcagactttccgtttccaacgagaagagcttcttctcttgacagccttgcagctaacgtaaaggttatcaaagagccagatgaacggattgttttaaggagtgactcatcatcatgtttagattcaagtcagtttggaaagtcttcatcccagtaaacaaggggatgctgatttccacgggaaagcttcatttgccacctaccagcattccacctctcctggccccttggatcagccccttctcagagaaaggttccatcctggttctcagtccacatggaagaatatccatgagagggtatgcagtcttctgacatcccacagagcacagctgcaccaaaacaaggaagattctacctctgaagtaaattatatcattgaaagaccaagctaccctctgaagaaatactcactgcatgaacagagatatttttaaggggaaattaatgaaagcttaaggagaatcatgaagagctcactcactgagacaattgaagcatccttaaagaaatgaacactttttgttgtctgtgttgagtcactgatgtctaatcccctttaaaccaaaccctgtactcagtcttttgtgcccaggtaagagttgttgattaaagtgtttgctgtttgggggctcaca

SEQ ID NO: 410395 - DNA, 1503 bp, Homo sapiens
gaagactgcgcgtttgagtgtccctggcaacgccacgcttccgccttctggaagcctgcactccagcttcgagtggaacgatgcctctggaggtggtggtggagctgcagatccgggcgatttcttgcccaggagtgttcctgcctggcaaacaagatgtgtacctcggggtctacctcatgaatcagtacctggagaccaacagctttccctctgcgttccccattatgattcaggagagcatgagatttgaaaaggtatttgaaagtgcagtagatcctggagctgtagtagaccttttggaaagcttcctagccaggtttgaattaatacagctagttcctccagtgtgggatgagttggcctactacgaagaaaacacacgagattttcttttcccagagcccaagctgacaccttcgcaccctaggaggtgtagggaggtgctcatgaagacggctctgggttttccaggcattgctcccaaaatagagttttctacaaggacagccatcagagaatgtgtgtttctgcatagaaacagatttcttgaagaaagacatgagtcacggaggcctttatctacatcacatgaaccaatatttcccttaaatactataaagatgaaactaaaggagaataatctcaacagactgcccaaaggcatgcaagcccgggcgccctctcaatattctaccaggcatttcttccaggaccagccagctcagttgaaccttggaaataatttcaaaatctctggaggaagcaagcctccatttgttgttagacacgtggacagtgcaaagccctttggtgagaatatttcagagcatcatttgaggaggtctggaagaaaatctaagttttcagactttccgtttccaacgagaagagcttcttctcttgacagccttgcagctaacgtaaaggttatcaaagagccagatgaacggattgttttaaggagtgactcatcatcatgtttagattcaagtcagtttggaaagtcttcatcccagtaaacaaggggatgctgatttccacgggaaagcttcatttgccacctaccagcattccacctctcctggccccttggatcagccccttctcagagaaaggttccatcctggttctcagtccacatggaagaatatccatgagagggtatgcagtcttctgacatcccacagagcacagctgcaccaaaacaaggaagattctacctctgaagtaaattatatcattgaaagaccaagctaccctctgaagaaatactcactgcatgaacagagatatttttaaggggaaattaatgaaagcttaaggagaatcatgaagagctcactcactgagacaattgaagcatccttaaagaaatgaacactttttgttgtctgtgttgagtcactgatgtctaatcccctttaaaccaaaccctgtactcagtcttttgtgcccaggtaagagttgttgattaaagtgtttgctgtttgggggctcaca

SEQ ID NO: 410396 - DNA, 1675 bp, Homo sapiens
gaagactgcgcgtttgagtgtccctggcaacgccacgcttccgccttctggaagcctgcactccagcttcgagtggaacgatgcctctggaggtggtggtggagctgcagatccgggcgatttcttgcccaggagtgttcctgcctggcaaacaagatgtgtacctcggggtctacctcatgaatcagtacctggagaccaacagctttccctctgcgttccccattatgattcaggagagcatgagatttgaaaaggtatttgaaagtgcagtagatcctggagctgtagtagaccttttggaaatgtgggatgagttggcctactacgaagaaaacacacgagattttcttttcccagagcccaagctgacaccttcgcaccctaggaggtgtagggaggtgctcatgaagacggctctgggttttccaggcattgctcccaaaatagagttttctacaaggacagccatcagagaatgtgtgtttctgcatagaaacagatttcttgttgattccaaatcttggctattgtgaatagtgctgcagtaaacatggggccacctttcttttgctgaggctgatgctcggattgtattcatggtccgtctttggaagaaagacatgagtcacggaggcctttatctacatcacatgaaccaatatttcccttaaatactataaagatgaaactaaaggagaataatctcaacagactgcccaaaggcatgcaagcccgggcgccctctcaatattctaccaggcatttcttccaggaccagccagctcagttgaaccttggaaataatttcaaaatctctggaggaagcaagcctccatttgttgttagacacgtgagcctaaaattattttttagagcattttgcaatagtgaggatatggatgagggtggaagaaaggaaggttgagttataacaacaaatgaataatattcaataaaaaggtggacagtgcaaagccctttggtgagaatatttcagagcatcatttgaggaggtctggaagaaaatctaagttttcagactttccgtttccaacgagaagagcttcttctcttgacagccttgcagctaacgtaaaggttatcaaagagccagatgaacggattgttttaaggagtgactcatcatcatgtttagattcaagtcagtttggaaagtcttcatcccagtaaacaaggggatgctgatttccacgggaaagcttcatttgccacctaccagcattccacctctcctggccccttggatcagccccttctcagagaaaggttccatcctggttctcagtccacatggaagaatatccatgagagggtatgcagtcttctgacatcccacagagcacagctgcaccaaaacaaggaagattctacctctgaagtaaattatatcattgaaagaccaagctaccctctgaagaaatactcactgcatgaacagagatatttttaaggggaaattaatgaaagcttaaggagaatcatgaagagctcactcactgagacaattgaagcatccttaaagaaatgaacactttttgttgtctgtgttgagtcactgatgtctaatcccctttaaaccaaaccctgtactcagtcttttgtgcccaggtaagagttgttgattaaagtgtttgctgtttgggggctcaca

SEQ ID NO: 410397 - DNA, 636 bp, Homo sapiens
gacccgtcccggtgggagggacctgggctgggggggacggtaggggaacaagggcgtgggactggggaagcttctgggaacatttgctctaggtattcagctaaactaagaaaaattggtccaaggctcggcacaaaaggatcttctcattccagtcctttcgcccacgcagggaacgatgcctctggaggtggtggtggagctgcagatccgggcgatttcttgcccaggagtgttcctgcctggcaaacaagatgtgtacctcggggtctacctcatgaatcagtacctggagaccaacagctttccctctgcgttccccattatgattcaggagagcatgagatttgaaaaggtatttgaaagtgcagtagatcctggagctgtagtagaccttttggaaagcttcctagccaggtttgaattaatacagctagttcctccaggtaatgtggcagtaaatccgtttctaaattagcttaatatgattttaaaataaatttggcctgtcaaaatggggactgtacttaagagttgtgtttgaaaataacatacaactttatgtgtctgtaagtttatataacacatgccttttttctgccaatctattaaattttgtctattttcagaataata

SEQ ID NO: 410398 - DNA, 830 bp, Homo sapiens
tggaccagtattatatagctgaggtggatttgcaactgagcgcaattgcttactcaccaatacagctggtttctaacttttaaactatcataagcatttttgtagctatacatatagccatagttatttccttataatacattcctggaagtgaaattgctagacccctctatgtgtcaaattctctattatctatctattggaggtgtctgacactttctaacttccccctattataaataaatctcactgttaattagttgaatacattatactagcaagttataaatactactgatgttaaactgaacaggaaaaaaattagagaaatgtccttcttaagtttatgttttataaatctgaggtgtgttatctttgaccttaatttttaaaaattcaattaaatacagttatattctgattgaattttcttcttttctttctttattttaaaaaatattctttttttgtttatttcaggaagaaagacatgagtcacggaggcctttatctacatcacatgaaccaatatttcccttaaatactataaagatgaaactaaaggagaataatctcaacagactgcccaaaggcatgcaagcccgggcgccctctcaatattctaccaggcatttcttccaggaccagccagctcagttgaaccttggaaataatttcaaaatctctggaggaagcaagcctccatttgttgttagacacgtgagcctaaaattattttttagagcattttgcaatagtgaggatatggatgagggtggaagaaaggaaggttgagttataacaacaaatgaataatattcaataaaaag

SEQ ID NO: 410399 - DNA, 513 bp, Homo sapiens
ctccattatccattcccaggcctctccagtgtctctcctatgtctgagacatagtggcaagctgataaggctgtacagtggcaagggcaaaggagatcttaacccttagtccaatttaaggatgatgaattgaggttttttaccaacaaggcagaggatcagagatgtcttgcttcagctcctcccacggttcgtattgtgcactcaggcttggcctgtaacattgaagaggagcgctactccgaaagggtctacactatccgggaaggagaaacccttgagttgacttgtctagtcacaggacatccacgtccacagacatggaatagaaatttcagaatcaaaagttgggatctaaacaggagggtctaaacacatccaaaagaagccttgaagagctttatgagaggcagtttatggcaagagaagactcattgaggttcccattagtcccacaaagagtgtactaaatttacaccttctgaactccaaattatattttaaaatgcaaat

SEQ ID NO: 410400 - DNA, 689 bp, Homo sapiens
gcttgagcctgtaccagaatgataagtggaaattagtcctcaaagtaacctcagctgtttcattattgtgtgcctcgagcatctggttattcaagctcctcccacggttcgtattgtgcactcaggcttggcctgtaacattgaagaggagcgctactccgaaagggtctacactatccgggaaggagaaacccttgagttgacttgtctagtcacaggacatccacgtccacaggtggaccaaaacagcaggaagtgcctctgacagattccaagactcaagtgtcttcaatgagactttgaggattacaaatattcagcgacaccaaggaggccggtattactgtaaagcagagaatggcttggggtctccagcgataaagtcaatcagagtggatgtatactatttggatgatccagtagtaactgttcatcaaagtataggtgaagctaaagaacaattttactatgagagaacagtgttcctccggtgtgttgccaattccaatcctcctgttcggtatagctggagacgtggccaggaggtcttgctgcaaggatctgataaaggagttgagatttatgaaccattctttacccagggtgaaacaaagatcttaaaactaaagaatcttcgacctcaggactatgctaattatagctgcattgcttcagtgaggaatgtatgt

SEQ ID NO: 410401 - DNA, 427 bp, Homo sapiens
ccgaactctagtctctccttgaagtttcagtgtgggcatcccctcctcctcggcgagaccccctcctgggcccccatgacccctgcgcatcctggtggcactgcaccaatttatctgcagcaccactgtctgtccatgagagtaacagcaccagtactgcctcagcttcatttttccatttcatccttcaagacaccacaagctttattatcaaggagtcttgtggctcctacttgagtcttaccccataccaggaagagtttaagaacccagggtcttagtccaaatttggggcaggctgggtgcagtggcttatgcctataatcccaccactttgggagaccaaggtggaaagatcacttgagcctaggagttcaagactggcctgagccacacaatgagaccccatctctattttagaaggaaa

SEQ ID NO: 410402 - DNA, 575 bp, Homo sapiens
ctcctgccatgacctctgaccctgctggatctgagagaagaggaggtgaagggttgcattgcatgtctggtcctgtgcccccactgtgggctcactctgggaggatgaggacacagcagcaaggcaggacgggaggaagatagaggctggaggcagggttggacctgcaacccggaagtgcctggccaccttgtgcagcacagggctcagccctgcttccctctgtccttgcctctttgcctcctgcagccccatcctcataagaacaggtgcccccagcccactccggggccagatttctgtggtctgtctgcagagacgaggtcttgcagggcagcgccccgtgatggatccaccagggctctaaccccactgtcctgagcttcagtgaggcaggagctccctgaggacagggctggcaccaaactaaaagcagggagccctgggccacacactgtgagggctgcaggtgtgctccagggacacagcccccagacccagaggccaggcagtcccctccccatacatttatttctgtaaataatgtgcactgaataaattgtacagccggcaaa

SEQ ID NO: 410403 - DNA, 3451 bp, Homo sapiens
gcgaggatccggcgtgcagtgttccgagctgggctgggcgccgagagcatgggcagcgacccgagcgcgcccggacggccgggctggacgggcagcctcctcggcgaccgggaggaggcggcgcggccgcgactgctgccgctgctcctggtgcttctgggctgcctgggccttggcgtagcggccgaagacgcggaggtccatgccgagaactggctgcggctttatggctacctgcctcagcccagccgccatatgtccaccatgcgttccgcccagatcttggcctcggcccttgcagagatgcagcgcttctacgggatcccagtcaccggtgtgctcgacgaagagaccaaggagtggatgaagcggccccgctgtggggtgccagaccagttcggggtacgagtgaaagccaacctgcggcggcgtcggaagcgctacgccctcaccgggaggaagtggaacaaccaccatctgacctttagcatccagaactacacggagaagttgggctggtaccactcgatggaggcggtgcgcagggccttccgcgtgtgggagcaggccacgcccctggtcttccaggaggtgccctatgaggacatccggctgcggcgacagaaggaggccgacatcatggtactctttgcctctggcttccacggcgacagctcgccgtttgatggcaccggtggctttctggcccacgcctatttccctggccccggcctaggcggggacacccattttgacgcagatgagccctggaccttctccagcactgacctgcatggaaacaacctcttcctggtggcagtgcatgagctgggccacgcgctggggctggagcactccagcaaccccaatgccatcatggcgccgttctaccagtggaaggacgttgacaacttcaagctgcccgaggacgatctccgtggcatccagcagctctacggtaccccagacggtcagccacagcctacccagcctctccccactgtgacgccacggcggccaggccggcctgaccaccggccgccccggcctccccagccaccacccccaggtgggaagccagagcggcccccaaagccgggccccccagtccagccccgagccacagagcggcccgaccagtatggccccaacatctgcgacggggactttgacacagtggccatgcttcgcggggagatgttcgtgttcaagggccgctggttctggcgagtccggcacaaccgcgtcctggacaactatcccatgcccatcgggcacttctggcgtggtctgcccggtgacatcagtgctgcctacgagcgccaagacggtcgttttgtctttttcaaaggtgaccgctactggctctttcgagaagcgaacctggagcccggctacccacagccgctgaccagctatggcctgggcatcccctatgaccgcattgacacggccatctggtgggagcccacaggccacaccttcttcttccaagaggacaggtactggcgcttcaacgaggagacacagcgtggagaccctgggtaccccaagcccatcagtgtctggcaggggatccctgcctcccctaaaggggccttcctgagcaatgacgcagcctacacctacttctacaagggcaccaaatactggaaattcgacaatgagcgcctgcggatggagcccggctaccccaagtccatcctgcgggacttcatgggctgccaggagcacgtggagccaggcccccgatggcccgacgtggcccggccgcccttcaacccccacgggggtgcagagcccggggcggacagcgcagagggcgacgtgggggatggggatggggactttggggccggggtcaacaaggacgggggcagccgcgtggtggtgcagatggaggaggtggcacggacggtgaacgtggtgatggtgctggtgccactgctgctgctgctctgcgtcctgggcctcacctacgcgctggtgcagatgcagcgcaagggtgcgccacgtgtcctgctttactgcaagcgctcgctgcaggagtgggtctgaccacccagcgctcctgctaacggtgctcagggggcgcctgtggttctgagatggctcccaggggctccctccgcccccaggtaggggcccctctcagccctcacacaccctgtctgccccgccctcattatttatgtccaggtgtttgttttgttttgtttttggcaccttacttgaccatttgtttctgtttccccgactggggcagggtgtttagaattttctaaatgtagttctgctccagacagggaattaggcccccatcatcctctggcttggccacagccaggggagcagaggggcagaggcccacattggaagagcagcacctcctcagcctgaaccccagggctgtaactgccaggctctctttgcccagttggagactgtctggcccccctggtcccctccttcccaagtgagtctctctgggccttaggaagagccttccacccaggggcagccccaggccaaaggggacctggaagggaggtgggccgtggcccttgagtccccattgaggcttggttccttcccaatccagtggacttcgcagtccacttctgacagcctcagtgaccctggctccttgtgccagagaacccagcccacccccggcagcagcccccagctcccacctccccttgggcccacaccttggcccctctccccagggaagcagcagcctcgcccctggcagagatgcctccctgagctagaaccctctgttccttccctgtgcctcctccctccctctccgactcacaccactagcctcaggggtctgagctccagctcctttgggcttcagctgccagtgtcctgagccccagggagagggggctggtgggtgcctaggcctgggcagtggatggccgtgaatgggtgcccacagtgtcaggcactgggcatgaggggttcctcccctccagctccctgtgcccccagggtcctgggaggagagacactggtggggataggccagccgcgcatcagactgtgaaccccacgaaggagcccattgtggcctaagaggctgccctcctgtgctcagccctgaggacagatgcctccttcctcttttccttcccaaagcaagcaagaggccgtggctgctgtgggaaatggtactgtacagctggctctacttccccatggccctgagcgagtggagtctgccacccaggatccccaaggcacttgagggggaaggattctgctggcctctgcgagtggtttcttgtgcactggcaccaagtgcgggtccggcagcttctgccccctgcagaaccggagagccagctaaggggtggggctgcgggggttccgtgtccacccccatacatttatttctgtaaataatgtgcactgaataaattgtacagccggcaaa

SEQ ID NO: 410404 - DNA, 2318 bp, Homo sapiens
  misc_feature (1)..(1): n is a, c, g, or t
ngtctttgttttggctcgacatggtgggtggttaagtccggcacaaccgcgtcctggacaactatcccatgcccatcgggcacttctggcgtggtctgcccggtgacatcagtgctgcctacgagcgccaagacggtcgttttgtctttttcaaaggtgaccgctactggctctttcgagaagcgaacctggagcccggctacccacagccgctgaccagctatggcctgggcatcccctatgaccgcattgacacggccatctggtgggagcccacaggccacaccttcttcttccaagaggacaggtactggcgcttcaacgaggagacacagcgtggagaccctgggtaccccaagcccatcagtgtctggcaggggatccctgcctcccctaaaggggccttcctgagcaatgacgcagcctacacctacttctacaagggcaccaaatactggaaattcgacaatgagcgcctgcggatggagcccggctaccccaagtccatcctgcgggacttcatgggctgccaggagcacgtggagccaggcccccgatggcccgacgtggcccggccgcccttcaacccccacgggggtgcagagcccggggcggacagcgcagagggcgacgtgggggatggggatggggactttggggccggggtcaacaaggacgggggcagccgcgtggtggtgcagatggaggaggtggcacggacggtgaacgtggtgatggtgctggtgccactgctgctgctgctctgcgtcctgggcctcacctacgcgctggtgcagatgcagcgcaagggtgcgccacgtgtcctgctttactgcaagcgctcgctgcaggagtgggtctgaccacccagcgctcctgctaacggtgctcagggggcgcctgtggttctgagatggctcccaggggctccctccgcccccaggtaggggcccctctcagccctcacacaccctgtctgccccgccctcattatttatgtccaggtgtttgttttgttttgtttttggcaccttacttgaccatttgtttctgtttccccgactggggcagggtgtttagaattttctaaatgtagttctgctccagacagggaattaggcccccatcatcctctggcttggccacagccaggggagcagaggggcagaggcccacattggaagagcagcacctcctcagcctgaaccccagggctgtaactgccaggctctctttgcccagttggagactgtctggcccccctggtcccctccttcccaagtgagtctctctgggccttaggaagagccttccacccaggggcagccccaggccaaaggggacctggaagggaggtgggccgtggcccttgagtccccattgaggcttggttccttcccaatccagtggacttcgcagtccacttctgacagcctcagtgaccctggctccttgtgccagagaacccagcccacccccggcagcagcccccagctcccacctccccttgggcccacaccttcttccctctctggagaaagggccctgggcctgcctcaccacggaccaaagggagtctgccagggcccctctccccagggaagcagcagcctcgcccctggcagagatgcctccctgagctagaaccctctgttccttccctgtgcctcctccctccctctccgactcacaccactagcctcaggggtctgagctccagctcctttgggcttcagctgccagtgtcctgagccccagggagagggggctggtgggtgcctaggcctgggcagtggatggccgtgaatgggtgcccacagtgtcaggcactgggcatgaggggttcctcccctccagctccctgtgcccccagggtcctgggaggagagacactggtggggataggccagccgcgcatcagactgtgaaccccacgaaggagcccattgtggcctaagaggctgccctcctgtgctcagccctgaggacagatgcctccttcctcttttccttcccaaagcaagcaagaggccgtggctgctgtgggaaatggtactgtacagctggctctacttccccatggccctgagcgagtggagtctgccacccaggatccccaaggcacttgagggggaaggattctgctggcctctgcgagtggtttcttgtgcactggcaccaagtgcgggtccggcagcttctgccccctgcagaaccggagagccagctaaggggtggggctgcgggggttccgtgtccacccccatacatttatttctgtaaataatgtgcactgaataaattgtacagccggcaaa

SEQ ID NO: 410405 - DNA, 1617 bp, Homo sapiens
ctcattgtgcggctcttggtggggctcgtggtgatggtgctggtgccactgctgctgctgctctgcgtcctgggcctcacctacgcgctggtgcagatgcagcgcaagggtgcgccacgtgtcctgctttactgcaagcgctcgctgcaggagtgggtctgaccacccagcgctcctgctaacggtgctcagggggcgcctgtggttctgagatggctcccaggggctccctccgcccccaggtaggggcccctctcagccctcacacaccctgtctgccccgccctcattatttatgtccaggtgtttgttttgttttgtttttggcaccttacttgaccatttgtttctgtttccccgactggggcagggtgtttagaattttctaaatgtagttctgctccagacagggaattaggcccccatcatcctctggcttggccacagccaggggagcagaggggcagaggcccacattggaagagcagcacctcctcagcctgaaccccagggctgtaactgccaggctctctttgcccagttggagactgtctggcccccctggtcccctccttcccaagtgagtctctctgggccttaggaagagccttccacccaggggcagccccaggccaaaggggacctggaagggaggtgggccgtggcccttgagtccccattgaggcttggttccttcccaatccagtggacttcgcagtccacttctgacagcctcagtgaccctggctccttgtgccagagaacccagcccacccccggcagcagcccccagctcccacctccccttgggcccacaccttcttccctctctggagaaagggccctgggcctgcctcaccacggaccaaagggagtctgccagggcccctctccccagggaagcagcagcctcgcccctggcagagatgcctccctgagctagaaccctctgttccttccctgtgcctcctccctccctctccgactcacaccactagcctcaggggtctgagctccagctcctttgggcttcagctgccagtgtcctgagccccagggagagggggctggtgggtgcctaggcctgggcagtggatggccgtgaatgggtgcccacagtgtcaggcactgggcatgaggggttcctcccctccagctccctgtgcccccagggtcctgggaggagagacactggtggggataggccagccgcgcatcagactgtgaaccccacgaaggagcccattgtggcctaagaggctgccctcctgtgctcagccctgaggacagatgcctccttcctcttttccttcccaaagcaagcaagaggccgtggctgctgtgggaaatggtactgtacagctggctctacttccccatggccctgagcgagtggagtctgccacccaggatccccaaggcacttgagggggaaggattctgctggcctctgcgagtggtttcttgtgcactggcaccaagtgcgggtccggcagcttctgccccctgcagaaccggagagccagctaaggggtggggctgcgggggttccgtgtccacccccatacatttatttctgtaaataatgtgcactgaataaattgtacagccggcaaa

SEQ ID NO: 410406 - DNA, 3007 bp, Homo sapiens
gcgaggatccggcgtgcagtgttccgagctgggctgggcgccgagagcatgggcagcgacccgagcgcgcccggacggccgggctggacgggcagcctcctcggcgaccgggaggaggcggcgcggccgcgactgctgccgctgctcctggtgcttctgggctgcctgggccttggcgtagcggccgaagacgcggaggtccatgccgagaactggctgcggctttatggctacctgcctcagcccagccgccatatgtccaccatgcgttccgcccagatcttggcctcggcccttgcagagatgcagcgcttctacgggatcccagtcaccggtgtgctcgacgaagagaccaaggagtggatgaagcggccccgctgtggggtgccagaccagttcggggtacgagtgaaagccaacctgcggcggcgtcggaagcgctacgccctcaccgggaggaagtggaacaaccaccatctgacctttagcatccagaactacacggagaagttgggctggtaccactcgatggaggcggtgcgcagggccttccgcgtgtgggagcaggccacgcccctggtcttccaggaggtgccctatgaggacatccggctgcggcgacagaaggaggccgacatcatggtactctttgcctctggcttccacggcgacagctcgccgtttgatggcaccggtggctttctggcccacgcctatttccctggccccggcctaggcggggacacccattttgacgcagatgagccctggaccttctccagcactgacctgcatggaaacaacctcttcctggtggcagtgcatgagctgggccacgcgctggggctggagcactccagcaaccccaatgccatcatggcgccgttctaccagtggaaggacgttgacaacttcaagctgcccgaggacgatctccgtggcatccagcagctctacggtaccccagacggtcagccacagcctacccagcctctccccactgtgacgccacggcggccaggccggcctgaccaccggccgccccggcctccccagccaccacccccaggtgggaagccagagcggcccccaaagccgggccccccagtccagccccgagccacagagcggcccgaccagtatggccccaacatctgcgacggggactttgacacagtggccatgcttcgcggggagatgttcgtgttcaagggccgctggttctggcgagtccggcacaaccgcgtcctggacaactatcccatgcccatcgggcacttctggcgtggtctgcccggtgacatcagtgctgcctacgagcgccaagacggtcgttttgtctttttcaaaggtgaccgctactggctctttcgagaagcgaacctggagcccggctacccacagccgctgaccagctatggcctgggcatcccctatgaccgcattgacacggccatctggtgggagcccacaggccacaccttcttcttccaagaggacaggtactggcgcttcaacgaggagacacagcgtggagaccctgggtaccccaagcccatcagtgtctggcaggggatccctgcctcccctaaaggggccttcctgagcaatgacgcagcctacacctacttctacaagggcaccaaatactggaaattcgacaatgagcgcctgcggatggagcccggctaccccaagtccatcctgcgggacttcatgggctgccaggagcacgtggagccaggcccccgatggcccgacgtggcccggccgcccttcaacccccacgggggtgcagagcccggggcggacagcgcagagggcgacgtgggggatggggatggggactttggggccggggtcaacaaggacgggggcagccgcgtggtggtgcagatggaggaggtggcacggacggtgaacgtggtgatggtgctggtgccactgctgctgctgctctgcgtcctgggcctcacctacgcgctggtgcagatgcagcgcaagggtgcgccacgtgtcctgctttactgcaagcgctcgctgcaggagtgggtctgaccacccagcgctcctgctaacggtgctcagggggcgcctgtggttctgagatggctcccaggggctccctccgcccccaggtaggggcccctctcagccctcacacaccctgtctgccccgccctcattatttatgtccaggtgtttgttttgttttgtttttggcaccttacttgaccatttgtttctgtttccccgactggggcagggtgtttagaattttctaaatgtagttctgctccagacagggaattaggcccccatcatcctctggcttggccacagccaggggagcagaggggcagaggcccacattggaagagcagcacctcctcagcctgaaccccagggctgtaactgccaggctctctttgcccagttggagactgtctggcccccctggtcccctccttcccaagtgagtctctctgggccttaggaagagccttccacccaggggcagccccaggccaaaggggacctggaagggaggtgggccgtggcccttgagtccccattgaggcttggttccttcccaatccagtggacttcgcagtccacttctgacagcctcagtgaccctggctccttgtgccagagaacccagcccacccccggacagatgcctccttcctcttttccttcccaaagcaagcaagaggccgtggctgctgtgggaaatggtactgtacagctggctctacttccccatggccctgagcgagtggagtctgccacccaggatccccaaggcacttgagggggaaggattctgctggcctctgcgagtggtttcttgtgcactggcaccaagtgcgggtccggcagcttctgccccctgcagaaccggagagccagctaaggggtggggctgcgggggttccgtgtccacccccatacatttatttctgtaaataatgtgcactgaataaattgtacagccggcaaa

SEQ ID NO: 410407 - DNA, 1293 bp, Homo sapiens
cccccaggatcctgggaggagagacactgttggggataggccacaccgcgcatcagactgtgacacatcgaaggactccatacagcctaagagcccccctcctgtgctcagtcctgagcgacagaggcctcctgccgcgcatgccgtccccaagcaaacaagagcccgtggctactgtggaaaatggtactgtaactgccaggctctctttgcccagttggagactgtctggcccccctggtcccctccttcccaagtgagtctctctgggccttaggaagagccttccacccaggggcagccccaggccaaaggggacctggaagggaggtgggccgtggcccttgagtccccattgaggcttggttccttcccaatccagtggacttcgcagtccacttctgacagcctcagtgaccctggctccttgtgccagagaacccagcccacccccggcagcagcccccagctcccacctccccttgggcccacaccttcttccctctctggagaaagggccctgggcctgcctcaccacggaccaaagggagtctgccagggcccctctccccagggaagcagcagcctcgcccctggcagagatgcctccctgagctagaaccctctgttccttccctgtgcctcctccctccctctccgactcacaccactagcctcaggggtctgagctccagctcctttgggcttcagctgccagtgtcctgagccccagggagagggggctggtgggtgcctaggcctgggcagtggatggccgtgaatgggtgcccacagtgtcaggcactgggcatgaggggttcctcccctccagctccctgtgcccccagggtcctgggaggagagacactggtggggataggccagccgcgcatcagactgtgaaccccacgaaggagcccattgtggcctaagaggctgccctcctgtgctcagccctgaggacagatgcctccttcctcttttccttcccaaagcaagcaagaggccgtggctgctgtgggaaatggtactgtacagctggctctacttccccatggccctgagcgagtggagtctgccacccaggatccccaaggcacttgagggggaaggattctgctggcctctgcgagtggtttcttgtgcactggcaccaagtgcgggtccggcagcttctgccccctgcagaaccggagagccagctaaggggtggggctgcgggggttccgtgtccacccccatacatttatttctgtaaataatgtgcactgaataaattgtacagccggcaaa

SEQ ID NO: 410408 - DNA, 497 bp, Homo sapiens
caggcggatccagtaaggagccacgtgccctccggttatgaatgtacccaggcgagcttagaagcaatgcagcggtgggactggtaccgacgtcgattacattgtcatggccataactgatcccattgtggcctaagaggctgccctcctgtgctcagccctgaggacagatgcctccttcctcttttccttcccaaagcaagcaagaggccgtggctgctgtgggaaatggtactgtacagctggctctacttccccatggccctgagcgagtggagtctgccacccaggatccccaaggcacttgagggggaaggattctgctggcctctgcgagtggtttcttgtgcactggcaccaagtgcgggtccggcagcttctgccccctgcagaaccggagagccagctaaggggtggggctgcgggggttccgtgtccacccccatacatttatttctgtaaataatgtgcactgaataaattgtacagccggcaaa

SEQ ID NO: 410409 - DNA, 254 bp, Homo sapiens
agctaatgtcagtctggtcaggaagcccagggttctagtcgtacccttagcccaaagccctctgagcctcagtctggctcctgcaagttgagaaggggcagatttgaaaatactcagggaagcaaatgagaagaagggtgttttgaagccctcagcatgtcctggcctttgatggttctcactggtggttcggctcaacctgaagccactctggcctccttgcccctgcagcctacacctacttctacaagggc

SEQ ID NO: 410410 - DNA, 329 bp, Homo sapiens
gaaacaacctcttcctggtggcagtgcatgagctgggccacgcgctggggctggagcactccagcaaccccaatgccatcatggcgccgttctaccagtggaaggacgttgacaacttcaagctgcccgaggacgatctccgtggcatccagcagctctacggtgcgtgggctgtgaccagcgggctctgcatgccgctctcaagtccctggccaatgaggagtaggcattgctgccatccccattttgtagatgaggaacccaaggctcagtgaggattagtgacttgcccacatcatttggggaataaatggtggtactggaaatga

SEQ ID NO: 410411 - DNA, 3513 bp, Homo sapiens
gcgaggatccggcgtgcagtgttccgagctgggctgggcgccgagagcatgggcagcgacccgagcgcgcccggacggccgggctggacgggcagcctcctcggcgaccgggaggaggcggcgcggccgcgactgctgccgctgctcctggtgcttctgggctgcctgggccttggcgtagcggccgaagacgcggaggtccatgccgagaactggctgcggctttatggctacctgcctcagcccagccgccatatgtccaccatgcgttccgcccagatcttggcctcggcccttgcagagatgcagcgcttctacgggatcccagtcaccggtgtgctcgacgaagagaccaaggagtggatgaagcggccccgctgtggggtgccagaccagttcggggtacgagtgaaagccaacctgcggcggcgtcggaagcgctacgccctcaccgggaggaagtggaacaaccaccatctgacctttagcatccagaactacacggagaagttgggctggtaccactcgatggaggcggtgcgcagggccttccgcgtgtgggagcaggccacgcccctggtcttccaggaggtgccctatgaggacatccggctgcggcgacagaaggaggccgacatcatggtactctttgcctctggcttccacggcgacagctcgccgtttgatggcaccggtggctttctggcccacgcctatttccctggccccggcctaggcggggacacccattttgacgcagatgagccctggaccttctccagcactgacctgcatggaaacaacctcttcctggtggcagtgcatgagctgggccacgcgctggggctggagcactccagcaaccccaatgccatcatggcgccgttctaccagtggaaggacgttgacaacttcaagctgcccgaggacgatctccgtggcatccagcagctctacggtaccccagacggtcagccacagcctacccagcctctccccactgtgacgccacggcggccaggccggcctgaccaccggccgccccggcctccccagccaccacccccaggtgggaagccagagcggcccccaaagccgggccccccagtccagccccgagccacagagcggcccgaccagtatggccccaacatctgcgacggggactttgacacagtggccatgcttcgcggggagatgttcgtgttcaagggccgctggttctggcgagtccggcacaaccgcgtcctggacaactatcccatgcccatcgggcacttctggcgtggtctgcccggtgacatcagtgctgcctacgagcgccaagacggtcgttttgtctttttcaaaggtgaccgctactggctctttcgagaagcgaacctggagcccggctacccacagccgctgaccagctatggcctgggcatcccctatgaccgcattgacacggccatctggtgggagcccacaggccacaccttcttcttccaagaggacaggtactggcgcttcaacgaggagacacagcgtggagaccctgggtaccccaagcccatcagtgtctggcaggggatccctgcctcccctaaaggggccttcctgagcaatgacgcagcctacacctacttctacaagggcaccaaatactggaaattcgacaatgagcgcctgcggatggagcccggctaccccaagtccatcctgcgggacttcatgggctgccaggagcacgtggagccaggcccccgatggcccgacgtggcccggccgcccttcaacccccacgggggtgcagagcccggggcggacagcgcagagggcgacgtgggggatggggatggggactttggggccggggtcaacaaggacgggggcagccgcgtggtggtgcagatggaggaggtggcacggacggtgaacgtggtgatggtgctggtgccactgctgctgctgctctgcgtcctgggcctcacctacgcgctggtgcagatgcagcgcaagggtgcgccacgtgtcctgctttactgcaagcgctcgctgcaggagtgggtctgaccacccagcgctcctgctaacggtgctcagggggcgcctgtggttctgagatggctcccaggggctccctccgcccccaggtaggggcccctctcagccctcacacaccctgtctgccccgccctcattatttatgtccaggtgtttgttttgttttgtttttggcaccttacttgaccatttgtttctgtttccccgactggggcagggtgtttagaattttctaaatgtagttctgctccagacagggaattaggcccccatcatcctctggcttggccacagccaggggagcagaggggcagaggcccacattggaagagcagcacctcctcagcctgaaccccagggctgtaactgccaggctctctttgcccagttggagactgtctggcccccctggtcccctccttcccaagtgagtctctctgggccttaggaagagccttccacccaggggcagccccaggccaaaggggacctggaagggaggtgggccgtggcccttgagtccccattgaggcttggttccttcccaatccagtggacttcgcagtccacttctgacagcctcagtgaccctggctccttgtgccagagaacccagcccacccccggcagcagcccccagctcccacctccccttgggcccacaccttcttccctctctggagaaagggccctgggcctgcctcaccacggaccaaagggagtctgccagggcccctctccccagggaagcagcagcctcgcccctggcagagatgcctccctgagctagaaccctctgttccttccctgtgcctcctccctccctctccgactcacaccactagcctcaggggtctgagctccagctcctttgggcttcagctgccagtgtcctgagccccagggagagggggctggtgggtgcctaggcctgggcagtggatggccgtgaatgggtgcccacagtgtcaggcactgggcatgaggggttcctcccctccagctccctgtgcccccagggtcctgggaggagagacactggtggggataggccagccgcgcatcagactgtgaaccccacgaaggagcccattgtggcctaagaggctgccctcctgtgctcagccctgaggacagatgcctccttcctcttttccttcccaaagcaagcaagaggccgtggctgctgtgggaaatggtactgtacagctggctctacttccccatggccctgagcgagtggagtctgccacccaggatccccaaggcacttgagggggaaggattctgctggcctctgcgagtggtttcttgtgcactggcaccaagtgcgggtccggcagcttctgccccctgcagaaccggagagccagctaaggggtggggctgcgggggttccgtgtccacccccatacatttatttctgtaaataatgtgcactgaataaattgtacagccggcaaa

SEQ ID NO: 410412 - DNA, 3045 bp, Homo sapiens
gcgaggatccggcgtgcagtgttccgagctgggctgggcgccgagagcatgggcagcgacccgagcgcgcccggacggccgggctggacgggcagcctcctcggcgaccgggaggaggcggcgcggccgcgactgctgccgctgctcctggtgcttctgggctgcctgggccttggcgtagcggccgaagacgcggaggtccatgccgagaactggctgcggctttatggctacctgcctcagcccagccgccatatgtccaccatgcgttccgcccagatcttggcctcggcccttgcagagatgcagcgcttctacgggatcccagtcaccggtgtgctcgacgaagagaccaaggagtggatgaagcggccccgctgtggggtgccagaccagttcggggtacgagtgaaagccaacctgcggcggcgtcggaagcgctacgccctcaccgggaggaagtggaacaaccaccatctgacctttagcatccagaactacacggagaagttgggctggtaccactcgatggaggcggtgcgcagggccttccgcgtgtgggagcaggccacgcccctggtcttccaggaggtgccctatgaggacatccggctgcggcgacagaaggaggccgacatcatggtactctttgcctctggcttccacggcgacagctcgccgtttgatggcaccggtggctttctggcccacgcctatttccctggccccggcctaggcggggacacccattttgacgcagatgagccctggaccttctccagcactgacctgcatggaaacaacctcttcctggtggcagtgcatgagctgggccacgcgctggggctggagcactccagcaaccccaatgccatcatggcgccgttctaccagtggaaggacgttgacaacttcaagctgcccgaggacgatctccgtggcatccagcagctctacggtaccccagacggtcagccacagcctacccagcctctccccactgtgacgccacggcggccaggccggcctgaccaccggccgccccggcctccccagccaccacccccaggtgggaagccagagcggcccccaaagccgggccccccagtccagccccgagccacagagcggcccgaccagtatggccccaacatctgcgacggggactttgacacagtggccatgcttcgcggggagatgttcgtgttcaagggccgctggttctggcgagtccggcacaaccgcgtcctggacaactatcccatgcccatcgggcacttctggcgtggtctgcccggtgacatcagtgctgcctacgagcgccaagacggtcgttttgtctttttcaaaggtgaccgctactggctctttcgagaagcgaacctggagcccggctacccacagccgctgaccagctatggcctgggcatcccctatgaccgcattgacacggccatctggtgggagcccacaggccacaccttcttcttccaagaggacaggtactggcgcttcaacgaggagacacagcgtggagaccctgggtaccccaagcccatcagtgtctggcaggggatccctgcctcccctaaaggggccttcctgagcaatgacgcagcctacacctacttctacaagggcaccaaatactggaaattcgacaatgagcgcctgcggatggagcccggctaccccaagtccatcctgcgggacttcatgggctgccaggagcacgtggagccaggcccccgatggcccgacgtggcccggccgcccttcaacccccacgggggtgcagagcccggggcggacagcgcagagggcgacgtgggggatggggatggggactttggggccggggtcaacaaggacgggggcagccgcgtggtggtgcagatggaggaggtggcacggacggtgaacgtggtgatggtgctggtgccactgctgctgctgctctgcgtcctgggcctcacctacgcgctggtgcagatgcagcgcaagggtgcgccacgtgtcctgctttactgcaagcgctcgctgcaggagtgggtctgaccacccagcgctcctgctaacggtgctcagggggcgcctgtggttctgagatggctcccaggggctccctccgcccccaggtaggggcccctctcagccctcacacaccctgtctgccccgccctcattatttatgtccaggtgtttgttttgttttgtttttggcaccttacttgaccatttgtttctgtttccccgactggggcagggtgtttagaattttctaaatgtagttctgctccagacagggaattaggcccccatcatcctctggcttggccacagccaggggagcagaggggcagaggcccacattggaagagcagcacctcctcagcctgaaccccagggctgtaactgccaggctctctttgcccagttggagactgtctggcccccctggtcccctccttcccaagtgagtctctctgggccttaggaagagccttccacccaggggcatggatggccgtgaatgggtgcccacagtgtcaggcactgggcatgaggggttcctcccctccagctccctgtgcccccagggtcctgggaggagagacactggtggggataggccagccgcgcatcagactgtgaaccccacgaaggagcccattgtggcctaagaggctgccctcctgtgctcagccctgaggacagatgcctccttcctcttttccttcccaaagcaagcaagaggccgtggctgctgtgggaaatggtactgtacagctggctctacttccccatggccctgagcgagtggagtctgccacccaggatccccaaggcacttgagggggaaggattctgctggcctctgcgagtggtttcttgtgcactggcaccaagtgcgggtccggcagcttctgccccctgcagaaccggagagccagctaaggggtggggctgcgggggttccgtgtccacccccatacatttatttctgtaaataatgtgcactgaataaattgtacagccggcaaa

SEQ ID NO: 410413 - DNA, 1882 bp, Homo sapiens
aatcgagtcggccccttttgtggtctcctccaatgagcgcctgcggatggagcccggctaccccaagtccatcctgcgggacttcatgggctgccaggagcacgtggagccaggcccccgatggcccgacgtggcccggccgcccttcaacccccacgggggtgcagagcccggggcggacagcgcagagggcgacgtgggggatggggatggggactttggggccggggtcaacaaggacgggggcagccgcgtggtggtgcagatggaggaggtggcacggacggtgaacgtggtgatggtgctggtgccactgctgctgctgctctgcgtcctgggcctcacctacgcgctggtgcagatgcagcgcaagggtgcgccacgtgtcctgctttactgcaagcgctcgctgcaggagtgggtctgaccacccagcgctcctgctaacggtgctcagggggcgcctgtggttctgagatggctcccaggggctccctccgcccccaggtaggggcccctctcagccctcacacaccctgtctgccccgccctcattatttatgtccaggtgtttgttttgttttgtttttggcaccttacttgaccatttgtttctgtttccccgactggggcagggtgtttagaattttctaaatgtagttctgctccagacagggaattaggcccccatcatcctctggcttggccacagccaggggagcagaggggcagaggcccacattggaagagcagcacctcctcagcctgaaccccagggctgtaactgccaggctctctttgcccagttggagactgtctggcccccctggtcccctccttcccaagtgagtctctctgggccttaggaagagccttccacccaggggcagccccaggccaaaggggacctggaagggaggtgggccgtggcccttgagtccccattgaggcttggttccttcccaatccagtggacttcgcagtccacttctgacagcctcagtgaccctggctccttgtgccagagaacccagcccacccccggcagcagcccccagctcccacctccccttgggcccacaccttcttccctctctggagaaagggccctgggcctgcctcaccacggaccaaagggagtctgccagggcccctctccccagggaagcagcagcctcgcccctggcagagatgcctccctgagctagaaccctctgttccttccctgtgcctcctccctccctctccgactcacaccactagcctcaggggtctgagctccagctcctttgggcttcagctgccagtgtcctgagccccagggagagggggctggtgggtgcctaggcctgggcagtggatggccgtgaatgggtgcccacagtgtcaggcactgggcatgaggggttcctcccctccagctccctgtgcccccagggtcctgggaggagagacactggtggggataggccagccgcgcatcagactgtgaaccccacgaaggagcccattgtggcctaagaggctgccctcctgtgctcagccctgaggacagatgcctccttcctcttttccttcccaaagcaagcaagaggccgtggctgctgtgggaaatggtactgtacagctggctctacttccccatggccctgagcgagtggagtctgccacccaggatccccaaggcacttgagggggaaggattctgctggcctctgcgagtggtttcttgtgcactggcaccaagtgcgggtccggcagcttctgccccctgcagaaccggagagccagctaaggggtggggctgcgggggttccgtgtccacccccatacatttatttctgtaaataatgtgcactgaataaattgtacagccggcaaa

SEQ ID NO: 410414 - DNA, 475 bp, Homo sapiens
cttctgggctgcctgggccttggcgtagcggccgaagacgcggaggtccatgccgaggtaagacccccgccctgccctttggctgcgggctgggggcttggagggagaggcgccacgtccgcaggctgggacttggaggtggagggagcggagacgcgccccctgttctgggccgtggcggggaagcaagcggacttggcagtctgcccctccccagctcgccctctgcagcgcacctcttcgcaaacccttgagggcgcagggcctcgctctcctccccgctactcctacagccctgttctgggcactgagcccccaccccgacccccttacattcagcctgtgtcccgggagccgcttccgccgcccccagcccttgcctcccctccttccttccctccagggcagccgattcctcgagagcccggctggcgcgcagtggcgctctttgcgagtggggagggggctgctctcg

SEQ ID NO: 410415 - DNA, 1725 bp, Homo sapiens
gagcggactcttcgtttcagccctggcgcggtcctgtggtgaactccttgtctctatggcgactggacgcggtcggatcttgcagcagcactggctcggcctccagacgctgcgcgggcccagcaggggcggtggcgcggcccgggggcgcgccaggcctttgggtgcagaaaggggccaggggtcaagctttctgcaggctctgctgccctgaggtgccatgccggaggtggacagcactgggagagctctttctcctgctgttctgggttcctggatggaatgccttcagaaatcttgctgaagatattttcctacttggatgctgtgagccttctgtgtactggatgtgtgagcaggcgcttttatcatctagccaatgacaattttatttggatcggaatctactcaactgctttttcacctgcaagatcaaattggaaatttaattcagtagagaagatagctatgtctatgagctttctgtcagttcaggataaagaagctggttattggaagaaagaatatatcacaaaacaaatagcatctgtaaaagccgcactagctgacattctcaaacctgtcaacccttacacaggccttccagttaagaccaaagaggccctcagaatatttggtttaggttgggcaattatactgaaagaaaaaggtggaaaagaatatatcatggagcatgttgatctttccataaatgacacatcagttactgttatatggtatggcaaaaaatggccatgcctagcatcattgtcaaccttagatttatgtggcatgacaccagtttttaccgactggtataaaactcccaccaaacatagactccgatggcattctttaattgcaaagtacaatctgagtcattgaccatatctaccatgattggctgtgacagactcattcggatcttctgcctgcaccctggcctcctggtgggagtgtggaagaaggaggaagaactggcttttgttatggcaaatcttcattttcatcaccttgtggagaggagcacattaggctcggctactatcccctatgaactgcctccacatagcccctttttggatgatagccccgagtatggactgcacggctaccaactccatgttgatctgcacagcggtggggttttctacctatgtggtacatttcgcaatctcttcaccaagagaggaaatattgaaaatggacatgtgaagctcattgttatacatttaaaaaataacagagaacacctacctcttattggaaaagttggcctctcgtggaaaactgatatttttgatggctgtataaagagttgttccatgatggacgtaactcttttggatgaacatgggaaacccttttggtgtttcagttccccggtgtgcctgagatcgcctgccacaccctctgacagctctagcttcttgggacagacatacaacgtggactacgttgatgcggaaggaagagtgcacgtggagctggtgtggatcagagagaccgaagaataccttattgtcaacctggtcctttatcttagtatcgcaaaaatcaaccattggtttgggactgaatattagcagtaggtggcaaattattgttgttatttagttgtttatttttgactggctttgttcttggtgttgaaaattaaaataaagcagatgcggccgaaaatatatattttgagactcgtatccgtgcgtaagacgaataaca

SEQ ID NO: 410416 - DNA, 1721 bp, Homo sapiens
gagcggactcttcgtttcagccctggcgcggtcctgtggtgaactccttgtctctatggcgactggacgcggtcggatcttgcagcagcactggctcggcctccagacgctgcgcgggcccagcaggggcggtggcgcggcccgggggcgcgccaggcctttgggtgcagaaaggggccaggggtcaagctttctgcaggctctgctgccctgaggtgccatgccggaggtggacagcactgggagagctctttctcctgctgttctgggttcctggatggaatgccttcagaaatcttgctgaagatattttcctacttggatgctgtgagccttctgtgtactggatgtgtgagcaggcgcttttatcatctagccaatgacaattttatttggatcggaatctactcaactgctttttcacctgcaagatcaaattggaaatttaattcagtagagaagatagctatgtctatgagctttctgtcagttcaggataaagaagctggttattggaagaaagaatatatcacaaaacaaatagcatctgtaaaagccgcactagctgacattctcaaacctgtcaacccttacacaggccttccagttaagaccaaagaggccctcagaatatttggtttaggttgggcaattatactgaaagaaaaaggtggaaaagaatatatcatggagcatgttgatctttccataaatgacacatcagttactgttatatggtatggcaaaaaatggccatgcctagcatcattgtcaaccttagatttatgtggcatgacaccagtttttaccgactggtataaaactcccaccaaacatagactccgatggcattctttaattgcaaagtacaatctgagtcattgaccatatctaccatgattggctgtgacagactcattcggatcttctgcctgcaccctggcctcctggtgggagtgtggaagaaggaggaagaactggcttttgttatggcaaatcttcattttcatcaccttgtggagaggagcacattaggctcggctactatcccctatgaactgcctccacatagcccctttttggatgatagccccgagtatggactgcacggctaccaactccatgttgatctgcacagcggtggggttttctacctatgtggtacatttcgcaatctcttcaccaagagaggaaatattgaaaatggacatgtgaagctcattgttatacatttaaaaaataacagagaacacctacctcttattggaaaagttggcctctcgtggaaaactgatatttttgatggctgtataaagagttgttccatgatggacgtaactcttttggatgaacatgggaaacccttttggtgtttcagttccccggtgtgcctgagatcgcctgccacaccctctgacagctctagcttcttgggacagacatacaacgtggactacgttgatgcggaaggaagagtgcacgtggagctggtgtggatcagagagaccgaagaataccttattgtcaacctggtcctttatcttagtatcgcaaaaatcaaccattggtttgggactgaatattagcagtaggtggcaaattattgttgttatttagttgtttatttttgactggctttgttcttggtgttgaaaattaaaataaagcaccgatgcggcagaccgaaacataaacatgataataaaaaacgatatactgta

SEQ ID NO: 410417 - DNA, 1727 bp, Homo sapiens
gagcggactcttcgtttcagccctggcgcggtcctgtggtgaactccttgtctctatggcgactggacgcggtcggatcttgcagcagcactggctcggcctccagacgctgcgcgggcccagcaggggcggtggcgcggcccgggggcgcgccaggcctttgggtgcagaaaggggccaggggtcaagctttctgcaggctctgctgccctgaggtgccatgccggaggtggacagcactgggagagctctttctcctgctgttctgggttcctggatggaatgccttcagaaatcttgctgaagatattttcctacttggatgctgtgagccttctgtgtactggatgtgtgagcaggcgcttttatcatctagccaatgacaattttatttggatcggaatctactcaactgctttttcacctgcaagatcaaattggaaatttaattcagtagagaagatagctatgtctatgagctttctgtcagttcaggataaagaagctggttattggaagaaagaatatatcacaaaacaaatagcatctgtaaaagccgcactagctgacattctcaaacctgtcaacccttacacaggccttccagttaagaccaaagaggccctcagaatatttggtttaggttgggcaattatactgaaagaaaaaggtggaaaagaatatatcatggagcatgttgatctttccataaatgacacatcagttactgttatatggtatggcaaaaaatggccatgcctagcatcattgtcaaccttagatttatgtggcatgacaccagtttttaccgactggtataaaactcccaccaaacatagactccgatggcattctttaattgcaaagtacaatctgagtcattgaccatatctaccatgattggctgtgacagactcattcggatcttctgcctgcaccctggcctcctggtgggagtgtggaagaaggaggaagaactggcttttgttatggcaaatcttcattttcatcaccttgtggagaggagcacattaggctcggctactatcccctatgaactgcctccacatagcccctttttggatgatagccccgagtatggactgcacggctaccaactccatgttgatctgcacagcggtggggttttctacctatgtggtacatttcgcaatctcttcaccaagagaggaaatattgaaaatggacatgtgaagctcattgttatacatttaaaaaataacagagaacacctacctcttattggaaaagttggcctctcgtggaaaactgatatttttgatggctgtataaagagttgttccatgatggacgtaactcttttggatgaacatgggaaacccttttggtgtttcagttccccggtgtgcctgagatcgcctgccacaccctctgacagctctagcttcttgggacagacatacaacgtggactacgttgatgcggaaggaagagtgcacgtggagctggtgtggatcagagagaccgaagaataccttattgtcaacctggtcctttatcttagtatcgcaaaaatcaaccattggtttgggactgaatattagcagtaggtggcaaattattgttgttatttagttgtttatttttgactggctttgttcttggtgttgaaaattaaaataaagcataagatgcgcgcagtttttattttgataaaaatgatggaagggagggaaaattagggg

SEQ ID NO: 410418 - DNA, 1727 bp, Homo sapiens
gagcggactcttcgtttcagccctggcgcggtcctgtggtgaactccttgtctctatggcgactggacgcggtcggatcttgcagcagcactggctcggcctccagacgctgcgcgggcccagcaggggcggtggcgcggcccgggggcgcgccaggcctttgggtgcagaaaggggccaggggtcaagctttctgcaggctctgctgccctgaggtgccatgccggaggtggacagcactgggagagctctttctcctgctgttctgggttcctggatggaatgccttcagaaatcttgctgaagatattttcctacttggatgctgtgagccttctgtgtactggatgtgtgagcaggcgcttttatcatctagccaatgacaattttatttggatcggaatctactcaactgctttttcacctgcaagatcaaattggaaatttaattcagtagagaagatagctatgtctatgagctttctgtcagttcaggataaagaagctggttattggaagaaagaatatatcacaaaacaaatagcatctgtaaaagccgcactagctgacattctcaaacctgtcaacccttacacaggccttccagttaagaccaaagaggccctcagaatatttggtttaggttgggcaattatactgaaagaaaaaggtggaaaagaatatatcatggagcatgttgatctttccataaatgacacatcagttactgttatatggtatggcaaaaaatggccatgcctagcatcattgtcaaccttagatttatgtggcatgacaccagtttttaccgactggtataaaactcccaccaaacatagactccgatggcattctttaattgcaaagtacaatctgagtcattgaccatatctaccatgattggctgtgacagactcattcggatcttctgcctgcaccctggcctcctggtgggagtgtggaagaaggaggaagaactggcttttgttatggcaaatcttcattttcatcaccttgtggagaggagcacattaggctcggctactatcccctatgaactgcctccacatagcccctttttggatgatagccccgagtatggactgcacggctaccaactccatgttgatctgcacagcggtggggttttctacctatgtggtacatttcgcaatctcttcaccaagagaggaaatattgaaaatggacatgtgaagctcattgttatacatttaaaaaataacagagaacacctacctcttattggaaaagttggcctctcgtggaaaactgatatttttgatggctgtataaagagttgttccatgatggacgtaactcttttggatgaacatgggaaacccttttggtgtttcagttccccggtgtgcctgagatcgcctgccacaccctctgacagctctagcttcttgggacagacatacaacgtggactacgttgatgcggaaggaagagtgcacgtggagctggtgtggatcagagagaccgaagaataccttattgtcaacctggtcctttatcttagtatcgcaaaaatcaaccattggtttgggactgaatattagcagtaggtggcaaattattgttgttatttagttgtttatttttgactggctttgttcttggtgttgaaaattaaaataaagcagagatgcggccggaaatttttatattgtataatttcgggaatatttcgaaaaaataaa

SEQ ID NO: 410419 - DNA, 1854 bp, Homo sapiens
gagcggactcttcgtttcagccctggcgcggtcctgtggtgaactccttgtctctatggcgactggacgcggtcggatcttgcagcagcactggctcggcctccagacgctgcgcgggcccagcaggggcggtggcgcggcccgggggcgcgccaggcctttgggtgcaggtgactgtagggcctgcgggtggggtcccctggcgggaagcccgtcactgcgcggccccgctctcttcaccgtgtattttattcgtccagcttggcgcaaggcccgtggccgtcttcaacgtgagaaggaaaggggccaggggtcaagctttctgcaggctctgctgccctgaggtgccatgccggaggtggacagcactgggagagctctttctcctgctgttctgggttcctggatggaatgccttcagaaatcttgctgaagatattttcctacttggatgctgtgagccttctgtgtactggatgtgtgagcaggcgcttttatcatctagccaatgacaattttatttggatcggaatctactcaactgctttttcacctgcaagatcaaattggaaatttaattcagtagagaagatagctatgtctatgagctttctgtcagttcaggataaagaagctggttattggaagaaagaatatatcacaaaacaaatagcatctgtaaaagccgcactagctgacattctcaaacctgtcaacccttacacaggccttccagttaagaccaaagaggccctcagaatatttggtttaggttgggcaattatactgaaagaaaaaggtggaaaagaatatatcatggagcatgttgatctttccataaatgacacatcagttactgttatatggtatggcaaaaaatggccatgcctagcatcattgtcaaccttagatttatgtggcatgacaccagtttttaccgactggtataaaactcccaccaaacatagactccgatggcattctttaattgcaaagtacaatctgagtcattgaccatatctaccatgattggctgtgacagactcattcggatcttctgcctgcaccctggcctcctggtgggagtgtggaagaaggaggaagaactggcttttgttatggcaaatcttcattttcatcaccttgtggagaggagcacattaggctcggctactatcccctatgaactgcctccacatagcccctttttggatgatagccccgagtatggactgcacggctaccaactccatgttgatctgcacagcggtggggttttctacctatgtggtacatttcgcaatctcttcaccaagagaggaaatattgaaaatggacatgtgaagctcattgttatacatttaaaaaataacagagaacacctacctcttattggaaaagttggcctctcgtggaaaactgatatttttgatggctgtataaagagttgttccatgatggacgtaactcttttggatgaacatgggaaacccttttggtgtttcagttccccggtgtgcctgagatcgcctgccacaccctctgacagctctagcttcttgggacagacatacaacgtggactacgttgatgcggaaggaagagtgcacgtggagctggtgtggatcagagagaccgaagaataccttattgtcaacctggtcctttatcttagtatcgcaaaaatcaaccattggtttgggactgaatattagcagtaggtggcaaattattgttgttatttagttgtttatttttgactggctttgttcttggtgttgaaaattaaaataaagcagatgcggccgaaaatatatattttgagactcgtatccgtgcgtaagacgaataaca

SEQ ID NO: 410420 - DNA, 1368 bp, Homo sapiens
gagcggactcttcgtttcagccctggcgcggtcctgtggtgaactccttgtctctatggcgactggacgcggtcggatcttgcagcagcactggctcggcctccagacgctgcgcgggcccagcaggggcggtggcgcggcccgggggcgcgccaggcctttgggtgcaggtgactgtagggcctgcgggtggggtcccctggcgggaagcccgtcactgcgcggccccgctctcttcaccgtgtattttattcgtccagcttggcgcaaggcccgtggccgtcttcaacgtgagaaggaaaggggccaggggtcaagctttctgcaggctctgctgccctgaggtgccatgccggaggtggacagcactgggagagctctttctcctgctgttctgggttcctggatggaatgccttcagaaatcttgctgaagatattttcctacttggatgctgtgagccttctgtgtactggatgtgtgagcaggcgcttttatcatctagccaatgacaaatgaacgttcaactgtaaatattcagcttggcttattcatggaattggattatttgaaaatatgcatctctaatttgatatattatgactaagaaggaggaagaactggcttttgttatggcaaatcttcattttcatcaccttgtggagaggagcacattaggctcggctactatcccctatgaactgcctccacatagcccctttttggatgatagccccgagtatggactgcacggctaccaactccatgttgatctgcacagcggtggggttttctacctatgtggtacatttcgcaatctcttcaccaagagaggaaatattgaaaatggacatgtgaagctcattgttatacatttaaaaaataacagagaacacctacctcttattggaaaagttggcctctcgtggaaaactgatatttttgatggctgtataaagagttgttccatgatggacgtaactcttttggatgaacatgggaaacccttttggtgtttcagttccccggtgtgcctgagatcgcctgccacaccctctgacagctctagcttcttgggacagacatacaacgtggactacgttgatgcggaaggaagagtgcacgtggagctggtgtggatcagagagaccgaagaataccttattgtcaacctggtcctttatcttagtatcgcaaaaatcaaccattggtttgggactgaatattagcagtaggtggcaaattattgttgttatttagttgtttatttttgactggctttgttcttggtgttgaaaattaaaataaagcagatgcggccgaaaatatatattttgagactcgtatccgtgcgtaagacgaataaca

SEQ ID NO: 410421 - DNA, 1904 bp, Homo sapiens
gagcggactcttcgtttcagccctggcgcggtcctgtggtgaactccttgtctctatggcgactggacgcggtcggatcttgcagcagcactggctcggcctccagacgctgcgcgggcccagcaggggcggtggcgcggcccgggggcgcgccaggcctttgggtgcaggtgactgtagggcctgcgggtggggtcccctggcgggaagcccgtcactgcgcggccccgctctcttcaccgtgtattttattcgtccagcttggcgcaaggcccgtggccgtcttcaacgtgagaaggcctacagtgagagtgtatatttctaaacctttgggtgaaagcacatcagaaaaggggccaggggtcaagctttctgcaggctctgctgccctgaggtgccatgccggaggtggacagcactgggagagctctttctcctgctgttctgggttcctggatggaatgccttcagaaatcttgctgaagatattttcctacttggatgctgtgagccttctgtgtactggatgtgtgagcaggcgcttttatcatctagccaatgacaattttatttggatcggaatctactcaactgctttttcacctgcaagatcaaattggaaatttaattcagtagagaagatagctatgtctatgagctttctgtcagttcaggataaagaagctggttattggaagaaagaatatatcacaaaacaaatagcatctgtaaaagccgcactagctgacattctcaaacctgtcaacccttacacaggccttccagttaagaccaaagaggccctcagaatatttggtttaggttgggcaattatactgaaagaaaaaggtggaaaagaatatatcatggagcatgttgatctttccataaatgacacatcagttactgttatatggtatggcaaaaaatggccatgcctagcatcattgtcaaccttagatttatgtggcatgacaccagtttttaccgactggtataaaactcccaccaaacatagactccgatggcattctttaattgcaaagtacaatctgagtcattgaccatatctaccatgattggctgtgacagactcattcggatcttctgcctgcaccctggcctcctggtgggagtgtggaagaaggaggaagaactggcttttgttatggcaaatcttcattttcatcaccttgtggagaggagcacattaggctcggctactatcccctatgaactgcctccacatagcccctttttggatgatagccccgagtatggactgcacggctaccaactccatgttgatctgcacagcggtggggttttctacctatgtggtacatttcgcaatctcttcaccaagagaggaaatattgaaaatggacatgtgaagctcattgttatacatttaaaaaataacagagaacacctacctcttattggaaaagttggcctctcgtggaaaactgatatttttgatggctgtataaagagttgttccatgatggacgtaactcttttggatgaacatgggaaacccttttggtgtttcagttccccggtgtgcctgagatcgcctgccacaccctctgacagctctagcttcttgggacagacatacaacgtggactacgttgatgcggaaggaagagtgcacgtggagctggtgtggatcagagagaccgaagaataccttattgtcaacctggtcctttatcttagtatcgcaaaaatcaaccattggtttgggactgaatattagcagtaggtggcaaattattgttgttatttagttgtttatttttgactggctttgttcttggtgttgaaaattaaaataaagcagatgcggccgaaaatatatattttgagactcgtatccgtgcgtaagacgaataaca

SEQ ID NO: 410422 - DNA, 1965 bp, Homo sapiens
gagcggactcttcgtttcagccctggcgcggtcctgtggtgaactccttgtctctatggcgactggacgcggtcggatcttgcagcagcactggctcggcctccagacgctgcgcgggcccagcaggggcggtggcgcggcccgggggcgcgccaggcctttgggtgcagaaaggggccaggggtcaagctttctgcaggctctgctgccctgaggtgccatgccggaggtggacagcactgggagagctctttctcctgctgttctgggttcctggatggaatgccttcagaaatcttgctgaagatattttcctacttggatgctgtgagccttctgtgtactggatgtgtgagcaggcgcttttatcatctagccaatgacaattttatttggatcggaatctactcaactgctttttcacctgcaagatcaaattggaaatttaattcagtagagaagatagctatgtctatgagctttctgtcagttcaggataaagaagctggttattggaagaaagaatatatcacaaaacaaatagcatctgtaaaagccgcactagctgacattctcaaacctgtcaacccttacacaggccttccagttaagaccaaagaggccctcagaatatttggtttaggttgggcaattatactgaaagaaaaaggtggaaaagaatatatcatggagcatgttgatctttccataaatgacacatcagttactgttatatggtatggcaaaaaatggccatgcctagcatcattgtcaaccttagatttatgtggcatgacaccagtttttaccgactggtataaaactcccaccaaacatagactccgatggcattctttaattgcaaagtacaatctgagtcattgaccatatctaccatgattggctgtgacagactcattcggatcttctgcctgcaccctggcctcctggtgggagtgtggaagaaggaggaagaactggcttttgttatggcaaatcttcattttcatcaccttgtggagaggagcacattaggctcggctactatcccctatgaactgcctccacatagcccctttttggatgatagccccgagtatggactgcacggctaccaactccatgttgatctgcacagcggtggggttttctacctatgtggtacatttcgcaatctcttcaccaagagaggtgaaattgattgagtttttatttcattatgaaattaaaggttgaggtgagggaaccaattttgatgtccgagttaagaattgccctcactggtcactttataatcttttggcaccagtatcctcccagacccgtgtgtcatcccagggcttgtgaaagtcctcactggaccgagtctcttcagaactggctctgtctccttcaccaccatcactctcaatgccaccttctgggggtagcccctactcatcttctctactgatgcttccttattatttttccatgctctctgctttccccagacttcttcccttctttcttaaaggaatgtggtaaatttgccagcagggcccgtgccgctccaggatgagagtaaagagaaaccagcctttctcctctacgtactgcatcactgtttgccacacctaccaaagccaggacagaggctggggcagacagaggaaaggagggagcttacgccaagcaggaaaaacgagggagtggagaatgccccattctcacttatctgattatttccttttggtttcattctactgtagcctgtaaacttggagtttcatgtaaggacttgcttagattcaagtttaacatttctggtaaaaatattttaaaagggaagttatgtacttcattttgcattatattgagaggtatataatgtcaggttgtcccattattagtaatgcctggttttatcatctggttaagatggtgaccactagatatcttcattattaaaagtattcttttcca

SEQ ID NO: 410423 - DNA, 454 bp, Homo sapiens
atttagccacttcttaaatagcacatcaggaaggaggtgcgccaatatccaatacctgtgtgttgtatgttgcttaaagcagaagcttccaaacctttcctagagaaatagtgtaaccattcatggctctccgggtgtgctgctgcctagacatggaggctgtgagctgtatgattttctggtgtttcagattccctcaagagtgcacgtggagctggtgtggatcagagagaccgaagaataccttattgtcaacctggtcctttatcttagtatcgcaaaaatcaaccattggtttgggactgaatattagcagtaggtggcaaattattgttgttatttagttgtttatttttgactggctttgttcttggtgttgaaaattaaaataaagcagagatgcggccggaaatttttatattgtataatttcgggaatatttcgaaaaaataaa

SEQ ID NO: 410424 - DNA, 351 bp, Homo sapiens
cctgcagccctggaggtggacatggggctccggcctgaagaagctcagtggcagaggttgtgcttcccaaggagtccagacctcccattcctggctgtctccactccactgtagtgcctctcttcaccctgactcttcttcccctgcagcctcaggtcagcctgtctccctgaagaatatctccacagacacatcgggttactacatctgtacctccagcaatgaggaggggacgcagttctgcaacatcacggtggccgtcagatctcgtaagagcagcctgcggggggagggctgacaaacgccacaggataactggtgggggtccagaaagtcagctgagaccaccgt

SEQ ID NO: 410425 - DNA, 430 bp, Homo sapiens
atcagctgaccatggctgacaacggcacctacgagtgttctgtctcgctgatgtcagacctggagggcaacaccaagtcacgtgtccgcctgttggtcctcggtgagtgtcttcatgtctttcaggagttgtaggaagagggtgggcaggtggcagcacagggagaagagcccaggtgttgagacgaagccagaggcagcaacaaggagctaagactcctcacctcgtccaggctgtcttcagcagagggaccgctcctccctttggaactaaacactattctgagttctccgccaatggccaacagtctcgaggacagagaaggccgacttggagtggtcccttgctctgtcggtgtcctttcctccataccagctcctctttttcataccacacttattacaaagataaaggaaaatcttaaatccta

SEQ ID NO: 410426 - DNA, 2807 bp, Homo sapiens
ctacccctttgtgagcagtctaggactttgtacacctgttaagtagggagaaggcaggggaggtggctggtttaaggggaacttgagggaagtagggaagactcctcttgggacctttggagtaggtgacacatgagcccagccccagctcacctgccaatccagctgaggagctcacctgccaatccagctgaggctgggcagaggtgggtgagaagagggaaaattgcagggacctccagttgggccaggccagaagctgctgtagctttaaccagacagctcagacctgtctggaggctgccagtgacaggttaggtttagggcagagaagaagcaagaccatggtggggaagatgtggcctgtgttgtggacactctgtgcagtcagggtgaccgtcgatgccatctctgtggaaactccgcaggacgttcttcgggcttcgcagggaaagagtgtcaccctgccctgcacctaccacacttccacctccagtcgagagggacttattcaatgggataagctcctcctcactcatacggaaagggtggtcatctggccgttttcaaacaaaaactacatccatggtgagctttataagaatcgcgtcagcatatccaacaatgctgagcagtccgatgcctccatcaccattgatcagctgaccatggctgacaacggcacctacgagtgttctgtctcgctgatgtcagacctggagggcaacaccaagtcacgtgtccgcctgttggtcctcgtgccaccctccaaaccagaatgcggcatcgagggagagaccataattgggaacaacatccagctgacctgccaatcaaaggagggctcaccaacccctcagtacagctggaagaggtacaacatcctgaatcaggagcagcccctggcccagccagcctcaggtcagcctgtctccctgaagaatatctccacagacacatcgggttactacatctgtacctccagcaatgaggaggggacgcagttctgcaacatcacggtggccgtcagatctccctccatgaacgtggccctgtatgtgggcatcgcggtgggcgtggttgcagccctcattatcattggcatcatcatctactgctgctgctgccgagggaaggacgacaacactgaagacaaggaggatgcaaggccgaaccgggaagcctatgaggagccaccagagcagctaagagaactttccagagagagggaggaggaggatgactacaggcaagaagagcagaggagcactgggcgtgaatccccggaccacctcgaccagtgacaggccagcagcagagggcggcggaggaagggttaggggttcattctcccgcttcctggcctcccttctcctttctaagccctgttctcctgtccctccatcccagacattgatggggacatttcttccccagtgtcagctgtggggaacatggctggcctggtaagggggtccctgtgctgatcctgctgacctcactgtcctgtgaagtaacccctcctggctgtgacacctggtgcgggcctggccctcactcaagaccaggctgcagcctccacttccctcgtagttggcaggagctcctggaagcacagcgctgagcatggggcgctcccactcagaactctccagggaggcgatgccagccttggggggtgggggctgtcctgctcacctgtgtgcccagcacctggaggggcaccaggtggagggtttgcactccacacatctttcttgaatgaatgaaagaataagtgagtatgcttgggccctgcattggcctggcctccagctcccactccctttccaacctcacttcccgtagctgccagtatgttccaaaccctcctgggaaggccacctcccactcctgctgcacaggccctggggagcttttgcccacacactttccatctctgcctgtcaatatcgtacctgtccctccaggcccatctcaaatcacaaggatttctctaaccctatcctaattgtccacatacgtggaaacaatcctgttactctgtcccacgtccaatcatgggccacaaggcacagtcttctgagcgagtgctctcactgtattagagcgccagctccttggggcagggcctgggcctcatggcttttgctttccctgaagccctagtagctggcgcccatcctagtgggcacttaagcttaattggggaaactgctttgattggttgtgccttcccttctctggtctccttgagatgatcgtagacacagggatgattcccacccaaacccacgtattcattcagtgagttaaacacgaattgatttaaagtgaacacacacaagggagcttgcttgcagatggtctgagttcttgtgtcctggtaattcctctccaggccagaataattggcatgtctcctcaacccacatggggttcctggttgttcctgcatcccgatacctcagccctggccctgcccagcccatttgggctctggttttctggtggggctgtcctgctgccctcccacagcctccttctgtttgtcgagcatttcttctactcttgagagctcaggcagcgttagggctgcttaggtctcatggaccagtggctggtctcacccaactgcagtttactattgctatcttttctggatgatcagaaaaataattccataaatctattgtctacttgcgattttttaaaaaatgtatatttttatatatattgttaaatcctttgcttcattccaaatgctttcagtaataataaaattgtgggtggaaattcttaaaact

SEQ ID NO: 410427 - DNA, 231 bp, Homo sapiens
actctgcggctccagtccttggaggtgtgtccttcgcccacattggggtcgtttgtctgtcttcctgcacttttcccggctgtgaactggattgatggggccagtctcctcctcccctgtcctggggtcattctccacattccttccagcccacctgtcctttccgtagccctctttggacctttacaaccacagatggtagcaccagcctgatgagccacagtcaggaga

SEQ ID NO: 410428 - DNA, 686 bp, Homo sapiens
cggggagggcggcttttgccggcttccggagaagggaggaaagagagaggtttacctaacactgtaaagagaacgttcaatgaaatacaaagaaaaagatgatttttttgctccaagagaattattccagccttggggtggagtgggtgtggacagtgagcagaaaaacaagaaaccaagttctgggaggaaataaaatgaatataatcagtggaaaattcagcaacgcaatattgtgtgacaacagtaaatgaccaatttataatttaaattctatgaaaaagagatttagaagagagttctaccaaacccactgttccctagggaataaaatgagtaacgctgactggcaacagtgcatcctgagggagcctggagaaacaacagcagcctccgacctcaagatatcctggttagctgcaaagtctgttatatattcattcaaatatttattaagcaccttactgtgtgctgggaactcttaagtgctagggattatgaacaaaacatatttacatggagcttacaatctaagtaaggggaagacaagtaaatacatgtcagatagtgaaatggtagagaaaagaaaaaacggtggtcagggaaagccttactgacatttgagctagtactgaaggaagtgaggaagaaggctaagcagctaccttggaggaggaattttccag

SEQ ID NO: 410429 - DNA, 828 bp, Homo sapiens
gcggccgcctcactcccggaggaacccgacggcggtggcggtccggacgacttgctgccgctcccgctgtggctggtggccgagggcatcttcagaccgcaaggagagagaagaaaaagcgggaggaaggacaagagcggccagtcaggagacggacggggcgagacgcgggacaaaacgcgcagcgagcggtttacctaacactgtaaagagaacgttcaatgaaatacaaagaaaaagatgatttttttgctccaagagaattattccagccttggggtggagtgggtgtggacagtgagcagaaaaacaagaaaccaagttctgggaggaaataaaatgaatataatcagtggaaaattcagcaacgcaatattgtgtgacaacagtaaatgaccaatttataatttaaattctatgaaaaagagatttagaagagagttctaccaaacccactgttccctagggaataaaatgagtaacgctgactggcaacagtgcatcctgagggagcctggagaaacaacagcagcctccgacctcaagatatcctggttagctgcaaagtctgttatatattcattcaaatatttattaagcaccttactgtgtgctgggaactcttaagtgctagggattatgaacaaaacatatttacatggagcttacaatctaagtaaggggaagacaagtaaatacatgtcagatagtgaaatggtagagaaaagaaaaaacggtggtcagggaaagccttactgacatttgagctagtactgaaggaagtgaggaagaaggctaagcagctaccttggaggaggaattttccag

SEQ ID NO: 410430 - DNA, 487 bp, Homo sapiens
gttctcttacaagaccaccaacattcttcaaacatcagtgaaataaaacaggaggagggtttcgagctctggatcctcagcctggaaatgtcacaatttaatcccaaaggtttgctgtgaagttgtaagcatgacagtgtgaaactcgacagattattcttgaattctttgtttgttttcgttgtgacccgactctcataaaatttatgttttcttccaaacccccagggtgtgtggtcatatgacttaaatagagaaaaacattgtcaaaacagtattgaggagttatcacttttacattgttttaattaaagaaaaagcctttctatccaggtctaataccatcatttttatgggcatgttaaagtatctaatctaatactgtagttagtagtagtatttagtatttttagtattattatagttttatctgtatcttaaagaaaaagtcaataaatatgaaaacagagtttgttttgggaatgta

SEQ ID NO: 410431 - DNA, 2331 bp, Homo sapiens
ctgcacagggagtttgtcttgtgcaaacaatttccaaggcagcgttttcttccctgcctgggagtgcagggctcagcgccttcactttggaactgactcagagacctaaagaagcccacctggccagcgggaaggggggccgccgccgcctcccggttttgggcagccctggccagctccctgtggccttggaggacttccaccgggcaggcgttcccatgatgccaggctaccaggcgcgggggattcctgcaggccggcgctgcttttcttagaaccccctttctagaaaagtacacctggaggttttgcttcaaagagaggagaggcagcagcatggcgagtgtcctgtcccgacgccttggaaagcggtccctcctgggagcccgggtgttgggacccagtgcctcggaggggccctcggctgccccaccctcggagccactgctagaaggggccgctccccagcctttcaccacctctgatgacaccccctgccaggagcagcccaaggaagtccttaaggctcccagcacctcgggccttcagcaggtggcctttcagcctgggcagaaggtttatgtgtggtacgggggtcaagagtgcacaggactggtggagcagcacagctggatggagggtcaggtgaccgtctggctgctggagcagaagctgcaggtctgctgcagggtggaggaggtgtggctggcagagctgcagggcccctgtccccaggcaccacccctggagcccggagcccaggccctggcctacaggcccgtctccaggaacatcgatgtcccaaagaggaagtcggacgcagtggaaatggatgagatgatggcggccatggtgctgacgtccctgtcctgcagccctgttgtacagagtcctcccgggaccgaggccaacttctctgcttcccgtgcggcctgcgacccatggaaggagagtggtgacatctcggacagcggcagcagcactaccagcggtcactggagtgggagcagtggtgtctccaccccctcgcccccccacccccaggccagccccaagtatttgggggatgcttttggttctccccaaactgatcatggctttgagaccgatcctgaccctttcctgctggacgaaccagctccacgaaaaagaaagaactctgtgaaggtgatgtacaagtgcctgtggccaaactgtggcaaagttctgcgctccattgtgggcatcaaacgacacgtcaaagccctccatctgggggacacagtggactctgatcagttcaagcgggaggaggatttctactacacagaggtgcagctgaaggaggaatctgctgctgctgctgctgctgctgccgcaggcaccccagtccctgggactcccacctccgagccagctcccacccccagcatgactggcctgcctctgtctgctcttccaccacctctgcacaaagcccagtcctccggcccagaacatcctggcccggagtcctccctgccctcaggggctctcagcaagtcagctcctgggtccttctggcacattcaggcagatcatgcataccaggctctgccatccttccagatcccagtctcaccacacatctacaccagtgtcagctgggctgctgccccctccgccgcctgctctctctctccggtccggagccggtcgctaagcttcagcgagccccagcagccagcacctgcgatgaaatctcatctgatcgtcacttctccaccccgggcccagagtggtgccaggaaagcccgaggggaggctaagaagtgccgcaaggtgtatggcatcgagcaccgggaccagtggtgcacggcctgccggtggaagaaggcctgccagcgctttctggactgagctgtgctgcaggttctactctgttcctggccctgccggcagccactgacaagaggccagtgtgtcaccagccctcagcagaaaccgaaagagaaagaacggaaacacggagtttgggctctgttggctaaggtgtaacacttaaagcaattttctcccattgtgcgaacattttattttttaaaaaaaagaaacaaaaatatttttccccctaaaataggagagagccaaaactgaccaaggctattcagcagtgaaccagtgaccaaagaattaattaccctccgtttcccacatccccactctctaggggattagcttgtgcgtgtcaaaagaaggaacagctcgttctgcttcctgctgagtcggtgaattctttgctttctaaactcttccagaaaggactgtgagcaagatgaatttacttttcttaaaaaaaaaaaaaaaaaaaaa

SEQ ID NO: 410432 - DNA, 2165 bp, Homo sapiens
gggcgggcggccggagcggagccgggccgcgggccgcgccgggagggcgggcagggccgcggccgctgcagcccggagctgagctagccgtccgagccgagccgtccgagccggggaagccgggcgcgtgctgccgctcgtggcgggccgaggagaggagaggcagcagcatggcgagtgtcctgtcccgacgccttggaaagcggtccctcctgggagcccgggtgttgggacccagtgcctcggaggggccctcggctgccccaccctcggagccactgctagaaggggccgctccccagcctttcaccacctctgatgacaccccctgccaggagcagcccaaggaagtccttaaggctcccagcacctcgggccttcagcaggtggcctttcagcctgggcagaaggtttatgtgtggtacgggggtcaagagtgcacaggactggtggagcagcacagctggatggagggtcaggtgaccgtctggctgctggagcagaagctgcaggtctgctgcagggtggaggaggtgtggctggcagagctgcagggcccctgtccccaggcaccacccctggagcccggagcccaggccctggcctacaggcccgtctccaggaacatcgatgtcccaaagaggaagtcggacgcagtggaaatggatgagatgatggcggccatggtgctgacgtccctgtcctgcagccctgttgtacagagtcctcccgggaccgaggccaacttctctgcttcccgtgcggcctgcgacccatggaaggagagtggtgacatctcggacagcggcagcagcactaccagcggtcactggagtgggagcagtggtgtctccaccccctcgcccccccacccccaggccagccccaagtatttgggggatgcttttggttctccccaaactgatcatggctttgagaccgatcctgaccctttcctgctggacgaaccagctccacgaaaaagaaagaactctgtgaaggtgatgtacaagtgcctgtggccaaactgtggcaaagttctgcgctccattgtgggcatcaaacgacacgtcaaagccctccatctgggggacacagtggactctgatcagttcaagcgggaggaggatttctactacacagaggtgcagctgaaggaggaatctgctgctgctgctgctgctgctgccgcaggcaccccagtccctgggactcccacctccgagccagctcccacccccagcatgactggcctgcctctgtctgctcttccaccacctctgcacaaagcccagtcctccggcccagaacatcctggcccggagtcctccctgccctcaggggctctcagcaagtcagctcctgggtccttctggcacattcaggcagatcatgcataccaggctctgccatccttccagatcccagtctcaccacacatctacaccagtgtcagctgggctgctgccccctccgccgcctgctctctctctccggtccggagccggtcgctaagcttcagcgagccccagcagccagcacctgcgatgaaatctcatctgatcgtcacttctccaccccgggcccagagtggtgccaggaaagcccgaggggaggctaagaagtgccgcaaggtgtatggcatcgagcaccgggaccagtggtgcacggcctgccggtggaagaaggcctgccagcgctttctggactgagctgtgctgcaggttctactctgttcctggccctgccggcagccactgacaagaggccagtgtgtcaccagccctcagcagaaaccgaaagagaaagaacggaaacacggagtttgggctctgttggctaaggtgtaacacttaaagcaattttctcccattgtgcgaacattttattttttaaaaaaaagaaacaaaaatatttttccccctaaaataggagagagccaaaactgaccaaggctattcagcagtgaaccagtgaccaaagaattaattaccctccgtttcccacatccccactctctaggggattagcttgtgcgtgtcaaaagaaggaacagctcgttctgcttcctgctgagtcggtgaattctttgctttctaaactcttccagaaaggactgtgagcaagatgaatttacttttcttaaaaaaaaaaaaaaaaaaaaa

SEQ ID NO: 410433 - DNA, 2087 bp, Homo sapiens
aggttcaagtgcgcatgtgcgcgaggagtcgctcgggcacttattgagcgccgactgtctacgggcggccgggggagaggagaggcagcagcatggcgagtgtcctgtcccgacgccttggaaagcggtccctcctgggagcccgggtgttgggacccagtgcctcggaggggccctcggctgccccaccctcggagccactgctagaaggggccgctccccagcctttcaccacctctgatgacaccccctgccaggagcagcccaaggaagtccttaaggctcccagcacctcgggccttcagcaggtggcctttcagcctgggcagaaggtttatgtgtggtacgggggtcaagagtgcacaggactggtggagcagcacagctggatggagggtcaggtgaccgtctggctgctggagcagaagctgcaggtctgctgcagggtggaggaggtgtggctggcagagctgcagggcccctgtccccaggcaccacccctggagcccggagcccaggccctggcctacaggcccgtctccaggaacatcgatgtcccaaagaggaagtcggacgcagtggaaatggatgagatgatggcggccatggtgctgacgtccctgtcctgcagccctgttgtacagagtcctcccgggaccgaggccaacttctctgcttcccgtgcggcctgcgacccatggaaggagagtggtgacatctcggacagcggcagcagcactaccagcggtcactggagtgggagcagtggtgtctccaccccctcgcccccccacccccaggccagccccaagtatttgggggatgcttttggttctccccaaactgatcatggctttgagaccgatcctgaccctttcctgctggacgaaccagctccacgaaaaagaaagaactctgtgaaggtgatgtacaagtgcctgtggccaaactgtggcaaagttctgcgctccattgtgggcatcaaacgacacgtcaaagccctccatctgggggacacagtggactctgatcagttcaagcgggaggaggatttctactacacagaggtgcagctgaaggaggaatctgctgctgctgctgctgctgctgccgcaggcaccccagtccctgggactcccacctccgagccagctcccacccccagcatgactggcctgcctctgtctgctcttccaccacctctgcacaaagcccagtcctccggcccagaacatcctggcccggagtcctccctgccctcaggggctctcagcaagtcagctcctgggtccttctggcacattcaggcagatcatgcataccaggctctgccatccttccagatcccagtctcaccacacatctacaccagtgtcagctgggctgctgccccctccgccgcctgctctctctctccggtccggagccggtcgctaagcttcagcgagccccagcagccagcacctgcgatgaaatctcatctgatcgtcacttctccaccccgggcccagagtggtgccaggaaagcccgaggggaggctaagaagtgccgcaaggtgtatggcatcgagcaccgggaccagtggtgcacggcctgccggtggaagaaggcctgccagcgctttctggactgagctgtgctgcaggttctactctgttcctggccctgccggcagccactgacaagaggccagtgtgtcaccagccctcagcagaaaccgaaagagaaagaacggaaacacggagtttgggctctgttggctaaggtgtaacacttaaagcaattttctcccattgtgcgaacattttattttttaaaaaaaagaaacaaaaatatttttccccctaaaataggagagagccaaaactgaccaaggctattcagcagtgaaccagtgaccaaagaattaattaccctccgtttcccacatccccactctctaggggattagcttgtgcgtgtcaaaagaaggaacagctcgttctgcttcctgctgagtcggtgaattctttgctttctaaactcttccagaaaggactgtgagcaagatgaatttacttttcttaaaaaaaaaaaaaaaaaaaaa

SEQ ID NO: 410434 - DNA, 1980 bp, Homo sapiens
  misc_feature (449)..(449): n is a, c, g, or t
cttctacaaggaaacaaaaggaaaccgaattcactgctcaataaatgtgggaattcctggagttatctacattggcagctgtcatgagtggttactaggaatctagctaaatccctaagtaactgggcgatggatttgggtgggggaattgtcacacctctgcttataagagaggatggagtcgtgtagttgggcttcccacgtgacgtctaggtcctagaattgtgttctgtggacagacagtccagcacgcatgttttgaatacttcctacgggccaagaattggactaagtaagactttcaggttgaagaaggcttagtccctgcccttgtggagggcatggttcagattgagagagaaatgaatatgtaactatggttaattataataaccagtcaaagtactaattactagaggcatgagaaggtgttgtaggtaccagagggnccaacctattttgcccttgtggatgagaaacttatcacagagggtgacatttaggatggtcttcgctgcatgtagtaggtactcaaggaacatgcagcttgctgtgtgctgatatttcttaaaattcttttgtgcctattttatcagtctgtgggccaatttgcaaattagttattaaaaggtattgctttcagtgagaaagctttatgaaatgggccagccctcctccttgttagaatgagtggccgcttagcgatttcatgtttggcccacttggagctgtggctgacctatggggcccagacatgtagctggtgttttcacaaatagccctgaacctggatacccatgagcacactactactctcaagcagttgctggaagatcccatatcttatcccagccatgccccctagacgcagaaggcttggggcctcttttggcacgtgccatggcatgttcttggtaggtgatccagttgagaagttaaatcttctgcggtgattaagtcatgaggctagcacgtagaccagcgctgagggaagggttccaggatgagattggagcctcgcaataaggagactactgcaaggcattggatgatactccagtgttgtcctcgagaaagccgagtgtgtcccagctctttctggtcattgcacttacgcagagatgcaccttctgctgctgtcatgaggctgtggggattgtgggcagactctgaacacttcctgagctagaatccgggctgcaccctcgtcttccgcaggctctgccatccttccagatcccagtctcaccacacatctacaccagtgtcagctgggctgctgccccctccgccgcctgctctctctctccggtccggagccggtcgctaagcttcagcgagccccagcagccagcacctgcgatgaaatctcatctgatcgtcacttctccaccccgggcccagagtggtgccaggaaagcccgaggggaggctaagaagtgccgcaaggtgtatggcatcgagcaccgggaccagtggtgcacggcctgccggtggaagaaggcctgccagcgctttctggactgagctgtgctgcaggttctactctgttcctggccctgccggcagccactgacaagaggccagtgtgtcaccagccctcagcagaaaccgaaagagaaagaacggaaacacggagtttgggctctgttggctaaggtgtaacacttaaagcaattttctcccattgtgcgaacattttattttttaaaaaaaagaaacaaaaatatttttccccctaaaataggagagagccaaaactgaccaaggctattcagcagtgaaccagtgaccaaagaattaattaccctccgtttcccacatccccactctctaggggattagcttgtgcgtgtcaaaagaaggaacagctcgttctgcttcctgctgagtcggtgaattctttgctttctaaactcttccagaaaggactgtgagcaagatgaatttacttttcttaaaaaaaaaaaaaaaaaaaaa

SEQ ID NO: 410435 - DNA, 2205 bp, Homo sapiens
gggcgggcggccggagcggagccgggccgcgggccgcgccgggagggcgggcagggccgcggccgctgcagcccggagctgagctagccgtccgagccgagccgtccgagccggggaagccgggcgcgtgctgccgctcgtggcgggccgaggtgatgggcagaggcttcagtgtccccttcgcctccgcaggagaggagaggcagcagcatggcgagtgtcctgtcccgacgccttggaaagcggtccctcctgggagcccgggtgttgggacccagtgcctcggaggggccctcggctgccccaccctcggagccactgctagaaggggccgctccccagcctttcaccacctctgatgacaccccctgccaggagcagcccaaggaagtccttaaggctcccagcacctcgggccttcagcaggtggcctttcagcctgggcagaaggtttatgtgtggtacgggggtcaagagtgcacaggactggtggagcagcacagctggatggagggtcaggtgaccgtctggctgctggagcagaagctgcaggtctgctgcagggtggaggaggtgtggctggcagagctgcagggcccctgtccccaggcaccacccctggagcccggagcccaggccctggcctacaggcccgtctccaggaacatcgatgtcccaaagaggaagtcggacgcagtggaaatggatgagatgatggcggccatggtgctgacgtccctgtcctgcagccctgttgtacagagtcctcccgggaccgaggccaacttctctgcttcccgtgcggcctgcgacccatggaaggagagtggtgacatctcggacagcggcagcagcactaccagcggtcactggagtgggagcagtggtgtctccaccccctcgcccccccacccccaggccagccccaagtatttgggggatgcttttggttctccccaaactgatcatggctttgagaccgatcctgaccctttcctgctggacgaaccagctccacgaaaaagaaagaactctgtgaaggtgatgtacaagtgcctgtggccaaactgtggcaaagttctgcgctccattgtgggcatcaaacgacacgtcaaagccctccatctgggggacacagtggactctgatcagttcaagcgggaggaggatttctactacacagaggtgcagctgaaggaggaatctgctgctgctgctgctgctgctgccgcaggcaccccagtccctgggactcccacctccgagccagctcccacccccagcatgactggcctgcctctgtctgctcttccaccacctctgcacaaagcccagtcctccggcccagaacatcctggcccggagtcctccctgccctcaggggctctcagcaagtcagctcctgggtccttctggcacattcaggcagatcatgcataccaggctctgccatccttccagatcccagtctcaccacacatctacaccagtgtcagctgggctgctgccccctccgccgcctgctctctctctccggtccggagccggtcgctaagcttcagcgagccccagcagccagcacctgcgatgaaatctcatctgatcgtcacttctccaccccgggcccagagtggtgccaggaaagcccgaggggaggctaagaagtgccgcaaggtgtatggcatcgagcaccgggaccagtggtgcacggcctgccggtggaagaaggcctgccagcgctttctggactgagctgtgctgcaggttctactctgttcctggccctgccggcagccactgacaagaggccagtgtgtcaccagccctcagcagaaaccgaaagagaaagaacggaaacacggagtttgggctctgttggctaaggtgtaacacttaaagcaattttctcccattgtgcgaacattttattttttaaaaaaaagaaacaaaaatatttttccccctaaaataggagagagccaaaactgaccaaggctattcagcagtgaaccagtgaccaaagaattaattaccctccgtttcccacatccccactctctaggggattagcttgtgcgtgtcaaaagaaggaacagctcgttctgcttcctgctgagtcggtgaattctttgctttctaaactcttccagaaaggactgtgagcaagatgaatttacttttcttaaaaaaaaaaaaaaaaaaaaa

SEQ ID NO: 410436 - DNA, 2077 bp, Homo sapiens
  misc_feature (43)..(43): n is a, c, g, or t
tcgggttctgtggacacaggcaggaagcttaagaggctctgcngagcagggacctggggaagaggagaggagaggcagcagcatggcgagtgtcctgtcccgacgccttggaaagcggtccctcctgggagcccgggtgttgggacccagtgcctcggaggggccctcggctgccccaccctcggagccactgctagaaggggccgctccccagcctttcaccacctctgatgacaccccctgccaggagcagcccaaggaagtccttaaggctcccagcacctcgggccttcagcaggtggcctttcagcctgggcagaaggtttatgtgtggtacgggggtcaagagtgcacaggactggtggagcagcacagctggatggagggtcaggtgaccgtctggctgctggagcagaagctgcaggtctgctgcagggtggaggaggtgtggctggcagagctgcagggcccctgtccccaggcaccacccctggagcccggagcccaggccctggcctacaggcccgtctccaggaacatcgatgtcccaaagaggaagtcggacgcagtggaaatggatgagatgatggcggccatggtgctgacgtccctgtcctgcagccctgttgtacagagtcctcccgggaccgaggccaacttctctgcttcccgtgcggcctgcgacccatggaaggagagtggtgacatctcggacagcggcagcagcactaccagcggtcactggagtgggagcagtggtgtctccaccccctcgcccccccacccccaggccagccccaagtatttgggggatgcttttggttctccccaaactgatcatggctttgagaccgatcctgaccctttcctgctggacgaaccagctccacgaaaaagaaagaactctgtgaaggtgatgtacaagtgcctgtggccaaactgtggcaaagttctgcgctccattgtgggcatcaaacgacacgtcaaagccctccatctgggggacacagtggactctgatcagttcaagcgggaggaggatttctactacacagaggtgcagctgaaggaggaatctgctgctgctgctgctgctgctgccgcaggcaccccagtccctgggactcccacctccgagccagctcccacccccagcatgactggcctgcctctgtctgctcttccaccacctctgcacaaagcccagtcctccggcccagaacatcctggcccggagtcctccctgccctcaggggctctcagcaagtcagctcctgggtccttctggcacattcaggcagatcatgcataccaggctctgccatccttccagatcccagtctcaccacacatctacaccagtgtcagctgggctgctgccccctccgccgcctgctctctctctccggtccggagccggtcgctaagcttcagcgagccccagcagccagcacctgcgatgaaatctcatctgatcgtcacttctccaccccgggcccagagtggtgccaggaaagcccgaggggaggctaagaagtgccgcaaggtgtatggcatcgagcaccgggaccagtggtgcacggcctgccggtggaagaaggcctgccagcgctttctggactgagctgtgctgcaggttctactctgttcctggccctgccggcagccactgacaagaggccagtgtgtcaccagccctcagcagaaaccgaaagagaaagaacggaaacacggagtttgggctctgttggctaaggtgtaacacttaaagcaattttctcccattgtgcgaacattttattttttaaaaaaaagaaacaaaaatatttttccccctaaaataggagagagccaaaactgaccaaggctattcagcagtgaaccagtgaccaaagaattaattaccctccgtttcccacatccccactctctaggggattagcttgtgcgtgtcaaaagaaggaacagctcgttctgcttcctgctgagtcggtgaattctttgctttctaaactcttccagaaaggactgtgagcaagatgaatttacttttcttaaaaaaaaaaaaaaaaaaaaa

SEQ ID NO: 410437 - DNA, 1868 bp, Homo sapiens
taactctagcaggatcctctgtcgctgtatcgggggatcacgagtgcacaggactggtggagcagcacagctggatggagggtcaggtgaccgtctggctgctggagcagaaggtttatgtgtggtacgggggtcaagagtgcacaggactggtggagcagcacagctggatggagggtcaggtgaccgtctggctgctggagcagaagctgcaggtctgctgcagggtggaggaggtgtggctggcagagctgcagggcccctgtccccaggcaccacccctggagcccggagcccaggccctggcctacaggcccgtctccaggaacatcgatgtcccaaagaggaagtcggacgcagtggaaatggatgagatgatggcggccatggtgctgacgtccctgtcctgcagccctgttgtacagagtcctcccgggaccgaggccaacttctctgcttcccgtgcggcctgcgacccatggaaggagagtggtgacatctcggacagcggcagcagcactaccagcggtcactggagtgggagcagtggtgtctccaccccctcgcccccccacccccaggccagccccaagtatttgggggatgcttttggttctccccaaactgatcatggctttgagaccgatcctgaccctttcctgctggacgaaccagctccacgaaaaagaaagaactctgtgaaggtgatgtacaagtgcctgtggccaaactgtggcaaagttctgcgctccattgtgggcatcaaacgacacgtcaaagccctccatctgggggacacagtggactctgatcagttcaagcgggaggaggatttctactacacagaggtgcagctgaaggaggaatctgctgctgctgctgctgctgctgccgcaggcaccccagtccctgggactcccacctccgagccagctcccacccccagcatgactggcctgcctctgtctgctcttccaccacctctgcacaaagcccagtcctccggcccagaacatcctggcccggagtcctccctgccctcaggggctctcagcaagtcagctcctgggtccttctggcacattcaggcagatcatgcataccaggctctgccatccttccagatcccagtctcaccacacatctacaccagtgtcagctgggctgctgccccctccgccgcctgctctctctctccggtccggagccggtcgctaagcttcagcgagccccagcagccagcacctgcgatgaaatctcatctgatcgtcacttctccaccccgggcccagagtggtgccaggaaagcccgaggggaggctaagaagtgccgcaaggtgtatggcatcgagcaccgggaccagtggtgcacggcctgccggtggaagaaggcctgccagcgctttctggactgagctgtgctgcaggttctactctgttcctggccctgccggcagccactgacaagaggccagtgtgtcaccagccctcagcagaaaccgaaagagaaagaacggaaacacggagtttgggctctgttggctaaggtgtaacacttaaagcaattttctcccattgtgcgaacattttattttttaaaaaaaagaaacaaaaatatttttccccctaaaataggagagagccaaaactgaccaaggctattcagcagtgaaccagtgaccaaagaattaattaccctccgtttcccacatccccactctctaggggattagcttgtgcgtgtcaaaagaaggaacagctcgttctgcttcctgctgagtcggtgaattctttgctttctaaactcttccagaaaggactgtgagcaagatgaatttacttttcttaaaaaaaaaaaaaaaaaaaaa

SEQ ID NO: 410438 - DNA, 2127 bp, Homo sapiens
aggttcaagtgcgcatgtgcgcgaggagtcgctcgggcacttattgagcgccgactgtctacgggcggccgggggtgatgggcagaggcttcagtgtccccttcgcctccgcaggagaggagaggcagcagcatggcgagtgtcctgtcccgacgccttggaaagcggtccctcctgggagcccgggtgttgggacccagtgcctcggaggggccctcggctgccccaccctcggagccactgctagaaggggccgctccccagcctttcaccacctctgatgacaccccctgccaggagcagcccaaggaagtccttaaggctcccagcacctcgggccttcagcaggtggcctttcagcctgggcagaaggtttatgtgtggtacgggggtcaagagtgcacaggactggtggagcagcacagctggatggagggtcaggtgaccgtctggctgctggagcagaagctgcaggtctgctgcagggtggaggaggtgtggctggcagagctgcagggcccctgtccccaggcaccacccctggagcccggagcccaggccctggcctacaggcccgtctccaggaacatcgatgtcccaaagaggaagtcggacgcagtggaaatggatgagatgatggcggccatggtgctgacgtccctgtcctgcagccctgttgtacagagtcctcccgggaccgaggccaacttctctgcttcccgtgcggcctgcgacccatggaaggagagtggtgacatctcggacagcggcagcagcactaccagcggtcactggagtgggagcagtggtgtctccaccccctcgcccccccacccccaggccagccccaagtatttgggggatgcttttggttctccccaaactgatcatggctttgagaccgatcctgaccctttcctgctggacgaaccagctccacgaaaaagaaagaactctgtgaaggtgatgtacaagtgcctgtggccaaactgtggcaaagttctgcgctccattgtgggcatcaaacgacacgtcaaagccctccatctgggggacacagtggactctgatcagttcaagcgggaggaggatttctactacacagaggtgcagctgaaggaggaatctgctgctgctgctgctgctgctgccgcaggcaccccagtccctgggactcccacctccgagccagctcccacccccagcatgactggcctgcctctgtctgctcttccaccacctctgcacaaagcccagtcctccggcccagaacatcctggcccggagtcctccctgccctcaggggctctcagcaagtcagctcctgggtccttctggcacattcaggcagatcatgcataccaggctctgccatccttccagatcccagtctcaccacacatctacaccagtgtcagctgggctgctgccccctccgccgcctgctctctctctccggtccggagccggtcgctaagcttcagcgagccccagcagccagcacctgcgatgaaatctcatctgatcgtcacttctccaccccgggcccagagtggtgccaggaaagcccgaggggaggctaagaagtgccgcaaggtgtatggcatcgagcaccgggaccagtggtgcacggcctgccggtggaagaaggcctgccagcgctttctggactgagctgtgctgcaggttctactctgttcctggccctgccggcagccactgacaagaggccagtgtgtcaccagccctcagcagaaaccgaaagagaaagaacggaaacacggagtttgggctctgttggctaaggtgtaacacttaaagcaattttctcccattgtgcgaacattttattttttaaaaaaaagaaacaaaaatatttttccccctaaaataggagagagccaaaactgaccaaggctattcagcagtgaaccagtgaccaaagaattaattaccctccgtttcccacatccccactctctaggggattagcttgtgcgtgtcaaaagaaggaacagctcgttctgcttcctgctgagtcggtgaattctttgctttctaaactcttccagaaaggactgtgagcaagatgaatttacttttcttaaaaaaaaaaaaaaaaaaaaa

SEQ ID NO: 410439 - DNA, 857 bp, Homo sapiens
gagatgtccgctgtcgtcccctgccttctggtttctgtgccctgtctccagtggcgtggactccgaccccacccagatgaagtcaccagggttagtccccagagaggagcccagatggcggatgcaccagatgggatgactgtttggtcctcagagcctctggcccctggtcctggtgacttttgccgggagctgcccctttggcctctgcttgttctcccagccccacttggccactctcctgggcccaccacctgtgtggggctcgatttgcattcctctctttctgcaggaaagcccgaggggaggctaagaagtgccgcaaggtgtatggcatcgagcaccgggaccagtggtgcacggcctgccggtggaagaaggcctgccagcgctttctggactgagctgtgctgcaggttctactctgttcctggccctgccggcagccactgacaagaggccagtgtgtcaccagccctcagcagaaaccgaaagagaaagaacggaaacacggagtttgggctctgttggctaaggtgtaacacttaaagcaattttctcccattgtgcgaacattttattttttaaaaaaaagaaacaaaaatatttttccccctaaaataggagagagccaaaactgaccaaggctattcagcagtgaaccagtgaccaaagaattaattaccctccgtttcccacatccccactctctaggggattagcttgtgcgtgtcaaaagaaggaacagctcgttctgcttcctgctgagtcggtgaattctttgctttctaaactcttccagaaaggactgtgagcaagatgaatttacttttcttaaaaaaaaaaaaaaaaaaaaa

SEQ ID NO: 410440 - DNA, 2248 bp, Homo sapiens
aggttcaagtgcgcatgtgcgcgaggagtcgctcgggcacttattgagcgccgactgtctacgggcggccggggacagtcttgcactgtttcctaggctggagtgcagtggcacaatcacagctcactgcagccttgacttccccaggctcaagccattctcctacctcagcctcccaagcagttgggaccacaggtgatgggcagaggcttcagtgtccccttcgcctccgcaggagaggagaggcagcagcatggcgagtgtcctgtcccgacgccttggaaagcggtccctcctgggagcccgggtgttgggacccagtgcctcggaggggccctcggctgccccaccctcggagccactgctagaaggggccgctccccagcctttcaccacctctgatgacaccccctgccaggagcagcccaaggaagtccttaaggctcccagcacctcgggccttcagcaggtggcctttcagcctgggcagaaggtttatgtgtggtacgggggtcaagagtgcacaggactggtggagcagcacagctggatggagggtcaggtgaccgtctggctgctggagcagaagctgcaggtctgctgcagggtggaggaggtgtggctggcagagctgcagggcccctgtccccaggcaccacccctggagcccggagcccaggccctggcctacaggcccgtctccaggaacatcgatgtcccaaagaggaagtcggacgcagtggaaatggatgagatgatggcggccatggtgctgacgtccctgtcctgcagccctgttgtacagagtcctcccgggaccgaggccaacttctctgcttcccgtgcggcctgcgacccatggaaggagagtggtgacatctcggacagcggcagcagcactaccagcggtcactggagtgggagcagtggtgtctccaccccctcgcccccccacccccaggccagccccaagtatttgggggatgcttttggttctccccaaactgatcatggctttgagaccgatcctgaccctttcctgctggacgaaccagctccacgaaaaagaaagaactctgtgaaggtgatgtacaagtgcctgtggccaaactgtggcaaagttctgcgctccattgtgggcatcaaacgacacgtcaaagccctccatctgggggacacagtggactctgatcagttcaagcgggaggaggatttctactacacagaggtgcagctgaaggaggaatctgctgctgctgctgctgctgctgccgcaggcaccccagtccctgggactcccacctccgagccagctcccacccccagcatgactggcctgcctctgtctgctcttccaccacctctgcacaaagcccagtcctccggcccagaacatcctggcccggagtcctccctgccctcaggggctctcagcaagtcagctcctgggtccttctggcacattcaggcagatcatgcataccaggctctgccatccttccagatcccagtctcaccacacatctacaccagtgtcagctgggctgctgccccctccgccgcctgctctctctctccggtccggagccggtcgctaagcttcagcgagccccagcagccagcacctgcgatgaaatctcatctgatcgtcacttctccaccccgggcccagagtggtgccaggaaagcccgaggggaggctaagaagtgccgcaaggtgtatggcatcgagcaccgggaccagtggtgcacggcctgccggtggaagaaggcctgccagcgctttctggactgagctgtgctgcaggttctactctgttcctggccctgccggcagccactgacaagaggccagtgtgtcaccagccctcagcagaaaccgaaagagaaagaacggaaacacggagtttgggctctgttggctaaggtgtaacacttaaagcaattttctcccattgtgcgaacattttattttttaaaaaaaagaaacaaaaatatttttccccctaaaataggagagagccaaaactgaccaaggctattcagcagtgaaccagtgaccaaagaattaattaccctccgtttcccacatccccactctctaggggattagcttgtgcgtgtcaaaagaaggaacagctcgttctgcttcctgctgagtcggtgaattctttgctttctaaactcttccagaaaggactgtgagcaagatgaatttacttttcttaaaaaaaaaaaaaaaaaaaaa

SEQ ID NO: 410441 - DNA, 2208 bp, Homo sapiens
aggttcaagtgcgcatgtgcgcgaggagtcgctcgggcacttattgagcgccgactgtctacgggcggccggggacagtcttgcactgtttcctaggctggagtgcagtggcacaatcacagctcactgcagccttgacttccccaggctcaagccattctcctacctcagcctcccaagcagttgggaccacaggagaggagaggcagcagcatggcgagtgtcctgtcccgacgccttggaaagcggtccctcctgggagcccgggtgttgggacccagtgcctcggaggggccctcggctgccccaccctcggagccactgctagaaggggccgctccccagcctttcaccacctctgatgacaccccctgccaggagcagcccaaggaagtccttaaggctcccagcacctcgggccttcagcaggtggcctttcagcctgggcagaaggtttatgtgtggtacgggggtcaagagtgcacaggactggtggagcagcacagctggatggagggtcaggtgaccgtctggctgctggagcagaagctgcaggtctgctgcagggtggaggaggtgtggctggcagagctgcagggcccctgtccccaggcaccacccctggagcccggagcccaggccctggcctacaggcccgtctccaggaacatcgatgtcccaaagaggaagtcggacgcagtggaaatggatgagatgatggcggccatggtgctgacgtccctgtcctgcagccctgttgtacagagtcctcccgggaccgaggccaacttctctgcttcccgtgcggcctgcgacccatggaaggagagtggtgacatctcggacagcggcagcagcactaccagcggtcactggagtgggagcagtggtgtctccaccccctcgcccccccacccccaggccagccccaagtatttgggggatgcttttggttctccccaaactgatcatggctttgagaccgatcctgaccctttcctgctggacgaaccagctccacgaaaaagaaagaactctgtgaaggtgatgtacaagtgcctgtggccaaactgtggcaaagttctgcgctccattgtgggcatcaaacgacacgtcaaagccctccatctgggggacacagtggactctgatcagttcaagcgggaggaggatttctactacacagaggtgcagctgaaggaggaatctgctgctgctgctgctgctgctgccgcaggcaccccagtccctgggactcccacctccgagccagctcccacccccagcatgactggcctgcctctgtctgctcttccaccacctctgcacaaagcccagtcctccggcccagaacatcctggcccggagtcctccctgccctcaggggctctcagcaagtcagctcctgggtccttctggcacattcaggcagatcatgcataccaggctctgccatccttccagatcccagtctcaccacacatctacaccagtgtcagctgggctgctgccccctccgccgcctgctctctctctccggtccggagccggtcgctaagcttcagcgagccccagcagccagcacctgcgatgaaatctcatctgatcgtcacttctccaccccgggcccagagtggtgccaggaaagcccgaggggaggctaagaagtgccgcaaggtgtatggcatcgagcaccgggaccagtggtgcacggcctgccggtggaagaaggcctgccagcgctttctggactgagctgtgctgcaggttctactctgttcctggccctgccggcagccactgacaagaggccagtgtgtcaccagccctcagcagaaaccgaaagagaaagaacggaaacacggagtttgggctctgttggctaaggtgtaacacttaaagcaattttctcccattgtgcgaacattttattttttaaaaaaaagaaacaaaaatatttttccccctaaaataggagagagccaaaactgaccaaggctattcagcagtgaaccagtgaccaaagaattaattaccctccgtttcccacatccccactctctaggggattagcttgtgcgtgtcaaaagaaggaacagctcgttctgcttcctgctgagtcggtgaattctttgctttctaaactcttccagaaaggactgtgagcaagatgaatttacttttcttaaaaaaaaaaaaaaaaaaaaa

SEQ ID NO: 410442 - DNA, 336 bp, Homo sapiens
ggcccaaactcccacatagacaggattcttccagtgcaagctctatcaggttttgaaattatggattccaaatttaggtttgcttatgtcatttaagagactaaaaattccagtttccctcagatcttccatatagctggccaagccaatggagcaaccagacaacacagttcagatgccatctgaaggcaaaaagtagccaaactataaatatgaaaggaaagaaataggaaatgagagaaagggagagaggagattaaaggtaggggtggtatttagcagatgaagcctccttagaagagaggaaatactcctttatagataggctcaactagg

SEQ ID NO: 410443 - DNA, 834 bp, Homo sapiens
ctaattttttgtattttttagtagagatggggtttcactgtgttagccaggatggtcacgatctcctgacctcgtgatccgtccacctcagccccccagagtgctgggattacaggcatgagccactgtgcccggccaaaaaaaatctctttttaaatatctcctatgattttggttgaatttgttcacctatagaacaaatttatgttgttttctgcttatcattagatgtaaaggagtaaagtccagtgggttctgctggcacattggtggggaagctgagaacttttaaactctttcccctttctccagtgaacaatcgacaggatatgggttatagttacagttaaagggtttattgaactaattgtcactgctgaagttcctgtgccctctgatagcttccttgaaaagttttcatagtttaaaaactctgcttgtccttagcctttgatctcttgctttgatgctcaaacagaagaatgatacaagactgaggatcttgccaggcaagggccccgtggttatgaatgtgcttcagtttcataatgcctcctgctatggcagacatccttgacatctgggcggtggattcacagatagcatctgatggctccatacctgtggatttccttttgcccactgggatttatatccagttggaggtacctcgggaagctaccatttcttatattaagcagatgttatggaagcaagttcacaattacccaatgttcaacctccttatggatattgactcctatatgtttgcatgtgtgaataaaaatgtggttatgggttggagaagacagcttgtgtggagagccttttttc

SEQ ID NO: 410444 - DNA, 480 bp, Homo sapiens
gggaggtgatcgagagaggcagggatgggggcgccggagtggagcggttgcggcggcctgggctgctgactgcgcacttggaatagtagcaggcggcggcggcggaacgccaggcagggctgaattggaaccctgtctcaggtactgagtgggaattactgctgaaatgaaaccgagcaaattcgggattcgcttaggatgaaagatggtgggacgtaaacttgaagtgctttgctgtttcatctcaagtgacacttgaactctgccacttgttacagagttataaacacacgaagagtatggaaacagactcttttttctgcattgctacatccaaagggagtgacaagtgcttttgtaaacatcattgtgggcagtgtgactgtctggtgaagtcatgataattaaatgagtacttattttgaagcactgaatggaagtttggagatatgattcgtaataaaattgtctccaacgagt

SEQ ID NO: 410445 - DNA, 4941 bp, Homo sapiens
gggaggtgatcgagagaggcagggatgggggcgccggagtggagcggttgcggcggcctgggctgctgactgcgcacttggaatagtagcaggcggcggcggcggaacgccaggcagtgtatgttttaactggaaaaagtcttccatgaaaacgtcacttttaaaaaataagtaatgccatctgttttcctaaaagactgaaatgggggcgaccattcttagacagggtctcactttgttgtccaggctggagtgcagtggtactattttagctcaatgcagccttagattcttggactcaagcaatcctcatgcctcagtctcccaagtagctgggactacagggccccgtggttatgaatgtgcttcagtttcataatgcctcctgctatggcagacatccttgacatctgggcggtggattcacagatagcatctgatggctccatacctgtggatttccttttgcccactgggatttatatccagttggaggtacctcgggaagctaccatttcttatattaagcagatgttatggaagcaagttcacaattacccaatgttcaacctccttatggatattgactcctatatgtttgcatgtgtgaatcagactgctgtatatgaggagcttgaagatgaaacacgaagactctgtgatgtcagaccttttcttccagttctcaaattagtgacaagaagttgtgacccaggggaaaaattagactcaaaaattggagtccttataggaaaaggtctgcatgaatttgattccttgaaggatcctgaagtaaatgaatttcgaagaaaaatgcgcaaattcagcgaggaaaaaatcctgtcacttgtgggattgtcttggatggactggctaaaacaaacatatccaccagagcatgaaccatccatccctgaaaacttagaagataaactttatgggggaaagctcatcgtagctgttcattttgaaaactgccaggacgtgtttagctttcaagtgtctcctaatatgaatcctatcaaagtaaatgaattggcaatccaaaaacgtttgactattcatgggaaggaagatgaagttagcccctatgattatgtgttgcaagtcagcgggagagtagaatatgtttttggtgatcatccactaattcagttccagtatatccggaactgtgtgatgaacagagccctgccccattttatacttgtggaatgctgcaagatcaagaaaatgtatgaacaagaaatgattgccatagaggctgccataaatcgaaattcatctaatcttcctcttccattaccaccaaagaaaacacgaattatttctcatgtttgggaaaataacaaccctttccaaattgtcttggttaagggaaataaacttaacacagaggaaactgtaaaagttcatgtcagggctggtctttttcatggtactgagctcctgtgtaaaaccatcgtaagctcagaggtatcagggaaaaatgatcatatttggaatgaaccactggaatttgatattaatatttgtgacttaccaagaatggctcgattatgttttgctgtttatgcagttttggataaagtaaaaacgaagaaatcaacgaaaactattaatccctctaaatatcagaccatcaggaaagctggaaaagtgcattatcctgtagcgtgggtaaatacgatggtttttgactttaaaggacaattgagaactggagacataatattacacagctggtcttcatttcctgatgaactcgaagaaatgttgaatccaatgggaactgttcaaacaaatccatatactgaaaatgcaacagctttgcatgttaaatttccagagaataaaaaacaaccttattattaccctcccttcgataagattattgaaaaggcagctgagattgcaagcagtgatagtgctaatgtgtcaagtcgaggtggaaaaaagtttcttcctgtattgaaagaaatcttggacagggatcccttgtctcaactgtgtgaaaatgaaatggatcttatttggactttgcgacaagactgccgagagattttcccacaatcactgccaaaattactgctgtcaatcaagtggaataaacttgaggatgttgctcagcttcaggcgctgcttcagatttggcctaaactgcccccccgggaggccctagagcttctggatttcaactatccagaccagtacgttcgagaatatgctgtaggctgcctgcgacagatgagtgatgaagaactttctcaatatcttttacaactggtgcaagtgttaaaatatgagccttttcttgattgtgccctctctagattcctattagaaagagcacttggtaatcggaggatagggcagtttctattttggcatcttaggtcagaagtgcacattcctgctgtctcagtacaatttggtgtcatccttgaagcatactgccggggaagtgtggggcacatgaaagtgctttctaagcaggttgaagcactcaataagttaaaaactttaaatagtttaatcaaactgaatgccgtgaagttaaacagagccaaagggaaggaggccatgcatacctgtttaaaacagagtgcttaccgggaagccctctctgacctgcagtcacccctgaacccatgtgttatcctctcagaactctatgttgaaaagtgcaaatacatggattccaaaatgaagcctttgtggctggtatacaataacaaggtatttggtgaggattcagttggagtgatttttaaaaatggtgatgatttacgacaggatatgttgacactccaaatgttgcgcttgatggatttactctggaaagaagctggtttggatcttcggatgttgccttatggctgtttagcaacaggagatcgctctggcctcattgaagttgtgagcacctctgaaacaattgctgacattcagctgaacagtagcaatgtggctgctgcagcagccttcaacaaagatgcccttctgaactggcttaaagaatacaactctggggatgacctggaccgagccattgaggaatttacactgtcctgtgctggctactgtgtagcttcttatgtccttgggattggtgacagacatagtgacaacatcatggtcaaaaaaactggccagctcttccacattgactttggacatattcttggaaatttcaaatctaagtttggcattaaaagggagcgagtgccttttattcttacctatgatttcatccatgtcattcaacaaggaaaaacaggaaatacagaaaagtttggccggttccgccagtgttgtgaggatgcatatctgattttacgacggcatgggaatctcttcatcactctctttgcgctgatgttgactgcagggcttcctgaactcacatcagtcaaagatatacagtatcttaaggactctcttgcattagggaagagtgaagaagaagcactcaaacagtttaagcaaaaatttgatgaggcgctcagggaaagctggactactaaagtgaactggatggcccacacagttcggaaagactacagatcttaacgatcagccttcgctcctaatgtatttgttggtttcatttcattttcattttgcacttgcactaaattgaacatgaccctgttagagatgttataaagggaatgaaatcctggaactcagagttaaattaagaacaaggcatcccacagaacctaatctgaacaatccccgatgattccctctgctttttgaatgcttccaagacttatcatgaaaactgtcaatggataatcatttcctgctgactttgcacgccaaggaatgctactagggattgtttccgtttttgtttgttttttctaatatttggtacttcccagaatggtgtaaatacttcttttcaatgttgtgaccaagtattgtcactcagccaacaacttttccacacctgggggttggtggctgttcttactgtccaaatgaagctaaaaagaaaggcatctttcttcccttttaaaattgtgtaaactgcaaattataatataatttgaatttatgattattttccagaagaaatcttgtaaacctgtggatactcattaattcttttgttaatatttatttccatgatagcatcattccagccagacttgctgaaaatctactggtgaggcaaatataacatatataaatatgctacatatatatttataaaatttctagtgggagttctatataaatgtttctttggtattcttcagcctgtgatttaaagttttacaaaaagcagagctttttcctaagttacttttcagttaggtaactgtgtgatccagttcttccagctgcttctataatgaggcacatattactaccagtttttatatggtatctatgaaagagttcacttcatagagaataatacttgagcaaatgtatccaagaaagcaagcaaatgaaaagaaacctatttatggaataaactccagatctgaaattcagtattttagaaaaatgccagctcttcttactgtatttattaaaacttgtaataatgtgatttttttcaaggatattagttcaaattgaaatggtttcacgccacacggaaatctttaagttatttgttgaggtaccatatatttagggtgctaggggcaagtaatgttaatatgtgcaataggaactactggtttgaatgtgtaaatgggtgatctctctgagtcctggcaacatccagcaaaactactgcttattctccaaagaatattgggagctctcaatcctcggtgatatgggaaagagaactgagtatttgccctatgactgagctttctataggaattttattaaagaatgtttaattttgttgtccttcttaatgttctcagtcaaataaatgagtgagctggtttcggctgctcttgg

SEQ ID NO: 410446 - DNA, 4103 bp, Homo sapiens
  misc_feature (3956)..(3956): n is a, c, g, or t
gggaggtgatcgagagaggcagggatgggggcgccggagtggagcggttgcggcggcctgggctgctgactgcgcacttggaatagtagcaggcggcggcggcggaacgccaggcagtgtatgttttaactggaaaaagtcttccatgaaaacgtcacttttaaaaaataagtaatgccatctgttttcctaaaagactgaaatgggggcgaccattcttagggccccgtggttatgaatgtgcttcagtttcataatgcctcctgctatggcagacatccttgacatctgggcggtggattcacagatagcatctgatggctccatacctgtggatttccttttgcccactgggatttatatccagttggaggtacctcgggaagctaccatttcttatattaagcagatgttatggaagcaagttcacaattacccaatgttcaacctccttatggatattgactcctatatgtttgcatgtgtgaatcagactgctgtatatgaggagcttgaagatgaaacacgaagactctgtgatgtcagaccttttcttccagttctcaaattagtgacaagaagttgtgacccaggggaaaaattagactcaaaaattggagtccttataggaaaaggtctgcatgaatttgattccttgaaggatcctgaagtaaatgaatttcgaagaaaaatgcgcaaattcagcgaggaaaaaatcctgtcacttgtgggattgtcttggatggactggctaaaacaaacatatccaccagagcatgaaccatccatccctgaaaacttagaagataaactttatgggggaaagctcatcgtagctgttcattttgaaaactgccaggacgtgtttagctttcaagtgtctcctaatatgaatcctatcaaagtaaatgaattggcaatccaaaaacgtttgactattcatgggaaggaagatgaagttagcccctatgattatgtgttgcaagtcagcgggagagtagaatatgtttttggtgatcatccactaattcagttccagtatatccggaactgtgtgatgaacagagccctgccccattttatacttgtggaatgctgcaagatcaagaaaatgtatgaacaagaaatgattgccatagaggctgccataaatcgaaattcatctaatcttcctcttccattaccaccaaagaaaacacgaattatttctcatgtttgggaaaataacaaccctttccaaattgtcttggttaagggaaataaacttaacacagaggaaactgtaaaagttcatgtcagggctggtctttttcatggtactgagctcctgtgtaaaaccatcgtaagctcagaggtatcagggaaaaatgatcatatttggaatgaaccactggaatttgatattaatatttgtgacttaccaagaatggctcgattatgttttgctgtttatgcagttttggataaagtaaaaacgaagaaatcaacgaaaactattaatccctctaaatatcagaccatcaggaaagctggaaaagtgcattatcctgtagcgtgggtaaatacgatggtttttgactttaaaggacaattgagaactggagacataatattacacagctggtcttcatttcctgatgaactcgaagaaatgttgaatccaatgggaactgttcaaacaaatccatatactgaaaatgcaacagctttgcatgttaaatttccagagaataaaaaacaaccttattattaccctcccttcgataagattattgaaaaggcagctgagattgcaagcagtgatagtgctaatgtgtcaagtcgaggtggaaaaaagtttcttcctgtattgaaagaaatcttggacagggatcccttgtctcaactgtgtgaaaatgaaatggatcttatttggactttgcgacaagactgccgagagattttcccacaatcactgccaaaattactgctgtcaatcaagtggaataaacttgaggatgttgctcagcttcaggcgctgcttcagatttggcctaaactgcccccccgggaggccctagagcttctggatttcaactatccagaccagtacgttcgagaatatgctgtaggctgcctgcgacagatgagtgatgaagaactttctcaatatcttttacaactggtgcaagtgttaaaatatgagccttttcttgattgtgccctctctagattcctattagaaagagcacttggtaatcggaggatagggcagtttctattttggcatcttaggtcagaagtgcacattcctgctgtctcagtacaatttggtgtcatccttgaagcatactgccggggaagtgtggggcacatgaaagtgctttctaagcaggttgaagcactcaataagttaaaaactttaaatagtttaatcaaactgaatgccgtgaagttaaacagagccaaagggaaggaggccatgcatacctgtttaaaacagagtgcttaccgggaagccctctctgacctgcagtcacccctgaacccatgtgttatcctctcagaactctatgttgaaaagtgcaaatacatggattccaaaatgaagcctttgtggctggtatacaataacaaggtatttggtgaggattcagttggagtgatttttaaaaatggtgatgatttacgacaggatatgttgacactccaaatgttgcgcttgatggatttactctggaaagaagctggtttggatcttcggatgttgccttatggctgtttagcaacaggagatcgctctggcctcattgaagttgtgagcacctctgaaacaattgctgacattcagctgaacagtagcaatgtggctgctgcagcagccttcaacaaagatgcccttctgaactggcttaaagaatacaactctggggatgacctggaccgagccattgaggaatttacactgtcctgtgctggctactgtgtagcttcttatgtccttgggattggtgacagacatagtgacaacatcatggtcaaaaaaactggccagctcttccacattgactttggacatattcttggaaatttcaaatctaagtttggcattaaaagggagcgagtgccttttattcttacctatgatttcatccatgtcattcaacaaggaaaaacaggaaatacagaaaagtttggccggttccgccagtgttgtgaggatgcatatctgattttacgacggcatgggaatctcttcatcactctctttgcgctgatgttgactgcagggcttcctgaactcacatcagtcaaagatatacagtatcttaaggactctcttgcattagggaagagtgaagaagaagcactcaaacagtttaagcaaaaatttgatgaggcgctcagggaaagctggactactaaagtgaactggatggcccacacagttcggaaagactacagatcttaacgatcagccttcgctcctaatgtatttgttggtttcatttcattttcattttgcacttgcactaaattgaacatgaccctgttagagatgttataaagggaatgaaatcctggaactcagagttaaattaagaacaaggcatcccacagaacctaatctgaacaatccccgatgattccctctgctttttgaatgcttccaagacttatcatgaaaactgtcaatggataatcatttcctgctgactttgcacgccaaggaatgctactagggattgtttccgtttttgtttgttttttctaatatttggtacttcccagaatggtgtaaatacttcttttcaatgttgtgaccaagtattgtcactcagccaacaacttttccacacctgggggttggtggctgttcttactgtccaaatgaagctaaaaagaaaggcatctttcttcccttttaaaatgtgtaactgcaatatatatattgattatgattatttccagagaanctggaacgggataccatactttggaattttccagtgaatttccgcgagtgaatatgggggaaaattagggcaattaacaggggcacggggggcacggaaaacaatagggagcacaaaattacaaggtaagaaatattaagagattgg

SEQ ID NO: 410447 - DNA, 4768 bp, Homo sapiens
gggaggtgatcgagagaggcagggatgggggcgccggagtggagcggttgcggcggcctgggctgctgactgcgcacttggaatagtagcaggcggcggcggcggaacgccaggcagtgtatgttttaactggaaaaagtcttccatgaaaacgtcacttttaaaaaataagtaatgccatctgttttcctaaaagactgaaatgggggcgaccattcttagggccccgtggttatgaatgtgcttcagtttcataatgcctcctgctatggcagacatccttgacatctgggcggtggattcacagatagcatctgatggctccatacctgtggatttccttttgcccactgggatttatatccagttggaggtacctcgggaagctaccatttcttatattaagcagatgttatggaagcaagttcacaattacccaatgttcaacctccttatggatattgactcctatatgtttgcatgtgtgaatcagactgctgtatatgaggagcttgaagatgaaacacgaagactctgtgatgtcagaccttttcttccagttctcaaattagtgacaagaagttgtgacccaggggaaaaattagactcaaaaattggagtccttataggaaaaggtctgcatgaatttgattccttgaaggatcctgaagtaaatgaatttcgaagaaaaatgcgcaaattcagcgaggaaaaaatcctgtcacttgtgggattgtcttggatggactggctaaaacaaacatatccaccagagcatgaaccatccatccctgaaaacttagaagataaactttatgggggaaagctcatcgtagctgttcattttgaaaactgccaggacgtgtttagctttcaagtgtctcctaatatgaatcctatcaaagtaaatgaattggcaatccaaaaacgtttgactattcatgggaaggaagatgaagttagcccctatgattatgtgttgcaagtcagcgggagagtagaatatgtttttggtgatcatccactaattcagttccagtatatccggaactgtgtgatgaacagagccctgccccattttatacttgtggaatgctgcaagatcaagaaaatgtatgaacaagaaatgattgccatagaggctgccataaatcgaaattcatctaatcttcctcttccattaccaccaaagaaaacacgaattatttctcatgtttgggaaaataacaaccctttccaaattgtcttggttaagggaaataaacttaacacagaggaaactgtaaaagttcatgtcagggctggtctttttcatggtactgagctcctgtgtaaaaccatcgtaagctcagaggtatcagggaaaaatgatcatatttggaatgaaccactggaatttgatattaatatttgtgacttaccaagaatggctcgattatgttttgctgtttatgcagttttggataaagtaaaaacgaagaaatcaacgaaaactattaatccctctaaatatcagaccatcaggaaagctggaaaagtgcattatcctgtagcgtgggtaaatacgatggtttttgactttaaaggacaattgagaactggagacataatattacacagctggtcttcatttcctgatgaactcgaagaaatgttgaatccaatgggaactgttcaaacaaatccatatactgaaaatgcaacagctttgcatgttaaatttccagagaataaaaaacaaccttattattaccctcccttcgataagagtcgaggtggaaaaaagtttcttcctgtattgaaagaaatcttggacagggatcccttgtctcaactgtgtgaaaatgaaatggatcttatttggactttgcgacaagactgccgagagattttcccacaatcactgccaaaattactgctgtcaatcaagtggaataaacttgaggatgttgctcagcttcaggcgctgcttcagatttggcctaaactgcccccccgggaggccctagagcttctggatttcaactatccagaccagtacgttcgagaatatgctgtaggctgcctgcgacagatgagtgatgaagaactttctcaatatcttttacaactggtgcaagtgttaaaatatgagccttttcttgattgtgccctctctagattcctattagaaagagcacttggtaatcggaggatagggcagtttctattttggcatcttaggtcagaagtgcacattcctgctgtctcagtacaatttggtgtcatccttgaagcatactgccggggaagtgtggggcacatgaaagtgctttctaagcaggttgaagcactcaataagttaaaaactttaaatagtttaatcaaactgaatgccgtgaagttaaacagagccaaagggaaggaggccatgcatacctgtttaaaacagagtgcttaccgggaagccctctctgacctgcagtcacccctgaacccatgtgttatcctctcagaactctatgttgaaaagtgcaaatacatggattccaaaatgaagcctttgtggctggtatacaataacaaggtatttggtgaggattcagttggagtgatttttaaaaatggtgatgatttacgacaggatatgttgacactccaaatgttgcgcttgatggatttactctggaaagaagctggtttggatcttcggatgttgccttatggctgtttagcaacaggagatcgctctggcctcattgaagttgtgagcacctctgaaacaattgctgacattcagctgaacagtagcaatgtggctgctgcagcagccttcaacaaagatgcccttctgaactggcttaaagaatacaactctggggatgacctggaccgagccattgaggaatttacactgtcctgtgctggctactgtgtagcttcttatgtccttgggattggtgacagacatagtgacaacatcatggtcaaaaaaactggccagctcttccacattgactttggacatattcttggaaatttcaaatctaagtttggcattaaaagggagcgagtgccttttattcttacctatgatttcatccatgtcattcaacaaggaaaaacaggaaatacagaaaagtttggccggttccgccagtgttgtgaggatgcatatctgattttacgacggcatgggaatctcttcatcactctctttgcgctgatgttgactgcagggcttcctgaactcacatcagtcaaagatatacagtatcttaaggactctcttgcattagggaagagtgaagaagaagcactcaaacagtttaagcaaaaatttgatgaggcgctcagggaaagctggactactaaagtgaactggatggcccacacagttcggaaagactacagatcttaacgatcagccttcgctcctaatgtatttgttggtttcatttcattttcattttgcacttgcactaaattgaacatgaccctgttagagatgttataaagggaatgaaatcctggaactcagagttaaattaagaacaaggcatcccacagaacctaatctgaacaatccccgatgattccctctgctttttgaatgcttccaagacttatcatgaaaactgtcaatggataatcatttcctgctgactttgcacgccaaggaatgctactagggattgtttccgtttttgtttgttttttctaatatttggtacttcccagaatggtgtaaatacttcttttcaatgttgtgaccaagtattgtcactcagccaacaacttttccacacctgggggttggtggctgttcttactgtccaaatgaagctaaaaagaaaggcatctttcttcccttttaaaattgtgtaaactgcaaattataatataatttgaatttatgattattttccagaagaaatcttgtaaacctgtggatactcattaattcttttgttaatatttatttccatgatagcatcattccagccagacttgctgaaaatctactggtgaggcaaatataacatatataaatatgctacatatatatttataaaatttctagtgggagttctatataaatgtttctttggtattcttcagcctgtgatttaaagttttacaaaaagcagagctttttcctaagttacttttcagttaggtaactgtgtgatccagttcttccagctgcttctataatgaggcacatattactaccagtttttatatggtatctatgaaagagttcacttcatagagaataatacttgagcaaatgtatccaagaaagcaagcaaatgaaaagaaacctatttatggaataaactccagatctgaaattcagtattttagaaaaatgccagctcttcttactgtatttattaaaacttgtaataatgtgatttttttcaaggatattagttcaaattgaaatggtttcacgccacacggaaatctttaagttatttgttgaggtaccatatatttagggtgctaggggcaagtaatgttaatatgtgcaataggaactactggtttgaatgtgtaaatgggtgatctctctgagtcctggcaacatccagcaaaactactgcttattctccaaagaatattgggagctctcaatcctcggtgatatgggaaagagaactgagtatttgccctatgactgagctttctataggaattttattaaagaatgtttaattttgttgtccttcttaatgttctcagtcaaataaatgagtgagctggtttcggctgctcttgg

SEQ ID NO: 410448 - DNA, 4736 bp, Homo sapiens
gggaggtgatcgagagaggcagggatgggggcgccggagtggagcggttgcggcggcctgggctgctgactgcgcacttggaatagtagcaggcggcggcggcggaacgccaggcagtgtatgttttaactggaaaaagtcttccatgaaaacgtcacttttaaaaaataagtaatgccatctgttttcctaaaagactgaaatgggggcgaccattcttagggccccgtggttatgaatgtgcttcagtttcataatgcctcctgctatggcagacatccttgacatctgggcggtggattcacagatagcatctgatggctccatacctgtggatttccttttgcccactgggatttatatccagttggaggtacctcgggaagctaccatttcttatattaagcagatgttatggaagcaagttcacaattacccaatgttcaacctccttatggatattgactcctatatgtttgcatgtgtgaatcagactgctgtatatgaggagcttgaagatgaaacacgaagactctgtgatgtcagaccttttcttccagttctcaaattagtgacaagaagttgtgacccaggggaaaaattagactcaaaaattggagtccttataggaaaaggtctgcatgaatttgattccttgaaggatcctgaagtaaatgaatttcgaagaaaaatgcgcaaattcagcgaggaaaaaatcctgtcacttgtgggattgtcttggatggactggctaaaacaaacatatccaccagagcatgaaccatccatccctgaaaacttagaagataaactttatgggggaaagctcatcgtagctgttcattttgaaaactgccaggacgtgtttagctttcaagtgtctcctaatatgaatcctatcaaagtaaatgaattggcaatccaaaaacgtttgactattcatgggaaggaagatgaagttagcccctatgattatgtgttgcaagtcagcgggagagtagaatatgtttttggtgatcatccactaattcagttccagtatatccggaactgtgtgatgaacagagccctgccccattttatacttgtggaatgctgcaagatcaagaaaatgtatgaacaagaaatgattgccatagaggctgccataaatcgaaattcatctaatcttcctcttccattaccaccaaagaaaacacgaattatttctcatgtttgggaaaataacaaccctttccaaattgtcttggttaagggaaataaacttaacacagaggaaactgtaaaagttcatgtcagggctggtctttttcatggtactgagctcctgtgtaaaaccatcgtaagctcagaggtatcagggaaaaatgatcatatttggaatgaaccactggaatttgatattaatatttgtgacttaccaagaatggctcgattatgttttgctgtttatgcagttttggataaagtaaaaacgaagaaatcaacgaaaactattaatccctctaaatatcagaccatcaggaaagctggaaaagtgcattatcctgtagcgtgggtaaatacgatggtttttgactttaaaggacaattgagaactggagacataatattacacagctggtcttcatttcctgatgaactcgaagaaatgttgaatccaatgggaactgttcaaacaaatccatatactgaaaatgcaacagctttgcatgttaaatttccagagaataaaaaacaaccttattattaccctcccttcgataagattattgaaaaggcagctgagattgcaagcagtgatagtgctaatgtgtcaagtcgaggtggaaaaaagtttcttcctgtattgaaagaaatcttggacagggatcccttgtctcaactgtgtgaaaatgaaatggatcttatttggactttgcgacaagactgccgagagattttcccacaatcactgccaaaattactgctgtcaatcaagtggaataaacttgaggatgttgctcagcttcaggcgctgcttcagatttggcctaaactgcccccccgggaggccctagagcttctggatttcaactatccagaccagtacgttcgagaatatgctgtaggctgcctgcgacagatgagtgatgaagaactttctcaatatcttttacaactggtgcaagtgttaaaatatgagccttttcttgattgtgccctctctagattcctattagaaagagcacttggtaatcggaggatagggcagtttctattttggcatcttaggtcagaagtgcacattcctgctgtctcagtacaatttggtgtcatccttgaagcatactgccggggaagtgtggggcacatgaaagtgctttctaagcaggttgaagcactcaataagttaaaaactttaaatagtttaatcaaactgaatgccgtgaagttaaacagagccaaagggaaggaggccatgcatacctgtttaaaacagagtgcttaccgggaagccctctctgacctgcagtcacccctgaacccatgtgttatcctctcagaactctatgttgaaaagtgcaaatacatggattccaaaatgaagcctttgtggctggtatacaataacaaggtatttggtgaggattcagttggagtgatttttaaaaatggtgatgatttacgacaggatatgttgacactccaaatgttgcgcttgatggatttactctggaaagaagctggtttggatcttcggatgttgccttatggctgtttagcaacaggagatcgctctggcctcattgaagttgtgagcacctctgaaacaattgctgacattcagctgaacagtagcaatgtggctgctgcagcagccttcaacaaagatgcccttctgaactggcttaaagaatacaactctggggatgacctggaccgagccattgaggaatttacactgtcctgtgctggctactgtgtagcttcttatgtccttgggattggtgacagacatagtgacaacatcatggtcaaaaaaactggccagctcttccacattgactttggacatattcttggaaatttcaaatctaagtttggcattaaaagggagcgagtgccttttattcttacctatgatttcatccatgtcattcaacaaggaaaaacaggaaatacagaaaagtttggccggttccgccagtgttgtgaggatgcatatctgattttacgacggcatgggaatctcttcatcactctctttgcgctgatgttgactgcagggcttcctgaactcacatcagtcaaagatatacagtatcttaaggactactaaagtgaactggatggcccacacagttcggaaagactacagatcttaacgatcagccttcgctcctaatgtatttgttggtttcatttcattttcattttgcacttgcactaaattgaacatgaccctgttagagatgttataaagggaatgaaatcctggaactcagagttaaattaagaacaaggcatcccacagaacctaatctgaacaatccccgatgattccctctgctttttgaatgcttccaagacttatcatgaaaactgtcaatggataatcatttcctgctgactttgcacgccaaggaatgctactagggattgtttccgtttttgtttgttttttctaatatttggtacttcccagaatggtgtaaatacttcttttcaatgttgtgaccaagtattgtcactcagccaacaacttttccacacctgggggttggtggctgttcttactgtccaaatgaagctaaaaagaaaggcatctttcttcccttttaaaattgtgtaaactgcaaattataatataatttgaatttatgattattttccagaagaaatcttgtaaacctgtggatactcattaattcttttgttaatatttatttccatgatagcatcattccagccagacttgctgaaaatctactggtgaggcaaatataacatatataaatatgctacatatatatttataaaatttctagtgggagttctatataaatgtttctttggtattcttcagcctgtgatttaaagttttacaaaaagcagagctttttcctaagttacttttcagttaggtaactgtgtgatccagttcttccagctgcttctataatgaggcacatattactaccagtttttatatggtatctatgaaagagttcacttcatagagaataatacttgagcaaatgtatccaagaaagcaagcaaatgaaaagaaacctatttatggaataaactccagatctgaaattcagtattttagaaaaatgccagctcttcttactgtatttattaaaacttgtaataatgtgatttttttcaaggatattagttcaaattgaaatggtttcacgccacacggaaatctttaagttatttgttgaggtaccatatatttagggtgctaggggcaagtaatgttaatatgtgcaataggaactactggtttgaatgtgtaaatgggtgatctctctgagtcctggcaacatccagcaaaactactgcttattctccaaagaatattgggagctctcaatcctcggtgatatgggaaagagaactgagtatttgccctatgactgagctttctataggaattttattaaagaatgtttaattttgttgtccttcttaatgttctcagtcaaataaatgagtgagctggtttcggctgctcttgg

SEQ ID NO: 410449 - DNA, 3588 bp, Homo sapiens
gggaggtgatcgagagaggcagggatgggggcgccggagtggagcggttgcggcggcctgggctgctgactgcgcacttggaatagtagcaggcggcggcggcggaacgccaggcagtgtatgttttaactggaaaaagtcttccatgaaaacgtcacttttaaaaaataagtaatgccatctgttttcctaaaagactgaaatgggggcgaccattcttagggccccgtggttatgaatgtgcttcagtttcataatgcctcctgctatggcagacatccttgacatctgggcggtggattcacagatagcatctgatggctccatacctgtggatttccttttgcccactgggatttatatccagttggaggtacctcgggaagctaccatttcttatattaagcagatgttatggaagcaagttcacaattacccaatgttcaacctccttatggatattgactcctatatgtttgcatgtgtgaatcagactgctgtatatgaggagcttgaagatgaaacacgaagactctgtgatgtcagaccttttcttccagttctcaaattagtgacaagaagttgtgacccaggggaaaaattagactcaaaaattggagtccttataggaaaaggtctgcatgaatttgattccttgaaggatcctgaagtaaatgaatttcgaagaaaaatgcgcaaattcagcgaggaaaaaatcctgtcacttgtgggattgtcttggatggactggctaaaacaaacatatccaccagagcatgaaccatccatccctgaaaacttagaagataaactttatgggggaaagctcatcgtagctgttcattttgaaaactgccaggacgtgtttagctttcaagtgtctcctaatatgaatcctatcaaagtaaatgaattggcaatccaaaaacgtttgactattcatgggaaggaagatgaagttagcccctatgattatgtgttgcaagtcagcgggagagtagaatatgtttttggtgatcatccactaattcagttccagtatatccggaactgtgtgatgaacagagccctgccccattttatacttgtggaatgctgcaagatcaagaaaatgtatgaacaagaaatgattgccatagaggctgccataaatcgaaattcatctaatcttcctcttccattaccaccaaagaaaacacgaattatttctcatgtttgggaaaataacaaccctttccaaattgtcttggttaagggaaataaacttaacacagaggaaactgtaaaagttcatgtcagggctggtctttttcatggtactgagctcctgtgtaaaaccatcgtaagctcagaggtatcagggaaaaatgatcatatttggaatgaaccactggaatttgatattaatatttgtgacttaccaagaatggctcgattatgttttgctgtttatgcagttttggataaagtaaaaacgaagaaatcaacgaaaactattaatccctctaaatatcagaccatcaggaaagctggaaaagtgcattatcctgtagcgtgggtaaatacgatggtttttgactttaaaggacaattgagaactggagacataatattacacagctggtcttcatttcctgatgaactcgaagaaatgttgaatccaatgggaactgttcaaacaaatccatatactgaaaatgcaacagctttgcatgttaaatttccagagaataaaaaacaaccttattattaccctcccttcgataagattattgaaaaggcagctgagattgcaagcagtgatagtgctaatgtgtcaagtcgaggtggaaaaaagtttcttcctgtattgaaagaaatcttggacagggatcccttgtctcaactgtgtgaaaatgaaatggatcttatttggactttgcgacaagactgccgagagattttcccacaatcactgccaaaattactgctgtcaatcaagtggaataaacttgaggatgttgctcagcttcaggcgctgcttcagatttggcctaaactgcccccccgggaggccctagagcttctggatttcaactatccagaccagtacgttcgagaatatgctgtaggctgcctgcgacagatgagtgatgaagaactttctcaatatcttttacaactggtgcaagtgttaaaatatgagccttttcttgattgtgccctctctagattcctattagaaagagcacttggtaatcggaggatagggcagtttctattttggcatcttaggtcagaagtgcacattcctgctgtctcagtacaatttggtgtcatccttgaagcatactgccggggaagtgtggggcacatgaaagtgctttctaagcaggttgaagcactcaataagttaaaaactttaaatagtttaatcaaactgaatgccgtgaagttaaacagagccaaagggaaggaggccatgcatacctgtttaaaacagagtgcttaccgggaagccctctctgacctgcagtcacccctgaacccatgtgttatcctctcagaactctatgttgaaaagtgcaaatacatggattccaaaatgaagcctttgtggctggtatacaataacaaggtatttggtgaggattcagttggagtgatttttaaaaatggtgatgatttacgacaggatatgttgacactccaaatgttgcgcttgatggatttactctggaaagaagctggtttggatcttcggatgttgccttatggctgtttagcaacaggagatcgctctggcctcattgaagttgtgagcacctctgaaacaattgctgacattcagctgaacagtagcaatgtggctgctgcagcagccttcaacaaagatgcccttctgaactggcttaaagaatacaactctggggatgacctggaccgagccattgaggaatttacactgtcctgtgctggctactgtgtagcttcttatgtccttgggattggtgacagacatagtgacaacatcatggtcaaaaaaactggccagctcttccacattgactttggacatattcttggaaatttcaaatctaagtttggcattaaaagggagcgagtgccttttattcttacctatgatttcatccatgtcattcaacaaggaaaaacaggaaatacagaaaagtttggccggtgagtactgcccttgtgccaaggctgaacacttctaacattttcttatctgaccaggtggaccagcatttcttagctgagatatatttggatctgggagatattcagtctgattataggaagcttttgggggaatttgcctgtcagattattgtgctggttcagaaattcccagataggagaaacagaatgctagaaatttaaaatagttattatattttattccaataatatactaccttttacctgtttcagaacattctctgaaactattaagacagttgataggaagatgctgaaaagacatctgctgtcattgtgtatggagtacagtaagggaactagaattcagggcaaattttttaatctctgatctattactggctacctacatgttcccaagcataa

SEQ ID NO: 410450 - DNA, 2907 bp, Homo sapiens
gggaggtgatcgagagaggcagggatgggggcgccggagtggagcggttgcggcggcctgggctgctgactgcgcacttggaatagtagcaggcggcggcggcggaacgccaggcagtgtatgttttaactggaaaaagtcttccatgaaaacgtcacttttaaaaaataagtaatgccatctgttttcctaaaagactgaaatgggggcgaccattcttagggccccgtggttatgaatgtgcttcagtttcataatgcctcctgctatggcagacatccttgacatctgggcggtggattcacagatagcatctgatggctccatacctgtggatttccttttgcccactgggatttatatccagttggaggtacctcgggaagctaccatttcttatattaagcagatgttatggaagcaagttcacaattacccaatgttcaacctccttatggatattgactcctatatgtttgcatgtgtgaatcagactgctgtatatgaggagcttgaagatgaaacacgaagactctgtgatgtcagaccttttcttccagttctcaaattagtgacaagaagttgtgacccaggggaaaaattagactcaaaaattggagtccttataggaaaaggtctgcatgaatttgattccttgaaggatcctgaagtaaatgaatttcgaagaaaaatgcgcaaattcagcgaggaaaaaatcctgtcacttgtgggattgtcttggatggactggctaaaacaaacatatccaccagagcatgaaccatccatccctgaaaacttagaagataaactttatgggggaaagctcatcgtagctgttcattttgaaaactgccaggacgtgtttagctttcaagtgtctcctaatatgaatcctatcaaagtaaatgaattggcaatccaaaaacgtttgactattcatgggaaggaagatgaagttagcccctatgattatgtgttgcaagtcagcgggagagtagaatatgtttttggtgatcatccactaattcagttccagtatatccggaactgtgtgatgaacagagccctgccccattttatacttgtggaatgctgcaagatcaagaaaatgtatgaacaagaaatgattgccatagaggctgccataaatcgaaattcatctaatcttcctcttccattaccaccaaagaaaacacgaattatttctcatgtttgggaaaataacaaccctttccaaattgtcttggttaagggaaataaacttaacacagaggaaactgtaaaagttcatgtcagggctggtctttttcatggtactgagctcctgtgtaaaaccatcgtaagctcagaggtatcagggaaaaatgatcatatttggaatgaaccactggaatttgatattaatatttgtgacttaccaagaatggctcgattatgttttgctgtttatgcagttttggataaagtaaaaacgaagaaatcaacgaaaactattaatccctctaaatatcagaccatcaggaaagctggaaaagtgcattatcctgtagcgtgggtaaatacgatggtttttgactttaaaggacaattgagaactggagacataatattacacagctggtcttcatttcctgatgaactcgaagaaatgttgaatccaatgggaactgttcaaacaaatccatatactgaaaatgcaacagctttgcatgttaaatttccagagaataaaaaacaaccttattattaccctcccttcgataagattattgaaaaggcagctgagattgcaagcagtgatagtgctaatgtgtcaagtcgaggtggaaaaaagtttcttcctgtattgaaagaaatcttggacagggatcccttgtctcaactgtgtgaaaatgaaatggatcttatttggactttgcgacaagactgccgagagattttcccacaatcactgccaaaattactgctgtcaatcaagtggaataaacttgaggatgttgctcagcttcaggcgctgcttcagatttggcctaaactgcccccccgggaggccctagagcttctggatttcaactatccagaccagtacgttcgagaatatgctgtaggctgcctgcgacagatgagtgatgaagaactttctcaatatcttttacaactggtgcaagtgttaaaatatgagccttttcttgattgtgccctctctagattcctattagaaagagcacttggtaatcggaggatagggcagtttctattttggcatcttaggtcagaagtgcacattcctgctgtctcagtacaatttggtgtcatccttgaagcatactgccggggaagtgtggggcacatgaaagtgctttctaagcaggttgaagcactcaataagttaaaaactttaaatagtttaatcaaactgaatgccgtgaagttaaacagagccaaagggaaggaggccatgcatacctgtttaaaacagagtgcttaccgggaagccctctctgacctgcagtcacccctgaacccatgtgttatcctctcagaactctatgttgaaaagtgcaaatacatggattccaaaatgaagcctttgtggctggtatacaataacaaggtatttggtgaggattcagttggagtgatttttaaaaatggtgatgatttacgacaggatatgttgacactccaaatgttgcgcttgatggatttactctggaaagaagctggtttggatcttcgctggatacagtggctcttgcttgtaatcctaatattttggaaggccaaggtgagaggatcgcttgaacccgggagttcaagactatcctgggcaacagagcaagaccctagctcagtaaataaatagataaataaataaataaaatttaatttccaaaggcatac

SEQ ID NO: 410451 - DNA, 1774 bp, Homo sapiens
cttactggatttgggtggtagtggcaagcagctgtgcatcctgcagtaattataaattattttcatcttcaaaaaccttttggaagaagtcatattatctccctatcttggggttctgcctcctgcagatgatatttaaataagaacatgaagcatgctgcctgatggtggctggggaggcacaaccaatccagcctcctgcagactttgatatttgcacatctctactaaagttatataaaatcatattttcccccttccattttaggactctcttgcattagggaagagtgaagaagaagcactcaaacagtttaagcaaaaatttgatgaggcgctcagggaaagctggactactaaagtgaactggatggcccacacagttcggaaagactacagatcttaacgatcagccttcgctcctaatgtatttgttggtttcatttcattttcattttgcacttgcactaaattgaacatgaccctgttagagatgttataaagggaatgaaatcctggaactcagagttaaattaagaacaaggcatcccacagaacctaatctgaacaatccccgatgattccctctgctttttgaatgcttccaagacttatcatgaaaactgtcaatggataatcatttcctgctgactttgcacgccaaggaatgctactagggattgtttccgtttttgtttgttttttctaatatttggtacttcccagaatggtgtaaatacttcttttcaatgttgtgaccaagtattgtcactcagccaacaacttttccacacctgggggttggtggctgttcttactgtccaaatgaagctaaaaagaaaggcatctttcttcccttttaaaattgtgtaaactgcaaattataatataatttgaatttatgattattttccagaagaaatcttgtaaacctgtggatactcattaattcttttgttaatatttatttccatgatagcatcattccagccagacttgctgaaaatctactggtgaggcaaatataacatatataaatatgctacatatatatttataaaatttctagtgggagttctatataaatgtttctttggtattcttcagcctgtgatttaaagttttacaaaaagcagagctttttcctaagttacttttcagttaggtaactgtgtgatccagttcttccagctgcttctataatgaggcacatattactaccagtttttatatggtatctatgaaagagttcacttcatagagaataatacttgagcaaatgtatccaagaaagcaagcaaatgaaaagaaacctatttatggaataaactccagatctgaaattcagtattttagaaaaatgccagctcttcttactgtatttattaaaacttgtaataatgtgatttttttcaaggatattagttcaaattgaaatggtttcacgccacacggaaatctttaagttatttgttgaggtaccatatatttagggtgctaggggcaagtaatgttaatatgtgcaataggaactactggtttgaatgtgtaaatgggtgatctctctgagtcctggcaacatccagcaaaactactgcttattctccaaagaatattgggagctctcaatcctcggtgatatgggaaagagaactgagtatttgccctatgactgagctttctataggaattttattaaagaatgtttaattttgttgtccttcttaatgttctcagtcaaataaatgagtgagctggtttcggctgctcttgg

SEQ ID NO: 410452 - DNA, 2000 bp, Homo sapiens
gggaggtgatcgagagaggcagggatgggggcgccggagtggagcggttgcggcggcctgggctgctgactgcgcacttggaatagtagcaggcggcggcggcggaacgccaggcagtgtatgttttaactggaaaaagtcttccatgaaaacgtcacttttaaaaaataagtaatgccatctgttttcctaaaagactgaaatgggggcgaccattcttagggccccgtggttatgaatgtgcttcagtttcataatgcctcctgctatggcagacatccttgacatctgggcggtggattcacagatagcatctgatggctccatacctgtggatttccttttgcccactgggatttatatccagttggaggtacctcgggaagctaccatttcttatattaagcagatgttatggaagcaagttcacaattacccaatgttcaacctccttatggatattgactcctatatgtttgcatgtgtgaatcagactgctgtatatgaggagcttgaagatgaaacacgaagactctgtgatgtcagaccttttcttccagttctcaaattagtgacaagaagttgtgacccaggggaaaaattagactcaaaaattggagtccttataggaaaaggtctgcatgaatttgattccttgaaggatcctgaagtaaatgaatttcgaagaaaaatgcgcaaattcagcgaggaaaaaatcctgtcacttgtgggattgtcttggatggactggctaaaacaaacatatccaccagagcatgaaccatccatccctgaaaacttagaagataaactttatgggggaaagctcatcgtagctgttcattttgaaaactgccaggacgtgtttagctttcaagtgtctcctaatatgaatcctatcaaagtaaatgaattggcaatccaaaaacgtttgactattcatgggaaggaagatgaagttagcccctatgattatgtgttgcaagtcagcgggagagtagaatatgtttttggtgatcatccactaattcagttccagtatatccggaactgtgtgatgaacagagccctgccccattttatacttgtggaatgctgcaagatcaagaaaatgtatgaacaagaaatgattgccatagaggctgccataaatcgaaattcatctaatcttcctcttccattaccaccaaagaaaacacgaattatttctcatgtttgggaaaataacaaccctttccaaattgtcttggttaagggaaataaacttaacacagaggaaactgtaaaagttcatgtcagggctggtctttttcatggtactgagctcctgtgtaaaaccatcgtaagctcagaggtatcagggaaaaatgatcatatttggaatgaaccactggaatttgatattaatatttgtgacttaccaagaatggctcgattatgttttgctgtttatgcagttttggataaagtaaaaacgaagaaatcaacgaaaactattaatccctctaaatatcagaccatcaggaaagctggaaaagtgcattatcctgtagcgtgggtaaatacgatggtttttgactttaaaggacaattgagaactggagacataatattacacagctggtcttcatttcctgatgaactcgaagaaatgttgaatccaatgggaactgttcaaacaaatccatatactgaaaatgcaacagctttgcatgttaaatttccagagaataaaaaacaaccttattattaccctcccttcgataagagtcgaggtggaaaaaagtttcttcctgtattgaaagaaatcttggacagggatcccttgtctcaactgtgtgaaaatgaaatggatcttatttggactttgcgacaagactgccgagagattttcccacaatcactgccaaaattactgctgtcaatcaagtggaataaacttgaggatgttgctcaggtaacaaaagatcgtttctataactttttttgggtgtatggta

SEQ ID NO: 410453 - DNA, 4819 bp, Homo sapiens
gggaggtgatcgagagaggcagggatgggggcgccggagtggagcggttgcggcggcctgggctgctgactgcgcacttggaatagtagcaggcggcggcggcggaacgccaggcagtgtatgttttaactggaaaaagtcttccatgaaaacgtcacttttaaaaaataagtaatgccatctgttttcctaaaagactgaaatgggggcgaccattcttagggccccgtggttatgaatgtgcttcagtttcataatgcctcctgctatggcagacatccttgacatctgggcggtggattcacagatagcatctgatggctccatacctgtggatttccttttgcccactgggatttatatccagttggaggtacctcgggaagctaccatttcttatattaagcagatgttatggaagcaagttcacaattacccaatgttcaacctccttatggatattgactcctatatgtttgcatgtgtgaatcagactgctgtatatgaggagcttgaagatgaaacacgaagactctgtgatgtcagaccttttcttccagttctcaaattagtgacaagaagttgtgacccaggggaaaaattagactcaaaaattggagtccttataggaaaaggtctgcatgaatttgattccttgaaggatcctgaagtaaatgaatttcgaagaaaaatgcgcaaattcagcgaggaaaaaatcctgtcacttgtgggattgtcttggatggactggctaaaacaaacatatccaccagagcatgaaccatccatccctgaaaacttagaagataaactttatgggggaaagctcatcgtagctgttcattttgaaaactgccaggacgtgtttagctttcaagtgtctcctaatatgaatcctatcaaagtaaatgaattggcaatccaaaaacgtttgactattcatgggaaggaagatgaagttagcccctatgattatgtgttgcaagtcagcgggagagtagaatatgtttttggtgatcatccactaattcagttccagtatatccggaactgtgtgatgaacagagccctgccccattttatacttgtggaatgctgcaagatcaagaaaatgtatgaacaagaaatgattgccatagaggctgccataaatcgaaattcatctaatcttcctcttccattaccaccaaagaaaacacgaattatttctcatgtttgggaaaataacaaccctttccaaattgtcttggttaagggaaataaacttaacacagaggaaactgtaaaagttcatgtcagggctggtctttttcatggtactgagctcctgtgtaaaaccatcgtaagctcagaggtatcagggaaaaatgatcatatttggaatgaaccactggaatttgatattaatatttgtgacttaccaagaatggctcgattatgttttgctgtttatgcagttttggataaagtaaaaacgaagaaatcaacgaaaactattaatccctctaaatatcagaccatcaggaaagctggaaaagtgcattatcctgtagcgtgggtaaatacgatggtttttgactttaaaggacaattgagaactggagacataatattacacagctggtcttcatttcctgatgaactcgaagaaatgttgaatccaatgggaactgttcaaacaaatccatatactgaaaatgcaacagctttgcatgttaaatttccagagaataaaaaacaaccttattattaccctcccttcgataagattattgaaaaggcagctgagattgcaagcagtgatagtgctaatgtgtcaagtcgaggtggaaaaaagtttcttcctgtattgaaagaaatcttggacagggatcccttgtctcaactgtgtgaaaatgaaatggatcttatttggactttgcgacaagactgccgagagattttcccacaatcactgccaaaattactgctgtcaatcaagtggaataaacttgaggatgttgctcagcttcaggcgctgcttcagatttggcctaaactgcccccccgggaggccctagagcttctggatttcaactatccagaccagtacgttcgagaatatgctgtaggctgcctgcgacagatgagtgatgaagaactttctcaatatcttttacaactggtgcaagtgttaaaatatgagccttttcttgattgtgccctctctagattcctattagaaagagcacttggtaatcggaggatagggcagtttctattttggcatcttaggtcagaagtgcacattcctgctgtctcagtacaatttggtgtcatccttgaagcatactgccggggaagtgtggggcacatgaaagtgctttctaagcaggttgaagcactcaataagttaaaaactttaaatagtttaatcaaactgaatgccgtgaagttaaacagagccaaagggaaggaggccatgcatacctgtttaaaacagagtgcttaccgggaagccctctctgacctgcagtcacccctgaacccatgtgttatcctctcagaactctatgttgaaaagtgcaaatacatggattccaaaatgaagcctttgtggctggtatacaataacaaggtatttggtgaggattcagttggagtgatttttaaaaatggtgatgatttacgacaggatatgttgacactccaaatgttgcgcttgatggatttactctggaaagaagctggtttggatcttcggatgttgccttatggctgtttagcaacaggagatcgctctggcctcattgaagttgtgagcacctctgaaacaattgctgacattcagctgaacagtagcaatgtggctgctgcagcagccttcaacaaagatgcccttctgaactggcttaaagaatacaactctggggatgacctggaccgagccattgaggaatttacactgtcctgtgctggctactgtgtagcttcttatgtccttgggattggtgacagacatagtgacaacatcatggtcaaaaaaactggccagctcttccacattgactttggacatattcttggaaatttcaaatctaagtttggcattaaaagggagcgagtgccttttattcttacctatgatttcatccatgtcattcaacaaggaaaaacaggaaatacagaaaagtttggccggttccgccagtgttgtgaggatgcatatctgattttacgacggcatgggaatctcttcatcactctctttgcgctgatgttgactgcagggcttcctgaactcacatcagtcaaagatatacagtatcttaaggactctcttgcattagggaagagtgaagaagaagcactcaaacagtttaagcaaaaatttgatgaggcgctcagggaaagctggactactaaagtgaactggatggcccacacagttcggaaagactacagatcttaacgatcagccttcgctcctaatgtatttgttggtttcatttcattttcattttgcacttgcactaaattgaacatgaccctgttagagatgttataaagggaatgaaatcctggaactcagagttaaattaagaacaaggcatcccacagaacctaatctgaacaatccccgatgattccctctgctttttgaatgcttccaagacttatcatgaaaactgtcaatggataatcatttcctgctgactttgcacgccaaggaatgctactagggattgtttccgtttttgtttgttttttctaatatttggtacttcccagaatggtgtaaatacttcttttcaatgttgtgaccaagtattgtcactcagccaacaacttttccacacctgggggttggtggctgttcttactgtccaaatgaagctaaaaagaaaggcatctttcttcccttttaaaattgtgtaaactgcaaattataatataatttgaatttatgattattttccagaagaaatcttgtaaacctgtggatactcattaattcttttgttaatatttatttccatgatagcatcattccagccagacttgctgaaaatctactggtgaggcaaatataacatatataaatatgctacatatatatttataaaatttctagtgggagttctatataaatgtttctttggtattcttcagcctgtgatttaaagttttacaaaaagcagagctttttcctaagttacttttcagttaggtaactgtgtgatccagttcttccagctgcttctataatgaggcacatattactaccagtttttatatggtatctatgaaagagttcacttcatagagaataatacttgagcaaatgtatccaagaaagcaagcaaatgaaaagaaacctatttatggaataaactccagatctgaaattcagtattttagaaaaatgccagctcttcttactgtatttattaaaacttgtaataatgtgatttttttcaaggatattagttcaaattgaaatggtttcacgccacacggaaatctttaagttatttgttgaggtaccatatatttagggtgctaggggcaagtaatgttaatatgtgcaataggaactactggtttgaatgtgtaaatgggtgatctctctgagtcctggcaacatccagcaaaactactgcttattctccaaagaatattgggagctctcaatcctcggtgatatgggaaagagaactgagtatttgccctatgactgagctttctataggaattttattaaagaatgtttaattttgttgtccttcttaatgttctcagtcaaataaatgagtgagctggtttcggctgctcttgg

SEQ ID NO: 410454 - DNA, 4765 bp, Homo sapiens
gggaggtgatcgagagaggcagggatgggggcgccggagtggagcggttgcggcggcctgggctgctgactgcgcacttggaatagtagcaggcggcggcggcggaacgccaggcagtgtatgttttaactggaaaaagtcttccatgaaaacgtcacttttaaaaaataagtaatgccatctgttttcctaaaagactgaaatgggggcgaccattcttagggccccgtggttatgaatgtgcttcagtttcataatgcctcctgctatggcagacatccttgacatctgggcggtggattcacagatagcatctgatggctccatacctgtggatttccttttgcccactgggatttatatccagttggaggtacctcgggaagctaccatttcttatattaagcagatgttatggaagcaagttcacaattacccaatgttcaacctccttatggatattgactcctatatgtttgcatgtgtgaatcagactgctgtatatgaggagcttgaagatgaaacacgaagactctgtgatgtcagaccttttcttccagttctcaaattagtgacaagaagttgtgacccaggggaaaaattagactcaaaaattggagtccttataggaaaaggtctgcatgaatttgattccttgaaggatcctgaagtaaatgaatttcgaagaaaaatgcgcaaattcagcgaggaaaaaatcctgtcacttgtgggattgtcttggatggactggctaaaacaaacatatccaccagagcatgaaccatccatccctgaaaacttagaagataaactttatgggggaaagctcatcgtagctgttcattttgaaaactgccaggacgtgtttagctttcaagtgtctcctaatatgaatcctatcaaagtaaatgaattggcaatccaaaaacgtttgactattcatgggaaggaagatgaagttagcccctatgattatgtgttgcaagtcagcgggagagtagaatatgtttttggtgatcatccactaattcagttccagtatatccggaactgtgtgatgaacagagccctgccccattttatacttgtggaatgctgcaagatcaagaaaatgtatgaacaagaaatgattgccatagaggctgccataaatcgaaattcatctaatcttcctcttccattaccaccaaagaaaacacgaattatttctcatgtttgggaaaataacaaccctttccaaattgtcttggttaagggaaataaacttaacacagaggaaactgtaaaagttcatgtcagggctggtctttttcatggtactgagctcctgtgtaaaaccatcgtaagctcagaggtatcagggaaaaatgatcatatttggaatgaaccactggaatttgatattaatatttgtgacttaccaagaatggctcgattatgttttgctgtttatgcagttttggataaagtaaaaacgaagaaatcaacgaaaactattaatccctctaaatatcagaccatcaggaaagctggaaaagtgcattatcctgtagcgtgggtaaatacgatggtttttgactttaaaggacaattgagaactggagacataatattacacagctggtcttcatttcctgatgaactcgaagaaatgttgaatccaatgggaactgttcaaacaaatccatatactgaaaatgcaacagctttgcatgttaaatttccagagaataaaaaacaaccttattattaccctcccttcgataagattattgaaaaggcagctgagattgcaagcagtgatagtgctaatgtgtcaagtcgaggtggaaaaaagtttcttcctgtattgaaagaaatcttggacagggatcccttgtctcaactgtgtgaaaatgaaatggatcttatttggactttgcgacaagactgccgagagattttcccacaatcactgccaaaattactgctgtcaatcaagtggaataaacttgaggatgttgctcagcttcaggcgctgcttcagatttggcctaaactgcccccccgggaggccctagagcttctggatttcaactatccagaccagtacgttcgagaatatgctgtaggctgcctgcgacagatgagtgatgaagaactttctcaatatcttttacaactggtgcaagtgttaaaatatgagccttttcttgattgtgccctctctagattcctattagaaagagcacttggtaatcggaggatagggcagtttctattttggcatcttaggtcagaagtgcacattcctgctgtctcagtacaatttggtgtcatccttgaagcatactgccggggaagtgtggggcacatgaaagtgctttctaagcaggttgaagcactcaataagttaaaaactttaaatagtttaatcaaactgaatgccgtgaagttaaacagagccaaagggaaggaggccatgcatacctgtttaaaacagagtgcttaccgggaagccctctctgacctgcagtcacccctgaacccatgtgttatcctctcagaactctatgttgaaaagtgcaaatacatggattccaaaatgaagcctttgtggctggtatacaataacaaggtatttggtgaggattcagttggagtgatttttaaaaatggtgatgatttacgacaggatatgttgacactccaaatgttgcgcttgatggatttactctggaaagaagctggtttggatcttcggatgttgccttatggctgtttagcaacaggagatcgctctggcctcattgaagttgtgagcacctctgaaacaattgctgacattcagctgaacagtagcaatgtggctgctgcagcagccttcaacaaagatgcccttctgaactggcttaaagaatacaactctggggatgacctggaccgagccattgaggaatttacactgtcctgtgctggctactgtgtagcttcttatgtccttgggattggtgacagacatagtgacaacatcatggtcaaaaaaactggccagctcttccacattgactttggacatattcttggaaatttcaaatctaagtttggcattaaaagggagcgagtgccttttattcttacctatgatttcatccatgtcattcaacaaggaaaaacaggaaatacagaaaagtttggccggttccgccagtgttgtgaggatgcatatctgattttacgacggcatgggaatctcttcatcactctctttgcgctgatgttgactgcagggcttcctgaactcacatcagtcaaagatatacagtatcttaaggactctcttgcattagggaagagtgaagaagaagcactcaaacagtttaagcaaaaatttgatgaggcgctcagggaaagctggactactaaagtgaactggatggcccacacagttcggaaagactacagatcttaacgatcagccttcgctcctaatgtatttgttggtttcatttcattttcattttgcacttgcactaaattgaacatgaccctgttagagatgttataaagggaatgaaatcctggaactcagagttaaattaagaacaaggcatcccacagaacctaatctgaacaatccccgatgattccctctgctttttgaatgcttccaagacttatcatgctagggattgtttccgtttttgtttgttttttctaatatttggtacttcccagaatggtgtaaatacttcttttcaatgttgtgaccaagtattgtcactcagccaacaacttttccacacctgggggttggtggctgttcttactgtccaaatgaagctaaaaagaaaggcatctttcttcccttttaaaattgtgtaaactgcaaattataatataatttgaatttatgattattttccagaagaaatcttgtaaacctgtggatactcattaattcttttgttaatatttatttccatgatagcatcattccagccagacttgctgaaaatctactggtgaggcaaatataacatatataaatatgctacatatatatttataaaatttctagtgggagttctatataaatgtttctttggtattcttcagcctgtgatttaaagttttacaaaaagcagagctttttcctaagttacttttcagttaggtaactgtgtgatccagttcttccagctgcttctataatgaggcacatattactaccagtttttatatggtatctatgaaagagttcacttcatagagaataatacttgagcaaatgtatccaagaaagcaagcaaatgaaaagaaacctatttatggaataaactccagatctgaaattcagtattttagaaaaatgccagctcttcttactgtatttattaaaacttgtaataatgtgatttttttcaaggatattagttcaaattgaaatggtttcacgccacacggaaatctttaagttatttgttgaggtaccatatatttagggtgctaggggcaagtaatgttaatatgtgcaataggaactactggtttgaatgtgtaaatgggtgatctctctgagtcctggcaacatccagcaaaactactgcttattctccaaagaatattgggagctctcaatcctcggtgatatgggaaagagaactgagtatttgccctatgactgagctttctataggaattttattaaagaatgtttaattttgttgtccttcttaatgttctcagtcaaataaatgagtgagctggtttcggctgctcttgg

SEQ ID NO: 410455 - DNA, 2654 bp, Homo sapiens
ccccaaatggaatcccttgttaagaaatcaagaatggtctcaaaatagttctaattttaatccaatgatttgttctaattttttattcactaaatgtaataatgtaaagttaagcaaataaaaggaaacgagagaaggaatgttaagtggagaaggtgagaagggccaatcttaggttttgagtccagcctatctggcattagtatatgccacccaaggctgtcctcatggttgcttttctaccaagtgggactcttctaagtctgactcttctgcagacctgacaggaataggtgaggagttttcccaagcctagtatatagtggtaaaattataatcttctgtatcattacactgaagttgactaattttccccacttgatttcagtgttgaaaagtgcaaatacatggattccaaaatgaagcctttgtggctggtatacaataacaaggtatttggtgaggattcagttggagtgatttttaaaaatggtgatgatttacgacaggatatgttgacactccaaatgttgcgcttgatggatttactctggaaagaagctggtttggatcttcggatgttgccttatggctgtttagcaacaggagatcgctctggcctcattgaagttgtgagcacctctgaaacaattgctgacattcagctgaacagtagcaatgtggctgctgcagcagccttcaacaaagatgcccttctgaactggcttaaagaatacaactctggggatgacctggaccgagccattgaggaatttacactgtcctgtgctggctactgtgtagcttcttatgtccttgggattggtgacagacatagtgacaacatcatggtcaaaaaaactggccagctcttccacattgactttggacatattcttggaaatttcaaatctaagtttggcattaaaagggagcgagtgccttttattcttacctatgatttcatccatgtcattcaacaaggaaaaacaggaaatacagaaaagtttggccggttccgccagtgttgtgaggatgcatatctgattttacgacggcatgggaatctcttcatcactctctttgcgctgatgttgactgcagggcttcctgaactcacatcagtcaaagatatacagtatcttaaggactctcttgcattagggaagagtgaagaagaagcactcaaacagtttaagcaaaaatttgatgaggcgctcagggaaagctggactactaaagtgaactggatggcccacacagttcggaaagactacagatcttaacgatcagccttcgctcctaatgtatttgttggtttcatttcattttcattttgcacttgcactaaattgaacatgaccctgttagagatgttataaagggaatgaaatcctggaactcagagttaaattaagaacaaggcatcccacagaacctaatctgaacaatccccgatgattccctctgctttttgaatgcttccaagacttatcatgaaaactgtcaatggataatcatttcctgctgactttgcacgccaaggaatgctactagggattgtttccgtttttgtttgttttttctaatatttggtacttcccagaatggtgtaaatacttcttttcaatgttgtgaccaagtattgtcactcagccaacaacttttccacacctgggggttggtggctgttcttactgtccaaatgaagctaaaaagaaaggcatctttcttcccttttaaaattgtgtaaactgcaaattataatataatttgaatttatgattattttccagaagaaatcttgtaaacctgtggatactcattaattcttttgttaatatttatttccatgatagcatcattccagccagacttgctgaaaatctactggtgaggcaaatataacatatataaatatgctacatatatatttataaaatttctagtgggagttctatataaatgtttctttggtattcttcagcctgtgatttaaagttttacaaaaagcagagctttttcctaagttacttttcagttaggtaactgtgtgatccagttcttccagctgcttctataatgaggcacatattactaccagtttttatatggtatctatgaaagagttcacttcatagagaataatacttgagcaaatgtatccaagaaagcaagcaaatgaaaagaaacctatttatggaataaactccagatctgaaattcagtattttagaaaaatgccagctcttcttactgtatttattaaaacttgtaataatgtgatttttttcaaggatattagttcaaattgaaatggtttcacgccacacggaaatctttaagttatttgttgaggtaccatatatttagggtgctaggggcaagtaatgttaatatgtgcaataggaactactggtttgaatgtgtaaatgggtgatctctctgagtcctggcaacatccagcaaaactactgcttattctccaaagaatattgggagctctcaatcctcggtgatatgggaaagagaactgagtatttgccctatgactgagctttctataggaattttattaaagaatgtttaattttgttgtccttcttaatgttctcagtcaaataaatgagtgagctggtttcggctgctcttgg

SEQ ID NO: 410456 - DNA, 2403 bp, Homo sapiens
ccccaaaatgtagagtaagagtgaaagactttgatccaatgtacttctgtccacctacacaagcaaatagaatgtttcaccagaataattagacaaaaaattttatatgtaattggcacattggaatccttgtaaattactccttctgttggccaagagatttactcctttggtggaacttgtgtttttccatatgacaataatatagtaatggcaagtatatcaataataataaaactttttttaaaaagtaaagggaaaatcttaccaaattaatgtttcattttaaggaaaatatgactctatgcccatttttttccttccaggatgttgccttatggctgtttagcaacaggagatcgctctggcctcattgaagttgtgagcacctctgaaacaattgctgacattcagctgaacagtagcaatgtggctgctgcagcagccttcaacaaagatgcccttctgaactggcttaaagaatacaactctggggatgacctggaccgagccattgaggaatttacactgtcctgtgctggctactgtgtagcttcttatgtccttgggattggtgacagacatagtgacaacatcatggtcaaaaaaactggccagctcttccacattgactttggacatattcttggaaatttcaaatctaagtttggcattaaaagggagcgagtgccttttattcttacctatgatttcatccatgtcattcaacaaggaaaaacaggaaatacagaaaagtttggccggttccgccagtgttgtgaggatgcatatctgattttacgacggcatgggaatctcttcatcactctctttgcgctgatgttgactgcagggcttcctgaactcacatcagtcaaagatatacagtatcttaaggactctcttgcattagggaagagtgaagaagaagcactcaaacagtttaagcaaaaatttgatgaggcgctcagggaaagctggactactaaagtgaactggatggcccacacagttcggaaagactacagatcttaacgatcagccttcgctcctaatgtatttgttggtttcatttcattttcattttgcacttgcactaaattgaacatgaccctgttagagatgttataaagggaatgaaatcctggaactcagagttaaattaagaacaaggcatcccacagaacctaatctgaacaatccccgatgattccctctgctttttgaatgcttccaagacttatcatgaaaactgtcaatggataatcatttcctgctgactttgcacgccaaggaatgctactagggattgtttccgtttttgtttgttttttctaatatttggtacttcccagaatggtgtaaatacttcttttcaatgttgtgaccaagtattgtcactcagccaacaacttttccacacctgggggttggtggctgttcttactgtccaaatgaagctaaaaagaaaggcatctttcttcccttttaaaattgtgtaaactgcaaattataatataatttgaatttatgattattttccagaagaaatcttgtaaacctgtggatactcattaattcttttgttaatatttatttccatgatagcatcattccagccagacttgctgaaaatctactggtgaggcaaatataacatatataaatatgctacatatatatttataaaatttctagtgggagttctatataaatgtttctttggtattcttcagcctgtgatttaaagttttacaaaaagcagagctttttcctaagttacttttcagttaggtaactgtgtgatccagttcttccagctgcttctataatgaggcacatattactaccagtttttatatggtatctatgaaagagttcacttcatagagaataatacttgagcaaatgtatccaagaaagcaagcaaatgaaaagaaacctatttatggaataaactccagatctgaaattcagtattttagaaaaatgccagctcttcttactgtatttattaaaacttgtaataatgtgatttttttcaaggatattagttcaaattgaaatggtttcacgccacacggaaatctttaagttatttgttgaggtaccatatatttagggtgctaggggcaagtaatgttaatatgtgcaataggaactactggtttgaatgtgtaaatgggtgatctctctgagtcctggcaacatccagcaaaactactgcttattctccaaagaatattgggagctctcaatcctcggtgatatgggaaagagaactgagtatttgccctatgactgagctttctataggaattttattaaagaatgtttaattttgttgtccttcttaatgttctcagtcaaataaatgagtgagctggtttcggctgctcttgg

SEQ ID NO: 410457 - DNA, 819 bp, Homo sapiens
gggaggtgatcgagagaggcagggatgggggcgccggagtggagcggttgcggcggcctgggctgctgactgcgcacttggaatagtagcaggcggcggcggcggaacgccaggcagtgtatgttttaactggaaaaagtcttccatgaaaacgtcacttttaaaaaataagtaatgccatctgttttcctaaaagactgaaatgggggcgaccattcttagggccccgtggttatgaatgtgcttcagtttcataatgcctcctgctatggcagacatccttgacatctgggcggtggattcacagatagcatctgatggctccatacctgtggatttccttttgcccactgggatttatatccagttggaggtacctcgggaagctaccatttcttatattaagcagatgttatggaagcaagttcacaattacccaatgttcaacctccttatggatattgactcctatatgtttgcatgtgtgaatcagactgctgtatatgaggagcttgaagatgaaacacgaagactctgtgatgtcagaccttttcttccagttctcaaattagtgacaagaagttgtgacccaggggaaaaattagactcaaaaattggagtccttataggaaaagagatggaatcttactgtgttacccaggatgtgggccaagtttcttcaaggcattggtatctctctgaaatttacctccttcccaacatttaccaaaacatggattcattggccaccattacctcttcctatgcctgccaaatgtggcaaataaaaatattgaagattgaaatattaaaaaaaaa

SEQ ID NO: 410458 - DNA, 903 bp, Homo sapiens
attaatcaagtctacatgtttcgtttagagtaacaggaagatggtaatacgcccagggaactatctggaagtgtagaaattgggatgaacaccgtggttatacttgttttgatctgcctgtggtgctatgatgacttattttctctcattattgcatagaaactcaattcagtgatgttattcagatgttattcataagttattgccatgattcatcacttttatgtcatcagagttgggatggctacccagaataggggatcctggagatttccctgtagacgctttgcatttataaataatcctttatcaagggcagagggatttctgtaggacttctcccttagaagaactcagcctgggtagaaatacgaggattaacatcagcacatattcatctccaaaaaattttcctccccattactcacacttgccaataaataacttgctttgggtaaatattcagcactcagtcttagtccaaagcatttgctcagcaatcactgtgtagagtacagagtaagggggataccaacaaatagaagtttgctctattttcttaagaagcttgttgtctggccaggcacggtgcctcacgccaccttcctatcttcctaggagatagatgccacaaagaagcttgttgtctgataggcagctcagcagtgatattaatttgtaatatataacaaagatatggaaaaacttgagtgccaagaaatatttaattgtaaaaaccatgaagagatcgacacatttagagtgcaataggatttcaagtccaggtgtgatggcttacgcctgtaatcctagcactgtgagaggctgaggtaggtggatcacttgagcccaggagttcgagaccagcttggccacatagcaaaaccctgcgtctactaaaaa

SEQ ID NO: 410459 - DNA, 270 bp, Homo sapiens
agcctgggcaacatagtgagactctgtctcacaaaaaaaaaaaaaaaaaaaaaggatagtatactagtagaggacttcactttattttcctattttctggaaatttcatttctttgaattcgggcataagagatttagaagcttcactcaaatattaagctttatttaaaaagatgatttccagtatttcattttatattcacattaatcaagtctacatgtttcgtttagagtaacaggaagatggtaatacgcccagggaactatctg

SEQ ID NO: 410460 - DNA, 567 bp, Homo sapiens
gaagtgaggtcgttcacatggcgtctgtaggtcccacagtagtgtggctcttggcacgactctgcccagcgcgttctcttatgtgatgtatgtgggttataccatttaatactcataatactcctgcagagtaggtattgttttttccattttaaggtgagaagactgcagcgtagaaagttgaattgcttgacccaaaccacacggctggtaggaaacagaggcaggcttcaggcccagacctgatgaccccaaacttattctccttccctttacgatgttgcctcctggcaggtctttcacatcccaaaaatgactagacaggaaaatgtctagatacctttcctgactgaccttcccccaactcaattgattaacaagaaattgactaacagattaaaaagaataaatactgataaactaacaaatcaaaccagttggtggtttggtgccttgttccatagccatatccaacatgaaagatccagatgcagctcccaggcagtatctggtgctcggcccttgctcatgagcctacccattccctgtgtgtgcctcaacttcatg

SEQ ID NO: 410461 - DNA, 562 bp, Homo sapiens
ccaatataaccctttgtccaaagtaggcaaagagagaagaaattacttcttcacgtccctgccgtttcagaccatgatggatttacgtgggttataccatttaatactcataatactcctgcagagtaggtattgttttttccattttaaggtgagaagactgcagcgtagaaagttgaattgcttgacccaaaccacacggctggtaggaaacagaggcaggcttcaggcccagacctgatgaccccaaacttattctccttccctttacgatgttgcctcctggcaggtctttcacatcccaaaaatgactagacaggaaaatgtctagatacctttcctgactgaccttcccccaactcaattgattaacaagaaattgactaacagattaaaaagaataaatactgataaactaacaaatcaaaccagttggtggtttggtgccttgttccatagccatatccaacatgaaagatccagatgcagctcccaggcagtatctggtgctcggcccttgctcatgagcctacccattccctgtgtgtgcctcaacttcatg

SEQ ID NO: 410462 - DNA, 569 bp, Homo sapiens
tccagcctgggtaacaaagtgagacccagtctcacaaaaagaaaacaagatgaggaatttattctggattatataggtgggccttaaatgccatcccaagtgtccttgctagagaggcaggaggagattgaaaacacaaagagaaggtgttgtgaagagttaggcagagtttggagtgatagggccgtaagacaaggaactgtggcagccaccagaagcaggaagaggcaaggaacagattatcccccagagcctctgaagggagcacagccctgccaacacctagatctcagacttctggcctccagaactgtgagagaacaaattcctattttgagtcaccaaggttatgggaatttgttacagctcccagaggaaggtaatacacgtaccaatagccatttggctctactgccttataaaaagcatgcagagaatgctatagaaagtgtatttcaaaaattagctgggtgcgttggtgcatgcctgtaatcccagctacttgagaggctgaggcatgagaatcgcttgaacccaggaggtggaggttgcagtgagccgagatcatg

SEQ ID NO: 410463 - DNA, 401 bp, Homo sapiens
actttctcaacttttaatcagccttttccttgctacaagtagggtgcattttccttggcggtgaggaaatatgaaaaataaatgctacgtaaaagtgaataattcagggccaggcatagtggctcacgcttgtaatcccatcattttgggagggcgaggcaggtggatcacttgaggtcaggagttcaagagcagtctggtcaacatggtgaaaccccatctctactttttaaaaagaaaacaaaacaaaacaaaactagccaggcatggtggcatatacctgtaattccagctttgggaggctggggcatgagaattgcttgaacccaggaggcagtgatttaagatcacagcactgtactccagcctaggtgacggagtgagactctgtctcaaaaaaa

SEQ ID NO: 410464 - DNA, 180 bp, Homo sapiens
ggcccatgcccaataatgagaatgagaagaaatcattttatcagttttgctggtagatttttttctcaattagaagaataagagaatgttggagaattcagcaggacttagaatgctggttcattggggaacatagatacagcagagtaagaaaaattggaagaaataagaactgggact

SEQ ID NO: 410465 - DNA, 293 bp, Homo sapiens
gagtcactttggatttgatcgatgataatccacagtcatgctccaagactcatctcttttgctctggccaaacagacccatgaaataagaatgtcataattatcaccattccttttttttttttgagacagtctcgctctgtcgccaggctggagtgccgtggtgcagtcttagctcactgcaatctccgcctcccggagaatcacttgatcctgggaggtggaggttgcagtgagctgagatcatgccactgcactccagtccgggtgacagagcaagactctatctaaaaa

SEQ ID NO: 410466 - DNA, 775 bp, Homo sapiens
cctgaggctgaagagggaggaagctggaaactccgtgcgggtaactgaatgctaaggctgcttcctggcctccagcggtgtctgaggaaaggagcatagctgcaaatccaaggatacacaaaggagccatgctgccaagtaagagcccgtcttccatccattgctctcaagcactatctaccagatcgcagcccaaactacaacaacaacaaaaaagtcactctgccacttctccctgctgataaaccaagggcaagaattcaaccacaaagacccttacagagccttagccctctgaaaacttccggatacaaagccaactgactatgctagattaccatcacagttaaaggaacccagccttctcagatgggaaaaaaatcagaataagaactctggcaattcagaaagccagtgtcccctcacctccaaacaggcccactaggttcccagcaatggttaatcagtctgaaatgtctgaaatggcagtcatagaattcagaatctggatggctaggaagcttatcaagaccaagagaaagttgaaactcaatccaaggatgcaaagcaattcagtaaaatgattcaagagttgaaagactaagaagccgttttaagaaagacccaaaattgaacttcttgaactgaaaaattcgctacgagaatttcaaactacaagcagaactattaacagcagaatagaccaagcagagaaaagaacctcagggcttgaagacagttaattaagtcaactcagtcaggcaaaaataaagag

SEQ ID NO: 410467 - DNA, 710 bp, Homo sapiens
cagccctgtctttgacatcttatctgacaatctccccctccttctccaacacttggttaggtggcttttctatgttctcctataacacactacacttctcccagcacagaacttaccacactgcacaatggtctgtttgccaatcagagaagcaacatgccagcatggcagggaatccaggctttgggggcggacagttctgggtttgaaaatatccccacctctcactagctgtatgactatcagcaagttactaaatctctaggctttgaactcctcatctgtaacacgggctagaaacacctacctcacatggttgctgcaaagactaaatcagacaaggcaggaagaacatggtacaagcacctaagaagcactcagtaagtggtagttattttttattattttttgagacgaggtctgtcatgcaggctggagtacagcggcatgatcatggctcactgcagtctcaaccacccagactcaagcgatcctcccacctcagcctccagagtagctgggaccacagatgtgtaccatcacactcagctaattttaaaattatgaatatttgtagaggtgaggtctcactacgttgcccaggatggtctcgagctcctgacctcaagtgatctgcccacattggcctcccaaagtgctggaattacaggctaagccaccacacccggcctattatttccctattataa

SEQ ID NO: 410468 - DNA, 619 bp, Homo sapiens
aattaaaaaacttagccttcggactcataaaaggttcatttacttgtgtttgttctttagtacccgaagctgtgacaaatgcctcaaggatcaaatgtctggggctgggcgtggtgtttcaatcagtcctttatagagtagcagatgcctcaagagggaaaaacaaacagaaacaacagaagagatggtggacatgtgcaggcatcaagttaaatcagtgttaggttctgagaatatagatttccaatgaggaaatatttgcagctatacaaccaaccaatagaaaaaaaaaaaaggaaaaaaggaattagacaagaagtctatgactgatttgaacttgcagtgtcttaatttttaaagtacttttattttaagtgcttacttaatcctcacaactcttaagtaggtactactattattcttattttactgacgaggaaagagggctcaaaaagtccagtaagttgactgtggatatccagctggtaaatgagagtaagggttcaaatcccagacactctgatttcaaagcccattctcttagtaacttatacctcatactgataaataaatcataattaagtctatttgcatccaaagcttcacagtgattcttcct

SEQ ID NO: 410469 - DNA, 427 bp, Homo sapiens
ttttttttttttttcagatagagtcccattctatcacccaggttggagtgcagtagagtggagtgatcagctaactgcagcctgcagccttgaactcctaggctcaagcaatcctttcaccttagcctcccaaagtgctgggattacaggcatgtgccactgtgcctggccctcttttctttatacaattttttaaaaaaggaaaatttggactctatcctaagcaaaatgggagaaaaaagcagactagggatataaacggtatgagggtcctactgggagctcagctaatgttataaatcaaggggtggtgccaattcacaagtccgtaaaaatctccagcagcactctgtactgtggctgtaggaatggagaaaatggatggctggatttgactagacctaagatttataggacaaatgaagta

SEQ ID NO: 410470 - DNA, 400 bp, Homo sapiens
gcggccctactactactaaatttgcgaccgccctcctggagtctcggccgtcacagcagcttccggagagcgctgtgtgcctctggccttcctggcatgggaaagaggtcagctacctgtgttcggtcaacaagatgtccagcgcttagtttggtctcacctggatgctcctttctcctctagagatggaaaactgttgtcctgaaagcgtcaccaaacaaaacctgtggaaaggtaatggggggacccacgagcaagagctgacagaaaaatgaccacgggccgggtgcagtggctcacgcctgtaatcccagcactttgggaggccaaggcgggcggatcatctgagttcaggggttcaagaccaacctggccaacatggtgaaacctcgtccctact

SEQ ID NO: 410471 - DNA, 517 bp, Homo sapiens
ctgtaggtccagtgtaagagttccgctattcggtctcacacctacagtggactacccgatttttcgcttctcttcagggatgagtcatgtggtggtgaaaaatgaccctgaactggaccagcagcttgctaatctggacctgaactctgaaaaacagagtggaggagcaagtacagcgagcaaagggcgctatatacctcctcacttaaggaacagagaagcatctaaaggtacgtctttaaggcaactttgtagacctaacctttagcagctaatcaaagcctagggaagaaagtaactttaggaggtctataaatgttttttgtcccctcctgtgcctctttcagactgtctttaagaactagcactttctgtttttggaacagtttgtataatgttgaatgatggatagttgtttcctttggcaaactgagcccaaagaatctgagttttgtatagtggtttatctgtttgtaaacatttatgttttgaaatttgaaaccagtgtatttgtgga

SEQ ID NO: 410472 - DNA, 4652 bp, Homo sapiens
ctgtaggtccagtgtaagagttccgctattcggtctcacacctacagtggactacccgatttttcgcttctcttcagggatgagtcatgtggtggtgaaaaatgaccctgaactggaccagcagcttgctaatctggacctgaactctgaaaaacagagtggaggagcaagtacagcgagcaaagggcgctatatacctcctcacttaaggaacagagaagcatctaaaggattccatgataaagacagttcaggttggagttgcagcaaagataaggatgcatatagcagttttgggtctcgagattctagaggaaagcctggttatttcagtgaacgtggaagtggatcaaggggaagatttgatgatcgtggacggagtgactatgatggtattggcaatcgtgaaagacctggctttggcagatttgaacggagtggacatagtcgttggtgtgacaagtcagttgaagatgattggtcaaaaccacttccaccaagtgaacgcttggagcaagaactgttttctggaggaaacacggggattaactttgagaaatatgatgatataccagtagaggcaaccggcagtaactgtcctccacatattgagaattttagcgatattgacatgggagaaattatcatggggaacattgaacttactcgctatactcgtcctactccagtgcaaaaacatgccattcctattattaagggaaaaagagacttaatggcttgtgcccaaacaggatctgggaaaactgcagcatttcttttacccatactgagtcagatatatacagatggtccaggagaagctttgaaggctgtgaaggtaaaggttttgttataaaatcagacatttttgttttaaaaagctttgcaaagccctgttgacttttctaacggatgccagatacaccttattttcatttttttttttttacccctttcacccactgaaaataagtttgtagatgtaatctgcaaattataaagagaaagtgatgaatttttaaaaacaattgaagttttgggttatgaatttaaaattatatttatgttttaggaaaatggaaggtatgggcgccgcaaacaatatccaatatccttggttttagccccaacaagagaattggctgtacagatctatgaggaagccagaaaattttcctaccgatctagagttcgtccttgtgtagtttatggtggtgctgatattggtcagcagattcgggacttagaacgtggatgccacttgttagtagccactccaggacgtctagtggatatgatggaaagaggaaagattggattagacttctgcaagtacttagtgttggatgaagctgataggatgctggatatgggatttgaacctcagatacgtcgtatagttgaacaagatactatgccaccaaagggcgttcgtcacaccatgatgtttagtgctacttttcctaaggaaatacagatgcttgctcgtgactttttggatgaatatatctttttggctgtaggcagagtaggctctacctctgagaacatcacacagaaagtagtttgggtggaagacttagataaacggtcatttctactggacattttaggtgcaacagggagtgattcacttactttagtgtttgtggagaccaaaaagggagcagattccctggaggatttcttataccatgaaggatatgcttgtactagtattcatggagaccggtcacagagagatcgagaggaggcccttcaccagtttcgctcaggaaaaagcccaattctagtggctacagctgtggcagcacgaggactagacatttcaaatgtgagacatgttatcaattttgatttgccaagtgatattgaagaatatgtgcatcgtattggccgtacaggacgtgtaggaaacctgggccttgccacctcattctttaatgaaaaaaatatgaatattacaaaggatttgttggatcttcttgtagaagctaaacaagaagtgccttcttggttggaaaatatggcttatgaacaccactacaagggtggcagtcgtggacgatctaaaagtaatagattcagtggaggatttggtgccagagactatcgacaaagtagtggttccagcagttctggctttggtgctagtcgcggaagcagcagccgcagtggtggaggtggttacggcaacagcagaggatttggtggaggtggctatggaggcttctacaatagtgatggatatggaggaaattataactcccagggggttgactggtggggcaactgaatctgctttgcagcaaagtcacccttacaaagaagctaatatggaaaccacatgtaacttagccagactatattgtgtagcttcaagaacttgcagtacattaccagctgtgattctcctgataattcaagggagctcaaagtcacaagaagaaaaatgaaaggaaaaaacagcagccctattcagaaattggtttgaagatgtaattgctctagtttggattaaactcttcccctcctgctttagtgccaccccaaactgcatttataattttgtgactgaggatcgtttgtttgttaacgtactgtgactttaactttagacaacttactactttgatgtcctgttggctcagtaatgctcacgataccaattgttttgacaaaataaatttactaaacttggcctaaaatcaaaccttggcacagaggtatgatacaactttaacaggagtcatcaattcatccataaatataaaaagggaaaaaaacttaaggcagtagtctgcattaggactgtttgagttttgcagacttggggttgggagaacatcttaaagcattaaagcatagttttttgtatggccaaccttactaaattaagttctgacttgctcactctatcctggataggcacttgggaacttacactctttaagccattccagtcatgatgaggtggaatgtatcagtataccaattaatatttttgaaagagctcttttaggttaatttaagtacagcaatttctcatgtaatgtttagggagtttattctaacctaggcaaacggcatgctatcacaagaaaggtttaaagctttgataaaatgggggagatttaatcagtttttttaatgcctgctataaaaatttgaaatattagaatggccgaccatggcagtgaccaggcctcactacaggcctggttggattctggtctttaatgcatgctagtgttgatgttttttggtcaagaacggtttaaacaggaaggattgtgcagcaggctttaatttaatgtagattcatactgctctgttaaagctgcattgaaatgttaaaatggcttacacttgcagactttgcaaatcttaagactaacaaatccttgaaatcacacagcttgcaaatacgtactaaactgcacaaggtgtgtgttctatatgtgcagttttagcgtattttagttgcataggtttccatggtatttatagtctcttgtgctaaatttggccaaagatgattgtccaccactaaaaatgcctctcccacttggaattctgtactgattttgtggccagatgcaatgatctttaaaaacaaatcttttcaatggcataagaagttgacaaaaatttcttaaagtgcaatagattttcaagtgtattgtgccttgttctaaaacttttaagtaggtgcacttgacagtattgaggtcatttgttaaggtgctatttcaattagtgtaggtttagactcttgtacatttctcccataactttttacaaagtattttgttgcacattcagagaattttatatatatatgtcttgtgtgggtgtcctcgaccttccaatcttatttcgtctcttggagattgttgaatgcagccagtgaagaagtagattcctaaattttattggggaccatggaatggtagttgagaagaaaactatttgcacacaacagattttagatactttttgctgctagttgtgtaatatttattgaacattttgacaaatatttatttttgtaagcctaaaaatgattctttgaaagtttaaagaaacttgaccaaaagacagtacaaaaaacactggcacttgaatgttgaatgtcaccgtatgtgaaataatatattttggggtagtgtgagcttttaatgttaagtctgttaaacttgagtcaaattaagcagacccggcattggcaatgtagctgtaattttctgacaaaatttaagacaaaattgtcaacttgaaactaaaacatgccaaggttttgatatacttgtcttaagatattaatgaaacacttctgaacactgataggaagtgtccacatccacaaagtttctcttgagttttgttatgtgttttgttgtgtttgattttcagtgattgtctggtatatttacagtcctcaaacatggttatttctgtcagtgacttaacattcggttttatcagccagcagtattcttcagtaaataaagaatggaattgctgaatgtaatcattgaacctcgagtcactgtaaaagttcagtaattgcttattgtattagttttagatgctggcactgcatgtgctctgtttattctgattttactaaaataaaaagttcaaaagtc

SEQ ID NO: 410473 - DNA, 4110 bp, Homo sapiens
ttcagaaaaatggttgtgttttgtacaaattgaaatacattgtttaaaaataaagcacagtactcactttaggtttgccatataaatttactgtaacttcctagaaaattggaaataaagtaagaaaaattttcttacaattcaagggcatttagaacactttgtcatctgttaatattcagaaatgataagccagtgttttgttttcaggatctgggaaaactgcagcatttcttttacccatactgagtcagatatatacagatggtccaggagaagctttgaaggctgtgaaggtaaaggttttgttataaaatcagacatttttgttttaaaaagctttgcaaagccctgttgacttttctaacggatgccagatacaccttattttcatttttttttttttacccctttcacccactgaaaataagtttgtagatgtaatctgcaaattataaagagaaagtgatgaatttttaaaaacaattgaagttttgggttatgaatttaaaattatatttatgttttaggaaaatggaaggtatgggcgccgcaaacaatatccaatatccttggttttagccccaacaagagaattggctgtacagatctatgaggaagccagaaaattttcctaccgatctagagttcgtccttgtgtagtttatggtggtgctgatattggtcagcagattcgggacttagaacgtggatgccacttgttagtagccactccaggacgtctagtggatatgatggaaagaggaaagattggattagacttctgcaagtacttagtgttggatgaagctgataggatgctggatatgggatttgaacctcagatacgtcgtatagttgaacaagatactatgccaccaaagggcgttcgtcacaccatgatgtttagtgctacttttcctaaggaaatacagatgcttgctcgtgactttttggatgaatatatctttttggctgtaggcagagtaggctctacctctgagaacatcacacagaaagtagtttgggtggaagacttagataaacggtcatttctactggacattttaggtgcaacagggagtgattcacttactttagtgtttgtggagaccaaaaagggagcagattccctggaggatttcttataccatgaaggatatgcttgtactagtattcatggagaccggtcacagagagatcgagaggaggcccttcaccagtttcgctcaggaaaaagcccaattctagtggctacagctgtggcagcacgaggactagacatttcaaatgtgagacatgttatcaattttgatttgccaagtgatattgaagaatatgtgcatcgtattggccgtacaggacgtgtaggaaacctgggccttgccacctcattctttaatgaaaaaaatatgaatattacaaaggatttgttggatcttcttgtagaagctaaacaagaagtgccttcttggttggaaaatatggcttatgaacaccactacaagggtggcagtcgtggacgatctaaaagtaatagattcagtggaggatttggtgccagagactatcgacaaagtagtggttccagcagttctggctttggtgctagtcgcggaagcagcagccgcagtggtggaggtggttacggcaacagcagaggatttggtggaggtggctatggaggcttctacaatagtgatggatatggaggaaattataactcccagggggttgactggtggggcaactgaatctgctttgcagcaaagtcacccttacaaagaagctaatatggaaaccacatgtaacttagccagactatattgtgtagcttcaagaacttgcagtacattaccagctgtgattctcctgataattcaagggagctcaaagtcacaagaagaaaaatgaaaggaaaaaacagcagccctattcagaaattggtttgaagatgtaattgctctagtttggattaaactcttcccctcctgctttagtgccaccccaaactgcatttataattttgtgactgaggatcgtttgtttgttaacgtactgtgactttaactttagacaacttactactttgatgtcctgttggctcagtaatgctcacgataccaattgttttgacaaaataaatttactaaacttggcctaaaatcaaaccttggcacagaggtatgatacaactttaacaggagtcatcaattcatccataaatataaaaagggaaaaaaacttaaggcagtagtctgcattaggactgtttgagttttgcagacttggggttgggagaacatcttaaagcattaaagcatagttttttgtatggccaaccttactaaattaagttctgacttgctcactctatcctggataggcacttgggaacttacactctttaagccattccagtcatgatgaggtggaatgtatcagtataccaattaatatttttgaaagagctcttttaggttaatttaagtacagcaatttctcatgtaatgtttagggagtttattctaacctaggcaaacggcatgctatcacaagaaaggtttaaagctttgataaaatgggggagatttaatcagtttttttaatgcctgctataaaaatttgaaatattagaatggccgaccatggcagtgaccaggcctcactacaggcctggttggattctggtctttaatgcatgctagtgttgatgttttttggtcaagaacggtttaaacaggaaggattgtgcagcaggctttaatttaatgtagattcatactgctctgttaaagctgcattgaaatgttaaaatggcttacacttgcagactttgcaaatcttaagactaacaaatccttgaaatcacacagcttgcaaatacgtactaaactgcacaaggtgtgtgttctatatgtgcagttttagcgtattttagttgcataggtttccatggtatttatagtctcttgtgctaaatttggccaaagatgattgtccaccactaaaaatgcctctcccacttggaattctgtactgattttgtggccagatgcaatgatctttaaaaacaaatcttttcaatggcataagaagttgacaaaaatttcttaaagtgcaatagattttcaagtgtattgtgccttgttctaaaacttttaagtaggtgcacttgacagtattgaggtcatttgttaaggtgctatttcaattagtgtaggtttagactcttgtacatttctcccataactttttacaaagtattttgttgcacattcagagaattttatatatatatgtcttgtgtgggtgtcctcgaccttccaatcttatttcgtctcttggagattgttgaatgcagccagtgaagaagtagattcctaaattttattggggaccatggaatggtagttgagaagaaaactatttgcacacaacagattttagatactttttgctgctagttgtgtaatatttattgaacattttgacaaatatttatttttgtaagcctaaaaatgattctttgaaagtttaaagaaacttgaccaaaagacagtacaaaaaacactggcacttgaatgttgaatgtcaccgtatgtgaaataatatattttggggtagtgtgagcttttaatgttaagtctgttaaacttgagtcaaattaagcagacccggcattggcaatgtagctgtaattttctgacaaaatttaagacaaaattgtcaacttgaaactaaaacatgccaaggttttgatatacttgtcttaagatattaatgaaacacttctgaacactgataggaagtgtccacatccacaaagtttctcttgagttttgttatgtgttttgttgtgtttgattttcagtgattgtctggtatatttacagtcctcaaacatggttatttctgtcagtgacttaacattcggttttatcagccagcagtattcttcagtaaataaagaatggaattgctgaatgtaatcattgaacctcgagtcactgtaaaagttcagtaattgcttattgtattagttttagatgctggcactgcatgtgctctgtttattctgattttactaaaataaaaagttcaaaagtc

SEQ ID NO: 410474 - DNA, 4598 bp, Homo sapiens
ctgtaggtccagtgtaagagttccgctattcggtctcacacctacagtggactacccgatttttcgcttctcttcagggatgagtcatgtggtggtgaaaaatgaccctgaactggaccagcagcttgctaatctggacctgaactctgaaaaacagagtggaggagcaagtacagcgagcaaagggcgctatatacctcctcacttaaggaacagagaagcatctaaaggattccatgataaagacagttcaggttggagttgcagcaaagataaggatgcatatagcagttttgggtctcgagattctagaggaaagcctggttatttcagtgaacgtggaagtggatcaaggggaagatttgatgatcgtggacggagtgactatgatggtattggcaatcgtgaaagacctggctttggcagatttgaacggagtggacatagtcgttggtgtgacaagtcagttgaagatgattggtcaaaaccacttccaccaagtgaacgcttggagcaagaactgttttctggaggaaacacggggattaactttgagaaatatgatgatataccagtagaggcaaccggcagtaactgtcctccacatattgagaattttagcgatattgacatgggagaaattatcatggggaacattgaacttactcgctatactcgtcctactccagtgcaaaaacatgccattcctattattaagggaaaaagagacttaatggcttgtgcccaaacaggatctgggaaaactgcagcatttcttttacccatactgagtcagatatatacagatggtccaggagaagctttgaaggctgtgaaggtaaaggttttgttataaaatcagacatttttgttttaaaaagctttgcaaagccctgttgacttttctaacggatgccagatacaccttattttcatttttttttttttacccctttcacccactgaaaataagtttgtagatgtaatctgcaaattataaagagaaagtgatgaatttttaaaaacaattgaagttttgggttatgaatttaaaattatatttatgttttaggaaaatggaaggtatgggcgccgcaaacaatatccaatatccttggttttagccccaacaagagaattggctgtacagatctatgaggaagccagaaaattttcctaccgatctagagttcgtccttgtgtagtttatggtggtgctgatattggtcagcagattcgggacttagaacgtggatgccacttgttagtagccactccaggacgtctagtggatatgatggaaagaggaaagattggattagacttctgcaagtacttagtgttggatgaagctgataggatgctggatatgggatttgaacctcagatacgtcgtatagttgaacaagatactatgccaccaaagggcgttcgtcacaccatgatgtttagtgctacttttcctaaggaaatacagatgcttgctcgtgactttttggatgaatatatctttttggctgtaggcagagtaggctctacctctgagaacatcacacagaaagtagtttgggtggaagacttagataaacggtcatttctactggacattttaggtgcaacagggagtgattcacttactttagtgtttgtggagaccaaaaagggagcagattccctggaggatttcttataccatgaaggatatgcttgtactagtattcatggagaccggtcacagagagatcgagaggaggcccttcaccagtttcgctcaggaaaaagcccaattctagtggctacagctgtggcagcacgaggactagacatttcaaatgtgagacatgttatcaattttgatttgccaagtgatattgaagaatatgtgcatcgtattggccgtacaggacgtgtaggaaacctgggccttgccacctcattctttaatgaaaaaaatatgaatattacaaaggatttgttggatcttcttgtagaagctaaacaagaagtgccttcttggttggaaaatatggcttatgaacaccactacaagggtggcagtcgtggacgatctaaaagtaatagattcagtggaggatttggtgccagagactatcgacaaagtagtggttccagcagttctggctttggtgctagtcgcggaagcagcagccgcagtggtggaggtggttacggcaacagcagaggatttggtggaggtggctatggaggcttctacaatagtgatggatatggaggaaattataactcccagggggttgactggtggggcaactgaatctgctttgcagcaaagtcacccttacaaagaagctaatatggaaaccacatgtaacttagccagactatattgtgtagcttcaagaacttgcagtacattaccagctgtgattctcctgataattcaagggagctcaaagtcacaagaagaaaaatgaaaggaaattaaactcttcccctcctgctttagtgccaccccaaactgcatttataattttgtgactgaggatcgtttgtttgttaacgtactgtgactttaactttagacaacttactactttgatgtcctgttggctcagtaatgctcacgataccaattgttttgacaaaataaatttactaaacttggcctaaaatcaaaccttggcacagaggtatgatacaactttaacaggagtcatcaattcatccataaatataaaaagggaaaaaaacttaaggcagtagtctgcattaggactgtttgagttttgcagacttggggttgggagaacatcttaaagcattaaagcatagttttttgtatggccaaccttactaaattaagttctgacttgctcactctatcctggataggcacttgggaacttacactctttaagccattccagtcatgatgaggtggaatgtatcagtataccaattaatatttttgaaagagctcttttaggttaatttaagtacagcaatttctcatgtaatgtttagggagtttattctaacctaggcaaacggcatgctatcacaagaaaggtttaaagctttgataaaatgggggagatttaatcagtttttttaatgcctgctataaaaatttgaaatattagaatggccgaccatggcagtgaccaggcctcactacaggcctggttggattctggtctttaatgcatgctagtgttgatgttttttggtcaagaacggtttaaacaggaaggattgtgcagcaggctttaatttaatgtagattcatactgctctgttaaagctgcattgaaatgttaaaatggcttacacttgcagactttgcaaatcttaagactaacaaatccttgaaatcacacagcttgcaaatacgtactaaactgcacaaggtgtgtgttctatatgtgcagttttagcgtattttagttgcataggtttccatggtatttatagtctcttgtgctaaatttggccaaagatgattgtccaccactaaaaatgcctctcccacttggaattctgtactgattttgtggccagatgcaatgatctttaaaaacaaatcttttcaatggcataagaagttgacaaaaatttcttaaagtgcaatagattttcaagtgtattgtgccttgttctaaaacttttaagtaggtgcacttgacagtattgaggtcatttgttaaggtgctatttcaattagtgtaggtttagactcttgtacatttctcccataactttttacaaagtattttgttgcacattcagagaattttatatatatatgtcttgtgtgggtgtcctcgaccttccaatcttatttcgtctcttggagattgttgaatgcagccagtgaagaagtagattcctaaattttattggggaccatggaatggtagttgagaagaaaactatttgcacacaacagattttagatactttttgctgctagttgtgtaatatttattgaacattttgacaaatatttatttttgtaagcctaaaaatgattctttgaaagtttaaagaaacttgaccaaaagacagtacaaaaaacactggcacttgaatgttgaatgtcaccgtatgtgaaataatatattttggggtagtgtgagcttttaatgttaagtctgttaaacttgagtcaaattaagcagacccggcattggcaatgtagctgtaattttctgacaaaatttaagacaaaattgtcaacttgaaactaaaacatgccaaggttttgatatacttgtcttaagatattaatgaaacacttctgaacactgataggaagtgtccacatccacaaagtttctcttgagttttgttatgtgttttgttgtgtttgattttcagtgattgtctggtatatttacagtcctcaaacatggttatttctgtcagtgacttaacattcggttttatcagccagcagtattcttcagtaaataaagaatggaattgctgaatgtaatcattgaacctcgagtcactgtaaaagttcagtaattgcttattgtattagttttagatgctggcactgcatgtgctctgtttattctgattttactaaaataaaaagttcaaaagtc

SEQ ID NO: 410475 - DNA, 476 bp, Homo sapiens
tttatggaaacttcatgtactttttttgaacactttaggccttgccacctcattctttaatgaaaaaaatatgaatattacaaaggatttgttggatcttcttgtagaagctaaacaagaagtgccttcttggttggaaaatatggcttatgaacaccactacaagggtggcagtcgtggacgatctaaaaggtacacactgtttcgagccttcactcttgttattgcttactaggggcaagaagctttcagagttaacttaaaagtgttaaacagttattttcaacaataataaacattttgggcaagggatgattattagagagggtgacaaggaattaagtgttaggtccttactcctgagtcctttagaaacactgttagaacacattgggacattaatgggatggttcccattggaacataatggaattgaactgaaaaatcaaattgggaattgcagggtttaagcagta

SEQ ID NO: 410476 - DNA, 4418 bp, Homo sapiens
ctgtaggtccagtgtaagagttccgctattcggtctcacacctacagtggactacccgatttttcgcttctcttcagggatgagtcatgtggtggtgaaaaatgaccctgaactggaccagcagcttgctaatctggacctgaactctgaaaaacagagtggaggagcaagtacagcgagcaaagggcgctatatacctcctcacttaaggaacagagaagcatctaaaggattccatgataaagacagttcaggttggagttgcagcaaagataaggatgcatatagcagttttgggtctcgagattctagaggaaagcctggttatttcagtgaacgtggaagtggatcaaggggaagatttgatgatcgtggacggagtgactatgatggtattggcaatcgtgaaagacctggctttggcagatttgaacggagtggacatagtcgttggtgtgacaagtcagttgaagatgattggtcaaaaccacttccaccaagtgaacgcttggagcaagaactgttttctggaggaaacacggggattaactttgagaaatatgatgatataccagtagaggcaaccggcagtaactgtcctccacatattgagaattttagcgatattgacatgggagaaattatcatggggaacattgaacttactcgctatactcgtcctactccagtgcaaaaacatgccattcctattattaagggaaaaagagacttaatggcttgtgcccaaacaggatctgggaaaactgcagcatttcttttacccatactgagtcagatatatacagatggtccaggagaagctttgaaggctgtgaaggaaaatggaaggtatgggcgccgcaaacaatatccaatatccttggttttagccccaacaagagaattggctgtacagatctatgaggaagccagaaaattttcctaccgatctagagttcgtccttgtgtagtttatggtggtgctgatattggtcagcagattcgggacttagaacgtggatgccacttgttagtagccactccaggacgtctagtggatatgatggaaagaggaaagattggattagacttctgcaagtacttagtgttggatgaagctgataggatgctggatatgggatttgaacctcagatacgtcgtatagttgaacaagatactatgccaccaaagggcgttcgtcacaccatgatgtttagtgctacttttcctaaggaaatacagatgcttgctcgtgactttttggatgaatatatctttttggctgtaggcagagtaggctctacctctgagaacatcacacagaaagtagtttgggtggaagacttagataaacggtcatttctactggacattttaggtgcaacagggagtgattcacttactttagtgtttgtggagaccaaaaagggagcagattccctggaggatttcttataccatgaaggatatgcttgtactagtattcatggagaccggtcacagagagatcgagaggaggcccttcaccagtttcgctcaggaaaaagcccaattctagtggctacagctgtggcagcacgaggactagacatttcaaatgtgagacatgttatcaattttgatttgccaagtgatattgaagaatatgtgcatcgtattggccgtacaggacgtgtaggaaacctgggccttgccacctcattctttaatgaaaaaaatatgaatattacaaaggatttgttggatcttcttgtagaagctaaacaagaagtgccttcttggttggaaaatatggcttatgaacaccactacaagggtggcagtcgtggacgatctaaaagtaatagattcagtggaggatttggtgccagagactatcgacaaagtagtggttccagcagttctggctttggtgctagtcgcggaagcagcagccgcagtggtggaggtggttacggcaacagcagaggatttggtggaggtggctatggaggcttctacaatagtgatggatatggaggaaattataactcccagggggttgactggtggggcaactgaatctgctttgcagcaaagtcacccttacaaagaagctaatatggaaaccacatgtaacttagccagactatattgtgtagcttcaagaacttgcagtacattaccagctgtgattctcctgataattcaagggagctcaaagtcacaagaagaaaaatgaaaggaaaaaacagcagccctattcagaaattggtttgaagatgtaattgctctagtttggattaaactcttcccctcctgctttagtgccaccccaaactgcatttataattttgtgactgaggatcgtttgtttgttaacgtactgtgactttaactttagacaacttactactttgatgtcctgttggctcagtaatgctcacgataccaattgttttgacaaaataaatttactaaacttggcctaaaatcaaaccttggcacagaggtatgatacaactttaacaggagtcatcaattcatccataaatataaaaagggaaaaaaacttaaggcagtagtctgcattaggactgtttgagttttgcagacttggggttgggagaacatcttaaagcattaaagcatagttttttgtatggccaaccttactaaattaagttctgacttgctcactctatcctggataggcacttgggaacttacactctttaagccattccagtcatgatgaggtggaatgtatcagtataccaattaatatttttgaaagagctcttttaggttaatttaagtacagcaatttctcatgtaatgtttagggagtttattctaacctaggcaaacggcatgctatcacaagaaaggtttaaagctttgataaaatgggggagatttaatcagtttttttaatgcctgctataaaaatttgaaatattagaatggccgaccatggcagtgaccaggcctcactacaggcctggttggattctggtctttaatgcatgctagtgttgatgttttttggtcaagaacggtttaaacaggaaggattgtgcagcaggctttaatttaatgtagattcatactgctctgttaaagctgcattgaaatgttaaaatggcttacacttgcagactttgcaaatcttaagactaacaaatccttgaaatcacacagcttgcaaatacgtactaaactgcacaaggtgtgtgttctatatgtgcagttttagcgtattttagttgcataggtttccatggtatttatagtctcttgtgctaaatttggccaaagatgattgtccaccactaaaaatgcctctcccacttggaattctgtactgattttgtggccagatgcaatgatctttaaaaacaaatcttttcaatggcataagaagttgacaaaaatttcttaaagtgcaatagattttcaagtgtattgtgccttgttctaaaacttttaagtaggtgcacttgacagtattgaggtcatttgttaaggtgctatttcaattagtgtaggtttagactcttgtacatttctcccataactttttacaaagtattttgttgcacattcagagaattttatatatatatgtcttgtgtgggtgtcctcgaccttccaatcttatttcgtctcttggagattgttgaatgcagccagtgaagaagtagattcctaaattttattggggaccatggaatggtagttgagaagaaaactatttgcacacaacagattttagatactttttgctgctagttgtgtaatatttattgaacattttgacaaatatttatttttgtaagcctaaaaatgattctttgaaagtttaaagaaacttgaccaaaagacagtacaaaaaacactggcacttgaatgttgaatgtcaccgtatgtgaaataatatattttggggtagtgtgagcttttaatgttaagtctgttaaacttgagtcaaattaagcagacccggcattggcaatgtagctgtaattttctgacaaaatttaagacaaaattgtcaacttgaaactaaaacatgccaaggttttgatatacttgtcttaagatattaatgaaacacttctgaacactgataggaagtgtccacatccacaaagtttctcttgagttttgttatgtgttttgttgtgtttgattttcagtgattgtctggtatatttacagtcctcaaacatggttatttctgtcagtgacttaacattcggttttatcagccagcagtattcttcagtaaataaagaatggaattgctgaatgtaatcattgaacctcgagtcactgtaaaagttcagtaattgcttattgtattagttttagatgctggcactgcatgtgctctgtttattctgattttactaaaataaaaagttcaaaagtc

SEQ ID NO: 410477 - DNA, 4887 bp, Homo sapiens
agcggagaggggtctggagttcctaggtgaaccccagcagcctaaccctgtcaagtctgtcgagcctctggctggtcacacgtgctgcggaatccactcagctttcctcaggtgcagtcaggtccatcctgcagagggaccttctgcggacctgttctttcacctccctaacctgaagattgtattcaaaccaccgtggatcgctcacgtaaaatggtcactgcgcctaacacctgggatcccgtaacccttatctatcttggcttcagagagttttttgactagttccaactttgctgaagcttgtcaaagggatgagtcatgtggtggtgaaaaatgaccctgaactggaccagcagcttgctaatctggacctgaactctgaaaaacagagtggaggagcaagtacagcgagcaaagggcgctatatacctcctcacttaaggaacagagaagcatctaaaggattccatgataaagacagttcaggttggagttgcagcaaagataaggatgcatatagcagttttgggtctcgagattctagaggaaagcctggttatttcagtgaacgtggaagtggatcaaggggaagatttgatgatcgtggacggagtgactatgatggtattggcaatcgtgaaagacctggctttggcagatttgaacggagtggacatagtcgttggtgtgacaagtcagttgaagatgattggtcaaaaccacttccaccaagtgaacgcttggagcaagaactgttttctggaggaaacacggggattaactttgagaaatatgatgatataccagtagaggcaaccggcagtaactgtcctccacatattgagaattttagcgatattgacatgggagaaattatcatggggaacattgaacttactcgctatactcgtcctactccagtgcaaaaacatgccattcctattattaagggaaaaagagacttaatggcttgtgcccaaacaggatctgggaaaactgcagcatttcttttacccatactgagtcagatatatacagatggtccaggagaagctttgaaggctgtgaaggtaaaggttttgttataaaatcagacatttttgttttaaaaagctttgcaaagccctgttgacttttctaacggatgccagatacaccttattttcatttttttttttttacccctttcacccactgaaaataagtttgtagatgtaatctgcaaattataaagagaaagtgatgaatttttaaaaacaattgaagttttgggttatgaatttaaaattatatttatgttttaggaaaatggaaggtatgggcgccgcaaacaatatccaatatccttggttttagccccaacaagagaattggctgtacagatctatgaggaagccagaaaattttcctaccgatctagagttcgtccttgtgtagtttatggtggtgctgatattggtcagcagattcgggacttagaacgtggatgccacttgttagtagccactccaggacgtctagtggatatgatggaaagaggaaagattggattagacttctgcaagtacttagtgttggatgaagctgataggatgctggatatgggatttgaacctcagatacgtcgtatagttgaacaagatactatgccaccaaagggcgttcgtcacaccatgatgtttagtgctacttttcctaaggaaatacagatgcttgctcgtgactttttggatgaatatatctttttggctgtaggcagagtaggctctacctctgagaacatcacacagaaagtagtttgggtggaagacttagataaacggtcatttctactggacattttaggtgcaacagggagtgattcacttactttagtgtttgtggagaccaaaaagggagcagattccctggaggatttcttataccatgaaggatatgcttgtactagtattcatggagaccggtcacagagagatcgagaggaggcccttcaccagtttcgctcaggaaaaagcccaattctagtggctacagctgtggcagcacgaggactagacatttcaaatgtgagacatgttatcaattttgatttgccaagtgatattgaagaatatgtgcatcgtattggccgtacaggacgtgtaggaaacctgggccttgccacctcattctttaatgaaaaaaatatgaatattacaaaggatttgttggatcttcttgtagaagctaaacaagaagtgccttcttggttggaaaatatggcttatgaacaccactacaagggtggcagtcgtggacgatctaaaagtaatagattcagtggaggatttggtgccagagactatcgacaaagtagtggttccagcagttctggctttggtgctagtcgcggaagcagcagccgcagtggtggaggtggttacggcaacagcagaggatttggtggaggtggctatggaggcttctacaatagtgatggatatggaggaaattataactcccagggggttgactggtggggcaactgaatctgctttgcagcaaagtcacccttacaaagaagctaatatggaaaccacatgtaacttagccagactatattgtgtagcttcaagaacttgcagtacattaccagctgtgattctcctgataattcaagggagctcaaagtcacaagaagaaaaatgaaaggaaaaaacagcagccctattcagaaattggtttgaagatgtaattgctctagtttggattaaactcttcccctcctgctttagtgccaccccaaactgcatttataattttgtgactgaggatcgtttgtttgttaacgtactgtgactttaactttagacaacttactactttgatgtcctgttggctcagtaatgctcacgataccaattgttttgacaaaataaatttactaaacttggcctaaaatcaaaccttggcacagaggtatgatacaactttaacaggagtcatcaattcatccataaatataaaaagggaaaaaaacttaaggcagtagtctgcattaggactgtttgagttttgcagacttggggttgggagaacatcttaaagcattaaagcatagttttttgtatggccaaccttactaaattaagttctgacttgctcactctatcctggataggcacttgggaacttacactctttaagccattccagtcatgatgaggtggaatgtatcagtataccaattaatatttttgaaagagctcttttaggttaatttaagtacagcaatttctcatgtaatgtttagggagtttattctaacctaggcaaacggcatgctatcacaagaaaggtttaaagctttgataaaatgggggagatttaatcagtttttttaatgcctgctataaaaatttgaaatattagaatggccgaccatggcagtgaccaggcctcactacaggcctggttggattctggtctttaatgcatgctagtgttgatgttttttggtcaagaacggtttaaacaggaaggattgtgcagcaggctttaatttaatgtagattcatactgctctgttaaagctgcattgaaatgttaaaatggcttacacttgcagactttgcaaatcttaagactaacaaatccttgaaatcacacagcttgcaaatacgtactaaactgcacaaggtgtgtgttctatatgtgcagttttagcgtattttagttgcataggtttccatggtatttatagtctcttgtgctaaatttggccaaagatgattgtccaccactaaaaatgcctctcccacttggaattctgtactgattttgtggccagatgcaatgatctttaaaaacaaatcttttcaatggcataagaagttgacaaaaatttcttaaagtgcaatagattttcaagtgtattgtgccttgttctaaaacttttaagtaggtgcacttgacagtattgaggtcatttgttaaggtgctatttcaattagtgtaggtttagactcttgtacatttctcccataactttttacaaagtattttgttgcacattcagagaattttatatatatatgtcttgtgtgggtgtcctcgaccttccaatcttatttcgtctcttggagattgttgaatgcagccagtgaagaagtagattcctaaattttattggggaccatggaatggtagttgagaagaaaactatttgcacacaacagattttagatactttttgctgctagttgtgtaatatttattgaacattttgacaaatatttatttttgtaagcctaaaaatgattctttgaaagtttaaagaaacttgaccaaaagacagtacaaaaaacactggcacttgaatgttgaatgtcaccgtatgtgaaataatatattttggggtagtgtgagcttttaatgttaagtctgttaaacttgagtcaaattaagcagacccggcattggcaatgtagctgtaattttctgacaaaatttaagacaaaattgtcaacttgaaactaaaacatgccaaggttttgatatacttgtcttaagatattaatgaaacacttctgaacactgataggaagtgtccacatccacaaagtttctcttgagttttgttatgtgttttgttgtgtttgattttcagtgattgtctggtatatttacagtcctcaaacatggttatttctgtcagtgacttaacattcggttttatcagccagcagtattcttcagtaaataaagaatggaattgctgaatgtaatcattgaacctcgagtcactgtaaaagttcagtaattgcttattgtattagttttagatgctggcactgcatgtgctctgtttattctgattttactaaaataaaaagttcaaaagtc

SEQ ID NO: 410478 - DNA, 2381 bp, Homo sapiens
  misc_feature (2370)..(2370): n is a, c, g, or t
ctgtaggtccagtgtaagagttccgctattcggtctcacacctacagtggactacccgatttttcgcttctcttcagggatgagtcatgtggtggtgaaaaatgaccctgaactggaccagcagcttgctaatctggacctgaactctgaaaaacagagtggaggagcaagtacagcgagcaaagggcgctatatacctcctcacttaaggaacagagaagcatctaaaggattccatgataaagacagttcaggttggagttgcagcaaagataaggatgcatatagcagttttgggtctcgagattctagaggaaagcctggttatttcagtgaacgtggaagtggatcaaggggaagatttgatgatcgtggacggagtgactatgatggtattggcaatcgtgaaagacctggctttggcagatttgaacggagtggacatagtcgttggtgtgacaagtcagttgaagatgattggtcaaaaccacttccaccaagtgaacgcttggagcaagaactgttttctggaggaaacacggggattaactttgagaaatatgatgatataccagtagaggcaaccggcagtaactgtcctccacatattgagaattttagcgatattgacatgggagaaattatcatggggaacattgaacttactcgctatactcgtcctactccagtgcaaaaacatgccattcctattattaagggaaaaagagacttaatggcttgtgcccaaacaggatctgggaaaactgcagcatttcttttacccatactgagtcagatatatacagatggtccaggagaagctttgaaggctgtgaaggtaaaggttttgttataaaatcagacatttttgttttaaaaagctttgcaaagccctgttgacttttctaacggatgccagatacaccttattttcatttttttttttttacccctttcacccactgaaaataagtttgtagatgtaatctgcaaattataaagagaaagtgatgaatttttaaaaacaattgaagttttgggttatgaatttaaaattatatttatgttttaggaaaatggaaggtatgggcgccgcaaacaatatccaatatccttggttttagccccaacaagagaattggctgtacagatctatgaggaagccagaaaattttcctaccgatctagagttcgtccttgtgtagtttatggtggtgctgatattggtcagcagattcgggacttagaacgtggatgccacttgttagtagccactccaggacgtctagtggatatgatggaaagaggaaagattggattagacttctgcaagtacttagtgttggatgaagctgataggatgctggatatgggatttgaacctcagatacgtcgtatagttgaacaagatactatgccaccaaagggcgttcgtcacaccatgatgtttagtgctacttttcctaaggaaatacagatgcttgctcgtgactttttggatgaatatatctttttggctgtaggcagagtaggctctacctctgagaacatcacacagaaagtagtttgggtggaagacttagataaacggtcatttctactggacattttaggtgcaacagggagtgattcacttactttagtgtttgtggagaccaaaaagggagcagattccctggaggatttcttataccatgaaggatatgcttgtactagtattcatggagaccggtcacagagagatcgagaggaggcccttcaccagtttcgctcaggaaaaagcccaattctagtggctacagctgtggcagcacgaggactagacatttcaaatgtgagacatgttatcaattttgatttgccaagtgatattgaagaatatgtgcatcgtattggccgtacaggacgtgtaggaaacctgggccttgccacctcattctttaatgaaaaaaatatgaatattacaaaggatttgttggatcttcttgtagaagctaaacaagaagtgccttcttggttggaaaatatggcttatgaacaccactacaagggtggcagtcgtggacgatctaaaagtaatagattcagtggaggatttggtgccagagactatcgacaaagtagtggttccagcagttctggctttggtgctagtcgcggaagcagcagccgcagtggtggaggtggttacggcaacagcagaggatttggtggaggtggctatggaggcttctacaatagtgatggatatggaggaaattataactcccagggggttgactggtggggcaactgaatctgcatcatagaaagttctagaaaacaggaccactgtcacttcatgactacagttcttctccttccacttgngaccgaatatt

SEQ ID NO: 410479 - DNA, 502 bp, Homo sapiens
cattcatgttcagcaccagcatgaacctggcacagaggagatgctccttaaaacttcactcattcaaaccgaatcactgggaagtttgaaggagtcattgcttccaggcttttttcttgaatctcattagaaaaaaaaaaaaaatctctttggtatttggttgccacattcttgtatcaacaccaaggttcgtcggaagaaagatggtcatggcgggcaggaaaggtgatggtgagcaagtggtgttattgccattacaataacttaaaaggagaaagtatttttaaaaattacatatatatatatttgagatggagtctcactctgtcacccaggctggagtgcagtggcaccgtgtcggctcattgcaacctccgtctcccgggttcacgcaattctcctgcctcagcctcctgagtagctgggattacaggcgcccgccaccaagccctgctagtttttatatttttagtagagatgaggtttcaccatgttggccagg

SEQ ID NO: 410480 - DNA, 334 bp, Homo sapiens
gtgaaaagcaatcatgccttcattcattcaacaaagaactataatgaacatctatttcctgaggactccactttacgtctttaaattttatgttcctggtgaactacagagttgggatttttatccatctcttcctgatttctaaaatgtgtgctttcaactacatccctctgaataaatagtatacaatatataatacaaattataaaagaggcacaaagaagcatatagaaacactgaagtgggagaagtgattttttcctggagggtttagtaaaggcttcacagaagaggtgacatttgagtttagcgacagtgcgacagaaaaaataac

SEQ ID NO: 410481 - DNA, 329 bp, Homo sapiens
ttcttttttctgtggtgcttttgccttctaacatagtataaattttacatatttattatgtttattttcttctcactatgatataagctccatgagggtagaaatatttgcttgttttgttcactgtctccaagcatttagaacaacagctggcatatagcaatcatacaaaaaatatttgtaattgaaggtgaagagtcttctggtctttatcctaggaggttacttatgtctgggctgcctctgaaggagagattaccatcatgatttgaagttaatccacaagtcatgaggagataataaatacaacacacaggaaaacaaaacaa

SEQ ID NO: 410482 - DNA, 277 bp, Homo sapiens
ctgtaatctcagcactttagaaggccaaggagggaggatcgcttgaggccaggagtttgagaccagcctgagcaacatagcaagaccctgtctctacaaaaaatttaaaaattagggcatggtggcgtgcacctatgtggccccagctacttgggaggctaaggtggaaggatcagttgagcctgggaggttaaattgtagtgagctgtgattgtgctgctgcactccagcctgacacagcgatgagactctgtgtcaaaaaaatatatatataaag

SEQ ID NO: 410483 - DNA, 536 bp, Homo sapiens
gacatactgattacatatctaattttctgtcactatctgcatgacatcacatatgtcactgtggttttccagattactctcgaccctgtaaagaaatattttccctgatgactcagtttgaattttttgttggcacgggtttcacttccttacttcctgttggtctcactccttagatctttgttggggtcttcagtgcctcccaaacccccaatctacaggaatttttccagactgcagagtcttctggcatttctccctcctgatcactcaaaatgatataaagcctcaccaaatgatctggcattgctgcttctggagatagctatagccgagctccccacaccgcaaccccttgatctttttcactgtgttcaaaactaggctgaagtgaaatcatcacaactgctctttcaagcttaaggaatttgataaatgaagttgtgtggggtcctggcaggcaatacacttgagcaaagcacagtgatcatctgcggaccactctttatccctttattgtagacatgtattcaagt

SEQ ID NO: 410484 - DNA, 848 bp, Homo sapiens
  misc_feature (32)..(32): n is a, c, g, or t
  misc_feature (34)..(34): n is a, c, g, or t
  misc_feature (37)..(37): n is a, c, g, or t
ggctgtactagaggaccccgaagcgcacgaangngcnctcgtagaccaggtacctgcggcaacaccagtcgctgcttttaaataaggggaggctggtgacggtgatgccacttagcaagatggagtcctgatctggggatgggggctgtgtctaaccttgctgtgccctgaggggcttaactgctttttctgggagatgttagtaggggaagctcctagcccttaggaccacacataccctaggcagggggtgtggagctggccgtgccagaaggggccaggcagcctgcactctgggtggtgtctcggcttgcgtgggtgagggctcccattggcccacctgcctgcaatgaagggcctcgtcacacccgtgaggccccccaggggctccggttccctgccctgaagctgtgctccgggacggtcaaggttcggccaccaaggctcaggctgctcctcgtggatggaggtggccccagaaagggcctgtgcagactctgtctccccggggcctactaactccctggggtgctccacgaaggcctagacccccctacacctacctcagtctgttccctgactgccaccgcctagaaaggaaagcaatgccctgtggaccttgcagtgctagagaaggtggccgtggcaagggaggagctgctcccatggcagagcattcctgcagatttgcctggatttgcccttcctggggttccctctaggcttcctccccacccggccttcctgggaacaagtcccgcccacctggcttctcactcagcttcctcagcctggctcatgggcgctaggttgaactccaaagagaatgctgagaaagaaagttaaaa

SEQ ID NO: 410485 - DNA, 899 bp, Homo sapiens
ctttctagggagatggaaccctagaagctaagcggccagagcttcctgcccttcagctggaaggagccggaaggagctggaaggaagggccaggccctcgccctggctgcagccagatcccctgagagccgacagccccgttcctgctgcccccacaagcgtgcacccaggcgactgtgctgtcagcggcccccggggaggtggacggtgggagagggatgcctgcgtcttcgtagaccaggtacctgcggcaacaccagtcgctgcttttaaataaggggaggctggtgacggtgatgccacttagcaagatggagtcctgatctggggatgggggctgtgtctaaccttgctgtgccctgaggggcttaactgctttttctgggagatgttagtaggggaagctcctagcccttaggaccacacataccctaggcagggggtgtggagctggccgtgccagaaggggccaggcagcctgcactctgggtggtgtctcggcttgcgtgggtgagggctcccattggcccacctgcctgcaatgaagggcctcgtcacacccgtgaggccccccaggggctccggttccctgccctgaagctgtgctccgggacggtcaaggttcggccaccaaggctcaggctgctcctcgtggatggaggtggccccagaaagggcctgtgcagactctgtctccccggggcctactaactccctggggtgctccacgaaggcctagacccccctacacctacctcagtctgttccctgactgccaccgcctagaaaggaaagcaatgccctgtggaccttgcagtgctagagaaggtggccgtggcaagggaggagctgctcccatggcagagcattcctgcagatttgcctggatttgcccttcc

SEQ ID NO: 410486 - DNA, 432 bp, Homo sapiens
atcctatcactcttaaatatggaagtttgcaaacttgtgctttttttttttagtcagtcatctctatattttccataagtgatattaataaatttccaaaataatgtattacaaccattgatatttaaatataaattctatttcctcacttcaaatccttaggatacaacgttcttcaggttaattgatttcaatctctgtcttcttttacacacacacacacacacacacacacacactatatatatatatatatatatattaaaatgctctcaggaaagcaaaagaggaaattttccatcaaacacatgtaaggcttcaaggaaaccttgaagttggaattttgatgttatctctgcattgtttccatttaggaacttcagtgatttaatttaattaatttatttatttttgagatggagtctcacactg

SEQ ID NO: 410487 - DNA, 2735 bp, Homo sapiens
tgaacaacctcagtaaaattcatcagtgctggtaaatagtttgctgtagtggaaagctcataacctttggattcaaatgatcctagtttctgtaccatttattagcgttgtgacctaggacaagtacctcacttctctgagcctgtttcctcctctgtaaaataatgtctacttcacaaggctgtttcaaaggttaaaaaagatagcatatgtaaactgtcttagctcagcgcttgacatttcctaagtgtgccataaatattaatctctttccttactcccagctccaatacagcgtaacagtgctttaaaatgtatgtccttcatttctccttcatttctcagtcacctttgtctcttccctagggcatatccccaaattcttaaacaaaaaaaaatgatttttttccccttcatcaaacttttcactggctcccttagcacccagtagaaggtcccaactccttacagagtctgggttttcatgtccctgtttgcttacacagcttaatcttttgccactttccccctcacattgattaaggtagccaagtttaactatttacacaactattcacacaagttattctctgggcctgcagcagaaacatgattaacaattttaatgcccagagtaaacaacagaaatttttcttaaattaaaggaatagtgtgaaaatgctgtaagtacagaaaatgcaacctccattccagtagaacaatttcctttgccttgtccttggctctccaaaactgttcatttattgtggtgtcttttagattttagtgccctgggacaaagatctaatttccccaccctacttttgactctatcctggactacctttcctcacctctatctctctcaaccagactaactctttattccttagacttgatgatgcatccctctttagagatccaaagacaccccaagcatccccctctctcagcaataatcacattgtatagcagtgtttttcaaagtgtggtcctcacaccgcctgtgttagaatcacctttagtgtttgttaaaagaattgattttgggttcccactcctgacctaaccagaatatctgagaacataggcaggaatttacatttttgacaagctcctcatgattctgatgcaccaaaaattttaatgaataatcatcttccctactagactgaacaccttgagaggaaggactgtgtcttttattgttgttatattgttaatacctggcacagtgcttggaacattagcttggctaatgtttattgaatgaatgtatgaatgaaaaaatgcattatgaaagtttcctcttgtactctcatgttcgtagtgatgtttgttacttcctgggcagaaaagcttggttactactccatttgagctgtattaattctattttgcagagatatcaaggctcctacataataaatgatcattgtcctcctcaaaaactctttggcagttatcttggggaaatgtctttggagcatatggcaccattgttttcagtaacatttcagtcttgtcaaactttgttgtttgaaggtggatttacatttcggttatagccaaaaatcactcaaagctaagcctacttaaaaaagtggggaattaaactgggtttggagtaagcaatgaagtttgactctgaagtcccaaattctgagtcaaacagtgacaaatgacttctaagatacaacatggtgacaaagtacttagtgggggtgcgatgggccccagatatttacttcagttaacttggcttttatagaatcctggcaatgccatggaccttaagagaagtaattggctacctctagctaaacccagctggacaaagagaataggacttgtatttaacattttcaaagaaggtgactgcataagcttttgttgttgttgctctactcaacctgttctccacaactgtttctaccagaagattattttatgtctgcaatttatgcttgtttccactttttatattgtcttattgaagaaagcacaaaaataatcaaaaataaagtaaaacctgttttgagagtatgaaagaaattttaatgccacattgaggttctggctacttgtaagtaagagtaactgcatctggatgtgtttttattatacaattctatgtgtatctttagatgcagtgaaattcagattgcagcaaaatcacttatctgttcttttcggctaaaacactctaggtgaattttctaaacttccatggtttacatatttatatatgactaccaagatggagcaatccacggatggacttttgaataaactcaaatatttgatactgcttcctccaaggaatggagagtgtcaggcaggtaggtaagaaccactcctacacttatttctagctcctgaagccaactgcagccttggagccaatggctgtatttggctgtgtgttacaggttggccaaactgattgccatcaggtcagacaaaactgccttttatggtgtagtctgccagcttcagacatatgctgtattgttgttattggctagactatttattagactattgttggactattttttatcaaatgctttaccccacgcctgtttgtattgggagctctggaccaatagtgtctctcctagtgacagaaatatgagcatctgtggattacacagcctcatccctctctacaatattccagcccatccaaaatgctatattatgaattaaataaatatatatgtattcatgaa

SEQ ID NO: 410488 - DNA, 420 bp, Homo sapiens
tttttttttttgagatggaatcttactctgttgcccaggctggagtgtagtggcacaatctcagctcactgcaacctctcccgcccaggttcaagtgattccctgcctcagcctcccgagtagctgggattacagggacacaccaccatgcccggcaaatttttgtgtttttagtagagacaaggtttcaccatgttggcctggatggtctcaatctcctaacctcgtgatccgcctgccttggccccctaaaatgctgggattacaggcatgagccagcgcgcccagccttgctggcttttataattttcttttcgtctttggtttttagcaattttactatgatgtgcctcgatgtagctttcttcgtatttatcctttcggggtttgcagtacttctaacatacgtgacttgatgtc

SEQ ID NO: 410489 - DNA, 682 bp, Homo sapiens
tcacagtatgagctttagtccagctcaaaggagaaaaagaactccttgtgttaaggatttctttttttaagtatattgattaacggttttctccatgttggatgccaagagaaatgtgagcaaagacatttttctccaacttggcaaaggtactacaaaaatggtcaggttgactgaagatgaccccaagtccatcctgccaatcactatcataaatacaaccacagattcacaaaataaattatcagattatttccatacaaaccttaagcccacttcagaattgcctgagttgctggtgtacagctggtctcatgacccaactccccgcagtcctagaactcggctcaaaaggaaggtggctgctggttttactcccctgttgaccatcctgggttgctgacatgctcagccaaccccaccctgcctgctaaggactatgcaaaccacagtctgaagctggggggctcctgatgttaattcaaatttaaaactaaagtcagttaaaggaagaaaggcagtagcctgccttttcttctgacaaagctcaaaatcaatgtgatgaaagctcactggaaatttcaattgcctagtctaagtatttacttaaacttaaaacccagaaatttggacttaagtgtaaccaaaagaaaaaagtatttggttgggttggagaatgaaa

SEQ ID NO: 410490 - DNA, 660 bp, Homo sapiens
gcctgcgtttcctggcttgaatggagagtgtctcttgactgtgctgactttcggggattcttttcttaacagcagatagcagtggggtcagaaagggtgacctgcagtccacgttgctggaagggcatggcacagctccacctgacctggatctctctgctattaatgacaaaagcatcgtcaaaaagacgccacagttagcaaaaacaatatcaaagaaacctgagtcaacatcattttctgcccctcggaaaaagagcccggatttatctgaagcaatggaaatgatggagtctcagacactactgctgacgctactatccgtaaagatggagaacaatcttgctgagtttgaaagaagggcagaaaagaatttattaataatgtgtaaggagaaggagaagctacagaaaaaggcccacgagctgaagcgcaggcttctcctctctcagaggaagcgggagctggcagatgtcctggatgcccagatcgagatgctcagccccttcgaggcagtggccacacgcttcaaggagcaatacaggacattcgccacggccctggacactaccaggcacgagctgcccgtgaggtccatccacctggagggagatgggcagcagctcttaggtaggaaacggggcgtcccagtgcgtgtgc

SEQ ID NO: 410491 - DNA, 1414 bp, Homo sapiens
gcgagaccaagtgcgaggggaggacaggcgaagcgcgcgtctggggccgcgctctccacacttagccggcgctgcctcacgcctcgcagccacccctcctgcgtctccacaaatggtccgacccgcaagcaagggggcgggtccggctttgaaaagccggcgggtcgggccttgaggtggaaggcgggaaaatggcggattcctcggggcgaggcgctgggaagcctgcaaccggccccacaaattctagcagtgccaagaagaaggataaaagagttcaaggtggaagagtgattgagtcccggtatctgcagtatgaaaagaagacaacccaaaaggctcctgcaggagatgggtcacagacccgagggaagatgtctgaaggtggaaggaaatccagcctgctccagaaaagcaaagcagatagcagtggggtcagaaagggtgacctgcagtccacgttgctggaagggcatggcacagctccacctgacctggatctctctgctattaatgacaaaagcatcgtcaaaaagacgccacagttagcaaaaacaatatcaaagaaacctgagtcaacatcattttctgcccctcggaaaaagagcccggatttatctgaagcaatggaaatgatggagtctcagacactactgctgacgctactatccgtaaagatggagaacaatcttgctgagtttgaaagaagggcagaaaagaatttattaataatgtgtaaggagaaggagaagctacagaaaaaggcccacgagctgaagcgcaggcttctcctctctcagaggaagcgggagctggcagatgtcctggatgcccaggtcagttgtaagtgacactctacgccctgcagcatgaactggtgaccactcagcgcctcctgggagaacttgatgttggtgattcggaagaaaatgtgcaggtgctggacttactgagcgaactcaaggacgtgacggcgaaaaaggaccttgagctccgaaggagctttgcccaggtgctggaactctccgcagaggcaagcaaagaggcagccttggcaaaccaggaagtctgggaagagacccagggcatggcgccccccagccggtggtatttcaatcaagacagtgcctgcagagaatctgggggagcacccaagaacacgcccctgtctgaggacgacaacccgggtgcctcgtcagcccccgctcaggccacgttcatcagcccaagcgaagatttttcttcaagcagccaggcagaagtcccgccctctctctctcgttcagggagggacttgtcatgactcatggttacattcaggatacttgagcactttatatactaccgtagcactgtagctattttttatgtgataatcttgtttgataaaaaagtaaacctgttttgcaattga

SEQ ID NO: 410492 - DNA, 320 bp, Homo sapiens
catcatgacagaagtctgtcggccgctccacttgtgtgtgccttgcgtggggcaccttgccatccatcgcccaccatccctcttcccctccacgccctgcagcatgaactggtgaccactcagcgcctcctgggagaacttgatgttggtgattcggaagaaaatgtgcaggtgctggacttactgagcgaactcaaggacgtgacggcgaaaaaggaccttgagctccgaaggtacctcggaaaatgctttaagaaagaggtggcaccctgtttgctcagggctgttggtggctgcactgttggggtggtgccgagttc

SEQ ID NO: 410493 - DNA, 1566 bp, Homo sapiens
gcgagaccaagtgcgaggggaggacaggcgaagcgcgcgtctggggccgcgctctccacacttagccggcgctgcctcacgcctcgcagccacccctcctgcgtctccacaaatggtccgacccgcaagcaagggggcgggtccggctttgaaaagccggcgggtcgggccttgaggtggaaggcgggaaaatggcggattcctcggggcgaggcgctgggaagcctgcaaccggccccacaaattctagcagtgccaagaagaaggataaaagagttcaaggtggaagagtgattgagtcccggtatctgcagtatgaaaagaagacaacccaaaaggctcctgcaggagatgggtcacagacccgagggaagatgtctgaaggtggaaggaaatccagcctgctccagaaaagcaaagcagatagcagtggggtcagaaagggtgacctgcagtccacgttgctggaagggcatggcacagctccacctgacctggatctctctgctattaatgacaaaagcatcgtcaaaaagacgccacagttagcaaaaacaatatcaaagaaacctgagtcaacatcattttctgcccctcggaaaaagagcccggatttatctgaagcaatggaaatgatggagtctcagacactactgctgacgctactatccgtaaagatggagaacaatcttgctgagtttgaaagaagggcagaaaagaatttattaataatgtgtaaggagaaggagaagctacagaaaaaggcccacgagctgaagcgcaggcttctcctctctcagaggaagcgggagctggcagatgtcctggatgcccagatcgagatgctcagccccttcgaggcagtggccacacgcttcaaggagcaatacaggacattcgccacggccctggacactaccaggcacgagctgcccgtgaggtccatccacctggagggagatgggcagcagctcttagacgccctgcagcatgaactggtgaccactcagcgcctcctgggagaacttgatgttggtgattcggaagaaaatgtgcaggtgctggacttactgagcgaactcaaggacgtgacggcgaaaaaggaccttgagctccgaaggagctttgcccaggtgctggaactctccgcagaggcaagcaaagaggcagccttggcaaaccaggaagtctgggaagagacccagggcatggcgccccccagccggtggtatttcaatcaagacagtgcctgcagagaatctgggggagcacccaagaacacgcccctgtctgaggacgacaacccgggtgcctcgtcagcccccgctcaggccacgttcatcagcccaagcgaagatttttcttcaagcagccaggcagaagtcccgccctctctctctcgttcagggagggacttgtcatgactcatggttacattcaggatacttgagcactttatatactaccgtagcactgtagctattttttatgtgataatcttgtttgataaaaaagtaaacctgttttgcaattgaagcctccattttctatgaaggggccagttgg

SEQ ID NO: 410494 - DNA, 1535 bp, Homo sapiens
gcgagaccaagtgcgaggggaggacaggcgaagcgcgcgtctggggccgcgctctccacacttagccggcgctgcctcacgcctcgcagccacccctcctgcgtctccacaaatggtccgacccgcaagcaagggggcgggtccggctttgaaaagccggcgggtcgggccttgaggtggaaggcgggaaaatggcggattcctcggggcgaggcgctgggaagcctgcaaccggccccacaaattctagcagtgccaagaagaaggataaaagagttcaaggtggaagagtgattgagtcccggtatctgcagtatgaaaagaagacaacccaaaaggctcctgcaggagatgggtcacagacccgagggaagatgtctgaaggtggaaggaaatccagcctgctccagaaaagcaaagcagatagcagtggggtcagaaagggtgacctgcagtccacgttgctggaagggcatggcacagctccacctgacctggatctctctgctattaatgacaaaagcatcgtcaaaaagacgccacagttagcaaaaacaatatcaaagaaacctgagtcaacatcattttctgcccctcggaaaaagagcccggatttatctgaagcaatggaaatgatggagtctcagacactactgctgacgctactatccgtaaagatggagaacaatcttgctgagtttgaaagaagggcagaaaagaatttattaataatgtgtaaggagaaggagaagctacagaaaaaggcccacgagctgaagcgcaggcttctcctctctcagaggaagcgggagctggcagatgtcctggatgcccagatcgagatgctcagccccttcgaggcagtggccacacgcttcaaggagcaatacaggacattcgccacggccctggacactaccaggcacgagctgcccgtgaggtccatccacctggagggagatgggcagcagctcttagacgccctgcagcatgaactggtgaccactcagcgcctcctgggagaacttgatgttggtgattcggaagaaaatgtgcaggtgctggacttactgagcgaactcaaggacgtgacggcgaaaaaggaccttgagctccgaaggagctttgcccaggtgctggaactctccgcagaggcaagcaaagaggcagccttggcaaaccaggaagtctgggaagagacccagggcatggcgccccccagccggtggtatttcaatcaagacagtgcctgcagagaatctgggggagcacccaagaacacgcccctgtctgaggacgacaacccgggtgcctcgtcagcccccgctcaggccacgttcatcagcccaagcgaagatttttcttcaagcagccaggcagaagtcccgccctctctctctcgttcagggagggacttgtcatgactcatggttacattcaggatacttgagcactttatatactaccgtagcactgtagctattttttatgtgataatcttgtttgataaaaaagtaaacctgttttgcaattga

SEQ ID NO: 410495 - DNA, 918 bp, Homo sapiens
aaaggtgagcctgctggaccggggagctttcctcaaggcctccgcctggctatgatggcgttagggttgaggggaagcttcatccaaaatgcacagtacttggatgtcaagatgatgttgctgctctcaggatgagtcactctccaccactgacttcctttgatgttctgagctcagcctggagtctgacctgggactatagcacttgttctcccaaggtaaggctggcggccaaacccagctgcgcacacctgaacctgctccttggcagagatgaagggcgtcatgtttcgtagccactcaacacccatggacaatttggctccttgtaaagacttagtcatgcctttgaactgacttacttgaaatataattgctcctattttgctccaaagaccagtggcatgatgggttagagttatttgtatttattgagattgttgtaattagcaatctcagggctcagtctaactgcattatccatgctggaaaacttaaaaaaaaaatacagtccttcatcttcagttttccaatggtcgccagttatacacagctaatctttgcagtgaaagttgtctttggagaatgtgctttcttggtcccgggtggtcctggtcttgggctggaatctacgtgagctgctttgaagtaagctgacaatacacaattattaaggctattttgacctgcaagtatggtttcttaaaaaggaacaattaaataccatgtagcagttatttagactttagcattgactaaggaaaggagaaaatggaagaagaaccccctcctgcttagatgcagtcattttttaaaaaaataatcttttggggaataaacttaaccaaggaggtgagggacttgtaaacaaaatgttaaaactgcactgaagactagaaaatgttgatgaaagctgtt

SEQ ID NO: 410496 - DNA, 371 bp, Homo sapiens
ttttttttttttttttgaggcagagtctcactctgtcacccaggctggagtgcagtggcgtgatcttggcttactgcaagctctacctcccagttcatgccattttcctgcctcagcctcccgagtagctgggactacaggcacccgccaccatgcccagctaattttttgtattcttagtagagacggggtttcaccatgttaggatggtctcgatctcctggcctcgtgatctgccctccttagcctcccaaagtgctgggattacaggcgtgagccaccatctttttaatctccactgtgaactcatagttttttttttcaacttaatgcattataatcaacatcatttgtcccaaatttgggaaatg

SEQ ID NO: 410497 - DNA, 1088 bp, Homo sapiens
gcgacaggagatcctgtaggctatggcaaagactttagatttttctgaagtctctacaaaaatcctcaacaaaatattggcaaattgaatgcaacaatatgtaaaaggataatataaccaaatggagtgtaccctgggaatgcaaggctagttcaattagttcaccatattaacagactaaagaagaaaaggccacaccatcatctcaacagatatagacaaatattaagcagccataataaaaactctcagcaaattggaacagaagggaatttccttaacctcatgaacagaaaccacataaaaacctacatctaacatcaaacttaagggtgaaaggctgaattccttccccctcagattgtaaaacaggcaagaatgcccactctcctgactccttttcaacattgtactaaaagttctgggcactgccttaaggcaagaaaatgaaatagcatacagattgaaaaagaagaaataaaattgtccctattcacagatgacatgagtgtcaatgtagaaaatcccatggcatctgtaaaaacaatttcacagaactagctaatgactttagcaaggtcataggatacaaagtcagtgtataaaaatcaactgaaaagtgaaatatgtgcaggattttatgctgaaaattatgaaatactgatgaagtaaatcacagaagatctaagcacatggacagacctactgagttcattcatgggttggaagactcaacattgttaaatgatgtcagtccccacaaaattgatctctagattcaatgcagtccccgtaggaattctttaggtatcaggagtcttatttgaaaacttacatggaaatgcaaagaacaagaataagaatagctaaaacaattttgaaaaagaagaaccaagttggagggctaacacttgctgattttaagatataaacctgtaataccacagtgtggcattggccagacccacacagatatagttaattgatttttgacaaacatgcaaaggcagttcagtggagaaaagactgtcttttcaataaatggtactgcactccagcctgggtaacagagtgagactcttgtctca

SEQ ID NO: 410498 - DNA, 1126 bp, Homo sapiens
gcgacaggagatcctgtaggctatggcaaagactttagatttttctgaagtctctacaaaaatcctcaacaaaatattggcaaattgaatgcaacaatatgtaaaaggataatataaccaaatggagtgtaccctgggaatgcaaggctagttcaattagttcaccatattaacagactaaagaagaaaaggccacaccatcatctcaacagatatagacaaatattaagcagccataataaaaactctcagcaaattggaacagaagggaatttccttaacctcatgaacagaaaccacataaaaacctacatctaacatcaaacttaagggtgaaaggctgaattccttccccctcagattgtaaaacaggcaagaatgcccactctcctgactccttttcaacattgtactaaaagttctgggcactgccttaaggcaagaaaatgaaatagcatacagattgaaaaagaagaaataaaattgtccctattcacagatgacatgagtgtcaatgtagaaaatcccatggcatctgtaaaaacaatttcacagaactagctaatgactttagcaaggtcataggatacaaagtcagtgtataaaaatcaactgaaaagtgaaatatgtgcaggattttatgctgaaaattatgaaatactgatgaagtaaatcacagaagatctaagcacatggacagacctactgagttcattcatgggttggaagactcaacattgttaaatgatgtcagtccccacaaaattgatctctagattcaatgcagtccccgtaggaattctttaggtatcaggagtcttatttgaaaacttacatggaaatgcaaagaacaagaataagaatagctaaaacaattttgaaaaagaagaaccaagttggagggctaacacttgctgattttaagatataaacctgtaataccacagtgtggcattggccagacccacacagatatagttaattgatttttgacaaacatgcaaaggcagttcagtggagaaaagactgtcttttcaataaatggtactgcagtcattagacagtttttttttttttttttagagtcttgctgtgccacccactgcacaccaccaccaccctaggt

SEQ ID NO: 410499 - DNA, 891 bp, Homo sapiens
  misc_feature (163)..(163): n is a, c, g, or t
cgggccaagaggtacaggcctgacattattgttcgaaattgtggaagatacaaaaagatgtagtgaaagcaaggaaagagcttggggcggttaatttaagaacggggtttgggggaatttaaaaggaaaccctttccaaaggaaaagaatgtggaccgggttnaagttgctcttaaaagaaaaaactccactggaaaccattcaccatgtgtgattgtcttctgttatcatttgtcttacaggcggctattgcagacggctaatttatgcttaacttaggaagagataaggcaagagctagatttttttcatgtgatcttttccaagcttcaacttaacttaactacatttctctgtatgatgatgtctcttacttctacaggttccttgagcaccaaagatgattcataactctgtataggtgacagctgcttataaaagcatcttagcagataagcctattaaaattgtgcttttgtaacaatgttgtggttgctagaataaataccattaacaaatgccttttgagtatgcttgatagtgcttttgttttggattcactttttatgctttaaccttcatttgcctctagaaacccaaaacacaataaagtacagaataagaccttagtaataaaattcagaattttcttaaattgcatgtctgagtgttctaaaaatttttcaacatttccctttcacaagtgacttattcccccagttaagttattcacggtttcaccccacagcgtgaggggcagatagaaaaaaaaaaaaggaaacatcactaccgaattgaaagtagggtataatactaagttcacaggaaatcaagaaaaaatgacataactgaaatctctcttttggtaaaatctatttcaggtgcatacca

SEQ ID NO: 410500 - DNA, 474 bp, Homo sapiens
ctcttttccatggttttattaatttatttttttcatcacagaaatgacctccaccttcaacccccgagaatgtaaactgtccaagcaagaagggcaaaactatggcttcttcctgcgaattgagaaggacaccgagggccacctggtccgggtggttgagaagtgtagcccagcagagaaggctggccttcaagatggagacagagttcttaggatcaatggtgtctttgtggacaaagaagaacatatgcaggtgaatgagacatttggggcttttcttccaggatctcttcagcccccacatcttctctgctgattataattttggggggttggtagagtttggttctttcctggctgccactggcaaggcaggacacctttattgctgtaccttgtgttggccaatcaagtcccctatgaggaaccaagaactgtacacattactcttggatttgaatagcgttaggtcta

SEQ ID NO: 410501 - DNA, 434 bp, Homo sapiens
cgagctcggtacccccacctgggccaggcccaggaatccaagcctcccaagctcttggggaccaggcctgggggccaccacggctgggcaaggttcattcctggccaccagctactctagaggggctgggcccccacccaggagacctctcacacaccgtgaaggctgggacagagctgcacgcttgggggtgcctgaaggtccagaaagagctgccggcgtggggtaggaggtccccccggataaacaactttgttgtcaactattgatttttcccccccgagctcaggaatggttatagctttctttcatctccagtttttttttctttttttgaaacagggtctcattctgttgcccaagagaaatgaagcacatgtccacagagactggtacacaatgttcacagcatctttatccgtaacggccaccac

SEQ ID NO: 410502 - DNA, 326 bp, Homo sapiens
tgatctcaggatcccaagtacccagcagagaaggctggccttcaagatggagacagagttcttaggatcaatggtgtctttgtggacaaagaagaacatatgcaggtgaatgagacatttggggcttttcttccaggatctcttcagcccccacatcttctctgctgattataattttggggggttggtagagtttggttctttcctggctgccactggcaaggcaggacacctttattgctgtaccttgtgttggccaatcaagtcccctatgaggaaccaagaactgtacacattactcttggatttgaatagcgttaggtcta

SEQ ID NO: 410503 - DNA, 2227 bp, Homo sapiens
gcaaggcagcaggatggaggggtttgtaaaaatgccttccacctaccctgctgggcttgccgaggaggctctgagtgtgtgaaggggaagacaattatcgctaggctggagaatagaaagagcaccatcagtccagtgagttgcaagcctaatgctcacctgcagagacagaattcctgagtgaacgaacagagcagctcctcttccatctccagaaatgacctccaccttcaacccccgagaatgtaaactgtccaagcaagaagggcaaaactatggcttcttcctgcgaattgagaaggacaccgagggccacctggtccgggtggttgagaagtgtagcccagcagagaaggctggccttcaagatggagacagagttcttaggatcaatggtgtctttgtggacaaagaagaacatatgcaggttgtggatctggtcagaaagagtgggaattcagtgactttactagttctggatggggattcctatgagaaagcagtgaaaacacgggtggacttgaaagagttgggtcaaagtcagaaggagcaaggtttgagtgataatatactttcccctgtgatgaatggaggtgtgcaaacttggacccagccccggctctgctatctcgtgaaggaaggaggcagctatggcttctctctgaaaactgtccaaggtaaaaagggggtgtacatgactgatattacacctcaaggtgtggctatgagagctggagttctggctgatgatcacttgattgaagtgaatggagagaatgtagaggatgccagccatgaggaagtggttgaaaaggtgaagaagtcaggaagccgtgtcatgttcctgctggtggacaaagaaactgacaagcgtcatgttgagcagaagatacaattcaaaagagaaacagccagtttgaaactgttaccccaccagccccgaattgtggagatgaagaaaggaagcaatggctatggtttctatctgagggcaggctcagaacagaaaggtcaaatcatcaaggacatagattctggaagtccagcagaggaggctggcttgaagaacaatgatctggtagttgctgtcaacggcgagtctgtggaaaccctggatcatgacagtgtggtagaaatgattagaaagggtggagatcagacttcactgttggtggtagacaaagagacggacaacatgtacagactggctcatttttctccatttctctactatcaaagtcaagaactgcccaatggctctgtcaaggaggctccagctcctactcccacttctctggaagtctcaagtccaccagatactacagaggaagtagatcataagcctaaactctgcaggctggctaaaggtgaaaatggctatggctttcacttaaatgcgattcggggtctgccaggctcattcatcaaagaggtacagaagggcggtcctgctgacttggctgggctagaggatgaggatgtcatcattgaagtgaatggggtgaatgtgctagatgaaccctatgagaaggtggtggatagaatccagagcagtgggaagaatgtcacacttctagtctgtggaaagaaggcctatgattatttccaagctaagaaaatccctattgtttcctccctggctgatccacttgacacccctccagattctaaagaaggaatagtggtggagtcaaaccatgactcgcacatggcaaaagaacgggcccacagtacagcctcacattcttcttccaattctgaagatacagagatgtgatgaaaacaagtaatagctttggctgtttatttgatagctgtttctgggtatttaataggaatcctttctcaaggaatgagttgtgacctgtttactgtctctttagaagaaaaactccactggaaaccattcaccatgtgtgattgtcttctgttatcatttgtcttacaggcggctattgcagacggctaatttatgcttaacttaggaagagataaggcaagagctagatttttttcatgtgatcttttccaagcttcaacttaacttaactacatttctctgtatgatgatgtctcttacttctacaggttccttgagcaccaaagatgattcataactctgtataggtgacagctgcttataaaagcatcttagcagataagcctattaaaattgtgcttttgtaacaatgttgtggttgctagaataaataccattaacaaatgc

SEQ ID NO: 410504 - DNA, 2863 bp, Homo sapiens
gcaaggcagcaggatggaggggtttgtaaaaatgccttccacctaccctgctgggcttgccgaggaggctctgagtgtgtgaaggggaagacaattatcgctaggctggagaatagaaagagcaccatcagtccagtgagttgcaagcctaatgctcacctgcagagacagaattcctgagtgaacgaacagagcagctcctcttccatctccagaaatgacctccaccttcaacccccgagaatgtaaactgtccaagcaagaagggcaaaactatggcttcttcctgcgaattgagaaggacaccgagggccacctggtccgggtggttgagaagtgtagcccagcagagaaggctggccttcaagatggagacagagttcttaggatcaatggtgtctttgtggacaaagaagaacatatgcaggttgtggatctggtcagaaagagtgggaattcagtgactttactagttctggatggggattcctatgagaaagcagtgaaaacacgggtggacttgaaagagttgggtcaaagtcagaaggagcaaggtttgagtgataatatactttcccctgtgatgaatggaggtgtgcaaacttggacccagccccggctctgctatctcgtgaaggaaggaggcagctatggcttctctctgaaaactgtccaaggtaaaaagggggtgtacatgactgatattacacctcaaggtgtggctatgagagctggagttctggctgatgatcacttgattgaagtgaatggagagaatgtagaggatgccagccatgaggaagtggttgaaaaggtgaagaagtcaggaagccgtgtcatgttcctgctggtggacaaagaaactgacaagcgtcatgttgagcagaagatacaattcaaaagagaaacagccagtttgaaactgttaccccaccagccccgaattgtggagatgaagaaaggaagcaatggctatggtttctatctgagggcaggctcagaacagaaaggtcaaatcatcaaggacatagattctggaagtccagcagaggaggctggcttgaagaacaatgatctggtagttgctgtcaacggcgagtctgtggaaaccctggatcatgacagtgtggtagaaatgattagaaagggtggagatcagacttcactgttggtggtagacaaagagacggacaacatgtacagactggctcatttttctccatttctctactatcaaagtcaagaactgcccaatggctctgtcaaggaggctccagctcctactcccacttctctggaagtctcaagtccaccagatactacagaggaagtagatcataagcctaaactctgcaggctggctaaaggtgaaaatggctatggctttcacttaaatgcgattcggggtctgccaggctcattcatcaaagaggtatggtaatctggttccagcagcccaacaaacacagccacaattaggatagtctcagcttttcccacccattgatggcttagtagagaggttccattgaaggcacacactgaggggtctcacttgggttcagataaatgttgtcatggtcccacaccctttaggttagctaccagtacatcataagctcacgtttgtttgtttcccaaacatctgttccaaacagtgtgagttgactgaactctagttgacagtcactatcaaccctgattggcagtcatatttgtttgcttctgtgcatttggcataatgccccttaccctgtagggactgataagaatccctaaagctttcaagttgggagtgaagaagggggacctatttatcccccttcatcccagaagacatatgatgctgaaccactatttataataccactaatcatgtgaatatggaagttatagccttcataaatataaaagcattagaacacctttctcaacttctatacctcaaggagaaataataacatgattaaaaataaattcttgagctcctcatctattctcttaaggagagctagtctgatgtccccttctctgtttgaaattgataactcagaacttctgttcacaggtacagaagggcggtcctgctgacttggctgggctagaggatgaggatgtcatcattgaagtgaatggggtgaatgtgctagatgaaccctatgagaaggtggtggatagaatccagagcagtgggaagaatgtcacacttctagtctgtggaaagaaggcctatgattatttccaagctaagaaaatccctattgtttcctccctggctgatccacttgacacccctccagattctaaagaaggaatagtggtggagtcaaaccatgactcgcacatggcaaaagaacgggcccacagtacagcctcacattcttcttccaattctgaagatacagagatgtgatgaaaacaagtaatagctttggctgtttatttgatagctgtttctgggtatttaataggaatcctttctcaaggaatgagttgtgacctgtttactgtctctttagaagaaaaactccactggaaaccattcaccatgtgtgattgtcttctgttatcatttgtcttacaggcggctattgcagacggctaatttatgcttaacttaggaagagataaggcaagagctagatttttttcatgtgatcttttccaagcttcaacttaacttaactacatttctctgtatgatgatgtctcttacttctacaggttccttgagcaccaaagatgattcataactctgtataggtgacagctgcttataaaagcatcttagcagataagcctattaaaattgtgcttttgtaacaatgttgtggttgctagaataaataccattaacaaatgc

SEQ ID NO: 410505 - DNA, 2597 bp, Homo sapiens
gcaaggcagcaggatggaggggtttgtaaaaatgccttccacctaccctgctgggcttgccgaggaggctctgagtgtgtgaaggggaagacaattatcgctaggctggagaatagaaagagcaccatcagtccagtgagttgcaagcctaatgctcacctgcagagacagaattcctgagtgaacgaacagagcagctcctcttccatctccagaaatgacctccaccttcaacccccgagaatgtaaactgtccaagcaagaagggcaaaactatggcttcttcctgcgaattgagaaggacaccgagggccacctggtccgggtggttgagaagtgtagcccagcagagaaggctggccttcaagatggagacagagttcttaggatcaatggtgtctttgtggacaaagaagaacatatgcaggttgtggatctggtcagaaagagtgggaattcagtgactttactagttctggatggggattcctatgagaaagcagtgaaaacacgggtggacttgaaagagttgggtcaaagtcagaaggagcaaggtttgagtgataatatactttcccctgtgatgaatggaggtgtgcaaacttggacccagccccggctctgctatctcgtgaaggaaggaggcagctatggcttctctctgaaaactgtccaaggtaaaaagggggtgtacatgactgatattacacctcaaggtgtggctatgagagctggagttctggctgatgatcacttgattgaagtgaatggagagaatgtagaggatgccagccatgaggaagtggttgaaaaggtgaagaagtcaggaagccgtgtcatgttcctgctggtggacaaagaaactgacaagcgtcatgttgagcagaagatacaattcaaaagagaaacagccagtttgaaactgttaccccaccagccccgaattgtggagatgaagaaaggaagcaatggctatggtttctatctgagggcaggctcagaacagaaaggtcaaatcatcaaggacatagattctggaagtccagcagaggaggctggcttgaagaacaatgatctggtagttgctgtcaacggcgagtctgtggaaaccctggatcatgacagtgtggtagaaatgattagaaagggtggagatcagacttcactgttggtggtagacaaagagacggacaacatgtacagactggctcatttttctccatttctctactatcaaagtcaagaactgcccaatggctctgtcaaggaggctccagctcctactcccacttctctggaagtctcaagtccaccagatactacagaggaagtagatcataagcctaaactctgcaggctggctaaaggtgaaaatggctatggctttcacttaaatgcgattcggggtctgccaggctcattcatcaaagaggtacagaagggcggtcctgctgacttggctgggctagaggatgaggatgtcatcattgaagtgaatggggtgaatgtgctagatgaaccctatgagaaggtggtggatagaatccagagcagtgggaagaatgtcacacttctagtctgtggaaagaaggcctatgattatttccaagctaagaaaatccctattgtttcctccctggctgatccacttgacacccctccagattctaaagaaggaatagtggtggagtcaaaccatgactcgcacatggcaaaagaacgggcccacagtacagcctcacattcttcttccaattctgaagatacagagatgtgatgaaaacaagtaatagctttggctgtttatttgatagctgtttctgggtatttaataggaatcctttctcaaggaatgagttgtgacctgtttactgtctctttagaagaaaaactccactggaaaccattcaccatgtgtgattgtcttctgttatcatttgtcttacaggcggctattgcagacggctaatttatgcttaacttaggaagagataaggcaagagctagatttttttcatgtgatcttttccaagcttcaacttaacttaactacatttctctgtatgatgatgtctcttacttctacaggttccttgagcaccaaagatgattcataactctgtataggtgacagctgcttataaaagcatcttagcagataagcctattaaaattgtgcttttgtaacaatgttgtggttgctagaataaataccattaacaaatgccttttgagtatgcttgatagtgcttttgttttggattcactttttatgctttaaccttcatttgcctctagaaacccaaaacacaataaagtacagaataagaccttagtaataaaattcagaattttcttaaattgcatgtctgagtgttctaaaaatttttcaacatttccctttcacaagtgacttattcccccagttaagttattcacggtttcaccccacagcgtgaggggcagatagaaaaaaaaaaaaggaaacatcactaccgaattgaaagtagggtataatactaagttcacaggaaatcaagaaaaaatgacataactgaaatctctcttttggtaaaatctatttcaggtgcatacca

SEQ ID NO: 410506 - DNA, 2809 bp, Homo sapiens
gcaaggcagcaggatggaggggtttgtaaaaatgccttccacctaccctgctgggcttgccgaggaggctctgagtgtgtgaaggggaagacaattatcgctaggctggagaatagaaagagcaccatcagtccagtgagttgcaagcctaatgctcacctgcagagacagaattcctgagtgaacgaacagagcagctcctcttccatctccagaaatgacctccaccttcaacccccgagaatgtaaactgtccaagcaagaagggcaaaactatggcttcttcctgcgaattgagaaggacaccgagggccacctggtccgggtggttgagaagtgtagcccagcagagaaggctggccttcaagatggagacagagttcttaggatcaatggtgtctttgtggacaaagaagaacatatgcaggttgtggatctggtcagaaagagtgggaattcagtgactttactagttctggatggggattcctatgagaaagcagtgaaaacacgggtggacttgaaagagttgggtcaaagtcagaaggagcaaggtttgagtgataatatactttcccctgtgatgaatggaggtgtgcaaacttggacccagccccggctctgctatctcgtgaaggaaggaggcagctatggcttctctctgaaaactgtccaaggtaaaaagggggtgtacatgactgatattacacctcaaggtgtggctatgagagctggagttctggctgatgatcacttgattgaagtgaatggagagaatgtagaggatgccagccatgaggaagtggttgaaaaggtgaagaagtcaggaagccgtgtcatgttcctgctggtggacaaagaaactgacaagcgtcatgttgagcagaagatacaattcaaaagagaaacagccagtttgaaactgttaccccaccagccccgaattgtggagatgaagaaaggaagcaatggctatggtttctatctgagggcaggctcagaacagaaaggtcaaatcatcaaggacatagattctggaagtccagcagaggaggctggcttgaagaacaatgatctggtagttgctgtcaacggcgagtctgtggaaaccctggatcatgacagtgtggtagaaatgattagaaagggtggagatcagacttcactgttggtggtagacaaagagacggacaacatgtacagactggctcatttttctccatttctctactatcaaagtcaagaactgcccaatggctctgtcaaggaggctccagctcctactcccacttctctggaagtctcaagtccaccagatactacagaggaagtagatcataagcctaaactctgcaggctggctaaaggtgaaaatggctatggctttcacttaaatgcgattcggggtctgccaggctcattcatcaaagaggtatggtaatctggttccagcagcccaacaaacacagccacaattaggatagtctcagcttttcccacccattgatggcttagtagagaggttccattgaaggcacacactgaggggtctcacttgggttcagataaatgttgtcatggtcccacaccctttaggttagctaccagtacatcataagctcacgtttgtttgtttcccaaacatctgttccaaacagtgtgagttgactgaactctagttgacagtcactatcaaccctgattggcagtcatatttgtttgcttctgtgcatttggcataatgccccttaccctgtagggactgataagaatccctaaagctttcaagttgggagtgaagaagggggacctatttatcccccttcatcccagaagacatatgatgctgaaccactatttataataccactaatcatgtgaatatggaagttatagccttcataaatataaaagcattagaacacctttctcaacttctatacctcaaggagaaataataacatgattaaaaataaattcttgagctcctcatctattctcttaaggagagctagtctgatgtccccttctctgtttgaaattgataactcagaacttctgttcacaggtacagaagggcggtcctgctgacttggctgggctagaggatgaggatgtcatcattgaagtgaatggggtgaatgtgctagatgaaccctatgagaaggtggtggatagaatccagagcagtgggaagaatgtcacacttctagtctgtggaaagaaggcctatgattatttccaagctaagaaaatccctattgtttcctccctggctgatccacttgacacccctccagattctaaagaaggaatagtggtggagtcaaaccatgactcgcacatggcaaaagaacgggcccacagtacagcctcacattcttcttccaattctgaagatacagagatgtgatgaagaatcctttctcaaggaatgagttgtgacctgtttactgtctctttagaagaaaaactccactggaaaccattcaccatgtgtgattgtcttctgttatcatttgtcttacaggcggctattgcagacggctaatttatgcttaacttaggaagagataaggcaagagctagatttttttcatgtgatcttttccaagcttcaacttaacttaactacatttctctgtatgatgatgtctcttacttctacaggttccttgagcaccaaagatgattcataactctgtataggtgacagctgcttataaaagcatcttagcagataagcctattaaaattgtgcttttgtaacaatgttgtggttgctagaataaataccattaacaaatgc

SEQ ID NO: 410507 - DNA, 2549 bp, Homo sapiens
gcaaggcagcaggatggaggggtttgtaaaaatgccttccacctaccctgctgggcttgccgaggaggctctgagtgtgtgaaggggaagacaattatcgctaggctggagaatagaaagagcaccatcagtccagtgagttgcaagcctaatgctcacctgcagagacagaattcctgagtgaacgaacagagcagctcctcttccatctccagaaatgacctccaccttcaacccccgagaatgtaaactgtccaagcaagaagggcaaaactatggcttcttcctgcgaattgagaaggacaccgagggccacctggtccgggtggttgagaagtgtagcccagcagagaaggctggccttcaagatggagacagagttcttaggatcaatggtgtctttgtggacaaagaagaacatatgcaggttgtggatctggtcagaaagagtgggaattcagtgactttactagttctggatggggattcctatgagaaagcagtgaaaacacgggtggacttgaaagagttgggtcaaagtcagaaggagcaaggtttgagtgataatatactttcccctgtgatgaatggaggtgtgcaaacttggacccagccccggctctgctatctcgtgaaggaaggaggcagctatggcttctctctgaaaactgtccaaggtaaaaagggggtgtacatgactgatattacacctcaaggtgtggctatgagagctggagttctggctgatgatcacttgattgaagtgaatggagagaatgtagaggatgccagccatgaggaagtggttgaaaaggtgaagaagtcaggaagccgtgtcatgttcctgctggtggacaaagaaactgacaagcgtcatgttgagcagaagatacaattcaaaagagaaacagccagtttgaaactgttaccccaccagccccgaattgtggagatgaagaaaggaagcaatggctatggtttctatctgagggcaggctcagaacagaaaggtcaaatcatcaaggacatagattctggaagtccagcagaggaggctggcttgaagaacaatgatctggtagttgctgtcaacggcgagtctgtggaaaccctggatcatgacagtgtggtagaaatgattagaaagggtggagatcagacttcactgttggtggtagacaaagagacggacaacatgtacagactggctcatttttctccatttctctactatcaaagtcaagaactgcccaatggctctgtcaaggaggctccagctcctactcccacttctctggaagtctcaagtccaccagatactacagaggaagtagatcataagcctaaactctgcaggctggctaaaggtgaaaatggctatggctttcacttaaatgcgattcggggtctgccaggctcattcatcaaagaggtatggtaatctggttccagcagcccaacaaacacagccacaattaggatagtctcagcttttcccacccattgatggcttagtagagaggttccattgaaggcacacactgaggggtctcacttgggttcagataaatgttgtcatggtcccacaccctttaggttagctaccagtacatcataagctcacgtttgtttgtttcccaaacatctgttccaaacagtgtgagttgactgaactctagttgacagtcactatcaaccctgattggcagtcatatttgtttgcttctgtgcatttggcataatgccccttaccctgtagggactgataagaatccctaaagctttcaagttgggagtgaagaagggggacctatttatcccccttcatcccagaagacatatgatgctgaaccactatttataataccactaatcatgtgaatatggaagttatagccttcataaatataaaagcattagaacacctttctcaacttctatacctcaaggagaaataataacatgattaaaaataaattcttgagctcctcatctattctcttaaggagagctagtctgatgtccccttctctgtttgaaattgataactcagaacttctgttcacaggtacagaagggcggtcctgctgacttggctgggctagaggatgaggatgtcatcattgaagtgaatggggtgaatgtgctagatgaaccctatgagaaggtggtggatagaatccagagcagtgggaagaatgtcacacttctagtctgtggaaagaaggcctatgattatttccaagctaagaaaatccctattgtttcctccctggctgatccacttgacacccctccagattctaaagaaggaatagtggtggagtcaaaccatgactcgcacatggcaaaagaacggcaggcggctattgcagacggctaatttatgcttaacttaggaagagataaggttccttgagcaccaaagatgattcataactctgtataggtgacagctgcttataaaagcatcttagcagataagcctattaaaattgtgcttttgtaacaatgttgtggttgctagaataaataccattaacaaatgc

SEQ ID NO: 410508 - DNA, 2298 bp, Homo sapiens
gcaaggcagcaggatggaggggtttgtaaaaatgccttccacctaccctgctgggcttgccgaggaggctctgagtgtgtgaaggggaagacaattatcgctaggctggagaatagaaagagcaccatcagtccagtgagttgcaagcctaatgctcacctgcagagacagaattcctgagtgaacgaacagagcagctcctcttccatctccagggtctcattctgttgcccaggctggagtgcagtggtgcgatctcggctcacagcaacctctctgcctccagaaatgacctccaccttcaacccccgagaatgtaaactgtccaagcaagaagggcaaaactatggcttcttcctgcgaattgagaaggacaccgagggccacctggtccgggtggttgagaagtgtagcccagcagagaaggctggccttcaagatggagacagagttcttaggatcaatggtgtctttgtggacaaagaagaacatatgcaggttgtggatctggtcagaaagagtgggaattcagtgactttactagttctggatggggattcctatgagaaagcagtgaaaacacgggtggacttgaaagagttgggtcaaagtcagaaggagcaaggtttgagtgataatatactttcccctgtgatgaatggaggtgtgcaaacttggacccagccccggctctgctatctcgtgaaggaaggaggcagctatggcttctctctgaaaactgtccaaggtaaaaagggggtgtacatgactgatattacacctcaaggtgtggctatgagagctggagttctggctgatgatcacttgattgaagtgaatggagagaatgtagaggatgccagccatgaggaagtggttgaaaaggtgaagaagtcaggaagccgtgtcatgttcctgctggtggacaaagaaactgacaagcgtcatgttgagcagaagatacaattcaaaagagaaacagccagtttgaaactgttaccccaccagccccgaattgtggagatgaagaaaggaagcaatggctatggtttctatctgagggcaggctcagaacagaaaggtcaaatcatcaaggacatagattctggaagtccagcagaggaggctggcttgaagaacaatgatctggtagttgctgtcaacggcgagtctgtggaaaccctggatcatgacagtgtggtagaaatgattagaaagggtggagatcagacttcactgttggtggtagacaaagagacggacaacatgtacagactggctcatttttctccatttctctactatcaaagtcaagaactgcccaatggctctgtcaaggaggctccagctcctactcccacttctctggaagtctcaagtccaccagatactacagaggaagtagatcataagcctaaactctgcaggctggctaaaggtgaaaatggctatggctttcacttaaatgcgattcggggtctgccaggctcattcatcaaagaggtacagaagggcggtcctgctgacttggctgggctagaggatgaggatgtcatcattgaagtgaatggggtgaatgtgctagatgaaccctatgagaaggtggtggatagaatccagagcagtgggaagaatgtcacacttctagtctgtggaaagaaggcctatgattatttccaagctaagaaaatccctattgtttcctccctggctgatccacttgacacccctccagattctaaagaaggaatagtggtggagtcaaaccatgactcgcacatggcaaaagaacgggcccacagtacagcctcacattcttcttccaattctgaagatacagagatgtgatgaaaacaagtaatagctttggctgtttatttgatagctgtttctgggtatttaataggaatcctttctcaaggaatgagttgtgacctgtttactgtctctttagaagaaaaactccactggaaaccattcaccatgtgtgattgtcttctgttatcatttgtcttacaggcggctattgcagacggctaatttatgcttaacttaggaagagataaggcaagagctagatttttttcatgtgatcttttccaagcttcaacttaacttaactacatttctctgtatgatgatgtctcttacttctacaggttccttgagcaccaaagatgattcataactctgtataggtgacagctgcttataaaagcatcttagcagataagcctattaaaattgtgcttttgtaacaatgttgtggttgctagaataaataccattaacaaatgc

SEQ ID NO: 410509 - DNA, 2168 bp, Homo sapiens
gcaaggcagcaggatggaggggtttgtaaaaatgccttccacctaccctgctgggcttgccgaggaggctctgagtgtgtgaaggggaagacaattatcgctaggctggagaatagaaagagcaccatcagtccagtgagttgcaagcctaatgctcacctgcagagacagaattcctgagtgaacgaacagagcagctcctcttccatctccagaaatgacctccaccttcaacccccgagaatgtaaactgtccaagcaagaagggcaaaactatggcttcttcctgcgaattgagaaggacaccgagggccacctggtccgggtggttgagaagtgtagcccagcagagaaggctggccttcaagatggagacagagttcttaggatcaatggtgtctttgtggacaaagaagaacatatgcaggttgtggatctggtcagaaagagtgggaattcagtgactttactagttctggatggggattcctatgagaaagcagtgaaaacacgggtggacttgaaagagttgggtcaaagtcagaaggagcaaggtttgagtgataatatactttcccctgtgatgaatggaggtgtgcaaacttggacccagccccggctctgctatctcgtgaaggaaggaggcagctatggcttctctctgaaaactgtccaaggtaaaaagggggtgtacatgactgatattacacctcaaggtgtggctatgagagctggagttctggctgatgatcacttgattgaagtgaatggagagaatgtagaggatgccagccatgaggaagtggttgaaaaggtgaagaagtcaggaagccgtgtcatgttcctgctggtggacaaagaaactgacaagcgtcatgttgagcagaagatacaattcaaaagagaaacagccagtttgaaactgttaccccaccagccccgaattgtggagatgaagaaaggaagcaatggctatggtttctatctgagggcaggctcagaacagaaaggtcaaatcatcaaggacatagattctggaagtccagcagaggaggctggcttgaagaacaatgatctggtagttgctgtcaacggcgagtctgtggaaaccctggatcatgacagtgtggtagaaatgattagaaagggtggagatcagacttcactgttggtggtagacaaagagacggacaacatgtacagactggctcatttttctccatttctctactatcaaagtcaagaactgcccaatggctctgtcaaggaggctccagctcctactcccacttctctggaagtctcaagtccaccagatactacagaggaagtagatcataagcctaaactctgcaggctggctaaaggtgaaaatggctatggctttcacttaaatgcgattcggggtctgccaggctcattcatcaaagaggtacagaagggcggtcctgctgacttggctgggctagaggatgaggatgtcatcattgaagtgaatggggtgaatgtgctagatgaaccctatgagaaggtggtggatagaatccagagcagtgggaagaatgtcacacttctagtctgtggaaagaaggcctatgattatttccaagctaagaaaatccctattgtttcctccctggctgatccacttgacacccctccagattctaaagaaggaatagtggtggagtcaaaccatgactcgcacatggcaaaagaacgggcccacagtacagcctcacattcttcttccaattctgaagatacagagatgtgatgaaaacaagtaatagctttggctgtttatttgatagctgtttctgggtatttaataggaatcctttctcaaggaatgagttgtgacctgtttactgtctctttagaagcaggcggctattgcagacggctaatttatgcttaacttaggaagagataaggcaagagctagatttttttcatgtgatcttttccaagcttcaacttaacttaactacatttctctgtatgatgatgtctcttacttctacaggttccttgagcaccaaagatgattcataactctgtataggtgacagctgcttataaaagcatcttagcagataagcctattaaaattgtgcttttgtaacaatgttgtggttgctagaataaataccattaacaaatgc

SEQ ID NO: 410510 - DNA, 3011 bp, Homo sapiens
gcaaggcagcaggatggaggggtttgtaaaaatgccttccacctaccctgctgggcttgccgaggaggctctgagtgtgtgaaggggaagacaattatcgctaggctggagaatagaaagagcaccatcagtccagtgagttgcaagcctaatgctcacctgcagagacagaattcctgagtgaacgaacagagcagctcctcttccatctccagaaatgacctccaccttcaacccccgagaatgtaaactgtccaagcaagaagggcaaaactatggcttcttcctgcgaattgagaaggacaccgagggccacctggtccgggtggttgagaagtgtagcccagcagagaaggctggccttcaagatggagacagagttcttaggatcaatggtgtctttgtggacaaagaagaacatatgcaggttgtggatctggtcagaaagagtgggaattcagtgactttactagttctggatggggattcctatgagaaagcagtgaaaacacgggtggacttgaaagagttgggtcaaagtcagaaggagcaaggtttgagtgataatatactttcccctgtgatgaatggaggtgtgcaaacttggacccagccccggctctgctatctcgtgaaggaaggaggcagctatggcttctctctgaaaactgtccaaggtaaaaagggggtgtacatgactgatattacacctcaaggtgtggctatgagagctggagttctggctgatgatcacttgattgaagtgaatggagagaatgtagaggatgccagccatgaggaagtggttgaaaaggtgaagaagtcaggaagccgtgtcatgttcctgctggtggacaaagaaactgacaagcgtcatgttgagcagaagatacaattcaaaagagaaacagccagtttgaaactgttaccccaccagccccgaattgtggagatgaagaaaggaagcaatggctatggtttctatctgagggcaggctcagaacagaaaggtcaaatcatcaaggacatagattctggaagtccagcagaggaggctggcttgaagaacaatgatctggtagttgctgtcaacggcgagtctgtggaaaccctggatcatgacagtgtggtagaaatgattagaaagggtggagatcagacttcactgttggtggtagacaaagagacggacaacatgtacagactggctcatttttctccatttctctactatcaaagtcaagaactgcccaatggctctgtcaaggaggctccagctcctactcccacttctctggaagtctcaagtccaccagatactacagaggaagtagatcataagcctaaactctgcaggctggctaaaggtgaaaatggctatggctttcacttaaatgcgattcggggtctgccaggctcattcatcaaagaggtatggtaatctggttccagcagcccaacaaacacagccacaattaggatagtctcagcttttcccacccattgatggcttagtagagaggttccattgaaggcacacactgaggggtctcacttgggttcagataaatgttgtcatggtcccacaccctttaggttagctaccagtacatcataagctcacgtttgtttgtttcccaaacatctgttccaaacagtgtgagttgactgaactctagttgacagtcactatcaaccctgattggcagtcatatttgtttgcttctgtgcatttggcataatgccccttaccctgtagggactgataagaatccctaaagctttcaagttgggagtgaagaagggggacctatttatcccccttcatcccagaagacatatgatgctgaaccactatttataataccactaatcatgtgaatatggaagttatagccttcataaatataaaagcattagaacacctttctcaacttctatacctcaaggagaaataataacatgattaaaaataaattcttgagctcctcatctattctcttaaggagagctagtctgatgtccccttctctgtttgaaattgataactcagaacttctgttcacaggtacagaagggcggtcctgctgacttggctgggctagaggatgaggatgtcatcattgaagtgaatggggtgaatgtgctagatgaaccctatgagaaggtggtggatagaatccagagcagtgggaagaatgtcacacttctagtctgtggaaagaaggcctatgattatttccaagctaagaaaatccctattgtttcctccctggctgatccacttgacacccctccagattctaaagaaggaatagtggtggagtcaaaccatgactcgcacatggcaaaagaacggcaggcggctattgcagacggctaatttatgcttaacttaggaagagataaggcaagagctagatttttttcatgtgatcttttccaagcttcaacttaacttaactacatttctctgtatgatgatgtctcttacttctacaggttccttgagcaccaaagatgattcataactctgtataggtgacagctgcttataaaagcatcttagcagataagcctattaaaattgtgcttttgtaacaatgttgtggttgctagaataaataccattaacaaatgccttttgagtatgcttgatagtgcttttgttttggattcactttttatgctttaaccttcatttgcctctagaaacccaaaacacaataaagtacagaataagaccttagtaataaaattcagaattttcttaaattgcatgtctgagtgttctaaaaatttttcaacatttccctttcacaagtgacttattcccccagttaagttattcacggtttcaccccacagcgtgaggggcagatagaaaaaaaaaaaaggaaacatcactaccgaattgaaagtagggtataatactaagttcacaggaaatcaagaaaaaatgacataactgaaatctctcttttggtaaaatctatttcaggtgcatacca

SEQ ID NO: 410511 - DNA, 667 bp, Homo sapiens
caggtacagaagggcggtcctgctgacttggctgggctagaggatgaggatgtcatcattgaagtgaatggggtgaatgtgctagatgaaccctatgagaaggtggtggatagaatccagagcagtgggaagaatgtcacacttctagtctgtggaaagaaggcctatgattatttccaagctaagaaaatccctattgtttcctccctggctgatccacttgacacccctccagattctaaagaaggaatagtggtggagtcaaaccatgactcgcacatggcaaaagaacgggtgagtgggggcctatttcttttcatgatctaatttactagagtatgggtacagtccctatgagtatatttaatgtctatgtttgccacagatttttttaaaactagaaaatgaaaatgtaaagataactaacaaatcaagttattgtagaggacaggaggcagtataagaacaacaaatttcttactttcatagcatgcagctgacagcaactgtctagagctaataaatcaagaagtaaaaagtttatcagtattgtaatgggaacccccaaaagagcctgaatcggatgatctagatatgaattctggttctgtcatttgtcagctgtggggaaatggatttatttgttctgttcctcagttttcccacc

SEQ ID NO: 410512 - DNA, 553 bp, Homo sapiens
ggagaaaggaaagaatagaaaaggtactgaactccaggtccaagtcaatcatctttgcttctctcacattgtcatcgacatttaccccagcattatcctcatcgcttcatcactactgccaccccaaccaatctgcctcctctgtataaggctggaagacagagatccaccaggctctcaattgaaagccctggagggctacaccctaagaacagaagtgaatcggaggtacacttagcaaaactgaaaccagcttctgattcagaataatctctgactcgattgaggtgatcaaaggctattctacctgcccaacagaagaaaaagggaacactttcggtggaaggcaatatcatctggaccctttatggttttattatacataatgtctaacattttttaaattactagatgtggaagatcaagttcatttgcccaataatcaagagaaaaaaacacacacaatagaaacacaattatagatgatcaagatattgtaatcagcaaatgagaatttacaaataatttttatgaatatgtttaagaaaataaa

SEQ ID NO: 410513 - DNA, 532 bp, Homo sapiens
cttcacagaagactatagagtgtcccaaacacattgccagtcttcctttcaagcgagttgctgaattttgaagctttatggagcaggaggttaaagagctaaactgaaaacttgctgttatcttttagggctggaagacagagatccaccaggctctcaattgaaagccctggagggctacaccctaagaacagaagtgaatcggaggtacacttagcaaaactgaaaccagcttctgattcagaataatctctgactcgattgaggtgatcaaaggctattctacctgcccaacagaagaaaaagggaacactttcggtggaaggcaatatcatctggaccctttatggttttattatacataatgtctaacattttttaaattactagatgtggaagatcaagttcatttgcccaataatcaagagaaaaaaacacacacaatagaaacacaattatagatgatcaagatattgtaatcagcaaatgagaatttacaaataatttttatgaatatgtttaagaaaataaa

SEQ ID NO: 410514 - DNA, 392 bp, Homo sapiens
ttctgaaatctaattttagtgatggtggcttcactctgtaattatcttgggaaacatttaatcacacaagttaaaggggagggtgacttaaaagtacgttcatctcaatagacctgtctttgaagaagaagaagtcttaaggttcttgttagtcatatgggtgattgccgatgccacacaatgggactcttagtgaggagagggagagcaggagacattgagaagtcaggtaatcccatagattattatgaaactcccacatggagttggataggctattgaatgccaactgaagatacaggtcataggttctgaacctatgggggtagactacctcaaccctggagaatgtataggggagtgagaagcgccatggatgaaatactcaaata

SEQ ID NO: 410515 - DNA, 424 bp, Homo sapiens
gttcaggtatcatggccttacatgatattcatctgaagcaggatgagacagagcaggcagaaaaggaaacatttctgacaatgttctgttatgaagaatccacctttcctagaagccccagcgaacctcccatcggactcataggtgcaaactggctgaaaggctcattccaagaccaagcacaggtacaagggccaaaactggctagaacaggcatgactcaccttttcagcttctcagtcatctcctctcaagggcacaggtctgtttggttggtttgtgaataaaactgggggactgttattatggaagaagcagtgataagaccctttccataaagaggagagacgtgaactggcatatatcaccaggaccacctccaagtaattgactaataaataaaagctctattagtaagaaaaaa

SEQ ID NO: 410516 - DNA, 417 bp, Homo sapiens
tcctaaacaaatttagttcgcttttttgtattttgccggaatactgacatctgattctgtactctgattttggggatatcctgttttaaaaaccagtaggactgactgtgttggccctgcatgaatctctttaaccacctatggagcaaacaaaacattttgaaaatggaaaatatatcacattcgcaacaagcacatttgaatatgttttttattatagacccatatgattgaatgcagtagccactgcctgcacgtggctagctagcacttgaagtgtgacaatttgggattgaaagatgctggaaatgtgaaatacacaccaagttccaaagatttcatatattgattacatgttgaaataacagtgttttcgttatattgagttaaaatattaaaatattgtaagatttgata

SEQ ID NO: 410517 - DNA, 313 bp, Homo sapiens
gtgagccgagattgcgccactgcactccagcctgggcgacagagcgagactccttctcaaaaaaaaaaaaatgcataaaataatatggatctatgttaataggcactaattgtttaaagacataatttgttaactataggtaggggacagagaaaggagcagagttaatgtatgctattgaagctgagttgctatcagtctgaactagactttgaactcagcatgttaaatgaaatcttcatagtagccactaaaaaaataacttttaaaatatacagaaaagaatttaagaaaggatcaaaatattacagga

SEQ ID NO: 410518 - DNA, 568 bp, Homo sapiens
caccccacaccccaaggcagtctgtccagtgctcctaaaggagagcagctccccttttccagttatgggagatgtgggcaataaagcattactgtcaatgccgtgatgttcactgcaacatatgcttgatgttttcataattttatccatctttttcagacatcttactgcagaacactgtatgttttccaattattatttttcagaaatgtggtttacagcttctatcaggattagcttcagcttcaagtgacaaaagtcacttgaaatatgagttgctgaaacaagatggcagtctctcccctcaacaggactgttacaacaccttatcttcagagaaccaggctctctgcaacatttcagggacgtcgttcagtaccttatgtggaattcaagcttagctgggcatcctatgttttaactggctaactcgtggaactctcaacttggatcaagtggtagtggagtcccagggactctgagcagccagtgtgtgatactgcagggcagcacaccctggggaggccaactgtacagaataaaattaatgctttctatctttagcaac

SEQ ID NO: 410519 - DNA, 246 bp, Homo sapiens
tgggtgtgctttcccgattgacccgctgtgaggtgagcgattttaacccacatccttactgacttcacagcacagtaggtgcttcgtggctgtccggtgcaaggatgtatatacacacacacctttgcaaaaaaagtttgcatctcttgcctggctgtttgttgcaataatctatcatttgtcttttcctttccagcattgcagatgatcccttgaaaagaagtctgatcacattcacactctgct

SEQ ID NO: 410520 - DNA, 429 bp, Homo sapiens
caggcatgcaccaccacacccagctatttttaaaacatttttgtagagacggggtcttgccatgttgcccaggctagtctcaaacttacagcgtcaagcaatcctcctgccttggcctcccagagtgctgggattacaggactcacccactgcacctggccagcaatctattttaatgactctaccatgtgattctgatgtgcaccaaaatttgagaaccactactcaaaggatttttatttgcagctgctgctttattcggctggacagaattttaaaatttggtatactaatggtagaaaatctaccattctctagataaatcagttacacatccattagtgtatagtatggtattttcaacaggctttttcttctttaaaagtagatataatttaggctgggtgcagtggctcacacctgtaatct

SEQ ID NO: 410521 - DNA, 409 bp, Homo sapiens
atttatgggtgtgaatatgtctgtgggggtgggagctggaggagggccaggtagctgaggccaggaaaaagagtcccaaacccaccagctgttgggatatttaactgtgattgtacgttaaagctgcctcggagtgtccgacagctaagaaaaaacagtagtatgatggattatatacttcatagtattgactaagataatatattcaggagacaccatctcttttcctagcattggaaatcttaaggtattttactgcaagagttcttacaaaagggaccctctcctgcataaaaagtggtgtttttggctggacgtgctggctcgtgcttgtaatcccagcactttgggaggctgagcggggaggattgcttgagctcagaagtttgagaccagcttgggcaacata

SEQ ID NO: 410522 - DNA, 195 bp, Homo sapiens
gaagttaaatagtttgcagtctttgtgttagaggcatgcagcatccagcctagcatgtgtaatttagcatgtgtgtaaacttaggatcaggcaaacttttttgtaaaaggccgaatagtaagtatttcaggccttgcagggcacatagaatctctgttacctgttcttctgggtgcatgatttttacaacccttt

SEQ ID NO: 410523 - DNA, 2941 bp, Homo sapiens
agacagatggagaagttagaagttttagaggaatggcagtctcacattgaaggctgggaggggtccaacatcactgacacctgcactgaaatgctaatgtgtggagtcttactgaaaatttcttctggaaatattcaagaacgggtgttttttcttttcgataatcttttggtgtactgcaaaagaaaacacagacggttgaagaacagcaaggcatctacagatggacatcggtacctttttcgtggccggatcaacacggaggtgatggaagtggagaatgtggatgatggcaccgctgatttccatagcagtggacacattgttgttaatggatggaagatacataacacagcaaaaaataaatggtttgtttgtatggcaaaaacacctgaagagaagcatgaatggtttgaagctattttgaaagaaagagaacggcggaaaggtttaaaattaggaatggagcaagatacctgggtcatgatctctgaacagggtgagaaactttataaaatgatgtgcagacaaggaaatctgatcaaagaccgaaagagaaaactgactacgttccctaaatgctttcttggaagcgaatttgtgtcatggctgttggaaattggagagattcacaggcctgaggaaggcgtgcacttgggacaagcattattagaaaatggaatcattcaccatgttactgataaacatcaattcaaaccagaacagatgttatatagatttcgctatgatgatggaacattttatccaagaaatgagatgcaggacgtgatttcaaagggtgtaagattatattgtcgtcttcatagcctttttactccagtgataagagataaagattaccatttaaggacctacaaatctgtggtcatggccaacaaactgatagactggttaattgcacagggagattgccgcaccagagaagaggcaatgatatttggcgttggactctgtgacaatggatttatgcaccatgtccttgaaaaaagcgaattcaaagatgaacccctacttttccgttttttttcggatgaggaaatggagggatcaaatatgaaacatcgacttatgaaacatgacttaaaagttgtggaaaatgttatagctaagtcattattgattaaatccaatgaaggcagctatggctttgggctagaagacaaaaataaagttccaataataaagttggtagaaaagggatctaatgctgagatggctggcatggaagtcgggaaaaagatttttgctattaatggtgacctagtttttatgagacctttcaatgaagtggattgcttcctgaaatcgtgtttaaacagcagaaaacctctaagagttcttgtgagcacaaagccaagagagacagtgaaaattccagattcagctgatggacttggcttccagatccggggatttggcccttctgttgtgcatgctgtaggaagaggaactgtggctgcagcagctggtcttcaccctggacagtgcattatcaaggtgaatggaatcaatgtcagcaaagagacacatgccagtgtcattgcacacgttacagcctgcaggaagtacaggcggccaacgaagcaagattccatacaatgggtttataatagcattgagagtgctcaagaagaccttcaaaaatctcactccaagccccctggagatgaagcaggggatgcttttgactgtaaagtagaagaggttattgacaaattcaacactatggccatcattgatgggaagaaggagcatgtgagtctgacagtggacaatgtccacctggaatatggtgtcgtgtatgagtacgacagcacagctggcatcaagtgcaatgtggtggaaaagatgattgagcccaaaggtttcttcagcttaactgccaagattcttgaagccctggctaaaagtgatgagcattttgtacaaaactgtaccagcctaaattctctaaatgaagtgattcctactgaccttcagagtaaattcagtgccctttgcagtgaaagaattgaacacctatgtcagagaatatccagttataaaaaggttcaagcttcagaaaggttttacaatttcacagcacggcatgctgtctgggagcacagttttgatcttcacagtgtaagcagcacatttccagtacctgtgactatggagttcctcctgctgcctcctcctctcttaggaatatcccaggatggaagacagcactgcattcctgaggaccttccttctcaagaaatgctcttagcagagagggcccctgtctgattcttaccctttggaacagttcaggcacccttagacacagtacacagcccttcctagcatgtgggcagggggacatcctgtattcacaggcatttgtattgagctacaagttggaaagccagtccccctagcaagagaatcttctgccagctctccccgattactccattaacacttcttgacatcaccctattcatttccttttcagcttgtaccaaaatttctaactatctggcttttacgtgcattatataattgtatatatacagtcatgcactgcataacatttcagtaaatgacagaccatatatatatggatatatatatatatatatatatggatatatatacacatatatatacacacacatatatgtatatatacatatatatgtatatatatataaaatggtggtcccataagattatactactacattttggctctactttttctatgttcagatagatgcacctattggtgtatttttcagaatacatccccgttgttaagcaatgcattactgtattatatatatggcacatgtattatatatatggcacattgccgttacttttaatggcaaaaaccgcaatcacttttgctccaacctagtaattgcaataaacaattgttgtatatagc

SEQ ID NO: 410524 - DNA, 4766 bp, Homo sapiens
  misc_feature (3157)..(3157): n is a, c, g, or t
  misc_feature (3237)..(3237): n is a, c, g, or t
agacagatggagaagttagaagttttagaggaatggcagtctcacattgaaggctgggaggggtccaacatcactgacacctgcactgaaatgctaatgtgtggagtcttactgaaaatttcttctggaaatattcaagaacgggtgttttttcttttcgataatcttttggtgtactgcaaaagaaaacacagacggttgaagaacagcaaggcatctacagatggacatcggtacctttttcgtggccggatcaacacggaggtgatggaagtggagaatgtggatgatggcaccgctgatttccatagcagtggacacattgttgttaatggatggaagatacataacacagcaaaaaataaatggtttgtttgtatggcaaaaacacctgaagagaagcatgaatggtttgaagctattttgaaagaaagagaacggcggaaaggtttaaaattaggaatggagcaagatacctgggtcatgatctctgaacagggtgagaaactttataaaatgatgtgcagacaaggaaatctgatcaaagaccgaaagagaaaactgactacgttccctaaatgctttcttggaagcgaatttgtgtcatggctgttggaaattggagagattcacaggcctgaggaaggcgtgcacttgggacaagcattattagaaaatggaatcattcaccatgttactgataaacatcaattcaaaccagaacagatgttatatagatttcgctatgatgatggaacattttatccaagaaatgagatgcaggacgtgatttcaaagggtgtaagattatattgtcgtcttcatagcctttttactccagtgataagagataaagattaccatttaaggacctacaaatctgtggtcatggccaacaaactgatagactggttaattgcacagggagattgccgcaccagagaagaggcaatgatatttggcgttggactctgtgacaatggatttatgcaccatgtccttgaaaaaagcgaattcaaagatgaacccctacttttccgttttttttcggatgaggaaatggagggatcaaatatgaaacatcgacttatgaaacatgacttaaaagttgtggaaaatgttatagctaagtcattattgattaaatccaatgaaggcagctatggctttgggctagaagacaaaaataaagttccaataataaagttggtagaaaagggatctaatgctgagatggctggcatggaagtcgggaaaaagatttttgctattaatggtgacctagtttttatgagacctttcaatgaagtggattgcttcctgaaatcgtgtttaaacagcagaaaacctctaagagttcttgtgagcacaaagccaagagagacagtgaaaattccagattcagctgatggacttggcttccagatccggggatttggcccttctgttgtgcatgctgtaggaagaggaactgtggctgcagcagctggtcttcaccctggacagtgcattatcaaggtgaatggaatcaatgtcagcaaagagacacatgccagtgtcattgcacacgttacagcctgcaggaagtacaggcggccaacgaagcaagattccatacaatgggtttataatagcattgagagtgctcaagaagaccttcaaaaatctcactccaagccccctggagatgaagcaggggatgcttttgactgtaaagtagaagaggttattgacaaattcaacactatggccatcattgatgggaagaaggagcatgtgagtctgacagtggacaatgtccacctggaatatggtgtcgtgtatgagtacgacagcacagctggcatcaagtgcaatgtggtggaaaagatgattgagcccaaaggtttcttcagcttaactgccaagattcttgaagccctggctaaaagtgatgagcattttgtacaaaactgtaccagcctaaattctctaaatgaagtgattcctactgaccttcagagtaaattcagtgccctttgcagtgaaagaattgaacacctatgtcagagaatatccagttataaaaagttttctcgtgtactgaagaatagggcctggcctacttttaaacaggccaaatctaaaatctccccactgcacagcagtgatttctgccctaccaactgccatgtcaatgtgatggaagtttcttatcccaaaacatcaacctctttgggaagtgcatttggtgttcagttggatagcaggaagcataattctcatgataaagaaaacaaatcttcggagcaagggaaactgagccctatggtgtacattcagcacaccatcacaaccatggcggccccttcaggtctgtctctgggacagcaggatggccatggtctcaggtatctgctaaaagaagaagacttagaaacccaagacatctatcagaaactgctgggcaaacttcagactgcactgaaagaggtggagatgtgtgtttgtcaaatagatgaccttctgtcttcaataacatattctcctaaattagaacgtaagacatcagagggcataataccaacagacagtgacaatgagaagggagaaagaaacagcaaacgggtatgttttaatgtagcaggagatgaacaggaagattctggtcatgacaccatcagcaacagagactcttacagtgactgcaacagcaataggaattccatcgcctccttcaccagcatctgcagcagccagtgcagctcgtatttccacagtgatgaaatggactcaggtgatgaacttcccttaagtgttcgcatatctcatgataaacaggacaagatacatagttgccttgagcatcttttcagccaggtggattcaattaccaatctcctaaaagggcaggctgttgtgagggcctttgaccaaaccaagtatctcactccaggccgaggattgcaagaatttcaacaggaaatggaaccaaagctgagttgtccaaaaaggctacggcttcatatcaagcaagatccttggaatcttcccagcagcgtccggactcttgctcagaacatcaggaaatttgttgaagaggtaaagtgtaggctactcctggctcttcttgaatattcagatagtgagacacagctccgtagagacatggttttcngccagactcttgtggccactgtctgtgccttctctgagcagctcatggcggccttgaaccagatgtttgacaacagcaangaaaatgagatggaaacttgggaagccagcaggaggtggctggaccagatagcgaatgcaggtgttctttttcactttcagtcacttctgtcaccaaacttgacagatgaacaagccatgttagaagatacactggttgcactatttgatttggaaaaggtttccttttactttaaaccatcagaagaggaacctctggttgcaaatgttcctcttacatatcaagcagaaggaagtcggcaagctctgaaagtttacttctacattgatagttatcattttgaacaacttcctcaacggctgaaaaatggaggagggtttaaaattcatcctgttctttttgcacaagcactagagagcatggaaggatattattacagagacaatgtttctgtggaagaatttcaagctcagataaatgcagcctcactggaaaaggtcaaacagtacaaccagaagctcagggcattctacttggacaagtcaaattcaccaccaaactccacatccaaagctgcctatgtagataagctaatgaggcctctcaacgctttggatgaactttaccgactggtagcctcgtttatcagatccaagcgcacagctgcctgtgcaaacacagcttgcagtgcttctggggttggactgctgtcagtttcctcggagctgtgcaacaggctgggcgcctgccacatcatcatgtgcagcagcggtgtgcatcggtgcaccctgagcgtgacgctggagcaagccatcattctggccagaagccacggactgccacctcgttacatcatgcaggctacagatgtgatgcggaagcagggagcaagagttcagaacacagcgaagaatttgggagtcagagaccggactccacagtctgcaccaaggctgtacaagctgtgcgagccacctcccccagctggagaagaatgaaaagaactcccaagaaaccaggcaggcagaagctcctgaatgctggactagacaaactacatgctggctaaacattctccactgaagatacatcaatgcttttttttttttttttctgtaaatctttcttcccattgcaaacaagtagtgatcagtttatactttgatatttatgctggaaatggatagaagttcaatcagacagttcagcttcacgaactgatgtctctctgtattgacattaagtattcacttttagagtaaaatccatccctgggacataaagaaaaaaatattagagatttaaaaattaaccaccatgcctcctctcccattcattaaaatggttttattatgcttgttttcatctttcccaagtggacacatgtaataatggagagttcctcttgaagaaggccattattgaagaaacctggcgacatcttgcaaatcatcatgagaaatgttaaggacaatatagactgtgtgctatacattttcagtcccccatttgcaagagagaaagtcattaatgtgtaaaaggtggaaaagcatgctttactctttctcctaagggcttatttcttatt

SEQ ID NO: 410525 - DNA, 4237 bp, Homo sapiens
  misc_feature (3157)..(3157): n is a, c, g, or t
  misc_feature (3237)..(3237): n is a, c, g, or t
agacagatggagaagttagaagttttagaggaatggcagtctcacattgaaggctgggaggggtccaacatcactgacacctgcactgaaatgctaatgtgtggagtcttactgaaaatttcttctggaaatattcaagaacgggtgttttttcttttcgataatcttttggtgtactgcaaaagaaaacacagacggttgaagaacagcaaggcatctacagatggacatcggtacctttttcgtggccggatcaacacggaggtgatggaagtggagaatgtggatgatggcaccgctgatttccatagcagtggacacattgttgttaatggatggaagatacataacacagcaaaaaataaatggtttgtttgtatggcaaaaacacctgaagagaagcatgaatggtttgaagctattttgaaagaaagagaacggcggaaaggtttaaaattaggaatggagcaagatacctgggtcatgatctctgaacagggtgagaaactttataaaatgatgtgcagacaaggaaatctgatcaaagaccgaaagagaaaactgactacgttccctaaatgctttcttggaagcgaatttgtgtcatggctgttggaaattggagagattcacaggcctgaggaaggcgtgcacttgggacaagcattattagaaaatggaatcattcaccatgttactgataaacatcaattcaaaccagaacagatgttatatagatttcgctatgatgatggaacattttatccaagaaatgagatgcaggacgtgatttcaaagggtgtaagattatattgtcgtcttcatagcctttttactccagtgataagagataaagattaccatttaaggacctacaaatctgtggtcatggccaacaaactgatagactggttaattgcacagggagattgccgcaccagagaagaggcaatgatatttggcgttggactctgtgacaatggatttatgcaccatgtccttgaaaaaagcgaattcaaagatgaacccctacttttccgttttttttcggatgaggaaatggagggatcaaatatgaaacatcgacttatgaaacatgacttaaaagttgtggaaaatgttatagctaagtcattattgattaaatccaatgaaggcagctatggctttgggctagaagacaaaaataaagttccaataataaagttggtagaaaagggatctaatgctgagatggctggcatggaagtcgggaaaaagatttttgctattaatggtgacctagtttttatgagacctttcaatgaagtggattgcttcctgaaatcgtgtttaaacagcagaaaacctctaagagttcttgtgagcacaaagccaagagagacagtgaaaattccagattcagctgatggacttggcttccagatccggggatttggcccttctgttgtgcatgctgtaggaagaggaactgtggctgcagcagctggtcttcaccctggacagtgcattatcaaggtgaatggaatcaatgtcagcaaagagacacatgccagtgtcattgcacacgttacagcctgcaggaagtacaggcggccaacgaagcaagattccatacaatgggtttataatagcattgagagtgctcaagaagaccttcaaaaatctcactccaagccccctggagatgaagcaggggatgcttttgactgtaaagtagaagaggttattgacaaattcaacactatggccatcattgatgggaagaaggagcatgtgagtctgacagtggacaatgtccacctggaatatggtgtcgtgtatgagtacgacagcacagctggcatcaagtgcaatgtggtggaaaagatgattgagcccaaaggtttcttcagcttaactgccaagattcttgaagccctggctaaaagtgatgagcattttgtacaaaactgtaccagcctaaattctctaaatgaagtgattcctactgaccttcagagtaaattcagtgccctttgcagtgaaagaattgaacacctatgtcagagaatatccagttataaaaagttttctcgtgtactgaagaatagggcctggcctacttttaaacaggccaaatctaaaatctccccactgcacagcagtgatttctgccctaccaactgccatgtcaatgtgatggaagtttcttatcccaaaacatcaacctctttgggaagtgcatttggtgttcagttggatagcaggaagcataattctcatgataaagaaaacaaatcttcggagcaagggaaactgagccctatggtgtacattcagcacaccatcacaaccatggcggccccttcaggtctgtctctgggacagcaggatggccatggtctcaggtatctgctaaaagaagaagacttagaaacccaagacatctatcagaaactgctgggcaaacttcagactgcactgaaagaggtggagatgtgtgtttgtcaaatagatgaccttctgtcttcaataacatattctcctaaattagaacgtaagacatcagagggcataataccaacagacagtgacaatgagaagggagaaagaaacagcaaacgggtatgttttaatgtagcaggagatgaacaggaagattctggtcatgacaccatcagcaacagagactcttacagtgactgcaacagcaataggaattccatcgcctccttcaccagcatctgcagcagccagtgcagctcgtatttccacagtgatgaaatggactcaggtgatgaacttcccttaagtgttcgcatatctcatgataaacaggacaagatacatagttgccttgagcatcttttcagccaggtggattcaattaccaatctcctaaaagggcaggctgttgtgagggcctttgaccaaaccaagtatctcactccaggccgaggattgcaagaatttcaacaggaaatggaaccaaagctgagttgtccaaaaaggctacggcttcatatcaagcaagatccttggaatcttcccagcagcgtccggactcttgctcagaacatcaggaaatttgttgaagaggtaaagtgtaggctactcctggctcttcttgaatattcagatagtgagacacagctccgtagagacatggttttcngccagactcttgtggccactgtctgtgccttctctgagcagctcatggcggccttgaaccagatgtttgacaacagcaangaaaatgagatggaaacttgggaagccagcaggaggtggctggaccagatagcgaatgcaggtgttctttttcactttcagtcacttctgtcaccaaacttgacagatgaacaagccatgttagaagatacactggttgcactatttgatttggaaaaggtttccttttactttaaaccatcagaagaggaacctctggttgcaaatgttcctcttacatatcaagcagaaggaagtcggcaagctctgaaagtttacttctacattgatagttatcattttgaacaacttcctcaacggctgaaaaatggaggagggtttaaaattcatcctgttctttttgcacaagcactagagagcatggaaggatattattacagagacaatgtttctgtggaagaatttcaagctcagataaatgcagcctcactggaaaaggtcaaacagtacaaccagaagctcagggcattctacttggacaagtcaaattcaccaccaaactccacatccaaagctgcctatgtagataagctaatgaggcctctcaacgctttggatgaactttaccgactggtagcctcgtttatcagatccaagcgcacagctgcctgtgcaaacacagcttgcagtgcttctggggttggactgctgtcagtttcctcggagctgtgcaacaggctgggcgcctgccacatcatcatgtgcagcagcggtgtgcatcggtgcaccctgagcgtgacgctggagcaagccatcattctggccagaagccacggactgccacctcgttacatcatgcaggctacagatgtgatgcggaagcagattttgtgtatatacttttcatacagttgttattttaattcactgcttgagtttgaaggaaagataaaagacagaagagaagggtactatgttttcatgatgttttgctaatgattgtaacaaccttgggcagcactttatgtaaccagctgatttgattaataaaaggcttgca

SEQ ID NO: 410526 - DNA, 267 bp, Homo sapiens
ttactgataaacatcaattcaaaccagaacagatgttatatagatttcgctatgatgatggaacattttatccaagaaatgagatgcaggacgtgatttcaaaggtaacgacctctcccacaacctctccaatagtagaatgcatgttgtcattcttcagaagataaaaggtagttgagaaacataaaagatttttctagtttagaaaattcttcgactatatatacaagcaagcctctttatttatttttggtatttcaagaattc

SEQ ID NO: 410527 - DNA, 389 bp, Homo sapiens
tacaagaaatgcaatcagggggagcagaatgacgcagaggagtctggaagctcaggattgcattaagcgactttcccatactgtgaggagatgtggtggggaccattaactgttggaaggattccttttaaggatgcattatatcaagagctagatatcagagccacttgggagaaataagaaacaggtgtagaaacagtcgcagattggcatgagctgtggagaaagagtctggattttgggttgctgtgtcacacacagcccacttgcaggatgacagtggaagaatgagtcatgatctctgcaagcgcccatcaagaacagcctgagaggtttggaaagtgctcaccccaggacccttcatgtccttattaaaattgtatggcaga

SEQ ID NO: 410528 - DNA, 549 bp, Homo sapiens
tacaagaaatgcaatcagggggagcagaatgacgcagaggagtctggaagctcaggattgcattaagcgactttcccatactgtgaggagatgtggtggggaccattaactgttggaaggattccttttaaggatgcattatatcaagagctagatatcagagccacttgggagaaataagaaacaggtgtagaaacaggattggtagacaacatgttcatgcaaatgatatgaagaagattggcacctggaaaatcaaggaagaggtggggccgtgtaggcagagacttaattttctcaagtgaatgaagaaaaaagcacatggtgaggctgattctgtggggatgtatttgagctagaagattcaggagggaaaattagttctaagacaaagatggagacatcaataagattgggaaatactcagacgtcagaagaatttgggtttgaatcagaattcctttacatactttctaagtttcaagttaagcagcaattcagtgtttcaaaccttacgattgataaacaaaaaataaaatgaaattcacc

SEQ ID NO: 410529 - DNA, 413 bp, Homo sapiens
aatctctgttgacacagcctctgccctcaagcctgagccttacctgcctccctagcctccgcacctgaagcttaacacaccctgcagcatgcccaaggcacagctaactataatcagcctctagccctataatggtggaggtcttgtgatttcctgcagctgtgccagttgttgagaatgccagcagctgaatcccttcatggaagatgctgagagagacagtatagtggaggaaaggatgtgagttttgcagtcagatcagtacttgaatcgagatctcaacttatcagttacttgactggacatgccctccctgagacgccatttctttattgcaaaaatgaaaataataaaacctacctcttggggccaagtgtggatcagcatgatgcacttggaaagtaactggaata

SEQ ID NO: 410530 - DNA, 299 bp, Homo sapiens
tgacttttaagcaggggaagcaaggctgccggagacagcgcgttgtgcctggggaacaggttcacaggctcacagacagaattgggttcagatgctggttctgatcactcctaggtgaccccaggcaaaatgctttcccagactgagactcaatgtcctcatctgtaaagtgaagttaaccccacccgcctcactggtgaatatgcatctgcaatgttaagcacttagcatagtgcctaccacatagtacgtgtttaatcaatgtttgttatgtatattaatgaaaaggttcaccaatt

SEQ ID NO: 410531 - DNA, 425 bp, Homo sapiens
tcaagtcccatttaatgcattcaacaaatatctatcgtgcctcgtgttctcactttgactcagcagaccctgtggatagagagtgagacagacaagtccctgtcctcatggggcacacactcaaggcttgggggcatggggagcagatcatcaataggatgacacagaaagaagcatattttaattttgataagcggtacgaaggaaataaaacaagttttcttcagggaggccttccttggccatctggtctaacctggccccctattctctaacacgttggtcaatttgtcagacccattgagcttaatccatgagaatgtcagctctctaagagcagagccctcatctgccttgcttatggccatgtccccagtgctgtggacacaatagctgttggacaaataaaagagattgtaaataaa

SEQ ID NO: 410532 - DNA, 503 bp, Homo sapiens
atttgaattacatacgcttatgtaattgaaaagaccaaagggagtgagggcccctggcatggtttgatgaagggtacaggctttggccctgtttttctataattctcttggctttaccctgtattagcttttttttctcaaacgggcttccccagtagtacaagatggctgcctttgtatgtttcctcattcctggagagaaagtagatgcttcctacaaatacagtgcaaaatcctaagcttgacactaattgaaccatcttgtgctccaaaggatcactgtcttaaaatctgggtagctttctgtgtctagaccagtggcttttaaacttgagtgtgcattagaactacctggaggacttgttaaattacagattgcagccaggcactgtggctcatgcctgtaatcccagcactgttggaggaccaggcgggaggattacgtgagtccaggaattcaagatcagcctgggcaacatggtgaaactctgtctctaccaaaa

SEQ ID NO: 410533 - DNA, 430 bp, Homo sapiens
attttttacctaaaattaaaattaatagagtaaatgaaattaccctaaagggtaaaaatgtattattactatggacagataaggtttctaaagtaattagtttcctaaatccaagatgcttttcctatcaaatatgaccatggtagcccaagttttgaatattaggaaatagctttatggcaaaaaaagttccattatagatctgtggctaaaaactggtgatgattacctccaaataaaaagaatctctggcattaacaaaatactaagcattattttctgtacagtgatgagggatagttgtcctagtttcccttgtattaagaaaggtcaggccaggcacggtggctcatgcctgtaatcccagcactttgggaggctgaggcaggcggatcacgaggtcaggagatcgagaccatcctggctaaca

SEQ ID NO: 410534 - DNA, 867 bp, Homo sapiens
tctacaaaaagtaagcaaattagctaggtgtggtggtgtgttcctgtagttccagctgcttgggtggctgaggcaggcagatcgcctgagcacaggagttgggggctgcagtgagctatgattacaccactgcacttgagccagggtgacagagtgagacctgtcttaaaaaaaaaaaaaagggggtcttcaaagacaagaacatctgtgctgtcacgttgggtggatgaggggctgccaggtttgcaatgaatgtttcccatttcttcttagtttatggacttaccataaactcaggatggcagtttggtgggttggagaaggatatggtgattgcgggagttacaagacattacttataggggaaaacagggttttgaaaggttaacacttaaaagtgagaatggaaaagggatgaatgaatgaacaagatgaggtgagatggaagaggtaaagggaaaaggagaacaagcagctcttctctgcgtggcgcctgggatgaatggtttctggggacatccctgatggcagttttgtggagaggcgcaaaactttatgtggtaagaaatgagctgtaggcccagcgcaggacccactcggcctgtaatcccagaactttgggaggccgaggagggcggatcacttgaggtcaggagttcaagaccagcctggccaacatggagaaaccttgtctctactaaaagtacaaaaattaggcaggcgtggtggcaagtgcctgtaatcccagttactcggaaggctaaggcatgagaatcgcttgaacccgggaggtggaggttgcggtgagggaagatcgcacctttgcactccagcctgggcaacaagagcaaaactctgttttaagaa

SEQ ID NO: 410535 - DNA, 496 bp, Homo sapiens
gaatcagcaaattattggaagaaatgatgcctgaaaatcaaatatttgatgaaaacattaatccaagatcaagttgtaagataacatagaaagatgcataccaaaactatagtgaaaacaatgaaagaaaaaaatcttgaaaacagaaaaaaaaactactcattgtgtataagaaaacccattggcccaatgctgtggctcactcctgtaatcccagcgctttggagcttgaggcaggagtgcttgaggccaggagttcaaaaccagcctgggcaatatagtgagaccccatctctacaaaaaatttttaaaaattagccaggtgtggtggcatccacctcataactacttgagaggctgaggcaagaggatcacttgagcccaggagtttgaggctacagtgagctatgattgcaccactatactccagcatgggcaacagaacaagaccttgtctctattttgttttttgtttttgtttttgttttttcatttt

SEQ ID NO: 410536 - DNA, 458 bp, Homo sapiens
tagctaattgccaagaaatcatacgactaccatgaaaaatgatttccatccatttttaagatgatcaataattcagtctttgctagtccaaattccaagttaattctatgtgttattcttgaagtgtgagtacagggacagatataatcagtattttatttccctacaagcctccaaaagaagggctaggcaaaaaatttagccatttttcacttaaaatatttatgctaacataaatgttacatagacatgtcacttttcaattacatttttaatttctgaagtggtaaatattagcagacatacctgccaacataaaagttctctgaggcccttactaatttgtgtgaagaggttctgagatttaaaaaatgaaaatattcaattagaaaacatttttgtaaagggggagaaaaaaggagcacattcataaatacaagaacattaaaacacattaa

SEQ ID NO: 410537 - DNA, 1387 bp, Homo sapiens
  misc_feature (1188)..(1188): n is a, c, g, or t
  misc_feature (1252)..(1252): n is a, c, g, or t
ttcagaatcataaaaacatttttaaaaggaattgagaaaaaaaaaacctcaaagaagataccatatgagtatggtagtaatacccaaagataaccaaagcaatggaacaaaataaattttataatgagaaattttaatccttgttatatttaacccatttgttcattcaatgctgttatacattccctttgttgtgggttgaatctaggaaaagggtcttgtccaatataattaaggatctcaagatgaagcatcctgtatcgtcacgggtacgtcctaaatccaatgacaagtgttcttataaaagacaagagaaggcacaaagacaaagaaaaagccacgtgaaacacaatagaaggcataaataaaaagccacgtgaaagcaaaggcagaaactagagcaatgcagctacaaagaatgctgacagctaccaaaagctgaaaaagacaagaaaccattctcctctcttgtcttcagagggattgtggccctgccaacaccttgattttgtacttctgtcctccagaaccatgacagaatgaatttctgttattttaagccaagtaggtggtacagcagccacgggaaactaatatatgtggtttgctttatatttatgttggacagcattctcttagatcctacaaccaattcacagaaaacacagggctgaggaaccagttaaacttcaccagggaatacagttcacaaaatttagcccatgggaaattccacagagtaaactatctaatctccacaaataaattgaaatggaagccttctatggatgaaaagagacttagacatatcaaccagtcacaaccagtttggaacctgattaaaacaaaatgtaaaaaaaaaactccaatttatgagaaaattgaaaatgtgaacactaaccatatgtttgatattaaggaatttattgagatttttttaaagtgtagtaatgatattgtactcttatgtatctttaaatcctttagagctgtatactgaaatatttatagataaaatgataggatatctaggatttgaaatagcacaggggaagcaggagaagcagatggagttaaaggtgtgacaggatggccatgggccaggcgtggtggctcacgcctgtaatcccagcacttttggaggctgaggctggtggataaccagaggtcaggagttcaagaccagcntggccaacatggtgaaaccctgtctctacttacaatacagaaaaaaaaattatctgggcatagnggcaggtgcctgtagtcccagctacttgggaggctgaggcatgagaatcacttgaacctgggaggcagaggttgcagtgagccaaaatagtgccattgcactctagcctgggcaacaagagcaaaactccatctc

SEQ ID NO: 410538 - DNA, 1220 bp, Homo sapiens
ttctgttaggacagtcttagcataagaaatatgtacaatgaatatcttggaccatggagtatttgtgtagtttatcacatttggaattttctgcccctgggtgacagagtgagacttggtctcgaaaatatatatatatatatgtttatttcagcaaattctggaattatgccctcccctcccccctttttatttttgctgattgatgtttaaaagtggaccattaaaaaatgtaattccaagattgccttgcatctgttttgaatgattgtgttttgctttacaaggggcagaatgacttttggggccaaatgctcagctgactttttgttcgctgttttctgcagggatcttgagaataatggttctttttaaggccaattgttactttctttctcacacaaaggaaaaaagagactatctttaggaaacactgctttaaatcatcttccttgaatattaattctctgttgcttcctccaaaaatggagaaaataatccctaccctcataggcttattataaggctcaattatgataatggtgtgaaaactttgaaaattagacttcagagaaattgagttaatctgggattatttatcaatgtcttagtaaccaaaagtttaaaatgtgttttgtttaccaactggttgcatgtacatggttaatccaaaaggctcagcttttcagcaaatggaaaaagattaacttctttatggatcacattatgagatgaaacacatttcattctagctgctgaaaaaatagcaacatgtttttgaaaccattgtgattttgtattgcagtcactaaaacatcaaatatatcatttttatgttaaagtgccctaatttgtgttgttacataaaacttggagtaccttgaccaaatagaagaaattaatgtgccgcgtgtctgttttaaagatgaaatctgagcccagtgtgaggctcatgcctgtaatcccagcactttgggaggctgaggcaggaagattgcttgagtccaggagttggagaccagcccgggcaacatagggagacctcatctctacaaaaaataaaaaatagacagacatggtggcacatgcgtgtagtcccagcttcttgggaggctgagctgggacaattgcttgagccagagaggtcaaggctgcagtgagctgtgatcacaccactgcactcctggtctgggcaacagagtgaaaccctatctttaaaa

SEQ ID NO: 410539 - DNA, 485 bp, Homo sapiens
atgttggccaggctggtcttgaactcttgacctcaggtaatctgcccacctcggccttccaaagtgctgggattacaggcgtgagccactgtgcccggcccgacagtatcctaatcaagcgatccaggcatgcatcaccagtaacgggacagacaagacagcacgcgcctcctggtatgaggagctgaggacagcaccgctcttgtggtattcctgccaaatattcataacctggatcgaatcttgagaagtatcagagaagcccgactgagaggctcaacaacataactggcctgcactcttccaaataccaaggtaatgagaggcaaagaaagactgttctagatgacaagagactacagagtcatgacagcaaaatgcaacgtgaaatcctggactggatgctggaacagaaaaatatgttttccctttcgttataacagttcacaactggcaagatctgaatgaggcctatagatagatat

SEQ ID NO: 410540 - DNA, 455 bp, Homo sapiens
gcatggatatatgaggcaaggtgacccatcagacaattatgttccacgggaaggcccaggggacccatccttcagcaaggctgctgggaatgcactgataagcgggcttgggcatcataaaggagctcagcggtggctctcctcggcaggctggggctggcaggaagggctgtgatggaacttcacttgctgagagcaatgtggatgatgatgagaccttgaagagcccaggtggcagtgccagccacagaagccagggtgccatcagtatcctgttaaccactaagctccaaatggcagccgaggggtcctgacctgtaaagtctcatggaaatagttggtagaacaaggcattcctagggacaaaagagctgactaatcaacaagggtaaggctttatatataatcaaaagtgagcaagaattgatgagcaggggactgagagagatcactcc

SEQ ID NO: 410541 - DNA, 402 bp, Homo sapiens
gagtcacaaaacatactcgctggctcagaaaactgcagaaaagcagtctaagttcttttcagcctggctttgatggctgaaaggtatacctcttggaactagtgagcatatcacagatgctgagcaggtgagctttaaaaaatggtgttccatctaaataatctgtcaggctactgacaacaaaaagctatttctgactgtagctggaatgagtgattactttgataccaaattaaaacaagctttgaaattggaaataaccagaattaagctatctccaatgaatgactgagctccccccttcagtacattttcttctatattagccgtaaacatgagctcttcattaatagaaattggctcattgctactagccacaaggggaatctataggatgtgtgg

SEQ ID NO: 410542 - DNA, 297 bp, Homo sapiens
aaaaaaaaaaaaaaaaaaaaaaaaaaaaaaagagtagaatttcagtgggttgaaaacaatggaggctgggaggacacaggctttggggtggacatactgagaatgtagggaggtggaaagtgcatgacacttctgggtactggaaagacaggagtgaacaagccatgcggctgggaggactgaatgaattactaaagtgatagaatcatcttaccagagagaaagcagctgatgaagtaggagaagaaactatatgtagacaagttattaggaagaagtgacattcagagtgggaag

SEQ ID NO: 410543 - DNA, 523 bp, Homo sapiens
gggtcgcaggtatgtaaagggctcagcacatcccaggcgcctggtaaatgggagctgttattcattgacctgggcaacagctattttttggagcaccaactgtgccttagatgggaaataaaataaaaatctctgcccttgtggtgctcacactctagatggggagccgggtaataaacagataagcaagcgaaatattaatatatagcaagtccggaaggtaagggctgcaggttaaataacgtgggcagggccaggcgcggtggctcacacctgtgatcccaatatcttaggaggccaaggcaggaggattgtttggggccaggagtttgagaacagcctggccaacatggcgaaactccttctctacaaaaaatacaaaaattagccggtcatagtggtatgcgcttgtaatcccagctactcaggaggctgaggcagagaattgcctgagcctgggaggcagaggttgcagtgagccaagatcgcaccactgcctgggagacagagcgatactctgtct

SEQ ID NO: 410544 - DNA, 505 bp, Homo sapiens
ttcatttgcgtgtttcactaagcacaaaagctcccctttaagccctcatctcatggtgaacagactattcctgcctgtctgagtcacatatctctgggcagccagaccttctgactcactggtggttgaaatctcagattcacaataccagagagttgctaaaaataggaatcatgtacctgggccccaaaataggacagagtcaaacacggctctttaaaaacctactgcccaatgtgtaacataaaaatcaaagaggggctatacttgtcttctttcatattatcttaaatgtaataaagccgtctctaattcctttggaaatcggcaaagtagatggaccaatacaatagaaagataggttggaataattgtgcctagtgcactctggttgtttttattagaaaattctatatccttaaattagcatagggtattttcacagcagtggtagggaaatgaagcttctccatccatgctttgccagtttctctcttgggaatca

SEQ ID NO: 410545 - DNA, 274 bp, Homo sapiens
tttgtttgtttgtttatgtatttttggtttacagattcaatttctattttcaattaaataaaattcccagaagcaagcaactgcaattgcaatttcagaatctagattgcctacatttacaagagacacttttaccttctggagcaaaacaaaatatgtctgatccttcctctacgtgacaaaagatatttgaagatttttttcctcccttcaaccactgtcaggttaaacataacccagttttctcagtcatatgacctggttgccagacctc

SEQ ID NO: 410546 - DNA, 842 bp, Homo sapiens
acccccatactccccccaccccaaaccctcagagcaccttcctgtggagccagtctgagatccaggctgggactgaaagaggaactggaagggagtccagggaaggagtacagggagggtccctgtgtgcagctgctcagggagttccgatctgtgcaccctcttgacctggctgtgcactgccaaggcaggggtggacggaaagccttgcagatattttccagcttctacagaacttgagggagtgcaactttgagggtatgggcacctccaaccctgagtctgggctcctgaaggggcttggcctacctggatgtcctgccttccaccccaggttgtccctactgcttccagcagctcttggaactcttgtttccaacacctttttttgagtctcaacataaacattagattaagccattgtggtctcttcctctgtgccttgtttgcccaggtcctcctaagggccaggagtggctccttgggaggaagagtgatgggagctatgggaggaaggatgggggctggatcatcaggcgggacctggttctttcaggactttgtgtatccctcatcctgattctacagggttcctccccttcagactccttctttgcccctgaggggtgggattaggtagtgattagggcatggctggagtcagctgccaaggttcaagtctgggctgtgccacttagcagcttagtgacctgggcagattacgctgcctctctgtgtctctgttcccttctctgataaccacagtaccatcgttataggtttgctgtgaggatgaaatgagctcatgcataagaagcacataatggtgcacaccccataga

SEQ ID NO: 410547 - DNA, 488 bp, Homo sapiens
gtgggttgaccgtggcttgtgggttgaccgtggcttgtgggttgagcgtggcttgggaatagaaacttgtggtctcttcctctgtgccttgtttgcccaggtcctcctaagggccaggagtggctccttgggaggaagagtgatgggagctatgggaggaaggatgggggctggatcatcaggcgggacctggttctttcaggactttgtgtatccctcatcctgattctacagggttcctccccttcagactccttctttgcccctgaggggtgggattaggtagtgattagggcatggctggagtcagctgccaaggttcaagtctgggctgtgccacttagcagcttagtgacctgggcagattacgctgcctctctgtgtctctgttcccttctctgataaccacagtaccatcgttataggtttgctgtgaggatgaaatgagctcatgcataagaagcacataatggtgcacaccccataga

SEQ ID NO: 410548 - DNA, 324 bp, Homo sapiens
aaaaaattagccgggcgtggttgcaggcgcctgtagtcccagctactcgggaggctgaggcaggagaatggcctgaacccaggaggcgaagcttgcaatgagctgagatcgcgccactgcactccagcctgggtgacagagcaagaatctgacaaaaaaaaaaaaagatttttaaaggaacaatttctagaaatgtagatacagtaattcaacaaataactaaagaaataactacatatatactatgtctatgtgtgtatgtgtatgtatatataatatatactgtgaaggaaaataaagggtgccatgaaaacatatcacaga

SEQ ID NO: 410549 - DNA, 928 bp, Homo sapiens
ccgtctcaaaaaaaaaaaaaaaaaaaaaaaaggaaagggtaaaccagtaaatacccaccttgaaaaaagagacagcaaggaaatgtccctactgcaatcttggctctgaatcaggggtggaagtcgaggattgtgaagacctcccctgagtattcacaggctagtcttcatgagtttatagtctaagtttatactacctgaatagacagaaacacttcaagcccagaattttatttatttatttatttacttacttacttacttatttacttacttactgagatggagtctccagtctgggtgacagagcaagactccatctcaaaacaaaacaaaaaagaagtatgtttaatatatataaaagcctgattcaagcaccggacagaaaaaataatgtatcactagggaataaatcactaaaaatgacaagacttccataaccattgcttggtttaaaaaaaaaaaaaaaaaaaaaaacaggccaggtgcggtggctcacacctgtaatcccggcactttgggagggcaaggcaggcagatcaggaggtcaggagttcgagagtagcctggccaacatggtgaaaccccgtctctactaaaaatacaaaaatcagctgggcgtgatggcacatgcctgtaatcccagctactcgggaggctgaggcaggagagctgcttgaactcgggaagcagaggttgcagtgagccgagatcacgccattacattacagcctgggtgacagagcaagaatctgacaaaaaaaaaaaaagatttttaaaggaacaatttctagaaatgtagatacagtaattcaacaaataactaaagaaataactacatatatactatgtctatgtgtgtatgtgtatgtatatataatatatactgtgaaggaaaataaagggtgccatgaaaacatatcacaga

SEQ ID NO: 410550 - DNA, 155 bp, Homo sapiens
tctaagtttatactacctgaatagacagaaacacttcaagcccagaattttatttatttatttatttacttacttacttacttatttacttacttactgagatggagtctccctctgttgcccaggctggagtgcaatggcgtgatcttggctca

SEQ ID NO: 410551 - DNA, 587 bp, Homo sapiens
ttttgcttacatgcaaacatgttaactttttatggcctccatctaagccaatacattaaaagaaagcaaagatcctctatattgtcagcctgttgaaccataaggaaatagtacagcaggatgatggcatccgattagccaagggttcaaatccttactctccactgctggcagggtgatcttgggaagaggatgtaacctctcaaacccctcatttcctcccctgcaaagtgaagataataataactacctccctcatagcattattgtgaggtgcttatcattagagtacatgatatagcaaggctcagaaatgtatgagcgcatgggggtgggcggggtgtctgtagacacagatataatttctatacttcactggaacacatcactattttatctggggaatatgggataattttgctgtttgtttttagtagtgcatgcttctgtggagggcagattttctgcaactaaaccacaactttaccagtctaatatcagagtcaaaaattaaaataagccatgaggatttttccatcccaaaattcatagtccaggctccttcctccttctcctttgtctttcat

SEQ ID NO: 410552 - DNA, 425 bp, Homo sapiens
actggtgagctccgactagaaatgtcaacgtggactcattagcatatagttggtactgaacaccaagaaagcggaagagatcccccaaggaaagagtgtagatgggaatgagaggtctgaggactaaagcctggagcattgtcacattcagagccacagcaatgaggtacaaccagtgaaaaagtctgaaatgctgtgccgggaatgaacaagacaagcaggaggatgtggtgtcctggaaagcaaatgaagaggagagggtggtgactggccacgtctgatgagggctgagaactgatgcaaagtcatggtcatgtgaccataccattggtggaaacagcaggcaggtaacactcctggcttcctcccacaggatcagtgtaaccgcatccctgaccaggtgatcacagtgactgtctcctgca

SEQ ID NO: 410553 - DNA, 742 bp, Homo sapiens
tcgtcctgtggaactgatccattctcggtcccattcccttctctctgggccaatctgcacctaggtttgtggcttcatgagtatggagggtcgtgcagaaaggggccaggtctgtaggaacctgggttcatgccctggaaatttgcccatttaagataagttagggccgggtgcggtggctcatgcctgtaatccccagcactttgcacttcgggagaccgaggcgggcggatcacctgaggtcaggagtttgactagcctggccaacacggtgaagccccgtctctgctgggaatacaagaattggccgggcgtagtggcgggcgctgtaatcccagctgctcgggaggctgaggcaagagaattgcttgagcctaagaggtgaaggttgccgtgagctgagatcgtaccattgcactccagcctgggcgacaagagtgaaactctgtctcaaaaaaaaaaagataagataggtgtcctgaataagataggtgaaatgggtgaggatgtactttatcttacacggtcttagggagtgtctcaggcggtgaacagaactctctcgcccctgagctggggcctggctgacccagagctatttgtgtgcccacctgtcaccctctttcaggaccacctgcttcaggttgccagatttagcaaataaaaataaggatgcccagctaaaattggatttcagacaagcaaggactaatgcaatatttgggatgaacttctagctaaa

SEQ ID NO: 410554 - DNA, 560 bp, Homo sapiens
tttttttttgagacagagtttcgctcttgttgcccaggctggagtgtagtggtgcaatctcggctcactgcaacctccacctcatgggttcaagcgatcctcctgcctcagtctactgagtagctgggattataggcatgcaccaccgtgtccagctaatttttgtatttttagtagagatggggttttgccatgttggtctggctggtcttgaactcctgaactcaggtaatccacctggctcgtcctcccaaagtgctgggattacaggtgtgagccaccaagcccagccccacacttcctctttaatgctgcacaaccaatgtcaccaggctccagacgaagaggcaagcctaggaaggtgatcccaagcacccacaaactgctccctaaaaagactaaatatgaccgggcgcactggctcatgcctacaatcccagtgctttgggaggctgagggaggagggtcacttgaggctagttcaacaccagcctgggcaacatagtgagacccccgtctctaaaaagaaaaaagaaaagaaaaaaattagcaatggtggt

SEQ ID NO: 410555 - DNA, 319 bp, Homo sapiens
tatcgcttgagcctgcggggtggaggttgcagtgagtcagattcactccactgcaccccagcctggacaacagagccagatcctgtctcaagaaaaaattttttttagatattcatgtgggatatggatggataacctcacagaataggaggtctggtaaaggaggaatggttattgggtcagtgggtcaccattcatatctgctccatgacagaagggcttagggggagtggtgagtgatgtcagatttgcattttgagaaaataactaactacaatatagagaatagataaaagggagaggcaagagttgaagtggg

SEQ ID NO: 410556 - DNA, 416 bp, Homo sapiens
tggtgagactgagtcttcctctgttgcccaggtttgagtgcagtggcgtgatctcagctcactgcaacctccacctcccaggctcagacaatcctcctgccacagcctctggaggagctgggattacaggcatgtgccaccatgcccggctaatttttgtatttttcgtagagacggggtttcaccatgttggccaggctggtcttgaactcctgacctctggtgatctgcccgcctcagcctcccaaagtgctgggattacaggtgtgaggcactgcacccggccagatttcactattcttgcatccacgtgattctcattgctactgctctagttcaggccttctttgcttctcagctggactagagtaatgacttttaaatacctccccctcctgttcctgatacttcgtttc

SEQ ID NO: 410557 - DNA, 671 bp, Homo sapiens
gactacttatgtaaaaacaaaaaacatagataagttttattctcatgttaattatttttaacgtcaggctcttactgtgttgcccaggctggagtgcagtggctattcaccggaacagtcatagctaaaaacagccttgaactcctgggttcaaacgatcctcccacctcagcctcccgagtagctgggaccacaggcacacaccaccatgcctggttttctcacatttataaatgcacagtatagggtccaaaaggataaaacagcacttttttttttttttaaactatggtaagctctgcagagaagggcagaattgggagggcggaaagaaggcttctcgctctaaatatatttggaatatttatgtattacatttgaatttttaaaacctacttttccatttttgaaattacgaccctcaaccttctcatttctattctaagtagaaataattctgctaaccttctgtgatcacactagttcttttcaatcaccatgtatgagtctggggttgaaaatcactgaagcgctcccacagagtgaacccattatttccaggattaatcatacctcctgctctcaggagggttaaaccagagtgaacagtgagtgctttccatatttctcaagagtggaactgtgataattccatagtaaacacggggagg

SEQ ID NO: 410558 - DNA, 600 bp, Homo sapiens
tcatcaagagttcatataactagacctgtcttggagcaatttttatcttttgcaaaataccttgatggtttatctcatggagcacctttgctgaagcagctttgtgatcatatttgtttattaacccagccatctggatacatacacctgcaaagggctggagagcaatgggcgatctcggctcaccgcaatctccgcctccctggttcagcccattctcctccgtcagcctcccgagtagctgggattacaggttcagctttccctatacacatatttgtctgctgaatttattggaactgctaccatctacaccaccatacgcagagtaggaacagtattacagctaatgcacaccttaaaatattactactgggttattaatcctgctgacagtagtggcattacacctaaaggattaggtatgtataacacttccactgtatttacatttgcctatgattattctgtattctgagtactgttaaagtgagcagtgtacatgactatgaaatcactgaaatgttttctttcttatatagcaaactggcatattgagaattgtttgtggtaaagaagtttagggcttttcaatattaa

SEQ ID NO: 410559 - DNA, 501 bp, Homo sapiens
tcatcaagagttcatataactagacctgtcttggagcaatttttatcttttgcaaaataccttgatggtttatctcatggagcacctttgctgaagcagctttgtgatcatatttgtttattaacccagccatctggatacatacacctgcaaagttcagctttccctatacacatatttgtctgctgaatttattggaactgctaccatctacaccaccatacgcagagtaggaacagtattacagctaatgcacaccttaaaatattactactgggttattaatcctgctgacagtagtggcattacacctaaaggattaggtatgtataacacttccactgtatttacatttgcctatgattattctgtattctgagtactgttaaagtgagcagtgtacatgactatgaaatcactgaaatgttttctttcttatatagcaaactggcatattgagaattgtttgtggtaaagaagtttagggcttttcaatattaa

SEQ ID NO: 410560 - DNA, 2101 bp, Homo sapiens
tcatcaagagttcatataactagacctgtcttggagcaatttttatcttttgcaaaataccttgatggtttatctcatggagcacctttgctgaagcagctttgtgatcatatttgtttattaacccagccatctggatacatacacctgcaaagttcagctttccctatacacatatttgtctgctgaatttattggaactgctaccatctacaccaccatacgcagagtaggaacagtattacagctaatgcacaccttaaaatattactactgggttattaatcctgctgacagtagtggcattacacctaaaggattagatggtccccggccatcacaaaaagaaattatatcactgagggcatttatgctactttttctgaaacagctgatactaaaggatcgaggggtcaaggaagatgaacttcagagtatattaaattacctacttacgatgcatgaggatgaaaatattcatgatgtgctacagttactggtggctttaatgtcggaacacccagcctcaatgataccagcatttgatcaaagaaatggaataagggtgatctacaaattattggcttctaaaagtgaaagtatttgagttcaagctttgaaggttctgggatactttctgaagcatttaggtcacaagagaaaagttgaaattatgcacacccatagtcttttcactcttcttggagaaaggctgatgttgcatacaaacactgtgactgtcaccacatacaacacactttatgagatcttgacagaacaagtatgtactcaggtcgtacacaaaccacatccagagccagattctacagtgaaaattcagaatccaatgattcttaaagtggtggcaactttgttaaaaaactctacaccaagtgcagagctgatggaagttcgtcgtttatttttatctgatatgataaaacttttcagtaacagccgtgaaaatagaagatgcttattgcagtgttcagtgtggcaggattggatgttttctcttggctatatcaatcctaaaaattctgaggaacagaagattaccgaaatggtctacaatatcttccggattcttttgtatcatgcaataaaatatgaatggggaggctggagagtctgggtggataccctctcaatagcccattccaaggtcacttatgaagctcataaggaatacctagccaaaatgtatgaggaatatcaaagacaagaggaggaaaacattaaaaagggaaagaaagggaatgtgagcaccatctctggtctttcatcacagacaacaggagcaaaaggtggaatggaaattcgagagatagaagatctttcacaaagccagagcccagaaagtgagaccgattaccctgtcagcacagatactcgagacttactcatgtcaacaaaagtgtcagatgatattcttggaaattcagatagaccaggaagtggtgtacatgtggaagtacatgatcttttagtagatataaaagcagagaaagtggaagcaacagaagtaaagctcgatgatatggatttatcaccggagactttagtaggtggagagaatggtgcccttgtggaggttgaatctctgttggataatgtatatagtgctgctgttgagaaactccagaacaatgtacatggaagtgttggtatcattaaaaaaaatgaagaaaaggataatggtccattgataacattagcagatgagaaagaagaccttcccaatagtagtacatcatttctctttgataaaatacccaaacaggaggaaaaactacttcctgaactttctagcaatcacattattccaaatattcaggacacacaagtacatctgggtgttagtgatgatcttggattgcttgctcacatgaccggtagcgtagacttaacttgtacatccagtataatagaagaaaaagaattcaaaatccatacaacttcagatggaatgagcagtatttctgaaagagacttagcgtcatcaactaaggggctggagtatgctgaaatgactgctacaactctggaaactgagtcttctagtagcaaaattgtaccaaatattgatgcaggaagtata

SEQ ID NO: 410561 - DNA, 402 bp, Homo sapiens
ctcctttccatctttcacactcactggaatgtgcctccttcagcaggtctcagaccccactgcttcctcactgctctgcagccgccttatgtgtgttcccctcccccattcttaacctgattagttccagtgtcccatcgtggttgtactgttttccctttcctctctcttctagaagaacctctcacattggttaacctaactcagatagctgaaagtgcctggagaagagctgcaaaactgtgcagactgattccattttagattcaagtgcagagatcttaaatggactataataccagcaaccctgccatgttgctgtagtcgctttggttcccaccctcccttccgttcccactctcccttctcttcgaactgtcaccatgcttcttacttgcagcc

SEQ ID NO: 410562 - DNA, 374 bp, Homo sapiens
ttttttttttgagatggagtctcgctctgtcatccaggctggagtgctaatttttgtatttttactagagatggggtttcaccatattggccaggctggtctcaaactcctgactttgtgatctgcccacctcagcctcccaaagtgctgggattacaagtgttggtgccgtgagctgcgcccagccaactactgtgacttctaaaaggtgaatattataaaattctagcttaaccaatttccctccgcttcatcgaattttggacatttgaacttcataacaattcatttttgttttgtttcgttttgttttgagacggagtctggctctgtctccagggtggagtgcagtggcgcaatctcagctcactaca

SEQ ID NO: 410563 - DNA, 445 bp, Homo sapiens
tcccggatccaagtgatcctgctgtctcagacttcctagtaggtgggactactggcatgcgtcacgacaccaggctaatttttgtatatttagtaaagatggggtttcaccatgttggccagactggtctcaaattcctgacctcaagtgatctgcccgcctcggcctcccaaaatgctgggattacaggcatgagccactacatccggccaaatatattctttttcaaagaagtgaactcaagtaatttacctctgtagtcctagaatgtatacattttaagtgtaaaaacccttcataaagaatcacttttctggccagacatggtggttcacacctgtaatcctagcactttgggagccaaggcgggaggactgtttgagcccaggagtttgagaccaacctctgcaacatagtgagaccctgtctctaccgaaaaaaaaaa

SEQ ID NO: 410564 - DNA, 421 bp, Homo sapiens
gagcaagaacgcatccaggaggtcctggccggcactgggcaggagagcgttctacccagggagccgggggacccctgagagctcagacagcccagcctccgtacatgcaaagcagctgtgctcagaaaccaaaagaggaatgacaaattgctgagggcaaggaaagctgctctctgacccaagtgtgccaaattagggcaaagccaagcctgtcagagagaaaggaaatacagctgagaatcaggaattttaatttttaagagccacacatggtcttccatcttgtttctttgtaactgcgtccctctcctgctgaagcattgctgttgtgtctgaggcctctgtagcacccacagctgccaacacatgtgctctttctggaaacggacacccccgtggagagctactttgttggctttgt

SEQ ID NO: 410565 - DNA, 409 bp, Homo sapiens
gcacctctcccctgctgccctgtgcttgggccaggaccacagcaacacctgagtcatctcaccttctatctctctggttttcactcacctgcctccccagcttgggtttctttgtgaagagaattttctctctccctcccatctgtgcgctcccagggaagcacagcctgcctggtgacagcttctttcaagaatgctcagggatggccaggcgcggtggctcacgcctgtaatcccaacatttggagagaccgaggcgggaggatcacttgaggccagaagttcgagaccagcctggccaacatggtgaaaccccgtctctactaagaatacaaaaaaaaaaattagccgggcatagtggtgtgtgtctgtaatcccagctactcgggaggccgaggcaggaggatgg

SEQ ID NO: 410566 - DNA, 503 bp, Homo sapiens
gcagccgtagacagtaagtacgtgagtgtgctcagccgtgctcccacaaaccctgtttctgaaaccaggctggggtccacagaggatggatggccacatctgacccaaggcctgtttgtgtatgacctgtgaactaagaatgttcttaatacttttaaagggctgcaaaaacaaaaagaacaaaaaagaatatgcaacagagaccacgtgtggtccacagggccagaaatatttgcgatctggcccttcccagaaagtctgctggcccttgggcagaccacaccatttgcaacaaccaaaattcagtaaaacttcaatgtttctggtccttaagagtcctaaggccagggtggcagcttccagcccagccccaatactcactggtcttctgctgtctcccagagttggcgctggggctggacagccactgcccaggggacgccattgggctccagcttagccggaccatccttgaaccaggcccaggcatcgggggccccgtg

SEQ ID NO: 410567 - DNA, 135 bp, Homo sapiens
tcctggcaaatgtatataagaaaaaatgtcataatttggttgagattctgcatttccttgggcagcactgaattttggctgggggactttatagactagtagttctaggcatctcttgggagcttgctaaaaatg

SEQ ID NO: 410568 - DNA, 341 bp, Homo sapiens
aacacagccacctatgtcaaaagaccaagtgtcccagggtgtcctctgacccaaatctattttggctccacataagaattgtgtcagccctactttaaacatccctcagcatcagggagaatctctggtaaacagaggctgagcaggcctgtggggaggaactcaggctcaggtgaacacagttaggaacctagtaggtccttaataaataatggctagaaggttgggcgtggtagatcacacttgtaatctcaaccctctgggaggtgaagtgggaagattgcttgagaccatgagttcaagaccagcctgggcaacatagtgagacccaccccctccca

SEQ ID NO: 410569 - DNA, 219 bp, Homo sapiens
atcctcagagctttatagcctttcagttgagaaatatgaaacactgaaaatcaaaaacaaatgctggaaatcttctagaatgcaagatattactaatagcctgtaacttctgggggaaaacaggaggcaccatggaccccattctgcgaaaaacctctgttttcccatagaaccccaggaattgacatgaaataaacctttctcaaaatctaagacttt

SEQ ID NO: 410570 - DNA, 1076 bp, Homo sapiens
  misc_feature (992)..(992): n is a, c, g, or t
  misc_feature (1006)..(1006): n is a, c, g, or t
  misc_feature (1064)..(1064): n is a, c, g, or t
agctatgacagaggggacttggagaaccagatgcatgtagccgagcagtggaggagaaccctgctgaaggatttccatgacacctaagttgggatgtggatgtgcgggggtgaggaagataaggctgcaaggtctcctggctgccctactacatgctgcaggctctgcctttcatgacccctggcgacagccagggccccactcctgagagacactggcaacacctcatagttgatttctgttttcttctcttttcactttttgtttctaccagggtagaggccatgttgaactggcctcttttcaggacttttatttccccctggatggttgttgggagggagggaaagtgttttctgaatggctattaatagtattagatcattacaacttatgtaactttcaaaggttgtacaattatacaaaaaaaggcaaactataggataacacagagccctttttgaaaataaattggcattggagtgttttaccctctagctgttttacttagaatgtaacatatgctgcctacccacctcaaaatgtctgtactgcaagagggccctgggcctctgctttccatattcacgtttggccagagttgtagtcccaaagaagagcatgggtggcagatggtagggaattgaactggcctgtgcaatgggcatggagcacaaggggtcacagcatgcctcctgccttaccgtggcagtacggagacagtccagaacatggtcttcttgccacggggtgttgttgtctctggtggtgctgcatgtctgtggctcacctttattcttgaaactgaggtttacctggatctggctactgaggctagagcccacagcagaatggggttgggcctgtggccccccaaactagggggtgtgggttcatcacagtgttgcctttggctcctaaagatagggatctacttttgaagggaattgttcctccaaataaatttgctttaccttggtcctttcttttgngccagtattcaagngggataacttttgacagggtcacatttgggcaaacctgacactggcttgctgcatctnctttggcaacat

SEQ ID NO: 410571 - DNA, 461 bp, Homo sapiens
gtgaagatataggtttggaaaggggatataactttccatggtcaaaagcaaataaactgaacatctcagccagcccatctgcttggagccctctgccttaaagccacatcactctctgagatgaaacaccagccagacagggtgaagacaggagcgagctccaggtttacaagtgataggatccctgtggatttctagttcagactgaaaatccatgaaatttagaataatatggggatagtttacagacatgtgaacttttactgtgtatgttttacttacaatgcaatacctaatacttccactgcgacatcagcaaacatccttagccctgtttgccactgcaccacagagcttttcatgcaaactaacattacagtatgatacaaagaaaactgtttcttcttaagatatttacaatgtgatcaggtttatttaaataaagtccattttatactagc

SEQ ID NO: 410572 - DNA, 428 bp, Homo sapiens
ctaataccatcacattggggattaggagttcaacatatgaattttaaccaggggaggacacaaacatttatatcataataatctctaggaaggtctttgactggcaagtgttacgcagcctgggtggtgtaggacttagggccaagattaggtaagctgagtgaggggtcttgggtgcagagtttaaggaggggtcctcttagagtcatgtaggtgcctcatttgcctcatcctaatttcacccctaacggctaatttcgtgcatgacttgaaggcagtcactgtctctctgaccattagtttcttaacctgtaaaatgaagtggtcagaagactataagtcctgttaggttctctgggtttgaaactgctgcattgttccatagctcctgagacacagctcaccctctccaacctacccactggact

SEQ ID NO: 410573 - DNA, 556 bp, Homo sapiens
ggctttgtagattatccttcactttgacattataagcagaacacagagcaaactccactaaaaattattaactattcattagctctatcttgttaatgataacctttgtttgcaaagacaaaagctggctgatggagtctgctttgatgttccatgtttacactgtatgtgtgtggtctctgtatctgaatatgatattcagcagggataatgtacatatgagaactctaaaagtattgggtttagagtgaaatattgattattttcatattttattaatctctgtctaactgaatccatttcttgactttgattttggaaaggttctctggcgttaattgccatacaaacgagtgctctttctcttaggtaagtgatgtggagagtattatattgctgttccttgcctataaaataaccagattacaaaagtattaaatataaaataaaattacaggagtcagaagtgtgagacttatttctataatgtaacaaataatggattctaccttattactgtaacttcaaagttttattaaaagttgtctaaaggtta

SEQ ID NO: 410574 - DNA, 1886 bp, Homo sapiens
ctgagtgttaataatagctaatacacattgtaattacctggtattatagattatcatgcttaagtgtacctcaatcaccatgagtctgtatcttctaatatcttttactgactgatatggtttggttctgtgtctccacccaaatctcatcttgaattgtacttccataattcccatgtgggagggacccagtgggagataattgaatcatgggggcagtttcccgcgtactgttcttgcagtagtgaataagtcttatgacatctgatgattttatcaggggtttccgcttttgcatcttcctcattctctctctgcctgctgccatccatgtaagatgggagttgctcctccttgccttccaccatgattgtgaggcttccccagccacgtggagctgtaagtccaattaaacctctttcttttgtaaactgcccagtctctggcaacttatcagcagcatgaatggactaatacactgacccataaggaagtgtctttgtttggactaatgacattattttcctacctatttggaacaattcatttaaaacttctcaatattaagaattgtgacaaggattcttctttagttttacataatttcacattatctttttggataaataatttgagtctttatttcctcgtagtaccttgttctcttatcaccttttcttcttttggtcagccatatccagtctttccataacattatttagcaatacttttaaagcacctactctgtgtcaagtactatgctagttgctggatttattacagagaataaaatagacattttctgtactcacaacgtttagagtctagcagggaaaatacatgtaattatacaaagtagaggagagagagagagagacaaaaagggaaagagaaagaaatacacctaactcagatttttgcattccaggtgtcaaaggggttaccaggttaagatggcagaaagaaggagaaaaacggggcctgtcagggataattaatagcattttaaagcctaggagcaagagaaagtatgatgacacagaggacctgaaaatagtggtagaggctatgatagactctaccttttcacaatgaggaaatatggagctcattaatttatatatatatataggtttgcctgacttcgtccaagtacatggaagttttgatggttcatgttgcagtgaagatgagtgaactaaacagagaagctcttacgttgtagaggagtttaaataaacaaggtacagtcatagcattatgctgttatagctggagggtttgcaatgtatttgatcaggagttaagcaaataactaaagagtcaagtggtcatggtataagttggtaagttttgatatggtgaggtagagagtcaaactagagaggggctgctcactctaaagttactcaaaatactctatttatctaacaaagcatgggcttaaaacctctgaatcaacccaactgtcttatttcctagctgaggaaaccaaggcctagagaagttagagaccaaagtctcacaacaagtgagcagcaaagatgggactggaacacgtctcctgactttcacttcgctcacttgctattgtttaaagaaccttttctagaggccaggcacggtggcacttggggaggccgaggtgggcagatcacgaggtcagcagatagagaccatcctggctaacatggtgaaaccccgtctctactaaaaatacaaaaaattagccaggcatggcagcaggcacctgtggtcccaactactcaggaggctgaggcaggagaatggtgtgaacccaggaggcggaggttgcagtgagccaagattgcgtcactgcactccagcctgggggacagaatgagacatgagactccctctcaaaa

SEQ ID NO: 410575 - DNA, 2013 bp, Homo sapiens
cgccgcacgcacgcgcactgcgcccagcatgagggtcgcggctctgatcagtggtgggaaggacagctgctataatatgatgcagtgcattgctgctgggcatcagatcgttgctttagcaaatctaagaccagctgaaaaccaagtggggtctgatgaactggatagctacatgtatcagacagtggggcaccatgccattgacttgtatgcagaagcaatggctcttcccctctatcgccgaaccataagaggaaggagcttggatacaagacaagtgtacaccaaatgtgaaggtgatgaggttgaagatctctatgagcttttgaaacttgttaaggaaaaagaagaagtagaggggatatcagtaggtgctatactttctgactatcagcgtattcgagtggaaaatgtgtgtaaaaggcttaatctccagcctttagcttatctttggcagagaaaccaggaagatttgctcagagagatgatatcatctaacattcaagcaatgatcatcaaagtagcagctttgggtttagatcctgataagcatcttgggaaaaccctggatcaaatggagccttatctcatagagctttctaagaagtatggagtacatgtttgtggagaaggtggagagtatgaaactttcactttggattgccctctatttaagaagaaaataattgtggattcatcagaagtagtcatacattcagctgatgcatttgcacctgtggcttatctacgctttttagaattgcacttggaggacaaggtgtcctcagtgcctgacaactacagaacatctaattatatatataatttttgaaaagtgttttggaacattgttcattaaaccaccatttctatacaaaaaaattgcatagtattttctcagttactatgactagtttatttttttctcatgactcttatttttttagagaaacatactttcactagaagaggttagtggaaccatttattaattgggaaaatgtcgacggcatgttcattaatagtgccaactttcttggaattcactctttctctttcgttaacacatcttccctatgaccttttttttcttttatttcatctataaaccccatttctgtagcatttctttttttatcacactagtttcttttcctccttctctctttcttgctccaatccctaccaataatgtcatgatgcagaggcatttgaaaatgaagatgaaaagatggtcactttatttagccagtcaagcttattctactgggtgtcgccaaagcgatttatcatttttattttaaatatattcatggttgaagtgtttcaacgttattggacaattaggaagaatgtccttaactcttacaagttattttataactgatttttaaaatgctgtttttcagtattaactatgttgaccttagaaaacttttacaaaaaatagactttatgttttagaacagttttaggttcacagcaaaaatggagcagaaaatgcagagatttcccatataccctctacctccacacattcacagcctcccctaccgtcaatgtcttataatagagtggtacatttgttacaactgatgaacctacattgacacattattatcacccaaagtccatagtttacgtgagggttcactcttggtgttgtacataatatgggttttgacaaatgtgtaatgacatttgtcaaccgttatagtattatacagaataatttcactgccttaaaaaatcctctgtgttttacttattcatccctccctctcctttaacccttagcaactgatcttttcactgtgtacatagttttgcttttaccagaatgtaatgtagttgaaatcatacagtatatagcttttcatgcagtatatagcttttcagattggcttctttcatgtattaatatgcatttaggtttctctgtatcttgtcatgtatatgtagctcattttttttttagtgtagaataaaattttattgtctggttctaccaca

SEQ ID NO: 410576 - DNA, 1712 bp, Homo sapiens
ccttgtgtgccttgctgaggagtttggagaccccattctgaaaaagaagaagtagaggggatatcagtaggtgctatactttctgactatcagcgtattcgagtggaaaatgtgtgtaaaaggcttaatctccagcctttagcttatctttggcagagaaaccaggaagatttgctcagagagatgatatcatctaacattcaagcaatgatcatcaaagtagcagctttgggtttagatcctgataagcatcttgggaaaaccctggatcaaatggagccttatctcatagagctttctaagaagtatggagtacatgtttgtggagaaggtggagagtatgaaactttcactttggattgccctctatttaagaagaaaataattgtggattcatcagaagtagtcatacattcagctgatgcatttgcacctgtggcttatctacgctttttagaattgcacttggaggacaaggtgtcctcagtgcctgacaactacagaacatctaattatatatataatttttgaaaagtgttttggaacattgttcattaaaccaccatttctatacaaaaaaattgcatagtattttctcagttactatgactagtttatttttttctcatgactcttatttttttagagaaacatactttcactagaagaggttagtggaaccatttattaattgggaaaatgtcgacggcatgttcattaatagtgccaactttcttggaattcactctttctctttcgttaacacatcttccctatgaccttttttttcttttatttcatctataaaccccatttctgtagcatttctttttttatcacactagtttcttttcctccttctctctttcttgctccaatccctaccaataatgtcatgatgcagaggcatttgaaaatgaagatgaaaagatggtcactttatttagccagtcaagcttattctactgggtgtcgccaaagcgatttatcatttttattttaaatatattcatggttgaagtgtttcaacgttattggacaattaggaagaatgtccttaactcttacaagttattttataactgatttttaaaatgctgtttttcagtattaactatgttgaccttagaaaacttttacaaaaaatagactttatgttttagaacagttttaggttcacagcaaaaatggagcagaaaatgcagagatttcccatataccctctacctccacacattcacagcctcccctaccgtcaatgtcttataatagagtggtacatttgttacaactgatgaacctacattgacacattattatcacccaaagtccatagtttacgtgagggttcactcttggtgttgtacataatatgggttttgacaaatgtgtaatgacatttgtcaaccgttatagtattatacagaataatttcactgccttaaaaaatcctctgtgttttacttattcatccctccctctcctttaacccttagcaactgatcttttcactgtgtacatagttttgcttttaccagaatgtaatgtagttgaaatcatacagtatatagcttttcatgcagtatatagcttttcagattggcttctttcatgtattaatatgcatttaggtttctctgtatcttgtcatgtatatgtagctcattttttttttagtgtagaataaaattttattgtctggttctaccaca

SEQ ID NO: 410577 - DNA, 290 bp, Homo sapiens
cagcatgagggtcgcggctctgatcaggtaatgcggtcctggagccgcctccttcctcctaggccaggctctcgtcccttccagccgccgctagcgccgaaagagtgggtgtctccgtctgagtcgcgcgttgggggttccgcggctcctccgagccacaggaagaggcggagccttcgctgttgccggcccgcatgtgcctcggcccctggctggcgcgcctcctccctgtctgtcgctctctggtcttctagcccttaaacttggattcccattggattcaagtggga

SEQ ID NO: 410578 - DNA, 1182 bp, Homo sapiens
  misc_feature (1034)..(1034): n is a, c, g, or t
cgccgcacgcacgcgcactgcgcccagcatgagggtcgcggctctgatcagtggtgggaaggacagctgctataatatgatgcagtgcattgctgctgggcatcagatcgttgctttagcaaatctaagaccagctgaaaaccaagtggggtctgatgaactggatagctacatgtatcagacagtggggcaccatgccattgacttgtatgcagaagcaatggctcttcccctctatcgccgaaccataagaggaaggagcttggatacaagacaagtgtacaccaaatgtgaaggtgatgaggttgaagatctctatgagcttttgaaacttgttaaggaaaaagaagaagtagaggggatatcagtaggtgctatactttctgactatcagcgtattcgagtggaaaatgtgtgtaaaaggcttaatctccagcctttagcttatctttggcagagaaaccaggaagatttgctcagagagatgatatcatctaacattcaagcaatgatcatcaaagtagcagctttgggtttagatcctgataagcatcttgggaaaaccctggatcaaatggagccttatctcatagagctttctaagaagtatggagtacatgtttgtggagaaggtggagagtatgaaactttcactttggattgccctctatttaagaagaaaataattgtggattcatcagaagtagtcatacattcagctgatgcatttgcacctgtggcttatctacgctttttagaattgcacttggaggacaaggtgtcctcagtgcctgacaactacagaacatctaattatatatataatttttgaaaagtgttttggaacattgttcattaaaccaccatttctatacaaaaaaaaaaaaaaaacccgggcctcctatgccggcgggcggcaaccacgcagctcctcgacgtgccagtgggtcaaagctggttcctggccccggttttcctgtgtccaggggcaatcggcccgctccccaaaggagagcgaataaattcgaaagcanggacgggaaagcgcacgacagcacccaacacccaacacacaacacacagacaccaacacccgcgcacacccacaacacacaccaccacacaccacaccacccaccgagcacccacgcgcacacacacagtaaccacccccaccaccca

SEQ ID NO: 410579 - DNA, 1697 bp, Homo sapiens
gagaggattggaggaggaaggaactgggggtcccggacgcctgggcctaagtgagaaggggactaggggcctggactcctgggtctgactgaggaggggccaggagctaagcctcagcacctccagcaatgaagctgggaagtaagtctcctggcgccttgaggggaccagggttggtcccttggatacctaggacaccttctcacttctgctggctccagatcctgtgcagatcggcagggtccaacaggacaccccagggaaggtgctttccattgtgaaccagctctacctggagacccacagaggctgggggagggagcagacccctcaagaaacagagccagaggctgctcagagacatgatccagcccccaggaaccctgcgcctcacggggtctcctgggtgaaaggcccgctcagcccggaagtggaccatcctgggccggctctcgccagcctactggaagaggaggaggaagaccttgaaggaaaggaggaaggaagggaggacgaccctgaagaggaaggccctgaggacgtgctcaccattcacgtccagtctctggtcagggcccggagcagctacgtggccaggcagtaccgaagccttcgggtgcgcatcgcctcagattctgggggtccccacgggtctggggacccggccacggagctgcttcaggatgtgcggcacctccttactgacctccaggatcacctggcaaaggactcctacatcagggctgtctttggaagcaggggtcctgggctccccaagaaggacgaggatccaggccccgcgctggagacggcggtgtgccaggcggtgctggcgcccctgaagccggccctgtggacacgactccgcacactccgagcaccggagctgcggcggctgcggcggcgacagacagccctgcgggcgggggcggggcctccgggggcacaggggccgggaccggaagggcagagcctcgcccccgccttgcggagccgcatccacgagcgccttgcgcacctccacgctgcctgcgccccgcgccgcaaggtggcgctcctcttggaggtgtgcagagatgtctatgcgggcctggctcgaggcgagaaccaagatcccctgggggccgacgccttcctgccggcgctgaccgaggaactcatctggagcccggacattggggacacgcagctggacgtagagtttcttatggagctcttagatccagatgagctgcggggagaggctgggtactacctgaccacgtggtttggggcgctgcaccacattgcccactaccagcccgaaacagaccgcgctccccgggggctcagctccgaggcccgcgcctccctgcaccagtggcaccgcaggcggacgctgcacagaaaggatcatcccagagcccaggtgactgcccatctggctgcaagtagaagggagggtgagacctggtgcccttctgacccagctcccacctctccccacaggccaacctgccctttaaggagccatgggcagaagagactgtgacagggaccagtgacaactaggggtttcacacccctccgttcatgcctgtaatcccaacattttgggaggccaaggtgggaggattgcttgagcccaggagtttgagaccagcctgggcaaaacagtgggacccccatctaccaaaaaaaaaagtaaacaaacatta

SEQ ID NO: 410580 - DNA, 1617 bp, Homo sapiens
gagaggattggaggaggaaggaactgggggtcccggacgcctgggcctaagtgagaaggggactaggggcctggactcctgggtctgactgaggaggggccaggagctaagcctcagcacctccagcaatgaagctgggaagtaagtctcctggcgccttgaggggaccagggttggtcccttggatacctaggacaccttctcacttctgctggctccagatcctgtgcagatcggcagggtccaacaggacaccccagggaaggtgctttccattgtgaaccagctctacctggagacccacagaggctgggggagggagcagacccctcaagaaacagagccagaggctgctcagagacatgatccagcccccaggaaccctgcgcctcacggggtctcctgggtgaaaggcccgctcagcccggaagtggaccatcctgggccggctctcgccagcctactggaagaggaggaggaagaccttgaaggaaaggaggaaggaagggaggacgaccctgaagaggaaggccctgaggacgtgctcaccattcacgtccagtctctggtcagggcccggagcagctacgtggccaggcagtaccgaagccttcgggtgcgcatcgcctcagattctgggggtccccacgggtctggggacccggccacggagctgcttcaggatgtgcggcacctccttactgacctccaggatcacctggcaaaggactcctacatcagggctgtctttggaagcaggggtcctgggctccccaagaaggacgaggatccaggccccgcgctggagacggcggtgtgccaggcggtgctggcgcccctgaagccggccctgtggacacgactccgcacactccgagcaccggagctgcggcggctgcggcggcgacagacagccctgcgggcgggggcggggcctccgggggcacaggggccgggaccggaagggcagagcctcgcccccgccttgcggagccgcatccacgagcgccttgcgcacctccacgctgcctgcgccccgcgccgcaaggtggcgctcctcttggaggtgtgcagagatgtctatgcgggcctggctcgaggcgagaaccaagatcccctgggggccgacgccttcctgccggcgctgaccgaggaactcatctggagcccggacattggggacacgcagctggacgtagagtttcttatggagctcttagatccagatgagctgcggggagaggctgggtactacctgaccacgtggtttggggcgctgcaccacattgcccactaccagcccgaaacagaccgcgctccccgggggctcagctccgaggcccgcgcctccctgcaccagtggcaccgcaggcggacgctgcacagaaaggatcatcccagagcccaggccaacctgccctttaaggagccatgggcagaagagactgtgacagggaccagtgacaactaggggtttcacacccctccgttcatgcctgtaatcccaacattttgggaggccaaggtgggaggattgcttgagcccaggagtttgagaccagcctgggcaaaacagtgggacccccatctaccaaaaaaaaaagtaaacaaacatta

SEQ ID NO: 410581 - DNA, 1601 bp, Homo sapiens
gagaggattggaggaggaaggaactgggggtcccggacgcctgggcctaagtgagaaggggactaggggcctggactcctgggtctgactgaggaggggccaggagctaagcctcagcacctccagcaatgaagctgggaagtaagtctcctggcgccttgaggggaccagggttggtcccttggatacctaggacaccttctcacttctgctggctccagatcctgtgcagatcggcagggtccaacaggacaccccagggaaggtgctttccattgtgaaccagctctacctggagacccacagaggctgggggagggagcagacccctcaagaaacagagccagaggctgctcagagacatgatccagcccccaggaaccctgcgcctcacggggtctcctgggtgaaaggcccgctcagcccggaagtggaccatcctgggccggctctcgccagcctactggaagaggaggaggaagaccttgaaggaaaggaggaaggaagggaggacgaccctgaagaggaaggccctgaggacgtgctcaccattcacgtccagtctctggtcagggcccggagcagctacgtggccaggcagtaccgaagccttcgggatcacctggcaaaggactcctacatcagggctgtctttggaagcaggggtcctgggctccccaagaaggacgaggatccaggccccgcgctggagacggcggtgtgccaggcggtgctggcgcccctgaagccggccctgtggacacgactccgcacactccgagcaccggagctgcggcggctgcggcggcgacagacagccctgcgggcgggggcggggcctccgggggcacaggggccgggaccggaagggcagagcctcgcccccgccttgcggagccgcatccacgagcgccttgcgcacctccacgctgcctgcgccccgcgccgcaaggtggcgctcctcttggaggtgtgcagagatgtctatgcgggcctggctcgaggcgagaaccaagatcccctgggggccgacgccttcctgccggcgctgaccgaggaactcatctggagcccggacattggggacacgcagctggacgtagagtttcttatggagctcttagatccagatgagctgcggggagaggctgggtactacctgaccacgtggtttggggcgctgcaccacattgcccactaccagcccgaaacagaccgcgctccccgggggctcagctccgaggcccgcgcctccctgcaccagtggcaccgcaggcggacgctgcacagaaaggatcatcccagagcccaggtgactgcccatctggctgcaagtagaagggagggtgagacctggtgcccttctgacccagctcccacctctccccacaggccaacctgccctttaaggagccatgggcagaagagactgtgacagggaccagtgacaactaggggtttcacacccctccgttcatgcctgtaatcccaacattttgggaggccaaggtgggaggattgcttgagcccaggagtttgagaccagcctgggcaaaacagtgggacccccatctaccaaaaaaaaaagtaaacaaacatta

SEQ ID NO: 410582 - DNA, 592 bp, Homo sapiens
agcgtggtggggagagccttgagagttggagccaggcgggagagggtagcactggtgggaggaatctatgcggtcctgaagattctgatcccctgggggccgacgccttcctgccggcgctgaccgaggaactcatctggagcccggacattggggacacgcagctggacgtagagtttcttatggagctcttagatccagatgagctgcggggagaggctgggtactacctgaccacgtggtttggggcgctgcaccacattgcccactaccagcccgaaacagaccgcgctccccgggggctcagctccgaggcccgcgcctccctgcaccagtggcaccgcaggcggacgctgcacagaaaggatcatcccagagcccaggccaacctgccctttaaggagccatgggcagaagagactgtgacagggaccagtgacaactaggggtttcacacccctccgttcatgcctgtaatcccaacattttgggaggccaaggtgggaggattgcttgagcccaggagtttgagaccagcctgggcaaaacagtgggacccccatctaccaaaaaaaaaagtaaacaaacatta

SEQ ID NO: 410583 - DNA, 1387 bp, Homo sapiens
tcaacattcttaatgtgaatggccaccctactataggaaggtgcatcacataaacaccgtgtttatcgatgccaccacctccacgtctagaagggacaaaggcagcgaggagatccagagaccgacggggagatggtggctttcaggcttctggtgtgggtgcatgggggaaaggtacaatggttaactttccatcaaaaatacggcaccacacgatggtcttgagaagacacactcggtcttctggtttagaagcaaattgacttcctgaagctgtgaagcgaactatcgcaaaactctcttgcttcttgaatgtgggggcgatacaaattcaattaatgatgccatacacgtaatcttttcgactttttagaagtcacaaacgctttaactctccagtgaaaataattgaaagaggttaaacataaggggaatgggctttttttttttcttgtttttatttgggacaatttttcaaatgataaaactgtataaatacaagctgggtcagtcaaggaaagcgctgtggctgaagattttcgtaaaaaccttagtaaacgtggcatttaagtaactaattatgctttgccattagcagaccattaagataaacaggagaaagttcacactcctgctatttcgttccctaagaatagtcacaaagataataccaggctagttggtgggttatcttctccattaggagggttaatgtttaaatttgttaattaaaatacaaaaaatttggtttcctacacagccaacgttgtgagggaagtctcacggggacatcctgactccttgaaatttaccttttgttactttatcctgtggcattatcccctggagtcatatagggtttcaagactgttaatgttgcagggaatgtgagtgaatatgttagaagtctggactttcttctcccttatcataggtgactggcatacacactcctcataaagagaagttatggctcatcaaaagagtgactttatgagcattaatagaataataaatcttgcacttttagttcaagaaacagtgaagtcctataatcagagtgacccacgcaaatatgatccattcacttgcccaactctgacaggatacggatagtctataaatcattttagtttttaaaaccttaaaaaaggaaggcacccaaatctcccaaaggaaggtgtttatggggggaaagggacttctagcaaacctgcaggaagagatcatggaaaaacgaacagtcggtccagaagctgaattagatagactttccaccgaaacaagaatggatagatgttccaatgtcattgtttcagtatttatgttctatcatttaaaaagagaaaagtcttcctgcttcctgaaagctatacaaaaaaaaaaa

SEQ ID NO: 410584 - DNA, 1903 bp, Homo sapiens
gcaccgggaaaataacaatcgtatttcaggttgaaagctcctattactgctgggttttggaggctgcgataaaatcttcatcgacgtgaaggtaccttctgggttggcttgggtcgtaagtcctaagatgggggccgtccttccctgggggcagggacgtagggaaccaggcggtggggagggagaaaggagcgacgaggtcagaggaaaccttgggtttccaaggctcctggggcaccaaagggcttcccgcagtcggggaattgagccctggggaggagccttttgcgagaacgtgagcgcgccccaacacgcctcagacctcgtaaacccacttggcaaagaccggggaagcggctggcggaccgactgcggtgaactcaagaaattaacctgcgctgcaactaaacgggctgccgccctttcacactcacctcgagcgaccgagatagagaaagctcccgaaccggccgcggggggacttggctccaccctcccgtcccgggagaagaggacaaaaaggggagatggacttggaatggccccgcccttcacagcgctccaatccttggaaaccaaacctcctctccaagcctccacgtctagaagggacaaaggcagcgaggagatccagagaccgacggggagatggtggctttcaggcttctggtgtgggtgcatgggggaaaggtacaatggttaactttccatcaaaaatacggcaccacacgatggtcttgagaagacacactcggtcttctggtttagaagcaaattgacttcctgaagctgtgaagcgaactatcgcaaaactctcttgcttcttgaatgtgggggcgatacaaattcaattaatgatgccatacacgtaatcttttcgactttttagaagtcacaaacgctttaactctccagtgaaaataattgaaagaggttaaacataaggggaatgggctttttttttttcttgtttttatttgggacaatttttcaaatgataaaactgtataaatacaagctgggtcagtcaaggaaagcgctgtggctgaagattttcgtaaaaaccttagtaaacgtggcatttaagtaactaattatgctttgccattagcagaccattaagataaacaggagaaagttcacactcctgctatttcgttccctaagaatagtcacaaagataataccaggctagttggtgggttatcttctccattaggagggttaatgtttaaatttgttaattaaaatacaaaaaatttggtttcctacacagccaacgttgtgagggaagtctcacggggacatcctgactccttgaaatttaccttttgttactttatcctgtggcattatcccctggagtcatatagggtttcaagactgttaatgttgcagggaatgtgagtgaatatgttagaagtctggactttcttctcccttatcataggtgactggcatacacactcctcataaagagaagttatggctcatcaaaagagtgactttatgagcattaatagaataataaatcttgcacttttagttcaagaaacagtgaagtcctataatcagagtgacccacgcaaatatgatccattcacttgcccaactctgacaggatacggatagtctataaatcattttagtttttaaaaccttaaaaaaggaaggcacccaaatctcccaaaggaaggtgtttatggggggaaagggacttctagcaaacctgcaggaagagatcatggaaaaacgaacagtcggtccagaagctgaattagatagactttccaccgaaacaagaatggatagatgttccaatgtcattgtttcagtatttatgttctatcatttaaaaagagaaaagtcttcctgcttcctgaaagctatacaaaaaaaaaaa

SEQ ID NO: 410585 - DNA, 397 bp, Homo sapiens
ctaatatgaaaccggtcatttggatagtcctacaactatggaaaattaaattcagaatttaaaagcctcctccaaagaaatgtccaggcctagatggtttcactggagaattctaccaaacatttaaatatgaattaacacctattctactgtctcttccagaaaatagaagaaatgaaaacactttccgacacttctacgaagccacaattactctcataccaaaaccagacaaacccaatgtaaacaaataaaactatagaccaatatccctcatgaatatagatgcaaaaatctttaacaaaatattactgatgggattcatcaatattgaaaagtaattatataccattattaagtggggttcatttcagaaatgtaagtctggtttgatctt

SEQ ID NO: 410586 - DNA, 382 bp, Homo sapiens
cctttattccaggggatggggctctgacaggtgaaacacagcatttgtttaaacagaatagagaaagtctgcaaaacattcaagggcaggaagtagcaataaatactcctctgtgcaactgaagcagcacagagcttggggtgagcagaatgtcatcactcaaagtagaatttggccagggcctcccagggtcccaccaagggatgcagtgaactttctaaaagtcaagacctctgtcttatctcctccaaaagatgagaaagtgagatgtgaagctcctttctggagatgggatatgtttttcatggtaggttctgatctcttttgcaggctttgagcataagaaccaagggcacaaaaatagctccttgaggaaaaaaaa

SEQ ID NO: 410587 - DNA, 340 bp, Homo sapiens
taaagttagcttaggaacgtcaattctgattctattcaatcttgttctggctcttgtagtcactcttctgaggcactcttgttctttgctgtatcaaggtcatacttaaaaagagatgttatttcttgatcagggttttgagaggattacattttcaatgtgaaggttcagccactgttttagaggactgtactaatgagcataagacagaaggtcttggcccaatgtggacccgcattcagttctattctccatgacatctttaacctcagccagctatttcgcaaaagtgagtaatgggtcggctgggcatggtggctcatgcctgtaatcccagcac

SEQ ID NO: 410588 - DNA, 3180 bp, Homo sapiens
  misc_feature (2349)..(2349): n is a, c, g, or t
gggaaagagagctagagataataagtgtgaaacaatgtcacagaatcaatgacggaactcttcccaggacaaaggatgacttttgagttcagtctttgcctttaattctacatggggaggagagcacgtttagccacaaatggaagggattactcatttgagctatttggttatatgattatttccccagagaataggatgtgcagggcattacacaagcagtgccaatagcagcaaagttcttgagagtgctagtaattcaaatggcaggaagagaaggaataaatggtaaggctacctacagttcacagagagctccatcctcactgtggctttggattttgtcctgtgtgaaagagaagtgactgtgaactgacatgctgtgtttggtgttttagaaagatggctgcagcagcggtttggggaatggactgcaggagtggcattggaaacaggaaggttcatgactattgccagagacagaggatgaagcaggagcaaggaagattcaggacaggggactccggggctgatcaggaggcagaactggttgataagtatatgtagcagcataagaaagaaagaatcccagattgacacccaggcttctcacttggaagcctggatagatactgaatgcaatcacaaaggctgggaagtcaatgggactgcagggaagggaagggaagggaggagaagaggaagggcaggagggtccaatatcaatattcagcttttagatgtgttgagcttgaagtgctcagatggagaagtccaggaggcagtagaatacggtggtccagagcacaggagagcaatgtggcttgagttgtcatttgctcacatatttccgtgtcagttacttgtcttagatcacagaacaagttctcctctcacagtttcctggctccacctgtctcatgctcaccgtcagcatcgaaattgagccacaccaggggttctggataccagcttctctctaggtgaggctgctatagtcagcagctgattagttgcagttatcagcaactggtaatataatatattgtgcatataagtgtaccagaagtcatgtttatatattgctgcaaatactcggaatggggatctcttgttccctgcttaagaccacatcacattacttggttttgtacgctagtggctgaaccaaaaaaagtaggagatgattttttttcttttttcttaaagcagtagcttttgaaccttgaccatgctttctaaccagctgaggggcttttgaaaaagagggtgccttactgtgccccagaccaggacaatcagtatttctggggaatggagcctggcacacacacatttcttaaagctcccttggcaattctgaggagtggattacatgttgtatgtagctcgtaacgaaagaaatcttgtctttgctctcagacccccatttcttactcatctcatgagctccttcgagatccagaaacagttgcatatttcattagtaaatcagttccagagtcacattttatttcacaagttagtccattaaaagtttcctgcagtgaggaaatagccagaaagaacactccacccctcctcctttttataactatagggtctggctcgacagagcaggagcatcgccatcttggacaagcccctcattctaaagttcaccttaataaaaaactgcctaaattcaaactgcatcagcctaatggctaaggtcagcatgaccataaaccacaaataacatctccaaccggaaacattcgaaactcctcctcgaccagagacatgctagtcccgagataacccccctccagcagggaagatgccagtctcgggataacctctctctggccggaaagatgcctgccccaagataaacttgcctcctcccagagatattccaaccctgccataaaacttctccctcaaacaggaacattccaaaattctgataatctccctcaccctaaaaccaatatatactcctagtctgtaagagaaagcgctcttgaccaaaattcaccaggagtgcctcccaggttttaactaaagaaaacctctctttaactgccaaaaaaaaaaagggaaaaaaaaaagctttctgcagtggctttcagcgggcccagcatggcagcagcacctgagaacctgttggagatgcacactcttggaccccaccctggcctctgagtaagacactggaagggcaggccccggtctgtgcacacaagtcctcagggagattctgactgatgcatgccagattttgagaactgctgatatactccaggcacatcgcatgctgggatctagatacaccaagggaacaaaataactgcacttgtcctctgnggaccgacttaccttttggaagggctgagaaagagagacacatacaagatcactccctgtaatgcaatgttttataacagatgtgatttgggatttcagtgggagcccaaaagagggactgactaattcagcctctgtgacaaggggagtttctcagaaacagaatgcttagctgggcctccaggcacagggacaggaatgaggaaatacttgtaggccctgtgctccttcagcaaaaccctcagtttcttgttatttttataaatgcaaacatcttattaaagtagatgctaaggcattagaatttcctgctttatttttctaaatgaccatgaggaaacctggaatgtcaaagataaagtgcaacacattctgcatttaaaaattaaaatgatcctttttaaaagtagcaaccagatgtgaaaaattggactggagtccaggttatagttgatagctttaactttctccccaacagcaacagcacaattttccctaaaatgtgttatgaataagtaaaatgactacttcacatcctttaactcttcctacagaaatctaagagagaaatgaaacaaaagtttgcacagttctagacacgataaatacatgtgaaatcacacaactcagaaaatgtcccttaaattaattgagccattggtacttgtgaattagaagagacatctatgttctgatccactgttgaaagctgtacaatgttacctatttatttgcagacatcctttggaaacaaataggtagatttgcaacaaataaagagtggagtacagctgctgacattaccttgtatattcatgcctttatgtaaaa

SEQ ID NO: 410589 - DNA, 178 bp, Homo sapiens
agactgaagatggcatggtgtggtgattggcaggagacattgtgataggactcgagtcccaactctgctactcagtagctctgtgagcttggacaagttaaccaaccatagtctctttatttgtaaaatggggataataatagaccctatatcacatgattgttatcagtattaaatg

SEQ ID NO: 410590 - DNA, 217 bp, Homo sapiens
gctcagtctgcacacagcgggtttggtcagaaatgcctggctcccccgacatgctcatgagattgttaggagatagaactgtgacattggggtgccagtgttctgtaaactgcttcctggcgtacaggtgggggtgctcacctgactgtgaaaaccttcccagaggcagaagaccagcagtggcagcaaggcacgggccacctcctcaggggacagc

SEQ ID NO: 410591 - DNA, 226 bp, Homo sapiens
gtaccaccacacccagcccagaactatttttatattaatactaagaccattacttgccatttcactgtgttgactttcgcacgaatggtgcaaaagcaatggtagctaaagcttctggcaccttagacagcaaggtggtgacaccaaactttactagtagtcattgtattctttgccacacacacgtggtaaaacaaaacaaaaacctagtttcacctaagaatgt

SEQ ID NO: 410592 - DNA, 433 bp, Homo sapiens
ttttttttttttgagacagggtctcactctgttgcccaggctggagtgcagtggtgcagtcatggctcactggagcctcaaactctccaggctcaagtgatcctcccacctcagcctcccaggtagctgggactgcaggaatgtgcatacctgactaattttttttttcttctatatcgtgtagtgatggggtttcaccatgttgcccaggctgatcttgaactcctgggctcaagtgatcttcccaccttggcctcccaaaatattgggatcacaggtataattgtgattgggatcactgtgcctggcctaagatatgatattttatctagaagttttagttatttccagcagtccagatacctatcttgtcattgccttagaaatggaagtctatgattttaaatatatttctaagcctcaacttcctcat

SEQ ID NO: 410593 - DNA, 292 bp, Homo sapiens
ttttttaacagaccagatcttgctatgtcgcccagactggccctccctactctgcctcttgagtagctgggactacaggggtgtgccaatgtacctggtgtgactgaaagtttttgagttggggaatgacagtagaatacaattttaagatgatcaatttggcaacaagatgtaggattagtagaaagtggtagagtttgaaagtcaggtgttaggagattttaataccagttaatacatgaacctaaaactacaaaggtagcagtggaaatggaaagaaaaacactaagtg

SEQ ID NO: 410594 - DNA, 365 bp, Homo sapiens
tcatttgtgattgcacagtggcatacaggagatggagaactagcttggattcatgtttaccctttgatggtggttctcaatgggggacaatttcgtcctccagggcacatttggcagtgcctgagacatgtttgcttgtcacaacctaagaggttgtttactgatgtgtagtgggtagaggctggggctgtttctgaatttcctatcgtgaacaggacagtctccttctcctgctcccccaccccactacaaagaattatttggtccaaaatgccaatagtgctgaggctgagaaaccctttcaaaatttttgtcccaaaatttttactaaattcttgcacataaaatcttttgttttctctgtt

SEQ ID NO: 410595 - DNA, 198 bp, Homo sapiens
aactgtttctaaaatttgcatctttaagaaaaaggtttggtttactatcttttaagaactataagagaaaaggaggaatcatcacattttgagtaagtctgaattaggacaattgcttttctgtcatttagttcgacattcctaagactcttactgggaattcccttcctgggttaggactctcagcttcccaaagct

SEQ ID NO: 410596 - DNA, 518 bp, Homo sapiens
ttcattcacagacatggctaatggaaaatttgtatatgttataaatactatgaaaatggaaactcaagttttcctgtcttctcagatctcatttttaaattcccaagcatctctgtcacttccatgcgccctccacacctagactcactccaagtggaccctgtcctcccattcttaatcactccactcgctgatttcaccctgccctcagatgacttcacgtccttccccttctgatgttgtgagcgcaccagcacctgctggaaatgattcagacaccgggaagctttccaaggtcaccgtgacgatgaaatgacctctacccacatcagctgaacagcccccaactcgacctgtgcttacgatgcagagtagaagccaagagcttaaagctgacaagacactgatctgggtggcgatgaataaagccaagctggctgcttaagagtctcctgggaaacttcttagaagcctccagggttccacatctggatattgaatgcattaggtctgggcaa

SEQ ID NO: 410597 - DNA, 671 bp, Homo sapiens
ttcattaacatagcttctaaggtgtgggcaaggccagtgttctgtgcccaagaaagtctgctgggcacactgtgaccttcactgagtctgctgaatcagcccactttgactcagcccagatatcagaatagcagggcagtggggatggtgttgggataacagcttagttatatgggaaaaaaaataggaatggtttgctccatcacatcaaactgtaaataaatttcagatgcatccaagcactatatgtaaaaatgaaatgaggccagtggggtgggtcctgcctgttattccagcactttaggaggctgaggtgggaggatcacttgagcccaggagttgaagaccaacttgggcaacatgacaaaaccccatccctacaaaaaaatttaaaaaattagctgggcatggtggcatgtgcctgtaattccagttacttgggagtctgaggtaggaggaacgcttgagcccagcaggtcaaggcaatagagcaagaccctgtctcaaaaaaaaaataaaaaagagaaagaaagaaagaagaagaaggaaagaaggaaaggaaaaaaggaaggaaggaagaaaggaaggaaggaaggaaggaagaaagaaaaagaaagagaaaaagggaaggaaggaagagagagagagagaaggaaggaaggagaaaaaga

SEQ ID NO: 410598 - DNA, 470 bp, Homo sapiens
tcagacctctcctgaaagcacatgtttgctcagctccctccctggcgctgttccgctttcctcacttccttgcaggtttctccctagggcctccctcaataaatcaattgcagtgggaggatcacttgagcccaggagttgaagaccaacttgggcaacatgacaaaaccccatccctacaaaaaaatttaaaaaattagctgggcatggtggcatgtgcctgtaattccagttacttgggagtctgaggtaggaggaacgcttgagcccagcaggtcaaggcaatagagcaagaccctgtctcaaaaaaaaaataaaaaagagaaagaaagaaagaagaagaaggaaagaaggaaaggaaaaaaggaaggaaggaagaaaggaaggaaggaaggaaggaagaaagaaaaagaaagagaaaaagggaaggaaggaagagagagagagagaaggaaggaaggagaaaaaga

SEQ ID NO: 410599 - DNA, 509 bp, Homo sapiens
gcacaactgtagccccagccactcgggaggctgacgtgggaggatcccttgaacctgggggcggaggctgctgtgagccttcatcatgccactgcactccagcctgggcaacaaagcaaaaccctgtctcaaaaaaagaaaagaaaaaaagaaactgcttgaaagtcatgacgaagaatgtcaggaggggacttattctggctgcagttgactttctccttaaatgtcaagtagtgattgatttggataagaagtaaactgttacttttcataacatactttaaggaatttatcaaattctatgtataatgcccattaaaatatactccattctggagtaaagggtaagagtaatatttttaaactagttaataaagtctttagctttcacataaaccatgatatttgaggtgtctaaaatcacagggtctttttttttttttcagtcttcccagttgttctctgctctattcctaaataaagttaacttgaaaatgcatggccggttg

SEQ ID NO: 410600 - DNA, 713 bp, Homo sapiens
agcagtcctgaggcgggagcacacaggactaccttgttcagatgaggataatgatgtttggccaactcaccccccaaccttctcactagttataggaagagccaggcctagaaccttctatcctggccccttgccctatgacctcatccctgttccatgccctattctgatttctggtgaactttggagcagcctggtttttcctcctcactccagcctctctccataccatggtaggggggtgctgttccacagaagggtcaggtgtgtctgggaagtcctaagagctgcctggagtttcaaggcattcttaaaaacgttcttgcctaatcagatggtgtcagtagttggcaaagcccctttcatgcgtagtagctgggggtatcgattgatgtttttggcaacacctgtccaattgtaaaatgtacatcctcccttcccccaaaatgcacataccctgtgatccagcaattctgcttctaggatttgtctattagagagatcttttgccttgggcataaagaagtctgctaaaggatgtttgctgcagcactgtgtgcagtaacaaagacggaactcagctaaatgtctgccgttggggacttctcatccccacattgggttagtgtgctgcctttagaagaatgaagcctctgtatgttctcccatggaaacatgctccaatgtatgttgttaagtaaaacaaaaaaaaa

SEQ ID NO: 410601 - DNA, 511 bp, Homo sapiens
accccagctacttaggacatgtcccatgacacacgctgaccctctcctgtggaactagcacccccactagccatggtataggagagaggctggagtttcaaggcattcttaaaaacgttcttgcctaatcagatggtgtcagtagttggcaaagcccctttcatgcgtagtagctgggggtatcgattgatgtttttggcaacacctgtccaattgtaaaatgtacatcctcccttcccccaaaatgcacataccctgtgatccagcaattctgcttctaggatttgtctattagagagatcttttgccttgggcataaagaagtctgctaaaggatgtttgctgcagcactgtgtgcagtaacaaagacggaactcagctaaatgtctgccgttggggacttctcatccccacattgggttagtgtgctgcctttagaagaatgaagcctctgtatgttctcccatggaaacatgctccaatgtatgttgttaagtaaaacaaaaaaaaa

SEQ ID NO: 410602 - DNA, 735 bp, Homo sapiens
ttttcacacataccattctctttctgcttcacagcagtcctgaggcgggagcacacaggactaccttgttcagatgaggataatgatgtttggccaactcaccccccaaccttctcactagttataggaagagccaggcctagaaccttctatcctggccccttgccctatgacctcatccctgttccatgccctattctgatttctggtgaactttggagcagcctggtttttcctcctcactccagcctctctccataccatggtaggggggtgctgttccacagaagggtcaggtgtgtctgggaagtcctaagagctgcctggagtttcaaggcattcttaaaaacgttcttgcctaatcagatggtgtcagtagttggcaaagcccctttcatgcgtagtagctgggggtatcgattgatgtttttggcaacacctgtccaattgtaaaatgtacatcctcccttcccccaaaatgcacataccctgtgatccagcaattctgcttctaggatttgtctattagagagatcttttgccttgggcataaagaagtctgctaaaggatgtttgctgcagcactgtgtgcagtaacaaagacggaactcagctaaatgtctgccgttggggacttctcatccccacattgggttagtgtgctgcctttagaagaatgaagcctctgtatgttctcccatggaaacatgctccaatgtatgttgttaagtaaaa

SEQ ID NO: 410603 - DNA, 393 bp, Homo sapiens
cacacccagcctacaactattcctttattttccaattttgactgtttatacaaaagaaaatctcatatcctttatatagctaatgacactgtataatattgacagttttataatattatcacattgcttcaataaggtgatttttattggcactgaaaatgcattaaattatgcctaacagtttattagtcaatattacaaggcactcaaatttatctttaaaaatctggcacaggaacctgagtcaggatataaacacctatattaccagttgttattagaaaaaggctgttcaacttaaataaccgtgacttatacctatcaaaattccaatgaaattttcaacacaaaaaaaaaaactcccaaaatttgtagggaacataaaaagaccac

SEQ ID NO: 410604 - DNA, 614 bp, Homo sapiens
ttggttgcacaatacagccactgagcttcattctggtttggaaatgttacagctgcaattgataaggtcattttggattggtgcacactcctccatctggaccagagatgccccagtgactgggaaaggagttgtcccttcctttgaatattcagcctcatcactcttaatcccagtaggaggaacctgccgtctttcccattgtctttgcatcctcagctctctccgagcctcaattcttggacccttgggctctgccgatggtagcctatcctggtacgtgcacgcctgggataggtgactgcttgaccatgcccaaatgcgagtacgggaccaacctacttttaggggtgctcaggtaacgaagggggaactagccaggcacagtggctcacacctgtaatcccagcactttgggaggctgaggcaggcatatcacgagtacaagaggccaatatggtgaaaccccatctctattaaaaacacaaaaattagctgggcatggtggcatgtgcctgtagtcccagctactcaggaggctgaggcaggagaattgcttgaacccaggaggcggaggttgcagtgagccgagatcacgccactgcactcctgcc

SEQ ID NO: 410605 - DNA, 373 bp, Homo sapiens
aaatacctagtttctaccagagacagtcacaggcactgtacttctactctggtttgttacctgtgttcttaaaaaaattaaatgctacattttagtaagaggttagtgaaataaaattttaatttttcccatcagaggacatggagcccttgaattctatcccagactcccagggtcttccaggttaacaagtcctgcactaaggaattggctcagtaaaacctcagcattctcacaggaagagcctaaaaaggagactgggataaattagtgagaggtccaaattatgcaattttcttttaaaataaatgcagttttattactttccacttgtagccattataggcagtagattaaatgagtttctagagaa

SEQ ID NO: 410606 - DNA, 485 bp, Homo sapiens
attttcaaaaatgttaagtggatggacaaagatagtcatagtagcatgacagaaggttgaaactgaagcaatcagaaaagtaataataatgaaaaggagtctgagctgctgatccccagaaatgcccagaaatgagagatattaaaggtagggattaaggaagtgactaaaaacattaaaatgggggttgaaagtttgtaaatggaagaattgggctcccagattctttcccacatcatgaagccaggcaactaccccggcttcattttgtcaaagacttgagatatactttgtgaattctgtaattcaactggagaagtactggtcttgcaaatcctaagatcagtttaggacagaaagaaggcactctaggctgggcacggtggctcacgcctgtaatcccagcactttgggaggccgaggcaggtggatcacgaggtcaggagatcgagaccatcctggctaacacggtgaaaccccgtctc

SEQ ID NO: 410607 - DNA, 386 bp, Homo sapiens
aaaacattagcagagttctcattagcatgcataaagaaaaagcacaatggaactagaccaagtggttttcacataagaacagactggaagggctaggatttttcagtttggaatgaaggtttggcaaagatataactacttcttaagtttgattatgggatatgggttaagggcagattagcttatttaccaaattctgtggcatcctacttcattttcacctcccacctcctacacagagtggagatacggtcctaagtataaacaagggtactgccttttgaaagatcatgtccttgcactattaacggtatgaaatggtggctcacgcctgtaatcccagcactttgggaggccaaggtgggtggatcatgaggtcaggagat

SEQ ID NO: 410608 - DNA, 780 bp, Homo sapiens
aacattttttttaaagcctttgtgatatgaagcaaacgaacctcttacattgctggtgggaataaaatggtacacaaatgttagaaaacaaaattggcagattcttttaaagtaacatatatccttggcatatgacctagcaattccactcttacttagtcaaggaaaacatattcacccaagacctgtatattaatatgcatagttgttttattcatgatagccaaaactagaaacaaccgaaatgttcatcaagtgagtggataaacaaataggatccatacaatagaatactacttaacagtaaaaaggaacaaaccactgataaatgcagcaacatggacgagtacatactgtacgattacatttatttgaaattttagaaaaggggacttacctactaaaagcagatcactggttgcctgaggccaggagagagtcaggaattgactgcaaagaaaaatgagagaactttctggagtactggaaatattttagatcttctttggagtggtggctacactggtatataaatttgtcaaaactcatccggtgcatgatcctgaaagcaaaaactgcatttaaaggggtacattttactgtatacaaattgattccaaatccatcttgttctagagcccctgctctttcctcattgtcagccctcctcatttgaagaattcttaggaggcctgagttgagaaagatcctgactctgagcttggaaatgttgggcttgagcaactgaatggccatccctacagatggacaagaatagca

SEQ ID NO: 410609 - DNA, 620 bp, Homo sapiens
tgtgccagttagggttaagtgtttttaatcgattgcagtgccttatggagaaaagaaaatatagatatatatatggcatagtgcttagcacatactagctatccctcttgatgaattaatgagtacttatgtaaatgacaaattaggcgtgtacataaatgacttacaacattttttttaaagcctttgtgatatgaagcaaacgaacctcttacattgctggtgggaataaaatggtacacaaatgttagaaaacaaaattggcagattcttttaaagtaacatatatccttggcatatgacctagcaattccactcttacttagtcaaggaaaacatattcacccaagacctgtatattaatatgcatagttgttttattcatgatagccaaaactagaaacaaccgaaatgttcatcaagtgagtggataaacaaataggatccatacaatagaatactacttaacagtaaaaaggaacaaaccactgataaatgcagcaacatggacgagtacatactgtacgattacatttatttgaaattttagaaaaggggacttacctactaaaagcagatcactggttgcctgaggccaggagagagtcaggaattgactg

SEQ ID NO: 410610 - DNA, 1091 bp, Homo sapiens
caaagcagctctatacatcctgagaaaacatttggggagtgatatactgtagtctttagtactcatcttatgagaaggctgcatgtgtgcctttaggatgcagacattgatcctggctttcactcagtttaattaggactctttaatacatctggttttaggtggtggagaacatgactttcactctgcagattcaggctgcctaataaagatagccctgtagacaatagaaaggaacttagattgagggtcttgctgtcataactgaaccatattcgtatggtgttttagtatggtgaaaacacttaatgctgtctaggaaaacatttgaatatgttgggaagtttagttagattatggcatgaactcaaatccataagattttagcattaaaattatagatttgccatgtaaatgtatttaattaataacattgatcatgatcacttacatctctgaaggaaatattaatgctctgcaaaaaagaagttaacttcttttataggttttcttgttgttgttgcatgacaacaaaaatgtcttcaaggcatagatccaaagttgctttctgtattggaaaaaataatataattgaaaacgtgattagcgaggagtttctacgtacttctccaatatgaatttgcctatggatgcctggtctgtagagccttcaagaaacgtaactgaattaggaaaaaaaacaacacaacaacaccaaaaaaaaaaaaaaaaaaaaaagggggggggggaaaaaaatacccccggggggccccattttggggcccccgttttttgggacaaagggggcccccaaaaggggggcggaaaaaaaaagagaggaggggcggcgtgaacccgcgcggccggggaacaggccgccgggacttcggggaggacccctgcgggggcgcgctcagggaccccccacgaaattaagcccaggaataaactcggtcacgggcaccggtagcgcgagaatgcttcgcttttgaatccgagcgcagtatacacaaagaagcacagacgacccaacacagagtccaaatcacataacacaaaaaacagagatagtagaagtcaggacgagctac

SEQ ID NO: 410611 - DNA, 390 bp, Homo sapiens
ctccaccatacagttctgtacagttcttcagaatctacagtcctttgaattcagaacagttcagtcgtggaaaatgagtgcacctccaatcaccatatgctcagtctacatatctagttaaatacctacatttctttcaccagaggggctatccttttgttgcttatctgcagtttccaatttggtatattcagccatctagtcatttcagtaagaaagtgaatcctgggggactaaagttttttggatctcttaaattctaaaaagtttttgatctgtggatgttgctcagtaaacttcaagtttcctgtacaatctgactatatcaaaatcaactaaaactgtgtttctactctttcctcaaacaaacatgaaagcagtgcttgggat

SEQ ID NO: 410612 - DNA, 296 bp, Homo sapiens
atcctactcaactcatggagagatatattcatctttatatccctagtgcctagtaatggacagagcctcaaatatagtgggagcaacccactgttgaactgaacttaatctccaagagatcacctcaagcaattccaattaagaaacaaattcacaaaagtccaagagaggaccccattaaaaacagatacaggtaattcagttaccatgcatatattctaactagccatagcctcctctgcaatgtccagaactacccacaccataccacaccactctaccctactcaacaatta

SEQ ID NO: 410613 - DNA, 188 bp, Homo sapiens
agcttcaacatgggaaagggaaacgaagacccctatctccactgctcctccatccaatgttccactgaccagccccctttccaacagatctcctttacaggaaagggctcagatgagaagaaaccgttcaaaggaaaaggcaagaccgcctcttcccattccagtgagaagcacatacaaaggcaagg

SEQ ID NO: 410614 - DNA, 382 bp, Homo sapiens
taaacctttaacaatagaggtattgaaagttttctgaatactatcattgaattgatatataagtatgaaccccttgaaaatagtaaaattatctggtaatcacttctgatcatgaatttcaccacttttcagatggaaagagaataacgtctctaatttggatccagaaatctgagattctggatttaagggaactggtgttaagtgcatttgttgataaaagttaatcttactgggccaggcacggcgacgcatgcttgtaatcccaacacttttggaggccaaggcaggaagatcacaaggtcaagagatcgagaccatcctagccaacatggtgaaaccctatctctactaaaaatacaaaaattagctgggtgtggtg

SEQ ID NO: 410615 - DNA, 274 bp, Homo sapiens
attcgcggccgcgtcgacctatgacataggaaaccagttatagatctgatgtttttaatctccaatcctttcatttttcctctacctcttcaactccattgtagatttcacaagaaatcttcaaatatctgtagagagggagatattcaagcagctcttgattctggaaagcaagcatgaacagcacagtgcaattactcaggttctggaaaaaaagtgaaattcacagtgcacaatacctttcaaaagataaagtttaaggttgaacttaaat

SEQ ID NO: 410616 - DNA, 320 bp, Homo sapiens
ctgatttcattttcaaatgctgcacacagaggggctctcatctgtaaggaacggagcaccctcttcaactcctcatcatccttctctgttagtggtgtgagcactgtcatgacatcctctgttgactggcactgtggacagacatactcatcaatgagctctgcctcactctgcaagatgccaatgcagcacccatggtaccaattctgacaccgatcatggccaataaaaaatctgcaagatccgaaatggaaatgtgagttcaaaacagatgggatgatgttacttataataaagcatgcacctgaaaatttgctaaa

SEQ ID NO: 410617 - DNA, 358 bp, Homo sapiens
tgttgttttgagaccgagtctcactctgtcgcccaggctccgtctcaaaaaataaataaacaaatcagactaatttaatgttgttagctgaatcttctgagttattggcaaaaatacctgtgtatttaactttgaggctttttttcagtgagcaaatgatattcattggtaataaaaaaatggctaacaaggaaataactttagaggatggtgtctactatcttagttttcagaagtaatctagataaaatgttaaaatgaaagaattgagtaaatgaaattgggataaatgttttaggtaaactctttgtgtaacttaaaatcttaaaattgtttttgatgttcattggatatctgg

SEQ ID NO: 410618 - DNA, 1201 bp, Homo sapiens
gggctattcttaaacatttaacccttttccctaagattgtgacaaggaaataatgtatattattagcccctctattcaacattctaccagaattacactagctagtgtaataaagaaaaagcaataaaaaacatatagattggataggagaaagtaaatttgtttgcatttgtaggtaacatgattatgtacattcgaaaccccatggtgtctacaaaacaatatactaggacaagtgaatttagcaagattacaaaaatacaaggtcaatagaaaaaaaaagcaattattagcaatttttatactagcagtgaacaattagaaaatgaaaagcatagtttatattagcatcagacatatcaaatgggtagaatgagtctgttgtaagaaattaaagaagaccttgataaatggagagatatatttatggattgaaacactaaaaattgtttaaagctgcccattttccccaaattggcctttattttaatgcagtgtaagtttggtctttgttgttgttgtcattgaggaaatagacaaactactataaaatttacatggaaatgcaaaggttttagactagccaaaacaattttgaaaaaagaaaaaattggaagctttatgctatctgatttcaggactctgtataaagccacaataatcaagacagtgtggtactggcttaaggatagacaaatggatcagtacaacagaatagagtccagaagtagacccatacgtatgtggtcagttgttttttgaccagggtaccaagtccaacggggaaaagaaagtttttaacaaatgatactgaataactggatatctcaaacctttctcactgtttactgaaacattaatttaagattgattacaggtctaaatataaaatccaaaagaataaggctttgggaagaaaacataggagattatcttcacaacattgggataggtaaagatttcttggacatgaactaaaggcagtaatcatcgaagaaaaatatggataaattggacttcaaaaaagttaaaatttctgctcattaaaggacttttaaaaacatagacattgccaggttcagtggctcacaccagtaatcccagcattttaggaggcctaggaggaaggattgcttgataccaggagtttgagaccagcctgggcaacatgtgagacctcgtctctaccaaaaaaaaaaaa

SEQ ID NO: 410619 - DNA, 281 bp, Homo sapiens
acttatagactggagagaaatgtaaacaaacagatgccgtgttaaattgtaactgcgtaaagttaaccatagtacatacggcagtactgtaataattttgcagcaaccttcttttgctgttacggtgagctcaagtgttacaagtatccacttaaaatgctgtgtttaaaatgctctgtgatgctaattgtctctgagctattcgtctctccagtaaattgtgtatcacagtaaaaagtgatctctcgtggttcttgcatagttttcattgtgtttagtgc

SEQ ID NO: 410620 - DNA, 240 bp, Homo sapiens
tgccagagggctcccactgcctattcagtccagacaatagtgaatctccccactctgtgcccagcagtctcagagccagctctgctcacatcttactgtgtatctgtgtgccaataattgtatattcttgacaaaaatgttcttgagatgacacatgctccaaacacctctagactctgcctccgcctccgcccctccgttttccctaatggtacaaaggctgaaagaggatgactatca

SEQ ID NO: 410621 - DNA, 871 bp, Homo sapiens
gataatttattatttgggtattttccaataaatatatcttgtaggaaaacattgttgcttaaaaaaaagtgtgtccttttttaaaaaaatggtgaacaagttttgtctaattcaaagcttattaaaaggttatatataaaacaaggtaaaaggaaccagaaaagaaaaaaaatgtaaataaagttataaaaataaagaattttttcaaggttaaaaagctgaaaaagaaataattttatataagaaagaattttatatggtaaatttagtcctaaaataaaataactggttgtttaacaaggagggatgttcaggacaaaccagaaagtccaagcatgtcatgaacattggtgtaagtcatgataagattttatatatatatatacacacacacacacacaccccaaaagcttttatataatcaagttgtcatattattattaagttttggtttgcttagggaagaaagagctaatttttaaaaaatcaaggttattacatccatgtatcttcctgtgtatgcttttaaagtccttgtaacattgagttacagggctttaactcctgtgtctgaaaaatcacaaacactgatgacaatcaaagcctcatcttaaggccccgtagaagatgccaatcaaaataaactgcattcctgaggcactaggcaagaaattaaagctattcaactcctcaaggcccagggactattgcggaagaggtgggcgcgtaagattgtaagggccgattttgaaagatccagtaagttcagtttctctatgaactaatcattcaagtcaaaggcacactgatgcaaaatcagtatatggacccctgtgtctgattagcaaggttttcttgaagcattaaccaa

SEQ ID NO: 410622 - DNA, 1126 bp, Homo sapiens
aggaaaaggtactcagttccttaaatggaagaaaaaaattttagtgactatttgattgccattttaaagataaacattgcaaagacagaatcaaaaaatatcattttttccttcctcttacaaaggaacaagatacatcagcagttatctttcagaaccatagttactgatttccaatagaataaaattgaatattctttatactgctactgattagtaagtaaactaatatgaaaagaccactagacaagaaaggtcatcttttttctggtttcaaactatgtccctttatagcaataacaatgtttaaaattactagttttaaaatgttttgaaatatagtaaaaatcaaacaaaaaccaaacttaatatttgcttggttaacttcataatgccaaattgtaacagaaacatcagtatctgacagctattttagaaataatagctagtaatgactgaactatgaacttctacgttatatagcaccattaaatgagaagcctcattaaaaattataaattatcaggctcccttacaagctaataactgaaaagaatgctactctcctgagaatatcaagattataaaacttttgtattctgcaccatcacccaatactatatatatccattcaatattatattgatttatttctctcaaattttcatatttaatataatccattatgaaaatattcaaataaactttcaaaaactgaagtgcattgttaaaaaagatcatttcaccagtttttctaacataaatatgaagcttgcttcttcctctcaaataacacaatatgaatatgtcattgtatggtatcacacttctagctaaacctattctaaggcgcttatcattcagataaaggtagacttcttctgaagcacttgtccagggatggtgttcaaaacttgttttcttgccaaatctttcctttccctcatcttcttcatctcagtaaatcacacaccactatctatctagtttctcaagccaggaaccaggaaatcatttctgacaattttcttcccacatccaatccatcatgaatctgtcagttgttcctcctccacacctcaccatctcctctcgattatatgacgtcgggtacgagctcgaatcg

SEQ ID NO: 410623 - DNA, 498 bp, Homo sapiens
tgtcagttgttcctcctccacacctcaccatctcctctctaaaatatatgtataatctggctaccatcatgtttttcctggactactgtagtattacaatatctttactttcacccttgcctttctccaatccattctcaaagtagcatttttaaaatgtagattaaagcgtatcacttctctaattcaaaatcttcaacgactgcaatgtctttagtaaaacctgtaagtctttaatatgccccacaaggccctgtataatctgctttctatctctcatttcagctcatatggttttctgccttattatgcttctgccatcctgaacttttcatttctttcaaatattaagttctttcctgtgtcatagccttcaaacatatttttctctcttccaagaaactcttttctctcctgacctgtcttcttattctgtttccacttagaatcaccaactgagggaagccttctctgagaatacaacattaatttctcccc

SEQ ID NO: 410624 - DNA, 502 bp, Homo sapiens
ctgcccaatctctgctgtaagtcctttccacagcctggcatttgaaagtccaccttcagtgaaaagatagaagaattggaaaggaatatctgcacaggcattcttgaagcctgaattctgcatgaaattaattaagtatccagattcaatagagatttacatgatttatgtggatctcccttgaagaagcaggtttctattataatgaaattagttgaatttcaaattcatcaagcaggtctattacaggatcataggatcagctgattggtttcattctcaggaaagtagcagcatgaagttaattttataaataagaaaaactatgaaatgcttcagttctgacacacgaagcctttgcacttcagtatttcaacaaatatgtctatattaaataagatatcatgtaataatgtttctcttaaatcaatgctataatggacttcacacatcacaaatatagtatggaattttaggtctaaatttagtgtaagacttgaaa

SEQ ID NO: 410625 - DNA, 398 bp, Homo sapiens
ttaaaatttgaagttctgaagactctttaaactcataaatggacaattggtggtttttgttaatgttacatgtaatttttttagctcttttaacataaacaagagttaagtgttgagaaacaacactagctgcacggattatatattaaaaattaagtattagttggctgggtgcggtggctcacgcttgtaatcccagcactttgggggggccaaggcgggtggatcttctgaggtcaggactttgagaccagcctgaccaacatggcgaaaccccgtcactattaaaaatacaaaaattagctgggcgtggtggcgggcacccgtaatcccagctacttgggaggctgaggcaggagaatcacttgaacgcaggaggtggaggttgcagtgagccg

SEQ ID NO: 410626 - DNA, 637 bp, Homo sapiens
agtggcctttcctaggaggctggctggctttctgcttctgggaggctacagttccaccgcagaaatgtgcaggtagcatgtttatctttgaatccaagcctgtgggggaccatcatccattacaaggagtggggtggaattgtgaactattcagaagagcagcaagccaatgggaacatgtctaggaccggggaagccttgtagtttttcttaagcacactgccacgcttcaggccagcccttctgggccacgttggtaacagcaagcatggtctctggaaagccttgtgggaacctccctacccctcctgctggctaaattcgcggccgcgtcgacgttcgtccataccaccctgtgaataatttatttgtatcctacagtttatatattaagttataatcagtttacttgacaactacttctccactccaaaaaaaaaaacaaaaaaaacacacaaaaaaaacctacaattttttaggaaggggactaggtcttccattttttattctctcagtgtttgttattttatcagccttgtaataagtgtttattaaatgcttggggaatgaatcaatgaatgaatgaagcaatcatcaatcaacaaggaacagatctgcaagactagatttaaaaaaa

SEQ ID NO: 410627 - DNA, 347 bp, Homo sapiens
gccttttccctgtctctcctagggaatatcacatcttgagttagggagaaattgctcaggaagaacaggctttgttcctctttcctctggaagcagtatattccttcaaagctttagtgcagtgagtgacattgcccttgaggtatgtaacccagggtgggctgcggttaagtttccctcagctgtggtgcaattgtaccacgctcagtccagactccttctgccctgggtacctcagctgtggtgcaattgtaccacgctcagtccagactccttctgccctgggtacctcagctgtggtgcaattgtaccacgctcagtccagactccttctgccctgggtacct

SEQ ID NO: 410628 - DNA, 270 bp, Homo sapiens
cttcagttctatgggcatctggcttgttggaaaattggcctggtttcattttcccatcctccctttattttggacctccagttacacattttaggccatttgatattgtctcacagtcactaatgctctggtaattgttttcagtcttttttttttctttgtgcttcattttggattgtttctattgctatatctttaagttcactgatttattaaaatctgccagtaatcttcagtgaaattttcatttcaggtgttgtatcatctcta

SEQ ID NO: 410629 - DNA, 662 bp, Homo sapiens
tagtgaattcatttcacaagtgacctatcgcaaagttatttacaaaaaccagttaggatagtttatttatagtgtgttaaagaagcattgggaaatcagctaacataatttgtacatctgtgagacttaacagcttttcctagacatttgctcaatgccagcactgtcttctacagggcatgaggcacataaatagaacctaatgggtgcaaggggctggcagggggcttttggcccattttatttgtttgctgactttactgtactcacattaaagattactgctttgactggttccttaattttgagataactgcattagatcttaatttaactttctgcctcagtatatgtgtttgcgatagaacttgcaaaaaaaaaaaaaaaaaaaaaaacaaggcaaaaccaaactgaaacaaacgaaaacgagacaggaagatgtcacggtgactcaagtacacgtctcacggtcctgcctgtaacaacaacaacataaagtagcttcgaaataagtcattatgagtcgcagggggaaatgaactgacaggaactcatagtgttttagctataaagaggctatgtttctgtccatggagggaacaggatgtttctttcctctttttctcaggtgatgtaaaaaaataaatttatatttaaatgct

SEQ ID NO: 410630 - DNA, 290 bp, Homo sapiens
atgaggagcttcttatgttgtagctggtcatataagaagaaaataaacacaattggatataaactgcctgcttcatacacacagatccaaaccaattcttggggaatgtgctggaactaatgtcacaccccctttggcacattccacttggcagagattgtgtctggagtcctttgtccctccttcaagaaccaaaactccctctggtcacaccccagctgttagattaggaaaagctagctgtgactccttgcatcactgtcaagcaacctaacatgtggcttcccaac

SEQ ID NO: 410631 - DNA, 384 bp, Homo sapiens
gttggggaagccaccccacctctctgagcctcagcttccccgtctggaatttggggatgatcttcgtggctcctggggtgtgcgacgaggccttggttgatggtggggcagaggtagcctagccccaggaacacagtaggtcctcagctggggagagttctacttggaagtcttgcttctccttgtcccaacctgcggggctgtgggaagacccctcagctggtgtgtggcctcaccaggttccttctaagaggatgcaaaagcaagttttcatttgactcggtttcccagaatgtgctctcagagcccaggccaggcaggaggctcttgagaaaaggacaaaaagacatggtggctcacacctgccatcccagcactttggga

SEQ ID NO: 410632 - DNA, 455 bp, Homo sapiens
  misc_feature (30)..(30): n is a, c, g, or t
gctgccgcctactactactaaataggcggncgcgtcgaccatacacatgcatttgaaaagcattaacaattggcctgaataaatatataaagaactattaaaactcagcagtaagaaaacagctaaataaatggacgaaatatttgaactgacaccttgaagacaaaaaacaggctgagcccggtggctcacacctgtaatccaagcactttgggaagccaaggcgggtggatcacctgagttcagaagttcgacatcagcctggccaacatggctaaactccgtctctactaaaaatataaaactaggccggttgtggtggtgcacatctatggtcccagctactcaggaggctgaggcaggaaaatcacttgaacctgggaggcggaggttgcgccactactctccagcctgggcgacagagtgagagtctgtctcaaaaaaaaaaaaaaaaa

SEQ ID NO: 410633 - DNA, 255 bp, Homo sapiens
cgtcacgtgaagatgtgcttgcttcccctttgcccttccaccgtaattgtgagtttcctgaggcctcaccagccatgcctcctgtacagcctgtggaactcttgaaacatggattttttcctaataattgaagacggttcaagaaaatatcttctacaagaaaatatgcaactaggagtcctgcaatgaacgttgtttgctttcttcaatatcaattataataatattttatctttaaaatcagaattttaccga

SEQ ID NO: 410634 - DNA, 2791 bp, Homo sapiens
gcaaccgggcgcggggcgcggagtcggcggggcctcgcgggacgccgggcagtgcggagaccgcggcgctgaggacgcgggagccgggagcgcacgcgcggggtggagttcagcctactctttcttagatgtgaaaggaaaggaagatcatttcatgccttgttgataaaggttcagacttctgctgattcataaccatttggctctgagctatgacaagagaggaaacaaaaagttaaacttacaagcctgccataagtgagaagcaaacttccttgataacatgcttttgcgaagtgcaggaaaattaaatgtgggcaccaagaaagaggatggtgagagtacagcccccaccccccgtccaaaggtcttgcgttgtaaatgccaccaccattgtccagaagactcagtcaacaatatttgcagcacagacggatattgtttcacgatgatagaagaggatgactctgggttgcctgtggtcacttctggttgcctaggactagaaggctcagattttcagtgtcgggacactcccattcctcatcaaagaagatcaattgaatgctgcacagaaaggaacgaatgtaataaagacctacaccctacactgcctccattgaaaaacagagattttgttgatggacctatacaccacagggctttacttatatctgtgactgtctgtagtttgctcttggtccttatcatattattttgttacttccggtataaaagacaagaaaccagacctcgatacagcattgggttagaacaggatgaaacttacattcctcctggagaatccctgagagacttaattgagcagtctcagagctcaggaagtggatcaggcctccctctgctggtccaaaggactatagctaagcagattcagatggtgaaacagattggaaaaggtcgctatggggaagtttggatgggaaagtggcgtggcgaaaaggtagctgtgaaagtgttcttcaccacagaggaagccagctggttcagagagacagaaatatatcagacagtgttgatgaggcatgaaaacattttgggtttcattgctgcagatatcaaagggacagggtcctggacccagttgtacctaatcacagactatcatgaaaatggttccctttatgattatctgaagtccaccaccctagacgctaaatcaatgctgaagttagcctactcttctgtcagtggcttatgtcatttacacacagaaatctttagtactcaaggcaaaccagcaattgcccatcgagatctgaaaagtaaaaacattctggtgaagaaaaatggaacttgctgtattgctgacctgggcctggctgttaaatttattagtgatacaaatgaagttgacataccacctaacactcgagttggcaccaaacgctatatgcctccagaagtgttggacgagagcttgaacagaaatcacttccagtcttacatcatggctgacatgtatagttttggcctcatcctttgggaggttgctaggagatgtgtatcaggaggtatagtggaagaataccagcttccttatcatgacctagtgcccagtgacccctcttatgaggacatgagggagattgtgtgcatcaagaagttacgcccctcattcccaaaccggtggagcagtgatgagtgtctaaggcagatgggaaaactcatgacagaatgctgggctcacaatcctgcatcaaggctgacagccctgcgggttaagaaaacacttgccaaaatgtcagagtcccaggacattaaactctgataggagaggaaaagtaagcatctctgcagaaagccaacaggtactcttctgtttgtgggcagagcaaaagacatcaaataagcatccacagtacaagccttgaacatcgtcctgcttcccagtgggttcagacctcacctctcagggagcgacctgggcaaagacagagaagctcccagaaggagagattgatccatgtctgtttgtaggacggagaaaccgcttgggtaacttgttcaagatatgatgcatgttgctttctaagaaagccctgtattttgtgattgccttttttttttttttaagatgctttcattttgccaaaataaaacagataatgtggatggtttaagggttatagtattatagtttaaataataacaacaaaattcttcccaggaactctgctggaaggtaaattaaaatacttgtttttccattggtaaaatattgttgcactctgtgaaccaaaagacagtctaagttggaggacatagaacggaactcatcttaaacatactccccaccccgtcttggcctcctcagaccactttggccatccctgcatttggggccgctatggtaatgtgaatgcactgggtacaaacaccgcctgtctaggaccacatttggaattcctgcaggtggccttttgcagcttcaggcaatatggaacaaatgaaggtttatgtgactctaatagaagtaattgttgataggtgttcttcagatccacttctgtttctgattgagttaggcatctctttcatggtaaaacccttttcattaaacacaaagaaagctttttttttttttttttttttacggggcggggaattggccggggggggctttgggtctgtcctccaagggatcattattatttaaatctttgcttgtttctgtgttgaagacagggtgctttcaaatagaggtaatttgctcttgtgttgtaagaggaacatgtcaacaaagataggaaatgagggtgatcgtgca

SEQ ID NO: 410635 - DNA, 368 bp, Homo sapiens
ccagttgtacctaatcacagactatcatgaaaatggttccctttatgattatctgaagtccaccaccctagacgctaaatcaatgctgaagttagcctactcttctgtcagtggcttatgtcatttacacacagaaatctttagtactcaaggcaaaccagcaattgcccatcgagatctgaaaagtaaaaacattctggtgaagaaaaatggaacttgctgtattgctgacctgggcctggctgttaaatttattaggttagtatcaaagtgaacaaatacatgttttatgactcttttctgttactttttattttgtagcgcagtgcttctaggatatttagtagaagaggaatatcattaatttt

SEQ ID NO: 410636 - DNA, 2625 bp, Homo sapiens
cgtcacgtgaagatgtgcttgcttcccctttgcccttccaccgtaattgtgagtttcctgaggcctcaccagccatgcctcctgtacagcctgtggaactcaaacttccttgataacatgcttttgcgaagtgcaggaaaattaaatgtgggcaccaagaaagaggatggtgagagtacagcccccaccccccgtccaaaggtcttgcgttgtaaatgccaccaccattgtccagaagactcagtcaacaatatttgcagcacagacggatattgtttcacgatgatagaagaggatgactctgggttgcctgtggtcacttctggttgcctaggactagaaggctcagattttcagtgtcgggacactcccattcctcatcaaagaagatcaattgaatgctgcacagaaaggaacgaatgtaataaagacctacaccctacactgcctccattgaaaaacagagattttgttgatggacctatacaccacagggctttacttatatctgtgactgtctgtagtttgctcttggtccttatcatattattttgttacttccggtataaaagacaagaaaccagacctcgatacagcattgggttagaacaggatgaaacttacattcctcctggagaatccctgagagacttaattgagcagtctcagagctcaggaagtggatcaggcctccctctgctggtccaaaggactatagctaagcagattcagatggtgaaacagattggaaaaggtcgctatggggaagtttggatgggaaagtggcgtggcgaaaaggtagctgtgaaagtgttcttcaccacagaggaagccagctggttcagagagacagaaatatatcagacagtgttgatgaggcatgaaaacattttgggtttcattgctgcagatatcaaagggacagggtcctggacccagttgtacctaatcacagactatcatgaaaatggttccctttatgattatctgaagtccaccaccctagacgctaaatcaatgctgaagttagcctactcttctgtcagtggcttatgtcatttacacacagaaatctttagtactcaaggcaaaccagcaattgcccatcgagatctgaaaagtaaaaacattctggtgaagaaaaatggaacttgctgtattgctgacctgggcctggctgttaaatttattagtgatacaaatgaagttgacataccacctaacactcgagttggcaccaaacgctatatgcctccagaagtgttggacgagagcttgaacagaaatcacttccagtcttacatcatggctgacatgtatagttttggcctcatcctttgggaggttgctaggagatgtgtatcaggaggtatagtggaagaataccagcttccttatcatgacctagtgcccagtgacccctcttatgaggacatgagggagattgtgtgcatcaagaagttacgcccctcattcccaaaccggtggagcagtgatgagtgtctaaggcagatgggaaaactcatgacagaatgctgggctcacaatcctgcatcaaggctgacagccctgcgggttaagaaaacacttgccaaaatgtcagagtcccaggacattaaactctgataggagaggaaaagtaagcatctctgcagaaagccaacaggtactcttctgtttgtgggcagagcaaaagacatcaaataagcatccacagtacaagccttgaacatcgtcctgcttcccagtgggttcagacctcacctctcagggagcgacctgggcaaagacagagaagctcccagaaggagagattgatccatgtctgtttgtaggacggagaaaccgcttgggtaacttgttcaagatatgatgcatgttgctttctaagaaagccctgtattttgtgattgccttttttttttttttaagatgctttcattttgccaaaataaaacagataatgtggatggtttaagggttatagtattatagtttaaataataacaacaaaattcttcccaggaactctgctggaaggtaaattaaaatacttgtttttccattggtaaaatattgttgcactctgtgaaccaaaagacagtctaagttggaggacatagaacggaactcatcttaaacatactccccaccccgtcttggcctcctcagaccactttggccatccctgcatttggggccgctatggtaatgtgaatgcactgggtacaaacaccgcctgtctaggaccacatttggaattcctgcaggtggccttttgcagcttcaggcaatatggaacaaatgaaggtttatgtgactctaatagaagtaattgttgataggtgttcttcagatccacttctgtttctgattgagttaggcatctctttcatggtaaaacccttttcattaaacacaaagaaagctttttttttttttttttttttacggggcggggaattggccggggggggctttgggtctgtcctccaagggatcattattatttaaatctttgcttgtttctgtgttgaagacagggtgctttcaaatagaggtaatttgctcttgtgttgtaagaggaacatgtcaacaaagataggaaatgagggtgatcgtgca

SEQ ID NO: 410637 - DNA, 323 bp, Homo sapiens
atcacaagacattaatgaagacctcaaaccctgaatataatcaagcttttagctctaatttccaatctataagaaatgtagaggatagaggaacaaattaagtgaaaccacgaatagacaagatgataaaatctagaatgtggggcctgggcacagtggctcatgcctgtaatcccaacactttgggaggctgagggaggaggattgcatgagtccaggagttcaagactggcctaggaaacatggcaagatgttgtctctacaaaaaaaaattaaaaattagccagggatggtgacatgtgcctgtaatcgtagctacttgg

SEQ ID NO: 410638 - DNA, 849 bp, Homo sapiens
catgttggtctcgaactctgacctcaggtgatccacccacctcagcttcccaaagtgctgggattacagaagtgagccaccgtgcctggcctaaaatgggcatgtttcagtccttatgttattcagcagcatctaacactgttgaccacccctatttcttgacattatctgtttttggtttctacactaccacattcttttatttccttccctacttctttggccttttctgataaatttccctcatttatttcttttcctttgtcaactgacttttgttattgttacccacatttacatccttacttgttctgtatatacaccctccagatatctccagttaaatgcctcacaaagggctcacaattaacatggtcatcatcatctgctttcatgcctttccccacctttaattatctcttgaaaggcaccatcatccattaccctatagtctcaaagcagcaatcatcctgtatttctcccttcttctcacgttaatcaatcatccaaatcctggatttctctctagcacctatctttcatccctcacaatcatgtagctgccttataatctttggctccagtctttaggctgccaacacattatatatgccttactgattctagaagagatctctataaaacagaattctactcaagtcatcacctgtagatttagcagctccccatcacctttaagatcgaatcaagctctttgctatgatacaactcttcatgacacagtctctaagcctcaagtcatgttcctacctactttatcatactttatgtaggcaaattgtttgtgttacagtctttcatgtcttatcttcacatatctcatttact

SEQ ID NO: 410639 - DNA, 271 bp, Homo sapiens
atcctggcagagaggaaaaaagatacatgacaagccatgtgctggcccagaagtaacacatttcaggccacattttatcagccaaagcaagtcacccctgagataattgggtgtggatgtataatcctcccccaggcaggggcatgggaatgtttggcaccagtaatacaatctaccacaggcatttcaagcaaagcatgtctaaaccttctatttattgttttatccccatccaaaacctattcctccccaattttccttttattctatt

SEQ ID NO: 410640 - DNA, 402 bp, Homo sapiens
atcctggcagagaggaaaaaagatacatgacaagccatgtgctggcccagaagtaacacatttcaggccacattttatcagccaaagcaagtcacccctgagataattgggtgtggatgtataatcctcccccaggcaggggcatgggaatgtttggcaccagtaatacaatctaccacaggcatttcaagcaaagcatgtctaaaccttctatttattgttttatccccatctctactaaaaaaaacaaaaattatctgggcatggtggcgtgcacctatagtcccagctacttgggaggccgaggcaggagaattgtttgaagtccagaggcgggggtttctgtgaaccaagatcgtaccactgcactccagcctaggtgacagagtgagactccatctc

SEQ ID NO: 410641 - DNA, 567 bp, Homo sapiens
ttcatctcaaatattataataataaaaataaaatgcatcagtgacctaaatataagtgctaaaaccataaaactcatagaagaaaacaaagggataaatcttcatgaccttggattaggcagtggagtcagatatgacaacaaaagcatgaacaacaaaagaaatattgggtaagttaaacttcatcaaaatcaaagacttttgtgctttaaaggacattattaagaaagtgaaaagcaacagaatgggagaaaatattagcaaatcatagataagggtttactatccagaatatataaagaactcctacaactcaacaataaaaaggccaacaacccaattaaaaatgatcagggttcggtgcagtatctgtaatctcagcactttgggaggctgagatgggaggatcatgggaacccaggaatttgagacatgcctgggcaacatagtgagacttcatctctataaaaaacttaaaaaattagccaggcatggtggcacacactgtgtaccagctactcaggagactgaggtgggaaggttgcttgagtctgggagggagaggtt

SEQ ID NO: 410642 - DNA, 333 bp, Homo sapiens
aaaatggaggttaaaggcagaaactctacaaccaagccacctgtatttgagtccagtcatgtaactttggaaaatttatttagtctcttttgccttgggctcctcacctgtaaaacaggaagagattctattttatcaattctaacatgctttcttattttaacttctttaaaattggggtgcatcttacatttcagtcttacaatccaagacatcttgcaattgctattattgcaattgcaatagagatacaactgtgtgaaagctttttgttagcatcttctagcaaggtcaagaatgcatcatcaatatattttagactcaatgaagcac

SEQ ID NO: 410643 - DNA, 680 bp, Homo sapiens
tgaggtagggcctcgctctgtctcccaggctggagtgcagtagcatgatctcagctcattgaaacctccacctcccgggctcaagtgatcctcctacctccgcctcccaagtagctgggactataggcacacaccaccatgcctggctaatttttgcatttttggtagagagggggtttcaccacgttggccaggctggtcttgaactcctgagctcagatgatccacccgccttggcctcccaaagtgctgggattataggcatgagccacggcacccaggctgccatgatattccttacagtgttgtggagtcagcacagtgagtttgtaagggcttaagaattctgatacttcttgagcatgtcttcctaggtaccgatccttaacctgaactgctgtgagaacggtaaacctattaaaatgcaatgtttgtatgcatcattttacaagcacctgcactactgacacctgtcttagattataaatctctgagaggcagacactgtgtccccctatagtaagtctatatgtcagcaaagtggcaaatacaaggggagtgatttgaggagatgtgtaaatatcacagggctacaatcccaacctgacatcactgggttcaagtcaaggaggtctgagtcacagagttctagaactagataaccttaaacatgatctttt

SEQ ID NO: 410644 - DNA, 855 bp, Homo sapiens
agcctctcttctggtaattatgcccatgacactgtcatttgcaggccttctttaaaattccacttgggcagttaaaagaacataaaatgactttcttagaagctttcctgaaatttaaattaaccacaatcattaaacattccctatgtcaataatttgactttcctactcaaagttttttaaggcatcagttttgtctagcgtggtttttttctttagaaaccatgttggttatgtgtgaattgcccatctttttacaatctctgctcaataagtttatacaatgagtctctggtaagagacagacgtgggagtgaaaatatttctccttaaccacaggaagggattttttacaatgcctttagctgcggataccgagggtacctcacccagcaggaaggagagggaactatacttgggctaaacactttcataaactacttctcatggaaaagaaaatccaaatagtggaaatttctttaaaatatccatgtgccttgagatagaagaaagccctttcgtttaagaaaaatgcacttaaaattaatgaataccttgtgatccaaaaacattttatacatatacgttcaggtgttttgaagtggagtgaacttctatttatagagtgtgttgcgctttattatatagtattatgcatttacattgatgatcaaagaacattgtatctgtgcaggcatgggttccgaaaaggctgaaaaattccaggtgagccgtggcaacaacctctaaaggatctaggaacctaaagaggatctgccttttatttaatagaaatcttagaaacaaaaataactgacatggcttgaatgtcaattgtttaaaaaaaaaaaaaaa

SEQ ID NO: 410645 - DNA, 406 bp, Homo sapiens
gctttataaatgacatttaaaatttcattttattagtcccttgattctgtcttactttaataggtcttgataaagattaggctttttaaattttaatgaatatgaaattcattctgttgtttatggcttacaaatttgtagtatatgctgaagtcttcctccgtaagggatttatttgtttttctaaaactgaaggacagcaatgcatggtggctcatgcctgtaaccccagcactttgggaggccaaggttggaggatcacttgagcgcaggagttcgagaccagcctgggcaacatggcaaaaccctacatgcgggcatgcaccaccacgcctggctcaaattttgtatttttggtacaaaatacaaaagtgagccagacgtggtagtgtgtgcctgtagtccc

SEQ ID NO: 410646 - DNA, 734 bp, Homo sapiens
ggtgttttattttcttcttgtcataagtgtcatattcaaagatccataggttgagctgttgggttggacacatgaaatagaggggacaagatttcatctctttatttcccaccaactactggcagcctttaccttgggaaccaccttggctatttctgccaggaaacactattgagagctccagtcactgctgttttaaatgagactttgggaattgaatcccagtttccctgagcccactcttaatcctttccttctaccaactagacgatattcagatgtggttgccctgagatcagtgccataaaagaattaaaattggcagttcccttccacattatttgatcttaattacagctttgtgagagaagtagagcagttgttatatttcctttttcttgtgtttttcagtttttgaaaaatgatttcagagataggaaaattgagcgctaggccaggtgcagtggtgtgtacgtgtaattccagcactttggacggccaaggtgggcagatctcttgagctcaggagtttgagatcagcctgagaaacatgatgaaactcgtctctacaaaaagtaaaaaagtataggtggtgtgcacctgtagtcccagctacttgaaaggctgagatgggagggttgcttgagtgtggcaggttgaggctgcagtgagccagaattgtgccacagcactccagcctgcgcgacacagcaagaccctgtctcaaaaaaaaa

SEQ ID NO: 410647 - DNA, 666 bp, Homo sapiens
aaaccaagcaaggtaaagctgcccaaacacaccagccctttctcacatccccaggctttagcccctgcagcttcctcttcgtgtaaggcatacgatgtccagctcgtccatccaaggaatcagtatcccatttacctttggtgttcccagcagatggtctgtaagctttgaaactgaatgaataaagtgattttgcctaatgcagaggtgggtttcaaacccaagtcttctgcctccaaattcagtgtttgtttcatgacatcaagtaaagtagatagactactacagagaatttgggtatagtcttggtggcctgctggaatgccaatcttgaaatgatctacttggtttatagggctgcaggaagtgtgttggtgttttattttcttcttgtcataagtgtcatattcaaagatccataggttgagctgttgggttggacacatgaaatagaggggacaagatttcatctctttatttcccaccaactactggcagcctttaccttgggaaccaccttggctatttctgccaggaaacactattgagagctccagtcactgctgttttaaatgagactttgggaattgaatcccagtttccctgagcccactcttaatcctttccttctaccaactagacgatattcagatgtggttgccctga

SEQ ID NO: 410648 - DNA, 497 bp, Homo sapiens
tgtaaccaagttggtaacaacgcaggggaattcttcggtaaaattccttcctcttacaaaatccagctcaccctgcacagtcaacctaattgtcaccgaatataggagaatggggaaactaggatttgcgtgttcaagggcggacaagccagtccaaacaggcattccagtcattgggtgggtgacagccaaagaaggtacgtcattttccttcctaccacccccatctctgaacaattctacagggatgtctgtcagagtgcctacatactatttctgttgcttgtataaccctgatgaagcagtggtgcgcattgtccaatgaaccacgtcgtgtttaaacaacagtcggttaagcaaaataaataagtaaataataaaaattccatccttcctagtgactctccgaggacattggggtcatcaagttaataactccagcctgggggacagagcgagactccgtctcaaaaaaaaaaaaaaaattagccaggagg

SEQ ID NO: 410649 - DNA, 456 bp, Homo sapiens
taccagcgttgtcccactttagcccttgaggccacaaatgcaggaatagctacactcttgaagcaactgtaaccaagttggtaacaacgcaggggaattcttcggtaaaattccttcctcttacaaaatccagctcaccctgcacagtcaacctaattgtcaccgaatataggagaatggggaaactaggatttgcgtgttcaagggcggacaagccagtccaaacaggcattccagtcattgggtgggtgacagccaaagaaggtacgtcattttccttcctaccacccccatctctgaacaattctacagggatgtctgtcagagtgcctacatactatttctgttgcttgtataaccctgatgaagcagtggtgcgcattgtccaatgaaccacgtcgtgtttaaacaacagtcggttaagcaaaataaataagtaaataataaaaattccat

SEQ ID NO: 410650 - DNA, 517 bp, Homo sapiens
tgtaaccaagttggtaacaacgcaggggaattcttcggtaaaattccttcctcttacaaaatccagctcaccctgcacagtcaacctaattgtcaccgaatataggagaatggggaaactaggatttgcgtgttcaagggcggacaagccagtccaaacaggcattccagtcattgggtgggtgacagccaaagaagatccacctggtcacatcccaatttccccagggcatccgaagcaggtctgagcagccaaggataactacttagtctcctgctagaaaatatctcagttgttatccccactttatagatggtcaacttactttatctatctgatgattggctcctacagccagtaagtggtgaagctgagatgtaattccaaggctgctgatctccaaagccagttgtctttccaaatattagaatatactagtgtctgtggtctgttaaaaaaaatgatgacagtgcctttttaaataaaatttaaagcatgtacatgaaaaatactaaaa

SEQ ID NO: 410651 - DNA, 723 bp, Homo sapiens
ttttcatttttctacatatggatatcctgttttcccagcatcatttattaaagagactgtccttttcccccagcgtatattcttggtgcctttgtcaaatatgagttgactgtaaatacatgcacttacttctggggtccctatcctcttccattggtctatgtctctgtttttatgccagtactatgctgttatgtttattatagttttgtcatgtaatttgaaatcaggtggtatgatgtttcccgctttgttctttttgctcaggattgccttagctgtgccagatcttttgtaattccatgtgaattctaggattgtttttctatttctgtgaagaatgtcactggtgttttgattgtagttcacttagggtagtatagacattttaacaatattaatttttatcatccatggcatgggatattttccatttttcatatcctcttcaacttctttcatcagtgttttagttgcctcacagagatttttcacatctttggttaaatttgtattttgatatttttgtagctattgtaaatgaaattgttttcttgattactttttcagatagatctctgttggcatatagaaacactagtgatgtttatatgttatttgtatcttgtaattttactaagatgttatttgtatcttaaaattttacaaattttcagttctaaaagttttttggcagagtcttcaggtttttctaaatataag

SEQ ID NO: 410652 - DNA, 384 bp, Homo sapiens
ctgcctcggcctcctaaagtgttgggattacaggtgtgagccaccacacccagcaagcctggcctcaaacttctgacctctagtgatctgcccgcctccgcctctcaaagtgctgggattacaggggtgagccactgcaccttgcctgaactacatgacttctaaagtcattccagttctaaaattctaggcctctatgaacccaaatgttgtgtagagtgaagcagataaagtcactgttttatacagatatttaggtcctacctaagaataagacctccttctaaatggtaggtcagaagaatcctaactcgcataggttgaacaagatataaaagctatggaggctggagtcagactctgttttagttacctttggccgca

SEQ ID NO: 410653 - DNA, 486 bp, Homo sapiens
tgtctctctgtgatggagaacaaaggacatagaattaaggaattaaccttagagaatgtttacattttaaagagtggagaagaatcaaagagtagtcaaatatgatagaaaatcctgggcgactatttctgagttctgttttgttttgtttttttgccctttaagtagctctctttagtaggaaagggaagaatattgacttgggttagttagttctgatttcaaatttcccctttatcacttacttggcagtatttaaccttttcagagtgtttcactgtcagaaaataggaattcagggttgtgaagattacataaaataaatacataaagcacagtgcttgtgacagagtttctttaacttcattagcaccttccctgtgacttcaagtatagacaggacttttatacattagaatggaatatttgtttaactttgtttatgtctcttgttttctccttccttttgcttccacttaaaaaaaa

SEQ ID NO: 410654 - DNA, 217 bp, Homo sapiens
actccaagaacttcgacttttttttttttaagtagaactagcttgttgtatcagttatctctgacttccttctcggcctggaaaattctcattgcacatgctgtttgacataactacattctattttcaaaatgtctgctcgatttcattgactatttgactaaagtctttacttcctagtttgccagatgccatccactctcaagtactaccttct

SEQ ID NO: 410655 - DNA, 875 bp, Homo sapiens
gtacgctttagttcaattcaaatcactgtattctttccccattgctaacctaatatatgaaacaagcttagctgtctcagaagtttttcaagagatgatcaggaaaaattaatgcacattcaaaaggagaatcttcagtacaaatttgtttttttaaaaatagatttagggctgggcgcggtggctcacgcctgtaatcccagcactttgggaggccgaggcgggtggatcacgaggtcaagacttcgagaccagcctggccaacatggtgaaaccctgtctctactaaaaatacaaaacattagccaggcgtggtagtgggtgcctgtaatccctgctacttgggaggctgaggcaggagaatcacttgaacgcgggaggcagaggttgcagggagccgagatggcgccattgcactccatcctgggcaacaagagcgaaattccatctcaaaaaataaaatagatttagggggtacaagtgcagttttgttacatgggtatattgcatagtggtaaaatgtgggcttttagtgtacctaacacccagagaagcatacattgtgcccagtaggtaatttttcatccctaaaccttttctcagcctcccactttctggagtctccaatgtcggttattccactctttatgtccatatctacacattcaatcctaatttgtaccaagtagcatctcacctttaaatcacaggcttattagttgggtgttttctttttacttatgaaaattcatctagtcaaactgtcaattaatttttcctcatttcattaaaagtgtatatctaatgctttctctaaaaattgatgtactggaaatacaaataaataaatgctccctgtgtagaatttcaacttg

SEQ ID NO: 410656 - DNA, 206 bp, Homo sapiens
aaaagatttaccttcagagtaatatagtatgactgctcatagtcaactttgaagatagaaggaaaccacaagacaaggaacgtgagaagtcaccagaagctggaaaatttgatcacaggacttccacaacagtaaaataataaatttgtcttgttttaagccaccaaatttgtggtactttgttatagcaaccatagaaaactaat

SEQ ID NO: 410657 - DNA, 441 bp, Homo sapiens
tgcaatgcttccattttttcattcacttttattctttacattcaaagtatggatgaaacatttttcagttacaaacagtgctctaatagatattttctacaactgtgcttgtaacgtctgcaagggtttcccagcaaatgcctgctgagggagaagcacatcttcacttttacaggcaccacccagttaccctctgacgagttcccatttcctcattgtcttactacaaaatgacgcagtcagacttacttgtttttaccattaggattgttttttgttttttgtttttttccctttgcatctgcaagtttccaagaccttttaaaaataacttgttattatcctggcccccaaaataagctgctctctaatttttcttacctataactcccacaataaggtggccgtgccccagtctaacaggtacgtagacaagaggtc

SEQ ID NO: 410658 - DNA, 582 bp, Homo sapiens
tgagatggagtctgactctgtcgcccaggctggagtgcagtgctgcaatctcggctcactgcaacctccgcctcccaggtttaagcaattctctgcctcagcctcccgagaaggtggggttacaggtgtgtgccaccatgcccagctaatttttgtattttcagtagagacggggtttcaccatcttggccaggctggtcttgaactgctgacctcgtgatccacttgcctcggcctcccaaagtgctgggactacaggcgtgagccaccgcgcctggcctaaaaacactcttgtcctaatcagagagtagttagttgtctttgtgggagtagggaattggtggtggaaatgttctctatcttgttttgggtagtggttgaattttgacaactgtcaaaattcatcaaatggaagccaggcacagtggcacacacctatatttctagctacttgggaggctgaagcaggaagattgcttgagcccagaagttcaaagccagcctaggcaacatagtgagactctgcctctaaaaaacaacaataaaaaacaaaaatgaacaaacacaaacaaaaaaaccccc

SEQ ID NO: 410659 - DNA, 318 bp, Homo sapiens
ggcatctacttgtcaggggcatattgggacctccgctccaaagaaaaaggtaaatggttgcattttgctttcttaattccacaatggaagtaccatggtttgcaggtctcactgggttttctaaggtaatatgtttcataggaatgtccctttggttcatacatggtttgacataaaagggaatcatctttgagtggtgtctggaacaggaaagagctgtgcagcagatccaggctgtgacacagcagcttgtcttggtgacttcactttaccataagaaaatgccacagaactgggtggcttaaataacagaaattt

SEQ ID NO: 410660 - DNA, 309 bp, Homo sapiens
aatttcaggaaaacaaaataagtatttaataaatatctgttgaatgaatggactaaatgattactaatgaagactacagttgaacaaaaatgttttagggcagtctttctcaaatattaatatgtatatgaatcatctgtgagggaacttgtgaaaatgcatattctcattcattatatccagggtaggacttcatactcagcatttctaaaaagcttccaagtgatactaatgttgctggtccttagacaacactttgaatagcatggcttttggatactagtgtaaaattttattaccgaatacatg

SEQ ID NO: 410661 - DNA, 853 bp, Homo sapiens
tgatgtttcgggcacgctgcagccgactccctgaacacctcatctgcactatctgatgccctttggttgtcgtgtatcataacctacccagaaccaagccatgtacatagcttgcagatgcaatttatcacgtgaggttatggctgcaagtgctactcattagggcacatcaaatgtccccttattaaatgggagggtgacttccttatgttccatctgagtagcatcaagtgatgtttttaaatgttgtctcaaacactcagaatatataactcctctgatctaagtaagtttataactccttcaaccagctatcccttaaagcatttttaataaagtactgtgtgtgtatgtatatatacatatgtgtgtgtgtgtgtgtgtctgtgtgtgtgtgtgtgtgtgtgaattaatgtggtgggcccctctgataatgcaagtggatcgacttttttaacaaaacaaatgttattgtgaaacatgcatataacaaagcaataaaacaattttgagttcaacaagtaggtctgaactctcatataaacatttaaataacctaaagtgaatatacagtagtaaaatgtaaataatgagacagtatttttgaatatttgaactgaatattaccttaatataataattgaatgttaccttaatataataattgaatattaccttcttaatacaattggtttaagtataagtttagggatgtcagtttggtaattacagtgagttgtcagttatggtgacattaatgtcttagaaaagttcttaaagtttttacccatcatttcttcaaatatttcctctcccattctcctaggacacttcattaaacacaaagactgtc

SEQ ID NO: 410662 - DNA, 675 bp, Homo sapiens
gtgctgggtgccaactacaggctttgcttgggagtcccaaaggtttccctcactggggcttgggatactaatatggaacctacactagcaccactaaatcagacccagaaagttcccccaggtgtccaaacacctgcatgaacaagcaggcagtttcctctaggttgacttcttgtctggccctacacatctctcagtttcatcactcagccaccagccctgggtctcatgtatgcacctgctgcttgacccagtcccaggagacactgagccttagaattgggctccttctctggaccttgccccaaaggctatttctgagtgactccctgggacttccctgacatggtaacccctagggctccaactgaacatgggtgctgtgagcaaggggaaattcttctgagtagcagatggagagtgggtagaacaagaggcagttgttctggatcagagataagcatggggtgagaaccatagtacactggattttatgtttaagcagcactgatcctcgatagttcagaactcccgcactgaagtccagcgtaggcaggtaaggacaacctggagccaggcattaatactcacttctacttcccatctgagtcatattcagagtctggccttgcctggtactttgactgcagaaggcaacccatggctaaatcaagg

SEQ ID NO: 410663 - DNA, 691 bp, Homo sapiens
gtgctgggtgccaactacaggctttgcttgggagtcccaaaggtttccctcactggggcttgggatactaatatggaacctacactagcaccactaaatcagacccagaaagttcccccaggtgtccaaacacctgcatgaacaagcaggcagtttcctctaggttgacttcttgtctggccctacacatctctcagtttcatcactcagccaccagccctgggtctcatgtatgcacctgctgcttgacccagtcccaggagacactgagccttagaattgggctccttctctggaccttgccccaaaggctatttctgagtgactccctgggacttccctgacatggtaacccctagggctccaactgaacatgggtgctgtgagcaaggggaaattcttctgagtagcagatggagagtgggtagaacaagaggcagttgttctggatcagagataagcatggggtgagaaccatagtacactggattttatgtttaagcagcactgatcctcgatagttcagaactcccgcactgaagtccagcgtaggcaggtaaggacaacctggagccaggcattaatactcacttctacttcccatctgagtcatattcagcaaatcctccgaataaatcagctgatcctcctgttgactggctggtgcttcagcagatcccaaggtcgggtc

SEQ ID NO: 410664 - DNA, 189 bp, Homo sapiens
ctttgactgcagaaggcaacccatggctaaatcaaggcacctcaagcctcatagagaaaagggaaagactcagcatttgctgagcttttactctgcactaggcaatgtgtaagtgcactttacatgtaccattaattattaggaatgtttgttaatccagtcactaaacactcagccaccaagtactag

SEQ ID NO: 410665 - DNA, 1029 bp, Homo sapiens
cagacacacacacactgctgtgcagaatcactgtcctgttgtgtgatcttcaaatgaagcaagagaggaataatctgggattgactgagataaatttatctcagctcttcaaaataccatgtgagcatagtgtaactcacttggacagctgtggaatgaaactcttgttttagtggccattagatacgtcaagagaactgactacgtagaagaatgtgtggtaaaggtagtttggcaattggtcaaatttgaagtagcatttacaggccgaggcaggtggatcacctgaggtcaggagttccaggccagcctggcctacatggtgaaactcctaaaatacaaaaatatctcctaaatacaaaacatctcctaaaacaaaaaaactctcctaaaaatacaaaaattagcctggtgtagtggcaggcacctgtagtcccagctactcgggaggctgaggcaggagaattgcttgaatctgggaggtggaggttgcggtgaggagagatcatgccactgcactccagcctgggcaacaagagtgaaacaacatctttaaaaaaaaaaaaaaaaaaaaggagcatttacatcaccaactgaaattaaataattgtcccccaaggtgatgtgtagcctgacttttgtgactgagggattgatctcttgacaagtctttatgaaataacaccacaggagggaaaattatatgcaggcatcaagctttgcatttattttgcaagccctctttatcgggtttgtatgatcttgttgtgtacagctaacaaaaggttacttctttgtcatgaaagccgtcctcagttttcagagacagtggggcaccacagagactttctttctctgcatccacatttctattaatgtcattactgcatttgattcctttatgaagcccttttggtcacatcaacagtgcattctaagctctctatcttaacttctagctttgtctgcaaaatttgtgtggttagcctgaggcatatgcagataaattgcccaggttcagtgttctca

SEQ ID NO: 410666 - DNA, 506 bp, Homo sapiens
gtcaatctcttctccagattgtaagctcctagaggacagggaccatgtcttatctatctatgtatccgtagtgcctgatccagtatctagcacagagtaaatacccaaggaaaaaatgtaaggccaggaatggtgactcacgcctataatcccagcactttgggaagccaagcaggaggattgcttgagaatagccgtttgagaccagcctagtcaatatggtaagtccctgtctcaacgaaaagaaatttttttagccagtcatggtagtgcacacctgtagtcccagatactcgggaggctgaggcgggaagattgcttgaacccaggagttcaaggctgcagtgagctatgattgtaccactgcactccagcctgggtgacagaatgagcccatgtctcaacaaaaagaagagagagagaaaaagaaagactgggtgcagtggctcatgcctgtaatcccagcactttgggaggctgaggcaggcagatcgcctgaggtcagg

SEQ ID NO: 410667 - DNA, 744 bp, Homo sapiens
gggaacagctttacaaatttcatatttacaaaaagaaaaacaaataatcaaaactgaattcttaatttaaagcatctgcttataagaagttgcttttactgtaaagatttttctgatatttattgtaatttagataaatctctaggttcaaagcaactctaaattatagtgtattttttcctacttttgaatgttcacccaaaacatctaattttactttgaaacaaagccaggattttagagtacttactacttatattatttcttattaacctaagccccacaacagacaatactttatttcagtaaagtatatttactctaggaggtggtgatttgagatgagacaccctgccttatcagcattatcgtgtggattggtgagactgggtgacttctcaatgaactattagaagaggcacaatgttgtagggtgagggatatggaaattaagtaacagaagaagacaatccagaatatattattgtaattaaaaggtaattttgaagtctttttttttttttagacggagtctcgctgtgttgcccaggctggggggcgcagtggtgcgatcttggctcactgcaagctccgcctcccctgggttcacgccattctcctacctccagctactcgggaggctgaggcaggagaaacgcatgaacccaggaggtggaggttgcagtgagccgagattgcaccattgtactccaatccggacaatagttgcgagactatgtatca

SEQ ID NO: 410668 - DNA, 458 bp, Homo sapiens
agcagagacttcacaaggtgcacacatacatgaaccacatgtcacaacccacaaccactacaagaagatggcccaagacctggcccagaaattgaagaaagacacttccagttttcagagggagatcctctgccacaagagaacagcccaggaaagctagatggccgctgcgaccactgagatagaactccaggtgctgcagaaagaaaatgactacagcaggcagaagccggctgactgcaaggccaagttgcagcctttcctgagtggccctttggctcctagggctccaccatccacagcccacaggagcccagaagtgccaagaggggccaggcgtggtggctcacacctgtaatgccagcactttgggaggccaaggcaggtggatttcttgaggtcaggagttcgagaccagcctggccaacatggcaaaaccccgtctctattaataatac

SEQ ID NO: 410669 - DNA, 966 bp, Homo sapiens
ctgtccttacgggtcgacagctgatatcttgaccttgttcatcccatgtttctttgtttttgaggattattattgttatttttaatgtatctaagttttttaaaagttgtcttttaacttaaaaaattatgtcatttttttcacaaattgttagattggtagaaaagtaatttgccatcactttcagtggcaaaaacttcaattacttttgtgccaacctaatagtttagatttaaagaaatatgcacagatgctttactttcagtggcaaaaactgcaatgcttttgcaccaacctaataatttagatttaaagaaatatgcacagatgcacgcacacacacacacatgcacacacacatagatataatttgtacgaatcttacttatttgttttcaaacctttctttccttctgaggtaattgtaatattgcaaaagatcatctctgggatagtctaaaagcctgtttgtaggtacatttgtacctctggctactttgaagtaaataattttagataaataatgtgcttacctaagatattatctttagaatagaaactttatgatcatgtttaattgcaacagtaattgctgttattttattgcagttaataaaatgtcaagtgtcaaaaacaactttattgtaactaattctaccttcctgtcctcatgagtatatgaaattttgctattcttaatgctcctaattgtttttcattttcttatctaacttatttttcctttatttccttgctatgctagagtatgctgaatgtggaatcctgccattataactaacattatagtgcacacgcttgtacgtggacagtcttttatgctgatatttgcaaggccttcttccagcatataagggatccatgggcctttttgttttaagaaaggaatgtagcaaatggaagtccaatatgagaaaggcaatttgtggaagcagagtgtaaaaacac

SEQ ID NO: 410670 - DNA, 349 bp, Homo sapiens
taaggaaaagaaaatttagagcaacatgagggagttgcagtattaaacatggtggtcagggcttccctccacgaaactgtgagatagaagcaaatgcctgaaggtgagggagtgagccctgtaactgtctgaggatgactgttacaggcagtccattagggaagaacatgctagcacattttggcatagctggagaggcacaggcaatgagaaggatgttgagaaaaggctttaaagagaaaggaaatagcaaaagcaggggtagcagttagaaatcaattaagaaaattccccatgttaaatagaaagaaggtgggaaaattggaattcaaatcatggttttcctgac

SEQ ID NO: 410671 - DNA, 305 bp, Homo sapiens
attaaggaggacaaagctcgacagcagatttcacttggctgattttgtttttctgttctttttctgttttcctgatgaggcttctgtacttctccctttaaggaggcaactgaatagcatgaaaataaggggtatgggtggtggtagttgctgaggggaatgacaatggatttggtaacacagcatgctaatatcatgcaaataatgagatgatataggaatctctgctctagtggtgggtctgaggtttgctctagtggtgggtctgaggttttctctactgagggcaaaattggagctttttt

SEQ ID NO: 410672 - DNA, 165 bp, Homo sapiens
tagcccagcctataagatgtgtactatcttgtagcccagcctataaaattgtactgtcttatacattgtggctagaattgttttctgtatttcaccctttaaaaaatatcaagtagagtttattttttttattcacataataggctttagtcccctagaatctga

SEQ ID NO: 410673 - DNA, 462 bp, Homo sapiens
tttttttagatgggagtctcgctctgtcgcccagcctggagtgcagtggcacaatctcggctcactgcaagctccgcctcccgggttcatgacattctcctgcctcagccttccgagtagctgggattacaggtgcctgccaccaagcccggctaattttttgtattttaatagagacggggttttaccatgttagtcaggatggtttcaatatcctgacctcatgatctgcccgccttagcctcccaaagtgctgggattacaggcgtgagccaccacgcccagccattacttatttatttatttatttatttaatatgttgagatggagtcttgctctgtcaccctttccactgtgcaacagccaggacaggaatttcctaaacgctgacgacttcagctttggccttctcccatttctggtcctcaacagagggaagaacagctggtcacttgtacaaa

SEQ ID NO: 410674 - DNA, 771 bp, Homo sapiens
gattttctcacctggttgctgcagattattggtcagagttctacgtttatgaatagtttctgcctattgtccatttgtatattcagtctcctaacttctaagaatttctagggaaagaatcatgaatgtatatagaaatgcttattgaaaaattgtctataatatggaaaattgaaacaatgtaaatttatagtcagggtctatttaaattataccattatcagtgtaatattatataactactatttttagatgatgtagatgaatatccaataacattaaatatttataatagtttaagataaatataggtataaaaccatacctgcattatgacttcatttttgtaaaaaaaaaaaaaagtgcgtatatctaggaaaaagagactggtgtgatatatatcaaattggctccagtggtaatatcatgatggcaggattaagagtgattcaaagttttttcttttgtatagttttaaattacatacaatgactgtgtactatttttataaacagaaacatttctataaatgtattttttaaggaaaaaaggaaaaaaaccgtccatatgttgacttatgtaatgtacccatttaagagaaaaggagtctaagatatgataaagagatgtgaacaaatgaattcaaagacacttagtgtaaagcaggagagctgtgtcaatatgcctttctgcgattttttatgaggcatgattactggctaaagctatttgttatgatagcactttcttataaatgtgtttctggaaaac

SEQ ID NO: 410675 - DNA, 447 bp, Homo sapiens
tgtacaacagagcactactcattaaacaaacaaacaaggacacactcaacaatatgaatgaatctcaagatcattattctgagaggaaaaaagccagacaaaataaagaatttacataaagttctagaaaatgcaacctagactacagtgacagaaagtaagtagaccaacggtttcctagaagtggggttgggggagtgatggcttgtattaggccattcttgcattgctagtctcagggaatacctgaaactaggtaatttataaagacaagaggtttaattggctcatggttctacagcctatacaagcatggcaccggcatctgcttggcttctggggggccttagggagcttttactcatggaggaaggtgaagtgggagcaggcatgtgacatggccagagcaggagcagcagtgagagaatgaaggcaggtgccacacag

SEQ ID NO: 410676 - DNA, 263 bp, Homo sapiens
gtcattatttaacctactacaattgggcctatccctaggccatgccagcctgggtgataaagcgagactctgtctcaaaaaaaaaaaaaaaaaaaaatctttaattgctgaaaagcatgaaatgtttcctttccgtccctgaattttctcatgtcatttttttcactggaatgccttctccctcttctttgtttatccaaattctactttatcttccaaagcccatctcaccttctccagtaagtcttccctgagtgctccag

SEQ ID NO: 410677 - DNA, 476 bp, Homo sapiens
gtatgtcttatgctcacccatcacgtagttcgttatcaccactacagatattgacaagctagtgaaacctgcgttttcattgcatttaactttgaaggcacacatctttgaacagaatgctaggtgctaatgtcatagcttacatctagatagggctctatttatgatgctgttatgttgtcttcataatctattgtggtattcagtttagctcataacagctgtataaattcaggttgccaagggtaaaagaggtgacccaacctcccatctggctgtattccccttgcacactcatatacctgtctcttctcaatgccctaattctatctcctataaaaagtttgcatcttcatgaattattcctatcttagtaaattaataaatggcctttcagaacaagtcataataaaaatacagctgggcatagcgatgcacacctttaatcccaacactttgggagactgagcaggagg

SEQ ID NO: 410678 - DNA, 434 bp, Homo sapiens
ggagcttccagttacagtcatgcattgcttaatgatgggatgcattctgagacatgcgtcattaggcagtttcatcattgtgccaatatcatagaatatacttaaacaaacctagatggtatagcttacaacacacttatgtgggatagcctattgctcctaggctacaaacctgtgtggcatgttgctatactgaatacagcaggcagatgtaacccagcactttgggaggctaagatgggtggattgcttgagcccaagagttgagaccagcctgggcaacgtggtgaaacccagtctctacaaaaaaaaaatacaaaaaattagctgggtgtagttgcacatgcctgtagtcccagctacttgagaggctaaggtgggaggtttgccaaggtgatgttaagtatcctcgagaggctgagcctggaggttga

SEQ ID NO: 410679 - DNA, 348 bp, Homo sapiens
aagtaataaatgataaaaattctaacataaaagttgaattaaaataaaacttaagtgttgggaaattcaattagaaaagagttaagaaaaaagaattaaattgttaccaattgcataatggatgacattttagacttgactaaggtcaaataaaacgatttttaaactgggaaacattttgacaaaattacataaataaggtaatattatgcaaaagaaattaaagataaaatacacaaatttcaaataattaaaataatatgacaagacgaatagttagcagaattaattgccatatttatttatttattttttgtttttgtttttatttgtttttgagatggaatc

SEQ ID NO: 410680 - DNA, 520 bp, Homo sapiens
gccttttttctggtggagggagagtgagtgactgcttttccgggggcacacatctgcataacacattgcctgaaatgcccttccctggaactagagtgtggttcgtaccctctcatggtttccatctctgatttcttttcccggtgttgatccctcagtccaaggcatgaacactgttacttattttatttgatttgttctccattcctcccttctgcgtactcctttgtagcttgcttctcctgatcattaaataagatttggctgggtgctgtaaccccagcacttcgggaggccaaggtgggcggatcaccggaggtcaggaattcgagaccagcctggccaacatggtaaagccccatttctactaaaaaaaaaaatacaaaaattagctgggtgtgtttgagggcgcctgtaatgccagctacgagagaggctgaggcaggagaattgcttgaacctgggaggcggaggttgcagtgagccaggattgtggcattgcactccagcctgggcgaca

SEQ ID NO: 410681 - DNA, 387 bp, Homo sapiens
ctcttttaggatttcctcaggtaacaatcttctttcaatgttcaataatccaagcagaacattttctcacttcatccgcctcccatgctaggttcacactgtgaaattggcttatctctgacctaaccacttccttcaccagacatagagctggtgtagctcaagggaaagaggcacggcgctgggaaatgattaggccccaccgtcccaagcaagagctcaggggagttctgaggctggagagaccattcgggatatcaccccgggttcctgagaacctgagatctgcggggaggcgtcaggcatccggaaacgcccgagtctggggagacggaccccctcagactttcctctaggagactctacaggtaaaggggagtcctggga

SEQ ID NO: 410682 - DNA, 372 bp, Homo sapiens
cattttacccaagaaatataaacacaaagctcaagggcacaggaacaagagaaaaagcatgacacgctttagaattgcaaacaatttgtcatgaggttggagaggtagctttaaatcctaaaagttctggaatgctatgctaatgaattggattttattctgactgcattagggagatgttgaatgatttttacttgggggtgagatggatgtgagtatagtgatagcagtgtggtgagtgctagtgtgggttggagtggcatgttagaggcagaaacatgagttgggagatattaccttatcgaaaagcgtttcttcaatgatcttctgagtttgggaatttttaaaaactagatcctcaaaagatagatt

SEQ ID NO: 410683 - DNA, 435 bp, Homo sapiens
cccacttcccatcctggcggcctaaaggcaaggcctagaccctggagaggccaaagtcgggccaaaacaacagcgaagctgggactggaacaggcgctgggggcctgcgcatgaccccaggctcagaatgcgacactccagtgacgccggggaatgagttgagatggagccggagacagaggttggggttcaggacgaggcgcttgggtatgggatcggatctgagacggttgcggcgctggtgctttgggctggaccagactcgaacccagagcggagcgagggtcagagccagggcaagagtccgaagcccagctcagcgtccagcccgcgagagaccccaccatgaatgacgtccgagtagggttggaactcgaagcccgaacgcactggaaatgcagccggacgacggctgggatccgagtgggtccgggc

SEQ ID NO: 410684 - DNA, 348 bp, Homo sapiens
tataaatgacaattgtatatgtttaaggtgatgttttgacatacatatacaatgtgaattgatgaccacaatcaagctaattaacgtattcatcacctcatatagttactctgtgtgtgttgagaataagatctactctcttagcaaatttcaaatatgtgatatattattaactatcatccctatgctgtatattaggtctctagaatttattcatcttataactgaaagtttgtaccctttggccaacatctctccatttcccctacccctcaacttcagaaagtcaccttttttactcagtttctatgagtttgagtttttttagattctacacatgtgtgaaat

SEQ ID NO: 410685 - DNA, 364 bp, Homo sapiens
gaaatacattaacacatcactaaaatgtctgaataaatgtttggataagtaaataatttcagtggaattcttaagtggttcacagaagttattaaaacttacaatgccctttaataattggcagaagaaaccagagggctccactgggagatggagctgggaggtctctggagggttgaaaggaaccccagtggggcgtcttggcaggcagttgtttctaattacgctgcaactctttacattttcctgtcaattgaattgaaactaaaccagctgttaattttctagcttaatgttagaactccctgtggaaatggtgctttagtgctgatttctagagggaatatttattcaagtatttcaa

SEQ ID NO: 410686 - DNA, 632 bp, Homo sapiens
ttcctgcttctcccactcctgaaggtgcctctgctcctgagcatactcggtgctatcctctgggtgaacaggccttggaggactccttggacagagtcatgaacaggagaacttgcaacaccccatgcccattggaaccctgtccagagacacagcccctctgactgcaaaaaggacttctgaccctgaccctcatatttctttccatcttatcaccggatactttttaaaagttaaaaaaaaatgtaggccgggtgcggtggcttacacctgcaatcccagcactttgggaggccaaggcaggtggatcacttgagtccaggagtttgagagcagcctgggcagcatggtcagacctcatctctacaaaaaaatacaaaaattagcagggtgtggtggtgtatgcctgtgatcccagctacttgggaagctgagacaggaggatcgcttgagccccggaggtggaggttgcattgagtcgagattgtgccactgcactccagcctgggtgacagagggagaccctgtctcagataaacaaataaataaataaaatacatcccatacacaagagtatgtatatgaggtatctatacagttcaaggactaaaaataaacatgtgtacccacca

SEQ ID NO: 410687 - DNA, 378 bp, Homo sapiens
cctactggcatctagtgggcagaggccaggactgttgctaaacaacctccagtgtacaggatattccctacaacaaagaattatctggttccaaatgtcaatagtgcccagactgagaaaccctgagttctgttgtaacatctaatgaagtttatttccttttggctctccgtgagtgttagctaactcataagatccccaaaactacctttctttttaacggaagggtggtagaaaagtcgtatcattctggaaggctgctggatctcattttgaatcagagcctgaacctagttgttgctgccagaagttgggaatttgggcagctcaggttcatagaaagcagagtttctcccactagtgtgtattgtttctgag

SEQ ID NO: 410688 - DNA, 316 bp, Homo sapiens
agcccaactgatatttcccttcctacagattttttttcaaccacatgctcatctctattctgatggcattgtgagaacacatcccactgtgttatagttgtctggtaacacattgctcttcctagaccagctttttttttcagagcatgacacacttgatcaatgatgcacagatacaggacacactgcgttgtgcaaggctgagcgatccagctgcgtctgctccctggttttctgaatattgagatacactgagaccagcggcattctagggctcaccttgaatctcttctcatttatttctttaagaagcctg

SEQ ID NO: 410689 - DNA, 392 bp, Homo sapiens
tacaagctttccccactgcatgaaatagctctactccatcttttcacttggaaaaataccttgcacatttcaaagcccatttcaaagtctgctttttctataaggccatcctttccctgtgcagaacattttaatgcccctgtccccagccctctctgtggtctgcacagggctggctactcacttttctgtgcacttaatcatctacacacaatagcatgggctgtttattataaccacctctttacaggacagtgttcctcctctggtctgtaggctcctgacaggcagcgcctgccctacttatctctgacctcagcatctggcagagttcctagtactagagaatgcctgctggattatgggaggcattcagcaaagagcagtccacc

SEQ ID NO: 410690 - DNA, 176 bp, Homo sapiens
caacaccatttgggtaacaatgccattttgaaacaggccaggaagagttataatgaaaataaacattgtttggaatggaggcagcaggcagagttcattttctctctttccctttcaggtagttctgaacaataaaagccaccaaccagtattcatatctgattaaacaaaagtta

SEQ ID NO: 410691 - DNA, 287 bp, Homo sapiens
atttatccctccccacctgccttgccccttaacccctggcaaactaatcttttaaatctccacaattttgctttttccagatgtcatatagttggaatcatacattatgtgttttttttctgactggcttttgttttttttaaggttcctacatgtcttttttgtaactttacagctcatttctttttattgctgaattgtactgtattatatggatgcatcacagtttatttatccatttaacaacagttagttggtgctggaactggacatccacatgccaaaaa

SEQ ID NO: 410692 - DNA, 428 bp, Homo sapiens
cgcatgcgcgttgcgcgccggacgcggaacgtctgccggtgtccccgcgctgctggtcccggggtccctgaaccgcgggcggccccgctccctctgctggccatggcccccccgcccgcgtgccggtccccgatgtcaccgccgccgccgctgctgctgctgctgctgctgagtctggcgctgctgggcgcccgggcccgcgccgagcccgccgggagtgccgtccccgcgcagagccgcccatgcgtggactgccacgccttcgagttcatgcagcgcgccctgcaggacctgcggaagacagcctgcagcctggacgcgcggacggagaccctactgctgcaggcagagcgccgtgccctgtgtgcctgctggccagcggggcactgaggaccacgctgctccgtgtgaataaatgcccagtggca

SEQ ID NO: 410693 - DNA, 535 bp, Homo sapiens
cgcatgcgcgttgcgcgccggacgcggaacgtctgccggtgtccccgcgctgctggtcccggggtccctgaaccgcggtaagggcggtggtgcgggcgtccgaatgggcgttttctagatacggggcgcggactagaggctcgctgggcccggagaccggcggactggagtcggggaaccggagggcggccccgctccctctgctggccatggcccccccgcccgcgtgccggtccccgatgtcaccgccgccgccgctgctgctgctgctgctgctgagtctggcgctgctgggcgcccgggcccgcgccgagcccgccgggagtgccgtccccgcgcagagccgcccatgcgtggactgccacgccttcgagttcatgcagcgcgccctgcaggacctgcggaagacagcctgcagcctggacgcgcggacggagaccctactgctgcaggcagagcgccgtgccctgtgtgcctgctggccagcggggcactgaggaccacgctgctccgtgtgaataaatgcccagtggca

SEQ ID NO: 410694 - DNA, 811 bp, Homo sapiens
  misc_feature (15)..(15): n is a, c, g, or t
  misc_feature (77)..(77): n is a, c, g, or t
  misc_feature (87)..(87): n is a, c, g, or t
  misc_feature (108)..(108): n is a, c, g, or t
  misc_feature (135)..(135): n is a, c, g, or t
  misc_feature (146)..(146): n is a, c, g, or t
  misc_feature (181)..(181): n is a, c, g, or t
  misc_feature (286)..(286): n is a, c, g, or t
  misc_feature (333)..(333): n is a, c, g, or t
  misc_feature (355)..(355): n is a, c, g, or t
  misc_feature (463)..(463): n is a, c, g, or t
  misc_feature (505)..(505): n is a, c, g, or t
  misc_feature (508)..(508): n is a, c, g, or t
agaagcttctggagnagacccagcaaaacatgaacgagttttacaacctcctgcagcccttcatcaaaacgtgcacnaagaacgccntctcggccgggaagaactggntgttcagaaatgccaagtccccgccgnactgtgagctnatggccggccacctccggtaccgctttacggctgntggtgcacacttcgtgctgctgctgcacctcatctacctgtttaattacgtgctgcaccactgcctgcgcatgcaggcccgggggctgctggccgccctgcaganggtcgtggtgcccttctactgctcctgcttcttggccgtggaggtanacatgctgcagttgttcgcccngctcctgctgctctgggagaaatacggctacttcgtttactccttcattctgctgctacagagcccagccctggggcttggtcagttccaggccaccctcttctacgngtactcctcagtggtccagccggtgctgctggccttcctgcngcngatccagaccctctagacgctgcacgaggagtttgtcaccagcctgattctggcgctgctgggcgcccgggcccgcgccgagcccgccgggagtgccgtccccgcgcagagccgcccatgcgtggactgccacgccttcgagttcatgcagcgcgccctgcaggacctgcggaagacagcctgcagcctggacgcgcggacggagaccctactgctgcaggcagagcgccgtgccctgtgtgcctgctggccagcggggcactgaggaccacgctgctccgtgtgaataaatgcccagtggca

SEQ ID NO: 410695 - DNA, 921 bp, Homo sapiens
cgcatgcgcgttgcgcgccggacgcggaacgtctgccggtgtccccgcgctgctggtcccggggtccctgaaccgcggtaagggcggtggtgcgggcgtccgaatgggcgttttctagatacggggcgcggactagaggctcgctgggcccggagaccggcggactggagtcggggaaccggagggcggccccgctccctctgctggccatggcccccccgcccgcgtgccggtccccgatgtcaccgccgccgccgctgctgctgctgctgctgctgagtctggcgctgctgggcgcccgggcccgcgccgagcccgccgggagtgccgtccccgcgcagagccgcccatgcgtggactgccacgccttcgagttcatgcagcgcgccctgcaggacctgcggaagacagcctgcagcctggacgcgcggacggagaccctactgctgcaggcagagcgccgtgccctgtgtgcctgctggccagcggggcactgaggaccacgctgctccgtgtgaataaatgcccagtggcaaaaaaaaaaaaaaaaaaaaaaacaacacaaaaaaaaaaaaaaaaaacaaacacaaaaaagggggggggcccaataagcaccccggcaggagcggcacacgcatccgttgcaggccacacccgatctttttgttaggaaacgaacggtgcgccccctaaagctgggcggcgtccttataatcatcccacggcgaagccaccgcgggctcgccacaaaaacactgtgcgctgagatcgagaacacagcgacggtccgccaccgcctacactcgtcgacacgaagcaacctcccttacttgtggcgtgcgggccactatcattggctgcaccgccctcgccacacgattctcccccccgggcgtactattatcctgtagctgcattggc

SEQ ID NO: 410696 - DNA, 840 bp, Homo sapiens
cgcatgcgcgttgcgcgccggacgcggaacgtctgccggtgtccccgcgctgctggtcccggggtccctgaaccgcgggcggccccgctccctctgctggccatggcccccccgcccgcgtgccggtccccgatgtcaccgccgccgccgctgctgctgctgctgctgctgagtctggcgctgctgggcgcccgggcccgcgccgagcccgccgggagtgccgtccccgcgcagagccgcccatgcgtggactgccacgccttcgagttcatgcagcgcgccctgcaggacctgcggaagacagcctgcagcctggacgcgcggacggagaccctactgctgcaggcagagcgccgtgccctgtgtgcctgctggccagcggggcactgaggaccacgctgctccgtgtgaataaatgcccagtggcaaaaaaaaaaaaaaaaaaaaaaaaaacaaaaaaaaaaaaaaaaaaaaaacaacacaaaaaaaaaaaaaaaaaacaaacacaaaaaagggggggggcccaataagcaccccggcaggagcggcacacgcatccgttgcaggccacacccgatctttttgttaggaaacgaacggtgcgccccctaaagctgggcggcgtccttataatcatcccacggcgaagccaccgcgggctcgccacaaaaacactgtgcgctgagatcgagaacacagcgacggtccgccaccgcctacactcgtcgacacgaagcaacctcccttacttgtggcgtgcgggccactatcattggctgcaccgccctcgccacacgattctcccccccgggcgtactattatcctgtagctgcattggc

SEQ ID NO: 410697 - DNA, 571 bp, Homo sapiens
ctctgacttccagcagggagagagggcctggagatttagatgattaccaatggccatgatttaatcaatcatgcttacataaggaaacctctataaaaccccataaatgacagtttggagagcttctgggttggtggacacagtgaggtactgggagggtggcgtgcttggaggtggcatggaagctctgtgcacccaccccctacccctgccccattgccctgtcttacgtttctcttcgatttggctgttgccttcctgagttgtagtagccttttaaacaaaccagtaatagtaagtaaagtgctatactgagttctgtgtcattctagcaaattattaaatctgaggcggggtcatgggaaccctcaaatttgtagtctgtaggcagaaatgggagtagcctgggcatgtcatctgtggctagcagctgtggcaggcagtcttatgggactgacctcttagtctgtgaggtctgggctaactccaggtagttactatcaaaattgtattgaattgttagacacctaattggtgtctgaagaattggagaattggttggtgtgattta

SEQ ID NO: 410698 - DNA, 411 bp, Homo sapiens
ttaaattccaaaatacatctgtcccagaggttttggataagggactttggagccacagtgcatttctttcattctttgactaatcagaccttttgtgatctttacaaaaaaaaaaaaaaaattgcctctaaagtataagaacaccgggagaagaaaaaatatataattattcagtagtgtaataattattcagtatcggaaactgtattttttttcctgtaaattaagtacttaaatgaaatcccaagtcactactcccttggggtcttatttttgttatctcaagacaaaataacactgacctaatttcagcttttaagtggacagccacaaacaccttccaggcagagctattccttggagatgccactctttgaaaagagaaagatgccacattagcttaaaagcacc

SEQ ID NO: 410699 - DNA, 497 bp, Homo sapiens
tgcaggctctgtctcaaagctttgcacgaggccatgctcatctttttcttcaattatttgatatcgcaagctgactatccacaacaactccccaatcccttaggctgattgtgcaacatctcaccttgcttacttatttatttcttttcttttgaaatgaaatttcactctatcaccctggatagagtgaagtgcagtggcgtgatctcgctcactgcaacatccacctcccaggtctaagcaattttcctgcctcagcctcccaagcagctgggattataggcacccaccaccacacctggctaatttttgtatttttaggagagacagggctcactacaacctccacctcccaggtctaagcaattttcctgcctcagcctccggagcagctgggattataggcacccaccaccacgcccggctaatttttgtatttttaggagtgagctgagatcacaccactgcactacagcctgggcagcagagcgagaccc

SEQ ID NO: 410700 - DNA, 273 bp, Homo sapiens
ctcctgagttcaagcaatcctcctgtctcagctagctgggactacaggtgtgtcccaccaggctgggctaatttttgttttggttattgttttcggtttttttttagagatggggttttgccatgttgcctagattggtcttgaactcctgagctcaagtgttccaatcgcctcagcctcccaaagtgttaatattataggtgtgagctgctacacccagccagattctgtttttttgtttttgtttttgtttttgtgttgagatggagtctc

SEQ ID NO: 410701 - DNA, 303 bp, Homo sapiens
gcattccatttagaaaacagatttaaccatatcacttggctgtctgtgtaaaactccgtaagctactttcaatggctcacaatgccctctatgatatagcttctgatcaaaacaatgcatgcacagaggagcttggaatgaaaagtggtagtgtcctgacactgtgatccccacttccaggcttcctccccataggacttcttttggccagttctgtgttttagtactcctggtgatgatctccatatcttcaaatagtatacttatactgatgtttgttgatttatcaaccttggatagcct

SEQ ID NO: 410702 - DNA, 673 bp, Homo sapiens
cattgttgtttttttcttcatgtcctcttttgtgcccatcggatttttgagactcacttttcaggccctaagtaagcaagaggcagaggtgaggaggggagtgtctgtcactgtccctatggttctggaatatgctgctcttcaaaggtctagcatcagcagcaacatccttcttgaagccaaaggaaaatttagatgagtggcagcgctgtggctgagggtgggtatggaaaggagaggcactgggtggggatgctaaaatactgccttcctgttccccagaagcgcagtcacttatgttcccctttatggccaagagcccccttaaccctcagcatacagttttctttcccttcgtgggaaccaactgaaattggcaaactgtgaccgtttgtgacgagttatctcagtcctcacatgagttcttacatgagtccctctatgaccttgtgcacctttcccagaaagataaattacataggttacaaccaaaggagcatgtaatgcctacttgttatttcatgtgccttgtaagaaccagagagggacctccttgctgaaccgcctcgaccatggagtaaagagttaggacatctcactgtacagcagtcaccccattgtgggcaaaactatgtcaacccccttggatttttagtaaaaaaaaaaaaaaaaa

SEQ ID NO: 410703 - DNA, 704 bp, Homo sapiens
gtccagagaatggctagtgtcctctagcactctctcagaagcaaaagcaagtctggggttacaacttccagtggcctactttaaatagacgctgttctggaaaatgactttatactttaaacacaaaatccaaaaaatagaactcagtggagtgacaatgacaatgcatgatggtggcccagtggctgtcccatgtgaaatacttcttgcctgacatgtatcatctacttgttgactgacctattgaggtgccttcatgacaccttttacattcatgataggtctcaggaagacagcagtgtacttggtggaaactcatgtaaaaagtgggttgtagggagctaaacagtgagtacacatggtatatggatacggaatggaataatagacattggagacttcaaaaggtgggagatgaaagggggatgaggtatgaaatcctacctgttgagtacaatgtacactacttacgtgcacagtacactgtttgggtgagaggcacactaaaagcccggacctcaccgctacccagtatgttcatgtaacacagctgcacttgtaccccctaaatgtatacaaataatctaaaaatagcccggacctcaccgctacacaatatattcatgtaacacagctgcatttgtaccccctaaatgtatacaaataatctaaaaataaagtggatatggtggctgtcgtgtcca

SEQ ID NO: 410704 - DNA, 364 bp, Homo sapiens
cactaaataaatgtcaagtgataaagcattgcagtggctgaaaaatgaagcttgcattcctgtaacccactaaattgttcatatagagcctcctgattgattttggttttctttgtgtgcaactttgaatccctgtctcatatttgggtcagagcaatgggagggacacatgacttgctttaaaattagcctcaaaactcattgtataacagctctcgttttcactaaatggaatgatttcttgagaagacaagcacagcatttgtaataagcctgcatagttgagtcgccatggagaaaattgtttacagtcaccaaaacactcaatgtttccacctgtaaaatggggtgtagatttagtttg

SEQ ID NO: 410705 - DNA, 507 bp, Homo sapiens
agctaccttttgtccttgggaaagttatgaactaaacaggtagcgagcattgagaggccttaggagaagactaaaaatcatgtatgatttttacacatgtacagttgacccttgaacaccactgagcttaggagtgctggcctctcccctacagtcagaaatctgcatataccttttgacttgcccaaaacttacctactaatagcctactcttgaccagaagccttactgataacgtaaacagtggattaatacatgttttatatgttacatgtatgatatactgtattaaagtaagctagagaaactattaagaaaatcatggccaggtgtggtggctgatgcctgtaatcccatcgccttgggaggccaaggtgggcggatcgcttgagctcaggtgttggagacctgtctgggtaacatggcgaaaccttgtctctacaaaaaaaaaaaatacaaaaatttagcagggagtggtagtgtgagcccgtagtcccagctacctgg

SEQ ID NO: 410706 - DNA, 346 bp, Homo sapiens
agccccgcctctcactttgggtcctagtgattcagagcagaaagtgccaggggagaagcaaaacaacagcaagggcagcagtggccaatcccgggctcaggcctgaaagtggagtccttctttccttccttccttcctccctccctcccttccttccttccttccttccttccttccttccttccttccttcctttcttccttcctttcttccttccttccttcctttcttccttccttcctttttccctccctccctccctccctttctttctttctttcttgatgaagtctcgctctgtcaccaggttggagtgcagtggtgcgagcaacctcctcctgccagg

SEQ ID NO: 410707 - DNA, 409 bp, Homo sapiens
ggctagacccagaagacagacaacagtcactacagttcagctcaaaggaagccacatccacaggaaaagggagagaatattattacatcaagggaacaccccatgggacaaaaagacctgaatagcagctttcagccctggaccttccctctgacagagcctacccaaatgagaaggaacgagaaaaccaacgctggtaatatgacaaaacaaggcttttcaacactcccccaaaatcacactagtttaccagcaatgaatccaaatcaagaagaaatccctgatttacctgaaaaagaattcaggaggtcagctattaagctaatcagggagggaccagagaaaggcgaagcccaatgcaaggaaatccaaaatatgatacaagaagtgaagggagaaatattcaagg

SEQ ID NO: 410708 - DNA, 1827 bp, Homo sapiens
  misc_feature (562)..(562): n is a, c, g, or t
  misc_feature (776)..(776): n is a, c, g, or t
  misc_feature (1245)..(1245): n is a, c, g, or t
  misc_feature (1497)..(1497): n is a, c, g, or t
  misc_feature (1537)..(1537): n is a, c, g, or t
tttgtattttcatcggagacagagtttcaccatgttggccgggctggtcttgaactcctgacctcaaatgatgtacccacctcagcctcccaaagtgttgggattataggcgtgagccaccatgcccagccccatccatgcatttctattaatgtctgctatccttgagaaactgtacataaaacatttttgtccccacatcactgaagataggacagaagcaagtgacagtcagacaactgtgtattaagggtatgctcttacagtgctcacagtttgatatatggctgtggggctgtttctctagatttgtaatacatactttgcaggtgaaagtttctggaatgtgagtatagcctcatttgggagttagagctcatttgggagttaggtgtaggtagaataacattgtgatttgaggctactgccaggttatgccttttcaaaaatagacttttcactcatttggcatggcctcccctttcttctctatttggcctgaaattcttaatttccctctctctcaagatagaattaagggcaagtgtgctggaagtgtttnatttggcaagaccaccattgatagacacatatgttgcccgggcaaaaaagatgctggttaatatttggatgagaagggtacatgttttcttcctctcccagttgtggtgatacctgtcagtttgtcagatactattttgctaccttgtcactgtggaaatttcataagacctaagcttccaactggccagggcactgttattttgggaggactnacctgtgctcacagattatagtaagacacttattcttaaataacttagaagtaagagagaaatagtggtcttgggataaagcttgaaatgtactgagtggcttcagaacaagaatggcctgttgccgatggactatattaatacatctaaggaaaagatgtgccaatctttatttttcagtctttaaaacatggttttaaataaaaaccaagtaacaaatgtatctccagagtatttaatatcatgagacatgtttacagtgtgctgtttaatagaataaaaatcatgatactctttaatacctgtacatctccatggatggaaaccttcatagtaagattgttttttcttttccttttttttctcatacttctattttttttattatcacagcaaggtgtgagaatttttttcttatacttgaaaaatgcttttctgtgattgctaaagtctctgaaatgagtaagtnttaatttacaaaatacatttcagccattaattattatttagaaaagaatacatgtatagaaagaaagaagagattgtaaaagaccagcaatggttgtgttcttctcctctgccctggtgtaacaactctggcccttgtaggtctctgccttttgtggagatgtttataataagccctcttagcctcatgcccgtcatacattcaggccgtaaagcttatcaaatagccatcctgttatgatttagctttccnggtacttggtctgcagaaagagtatatcttagcaggaggncccacatatgtgttcttttggccagattttattttattttaaagcaataatttggcccattggttgattcgtaagtctgtgtaaatttctcagcctgttgacaaactagtcttccaaatgtgcaatactaagttcatccagagtaattctttaccttttgataggtggcctgaagttgtttctagtaatagctcctgtaccacgtgccaactgggcttttcattttcaaaagtttattgaagaaagaaaattgagggctgggattataggcgtgagccacagtgcctggc

SEQ ID NO: 410709 - DNA, 2024 bp, Homo sapiens
  misc_feature (562)..(562): n is a, c, g, or t
  misc_feature (776)..(776): n is a, c, g, or t
  misc_feature (1245)..(1245): n is a, c, g, or t
  misc_feature (1497)..(1497): n is a, c, g, or t
  misc_feature (1537)..(1537): n is a, c, g, or t
tttgtattttcatcggagacagagtttcaccatgttggccgggctggtcttgaactcctgacctcaaatgatgtacccacctcagcctcccaaagtgttgggattataggcgtgagccaccatgcccagccccatccatgcatttctattaatgtctgctatccttgagaaactgtacataaaacatttttgtccccacatcactgaagataggacagaagcaagtgacagtcagacaactgtgtattaagggtatgctcttacagtgctcacagtttgatatatggctgtggggctgtttctctagatttgtaatacatactttgcaggtgaaagtttctggaatgtgagtatagcctcatttgggagttagagctcatttgggagttaggtgtaggtagaataacattgtgatttgaggctactgccaggttatgccttttcaaaaatagacttttcactcatttggcatggcctcccctttcttctctatttggcctgaaattcttaatttccctctctctcaagatagaattaagggcaagtgtgctggaagtgtttnatttggcaagaccaccattgatagacacatatgttgcccgggcaaaaaagatgctggttaatatttggatgagaagggtacatgttttcttcctctcccagttgtggtgatacctgtcagtttgtcagatactattttgctaccttgtcactgtggaaatttcataagacctaagcttccaactggccagggcactgttattttgggaggactnacctgtgctcacagattatagtaagacacttattcttaaataacttagaagtaagagagaaatagtggtcttgggataaagcttgaaatgtactgagtggcttcagaacaagaatggcctgttgccgatggactatattaatacatctaaggaaaagatgtgccaatctttatttttcagtctttaaaacatggttttaaataaaaaccaagtaacaaatgtatctccagagtatttaatatcatgagacatgtttacagtgtgctgtttaatagaataaaaatcatgatactctttaatacctgtacatctccatggatggaaaccttcatagtaagattgttttttcttttccttttttttctcatacttctattttttttattatcacagcaaggtgtgagaatttttttcttatacttgaaaaatgcttttctgtgattgctaaagtctctgaaatgagtaagtnttaatttacaaaatacatttcagccattaattattatttagaaaagaatacatgtatagaaagaaagaagagattgtaaaagaccagcaatggttgtgttcttctcctctgccctggtgtaacaactctggcccttgtaggtctctgccttttgtggagatgtttataataagccctcttagcctcatgcccgtcatacattcaggccgtaaagcttatcaaatagccatcctgttatgatttagctttccnggtacttggtctgcagaaagagtatatcttagcaggaggncccacatatgtgttcttttggccagattttattttattttaaagcaataatttggcccattggttgattcgtaagtctgtgtaaatttctcagcctgttgacaaactagtcttccaaatgtgcaatactaagttcatccagagtaattctttaccttttgataggtggcctgaagttgtttctagtaatagctcctgtaccacgtgccaactgggcttttcattttcaaaagtttattgaagaaagaaaattgagggctgggcacagtggctcacgtctgtaatcccagcactttgggaggctgaggtgggtggatcacctgaggtcagaagcttgagacagcctgaccaacatggcgaaaccccatctctactaaaaatacaaaaattagccaggtgcggtggcgcagcctgtaatcccagctactcggaggctgaggcaggagaatcgcttgaactcaggaagcagaggttgcagtgagctgaga

SEQ ID NO: 410710 - DNA, 188 bp, Homo sapiens
gcatgaaggtatcttttctgaaatgttgattcagaggttctgaactgatgtttgtgaggctgctttcattgtagcttgcagaagagttagattctaaacagcccagcaggaagcaccttggattctaatatccttaacaaggaaggggtagtgacggagagtcagggaacggctaaactactgacact

SEQ ID NO: 410711 - DNA, 119 bp, Homo sapiens
gtgatagctgcccaagtggactaggacaaatccctgaatcgtattaattcttgtctctggacctttacatatggtttgccctcagcctggatcctcccttagccaccttgcattcactt

SEQ ID NO: 410712 - DNA, 198 bp, Homo sapiens
aggagtgtgtgtatgtccttctttttaaagaaatgaccctcacctgctcaagccattcaaaaacatctcagttcttctcattccaaataccacactgacagcatgcaccctgcccctttaatgtatttactaccatacacatgtaaaattgcatttgctcagactcagtctttctgagtctgagccaaccatgattta

SEQ ID NO: 410713 - DNA, 355 bp, Homo sapiens
gcacaatctcatttaaccctcatggaaactctaacacaaaatatgatcaccatctttacatacaagaaaaatggaaacttaaaaagaaattaagtgacttgactaaaataacagcaactggcaaagtcatgagcggtgcccaggtttttagccacagagccaagtactgagccaccaggcaatcctgcctcccaaacagcaatctcagtattcactgctgtggactcttctaaaggcctcagccatctccatctccaggtaggtttcaggaccttttacttaactcagagtttcttagcatgttgtacaagcactactaagccgtaatgagtttgactaacaaaggaacccaatt

SEQ ID NO: 410714 - DNA, 91 bp, Homo sapiens
ctgtttgctattacattaatgctgaaaacacaattttctaaagctgaaatggaatgtgtatcatatgaaaagattaataatatttaattga

SEQ ID NO: 410715 - DNA, 607 bp, Homo sapiens
  misc_feature (571)..(571): n is a, c, g, or t
tttgtctacaaggtacttaaagcagtttttgttctggtttttccttgaaatagccaaaacatgctgttggaaaggcagatggtagattaagcagatttcatagacctttgcggtgattgtcattcatttcctttccagccttcattttaaaatgaaaatactaggagaaaattgggaaataatccgaataataaaatactgtggtgtagttaaagttgtagtctggaactgtttgcttcaagatatttcattagcttttttgaacaacaaacaatttcaagttatatatagacttagctggtttctcttcaagctattagctggttagggagatgattcgcacctttctgataaataatgctaaccgtgtatgtaaattttaaatgttctaaaaaccccatttaaactaaaaagacaagcgaaattattttaatattatcttttattaggctgagtgcagtggctcatgcttgtaatcccagcattttgggagcccgaggcgggtggatcgatagcacaaaggcgttagagacaaagacacaacaccatgatgaaacaaagacaacaccanaactacagaaacacaactcgacatggtgaaaacaca

SEQ ID NO: 410716 - DNA, 403 bp, Homo sapiens
agctgatccagcgatcaggacgagatacttacgcggacgatgaaagcaggactaagagcaagcaggctgatagggatccggagcatgagtttgagatacctttgtgaaatatgaacatagagatacctcagagaatagctgtagctatctgaagctacagatctgggcaatgttttgataaggtaatggcacagagatcatgatgcattaacacaaccacagagctacagctgagtgcagtggctcatgcttgtaatcccagcattttgggagcccgaggcgggtggatcgctggaggtcaggagttcgagaccagcctggccaccatggtgaaaccccgtctctactaaaaatacagaacatttgctggacgtggtggcgtgtgcctgtaatcccagttact

SEQ ID NO: 410717 - DNA, 328 bp, Homo sapiens
ttctaataacccctcccttccctttattcctgcactgggggtgctagctactttttgtagttatttactctgttacctcaatgtgcccctcacttctttttttgccttttcagccatccagtacaggtttaaccaattctccagattaaattctctctgttaaaataactgctgtggtttctgttttcctgaccagacactgactgatacagaccccacggctgccaaacaggctgcatgaggaagctgtaatttaccatctgtttttcctccttcaaaggagtaggtggcttccagcttacccagttactacactgcatcgaggtca

SEQ ID NO: 410718 - DNA, 423 bp, Homo sapiens
cacctctctatagcacctgtcttcaggctagaatggagcatgcccatgtatgctcacaaggtactaggggagcctgggagcatctctgccatctctctatagcacttgtctgcaggctagaatgaagcatgcccatgtatgctcacaaggcatactgttccatcatgcacagacaaacaccaatcaacacactctcggttgcagtcacatagagctccgacccccacagatgccatgggtgtgtgagcacacacagccttataggtacgaacatgctcccacaccagggatacctctcagaggtcttacctttttctacttcctgtctccatctaatggatagcactcctcttttcctgcatctcaagcttcagaaaatggcgctgattatctggagtaacattgtgtccggaattggtgggt

SEQ ID NO: 410719 - DNA, 437 bp, Homo sapiens
acttctttatatattctggtttttggcctcttgtcatatatatgatttgtaaatattttctcctattctgtaggtcgccttttcactctgttggtttttttgaggtgaagaaatgtttaagtttgatgtaattccatttgtctattattgcttttgctgtctatccttttggtatcctatccaagaaattattgccaaacccaatgtcatgaagattttcccctgtgttttcttctaagggttttatagttttagctcttacatttaggtgtttcatccgtgttagcgtgtgctttcattatttaaatacactctgcatggtcaagcagtctgtagtctgcagggaaatcattgagactcaaactcggccaaggttaggcctagacatggttctcttcaggttattggatgatggggctcatgaagctttagtgggc

SEQ ID NO: 410720 - DNA, 204 bp, Homo sapiens
agtcatcatctacctagacatccatctaggtaggagtctagggagtgagcgagcctagcccaccaccctccacccctcatctcaacctggctctgttgttccccttaaccccttgattcatgcagcgtggatgagacacaagcattaggaccccagtttataggggatgcgacacagctttttcccaaggatgccattcctatg

SEQ ID NO: 410721 - DNA, 496 bp, Homo sapiens
caatgaataaaagactgggatccctggtggatgagtttaaggagcttgtctacccgccagattacaatcctgaagggaaagttaccaagagaaagcacaataacgaaggttctgggagcaaaaggcccaaggtggagtattgagaagagaagctgaagacccacatcagcaaggtcatgctgggcaagttcactgtgcccatgctgaaagaggcctgccgggtggatgggctgaagagtgtgctaaagaagcaggacctgctgaaagccctcaccacgcacttccaggactgaccagaggccgcgcgtgcagccgcccttccacaccattcccaggctgcctggccttgttctcagccagttaaaatgtgtttcttctgagctaggaaggactttaagtttttgaggctttctgttgccatggtgatggtgtagccctcccactttgctgttccttactttactgcctgaataaagagccttaagtttgtactatt

SEQ ID NO: 410722 - DNA, 929 bp, Homo sapiens
ggtgaaaattagttggtaattaatccagcaataacagttaacagtctcaaattcagttaccacacaaataagaaaggaatacaaaaagaaggaggggatgtacttaaatccaaatgtgagcatggatatcacccagaaagagagagaattcagcatttctcctagtttgtggtctttgaggcataactgataagtgggaaaacagttgttctaatcgcagtggcagtgttcaagggaggaaccattgctggaagtgaccaagtgtactattttcaggtggcaaactcaccaatagggatcatttcccttttctctagttgaattggtgttgctgctaccctgtgctgagcagggtttggttttactgattgactgagaagatggtacctgtccccctgggctgagagcaggtgtacctgggcagtctctgaccatttagctgggtcccgtggttctgcagcacttgttaccttgcagaattggggcaggtgctttactcaaggtcagcggtttcacctcgaagactggacatcattgtaaaaaccagacgcagtctaaaagtgacaatgacaacagtgcaaaaatagaaggaaaaaaaggagaaagctgaaagtaaatcaagtctgtctataggactctcacaggagagcatgaatcatcaaagaggttccagagttacaaccaagaagtatttatggcgatcagtggtgcaaagggtaataatacaaacataataaagaagagaaaggaaagcatactagagataaaggaggcctagcattaaatgaatagggagataagcttaatgattatgctcaaatgactgagctattgatggcaaaatggctgagctttggaactgctttttaaaactggcctttaagaagataaataaggataattaaacagtaatgaagacccgtttcatt

SEQ ID NO: 410723 - DNA, 498 bp, Homo sapiens
ggttctagaatttggcatcagatgggtagcagctttggaaggaagcataagaaagggacacacgaggactccacacagccccaattgtcactttccaccaccacatatcctctttaattctgagagtattcaaaggagtttaaccattcagtggatgatacaattatcacagtggcatagccagttgtcctgttaacagccatcacatgtgaccctggggagcccaggcttctttcgtggtcagacctaaacctgctgagagagggtggtttcatgttagtcactgacagagcacatctccagctctcactgtggaatccaagttttcctttcgccttcctgcctcatttggttctgcccatttgcttggagccagaaagggaaaaggaagaacacaggacatcctctccgctctgcaactgacccaggtctgtctataacacctcctgacagtgcccagaaatcctcctatttaaaccattggcccctgatgcgatt

SEQ ID NO: 410724 - DNA, 972 bp, Homo sapiens
gcctgtgcaaaaatcagaggaactcaacagaaaacccagcctcccctacccaagtcagaatcgaacccctgaaggacccgccattggcttggcaaatcctccacccttcctcacaggcaagcgcaaccccggaaggggcctgtgtctctccagtcctgcagagcctgagggccccacatcacttaaacagcttttaccaaagatccacatgacgcaggctgcagtcagccctgagacctgggatctgtgaccaaatgcccttgagacgatggggctggcagaacccacaagcttccctgcggcgtgagggataatggcggtctctctcccataccactttgaacaagtgaaagccatttgcctttgttactccggaaaacgttttcactttgttgcatcttgtaaatattagagcagttgcagaaaagcagatgactttggtgtctttcctgatgatggagagactgtaaaattgcttttgctttcagtctcaggggaaggggagggaagagcagagcgtgatgggcacatggagaagctggctgtcccatttatgttttgattttattaatataaggagtgatggttttaggaaaaaggtattggttgggttgaagttaccacaatgattaggtcattttctagttctttctgtggcaacatttgggaagcttagaaagtgacttgcggccgggcgtggtggctcatgcctgtgatcccagcacttcgggaggccaaggtgggcggatcacgaggtcaggatatcgagaccatcctgcctaacacggtgaaactccgtctctactaaacatacaaaaaattagccgggtgtggttgtgggctcctgtagtcccagctactccggaggctgaggcaggagaatggcgagaacctgggaggtggagcttgcagtgagccgagatcataccactgcactccagcctgggcgacagagcgagactccgtctcaaa

SEQ ID NO: 410725 - DNA, 570 bp, Homo sapiens
cagatgccatgactacatctgtttgttggggaccagggaggctgccagtgaggattcagggtggaagtagtgtgtacccaatacctattgtgagatgtggcctggggagccctgagattgcctggccaggctcactcactacccagacaccctcttcctgcatggcgagtccctcagcccctccaaggctcaattctcagacatcggagtaatccacatcctccatcttgagttactcctcacaaggcctgcaagttttcctaggaggaagggaagacagggttgaacccacacaattctagaatctagaatttggaggatttctaaaccatttctgtaagtcagcccttgagaacttgtagattttctcatcatttgcagcatgagagtctggagtagactgtttggatttgactcttggttccttgggcaagttacttaacctctcagctgtgtgtcagtttccttatctaaaaagtgtggttaataataactgacctctcagaggtattgtgaggttactgtgatgattaaattagttgattcatataaaatgtttaaaagagtgcc

SEQ ID NO: 410726 - DNA, 291 bp, Homo sapiens
ggtgacaagagagaaactccatctcaaaaccaaaccaaaccaaaccaaaccaaaccaaaccaaaccaaaccaaaccaaacaaaatcggtccctactgtgccgacccagcttgcacattctactcggggttgggggacagcttggtgcattcctgtctctgcagacaacttttactgatggagcaccacctgctcagcacagccaagcacccaggttgtaaggaagggacaggcccagccaccctgcagcttacagcccacctgaggactaactagaattcagtaggacgaa

SEQ ID NO: 410727 - DNA, 350 bp, Homo sapiens
aggtgaggaaactcaagcatggaggggtaaagtaccttgcgctaggttacccggctaataagtggcccagctgggatttggtgcaggctgtctggctccagagcctctccttgtaaccttgatatggggctgtctctctaattgctaactaacatttatcacatgcttactacatgagtgtcactcttctaagtagtttatgtttacaaactcttaatactctcacaagccggccgggtgctgtggctcacgcctgtaatcccagcactttgggaggcccaggcgggtggatcacaaggtcaggagatcgagaccatcctggctaacatggtgaaaccccgtctctacta

SEQ ID NO: 410728 - DNA, 807 bp, Homo sapiens
tatcataattttggttaggtggttatatttggagttaacatcattatgactccgtaaatgccaattcacagctaagccatatagtatactataattacttttccttttgagcagtttttcctagagttaccattttgttgtttacctagttttgtttatacttactaccaacttaactacaaattcttccctgtctgtatctactatttcttcaaacacattacacattctaccaatttcaccttctcacagtagtatctctagaaatcttccaacctgtttctattgggactggaaactatctactaacctgaggacaagctgtcttcttgtgatcattattcatcatcatcctggtgattccctgggtctctagttaggtcatattccctgttacttgtatcctatgccttcatcttttttagtttacttctttatttttgttgagtaattcctccaataactgcctaagaaaggggacatgacaggtaaattttttaaggcttcgtaagtctaaaactgtcattagtctatccttaatcaacagtttagttggatactgaatacctggttgaaaatcacttttccttctgaatgctgaagactccactatcttctagcttccagtgtggtgtcaagaagtgcaaagccattctgattactgatcctttagatgtgacctgttatttatttcactctggaaactcccttgttttctaaaattgaacagtgatgtgccctgttttggctttttatatctgtactggtcactcaacaggcttttcctaactggtaactcatgtcctc

SEQ ID NO: 410729 - DNA, 423 bp, Homo sapiens
gaaatttcaccctgggtgtgcacactgttccctaagatcacaaatctgtaaatcagaacttctgcacagataattctcctaggatgggtgccaggtttcatttttcaatgtaatgaagtctcttgtagaaaagagcttaataaggcaaatgtctgaatttttagagctgttacctttacatctcattgttttaattctccggagtgctgtaaactaccagcatcttcactgaactttccttcgatcagtaatacctatattatgtgtttataaggcaattgaaccaaagctgttaattttttaaccattcttacggttttgcttgacttcaaaggacaccttaggttcaaaggacaccttaggtcttaatgtaagatttagtgaataaatctttaacatcacctcacacctcacattttactc

SEQ ID NO: 410730 - DNA, 421 bp, Homo sapiens
gaagggacaggcctgcttctggggaaagaggaggaggtggaaatgaagcatgggtggacctgggtgtggaaagtaaggcctacagaagtgtccttctggagctaggcctccactgggacagcccaagggctgggtcctgggctggattcgatctttctagttcacccagcatccccagtgcctgccacgatgccaggaacatcacagtactccacaaataactgctaagtggattaatgaattaatgatgagagactattaagatgcactttgttacttccagaaacagtctcgtctggaagacggatgtgtacagaagcaactctataggaggcagattgtttggggaagaaagaatgggaatgtgggtagaactggggaggacaaatccatttccactgtccacttccctaggtggtgg

SEQ ID NO: 410731 - DNA, 477 bp, Homo sapiens
gtgggtcctggaactaatcctctggataccaagggacgactgtgtttaaaccatcgtttgggtttggagagattaatgacaacagtggctaagcatgggaagggtttctatggtgggactgcattggaccacctctgaatgtgtgtattagcagtttagtaaataaaacaaatctaaattattatttgattggggttagtgggatgcaaataataagatttattcagagtatcctaaaaattcccccagttttatttagttttgtggaattatgtcctctttctaattttgcaacatttccttgcatgttaaaacattcttccctgaacccacaatgagtcttttacaacacatctctgatacaagaaaaaagatatttcaatgaaaaacagagcttgcttttgtacataagctaaaaacaaacaaaacaaacccagaagcatagctgtctgctcattcccttctacccaagagaaa

SEQ ID NO: 410732 - DNA, 405 bp, Homo sapiens
ctaacggggcatggcaacatacagaaaaatgaagcaagcaggaaaagagcagatctacccactgggtctggagacctggatggcagtggaggctcagccagcaagccaagacacattgttcaagatagttaagacagttctacctataattcagacagccaggcatctatggtgtaggagtgaggcaatgtagaaggagagaatcaaggaagaagtttagagtcagatcatcccagcttactaataagcaagaagtcagcccatctgcccattaccctgcaacagtccccacggcatcctctctgtccttaaataaatagatccaaggcaagatgaatgaatgggttcagggaaagataaatatctccagaaaaatgcaataaagagaaattttgagccaattaa

SEQ ID NO: 410733 - DNA, 452 bp, Homo sapiens
agggttcttggcagataactaaggctacaggagtcataagggtggcaccctaattctataggactgtagcctcataaaaagacggagagagagagagagctctctctatggcaaacaccgaggaaaggccacatgagcgtgcagtgagaaggcagctgtctgcaaggcacagagtgcactcactagaagccaaccacgctggcaccctgatcttcctcttccctcttcagagctgtgaaaaaattaatatctatataatttataaattacccagtctgtaatattgtgcagcacaaagtgactaagacatcgtatgtatactgatgacatacagatttagtcctcatctcttccttcaactgcaggcctatgtgtccaacttccttcttgactcctccacttggatgaataataaatagccacctcaaatattttaaagtccaaaacaaacc

SEQ ID NO: 410734 - DNA, 141 bp, Homo sapiens
tgtgcatcgggcagcggccagcaacctgcctctcacccacctggcccttctgggaggaccgggacttcctggggtcagattggaatgtacgtccaaaataagagtgaatggggatttgctgattattaaaacaattttgtt

SEQ ID NO: 410735 - DNA, 447 bp, Homo sapiens
aaaagaaatgttgttcttgtaagtcgagaaattgtgaggttgtttattacacggtgaaagctaattgataaggcattatttgtaatttccaatcaacaatccacctatatgtttaccagaaagacatataggttggttaaattcatacaacggtgataaagtttggatgtgtgtcccctccaaatctcatgttgaaatacatccgccagtgttgaaggcgggcctagtgggaggtgtttgggttatggggacagatccctcgtgaatgacttggtgtcctcccatggcaatgagtgagttcttgctccggtagttgatgtgagagctggttctctaaaggggcctggcacctcgtcctcttgtctatatttctccctctttctgtcttgctccatctctctttcttgttccctctctcgctgtgtgacatacctgcaccctcttcac

SEQ ID NO: 410736 - DNA, 395 bp, Homo sapiens
ttaattctaggggttgtacttggatttcaaaagacaccttatcatctttcagaagagagtagatttctcttctgtaaaggcagaatgaaaagcatacttttcaaatttgaaaaatatagtcaggttgatttaagtgacattttcttgctttaaattatattaaataggcatactctttttacgtttcatctgtagtaaagtgagagttagaaagaatggcaaagttctactcttcaaaagaccaaagcaccaactaagcctatgcatttttttttccctagaattctacgtatggaaaagagctatttgtagctgcataaagaaaagctgccacgctaggaaagactttgacccatccagcctgtgttgcctgtcctgtaaagtatttgatttca

SEQ ID NO: 410737 - DNA, 347 bp, Homo sapiens
aacaaggcagaggagtattgcatttatgatacacttgcagtcttggaagtctcatcaacccagctctgcatctcactagtgatgaactttcagcaaattgacagcactggaacccttcacaaggacattttttcccaaataacaggctttgtctgttttcatccatttagtcagcaggcatttttgagtaattctagcacaattgtttgaaatacctgctgtgaagtccaattgctcaaatttgcattccaattctgccactcacttcctgaaaaaacttctgatttttacctaaactctgtgcctctattttattaaatgcaaaacatgaggatttaaggaaattc

SEQ ID NO: 410738 - DNA, 381 bp, Homo sapiens
ttcctgtgggacatacaagtggaaacttgcagtataggcccttggatctgtgaatctggaccttaacctagaggttttggctaaaattatagatttggaaattatagtagtagttgaagctgtaaatgtaattacctagggaaagcatgtagaagaagaaaagtaaaatgtggccgggtgtggtggttcacatctgtaatcccagcactttgggaagcccaggtgggtggatcaaccgaggtcaggagttggagaccagcctggccaacgtggcgaaaccttgtgtctactaaaaatagaaaaattagctggccatcatggcgtgcgcctgtaatcccagttacttgggaggctgaggcagaagaatcacttgaacccggg

SEQ ID NO: 410739 - DNA, 638 bp, Homo sapiens
agataaaatttgaatagaaaggtaagatttgtatagtgattacaaagatgtgacctttaacagagggttttgttgtgtttgttttccacataaaagaatgaagaatttgtgagggtgaggtaaaagagaaggggtctccttaaaacttgagagaaggaaagaatttgtcccattgtagcaatatttgagaacaggttttattaaggttttaatatgtgttgaagtaaataattatgcaaattgaactagaaacttcttagtttaaatctagtctgctatttacagtgttagtagctggacatcatacttttttaaattaatgtaatattgataaatagcaatcctgtgtattctcttatttctcagacttaataacaaagactttataaatccacatatgtagtgggtttcagttgtttgcacgttattcatgaccaatattatgtacatagcattgttctaaggccttctttgatctgatcttgggtataaagaaacaaaaacaagccgggtgaggtggcctatgtttgtagtcccgggtgccctggagactgaggcaggaggattgcatgaactagggagttcgagaccagcctggtggcaacacagtgaaaccctgtctctaaaaaataaaaatt

SEQ ID NO: 410740 - DNA, 2958 bp, Homo sapiens
ctggatggactagccggggccatggccggcgcggcggcggagtcagggcgggagctgtggaccttcgcgggttcccgggacccgagcgcaccgcggctagcctacggctacggcccgggcagcctgcgcgagctgcgggcgcgcgagttcagccgcctggcaggaactgtctatcttgaccatgcaggtgccaccttgttctcccagagccagctcgaaagcttcactagtgatctcatggaaaacacttatggtaatcctcacagccagaacatcagcagcaagctcacccatgacactgtggagcaggtgcgctacagaatcctggcgcacttccacaccaccgcagaagactacactgtgatcttcactgccgggagcacggctgctctcaaactggtggcagaggcctttccatgggtgtcccagggcccagagagcagtgggagtcgcttctgttacctcaccgacagccacacctccgtagtgggtatgaggaacgtgaccatggctataaatgtcatatccatcccggtcaggccagaggacctgtggtctgcagaggaacgtggtgcttcagccagcaacccagactgccagctgccgcatctcttctgctacccagctcagagtaacttttctggagtcagataccccctgtcctggatagaagaggtcaagtctgggcggttgcgccctgtgagcacgcctgggaagtggtttgtgctgctggatgcagcctcctacgtgagcacctcgcctttggacctgtcagctcaccaggccgactttgtccccatctccttctataagatcttcgggtttcctacaggcctgggcgctctgctggtccataatcgtgcggctcctctactgaggaagacctactttggaggagggacagcctctgcgtacctagcaggagaagacttctacatcccgaggcagtcggtagctcagaggtttgaagatggcaccatctcattccttgatgttatcgcgctaaaacatggatttgacaccctagagcgcctcacaggtggaatggagaatataaagcagcacaccttcaccttggctcagtatacctacatggccctgtcctctctccagtaccccaatggagcccctgtggtgcggatttacagcgattctgagttcagcagccctgaggttcagggcccgatcatcaattttaatgtgctggatgacaaagggaacatcattggttactcccaggtggacaaaatggccagtctttacaacatccacctgcgaactggctgcttctgtaacactggggcctgccagaggcacctgggcataagcaacgagatggtcaggaagcattttcaggctggtcatgtctgtggggacaatatggacctcatagatgggcagcccacaggatctgtgaggatttcatttggatacatgtcgacgctggatgatgtccaggcctttcttaggttcatcatagacactcgcctgcactcatcaggggactggcctgtccctcaggcccatgctgacaccggggagactggagccccatcagcagacagccaggctgatgttatacctgctgtcatgggcagacgtagcctctcgcctcaggaagatgccctcacaggctccagggtttggaacaactcgtctactgtgaatgctgtgcctgtggccccacctgtgtgtgatgtcgccagaacccagccgactccttcagagaaagctgcaggagtcctggagggggcccttgggccacatgttgtcactaacctttatctctatccaatcaaatcctgtgctgcatttgaggtgaccaggtggcctgtaggaaaccaagggctgctatatgaccggagctggatggttgtgaatcacaatggtgtttgcctgagtcagaagcaggaaccccggctctgcctgatccagcccttcatcgacttgcggcaaaggatcatggtcatcaaagccaaagggatggagcctatagaggtgcctcttgaggaaaatagtgaacggactcagattcgccaaagcagggtctgtgctgacagagtaagtacttatgattgtggagaaaaaatttcaagctggttgtcaacattttttggccgtccttgtaatttgatcaaacaaagttcaaactctcaaaggaatgcaaagaagaaacatggaaaagatcaacttcctggtacaatggccaccctttctctggtgaatgaggcacagtatctgctgatcaacacatccagtattttggaacttcaccggcaactaaacaccagtgatgagaatggaaaggaggaattattctcactgaaggatctcagcttgcgttttcgtgccaatattattatcaatggaaaaagggcttttgaagaagagaaatgggatgagatttcaattggctctttgcgtttccaggttttggggccttgtcacagatgccagatgatttgcatcgaccagcaaactgggcaacgaaaccagcatgttttccaaaaactttctgagagtcgtgaaacaaaggtgaactttggcatgtacctgatgcatgcatcattggatttatcctccccatgtttcctgtctgtaggatctcaggtgctccctgtgttgaaagagaatgtggaaggtcatgatttacctgcatctgagaaacaccaggatgttacctcctaaaaaaaatttttagcatacattaaagtttctcttttacagtgatctctattattgttaagatctgcaacttggttcagtagaacttgatgttttgaataaggagagctctttttctttagaggcagggaatgctctcacctgcttccttctgcctttgacttctcaccctgcaaatttgcactggctgtgctcaggagagcacttctgaggcctcaggaacgaatgctgcacccacatccagtgaggctcctgtaggtatttgaagtataa

SEQ ID NO: 410741 - DNA, 2723 bp, Homo sapiens
ctggatggactagccggggccatggccggcgcggcggcggagtcagggcgggagctgtggaccttcgcgggttcccgggacccgagcgcaccgcggctagcctacggctacggcccgggcagcctgcgcgagctgcgggcgcgcgagttcagccgcctggcaggaactgtctatcttgaccatgcaggtgccaccttgttctcccagagccagctcgaaagcttcactagtgatctcatggaaaacacttatggtaatcctcacagccagaacatcagcagcaagctcacccatgacactgtggagcaggtgcgctacagaatcctggcgcacttccacaccaccgcagaagactacactgtgatcttcactgccgggagcacggctgctctcaaactggtggcagaggcctttccatgggtgtcccagggcccagagagcagtgggagtcgcttctgttacctcaccgacagccacacctccgtagtgggtatgaggaacgtgaccatggctataaatgtcatatccatcccggtcaggccagaggacctgtggtctgcagaggaacgtggtgcttcagccagcaacccagactgccagctgccgcatctcttctgctacccagctcagagtaacttttctggagtcagataccccctgtcctggatagaagaggtcaagtctgggcggttgcgccctgtgagcacgcctgggaagtggtttgtgctgctggatgcagcctcctacgtgagcacctcgcctttggacctgtcagctcaccaggccgactttgtccccatctccttctataagatcttcgggtttcctacaggcctgggcgctctgctggtccataatcgtgcggctcctctactgaggaagacctactttggaggagggacagcctctgcgtacctagcaggagaagacttctacatcccgaggcagtcggtagctcagaggtttgaagatggcaccatctcattccttgatgttatcgcgctaaaacatggatttgacaccctagagcgcctcacaggtggaatggagaatataaagcagcacaccttcaccttggctcagtatacctacatggccctgtcctctctccagtaccccaatggagcccctgtggtgcggatttacagcgattctgagttcagcagccctgaggttcagggcccgatcatcaattttaatgtgctggatgacaaagggaacatcattggttactcccaggtggacaaaatggccagtctttacaacatccacctgcgaactggctgcttctgtaacactggggcctgccagaggcacctgggcataagcaacgagatggtcaggaagcattttcaggctggtcatgtctgtggggacaatatggacctcatagatgggcagcccacaggatctgtgaggatttcatttggatacatgtcgacgctggatgatgtccaggcctttcttaggttcatcatagacactcgcctgcactcatcaggggactggcctgtccctcaggcccatgctgacaccggggagactggagccccatcagcagacagccaggctgatgttatacctgctgtcatgggcagacgtagcctctcgcctcaggaagatgccctcacaggctccagggtttggaacaactcgtctactgtgaatgctgtgcctgtggccccacctgtgtgtgatgtcgccagaacccagccgactccttcagagaaagctgcaggagtcctggagggggcccttgggccacatgttgtcactaacctttatctctatccaatcaaatcctgtgctgcatttgaggtgaccaggtggcctgtaggaaaccaagggctgctatatgaccggagctggatggttgtgaatcacaatggtgtttgcctgagtcagaagcaggaaccccggctctgcctgatccagcccttcatcgacttgcggcaaaggatcatggtcatcaaagccaaagggatggagcctatagaggtgcctcttgaggaaaatagtgaacggactcagattcgccaaagcagggtctgtgctgacagagtaagtacttatgattgtggagaaaaaatttcaagctggttgtcaacattttttggccgtccttgtaatttgatcaaacaaagttcaaactctcaaaggaatgcaaagaagaaacatggaaaagatcaacttcctggtacaatggccaccctttctctggtgaatgaggcacagtatctgctgatcaacacatccagtattttggaacttcaccggcaactaaacaccagtgatgagaatggaaaggaggaattattctcactgaaggatctcagcttgcgttttcgtgccaatattattatcaatggaaaaagggcttttgaagaagagaaatgggatgagatttcaattggctctttgcgtttccaggttttggggccttgtcacagatgccagatgatttgcatcgaccagcaaactgggcaacgaaaccagcatgttttccaaaaactttctgagagtcgtgaaacaaaggtgaactttggcatgtacctgatgcatgcatcattggatttatcctccccatgtttcctgtctgtaggatctcaggtgctccctgtgttgaaagagaatgtggaaggtcatgatttacctgcatctgagaaacaccaggatgttacctcctaaaaaaaatttttagcatacattaaagtttctctttt

SEQ ID NO: 410742 - DNA, 706 bp, Homo sapiens
cattctccaacatttcctgagaaccgtcaagatctcagtccctcttttctttgtctgcaaagaccttaagcagtggtcttttagctgacaaacaaatgcagatgattccccagcagagacggtgaacaggtgccccgttctggctctccatagttaggggactgggcatttctgtgtgattcctccctctgaggtgcaaggctctggtcacttttgtggcaacgctgtgttttccttctcacctgccaggttttggggccttgtcacagatgccagatgatttgcatcgaccagcaaactgggcaacgaaaccagcatgttttccaaaaactttctgagagtcgtgaaacaaaggtaagcgtgattgcaaaatatgacacctggtttccaatcctggtgttatcaataccagaactatgttcataatagcacagagttatttttttaaatgggggatttgctgcccatccaaagctgttgggctgccattaacctatccttgtttgtagtttcattttatttttcctttccatccaagttctcactttttttgttttacttcatgtatttttatgctttccaatcttgttgaagagatatggagtacaaaaaaaacaagtaattctgttgtcttgatcattattttctttaacacagagagctcatgaagagtaaagtgccttaatgtgaatagagtagctgcata

SEQ ID NO: 410743 - DNA, 1331 bp, Homo sapiens
gatatcgtcgaccacgcggtccgaactcgtctactgtgaatgctgtgcctgtggccccacctgtgtgtgatgtcgccagaacccagccgactccttcagagaaagctgcaggagtcctggagggggcccttgggccacatgttgtcactaacctttatctctatccaatcaaatcctgtgctgcatttgaggtgaccaggtggcctgtaggaaaccaagggctgctatatgaccggagctggatggttgtgaatcacaatggtgtttgcctgagtcagaagcaggaaccccggctctgcctgatccagcccttcatcgacttgcggcaaaggatcatggtcatcaaagccaaagggatggagcctatagaggtgcctcttgaggaaaatagtgaacggactcagattcgccaaagcagggtctgtgctgacagagtaagtacttatgattgtggagaaaaaatttcaagctggttgtcaacattttttggccgtccttgtaatttgatcaaacaaagttcaaactctcaaaggaatgcaaagaagaaacatggaaaagatcaacttcctggtacaatggccaccctttctctggtgaatgaggcacagtatctgctgatcaacacatccagtattttggaacttcaccggcaactaaacaccagtgatgagaatggaaaggaggaattattctcactgaaggatctcagcttgcgttttcgtgccaatattattatcaatggaaaaagggcttttgaagaagagaaatgggatgagatttcaattggctctttgcgtttccaggttttggggccttgtcacagatgccagatgatttgcatcgaccagcaaactgggcaacgaaaccagcatgttttccaaaaactttctgagagtcgtgaaacaaaggtgaactttggcatgtacctgatgcatgcatcattggatttatcctccccatgtttcctgtctgtaggatctcaggtgctccctgtgttgaaagagaatgtggaaggtcatgatttacctgcatctgagaaacaccaggatgttacctcctaaaaaaaatttttagcatacattaaagtttctcttttacagtgatctctattattgttaagatctgcaacttggttcagtagaacttgatgttttgaataaggagagctctttttctttagaggcagggaatgctctcacctgcttccttctgcctttgacttctcaccctgcaaatttgcactggctgtgctcaggagagcacttctgaggcctcaggaacgaatgctgcacccacatccagtgaggctcctgtaggtatttgaagtataa

SEQ ID NO: 410744 - DNA, 2887 bp, Homo sapiens
ctggatggactagccggggccatggccggcgcggcggcggagtcagggcgggagctgtggaccttcgcgggttcccgggacccgagcgcaccgcggctagcctacggctacggcccgggcagcctgcgcgagctgcgggcgcgcgagttcagccgcctggcaggaactgtctatcttgaccatgcaggtgccaccttgttctcccagagccagctcgaaagcttcactagtgatctcatggaaaacacttatggtaatcctcacagccagaacatcagcagcaagctcacccatgacactgtggagcaggtgcgctacagaatcctggcgcacttccacaccaccgcagaagactacactgtgatcttcactgccgggagcacggctgctctcaaactggtggcagaggcctttccatgggtgtcccagggcccagagagcagtgggagtcgcttctgttacctcaccgacagccacacctccgtagtgggtatgaggaacgtgaccatggctataaatgtcatatccatcccggtcaggccagaggacctgtggtctgcagaggaacgtggtgcttcagccagcaacccagactgccagctgccgcatctcttctgctacccagctcagagtaacttttctggagtcagataccccctgtcctggatagaagaggtcaagtctgggcggttgcgccctgtgagcacgcctgggaagtggtttgtgctgctggatgcagcctcctacgtgagcacctcgcctttggacctgtcagctcaccaggccgactttgtccccatctccttctataagatcttcgggtttcctacaggcctgggcgctctgctggtccataatcgtgcggctcctctactgaggaagacctactttggaggagggacagcctctgcgtacctagcaggagaagacttctacatcccgaggcagtcggtagctcagaggtttgaagatggcaccatctcattccttgatgttatcgcgctaaaacatggatttgacaccctagagcgcctcacaggtggaatggagaatataaagcagcacaccttcaccttggctcagtatacctacatggccctgtcctctctccagtaccccaatggagcccctgtggtgcggatttacagcgattctgagttcagcagccctgaggttcagggcccgatcatcaattttaatgtgctggatgacaaagggaacatcattggttactcccaggtggacaaaatggccagtctttacaacatccacctgcgaactggctgcttctgtaacactggggcctgccagaggcacctgggcataagcaacgagatggtcaggaagcattttcaggctggtcatgtctgtggggacaatatggacctcatagatgggcagcccacaggatctgtgaggatttcatttggatacatgtcgacgctggatgatgtccaggcctttcttaggttcatcatagacactcgcctgcactcatcaggggactggcctgtccctcaggcccatgctgacaccggggagactggagccccatcagcagacagccaggctgatgttatacctgctgtcatgggcagacgtagcctctcgcctcaggaagatgccctcacaggctccagggtttggaacaactcgtctactgtgaatgctgtgcctgtggccccacctgtgtgtgatgtcgccagaacccagccgactccttcagagaaagctgcaggagtcctggagggggcccttgggccacatgttgtcactaacctttatctctatccaatcaaatcctgtgctgcatttgaggtgaccaggtggcctgtaggaaaccaagggctgctatatgaccggagctggatggttgtgaatcacaatggtgtttgcctgagtcagaagcaggaaccccggctctgcctgatccagcccttcatcgacttgcggcaaaggatcatggtcatcaaagccaaagggatggagcctatagaggtgcctcttgaggaaaatagtgaacggactcagattcgccaaagcagggtctgtgctgacagagtaagtacttatgattgtggagaaaaaatttcaagctggttgtcaacattttttggccgtccttgtaatttgatcaaacaaagttcaaactctcaaaggaatgcaaagaagaaacatggaaaagatcaacttcctggtacaatggccaccctttctctggtgaatgaggcacagtatctgctgatcaacacatccagtattttggaacttcaccggcaactaaacaccagtgatgagaatggaaaggaggaattattctcactgaaggatctcagcttgcgttttcgtgccaatattattatcaatggaaaaagggcttttgaagaagagaaatgggatgagatttcaattggctctttgcgtttccaggttttggggccttgtcacagatgccagatgatttgcatcgaccagcaaactgggcaacgaaaccagcatgttttccaaaaactttctgagagtcgtgaaacaaaggtaagcgtgattgcaaaatatgacacctggtttccaatcctggtgttatcaataccagaactatgttcataatagcacagagttatttttttaaatgggggatttgctgcccatccaaagctgttgggctgccattaacctatccttgtttgtagtttcattttatttttcctttccatccaagttctcactttttttgttttacttcatgtatttttatgctttccaatcttgttgaagagatatggagtacaaaaaaaacaagtaattctgttgtcttgatcattattttctttaacacagagagctcatgaagagtaaagtgccttaatgtgaatagagtagctgcata

SEQ ID NO: 410745 - DNA, 2454 bp, Homo sapiens
ctggatggactagccggggccatggccggcgcggcggcggagtcagggcgggagctgtggaccttcgcgggttcccgggacccgagcgcaccgcggctagcctacggctacggcccgggcagcctgcgcgagctgcgggcgcgcgagttcagccgcctggcaggaactgtctatcttgaccatgcaggtgccaccttgttctcccagagccagctcgaaagcttcactagtgatctcatggaaaacacttatggtaatcctcacagccagaacatcagcagcaagctcacccatgacactgtggagcaggtgcgctacagaatcctggcgcacttccacaccaccgcagaagactacactgtgatcttcactgccgggagcacggctgctctcaaactggtggcagaggcctttccatgggtgtcccagggcccagagagcagtgggagtcgcttctgttacctcaccgacagccacacctccgtagtgggtatgaggaacgtgaccatggctataaatgtcatatccatcccggtcaggccagaggacctgtggtctgcagaggaacgtggtgcttcagccagcaacccagactgccagctgccgcatctcttctgctacccagctcagagtaacttttctggagtcagataccccctgtcctggatagaagaggtcaagtctgggcggttgcgccctgtgagcacgcctgggaagtggtttgtgctgctggatgcagcctcctacgtgagcacctcgcctttggacctgtcagctcaccaggccgactttgtccccatctccttctataagatcttcgggtttcctacaggcctgggcgctctgctggtccataatcgtgcggctcctctactgaggaagacctactttggaggagggacagcctctgcgtacctagcaggagaagacttctacatcccgaggcagtcggtagctcagaggtttgaagatggcaccatctcattccttgatgttatcgcgctaaaacatggatttgacaccctagagcgcctcacaggtggaatggagaatataaagcagcacaccttcaccttggctcagtatacctacatggccctgtcctctctccagtaccccaatggagcccctgtggtgcggatttacagcgattctgagttcagcagccctgaggttcagggcccgatcatcaattttaatgtgctggatgacaaagggaacatcattggttactcccaggtggacaaaatggccagtctttacaacatccacctgcgaactggctgcttctgtaacactggggcctgccagaggcacctgggcataagcaacgagatggtcaggaagcattttcaggctggtcatgtctgtggggacaatatggacctcatagatgggcagcccacaggatctgtgaggatttcatttggatacatgtcgacgctggatgatgtccaggcctttcttaggttcatcatagacactcgcctgcactcatcaggggactggcctgtccctcaggcccatgctgacaccggggagactggagccccatcagcagacagccaggctgatgttatacctgctgtcatgggcagacgtagcctctcgcctcaggaagatgccctcacaggctccagggtttggaacaactcgtctactgtgaatgctgtgcctgtggccccacctgtgtgtgatgtcgccagaacccagccgactccttcagagaaagctgcaggagtcctggagggggcccttgggccacatgttgtcactaacctttatctctatccaatcaaatcctgtgctgcatttgaggtgaccaggtggcctgtaggaaaccaagggctgctatatgaccggagctggatggttgtgaatcacaatggtgtttgcctgagtcagaagcaggaaccccggctctgcctgatccagcccttcatcgacttgcggcaaaggatcatggtcatcaaagccaaagggatggagcctatagaggtgcctcttgaggaaaatagtgaacggactcagattcgccaaagcagggtctgtgctgacagagtaagtacttatgattgtggagaaaaaatttcaagctggttgtcaacattttttggccgtccttgtaatttgatcaaacaaagttcaaactctcaaaggaatgcaaagaagaaacatggaaaagatcaacttcctggtacaatggccaccctttctctggtgaatgaggcacagtatctgctgatcaacacatccagtattttggaacttcaccggcaactaaacaccagtgatgagaatggaaaggaggaattattctcactgaaggatctcagcttgcgttttcgtgccaatattattatcaatggaaaaagggcttttgaagaagagaaatgggatgagatttcaattggctctttgcgtttccagttctgggcacacaggggatctcta

SEQ ID NO: 410746 - DNA, 2227 bp, Homo sapiens
ctggatggactagccggggccatggccggcgcggcggcggagtcagggcgggagctgtggaccttcgcgggttcccgggacccgagcgcaccgcggctagcctacggctacggcccgggcagcctgcgcgagctgcgggcgcgcgagttcagccgcctggcaggaactgtctatcttgaccatgcaggtgccaccttgttctcccagagccagctcgaaagcttcactagtgatctcatggaaaacacttatggtaatcctcacagccagaacatcagcagcaagctcacccatgacactgtggagcaggtgcgctacagaatcctggcgcacttccacaccaccgcagaagactacactgtgatcttcactgccgggagcacggctgctctcaaactggtggcagaggcctttccatgggtgtcccagggcccagagagcagtgggagtcgcttctgttacctcaccgacagccacacctccgtagtgggtatgaggaacgtgaccatggctataaatgtcatatccatcccggtcaggccagaggacctgtggtctgcagaggaacgtggtgcttcagccagcaacccagactgccagctgccgcatctcttctgctacccagctcagagtaacttttctggagtcagataccccctgtcctggatagaagaggtcaagtctgggcggttgcgccctgtgagcacgcctgggaagtggtttgtgctgctggatgcagcctcctacgtgagcacctcgcctttggacctgtcagctcaccaggccgactttgtccccatctccttctataagatcttcgggtttcctacaggcctgggcgctctgctggtccataatcgtgcggctcctctactgaggaagacctactttggaggagggacagcctctgcgtacctagcaggagaagacttctacatcccgaggcagtcggtagctcagaggtttgaagatggcaccatctcattccttgatgttatcgcgctaaaacatggatttgacaccctagagcgcctcacaggtggaatggagaatataaagcagcacaccttcaccttggctcagtatacctacatggccctgtcctctctccagtaccccaatggagcccctgtggtgcggatttacagcgattctgagttcagcagccctgaggttcagggcccgatcatcaattttaatgtgctggatgacaaagggaacatcattggttactcccaggtggacaaaatggccagtctttacaacatccacctgcgaactggctgcttctgtaacactggggcctgccagaggcacctgggcataagcaacgagatggtcaggaagcattttcaggctggtcatgtctgtggggacaatatggacctcatagatgggcagcccacaggatctgtgaggatttcatttggatacatgtcgacgctggatgatgtccaggcctttcttaggttcatcatagacactcgcctgcactcatcaggggactggcctgtccctcaggcccatgctgacaccggggagactggagccccatcagcagacagccaggctgatgttatacctgctgtcatgggcagacgtagcctctcgcctcaggaagatgccctcacaggctccagggtttggaacaactcgtctactgtgaatgctgtgcctgtggccccacctgtgtgtgatgtcgccagaacccagccgactccttcagagaaagctgcaggagtcctggagggggcccttgggccacatgttgtcactaacctttatctctatccaatcaaatcctgtgctgcatttgaggtgaccaggtggcctgtaggaaaccaagggctgctatatgaccggagctggatggttgtgaatcacaatggtgtttgcctgagtcagaagcaggaaccccggctctgcctgatccagcccttcatcgacttgcggcaaaggatcatggtcatcaaagccaaagggatggagcctatagaggtgcctcttgaggaaaatagtgaacggactcagattcgccaaagcagggtctgtgctgacagagtaagtacttatgattgtggagaaaaaatttcaagctggttgtcaacattttttggccgtccttgtaatttgatcaaacaaagttcaaactctcaaaggaatgcaaagaagaaacatggaaaagatcaacttcctggtacaatggacctaaaggacgggtaccgag

SEQ ID NO: 410747 - DNA, 179 bp, Homo sapiens
cttcgggtttcctacaggcctgggcgctctgctggtccataatcgtgcggctcctctactgaggaagacctactttggaggagggacagcctctgcgtacctagcaggagaagacttctacatcccgaggcagtcggtagctcagaggtaaccttgccacaggggaggggtcagaggag

SEQ ID NO: 410748 - DNA, 302 bp, Homo sapiens
tgttgggattatgggggtgagccaccgtaccaggcccatggcacctctcttaatttataaattgaactggatgtgaagtaataatgtcagctagttgagataagagggttacagttaggcgtgagccaccgtgtctggccatacacatccctgctgaagcccgcattacccttcccctatgctatagaagccctgggtcgggggggtgggggtgatggcacagggatccaccatcttatcttggtgccatccctgacttgccttctgttcataaacgcctattaaatgtttctttctgagaa

SEQ ID NO: 410749 - DNA, 389 bp, Homo sapiens
tgttgggattatgggggtgagccaccgtaccaggcccatggcacctctcttaatttataaattgaactggatgtgaagtaataatgtcagctagttgagataagagggttacagttaggctgggcgcagtggctcacacctgtaatcctagcactttgggaggcctaggcggactgatcaccaggtcaggagattgagaccatcctggctaacatcatgaaaccccatctctactaaaaaatacaaaaaattagctgggaatggccaggcgtggtggctcacacctgtaatcccagcactttgggaggccgaggcaggcggatcatgaggtcaggagatcaagaccatcctggctaacatggtgaaaccccatctctgctaaaaataca

SEQ ID NO: 410750 - DNA, 750 bp, Homo sapiens
ataggaaactcgtccctttgatgtgatggaacacagggaaataatttttttttttaatttaaagaaacatagtcttctttctattggtttgaggcaatagctttttagagttaggtccagttagcatatggctcttttggttttatcatcttctcttctccatttaccgtctcccactcttccaaaatagaagagaattctaaactttaaatcatactgaaaagttttgactaaaaatctctttataatccttaatggtatcaaaattaacattagttttcacaaattaacctttccttgctctaaaaatcagagaactaagaaggctttgaaaagaataaagtccttaaaaagaaaccaagaacagtatataaaagattatttatttagaacagaatacttagagggtgagaactaatatcatttggattttttattaggtcatagggaggttctgtccatgcaaagtgatgtagtattttgaattcttgcaataatcacagatcaaaattgaggttaaatattgttgttttctttttcacccaggcctgggactggcaggctgcatggctttgtggctgaggctggaagcagagcctatcaaagtcccctctcttgcaaaaaaaaaagaaattcttttctgtttttgaagaaaggttaaggttgatatctcagcaaagctacttgaaggaagtgattggtcttgacccagcacttgtaatgcagtacttacaaaatcatccagattct

SEQ ID NO: 410751 - DNA, 336 bp, Homo sapiens
atcatgccattgcaccccaggcctgggtgacagagcaagactccatctcaaaaacaaaaacaaaaacaaaaacaaaaaaaaaatgtactggaagttctagctagtgctaaacggcatgaaaaagaaacaaatggcacgcagattggaaagggagacataaaactgcctttatttgcagatgatatgattgtttagaaaaatcccaaagcatttacatgcaggtttagctaagtctcaggatacaaggtcagtatacaaaagtccattgctgtcctatgtaccaattgaacaactggattttgtaataagaaaaacaataacatttacaatagcacc

SEQ ID NO: 410752 - DNA, 421 bp, Homo sapiens
gctggatacatacttttattagtgggtttacatattaaaatggatatataagagattaaggaagttgttagagttaaatggcaggtaaatattggattctggaggaatgtccaaagagaccacgggaggatgccagtaaagaaggaggcacctaggattttcctctaaccagttagaatgttcagaacagcctcattcttactcctttttttctccctctccttgcctcctgctttatctgtgtcagttacgtcatttgctttgatgattcccaaacacattgtcctcgtccatgcctctgtcctcctttccttaatgccctctacctggaatgccctttccttcatccttcgaagccgagcttaaatgccacttgcctatgttacatttctttcttcttttttttttttttgagatggag

SEQ ID NO: 410753 - DNA, 525 bp, Homo sapiens
taattaggttgagatgaggtcaagaggctggggccctcatgatggaatttgtgcccttacaagaagaaatactagatagttttcgatctctctgtgccatggggacacagcaagaagacagtcatctgcaagccaggaagagaactctcaccaggaaccaaatcatcaggaactgtgagctaaatttctgttgtttaagccacccaggctacgatgtactgaatgtttacatccccccaaatttgtatgttgatatcctagccctcaaggtgatggtattaggaaatattagggcctttgggaggtgattaggttatgaaggctgagccctcatgaatgggattagtgccctcataaaagaggccccagagagctggtttgccccttccactatcttagaacacagcaagaagacaaccatatacaaggacgaagcccctcaccagaaaccaaagctaccagccgtttgatcttgaacttccaagtttccaaagctatgagaaataaatgtttgtttataagtca

SEQ ID NO: 410754 - DNA, 1025 bp, Homo sapiens
acacaaggggccagaagaggtaggggtttgtttccagtgccagccccagaaatgtgacccattgtgctttttaccaagttcctcctctagctcaccagggacctgggggcgggcctgccagcggccactccctgtgctccccttccaggctgatgcctccctgcctgcccacaccggggtactccacgtctctacactttgtgcgtgctcctctctccacgaagaaggccaattctcctccttctctggataacttcgactaattcaccagactcagcaaaggctctgcctccctgcaggaggccatccctgatcctcgccactcctgccccatctatgccaggcatgtgcctccagggagccacagcaccctctaaagagagcaacaccaaatcagtgataaccgatcgtttccttcaaccagagttaaatgtctgcagaatgcccaccaggcatggtattacagcagagatccccactggaccaacaactcccactgggtccccagcaccgacacatccgaggtaccacaaccggtgactgctgagctgaactaaggatgcaatgggatgaaagccaatggggaaatgtgcctcaaatacttattaacccctggtacaggaggcctggctgctgggattattcctagatcctctgtgacttctctgaccatgtcacacactaaccttcccagtgaaccttctgctctgagcaggcctggccttctgcactcctgcaaatgccagtggcttttctatctctgagctactgggtctgctgctcccccaggctgaaatgccgtccctatgccattcttttctttgtccatccaaatccccagttattaaaaaaaggagaaaaatttaaaaggggttacctgttcttaaaaacaaacaaacaacaacatcaaaaacaaaaacagtcccacatcctccctgaagctttcctaaaaactaaggctcacactgttctctcccaactgaactgcaaaataaagtattaacatacacaatatcatcttattt

SEQ ID NO: 410755 - DNA, 421 bp, Homo sapiens
ttccattttaatggttgaatattttctcaatatgtgtttttacattattaagtttaacatttctttgtacatttactggtttgaatttactttgtgaatcacctcttcatgttccctgtccagttcttccatttttcccccttatatctttgtaatagctccttaaaatctttggtttatgtcttcaaatattttcccccagtttttcatttaccttttatttttatttatattttataatgaacagtagttgccctttttaatgtagccagcctatctttttttatttcttttatgctcataaacagcttccccttgtttattttttccttttttttttttctttacagaggtaatcaagttaaccttctccatgttgataccacagttgtcaccattttcttctttttttgagacagag

SEQ ID NO: 410756 - DNA, 864 bp, Homo sapiens
gctttcaggctgctgagcctgttccttggctggggtcggtagggcttggagccagccgttcaaagtcacccctgggaagcgcccgcaacccttggggacgcctctcctccggctgccccccttccctggaatccaggtgtcactggggccggggaggggctaggagctcggatttctgctttgggaagtttttacaagcccaccctccccctgccttgggtccccgagccaagaatttcagaaatccggggcacaaaaacgccagtgtttgcggtcaaggattaaaggcgcgaggtgtctttatttaatctgctccgccctgctcgggtttgcacgagaaaccaagcctgggagcgacggtccacgcaagcggagacacagcattatcccctggtcactggacgctggggtctagtgcctaatacgttaagctgcttctccccatcatcaagaaactgccgcatctgccatataaaggagatgtttctcattcgcccccactcatctcttcccccatgaaaacctcttccattttcaaaggatcttcggctctacttttcaagcaaattcaacaaatcagtgtatgcctgtgtaactggtaaatagtgaagggtaattatttcatgtgcttctaactcagaaacaatggaatattaacagcggttttctgaagatccagttggacaattttcattttcatcatataatggacatttatctcctacctgcattatccactgtcttccctcggagaccacaaatttcactgaaggcagcatctatgtcttattcatgcttgtgctctctacctcccctgacccagaaggacttattcttctttctgcacattttagtagatgtgtt

SEQ ID NO: 410757 - DNA, 1232 bp, Homo sapiens
agagagtctcactggagtgcaatggcatgaatctcgcctcactgaaacctctgcctgcctcagcctcccacgtggctgggattacaggcgcgcaccaccacgcccagcttatttttgtatttttagtagagacggggtttcaccacattggccgggctggtctcaaactcttgacttcagatgatccacccgtctcggcctcccaaagtgctgggattacaggcatgagccaccgtgcctggcctttgttaaaatattttagtgctttacaaacacttaatatattgcaaaaaaacaaaaacaaaaacctcattaaaacctactttatctctttacatgtaaaaatcttctgaatccttccccctctgccatcccctaaagttcttttattggtagtcaagaacaagctttaagccatactctacacaaacaccaatacaccgaaacacaaggtaacactctgccaatatgtttggatagactaagttaaatacttgaatggcttattcactttattactaagttgaccaattttttaaaaaagcaacaacacagctaaggttcttcctcaaacatcacctaaactaaaaaaaaagtgtgatacatgactacatttcaacacaagcacagacacaatgactcatcatttgcctatctaggaatttaactgaaggcagtaatcagagaagtgggcagatatgaaatcataatcttgtttacagtaggaaaaggctgaaaacctcccaagtattcattgataggggattatttgtcaatgaaggtatacctacgcaatcaatataacaactgcagaattataaacagacataaaaacatattcctgacacattgctgaataaaagaacaggtaaaaaacagcaacacagaatcccatttttcaaatacatacatatgtaatttgtatacacatttatatgcatacagaaaaaaaagtatatattccaaaatgttccagggtcatggaatttaaaaactttacctatttacgaatatggcctacttttgaaatcatgaagaaaaacaagttaaaaagttatttttatacttatctatcactcatcactcattttcttttttcttttttttggagacagagtcttgctctgtcacccaggctggagtacagtggtgcaatctcaggtcacagcaacctccacctcctgggttcaagcgattatcctgtctcagccttccgagtggctgggattaca

SEQ ID NO: 410758 - DNA, 1107 bp, Homo sapiens
agggtcaatcagaaaagagcagattctttccctgtgattcacatattttgcagaagcttctggcttggaatttctatcgcaagtttcaaatctcacagcagaaatgtttacacattgcagtttggctgaattcagaggaagctttcctggatctctgatgagaatgagaattgtggtcatgggaagcatatggccatgacattcatcccttactcaagataagctgaggagcaaggtcaacacattgcctcagacctcaaatgaagactggaacatatcaccctaaccgcatgggactaggatggggtgagcactggggcaggagcagtggtgtgtgatggaggggtggaggaatctttctccactccaagatgggatcagaaatgtaggaggaagccaaaaagagcaagctcaccactcttggcatattttttccaccttgacattgatagctagacctcactcctggttgggaaattttctaagctaccaagaataggaaaaaaatcaaccataactaaagccctttgagatattcttccttgtcttcatgaacaggacaatattaaaacattacagaaagtctggaaaacaaagggaaaaaaaaagctgatagccctgcccttcaaatatacaactcattgcatttttagtaatgccccctttcagtttttaatctatttgcatatataatatattagctagctaaaattggaacataaacaatatatatcttgcttattcatcttacaacttaatacagaaattttctgttactttattactttttataattatttttaacaactgcttaatatttctcagatagagttttaagtattattaccctacaaataggtgaaagtaatgatgaatagcatttagtatagccagtcctggatagacacagaaagaaaatgatacatttttgtttttctcctccttcaaattctgccaaatgccactcatcagcaatataatagtgaaataaagtccatattcaggtatttgatttggagttgctggagatttttggtagatttaattcttcacatgattaacccactgttattagcaaggcttggaccctttgaccacaaaaaaact

SEQ ID NO: 410759 - DNA, 676 bp, Homo sapiens
gtctacagctcccagagtgagcaacgcagaagatgggtgatttctgcatttccagtcgaggtaccgggttcatctcactagggagtgccagacactgggcgcagggctgaaaaagcacgagtgtccgcactatgacaaaagaaaagcggcgtctcctcaaaacaccaccatgttcccctatgagtctggtgagccaagacactaagaaactgcaggaaacgagagagttctcggggtgggggtgtccatggatgaagcaccgaacaaactggagcccgcaaggccggcgcccagccactcaacaccaccgaagccgccgcttacctttcgcggggtcacctcctctcctcgcccgagacgccccgccccgcttcgccgccccgcctgctagagagagcggcggagggcgccccgcccggcgccacagcgtcccctgtcttccggaggctgcggcgcagcggcgcggggctgcggggacccatccagtgctagcctttccggttctgaggacctcgcgcccctccttggggtctgcgggctgaagtgtgcaagggacgtttttgctttcttccctttttgacctttagttttccacctcccaacttcaaattacgttccagttcggtgtgtatgtttgtataaataaaaggagacatctcctagaagtatgtttatt

SEQ ID NO: 410760 - DNA, 703 bp, Homo sapiens
atcccagcattttgggaggccaaggagggcagatcacctgaggttgggagttcgagaccagcctgaccatcatggagaaaccctgtctctactaaaaatacaaaattagccaggtggggtggtgcatgcctgtaatcccagctacgagggaggatgaggcaggagaatcacttgaacctaggaggcagaggttgcagtgagcccagatcacgccattgcactccagcctgggcaacaagagcaaaactccatctcaaaaaataaaaaataaaaaataaataaatacatacataaaacaaaaccccaaaaccatgtacatcatttgtcctgacttatttacagtggtttagatgaacagactgagactagcatgtgatgccttctgagtggctggccctagcagtaggtttgttttgtttggtatctttgaatatatcaaatggtatattgaacaggcatttccttccagtaaataattgggcaggcaaagctattaacttccaaccagggcattatttctgctctgcccactctagttggctcaacagactgaaaattgttaagtggtcattctgtatcagtcccacctctctctgccccaggataacttttacggtcacaaacaagaagacagcacaaggactatggctaacaacacatcatcatctcaactcaacatgaaaaccagggctgggctgcctgc

SEQ ID NO: 410761 - DNA, 178 bp, Homo sapiens
acagtggtatttggtgatacaccatcttaggtgtatctatgaacacagaaatagtggatttgggagccatggacaatgtggagaccactcacagaccaggagcctggaaactaagtctcctactcctggcccctgttcttccccctgcactgtgttaacaatggacttggaagaaaac

SEQ ID NO: 410762 - DNA, 439 bp, Homo sapiens
aaggtgggagggaaagtgactctgatcttcaactcaaagaacaaagagaagtcaaaagtcatttaggacctacttctggggatatttccaaaagaattgaaagcaagctctcgaagagataccctcacattcatattcataccaacaatactcacaagtggaagcaacccaaaagtccaaattaatggattaacaaaatgtgtatgtatatacaaacaatggatactattcaaccttaaaaaggatcacttgaggtcaggagtctgaaccagcctgaccaacatggtgaaaccccatctctactaaaaatacaaaatcagccaggtgtggtggtaaatgtctgtaatcccagcaacttgggaggctgaggcaggagaatcgcttgaatctgggaggcagaggttgcagtgagcagagatcgccccattgcactgcagcc

SEQ ID NO: 410763 - DNA, 421 bp, Homo sapiens
tgttgggcaagaggtgtaggaaagtctggggaagtatctgattaattccaacctttccttagctcccactccctgagtgagtctgtgcataataaaaaagcagagggccccggactcaaatgcttgtgtcacttatacaagatgtggagagataaaataagcacagtaaggtgagttgtctcgaggttgtcacccaccatacagtgcccaacatctccttgcctctaactgctcacctgacagcctttcctgctgctgcaggtttaacacagggtactggcattgcggcccctcccttggtggttttatgttgaccatctgaaagcatccttcctgaaaatgagagctaggtttcttctttgttttctttgttactaataagagcttgatgtatgattaaaacttctaaaaaactggaagg

SEQ ID NO: 410764 - DNA, 488 bp, Homo sapiens
tttccactgggaaccagggatgggtaagccttgggcttaggaaaaattagtaattagagcagcaatgccctagactcatttattccagggcccctttgtaagagaaccttttaactttatataaaactaggtaattctgcacttatgctgttcttcatacgtcaagacagcaaaatcctctcacctctctactttcatgtatactttgaatagataatgcattcaaatgactcaacactcaagtgccagagtggagagatgtccagtgaaaagcttcctccgcctctgtccctttcttgtctgggggagtccccattgcctgtttcttggtagccttcagagagtctgttcatatgagggacatgcatatttatcctccctcccccacctcttctacaaatggtgccacatcataccatgcggacacgcagcaagcacctcatccttcatttttgtggctacataaatgtttcgttgaacggatgcag

SEQ ID NO: 410765 - DNA, 366 bp, Homo sapiens
tgggtcttgtgatgttgcccaagctggtctcgaactcctgggcttaagcaatcctcccatctcagcctcccaaactgttgggattacaggcacgagccaccacatccagcctaaaaacagtttttaaagggtacagtgtgataccgtttatgggaaccactttttagatgagacaagcccagttgtaaattaatggtgaataatttggttttcatatttggtttgggacaatggagcaggttatgttgggtgggaggaggagagagcatgggtggagaaccattcctttactgtcttgtgtgagtaaataaacctctttaagctcctgatatagcataccagagtgacttgggtggtgtctacatt

SEQ ID NO: 410766 - DNA, 416 bp, Homo sapiens
taattgctgagtttctagctcacatagagagatggtgtccttcattgatagaagaaacaatagaagaataccaggtgtgggcaggtacagcccttgagtttacatttggatacattgggtttgaagtgcttttgaaatacctaagaggttatgtcaagtaggcagttgagtatgtgggtaggtagctcagaggaagctactggcttggttaaaaagttgggagtcagttgtgaataggtggcattcaaagcgtttgcctaggataagaacatggagtgagcagacaaagtggcttggtactgaggctttagcaggtgggtagtcgacgtctgagcctacaaagagactgagaaggagtagccagcaaggtgttccagaaaaacaccagaaaagtgtagaattgcctgaaccaaagg

SEQ ID NO: 410767 - DNA, 383 bp, Homo sapiens
gcccggccgcccgctctccccggcgcccgccgccgccgctcgcttttttaatgtccacagacagtgaaaaggaactcggcgttagggggctgccaccgtgtcggaggcgaggcgaggaagggagctggaataacaaagggaggtaatggggtagattggatacctctggggtcttggaagaagctatgacttatttactgtctactatgtgaaatgactggactcttctatggacccagtggagctcagacaagggtccaggccctgacactgccccagagcaggggtgcagcacctatgaggatgccaagctcaggtcatcgccctgcggtgtctcagccaactgggcctcgaacagccccataaacttggacataaacaca

SEQ ID NO: 410768 - DNA, 499 bp, Homo sapiens
cagtctggaattcctgaaagctcagaaaactgctgcttagggaggtaatggggtagattggatacctctggggtcttggaagaagctatgacttatttactgtctactatgtgagttttgggcatccttctatcagcccttatcccagggcaggaagaacagccttgatcctggatcccaggcacagctgggtgtcagacctggaggagaagctcccagagtgaccaagatagaatcggcatgcagatgggaagataagacccagaaaacagaaaggacatgtttaaggccatgcagcaagttagtgcctgacctgaatattgaaagaagaatattgaggatcaaagagaccaagactgcaagcgtaaaaactaagattggaaccaaagccagttcttcttgatcccagggtctgcgcccttcttctgttccatgtttcattgttcttggtggacctggggatcaatagctagaagttaaaggacaaactgatttggga

SEQ ID NO: 410769 - DNA, 209 bp, Homo sapiens
cctctttggacacacacgcgccgcccacgcacgcgctcccctccccggcaggcgggggcggcttcggccgggagccggcggacccgcttcggattccaggtgtggcagtgactccgcgctccacgttttgcaggctgccaccgtgtcggaggcgaggcgaggaagggagctggaataacaaaggcaagttggggagagcgcaagggggc

SEQ ID NO: 410770 - DNA, 916 bp, Homo sapiens
cctctttggacacacacgcgccgcccacgcacgcgctcccctccccggcaggcgggggcggcttcggccgggagccggcggacccgcttcggattccaggtgtggcagtgactccgcgctccacgttttgcaggctgccaccgtgtcggaggcgaggcgaggaagggagctggaataacaaagggaggtaatggggtagattggatacctctggggtcttggaagaagctatgacttatttactgtctactatgtggtggatggtgtttgaagtgaattgaattaggggacacccagctggcatctgctgcagaactgatgactcgcttgctggtgggcagaaatctccataatctttctttagcagatgaggtcactgaggctcagagaggctgaagccacttgctcagagccgcacagcaagcccaccaccctgaacctccagattaccaactcagcattgtgtcctgacagtgtcatcatagatggtcaacaccgtcacctgggcagcactgaagcccagagcgggagagactggctcaagaccatggcctctcctggtctgacagtctcagatgcagtcatggatggctttctggaggaggtggtacctggtctgtgggaagtaggggtcagcatcctggtctctgggagcatctgctccagatggtttccctggggcccccagaagcaggtgtttgcgctaacagctctgcaagcagagagcttcagtgcatggcccttcttgcccttgttcccaggcacatgctgttcccctggggctgaataccccacttacttgtaaatcccagtgctctcctgttcattctgcagtgccagcacaagtctcctccttggggaaggctttctggacttcccagcccactggccattgttccgtcttgcaggtgccccc

SEQ ID NO: 410771 - DNA, 409 bp, Homo sapiens
acttagaaaaaggcaagtggagaattcctctagctgtctgtcactcggccctgggccctgggtctggtgagcaagcaggcaagaaggcaggaagaggtcagctgtctggacgtgagcatccctgccactgctctctcctgccctggacacagctcgtgcttctctgctcctctaactccccagcctcacatctccaaagaaaggcagctagctctccttacagccctgactgtgggatttcctcatggtaaataaaccaatttataaagtaggtttccaaagaaatgagacggctgtacacacacacatacacccctgaaacatacaccttctaactggcgtcctccagagcagctgtcttgggaagaggcacctttgacaccaacaatgatgtagaacaacttctaga

SEQ ID NO: 410772 - DNA, 603 bp, Homo sapiens
ggagtgcaatggctgtgatgactgcatcctgctcaggttgtgggacatggggttaaaacactgtcacggcaaagacactggccttttacctgagtacaggatagtagccctttgtcctctaagatgctctgtccctggggccagcaaacacctcccaagggagaggagagaaagaaccccgagtagagccagccgagtagagccagccgagggcagataggtcttgtagggctgtgggagccactgcaaccctgggagcttcctgtcagctcaagcccagtgcccagagtgtccaagtgccacctggatgccctgcagtgtccactgtgctgggttctcaaggtttttctctggggggggtctgcggggaacctggagctgctgggtaggaggtgggcttgtggctcagctgtgtccagtggctggctgtggagcgcctcctctgctccagtaatattttcatgggcaagaaagaccactactttcttggccaccgcttcctggagcttgtgttcctggaagccagccataaataagccggccataaacgagggtaaacaggtgcctgagtaaacacaccagagcaaatgagtcatatgggcc

SEQ ID NO: 410773 - DNA, 430 bp, Homo sapiens
agccgtgagccatcgcgcccggcctggagtttctactgtgcaccaggcactacctttacatgtattgttttatttaatcctcagtcagccgtgtttggtaggtgcagttagtatatttccattttcatctgcgcaaacagattcaggaactttgtaatttacataaggtcacattcatcctaattcacaaaatcaagatttcacacctattcctttttctttccagtgcctgtgctttttctctcataccaaggagaagtaataagcctaacgttttaaacctcacaaaagtacatacagaaaagtaaatagcctaattttgcaactaatacaaatggcgctgtacttctttggtgatggtagatttataatttttgaagtatggtagattcaaatgaaccactgaaaaggcatttagtttcttgtccca

SEQ ID NO: 410774 - DNA, 426 bp, Homo sapiens
aaatgatatacgttactgtatatcattaacttgtttttgagaacacaggaaaccatgaaacgcacaaagaagttaattgtgaagacatgcaggatggttttaaacaaacaggaagcggactaagctgatttgcttatttaactattaagttactaagttagccattctaacaaattgccaagtgaagagaacaaacatactgaatctagtgactcaatgaccaatacaatttttaactaagggcgcgcgcgcgcgcgcgcgtgtgtgtgtgtgtgtgtgtgtgtgtgtgttggatagctagggaaggaagaagagtagagatgaagaacaaaggggaaaataaaaattaaatgagacaaaagagggacctggtaaggtcttagtgggtcgtgaactgaggataatcattaattcaactctgaaccc

SEQ ID NO: 410775 - DNA, 835 bp, Homo sapiens
ttgcagtgagccaagatcttgccactgcactccagtctggacaacaggagtaaaactctatctcaaaaaaaaaaaaaaaaaaattcatactagacattctggacagggcactatcagaaatcagtctaagctttaatatttccatctgtataatacaagttatattcaaaagcctcttatgctaatagttatgtgtgaaatatttagagtcagaagttggtaaaccgtgctgtgaggtcagtatataccacttatcttttatgcctctgttactgtcttcaggaaggagggaatggatgaaggcagacaggcaagtatgatcaaatagagatccacctccaaaaattaaagggtttttaaaattttaaagtagctataaacatatttttttaattatttttacttgataccaaaaaaatttaagttgatttttaacaaggcaagtatagatagttgatctaccaaattttgcacagaattcttcaagaggcagacagtatttgataaaaaattatttgcatatctattgtgtcaacaaagcaagttacaaaactagtttatataagaaacaaaatctgtgtgtacgtgtatgtatgttgtttgtagggacagaaaattcatgggaaaataaataagcaacagtgactgtctcaaggacagaagggactttttacagtatgtatattaccatctgtgtgtttttcaattaaaatcagcccgtcaaagtaagtgtaatacacagtattagacttagtaaaaggattggctaggcacagtggctcatgcttgcaatctcagcactttgggaagttggcgtgggaggattgcttgaggc

SEQ ID NO: 410776 - DNA, 518 bp, Homo sapiens
tcattgatgttatgaaaaaaagtacgattttataggctcaaagtataaatgcaactttacaaaattatggttcaatatgattcactggtgatgtttagatggtgtcataatctgaacactaaaggcagaactgttaagactagtggaatgtagacattactttaaaatatttcacagaagaatgaatgattggacacaaaatccatacccattatcaaaagattttcaacattacatttgaaagtgaaaaagagaaaaggctgttagattttttaaaatcttcaagtacagtttaaaggaatagaattactcaaattctggttaacagcaggaaaatagttctactgattgcagaaaaactagtgcatgctttttttgccattagtttctctgtgttcatgggaggaaaatttctcattatggtgaagaacaagaattggatgatctttttaagtaactgtatatagctacttgaagcataacattataaaattttaatatttattgtattccatgat

SEQ ID NO: 410777 - DNA, 410 bp, Homo sapiens
attctaaaatcatctccatttatattggtttatctttttaagacactttgttgtttcagagctaccttgccatgaagattcattaccttttctttgctcttttcttccttggccagctgtctacctcagtttatcttcttcagcaagttcttctttcagttctgtaatcccaacaatttgggaggccaaggaactgaagatgcttatgaagtcattagtatcatggactgtaaaaatcaaacactgtgtaattctcagaatacaactagacactgctctcatgggaaggagattgaactatgtgtcttgcgtcttggaaaaaatgcaaagcgactcactaaccatgaagaaacagcaaattaggaagacaggatgatcaatttccttgtcttattaaaaaataaagtctg

SEQ ID NO: 410778 - DNA, 159 bp, Homo sapiens
gggcactgtaaagactaaatgagataaggctgtggaagaccccagcatctccccagggtccacagaaggtactgaattaaatgttaatttttttccttgtatgggaagatacttattcctttgtctcttctgactgcataaatactgaattgtatgtat

SEQ ID NO: 410779 - DNA, 394 bp, Homo sapiens
tcttctgaaaatttactgagaagttacacatgaaggaaccactgttagcttgaatcctttaaaatctcagcaattatggcccaatcttcaggacgtcaaaagtaaacaagcaggtcttataattaagaaaagcaggtaaacagaataacattaatgtgtaaatcaacaaaacaaaacatcttaaatattatacatatctaatttcaagtcttcaatcccaaatatactaataatactccagaaagaaatgttggaggaaatcagtgaaactaaatgtaaagccaaaaagtaacccaattattttacagaaaaaagtaaatatattgggtttttttttttttgagacagagtcttgctctgtcacccaggctggagtgcagcagtgcaatctcga

SEQ ID NO: 410780 - DNA, 298 bp, Homo sapiens
ttactgttccgtttctaccaggaacctggggctctactgagcttatgctaaaaataagaaaatctagaatatatttattaagaaaggggaatgatcgtgtacatttttataaaagcaagcagtgtggaattttagaataccacttttaatctttaaacttttccataactcttgagtgaacaatgtcataactcaaattctttcatttctcaaataactactgttagcaatttggtgtatattttggtttacattttctgtcagctagtagcaatgctattgaatactaaggaatttt

SEQ ID NO: 410781 - DNA, 450 bp, Homo sapiens
ctcttgaccctacattcaaatacctagaatcataaaaacattgggccccaagagagcttagaatcatttaatccagtccctcatttgtcagatagggaaataaaagttcatttggtaaattgacttgcccaaggtcacccagcccgttaagggcatatggggaaatggaaaccagagctcctgacttcaggtcgaatattcactcccatgcatagaatgagcagcacaacattacccttagaaatgagggctttgggccaggcaccatggttcactctataatcccagcactttgggaggccaaggtggccaggtgtggtggtacacacctgtagtccagctacttgggaggctgcgatgagaggattacctttgcctgggaaggtcgaggctatagtgagctgtgatagtgttactgcactccagcctgggaaacacagtgagatcccg

SEQ ID NO: 410782 - DNA, 376 bp, Homo sapiens
tttttttttggaatggggtctcactctggcatccaagctggagtgcagtggtgtgatcatggctgactttagcctcaaactcctaggctcaagacttcatgtcacctcagcctcccaagtagctgggaccacaggtgtgcaccattacacccagctagtttttaaatttcttgtagacacaggtcttggtatgttgcctaggttggtctcaaactcctgagctcaaccagtcctcctgcctaggcctcccaaagtgttgggattaaaggtataagccaccatgcctggccccagagctttcccaaatccaagaaaagatcaaaattttgaagtttgtaagttttaaggaggactgcagctgtgaaacttcaagata

SEQ ID NO: 410783 - DNA, 386 bp, Homo sapiens
gataaataaacaaattatgtcaataggtgaccatttactgagttcttcctgtgtgtcaagcactgtgctatgtgggtaaatggttatctcgattaatcctcacaacagggaggttagtgctgcttttattcccgttttgcatgtagggaagctgtacagtggtagcgtcactgcctgagcacctagaattctttgctaacagggttgtgtgtgaataatttaattcgtctcttaagatctcaacacactccctccctggcccctgctgtaaacatcctacactgattggaatagaatacatagttcttttcttccaacatggtgtgttctattgatacaagttgtgaattgtggcgacaaggccattttgtattgagaaccattct

SEQ ID NO: 410784 - DNA, 455 bp, Homo sapiens
tttttgagacggagtctcgctctgtcgcccaggctggactgcggactgcagtggcacaatctcggctcactgcaagctccacttcccgggttcacgccattctcctgcctcagcctcccgagtagctgggactacaggcgcccgccaccgcgcccggctaattttttgtatttttagtagagacggggtttcaccttgttagccaggatggtctcgatctcctgacctcatgatccacccgcctcggcctcccaaagtgctgggattacaggcgtgagccaccgcacccggccggaatatttttaatttggaagccagatcttgtctctaccctgccaaacaccctgcaaaggattccctcctttcacaaagaattaagagccaacatctttaccatagcttacaaggccccacacaatctggctcccattttgcctgacctcatgtcccaccat

SEQ ID NO: 410785 - DNA, 514 bp, Homo sapiens
aaaagggcagtctcttcaacaaatggtgttgggaaaattgaatatccacattcaaaagaatgaaattagatgcttaccttaaactgtatacaaaaattacctcaaaaaagatcgaagtcctaaatgtaagacctaaaactataaaactcttagataaaaacataggaggacattggatttggcaatggatttcttgggcgtgacaccaaaaacaggcaacagaagtaaaaatagatggatgacatcaaaatttaaaacttctgtgtatcaaagaacacattcaacagagtgaaaaggcccataaaatgggtgaaaatatttgcaaatgatatatcctgtaagaggctaatatccagaatacataaggaaatcctaccattcaataacaaaaaacaacctgattttaaagtgaagaagtcaagaaaataagatagactacatactgggagaaaatttttgcaaaagatatatctaataaaggactgttatccaaagtcgacgcaagaactctaaa

SEQ ID NO: 410786 - DNA, 504 bp, Homo sapiens
atgtaaatttaccagagatatttctttaatgagtaaattggctcaatgtatgcattaattgattcataagtctttgaggatctctgatatcaaacaaataagcaagagtcactaaaatcaagaatttattgagaacctactttaacccatttttaaggtcactactgtgtcagttccatttcaaagctagtctcaacctttaaaatacttatactctagttagaggcaaggaataaatacatgaagtacaatgaaaagagctaagtgacaatgcaaaacaaccaatccataaaactgtagatcagagtcatctgggctgaagtaccttgttctgacaggtcatacaactgtacttatccctataaatacctaaggcaaaaatacctatttcttacttcctgcaaagaaattatataaaattatctttcccccaatctttactgtctgtcggcaaaagtgaggcagacttatggttctgagtgagcactaccatttaaaagaaaa

SEQ ID NO: 410787 - DNA, 464 bp, Homo sapiens
gccaccacgcccggctaatttttcaatctttttttttttggtagagatggaatctttctatgttgcccaggttggtcccaacctcctggcctcaagcaatcctcctgccaaagtactgggattacaggtgtgaaccatctcatccagcccaaaattctttctcaagcaaaggcgccttgcccagaggggaaaatgcagatgttttattccctccctctcctcaggcatcaggtattctgccattttgaggcacctggctcccttacctcagatccttttccaggttattctttttgccttcttgcctatttcctgccaaaccatatcctgtttttgtttttgtttttgtatcgagacgagtctcactctgtctcccaggctggagtgcagtggcgcaatctcgactcactgtaagctctgcctccgtcgacgcggccgcgaatttagtagtagtaggcggccgc

SEQ ID NO: 410788 - DNA, 1082 bp, Homo sapiens
ggcgggggcaaggttggagccccgggacgaagaagggacgcgggtcagcgaggcctgaagagtgggaggagatgggacccggctgtagagtgcccagaggtctaggccaggggccgcgctgccgcaggaagatgcgagagtttggctttggtgatctggtccacccggggccagtcttgccccctctgccaccgcagcgtagggcctcctgcattccgtttctctggccggaagggtctagtgttcatccctctcaggctttggcctcctcccactctcccgccctggggcccattcgtttaggaagaatgggagagccggtcgtggcccctgggcggggtaaaggagggaggcttggtaaacctctgctggggaggacccagtacagtggcagctccttgtcggggaaagaacggatctgcgtcacacgctcttacaggggaaccctaaggggcctgaggggtagggcttggtctccacccagagggaaggagaaatttttcgagtcgtaaagaaatgtatcagaagccatggaacatttacagccgcacacgctgggtctcccaacaaacagatccccaaaatattttccagtgctgtactcgtggcatagacccagacccacagaccaggaggaagcgctagagatgtcaacagccaacaaaaacagtgctttacacacttgtaaaattgtgacctacaggggctgggcactgtggctcacgcctgtaaccccagcactttgggtggccaaggtgggaggattgcttgagccccaggagtttgagatcagcctggcaaacatggtaaaatcctgtctctactaaaaatacaaaaattagctgggcgtggtggtgcatgcctgtaatcccagctacctgggaggctgaggcaggagaattgctggaacccaagaggcggaggctgcagtgagccgagattgcgccattgcacttcagtctcggccacagagcgagagtccgtctcaaaaaaaaaaaaaaaaaaaaaaaaaaaggaattagcttggcatggtggcgtgtgccttgcagcgagctgtacgtgatcagtgccactgcactcca

SEQ ID NO: 410789 - DNA, 401 bp, Homo sapiens
ttttaaaatttttggcctgaggttccagtatgtgaaaatctgttattttttcctcttaatttaccaaactgatgatattgtcattcctctgtcagaaaacaattggaaacaaatgcccattaaataggggactacacagaaaaaaaaggaaaaaaaaatacgatctatatttgatgaggaaaaaagtcaaaatgtggaaaagccacagcccatgtgtgttatgctgatttattaaggttatttgaggataaaagacataaaatttatttattttgcttacagtgattaggctttttaaaacataagggactgaagttcttgcaatttggaaatataaataatgtgcaagctatagcactatactaataagcataattccttccatttaacctaccaagcga

SEQ ID NO: 410790 - DNA, 447 bp, Homo sapiens
gaataagaagctgaaggttctactctcatgtgtgctactattttctcatgatcttaggcaaatcagctaagtacgtgcagaatcaatttcctcatttataaaacaaattataatcaatgccagttatcacaacatgcctatagttctatgtatataaatgctttgtaaatggcattaaatggtacaaaaatgtaactatcagggaagaaaacaaacagtttaaattataactttttttttacaactattttggaagagtacttaaggtaaacaatcattcaacaaaatatttattgagcacctacaatgagtcttgctctgttgcccaggctggagtgcagtggtgcaatctcagctcactgcaacctctgcctcccgggttcaagcaaattcttatgcctcagcctcctaaaaagctggaattacgcccagctaatttttgtgttt

SEQ ID NO: 410791 - DNA, 329 bp, Homo sapiens
gacagcatggctgtcttggtagaggctaatatagctggtgactttaaattgaagtcaatgcaaatttattatgatgaaaattttaggacctttaagagttatgttggccaggcgcagtggctcatccctgtaatcccagcactttgggaggccaaggcaagcggattgcctgagctcaggagtttgaaaccactgtgggaaacatggtaaaaccccatctctactaaaatacaagctgggcatggtggcacgcgcctgtaatcccagttactcgggatgccaaggcgggagaattgcttgagcacaggaggcggaggttgtagtgagcc

SEQ ID NO: 410792 - DNA, 357 bp, Homo sapiens
catcactaatttgttttttctttcatcattttcagttcagtaagcattttataaagccaatgtagttaattcatctgaattgggccctgcagcctaagtggagaggaggaaacaaaacaaaacagttgctgcttttaaggcacagaattaaggtctgacgcagtagaactgcttaatgctgatgctgcctgagagcaaacaggaaaggtctcatgcaattaaaaacctttataaatttgtatttttgacaataaccatatattttttcctattaaaaatcttataaaaacgacatattttaaaaaattccaggaattacatcttcatttgagatgagccttttgcaagatgatttat

SEQ ID NO: 410793 - DNA, 534 bp, Homo sapiens
ctgtgtcagcaattgcttttggtttttaaagttataggttgctactacatggatgtgactaagaaaatacatagattatcttaaaatgggcatgatgtaaaagactcaatcagtagggtaactaaaaactttgtagtactctagctttggaaatctgagaggcctatatagttcatttgagtgtttgatcaaattcttattgagattacagcctgtgcaaaatatttgtgatgcatttttaagtttacttaagtacactttgaaattctttaaaaattttaaaatctttaaaaggacacaagagtgtaccacattgagattaaaatgtgtttattattaatttgtacataatactataacaaataattgttctcaggtatgtttaaggccttattttaaaagttgattcttcaatttctaatttaaaataagcttttagtttttctcaactatgtatatgtaatgattataaatgcctagagtagtgtttcccagacaactagaaccacacacaaattagtaccaccaaaaaaa

SEQ ID NO: 410794 - DNA, 368 bp, Homo sapiens
atcagctcggcaccacttgtgtgctcacctgtgtgctctctgtgttttcacctaaaaacctagctatggaaaagcaaggactcagctgggcacagtggctcatgcctgtaatcccagcacttagggaggccgaggcgggtggatcacctgaggccatgaatttcctgtcatttaagccattttgggatggggcttctagtggttgctgtggaaagccactgggcacagtgagtagaagatggtctttctaaggcatagagagatcctgagaccagaagaagagcttcccctctcgatcctcatagaaaaacactgtgacggcaacgagtggtttccaataatcatttcttcttcagaaagttttggcc

SEQ ID NO: 410795 - DNA, 524 bp, Homo sapiens
ctatttcctgactttttttttttttgagacggagtcttgctctgtcacccaggctggagtgcagtggcgcattcaagtgattctcctgtctcagcctactaagtagctgggattacaggcacctgccaccacttccagctactttttacattttttagtagagacaggatttcgccacattggccaggctggtctcgaactcctgacctcaagtgatccacccaccttggcctcccaaagtgctggcattacaggtgtgagccgccatggctggcctatttcctgactttttgtttgtgttttgtgagaccatgaatttcctgtcatttaagccattttgggatggggcttctagtggttgctgtggaaagccactgggcacagtgagtagaagatggtctttctaaggcatagagagatcctgagaccagaagaagagcttcccctctcgatcctcatagaaaaacactgtgacggcaacgagtggtttccaataatcatttcttcttcagaaagttttggcc

SEQ ID NO: 410796 - DNA, 357 bp, Homo sapiens
cgttgtagtcagggaatcacgactctgtgtttataagaaaaaagaacgatggagcaggaccatcaccaagtagagactatgaaaatgtcatttttttggctgggcgcggtggctcacgcctgtaatcccagcactttgggaggctgagacaggcagatcatgaggtcaggagatcgagaccatcctggctaacacggtgaaaccccatctctactaagaatacaaaaaattagccgggcatggtggcacatgcctaaaatcctagctactcaagaggctgagtcaggagaatcactggaacctgcgaggcagagcttgcagtgagccgagatagcgccactgcactccagcctgggc

SEQ ID NO: 410797 - DNA, 373 bp, Homo sapiens
ggactcaaagcagcatagacatgggatgctgaggggccaagtgagcagagcagagagtgagtgctgcaagtcctcggaggggtcaaccgggacccaagcatccagaaaaggcagggaccatgcaaaggggtccgaaaaatgggaccttcagtggaaagcactgagaagaccattattcaggtgaggtttgggataaattcattcccacgaactcccctttgaaaggctcgttcctctaagcatggatttcaaaccagtagtgtcaccatcacctggaagccctttattttattttattatatgttttgagacagagttttgctcttgtcgcccaggctagagtgcaatggcacaatgtcagctcactgcaacc

SEQ ID NO: 410798 - DNA, 1231 bp, Homo sapiens
aacagagtcccaggcaacaggggacagagagactggcccagcaggggctctctgggccaactgagcaaggtgacagggcccaggaaaggagctgttgcctgcacaagggcagatggagtcaaggaatcagtgttcatgggatcctggctgtccccacagtgtcgtggctgaaccttacaagaacagaagcaagtgaagcacaggtagccagccacctcaagggggaagtattgataacgaagggactcaaagcagcatagacatgggatgctgaggggccaagtgagcagagcagagagtgagtgctgcaagtcctcggaggggtcaaccgggacccaagcatccagaaaaggcagggaccatgcaaaggggtccgaaaaatgggaccttcagtggaaagcactgagaagaccattattcagtctctgtgcccagaatcactgtctgccaggctctggccaacctgtagcctctccgtgctgaaaacgacccgctaaaaaagccaagagggaaggacccagcacacagccgtgaaccacatatacacgaagagggcctaaagtgaaaaagataaactttaaatcaaacggaaactttttccagcaacttccactcttgtgatactgaactgaactgaagcagaagattttaagagttgcctgaatcctttggacctgcttattggcttaaaaagtctaattgtgaaattgacttaaaaattcctaattgtgaaagaaggggtctcttctttggcatggcactctcactaacaattttcttggtaagaggaccaacaaacagcaatagaaatagaaaactatggattgctaggtgagagtattttttaacctgcttcaatctacaactgcaaaatgaactggcccaatttaattagaaaaatttcagtttctgaccactgatctacattactgaaaggttacatgtgaaataaatgtggggtgtgtgtgtgtgtttgtgtctgaaattgaatcattttctaactcattcactataaaaaagaaatagacgggatcatttgaactctgcctttgcaatttatcatcttcgtgatcttagacaatctcttaatttctctaagcttccactttctcctctaaaatggagttgaactcaaagggctgacctaaagtttacataaaatgagaaaatgtaaggtactggggctgatacatagacagtattcaataaagctttatgaaatctgtattgt

SEQ ID NO: 410799 - DNA, 576 bp, Homo sapiens
ctatggcaagtctcaggtggctgctggcagctccttggggctccctgctgttttgggtcatgtctagtaacagagagcttctcttttccagcgtttcaggcaaaggttcctagcttcgcactaattggtctgggttggttgatgtgcctacctttgaacccattccctgtggcaaagggatgggaaattcactgactggcttagcctgggtcttgcgctgtatccctggacccagggatggagtcagccttctgagaccaacacagatccccaatttagaaatggaggctgagctgggctcggtggctcatacctgtaatcccagcactttgggaggccaaggcagtcagattgctttagctcaggagttcaagaccagcctgggcaacatagtgagacctctgccccttgtctgtacaaaaagttaagaagcaaagcatggtggcacatgcctgtggtcccagctagttggaaagctgaggtgggaggttggcttgaacccaggaggtcaaggctgcagtgagccgtattgtgccactgcacttcagcctgggcaacagagcgagaccctgtctc

SEQ ID NO: 410800 - DNA, 345 bp, Homo sapiens
tactgaaaatagaatctgcaatcaagggtgctgatattaaataaagatctctgaaaataagaagaggtattcttggggccaggcgcggtggctcacgcctgtaatcccagcactttgggaggccgaggcgggtggatcacctgaggtcgagagttcgagaccagcttgaccaacatggagaaaccccgtctctactaaaaatacaaaattagccaggcatggtggcgcacacctgtagtcccagctactcgggaggctgaggcaggagaaccacttgaacccaggaagcagaggttgcggtgaactgaaattgtgccattgcccttctgcctgggcaacaagagt

SEQ ID NO: 410801 - DNA, 414 bp, Homo sapiens
caggggcctgtgattgtgccactgcagcctggataacggagcaagactctctctctgtctctcaaagccctggtttgaagtgaagtgaaacacatcacttccactcacatgccattgtgaagaactagccgtggaccatacctagatcaagggtggctgggcaacaccttcacatcacaggagaggtagactgcattttggtggatagagactcaaagaattctgtgtagatcaggtaccttccagattaaagtgggatggggatgggggggcatgaatgtgtctatgtgtgtgtatgtataaaaaaaaatgctattgaaacttctaaaactaggcctagttttagaagtttcaatagcatgcaggagttcatataaggacgcagagcctgtcctcgtcagccccgcaggtcct

SEQ ID NO: 410802 - DNA, 881 bp, Homo sapiens
tgtaaagtgaatcaatatcaagagaccaaaccctacaactggacgaagagccacgggaaaactgaggtgttcccagaaagctgatgtatctccatgcattgtgaagtcccagctgatggtgacttcgcagcccaaagccatttgaatcagcagctcttttatgatggctgcaagtatactcattctttaacacttgcaaacaacatggcagaaaatagcaaatcaaggccacatgcatgcatgtgcgccaagcatctacacaaggcacacaaagtcagagaaataagaggctgcatgcttcctctccgctttttcactgtagaaaacattcgtcacaaaggaaacagccttctgatttatagaggtctcctttccacaatgcatgcctataatataaatattttatttaacctatgtgctgtagacccctaagtttttgtgacacccaaaattcatgtgttaaaatcctaaccccaatgtgttagtatcggcaggtcctctgggaaatgattaggtcatgaagatggaggtctcattaggtcataaaggtggaaccctcatgaatggggttggtgttctatgaaagaggccccagaggccaggtgcagtggctcacacctgtaatcccagcaccctgggaggccgaggcaggtggatcacctgaggtcaggagttcgagaccagcctggccaacatggcaagaccctgtctctactaaaaatacaaaaattagccaggcatggttgtgcacacctgtaattccagctactcgggaagctgaggcaggagaatcccttgaacctgggagacggaggttgcaatgagctgagatcgcgccacagcactccagcctgggtgacaagagtgaaactccatctcaa

SEQ ID NO: 410803 - DNA, 350 bp, Homo sapiens
ttttttttttgtagagacagggtttcgccattttgcccagggtggtctcgaactcctgggctcaagtgatctgttcgcctcaacctcccaatgggctgggattacaggcgcgagccacagttcccaacctttatttttaaaagctttacatataattcaacaccctttctcagcagctacttacccagtgtttaaaggtttaatgttcttcacagttatgtaattcttctatcactctgaactcaatcttagaaccttttttttctttttgagacggagttttgctctcgttgcccaggctggaatgcagtggcgcaatctcggctcaccgcaacctctgcctcccgggt

SEQ ID NO: 410804 - DNA, 472 bp, Homo sapiens
cttcctcacagttggtgacacctgcaggctgaagcagcattttctgtactttggcaccaccttgtggttcagctgaaaaaagtctagaaatgggccgcatccatcttgggctcattgagcatcatgaacagtcttgaagggccatctggcttttgttatctccttcagcctgagaagaaatgagatttgttactggatagggaatgtctcctataggctaaaccgcctgctgagaaatccaacgaggtaatggctccaatttgaactaagcagagagtcatgcagaaacatcaatccaggctgccgctgttctctattatttagattgaattgtgtctactttccacagatgactcggctcagccagagaacttggcatctctgtgtgctgttactgtaaaatggggagtgattgttttcagctgctccaagttaggaattagctcctggccattgataatacctcctggaa

SEQ ID NO: 410805 - DNA, 312 bp, Homo sapiens
tatgaactgacgattgtttcgccgaaaccaagtcactgcttatggcatgaccagtgctaggactgcgacggtggtgggactcgggtgggggatgcctgtgccacgtgtgctgatagaagttcccagactcttctgtcacttgagcaagactgccatagagccactgtgctcccagagtgctgtgctgtcatttggcctttgctagaactgaaccccatgtatagagtctgttttctgcctacttagcttgtgacactttgagtcaatgcaaataattgctggaaggtgttaatgctgttttgttttttgttt

SEQ ID NO: 410806 - DNA, 342 bp, Homo sapiens
ttttaagactactcaagtgcaatagtgagaagggcgaaaagagtagaataggggaataagggccaggcacgatggctcacacctataatcccagcattttgggaggccaatgagggcagaccacctgaggtcaggagttagagaccagcctggccaacatggtgaaaccccatctctactgaaaatacaaaaattagccacgtgtggtggcacacacctgtggtcccagctactcaggaggctgaggcaagagaactgcttgaacccaggaggtggaggttgcagtgacctgagatcatgccactgcattccagccctgggtaacaagaacaaaactctgtc

SEQ ID NO: 410807 - DNA, 3495 bp, Homo sapiens
gaggtgctggggagcagcgtgtttgctgtgcttgattgtgagctgctggggaagttgtgactttcattttacctttcgaattcctgggtatatcttgggggctggaggacgtgtctggttattatataggtgcacagctggaggtgagatccacacagctcagaccagctggatcttgctcagtctctgtcagaggaagatcccttggaggaggccccgcagcgacatggagggagctgctttgctgaaaatctttgtcgtctgcatctgggtgcagcaaaaccatccaggctggacagtggctggacagttccaagaaaagaaacgcttcactgaagaagtcattgaatacttccagaagaaagttagcccagtgcatctgaaaatcctgctgactagcgatgaagcctggaagagatttgtgcgtgtggctgaattgcccagggaagaggcagatgctctctatgaagctctgaagaatcttacaccatatgtggctattgaggacaaagacatgcagcaaaaagaacagcagtttagggagtggtttttgaaagtttcctcaaatcagatggaagattcaggagtccatagaaaggcttcgtgtcattgcaaatgagattgaaaaggtccacagaggctgcgtcatcgccaatgtggtgtctggctccactggcatcctgtctgtcattggcgttatgttggcaccatttacagcagggctgagcctgagcattactgcagctggggtagggctgggaatagcatctgccacggctgggatcgcctccagcatcgtggagaacacatacacaaggtcagcagaactcacagccagcaggctgactgcaaccagcactgaccaattggaggcattaagggacattctgcgtgacatcacacccaatgtgctttcttttgcacttgattttgacgaagccacaaaaatgattgcgaatgatgtccatacactcaggagatctaaagccactgttggacgccctttgattgcttggcgatatgtacctataaatgttgttgagacactgagaacacgtggggcccccacccggatagtgagaaaagtagcccggaacctgggcaaggccacttcaggtgtccttgttgtgctggatgtagtcaaccttgtgcaagactcactggacttgcacaagggggcaaaatccgagtctgctgagtcgctgaggcagtgggctcaggagctggaggagaatctcaatgagctcacccatatccatcagagtctaaaagcaggctaggcccaattgttgcgggaagtcagggaccccaaacggagggactggctgaagccatggcagaagaacgtggattgtgaagatttcatggacatttattagttccccaaattaatacttttataatttcctatgcctgtctttaccgcaatctctaaacacaaattgtgaagatttcatggacacttatcacttccccaatcaatacccttgtgatttcttatgcctgtctttactttaatctcctaatcctgtcagctgaggaggatgtatgtcacctcaggaccatgtgataattgcgttaactgcacaaattgtagagcatgtgtgtttgaacaatatgaaatctgggcaccttgaaaaaagaacaggataacagcaattgttcagggaataagagagataaccttaaactctgaccaacagtgagcctggtggaacagagtcatatttctcttctttcaaaagcaaatgggagaaatatcgctgaattctttttctcagcaaggaacatccctgagaaagagaatgcacccctgagggtgggtctataaatggcctccttgggtgtggccatcttctatggtcgagactgtagggatgaaataaaccccagtctcccatagcgctcccaggcttattaggaagaggaaattcccgcctaataaattttggtcagaccggttgctctcaaaaccctgtctcctgataagatgttatcaatgacaatggtgcccgaaacctcattagcaattttaatttctccccggtcctgtggtcctgtgatctcgccctgcctccacttgccttgtgatattctattaccttgtgaagtaggtgatctttgtgacccacacccacaccctattcatacactccctccccttttgaaagtccctaataaaaacttgctggttttgcggcttgtgaggcatcacggaacctaccgatgtgtgatgtctcccctggacacctagctttaaaatttctctcttttgtactctgtgcctttatttctcaaaccggccaacacttagggaaaatagaaaagaacctacgtgaccatcggggcaggttccccgatacccaatgaccccagagcagtgcagccaccagggaaggtgagccagacacaggccgggacaaaacgcagacattttttaggggaataaagagggcgaggtaaagtttatggaactcagtgttaggaactttggcatctgtagctgagcacagcaggggaggggttactcaagatggcaagtgcgccaaggagaaggcagaaatgctggggcctggaataagggaggagaggggactggagagtgtggggaatggaaagaagcagtttactctagactaaagagtatattgggggaggaagagagggaggcacgtaggaacaagcaatgagaagaccaggaaaagaaagagctgaaaatggagaaagccacagttagaactgttggatacaggagaagaaacagcggctccactaaagacccgccccccggttggatgtccttccaagaatggaatccttccctggtgatggtctctcaccctgtcttaccagcatccactctcccttgtcctcccgggggtgtatctgagtcagccagtggcttcttgatgatggtggtggtggttgtagtgtgacaggtcccctttaggttatttaagggtgcatgtcccctgcttgaaccctgaaggccgggtaatgagccatttccatggtgcccagctgaggaccaggtgtctctgagaatccaaacatcctggagagtatctgagaaccaaccaagtaaaagtctcgttgctcatatatagtagacaaagagccagaaaattaactgaaaagcagtttagacattgggggaggctggatctctcgagctgtcttgctgagtgccctgtgtgtaagtcctaataaacttagctactcgccaagctggacttgtttaagtcattccttggtctcatggctcctttcccgctttgagggcaagttcctgtctcaagtttttgtcctaacagtggtaaaggtgattgtggtgatgtcagcagacagcaagaggacttgacatggggtcggccctgcttggggccagcgtacactgagggaccgatgacatttcaatgaaactccaaatgctatattggaaacgttgatgtgtgaagaaaaataaaagcaaaaccagatgccaggaacaagtca

SEQ ID NO: 410808 - DNA, 935 bp, Homo sapiens
gaggtgctggggagcagcgtgtttgctgtgcttgattgtgagctgctggggaagttgtgactttcattttacctttcgaattcctgggtatatcttgggggctggaggacgtgtctggttattatataggtgcacagctggaggtgagatccacacagctcagaccagctggatcttgctcagtctctgtcagaggaagatcccttggaggaggccccgcagcgacatggagggagctgctttgctgaaaatctttgtcgtctgcatctggaaccaaaatcacttcccggaattgaccaactggtagactcgcctagaggggacgcactgtgtcctagttgaggctaacagtcagtatccagcctcaacattcagcagaggccccagatcagcgtctgagccaggccaacaatgaccaaggaggatgggatcctgggtgcagctcatcacaagcgtcgggacaagcggacttttccttggtgtgagagtgagggaagagggagctggaatgaggtgcagcaaaaccatccaggctggacagtggctggacagttccaagggtcctctgggcccatcccctccccctgtccctacagctggttacagcagctccttctgtgtccattatgtgaacctgctgcctggagttcttgttctttctgtgacctcccagtatccacatctcagcatggccctctgtcagctggctgctcatgactggccgaggttaagctgtgtttgtgtctgacagaagcgcccatctgatatgaccccagttcagattcatagcttgcagtttcatggggggttacagctgttctgaaggtctggttggttttgtttgcccgggaatgtttcaggtctggtttttattttaattttgctttaatattcaccatccccaccccatcaataaaacacaaatttagtgctgg

SEQ ID NO: 410809 - DNA, 3684 bp, Homo sapiens
gaggtgctggggagcagcgtgtttgctgtgcttgattgtgagctgctggggaagttgtgactttcattttacctttcgaattcctgggtatatcttgggggctggaggacgtgtctggttattatataggtgcacagctggaggtgagatccacacagctcagaccagctggatcttgctcagtctctgtcagaggaagatcccttggaggaggccccgcagcgacatggagggagctgctttgctgaaaatctttgtcgtctgcatctggaaccaaaatcacttcccggaattgaccaactggtagactcgcctagaggggacgcactgtgtcctagttgaggctaacagtcagtatccagcctcaacattcagcagaggccccagatcagcgtctgagccaggccaacaatgaccaaggaggatgggatcctgggtgcagctcatcacaagcgtcggggtgcagcaaaaccatccaggctggacagtggctggacagttccaagaaaagaaacgcttcactgaagaagtcattgaatacttccagaagaaagttagcccagtgcatctgaaaatcctgctgactagcgatgaagcctggaagagatttgtgcgtgtggctgaattgcccagggaagaggcagatgctctctatgaagctctgaagaatcttacaccatatgtggctattgaggacaaagacatgcagcaaaaagaacagcagtttagggagtggtttttgaaagtttcctcaaatcagatggaagattcaggagtccatagaaaggcttcgtgtcattgcaaatgagattgaaaaggtccacagaggctgcgtcatcgccaatgtggtgtctggctccactggcatcctgtctgtcattggcgttatgttggcaccatttacagcagggctgagcctgagcattactgcagctggggtagggctgggaatagcatctgccacggctgggatcgcctccagcatcgtggagaacacatacacaaggtcagcagaactcacagccagcaggctgactgcaaccagcactgaccaattggaggcattaagggacattctgcgtgacatcacacccaatgtgctttcttttgcacttgattttgacgaagccacaaaaatgattgcgaatgatgtccatacactcaggagatctaaagccactgttggacgccctttgattgcttggcgatatgtacctataaatgttgttgagacactgagaacacgtggggcccccacccggatagtgagaaaagtagcccggaacctgggcaaggccacttcaggtgtccttgttgtgctggatgtagtcaaccttgtgcaagactcactggacttgcacaagggggcaaaatccgagtctgctgagtcgctgaggcagtgggctcaggagctggaggagaatctcaatgagctcacccatatccatcagagtctaaaagcaggctaggcccaattgttgcgggaagtcagggaccccaaacggagggactggctgaagccatggcagaagaacgtggattgtgaagatttcatggacatttattagttccccaaattaatacttttataatttcctatgcctgtctttaccgcaatctctaaacacaaattgtgaagatttcatggacacttatcacttccccaatcaatacccttgtgatttcttatgcctgtctttactttaatctcctaatcctgtcagctgaggaggatgtatgtcacctcaggaccatgtgataattgcgttaactgcacaaattgtagagcatgtgtgtttgaacaatatgaaatctgggcaccttgaaaaaagaacaggataacagcaattgttcagggaataagagagataaccttaaactctgaccaacagtgagcctggtggaacagagtcatatttctcttctttcaaaagcaaatgggagaaatatcgctgaattctttttctcagcaaggaacatccctgagaaagagaatgcacccctgagggtgggtctataaatggcctccttgggtgtggccatcttctatggtcgagactgtagggatgaaataaaccccagtctcccatagcgctcccaggcttattaggaagaggaaattcccgcctaataaattttggtcagaccggttgctctcaaaaccctgtctcctgataagatgttatcaatgacaatggtgcccgaaacctcattagcaattttaatttctccccggtcctgtggtcctgtgatctcgccctgcctccacttgccttgtgatattctattaccttgtgaagtaggtgatctttgtgacccacacccacaccctattcatacactccctccccttttgaaagtccctaataaaaacttgctggttttgcggcttgtgaggcatcacggaacctaccgatgtgtgatgtctcccctggacacctagctttaaaatttctctcttttgtactctgtgcctttatttctcaaaccggccaacacttagggaaaatagaaaagaacctacgtgaccatcggggcaggttccccgatacccaatgaccccagagcagtgcagccaccagggaaggtgagccagacacaggccgggacaaaacgcagacattttttaggggaataaagagggcgaggtaaagtttatggaactcagtgttaggaactttggcatctgtagctgagcacagcaggggaggggttactcaagatggcaagtgcgccaaggagaaggcagaaatgctggggcctggaataagggaggagaggggactggagagtgtggggaatggaaagaagcagtttactctagactaaagagtatattgggggaggaagagagggaggcacgtaggaacaagcaatgagaagaccaggaaaagaaagagctgaaaatggagaaagccacagttagaactgttggatacaggagaagaaacagcggctccactaaagacccgccccccggttggatgtccttccaagaatggaatccttccctggtgatggtctctcaccctgtcttaccagcatccactctcccttgtcctcccgggggtgtatctgagtcagccagtggcttcttgatgatggtggtggtggttgtagtgtgacaggtcccctttaggttatttaagggtgcatgtcccctgcttgaaccctgaaggccgggtaatgagccatttccatggtgcccagctgaggaccaggtgtctctgagaatccaaacatcctggagagtatctgagaaccaaccaagtaaaagtctcgttgctcatatatagtagacaaagagccagaaaattaactgaaaagcagtttagacattgggggaggctggatctctcgagctgtcttgctgagtgccctgtgtgtaagtcctaataaacttagctactcgccaagctggacttgtttaagtcattccttggtctcatggctcctttcccgctttgagggcaagttcctgtctcaagtttttgtcctaacagtggtaaaggtgattgtggtgatgtcagcagacagcaagaggacttgacatggggtcggccctgcttggggccagcgtacactgagggaccgatgacatttcaatgaaactccaaatgctatattggaaacgttgatgtgtgaagaaaaataaaagcaaaaccagatgccaggaacaagtca

SEQ ID NO: 410810 - DNA, 2397 bp, Homo sapiens
gaggtgctggggagcagcgtgtttgctgtgcttgattgtgagctgctggggaagttgtgactttcattttacctttcgaattcctgggtatatcttgggggctggaggacgtgtctggttattatataggtgcacagctggaggtgagatccacacagctcagaccagctggatcttgctcagtctctgtcagaggaagatcccttggaggaggccccgcagcgacatggagggagctgctttgctgaaaatctttgtcgtctgcatctggaaccaaaatcacttcccggaattgaccaactggtagactcgcctagaggggacgcactgtgtcctagttgaggctaacagtcagtatccagcctcaacattcagcagaggccccagatcagcgtctgagccaggccaacaatgaccaaggaggatgggatcctgggtgcagctcatcacaagcgtcggggtgcagcaaaaccatccaggctggacagtggctggacagttccaagaaaagaaacgcttcactgaagaagtcattgaatacttccagaagaaagttagcccagtgcatctgaaaatcctgctgactagcgatgaagcctggaagagatttgtgcgtgtggctgaattgcccagggaagaggcagatgctctctatgaagctctgaagaatcttacaccatatgtggctattgaggacaaagacatgcagcaaaaagaacagcagtttagggagtggtttttgaaagtttcctcaaatcagatggaagattcaggagtccatagaaaggcttcgtgtcattgcaaatgagattgaaaaggtccacagaggctgcgtcatcgccaatgtggtgtctggctccactggcatcctgtctgtcattggcgttatgttggcaccatttacagcagggctgagcctgagcattactgcagctggggtagggctgggaatagcatctgccacggctgggatcgcctccacttgccttgtgatattctattaccttgtgaagtaggtgatctttgtgacccacacccacaccctattcatacactccctccccttttgaaagtccctaataaaaacttgctggttttgcggcttgtgaggcatcacggaacctaccgatgtgtgatgtctcccctggacacctagctttaaaatttctctcttttgtactctgtgcctttatttctcaaaccggccaacacttagggaaaatagaaaagaacctacgtgaccatcggggcaggttccccgatacccaatgaccccagagcagtgcagccaccagggaaggtgagccagacacaggccgggacaaaacgcagacattttttaggggaataaagagggcgaggtaaagtttatggaactcagtgttaggaactttggcatctgtagctgagcacagcaggggaggggttactcaagatggcaagtgcgccaaggagaaggcagaaatgctggggcctggaataagggaggagaggggactggagagtgtggggaatggaaagaagcagtttactctagactaaagagtatattgggggaggaagagagggaggcacgtaggaacaagcaatgagaagaccaggaaaagaaagagctgaaaatggagaaagccacagttagaactgttggatacaggagaagaaacagcggctccactaaagacccgccccccggttggatgtccttccaagaatggaatccttccctggtgatggtctctcaccctgtcttaccagcatccactctcccttgtcctcccgggggtgtatctgagtcagccagtggcttcttgatgatggtggtggtggttgtagtgtgacaggtcccctttaggttatttaagggtgcatgtcccctgcttgaaccctgaaggccgggtaatgagccatttccatggtgcccagctgaggaccaggtgtctctgagaatccaaacatcctggagagtatctgagaaccaaccaagtaaaagtctcgttgctcatatatagtagacaaagagccagaaaattaactgaaaagcagtttagacattgggggaggctggatctctcgagctgtcttgctgagtgccctgtgtgtaagtcctaataaacttagctactcgccaagctggacttgtttaagtcattccttggtctcatggctcctttcccgctttgagggcaagttcctgtctcaagtttttgtcctaacagtggtaaaggtgattgtggtgatgtcagcagacagcaagaggacttgacatggggtcggccctgcttggggccagcgtacactgagggaccgatgacatttcaatgaaactccaaatgctatattggaaacgttgatgtgtgaagaaaaataaaagcaaaaccagatgccaggaacaagtca

SEQ ID NO: 410811 - DNA, 281 bp, Homo sapiens
  misc_feature (39)..(39): n is a, c, g, or t
atttatttttttatctcacttaattatataaaaaaacanaaataaatcctagtagaacaaaggcagtcaagggtgcaaggatattagaagctgtgttctgtgagctttcatgaaggctgtggaaggatccaggcaggatggcctcaaattaagattttaatgactctttggtttagaaaacacactcttgctgttaacgctatcttatcaggtatcatttttgaattcacagatgaaagttaaaaaattcataattatacaaatacttgccttgtatgttt

SEQ ID NO: 410812 - DNA, 282 bp, Homo sapiens
atgtaatgacagcatcaattttaatttgcatttttctggttactgatgaggaggagcacctttgatttccttcttgtgacattcctgttcaagcctcttgtccatttactactgagttatacgtctttttcttgttgcgttgtgagaattcttcacatggtttgggtactgagtaattctttatctatttcaataccttccactattctgcttgacttctactctgccagtggtatcttttgtttttgtttttgttttgagatggagttttgcttttgttgc

SEQ ID NO: 410813 - DNA, 415 bp, Homo sapiens
gggtattttatgatgacaataacagaagcagcatctttacttggcttacatattattcagtggttctctaacaatctatttaactacactgaaaataatttcagcaataattggaaaacctgttttcaggctccgcactctataagaaataaggaagttgtaaaggtaagcctttgaccttgtgctacatatttagcacaaaaagcacatactgagattataatgtgtgcagatgtgtggctgtgataagtcattccaggtatgaaaaatacaactaaggcatagctactacctttaacatgcttatagtatgcaaagcattacattacataaagaatatttaaaacatgttattaaaattatttgaggactgatttctggaatagtgaagagctatgaacctggtccccaggaa

SEQ ID NO: 410814 - DNA, 395 bp, Homo sapiens
aaaaatgtttaatagagatgaggtctccttatgttgcccaggctgttctcaaactcccaagctcaagcaatcctcccaccttggccttccaaagtcctgggattacagccatgagccaccacacccagcctaaatactttttaatctacactaccagtaagtatttttcataagaaaccattattaaatgagtgattaaaaccaagaggggcagggcgtggtggttcacgcctgtaatcccagcactttgggaggccgaggcgggtggatcatttgaggtcaggagttcaagatcagcctggccaacatggtgaaaccccgtttctactaaaaatacaaaaattagccagacatggtggtgcacacctgtagtcccagctacttgggaggctgag

SEQ ID NO: 410815 - DNA, 370 bp, Homo sapiens
gcatttggtgaaattaaacatcccttcatgttaaaaactaaaatattgtagagaaggaacatacctcgaaacactaaaagacatatatgacagaccttgtatcatactcaatggggaaaagcagaaagcctatttctctgagatctgaaacaacatgaggatgcccactttcaccactgttatttgagattgtacaggaagtcctagctagagtaattagaccagagaaataaataaagtgcatccaagttggaaaggaagaagtaaagttatccttgtttgcagatgatatgatcttatatttggatacacttaagactacaccaaaaaactattagaacgtagaaacaaattctgtcaagttgcagga

SEQ ID NO: 410816 - DNA, 1290 bp, Homo sapiens
tgggttcgagttcaaggttgaggagcagtctggggacatcagctcttaatatttttcaagttttggagcaagtggtttctaggttctgagtgaagtgaaacagaatctctaggggcatgtggtaaagataatcccatactatgtactgcgtagagttaaagagaagaggcgagagcatgaagataaaccagtacaatcagtcgttcacataccactaactacaatgatactcccatttgcttcctgtgaagtagttactaataatcactgatgtcgctttttaatttcatacatcctttaactgtcttcatataggtattgaaagagtcaacataaaagccacatccattttctaattttgaacaatagttagagaaacctaatatcttctcatatttttgtcttgcttctgtctcatgagttcccaaaatagatatattatctgaatgaagagttcatgggcaaatgtcacacttttcttggtttggctaattatatttctgcttttgcttagaataagattaattttcctattctgctaataaaccacgtgatggcaaaatgccttattctgagaaaagaagcctttggtattttaaagaattgggaagctatttcagataagctatcatatgcatgaagattaatttattcatatgaaatgttcaataaccagaaaagactgttttaaataaaaccatttcacaattaagtttttttttggttatggacagtgatttcttctaagaaacaaagcgcctgtctatatgaagaataactaaaataatggttagcaaatattgattggatccagccaagtgagcagcatttttgagtttacagatgtggtaactttgaactatatttacgtgcttataatgaaaccttacagttggagtaatagctttgttcctgagtctcatgaatattttccagctcctttgtcctaaatttctgcctgacaatcatccatttcaaggaataaaaggatataataagtgataaacctatgctggaaatttttaatctaaaaagttcacatactgtttctaataaactgaaaactattagagaaagatggaggtattaaaacctgttaataaggaaatcaatggcaacatattttaaatggttttgaattttataaagattttcttttatagcactatgtcctttttcttttcttctccttgtttgatttccaacagctgagctatttacttgttgagttatttcatatctattattccatttagaactcgaacccagtgtgaagctcctctagatctt

SEQ ID NO: 410817 - DNA, 751 bp, Homo sapiens
gactcttttctatgttctatatacacacagaaatacacatgcaaagctgaacacatgtgtgaaacaaaattcagacactcaaattttccgccaacacgtgataaaatcttgcacaatagcttcctccacagaggaaaatgtctttactacatcttaaaaatggggtaaatgaatagttaggctcttcagtgtaataatcatgataaatattctcaatatgcgaaaatacaaacaaaggactttctctcccagcaaatttagacccacatgaaaatttaagcacaatcattttaaacgaatttatcctggagcttagtgggttcgagttcaaggttgaggagcagtctggggacatcagctcttaatatttttcaagttttggagcaagtggtttctaggttctgagtgaagtgaaacagaatctctaggggcatgtggtaaagataatcccatactatgtactgcgtagagttaaagagaagaggcgagagcatgaagataaaccagtacaatcagtcgttcacataccactaactacaatgatactcccatttgcttcctgtgaagtagttactaataatcactgatgtcgctttttaatttcatacatcctttaactgtcttcatataggtattgaaagagtcaacataaaagccacatccattttctaattttgaacaatagttagagaaacctaatatcttctcatatttttgtcttgcttctgtctcatgagttcccaaaatagat

SEQ ID NO: 410818 - DNA, 571 bp, Homo sapiens
tgtgagccaaagatttatgtcttcatttcttgcatttgaagtactcttggatgacatccttggcctgagactccttgccatagtccttaactactacacaactgcaaccaaccactttacagggtttcccttctctcaattttacagagcgctacccattcccctagtttcttgttgtcatcaaccttaattaagttgatttggtgctcagcacaaagggactccaccagcttgacatacataggcttatcacagttggatcaagcacacaaagatgggcttggcgcttgtctaaggctttggcagcttcacagattccacgtgctaggccatcgtggatgagggcggtcttcagcacctcttgtaaagcagtattaacatccattacacctccagcagcaatgcctccctcggccatggcagtgggttatgggtgaagctgaatcttgaacatacccaagcctccgcctccgcgcaactcggcagtggcagggaaagggtgattaacatattttttaatgttatatatatatataatactataatcttacaataagctgaagaaaagaaa

SEQ ID NO: 410819 - DNA, 2551 bp, Homo sapiens
aggagaaataacaggaggcgcagttactgatatagccaaggtgggacactactggagggagctagaagggatcagccagccatgcctccagttcaggtacttggcattgctaagctcagaacaggacttgccagtgtctagatgaaaaagaggagagatctcaagagggataaccaattggctggcaaagtaacaaatgaaaagtaacctgactctattgacctgcttaaccctgcatgggggggaaggatggaaaggagcagctgtttgctttgaaacggtggaacagttttgcagccttagaaaatggcatgtaacatacctaaccaaagacagcggactctgtcaacaacaggagaagctctatacgaaattcttggtctgcataagggagcatcaaatgaagaaattaagaaaacctacaggctggaaaatcccttcacctaaaggcacctggctcctcagctactaccaacaaggagtgttgggagcctcagaagcgggagacaaaccaaacaaaccaaagaagcaccgtaaagactctgaaaagtagattgttattggaaccactcacaaaagtaggctagaacctgcatgctaaacctaaagggggctgcctgctaaaataaaacaacttaaatagaacccattatctcccaacatgataaccaaaatatccagatacaaacaaaatgacccatcctacaaagaagcaagaaaatcacaacttgaataagaaaagacaatcagctaactcctgtgctgagatgaaccagatgttggaactatctgaaaagcattttaaagtaaccatcataggccgggtgcggtggctctcgcctgtaatcccagcactttgggaggccgaggctggcggatcacgaggtcaggagattgagaccatcctggctaacacagtgaaagcccatctctactaaaaatacaaaaattagccgggcttagtggcaggcgcctatagtcccagctactcgggaggctgaggcaggagaagggcgtgaacctgggaggcggagcttgcagtgagccgagatcgcgccactgcactccagcctgggcgacagagcaagactgtctcaaaaaataaataaataaataaagtaaccatcataaaaaattcaacaagtaacgacaaattctcttgaagcaagtaaaaaaaaatggaaattctcagtgaagaaataggaattaacaaaaaagaaccaaatggaaactatagaaccaaaaaataacacaaataataaaactaactggatgagcttaatagtacagtggagatgacagagaatagaaattgaggacagatcaatagaatgttcccgatctgaacaaccgataaacaataaactgaaaacagagtctcagaaacctgtgggacaataacaaagatccaacatttatagcattgacatcctagaaggagaagagtgaaacaatgggactaaaagagtactaaaagaagtaatggctggaaattccccacatttggcaaaaaatagaaacctacagattcaagaggctgagagaactccgacaggataaacccaaagcaatcaatgccaagaaacattataattaaatttctgaaaactacagacaaagaaaaaaatttgaaagcagccagggagaaacaatgcatggccaaacacccatttgaatggcagcatatttctcatctaaagcaacagcagcctgaaggaagtgacaaaagatttttcaactgatgaaagagaagaactgtcaacagaaaattctgtatctggtgaaactatatttcacgagtgaatggggaaatacgttctcacataaagggaatctaaaagaattgtcactagcagatctcttcttaaagaatggctaaaggaagttcttcgaaagaaaggaaatgataaagaaaggatcttagacgatcaggaagaaggaaagaacaagggagaaagcagaaatatggaaaattggccctgaaacaccatccagacaagaatccagatgatccagctgctactgagaagtttaaagaaatcaacaacgcccacgcaatacttaccgacatttcaaagagaagcatatacgacaagtacggatcgctgggactctacgtggccgagcagtttggagacgaaaacgttaacacctacttcatgctgtcgagctggtgggcaaaggccctgtttgtcatcgttggcctcttgacgggctgctacttttgctgctgcctgtgctgctgctgcaactgctgctgtggacactgccggcccgagtcatcagtgccagaagaggacttctatgtgtccccagaggatctggaggagcagatcaagtctgacatggaaaaagatgtggactttccagtttttctccagcctacaaatgcaaatgagaaaacacagctaatcaaagaaggatctcgaagttattgcacagactcttgatattgagccctcagagagtccacagtccctcctctcagttcagtcttgtctccagatggtcgtaggggagcgtgtggggcataaagtgctgtgaacttttc

SEQ ID NO: 410820 - DNA, 1389 bp, Homo sapiens
aggagaaataacaggaggcgcagttactgatatagccaaggtgggacactactggagggagctagaagggatcagccagccatgcctccagttcaggtacttggcattgctaagctcagaacaggacttgccagtgtctagatgaaaaagaggagagatctcaagagggataaccaattggctggcaaagtaacaaatgaaaagtaacctgactctattgacctgcttaaccctgcatgggggggaaggatggaaaggagcagctgtttgctttgaaacggtggaacagttttgcagccttagaaaatggcatgtaacatacctaaccaaagacagcggactctgtcaacaacaggagaagctctatacgaaattcttggtctgcataagggagcatcaaatgaagaaattaagaaaacctacagaaaattggccctgaaacaccatccagacaagaatccagatgatccagctgctactgagaagtttaaagaaatcaacaacgcccacgcaatacttaccgacatttcaaagagaagcatatacgacaagtacggatcgctgggactctacgtggccgagcagtttggagacgaaaacgttaacacctacttcatgctgtcgagctggtgggcaaaggccctgtttgtcatcgttggcctcttgacgggctgctacttttgctgctgcctgtgctgctgctgcaactgctgctgtggacactgccggcccgagtcatcagtgccagaagaggacttctatgtgtccccagaggatctggaggagcagatcaagtctgacatggaaaaagatgtggactttccagtttttctccagcctacaaatgcaaatgagaaaacacagctaatcaaagaaggatctcgaagttattgcacagactcttgatattgagccctcagagagtccacagtccctcctctcagttcagtcttgtctccagatggtcgtaggggagcgtgtggggcataaagtgctgtgaacttttccatcttgttgttttatttttgggttaggaaaacatgattgctatataattttctcagtatgcagactttctctctgagtagaatttcttatgaaacacattcaatttgggtgaataaaggcctgaagagttattttaccctccttgcctgatgtaggacagtggaattgtacagcctttatgaacctgccctttatgtgtggcggatctgattcctaactgaccaaagtaatattccagaacaaaagccacttttcttacatttaacacaatattcatatctaccacgaacatgatcatcaaaatatatgagaacttataaagagtttttgtgtgtggagcctcttccgtgtcaatattcaataaagttatagaaatgtttc

SEQ ID NO: 410821 - DNA, 542 bp, Homo sapiens
cccaaagcaatcaatgccaagaaacattataattaaatttctgaaaactacagacaaagaaaaaaatttgaaagcagccagggagaaacaatgcatggccaaacacccatttgaatggcagcatatttctcatctaaagcaacagcagcctgaaggaagtgacaaaagatttttcaactgatgaaagagaagaactgtcaacagaaaattctgtatctggtgaaactatatttcacgagtgaatggggaaatacgttctcacataaagggaatctaaaagaattgtcactagcagatctcttcttaaagaatggctaaaggaagttcttcgaaagaaaggaaatgataaagaaaggatcttagacgatcaggaagaaggaaagaacaagggagaaagcagaaatatgggtaaatacaaaagactatccttttcctcgtgagtggtgtgtgtcctcccaccctcgatggtggtgtgttctcgctcctagcctgtactttgtattcccttaacagtatatcttaaagataattccaaggaaaga

SEQ ID NO: 410822 - DNA, 1007 bp, Homo sapiens
aggagaaataacaggaggcgcagttactgatatagccaaggtgggacactactggagggagctagaagggatcagccagccatgcctccagttcaggtacttggcattgctaagctcagaacaggacttgccagtgtctagatgaaaaagaggagagatctcaagagggataaccaattggctggcaaagtaacaaatgaaaagtaacctgactctattgacctgcttaaccctgcatgggggggaaggatggaaaggagcagctgtttgctttgaaacggtggaacagttttgcagccttagaaaatggcatgtaacatacctaaccaaagacagcggactctgtcaacaacaggagaagctctatacgaaattcttggtctgcataagggagcatcaaatgaagaaattaagaaaacctacagaaaattggccctgaaacaccatccagacaagaatccagatgatccagctgctactgagaagtttaaagaaatcaacaacgcccacgcaatacttaccgacatttcaaagagaagcatatacgacaagtacggatcgctgggactctacgtggccgagcagtttggagacgaaaacgttaacacctacttcatgctgtcgagctggtgggcaaaggccctgtttgtcatcgttggcctcttgacgggctgctacttttgctgctgcctgtgctgctgctgcaactgctgctgtggacactgccggcccgagtcatcagtgccagaagaggacttctatgtgtccccagaggatctggaggagcagatcaagtctgacatggaaaaagatgtggactttccagtttttctccagcctacaaatgcaaatgagaaaacacagctaatcaaagaaggatctcgaagttattgcacagactcttgatattgagccctcagagagtccacagtccctcctctcagttcagtcttgtctccagatggtcgtaggggagcgtgtggggcataaagtgctgtgaacttttc

SEQ ID NO: 410823 - DNA, 449 bp, Homo sapiens
aattgtgtttgagcacaagggtgttggcaataggggcgcccatagttaattagtaacagagagcagtagataaaacagatgcttccagcttggccggacactagtcagccttctgttctccctaaagagggccctgaaacatgagtactcaatgcacttatgtcttggctgacttttcatcccaagaagctagaccccagtgtcactcttcccttctccattcagccaatggcttgataccttgagtggatctgacaatgtaatgctcactactcccaccccagctggtatcaaacattcagaccagatgtgagctccactgggcttgataatagctcctagactcattcactcttttcttcattcaaaatgttgaatgagctgggtgcagtggttcacacctataatcccagcactttgggaggtcaaggcaggcagattgcttgagc

SEQ ID NO: 410824 - DNA, 851 bp, Homo sapiens
ctcctgcctcagcctcccgagtagctgggattacaggaaggcaccaccatgcgtggctaattttgtatttttagtagagacaaggtttctccatgttggtcaggctggtctcgaactcccaacctcaggtgatccacccgcctcggcctcccaaagtgctgggattaccagcgtgagccactgcacctggtcaagtattatggttttttaatagtatgcacacatgggacaaaactcaactggtataaaagggtatgcaggagaaaaaaagcaaacttccctctctcccttttctgtccaccagccatcctgttctcctccctaaactcaattatggttgcctgttttttatataagttttccatgaatttataaatacatcacgtgcatatatcctgtcagtcaatattaagaaattactaggttattttgtgtttatgtgtgcactattagatttaatgagttatgctagttgttgcctcttatatccacattcagtcttcattgtctgttctgtaataatagatctgggccctgtaaatacctctcccatgacagtaagcacagagtgaaactttgtcaatcgagggtgctgctgacacactgaaggggcaagggctgcttttcctggttccattgtgctcctctaggcagacacctgcaacacctgtgccatctgcaataccagctcctgtagcacatacactctgcctctgcagcacctcgttctggctgcacacttcttgggcggtgcctaacttcagcagcacccaatggtcagcagcgcacagtacccccacatgaatggcttcccttgacatgcacaaggtcccttctctgcaaagtgcccc

SEQ ID NO: 410825 - DNA, 424 bp, Homo sapiens
attacaggcatgagccactgtgccactgtgcccagccaactgttattttcagttgcctttgattttactcattaaattaatccgctaggcatgagtttagagatatagttagacatttgagaagcagcaagttgtaggataaatataaaatcattaattacttagcacattgtagctcttttgctgtgaagttctttggagcaagtactcagagtttgtggtatgagcgtcctcttacttagcagttgatgaacaactatgtgcaaaactttatacgatgattcactcaagcaagttatcaagatatttaaaggcatgttcttaacccttgaaaaaagtaatgctggctggacgtggtggctcacaactgtgatcacagcactttgggaggctgaagcggatggatcacttgaagttgggagtt

SEQ ID NO: 410826 - DNA, 235 bp, Homo sapiens
atcacccggaaacagagctggcacttatgttaaattggcatcttcataaaggaatgacagcacctgatgaactggctattcaagccttagaactttctctgatggaaagtgtgtgcaatactgcaggtgttgtcatcgatggatatcctgtaactaaacatcaaatgaatctcttggaagctaggtcaatcattcccatggtcatctttgaattgagtgtgccttccaaggagat

SEQ ID NO: 410827 - DNA, 1594 bp, Homo sapiens
tccctccccccactcccccctcccccgcccgccggggcaggggagcgccacgaattgaccaagtgaagctacaactttgcgacataaattttggggtctcgaaccatgtcgctgaccaacacaaagacggggttttcggtcaaggacatcttagacctgccggacaccaacgatgaggagggctctgtggccgaaggtccggaggaagagaacgaggggcccgagccagccaagagggccgggccgctggggcagggcgccctggacgcggtgcagagcctgcccctgaagaaccccttctacgacagcagcgacaacccgtacacgcgctggctggccagcaccgagggccttcagtactccctgcacggtctggctgccggggcgccccctcaggactcaagctccaagtccccggagccctcggccgacgagtcaccggacaatgacaaggagaccccgggcggcgggggggacgccggcaagaagcgaaagcggcgagtgcttttctccaaggcgcagacctacgagctggagcggcgctttcggcagcagcggtacctgtcggcgcccgagcgcgaacacctggccagcctcatccgcctcacgcccacgcaggtcaagatctggttccagaaccaccgctacaagatgaagcgcgcccgggccgagaaaggtatggaggtgacgcccctgccctcgccgcgccgggtggccgtgcccgtcttggtcagggacggcaaaccatgtcacgcgctcaaagcccaggacctggcagccgccaccttccaggcgggcattcccttttctgcctacagcgcgcagtcgctgcagcacatgcagtacaacgcccagtacagctcggccagcaccccccagtacccgacagcacaccccccagctctgcccatgcctctccttctgaaccttgggagagggctgaactctacgccgtgtttacagaatgtttgcgcagcttcgcttctttgcctctccccggggggaccaaaccgtcccagcgttaatgtcgtcacttgaaaacgagaaaaagaccgaccccccacccctgctttcgtgcattttgtaaaatatgtttgtgtgagtagcgatattgtcagccgtcttctaaagcaagtggagaacactttaaaaatacagagaatttcttcctttttttaaaaaaaaataagaaaatgctaaatatttatggccatgtaaacgttctgacaactggtggcagatttcgcttttcgttgtaaatatcggtggtgattgttgccaaaatgaccttcaggaccggcctgtttcccgtctgggtccaactcctttctttgtggcttgtttgggtttgttttttgttttgtttttgtttttgcgttttcccctgctttcttcctttctctttttattttattgtgcaaacatttctcaaatatggaaaagaaaaccctgtaggcagggagccctctgccctgtcctccgggccttcagccccgaacttggagctcagctattcggcgcggttccccaacagcgccgggcgcagaaagctttcgattttttaaataagaattttaataaaaatcctgtgttt

SEQ ID NO: 410828 - DNA, 1819 bp, Homo sapiens
tccctccccccactcccccctcccccgcccgccggggcaggggagcgccacgaattgaccaagtgaagctacaactttgcgacataaattttggggtctcgaaccatgtcgctgaccaacacaaagacggggttttcggtcaaggacatcttagacctgccggacaccaacgatgaggagggctctgtggccgaaggtccggaggaagagaacgaggggcccgagccagccaagagggccgggccgctggggcagggcgccctggacgcggtgcagagcctgcccctgaagaaccccttctacgacagcagcgacaacccgtacacgcgctggctggccagcaccgagggccttcagtactccctgcacggtctggctgccggggcgccccctcaggactcaagctccaagtccccggagccctcggccgacgagtcaccggacaatgacaaggagaccccgggcggcgggggggacgccggcaagaagcgaaagcggcgagtgcttttctccaaggcgcagacctacgagctggagcggcgctttcggcagcagcggtacctgtcggcgcccgagcgcgaacacctggccagcctcatccgcctcacgcccacgcaggtcaagatctggttccagaaccaccgctacaagatgaagcgcgcccgggccgagaaaggtatggaggtgacgcccctgccctcgccgcgccgggtggccgtgcccgtcttggtcagggacggcaaaccatgtcacgcgctcaaagcccaggacctggcagccgccaccttccaggcgggcattcccttttctgcctacagcgcgcagtcgctgcagcacatgcagtacaacgcccagtacagctcggccagcaccccccagtacccgacagcacaccccctggtccaggcccagcagtggacttggtgagcgccgccccaacgagactcgcggccccaggcccaggccccaccccggcggcggtggcggcgaggaggcctcggtccttatggtggttattattattattataattattattatggagtcgagttgactctcggctccactagggaggcgccgggaggttgcctgcgtctccttggagtggcagattccacccacccagctctgcccatgcctctccttctgaaccttgggagagggctgaactctacgccgtgtttacagaatgtttgcgcagcttcgcttctttgcctctccccggggggaccaaaccgtcccagcgttaatgtcgtcacttgaaaacgagaaaaagaccgaccccccacccctgctttcgtgcattttgtaaaatatgtttgtgtgagtagcgatattgtcagccgtcttctaaagcaagtggagaacactttaaaaatacagagaatttcttcctttttttaaaaaaaaataagaaaatgctaaatatttatggccatgtaaacgttctgacaactggtggcagatttcgcttttcgttgtaaatatcggtggtgattgttgccaaaatgaccttcaggaccggcctgtttcccgtctgggtccaactcctttctttgtggcttgtttgggtttgttttttgttttgtttttgtttttgcgttttcccctgctttcttcctttctctttttattttattgtgcaaacatttctcaaatatggaaaagaaaaccctgtaggcagggagccctctgccctgtcctccgggccttcagccccgaacttggagctcagctattcggcgcggttccccaacagcgccgggcgcagaaagctttcgattttttaaataagaattttaataaaaatcctgtgttt

SEQ ID NO: 410829 - DNA, 478 bp, Homo sapiens
gtctattcatttgttaaaagaacagattggaccaaattatttctaaaatccgaatctctgtcattactatgtgaccttgggtgtaataccaacttttgtgtcacttttcctcatctgttaaattgttaagtgggataatagttgttgaccttatctatccattcctttcttcctccctccctttctcccttctttacttcctagaatcaaattagataatatacatgagagcactttaaaacttaaaaatttggtgtgtaaccacaggcgtagttacagtatctaagggggtgtaggtttgccgctattgcatgcatattatgtgccaagcccattgctatgtctttatgatacattatccttcccagatttacataaggtggttgtcatacacctgctacagacaagaaacctggaatccatgggagtaaaggaacttgtttaaggtcaaaagacaaatagaagaatttagggtttg

SEQ ID NO: 410830 - DNA, 378 bp, Homo sapiens
cgatattttttcatctattcacttttctaccttttttgtggttaaaagatatggtctggttccttaaagtggaaaattcttaaccatttctggagttacttaacgcctagaaaactgctgcatgtttattggtttatatgctggaagatggcccattgcagaattaaaatggaaatgtagacagaaaggagaggacatgagtggatgagggcattgatcgcggccagcctggtttggattgccctacatctctcttgtgctggcatctctgcagcgacatctctttccagtgtatagagtcttatataggacctgttagactctgctgaggtttggtcgtgttttttcgttttattttgttttttctttgaaatagag

SEQ ID NO: 410831 - DNA, 205 bp, Homo sapiens
ggatctggtaagtattcttctatcatttgatgtccataaacatatggttcacattaaatattaaatatagagtaatagtaaatgatggttttgggttttaaagccgttagaaattagtttatggaggttataagataacttttttcccctattactgtaaacactcatttcttcatggtgatgacattgaaaatcttctcttcta

SEQ ID NO: 410832 - DNA, 247 bp, Homo sapiens
gcgtcaaatgcttaatggagcaagtggggtacttgggaaacatctcgcacccctttctgtggctgtagaactagatggtggaagttgaattaaatcccaagaatgggcttggggaatggcatcaaagctgtgttccacatgtccatctctgtgtacttgttatgttccagaggctctatttggccctggttataaccaaaccttcaaagccctaggccctctaactccatggtttcttctgaacgta

SEQ ID NO: 410833 - DNA, 789 bp, Homo sapiens
ggacaacagagcaagactctgtctcaaaaataaaaacctgcctttgtggaacttacattctagcagctatgaagagaacaagttagtgtgatagaagacagctttggtattgggaagggtacagccacttctgactgggtggtcagggccggctcctctgaggagacttggaaggtaaggaggagccaaccctgtggagagctgaggaggagcattctgagtagagggaatggcaagggcaaaggccccttgtgtttaggaaaaggaaggttgaccagtgtggccgcagaggagggagtagcagggagacagtgagtgggctggaaggggagccagggctgcgccctgtaggccaccagaaggaggagtctgtattttgtaataggagcagtaggaaacttgtggaaggttttgagcaggacagtaaagtgacctgatttgtaaaggaccttaggatccagttggcccatcttccctgtccctgtcccatcttccctccctcctgcaacacagatacatcccatcaaggcacccctgccaaatggcgaagccagtctggctgatggaggtgaggggtctccaaaggttgccctagaacagtctcagcgggctgttaggtaggcggataacttgaggggggggctgacctgagatgtagggatcctggcttacaggattcgaaccccgtatggcaccaggtcggttgattcctgtgcgtaaatgtaagttgccggtttccactgagcatgggacgatattgatctgagtcctaccctagaccgccgtgtt

SEQ ID NO: 410834 - DNA, 426 bp, Homo sapiens
tgcagtgagctgagatcacaccactgcactccagcctgggcgacagagtgagactctgtctccaacaaaacaaaacaaaaaaattcatataaaaatacaggtaaaatgtttcaagtaattagaatattctggcactggtccatgcgtgttggctcatgcctgtaatcctaatactttggggggctgaagtgggcggatcacttgagcccaggagtttgagaccagcctggacaacatggtgaaaccctgtctctgcaaaaaatgcaaaaattagccaagtgtggtggtgtatacccatagtcccagctacctgggagggagtttgaggtaggaggatcagttgagcccaggaggtcgagggcggtgagccgtaatcacaccactacactccagcttggacaacagagcaagactctgtctcaaaaa

SEQ ID NO: 410835 - DNA, 434 bp, Homo sapiens
ccatagtcccagctacctgggagggagtttgaggtaggaggatcagttgagcccaggaggtcgagggcggtgagccgtaatcacaccactacactccagcttggacaacagagcaagactctgtctcaaaaataaaaaaaagtataccagcactattgtcagcagttgggatacagtggacaaaaccagcaaaaagcctgcctttgtggaacttacattctagcagctatgaagagaacaagttagtgtgatagaagacagctttggtattgggaagggtacagccacttctgactgggtggtcagggccggctcctctgaggagacttggaaggtaaggaggagccaaccctgtggagagctgaggaggagcattctgagtagagggaatggcaagggcaaaggccccttgtgtttaggaaaaggaaggttga

SEQ ID NO: 410836 - DNA, 579 bp, Homo sapiens
catgaggcctggctaagtgtttgtatttttgatagagatggggtctcattatgttgcccaggctggtctcgaactcctgagttcaagcgatctgcccaccttggtctcccaaagtgctgggattacaggcgtgagccactgtacccggcccttcctcccttacgcgtgcttttcctctcttcccctaatttatgatggtgcaaaatcaatgggtgttcagtagaagcagtacttggagcacccatacgaccattctgtttttcactctcagtattccataaactacacaagctattcaacactttataacaaaacaggctttgtgttagatgactttgcccaactgtaggctaatgcaagtgttccgagctaagttaagctataacgttcagtaggttaggagtatgaagtacatttctgacttaataatattttcaacttatgatgagtttatggggacaaaaccccatcattaagaaacatctgtgtatgagacacataaacacactcacatatctccataatgaataaattaccccaatacctcagtgtgcatgtcagaaaaacaaggacattctc

SEQ ID NO: 410837 - DNA, 364 bp, Homo sapiens
cctgtgtgctttaggatataaaaatccacagttgatgtctcattctgagtgctacttagaggcaatctagtctaggtaattctgaacatagaattttagaataacagtgaccttacagatcatcctatctaactcttaaatgatgctggattaaatcttcacattttatataatgaagaaattcaattatttcacaataatattgtaattcttcttttgaaagtgtaaagacagggcgccatttttcccaggctggtctcgaactcctgtgctcaagccatccacctgcctagcctccctaagtgtttggactacaggcgtgagtcatggtgccgtcgacgcggccgcgaatttagtagtagta

SEQ ID NO: 410838 - DNA, 955 bp, Homo sapiens
tttttcttttaaggcaggagagacaaagaatgagctttaaagtgcatgtttacagaaatgatcaagggtttgacggtgtggtaaaagcacaggccactaacccagactccatcaggggaatggagaggccctgtactccgctctttgatgccacctgacctggaccagccctccacgctgcatgcttttaaaagcgaggcgagttgtgcatttccacttgtgcctgttctccccaccaggtccaagcctttcaattacctcctttaaaactcccttagagtccccaaggagtgcagcctccctctgctcccgacactctgtctacacccagaagcctcagggccttcaaagacctactcagtgtctgcactgtgctaaaccctggagacaacgaagtggattctctcccatttgtattctcatgacatggtcactttcaccccatgaactccgaggttattctgtgtaaatttttctcaactagactttggctcatttggggtccagggcccagtctcctgcacgggtaatagctaggggtaatcaagtcttcgctacagaaatgtaggacagcggcgttgtgacgatattcccaccacgctccgcgccgctctccagccccaagacccctcgtttccttcagggaccgccctttggtgcttccgcgacgctggaaaccggcagagattcctaccaccgtattgcctgcagcctccagtcctttttcgggtttcttgtaccctgaggccctggtgggtctgcctatcctccttcagggctcgtcccttcaaaaaaaatctgcacgcctctccccaccatcggatgacaactccagttgccatcggtgcatcctgtgtttacggaaagtggcccaagaaagccctcaaaagtataccttaaaggccatcttagggcagtgaagcagccagttttttctttgggggagggcggccgc

SEQ ID NO: 410839 - DNA, 1004 bp, Homo sapiens
tttttcttttaaggcaggagagacaaagaatgagctttaaagtgcatgtttacagaaatgatcaagggtttgacggtgtggtaaaagcacaggccactaacccagactccatcaggggaatggagaggccctgtactccgctctttgatgccacctgacctggaccagccctccacgctgcatgcttttaaaagcgaggcgagttgtgcatttccacttgtgcctgttctccccaccaggtccaagcctttcaattacctcctttaaaactcccttagagtccccaaggagtgcagcctccctctgctcccgacactctgtctacacccagaagcctcagggccttcaaagacctactcagtgtctgcactgtgctaaaccctggagacaacgaagtggattctctcccatttgtattctcatgacatggtcactttcaccccatgaactccgaggttattctgtgtaaatttttctcaactagactttggctcatttggggtccagggcccagtctcctgcacgggtaatagctaggggtaatcaagtcttcgctacagaaatgtaggacagcggcgttgtgacgatattcccaccacgctccgcgccgctctccagccccaagacccctcgtttccttcagggaccgccctttggtgcttccgcgacgctggaaaccggcagagattcctaccaccgtattgcctgcagcctccagtcctttttcgggtttcttgtaccctgaggccctggtgggtctgcctatcctccttcagggctcgtcccttcaaaaaaaatctgcacgcctctccccaccatcggatgacaactccagttgccatcggtgcatcctgtgtttacggaaagtggcccaagaaagccctcaaaagtataccttaaaggccatcttagggcagtgaagacacaccctttctggcaccagcccgcccagccggcttcgcacttagaagcagccagttttttctttgggggagggcggccgc

SEQ ID NO: 410840 - DNA, 309 bp, Homo sapiens
cttcgaaagcgtcgacatctgtgaatttataatgggcatgaacttaccaaccactggaatgattaggtcagctggccggaacactacttttaaaagtgaagtccattaataatcaaaagattactggctgaaagtgaagtgaaggcaaaaggagttggatggtctgagaggaccttttaccccatcgatagtagtttttacatagcagtaatactaaagcttaatctttggtgggttgttgttctctctggagagatacttggcctgccacaaaaggaggagctgcttctctgtccagtgctggccaga

SEQ ID NO: 410841 - DNA, 680 bp, Homo sapiens
ggccaaagtattgatgcacctactgtgaatctccacatcgagtgataaaaagcctattctaaaaggttatatgttgtataattccattgatgtaatatttatgaaatgacaaaattctagaactggattagtggcttccagtggctaaagagcagaagagagtaggacggacatggatgtggctaatgaaagagtgacatgtgggatccttgtggtggtggaaatactctatcttggctgtatcgatgtcaataatctgtatgtggtattgcactagctgttcaaagtgtcattgttgtgggaaacttggtcaagggtgaatgggatctctgtagtatttcttacaactgcttgtgaatctgtaattatctcttaataaaaagttaaatatgaatggactgacttctattagaagacaagattggaaagtgccttaaaatacaggtgataacaagtaactcttcaattgttaaaggggaagatgaaagtgaagagatgggcaaaaagataccatacaaacaaaaaacagaatggcagtgttgatatcagatcagttgagactaacagttgaaagcagtaaacatattacggacatattattgataaaagacatttatgaagaggataaactgtgaaggtgtacagacactaaaccatagttgctaaacacatacaaccaa

SEQ ID NO: 410842 - DNA, 448 bp, Homo sapiens
gctcccggccttttttttttttttttttttattgctgggtgtaggaaggtgtacatgttaacttttgggggtactaccaaattgtcctctgaaaagatgttggtccagtttatgctgatgtcagcaatatatgagaatgaacgtttattttctcacctcctccagctgggagacagagcaagaccctgtctcaaaaacatttaaaaataagtaaataaaatttttaaaaaagaatgtctatctggaatttatgattaaatgttagctctaaatttatggttttccaattggagtaccagtataccacaacactaaatggccatcttttcctcactgatttaaaatgctttagttatcatatatgtaatttttcatgtaactattgtctgggctgtctgttgatgtgtttgtctattcatttcttttattatattctattaccttattg

SEQ ID NO: 410843 - DNA, 1535 bp, Homo sapiens
aagaatgtcacaaagtttacagtcgcacatcaaaccgtgaaagacaggagaattcatactggagagaaaccataaaaatgtaagagtttgtgacaaggcttttgggcatgattcgcacctggcacaacatgctagaattcacactggagagaaaccttaccagtgtaatgagtgtggcaaagcctttagtaggcagtcaacacttgtttaccgtcaggcaatccatggtgtagggaaactttactaaggtaatgattgtcacaaagtcttcagtaatgctacaaccattgtgaatcactggagaatccataaggaagagagatcatactagggtaataaatgtggcagatttttcagacattgttcataccttgcagttcatcggtgaactcaacgctggagagaaaccttacaaatgtcatgactgtggcaaggtcttcagtcaagcttcatcctatgcaaaacataggagaattcatacaggagagaaacctcacatgtgtgatgatagtggcaaagccttcacttcacacctcatgagacatcagagaatgcatactggacagaaatcttacaaatgtcatcaatgtgccaaggtcttcagtctgagttcactccttgcagaatatgagagcattgacttgagtttgtattgacttaacattgagttcaagcattaattgacattagtgtttatgttaagaggattgggccaggcacatcagcttacacctgtaatctgagcgctttgggaggccaaggtgggtagatcacttgaggtcaggagtttgagatcagcctggccaacagacgtgagccattttcccagcctgttttttgtttctttaaaaaaactgatagggatttttatggatatcatgttgaatctaaatcacattgggttattatataatcatttcacaatattaatttttccaagctatcaatatgggttgtagctcaatgtttttaatcattttgatcaatgtttgtagatttcaaggtacaaacttctgacctttgtacgtttatttctaagtatttctttaagttctccagcaaatggaagtgttttaaaattttcttttaaaattgtttattgttaaagtatggaaattcaactaatttttggtgctgatactgtattgtgcaaatccactgactatgttacttagttccagtagtattttggttggctctttgtgattttctacacagaagattatgtcatctacaaacaaatataattttacttcttaaaaaacaacaaagaacagtcagcagacacagaaaaaagagaacaagacaggaagcgaagagacacagcaaagcaacagagcaaacgcgagacaaacaaaagaaaaggggaggtgggcgcgccccccgaccgcagaaaatacaataacacacggcgggggggcgcaagacaaagagaaagcagcgcacgcgcgccaacaaggcaagaaggagggtggtcaaccaaaagcagcgggccgccgcccaacacagggggggagacgtcaagcacagaaacg

SEQ ID NO: 410844 - DNA, 755 bp, Homo sapiens
aatctaaatcatatgtgaaatgattatataataacccaatgtgatttagattcaacatgatatccataaaaatccctatcaggatttttatggatatcatgttgaatctaaatcacattgggttattatataatcatttcacaatattaatttttccaagctatcaatatgggttgtagctcaatgtttttaatcattttgatcaatgtttgtagatttcaaggtacaaacttctgacctttgtacgtttatttctaagtatttctttaagttctccagcaaatggaagtgttttaaaattttcttttaaaattgtttattgttaaagtatggaaattcaactaatttttggtgctgatactgtattgtgcaaatccactgactatgttacttagttccagtagtattttggttggctctttgtgattttctacacagaagattatgtcatctacaaacaaatataattttacttcttaaaaaacaacaaagaacagtcagcagacacagaaaaaagagaacaagacaggaagcgaagagacacagcaaagcaacagagcaaacgcgagacaaacaaaagaaaaggggaggtgggcgcgccccccgaccgcagaaaatacaataacacacggcgggggggcgcaagacaaagagaaagcagcgcacgcgcgccaacaaggcaagaaggagggtggtcaaccaaaagcagcgggccgccgcccaacacagggggggagacgtcaagcacagaaacg

SEQ ID NO: 410845 - DNA, 191 bp, Homo sapiens
cttcagtctgagttcactccttgcagaatatgagagaattcattttggaggtagttggtccatatgcaatgagtagagcaaaccatcaagcattaattgacattagggtcaattcagcattgacttgagtttgtattgacttaacattgagttcaagcattaattgacattagtgtttatgttaagaggat

SEQ ID NO: 410846 - DNA, 470 bp, Homo sapiens
gaagtattggcatgaataatcaaaaaacaaaaaacatgctttgtaataccttaaattatccacatgtatcatctggataatcatttaacccttttccatactgcccagctttattccaggaaccacctccagctattaaaaaaggtttcagaaattcagagttatttttattcaggcaaagaagtaccaagtattgtgactagttagataaggggtggggggaagacagtagatggtggatcattaggcatattataagaataaaactagttttatagtgcctcatttttacttacccattcacatattttgcttacatttcgtagcatcatttaataatttacaaagaaagttgtattacattgtttagattttgtacatacaggttagctaggtttttagtaaagtgaccttgtgaatgttttagaagggcaagggaaattatgacccctggttaggaaaaaaaaaaa

SEQ ID NO: 410847 - DNA, 2004 bp, Homo sapiens
aacttacggctaggtacgaggctcccgtgttaaacaggaagtcaccacgggtgactggatgtgatgcacaggccttcggaaaggaaatgcagctgagatccagaggacgtggaaggctccccctcactaaagctagagcaccagtttctcaggaggatgccttgaatctcatgaacgagaatatagacattctggagacagcgatcaagcaggcagctgagcagggtgctcgaatcattgtgactccagaagatgcactttatggatggaaatttaccagggaaactgttttcccttatctggaggatatcccagaccctcaggtgaactggattccgtgtcaagacccccacagatttggtcacacaccagtacaagcaagactcagctgcctggccaaggacaactctatctatgtcttggcaaatttgggggacaaaaagccatgtaattcccgtgactccacatgtcctcctaatggctactttcaatacaataccaatgtggtgtataatacagaaggaaaactcgtggcacgttaccataagtaccacctgtactctgagcctcagtttaatgtccctgaaaagccggagttggtgactttcaacaccgcatttggaaggtttggcattttcacgtgctttgatatattcttctatgatcctggtgttaccctggtgaaagatttccatgtggacaccatactgtttcccacagcttggatgaacgttttgccccttttgacagctattgaattccattcagcttgggcaatgggaatgggagttaatcttcttgtggccaacacacatcatgtcagcctaaatatgacaggaagtggtatttatgcaccaaatggtcccaaagtgtatcattatgacatgaagacagagttgggaaaacttctcctttcagaggtggattcacatcccctatcctcgcttgcctacccaacagctgttaattggaatgcctacgccaccaccatcaaaccatttccagtacagaaaaacactttcaggggatttatttccagggatgggttcaacttcacagaactttttgaaaatgcaggaaaccttacagtctgtcaaaaggagctttgctgtcatttaagctacagaatgttacaaaaagaagagaatgaagtatacgttctaggagcttttacaggattacatggccgaaggagaagagagtactggcaggtctgcacaatgctgaagtgcaaaactactaatttgacaacttgtggacggccagtagaaactgcttctacaagatttgaaatgttctccctcagtggcacatttggaacagagtatgtttttcctgaagtgctacttaccgaaattcatctgtcacctggaaaatttgaggtgctgaaagatgggcgtttggtaaacaagaatggatcatctgggcctatactaacagtgtcactctttgggaggtggtacacaaaggactcactttacagctcatgtgggaccagcaattcagcaataacttacctgctaatattcatattattaatgatcatagctttgcaaaatattgtaatgttatagggcgtctctttatcactcagcttctgcatcatatgcttggctgaatgtgtttatcggcttcccaagtttactaagaaactttgaagggctatttcagtagtatagaccagtgagtcctaaatattttttctcatcaataattattttttaagtattatgataatgttgtccatttttttggctactctgaaatgttgcagtgtggaacaatggaaagagcctgggtgtttgggtcagataaatgaagatcaaactccagctccagcctcatttgcttgagactttgtgtgtatgggggacttgtatgtatgggagtgaggagtttcagggccattgcaaacatagctgtgcccttgaagagaatagtaatgatgggaatttagaggtttatgactgaattccctttgacattaaagactatttgaattca

SEQ ID NO: 410848 - DNA, 2147 bp, Homo sapiens
tgtgggggtcactgctggcattagtaagagtttgggtgatagagatacaagttggagtgctctgaaagggaatgggagaggaggaactggcaacagcaagagggactgatcttttgaggagttttgctttaagagagagatgaggattaaagcaatatttggaagggcatgtttggaaaggtcaaaagaggttttaattttattttttaaagatgggaggtactagaggatatttcattgctgatgggatgtttcagtagagaggagacccttgatgaggcaggagaccgaataatgaatttctggagcaatagataccgtgtgggaagcattcatcaagtgtataatcatctgtggcttttaaagtatgatatttttaggcatagtttttgtattaacttaagttccacttaagtggttacagttgctatcgtttccatataaagtgactaaaatatttttttaaaattgaaatttcttaattataatttggtttagatttggtcacacaccagtacaagcaagactcagctgcctggccaaggacaactctatctatgtcttggcaaatttgggggacaaaaagccatgtaattcccgtgactccacatgtcctcctaatggctactttcaatacaataccaatgtggtgtataatacagaaggaaaactcgtggcacgttaccataagtaccacctgtactctgagcctcagtttaatgtccctgaaaagccggagttggtgactttcaacaccgcatttggaaggtttggcattttcacgtgctttgatatattcttctatgatcctggtgttaccctggtgaaagatttccatgtggacaccatactgtttcccacagcttggatgaacgttttgccccttttgacagctattgaattccattcagcttgggcaatgggaatgggagttaatcttcttgtggccaacacacatcatgtcagcctaaatatgacaggaagtggtatttatgcaccaaatggtcccaaagtgtatcattatgacatgaagacagagttgggaaaacttctcctttcagaggtggattcacatcccctatcctcgcttgcctacccaacagctgttaattggaatgcctacgccaccaccatcaaaccatttccagtacagaaaaacactttcaggggatttatttccagggatgggttcaacttcacagaactttttgaaaatgcaggaaaccttacagtctgtcaaaaggagctttgctgtcatttaagctacagaatgttacaaaaagaagagaatgaagtatacgttctaggagcttttacaggattacatggccgaaggagaagagagtactggcaggtctgcacaatgctgaagtgcaaaactactaatttgacaacttgtggacggccagtagaaactgcttctacaagatttgaaatgttctccctcagtggcacatttggaacagagtatgtttttcctgaagtgctacttaccgaaattcatctgtcacctggaaaatttgaggtgctgaaagatgggcgtttggtaaacaagaatggatcatctgggcctatactaacagtgtcactctttgggaggtggtacacaaaggactcactttacagctcatgtgggaccagcaattcagcaataacttacctgctaatattcatattattaatgatcatagctttgcaaaatattgtaatgttatagggcgtctctttatcactcagcttctgcatcatatgcttggctgaatgtgtttatcggcttcccaagtttactaagaaactttgaagggctatttcagtagtatagaccagtgagtcctaaatattttttctcatcaataattattttttaagtattatgataatgttgtccatttttttggctactctgaaatgttgcagtgtggaacaatggaaagagcctgggtgtttgggtcagataaatgaagatcaaactccagctccagcctcatttgcttgagactttgtgtgtatgggggacttgtatgtatgggagtgaggagtttcagggccattgcaaacatagctgtgcccttgaagagaatagtaatgatgggaatttagaggtttatgactgaattccctttgacattaaagactatttgaattca

SEQ ID NO: 410849 - DNA, 1973 bp, Homo sapiens
tttttttttttaggcagagtctggctctgtcatcccggctggagtgcaatggcacgatctcagctcactgcaacctctgactcccaggttcaacccattctcctgcctcagctactcgcttgaactcaggaggtggagattgcagtgagccgaaatcatgccactgcactccagcctgggtgatagagcgaggctccgtctcagaaaaataaaattaaattaaatttaaaaaaagcttacggactttggggtttatgggggggtatttggcttttaactgagagagagggaaagagagagaagggagagagaggagatgagagatgctatggacgtatgttacatattcctccacattttccttagaaatttacttccaattgccagatttatccgcttcctaggagattccctgcagttgaccatagccaaatctgttaccaacttagagggtttttatgagtcatttcttcaacaaataaggttttactggttttctcctatccatttgttgtagtaccacctgtactctgagcctcagtttaatgtccctgaaaagccggagttggtgactttcaacaccgcatttggaaggtttggcattttcacgtgctttgatatattcttctatgatcctggtgttaccctggtgaaagatttccatgtggacaccatactgtttcccacagcttggatgaacgttttgccccttttgacagctattgaattccattcagcttgggcaatgggaatgggagttaatcttcttgtggccaacacacatcatgtcagcctaaatatgacaggaagtggtatttatgcaccaaatggtcccaaagtgtatcattatgacatgaagacagagttgggaaaacttctcctttcagaggtggattcacatcccctatcctcgcttgcctacccaacagctgttaattggaatgcctacgccaccaccatcaaaccatttccagtacagaaaaacactttcaggggatttatttccagggatgggttcaacttcacagaactttttgaaaatgcaggaaaccttacagtctgtcaaaaggagctttgctgtcatttaagctacagaatgttacaaaaagaagagaatgaagtatacgttctaggagcttttacaggattacatggccgaaggagaagagagtactggcaggtctgcacaatgctgaagtgcaaaactactaatttgacaacttgtggacggccagtagaaactgcttctacaagatttgaaatgttctccctcagtggcacatttggaacagagtatgtttttcctgaagtgctacttaccgaaattcatctgtcacctggaaaatttgaggtgctgaaagatgggcgtttggtaaacaagaatggatcatctgggcctatactaacagtgtcactctttgggaggtggtacacaaaggactcactttacagctcatgtgggaccagcaattcagcaataacttacctgctaatattcatattattaatgatcatagctttgcaaaatattgtaatgttatagggcgtctctttatcactcagcttctgcatcatatgcttggctgaatgtgtttatcggcttcccaagtttactaagaaactttgaagggctatttcagtagtatagaccagtgagtcctaaatattttttctcatcaataattattttttaagtattatgataatgttgtccatttttttggctactctgaaatgttgcagtgtggaacaatggaaagagcctgggtgtttgggtcagataaatgaagatcaaactccagctccagcctcatttgcttgagactttgtgtgtatgggggacttgtatgtatgggagtgaggagtttcagggccattgcaaacatagctgtgcccttgaagagaatagtaatgatgggaatttagaggtttatgactgaattccctttgacattaaagactatttgaattca

SEQ ID NO: 410850 - DNA, 1349 bp, Homo sapiens
tttttttttttaggcagagtctggctctgtcatcccggctggagtgcaatggcacgatctcagctcactgcaacctctgactcccaggttcaacccattctcctgcctcagctactcgcttgaactcaggaggtggagattgcagtgagccgaaatcatgccactgcactccagcctgggtgatagagcgaggctccgtctcagaaaaataaaattaaattaaatttaaaaaaagcttacggactttggggtttatgggggggtatttggcttttaactgagagagagggaaagagagagaagggagagagaggagatgagagatgctatggacgtatgttacatattcctccacattttccttagaaatttacttccaattgccagatttatccgcttcctaggagattccctgcagttgaccatagccaaatctgttaccaacttagagggtttttatgagtcatttcttcaacaaataaggttttactggttttctcctatccatttgttgtagtaccacctgtactctgagcctcagtttaatgtccctgaaaagccggagttggtgactttcaacaccgcatttggaaggtttggcattttcacgtgctttgatatattcttctatgatcctggtgttaccctggtgaaagatttccatgtggacaccatactgtttcccacagcttggatgaacgttttgccccttttgacagctattgaattccattcagcttgggcaatgggaatgggagttaatcttcttgtggccaacacacatcatgtcagcctaaatatgacaggtaattcatgaccaggttaggtttcatcttatatttttaagtgcagagaaatgaatgcctcagttatgacttgtattaattttttgcttattggaaattcttactgtgtttgtcatagtttcacaatagaaaaaaaaagctagcacttgattataagctatggttatactaagacctttatgtgtattattcatttaattattacaataattatatgagatagatagtgtcatcccaattttgcagatgagaaaattgacatacagagagtgcaagtaatttgccaaatgctacccagctactactttcctcagtggccatggaagcctctatatcttgccctttgtctcctcctatggctgcatggcatatcctcgtgacatggctgctgtcttcctctagagcaattaatgagaggggacaagagagaaaaggaaagaagccacattgctatttatgactagttacccaccatcacttctgccatgttctattcattggaagtgagtcactaagtccagcccctcttcaaggggaaaggaa

SEQ ID NO: 410851 - DNA, 341 bp, Homo sapiens
aaacattctcccctctgtaaatactacatgaatgttatttttgctttcagaaatcactaaaccttggccatggtcacttcctcttttccaatctctgtggcagtttttgccctaataaccctgcaggttggtactcaggacagttttatagctgcagtgtatgaacatgctgtcattttgccaaataaaacagaaacaccagtttctcaggaggatgccttgaatctcatgaacgagaatatagacattctggagacagcgatcaagcaggcagctgagcaggtattctcttatttctgttaatcataatgtacacgaggggcatgggagctggtggaaga

SEQ ID NO: 410852 - DNA, 2014 bp, Homo sapiens
agaaatcactaaaccttggccatggtcacttcctcttttccaatctctgtggcagtttttgccctaataaccctgcaggttggtactcaggacagttttatagctgcagtgtatgaacatgctgtcattttgccaaataaaacagaaacaccagtttctcaggaggatgccttgaatctcatgaacgagaatatagacattctggagacagcgatcaagcaggcagctgagcagggtgctcgaatcattgtgactccagaagatgcactttatggatggaaatttaccagggaaactgttttcccttatctggaggatatcccagaccctcaggtgaactggattccgtgtcaagacccccacagatttggtcacacaccagtacaagcaagactcagctgcctggccaaggacaactctatctatgtcttggcaaatttgggggacaaaaagccatgtaattcccgtgactccacatgtcctcctaatggctactttcaatacaataccaatgtggtgtataatacagaaggaaaactcgtggcacgttaccataagtaccacctgtactctgagcctcagtttaatgtccctgaaaagccggagttggtgactttcaacaccgcatttggaaggtttggcattttcacgtgctttgatatattcttctatgatcctggtgttaccctggtgaaagatttccatgtggacaccatactgtttcccacagcttggatgaacgttttgccccttttgacagctattgaattccattcagcttgggcaatgggaatgggagttaatcttcttgtggccaacacacatcatgtcagcctaaatatgacaggaagtggtatttatgcaccaaatggtcccaaagtgtatcattatgacatgaagacagagttgggaaaacttctcctttcagaggtggattcacatcccctatcctcgcttgcctacccaacagctgttaattggaatgcctacgccaccaccatcaaaccatttccagtacagaaaaacactttcaggggatttatttccagggatgggttcaacttcacagaactttttgaaaatgcaggaaaccttacagtctgtcaaaaggagctttgctgtcatttaagctacagaatgttacaaaaagaagagaatgaagtatacgttctaggagcttttacaggattacatggccgaaggagaagagagtactggcaggtctgcacaatgctgaagtgcaaaactactaatttgacaacttgtggacggccagtagaaactgcttctacaagatttgaaatgttctccctcagtggcacatttggaacagagtatgtttttcctgaagtgctacttaccgaaattcatctgtcacctggaaaatttgaggtgctgaaagatgggcgtttggtaaacaagaatggatcatctgggcctatactaacagtgtcactctttgggaggtggtacacaaaggactcactttacagctcatgtgggaccagcaattcagcaataacttacctgctaatattcatattattaatgatcatagctttgcaaaatattgtaatgttatagggcgtctctttatcactcagcttctgcatcatatgcttggctgaatgtgtttatcggcttcccaagtttactaagaaactttgaagggctatttcagtagtatagaccagtgagtcctaaatattttttctcatcaataattattttttaagtattatgataatgttgtccatttttttggctactctgaaatgttgcagtgtggaacaatggaaagagcctgggtgtttgggtcagataaatgaagatcaaactccagctccagcctcatttgcttgagactttgtgtgtatgggggacttgtatgtatgggagtgaggagtttcagggccattgcaaacatagctgtgcccttgaagagaatagtaatgatgggaatttagaggtttatgactgaattccctttgacattaaagactatttgaattca

SEQ ID NO: 410853 - DNA, 1390 bp, Homo sapiens
agaaatcactaaaccttggccatggtcacttcctcttttccaatctctgtggcagtttttgccctaataaccctgcaggttggtactcaggacagttttatagctgcagtgtatgaacatgctgtcattttgccaaataaaacagaaacaccagtttctcaggaggatgccttgaatctcatgaacgagaatatagacattctggagacagcgatcaagcaggcagctgagcagggtgctcgaatcattgtgactccagaagatgcactttatggatggaaatttaccagggaaactgttttcccttatctggaggatatcccagaccctcaggtgaactggattccgtgtcaagacccccacagatttggtcacacaccagtacaagcaagactcagctgcctggccaaggacaactctatctatgtcttggcaaatttgggggacaaaaagccatgtaattcccgtgactccacatgtcctcctaatggctactttcaatacaataccaatgtggtgtataatacagaaggaaaactcgtggcacgttaccataagtaccacctgtactctgagcctcagtttaatgtccctgaaaagccggagttggtgactttcaacaccgcatttggaaggtttggcattttcacgtgctttgatatattcttctatgatcctggtgttaccctggtgaaagatttccatgtggacaccatactgtttcccacagcttggatgaacgttttgccccttttgacagctattgaattccattcagcttgggcaatgggaatgggagttaatcttcttgtggccaacacacatcatgtcagcctaaatatgacaggtaattcatgaccaggttaggtttcatcttatatttttaagtgcagagaaatgaatgcctcagttatgacttgtattaattttttgcttattggaaattcttactgtgtttgtcatagtttcacaatagaaaaaaaaagctagcacttgattataagctatggttatactaagacctttatgtgtattattcatttaattattacaataattatatgagatagatagtgtcatcccaattttgcagatgagaaaattgacatacagagagtgcaagtaatttgccaaatgctacccagctactactttcctcagtggccatggaagcctctatatcttgccctttgtctcctcctatggctgcatggcatatcctcgtgacatggctgctgtcttcctctagagcaattaatgagaggggacaagagagaaaaggaaagaagccacattgctatttatgactagttacccaccatcacttctgccatgttctattcattggaagtgagtcactaagtccagcccctcttcaaggggaaaggaa

SEQ ID NO: 410854 - DNA, 434 bp, Homo sapiens
aaagtaattaaatttttatttaggctcatgacaagcattgtttttataaaacccagaagaaaatgtagttgttctagaaaattatatggtttgtagaaaaaagggaaactagagactgacttttacctaggcactgttttcatagttcattttagtttaggaaaattatgattattggggatagaaaagagattcatatgtgctaggagttatataaggttatatttataagaatttttcaaacactttttggtaatattgatattgatataaatataaccttacaatattatgtactttttctataatctcatccttttttcataaattttatcattttttctcattgcttttgtgatttgtttggattatatttatttgcaattatttataacgttttaaggctttttcatgcatgtatatcatatcaccaa

SEQ ID NO: 410855 - DNA, 2540 bp, Homo sapiens
tcggcagatgccgcctggtccagctatcgtgctcggtattcagttttccggagcagcgctctttctctggcccgcggagcggtcccgcggccgagtaccggattcccgagtttgggaggctctgctttcctccttaggacccactttgccgtcctggggtggctgcagttatgtccgcgctgcgacctctcctgcttctgctgctgcctctgtgtcccggtcctggtcccggacccgggagcgaggcaaaggtcacccggagttgtgcagagacccggcaggtgctgggggcccggggatatagcttaaacctaatccctcccgccctgatctcaggtgagcacctccgggtctgtccccaggagtacacctgctgttccagtgagacagagcagaggctgatcagggagactgaggccaccttccgaggcctggtggaggacagcggctcctttctggttcacacactggctgccaggcacagaaaatttgatgagttttttctggagatgctctcagtagcccagcactctctgacccagctcttctcccactcctacggccgcctgtatgcccagcacgccctcatattcaatggcctgttctctcggctgcgagacttctatggggaatctggtgaggggttggatgacaccctggcggatttctgggcacagctcctggagagagtgttcccgctgctgcacccacagtacagcttcccccctgactacctgctctgcctctcacgcttggcctcatctaccgatggctctctgcagccctttggggactcaccccgccgcctccgcctgcagataacccggaccctggtggctgcccgagcctttgtgcagggcctggagactggaagaaatgtggtcagcgaagcgcttaaggtgccggtgtctgaaggctgcagccaggctctgatgcgtctcatcggctgtcccctgtgccggggggtcccctcacttatgccctgccagggcttctgcctcaacgtggttcgtggctgtctcagcagcaggggactggagcctgactggggcaactatctggatggtctcctgatcctggctgataagctccagggccccttttcctttgagctgacggccgagtccattggggtgaagatctcggagggtttgatgtacctgcaggaaaacagtgcgaaggtgtccgcccaggtgtttcaggagtgcggcccccccgacccggtgcctgcccgcaaccgtcgagccccgccgccccgggaagaggcgggccggctgtggtcgatggtgaccgaggaggagcggcccacgacggccgcaggcaccaacctgcaccggctggtgtgggagctccgcgagcgtctggcccggatgcggggcttctgggcccggctgtccctgacggtgtgcggagactctcgcatggcagcggacgcctcgctggaggcggcgccctgctggaccggagccgggcggggccggtacttgccgccagtggtcgggggctccccggccgagcaggtcaacaaccccgagctcaaggtggacgcctcgggccccgatgtcccgacacggcggcgtcggctacagctccgggcggccacggccagaatgaaaacggccgcactgggacacgacctggacgggcaggacgcggatgaggatgccagcggctctggagggggacagcagtatgcagatgactggatggctggggctgtggctccccccagcccggcctcctcggcctccataccctcctagaagggatggttctgggggcaaaggaggaggtggcagtgcccgctacaaccagggccggagcaggagtgggggggcatctattggttttcacacccaaaccatcctcattctctccctctcagccctggccctgcttggacctcgataacgggggaggggtgccctagcatcagaagggttcatggccctttcccctcctcccccctcagctgggcctggggaggagtcgaagggggctgcagagagggtagagaagggactttgcaggtgaatggctggggccccaaatccaggagattttcatcagaggtgggtgggtgttcacaatatttattttttcatttggtaatgggaggggggcctgggggtatttatttaggagggagtgtggtttccttagaaggtatagtctctagccctctaaggctggggctggtgatcagccccaacagagaaaatgaggagtttagagttgcagctggggaaggggtttgaaggaagttggaagtggggaggggtgggggcatctggtctcagaaatggaccagctggatgcagggcaggggactgagggtgcttgagtaggatgtgagacttcatgggcctgggttctgttgagttttttcagtatcaatttcttaaaccaaattttaaaaaaaacaaggtgggggggtgctcatctcgtgacctctgccacccacatccttcacaaactccatgtttcagtgtttgagtccatgtttattctgcaaataaatggtaatgtattggacccca

SEQ ID NO: 410856 - DNA, 1450 bp, Homo sapiens
tcggcagatgccgcctggtccagctatcgtgctcggtattcagttttccggagcagcgctctttctctggcccgcggagcggtcccgcggccgagtaccggattcccgagtttgggaggctctgctttcctccttaggacccactttgccgtcctggggtggctgcagttatgtccgcgctgcgacctctcctgcttctgctgctgcctctgtgtcccggtcctggtcccggacccgggagcgaggcaaaggtcacccggagttgtgcagagacccggcaggtgctgggggcccggggatatagcttaaacctaatccctcccgccctgatctcaggtgagcacctccgggtctgtccccaggagtacacctgctgttccagtgagacagagcagaggctgatcagggagactgaggccaccttccgaggcctggtggaggacagcggctcctttctggttcacacactggctgccaggcacagaaaatttgatgagttttttctggagatgctctcagtagcccagcactctctgacccagctcttctcccactcctacggccgcctgtatgcccagcacgccctcatattcaatggcctgttctctcggctgcgagacttctatggggaatctggtgaggggttggatgacaccctggcggatttctgggcacagctcctggagagagtgttcccgctgctgcacccacagtacagcttcccccctgactacctgctctgcctctcacgcttggcctcatctaccgatggctctctgcagccctttggggactcaccccgccgcctccgcctgcagataacccggaccctggtggctgcccgagcctttgtgcagggcctggagactggaagaaatgtggtcagcgaagcgcttaaggtgccggtgtctgaaggctgcagccaggctctgatgcgtctcatcggctgtcccctgtgccggggggtcccctcacttatgccctgccagggcttctgcctcaacgtggttcgtggctgtctcagcagcaggggactggagcctgactggggcaactatctgggtgaggggattcaagaaagcctggagccaggcatggtggctcacacctgtaatcacagcactttgagaggctgaggcaggaggatcacttgaggccaggagttggagcccagctggggcaacatagctagacgtcatctcaagaaagaaagagagagagagaaagaaagagagagagagagacagagaaagaaagaaggaaagaaggaaggaaagaaagaaaaagaaagaaagaaagaaagaaaagaaagaaatcagccaggcatggtagcgcccgcgcctgtagtcccagttactcctgaggctgaggcaggaggatcacttgaggccaggagttggaggccagcctgggcaacgtagctagaccgcatctctaccaaaaaaaaaaa

SEQ ID NO: 410857 - DNA, 2217 bp, Homo sapiens
tcggcagatgccgcctggtccagctatcgtgctcggtattcagttttccggagcagcgctctttctctggcccgcggagcggtcccgcggccgagtaccggattcccgagtttgggaggctctgctttcctccttaggacccactttgccgtcctggggtggctgcagttatgtccgcgctgcgacctctcctgcttctgctgctgcctctgtgtcccggtcctggtcccggacccgggagcgaggcaaaggtcacccggagttgtgcagagacccggcaggtgctgggggcccggggatatagcttaaacctaatccctcccgccctgatctcaggtgagcacctccgggtctgtccccaggagtacacctgctgttccagtgagacagagcagaggctgatcagggagactgaggccaccttccgaggcctggtggaggacagcggctcctttctggttcacacactggctgccaggcacagaaaatttgatgataacccggaccctggtggctgcccgagcctttgtgcagggcctggagactggaagaaatgtggtcagcgaagcgcttaaggtgccggtgtctgaaggctgcagccaggctctgatgcgtctcatcggctgtcccctgtgccggggggtcccctcacttatgccctgccagggcttctgcctcaacgtggttcgtggctgtctcagcagcaggggactggagcctgactggggcaactatctggatggtctcctgatcctggctgataagctccagggccccttttcctttgagctgacggccgagtccattggggtgaagatctcggagggtttgatgtacctgcaggaaaacagtgcgaaggtgtccgcccaggtgtttcaggagtgcggcccccccgacccggtgcctgcccgcaaccgtcgagccccgccgccccgggaagaggcgggccggctgtggtcgatggtgaccgaggaggagcggcccacgacggccgcaggcaccaacctgcaccggctggtgtgggagctccgcgagcgtctggcccggatgcggggcttctgggcccggctgtccctgacggtgtgcggagactctcgcatggcagcggacgcctcgctggaggcggcgccctgctggaccggagccgggcggggccggtacttgccgccagtggtcgggggctccccggccgagcaggtcaacaaccccgagctcaaggtggacgcctcgggccccgatgtcccgacacggcggcgtcggctacagctccgggcggccacggccagaatgaaaacggccgcactgggacacgacctggacgggcaggacgcggatgaggatgccagcggctctggagggggacagcagtatgcagatgactggatggctggggctgtggctccccccagcccggcctcctcggcctccataccctcctagaagggatggttctgggggcaaaggaggaggtggcagtgcccgctacaaccagggccggagcaggagtgggggggcatctattggttttcacacccaaaccatcctcattctctccctctcagccctggccctgcttggacctcgataacgggggaggggtgccctagcatcagaagggttcatggccctttcccctcctcccccctcagctgggcctggggaggagtcgaagggggctgcagagagggtagagaagggactttgcaggtgaatggctggggccccaaatccaggagattttcatcagaggtgggtgggtgttcacaatatttattttttcatttggtaatgggaggggggcctgggggtatttatttaggagggagtgtggtttccttagaaggtatagtctctagccctctaaggctggggctggtgatcagccccaacagagaaaatgaggagtttagagttgcagctggggaaggggtttgaaggaagttggaagtggggaggggtgggggcatctggtctcagaaatggaccagctggatgcagggcaggggactgagggtgcttgagtaggatgtgagacttcatgggcctgggttctgttgagttttttcagtatcaatttcttaaaccaaattttaaaaaaaacaaggtgggggggtgctcatctcgtgacctctgccacccacatccttcacaaactccatgtttcagtgtttgagtccatgtttattctgcaaataaatggtaatgtattggacccca

SEQ ID NO: 410858 - DNA, 448 bp, Homo sapiens
aagccaggctgagagcagccacagcgtttgtggaggacacagccccactctctgcccccaggtgccggtgtctgaaggctgcagccaggctctgatgcgtctcatcggctgtcccctgtgccggggggtcccctcacttatgccctgccagggcttctgcctcaacgtggttcgtggctgtctcagcagcaggggactggagcctgactggggcaactatctgggtgaggggattcaagaaagcctggagccaggcatggtggctcacacctgtaatcacagcactttgagaggctgaggcaggaggatcacttgaggccaggagttggagcccagctggggcaacatagctagacgtcatctcaagaaagaaagagagagagagaaagaaagagagagagagagacagagaaagaaagaaggaaagaaggaaggaaagaaagaaaaa

SEQ ID NO: 410859 - DNA, 663 bp, Homo sapiens
tttcatactcttcatctacaaaatgggaatagtatcacttatcctttcaggtttattgtgcaggtgagatacaaaacatctagctcaatgcctaatatagattaagcacacaataattggtagtttcttttaatagtaataaagtacatgtctttgaatatcattcttttttctctgctgcctaccaacaagtccaaaatcttggtatttagtactctctacaccctaacccaaaacattttctaaaatttgtctctagctatgacctgtcacataacatgccctccaccaatgtgggtcacttcattttctacttgtacatctatgattcttctcctccaggcttttgttcaaagtccttttcatctctagttactctgctcatgtttgaaagtcaaattcaagtgccactttctccagaaaactgcttagtaatttctcctttatcttctattttgttagtattaacatttattctgcttttaattgtagccagtttgtgtattgggttttttatatagtggctttctccctagattataaattccttaagagcacagcttgcctctcatttacctttcaaacccctgagagactgaaaatgtgctttgtacccaatgagcatgcaataaatgttccatgaataaacacaagaaaaaaaaa

SEQ ID NO: 410860 - DNA, 280 bp, Homo sapiens
agccactttcatgactttgtctcaaaaaaaaaaaaaaagtctcaatcattaaaacagtgtgatattaagatattaacagacagacccaaggaagaaaatagaaagtcccaaaataaatagagctatgtggagaattttaacttaaggaaaacgtgacatttcaacacaacaggaaaatgatagattattcaacaaatagtgcactgagtaggcatctgaggaaaaaaatgagattcacacttcatatacaaattgcaaatggatgaaatgtaaaaggaat

SEQ ID NO: 410861 - DNA, 914 bp, Homo sapiens
cagtggatacaaaggcatcattggcaccatagttaaaaaagatgaggtggcctaccagcatgaagactgacatggcatagatggtgtcagtgctgacagactctgtcagggtcttagcactggtgaaaagccataagtgaaagtaatgaagactagggcactcttcaggtcagcccaccgggtccacccactcttctgcccttcacctccatcagtgagatcaaacaaaacatacccaatcagtgaagaagccaggccagtcccaaaaagccattggggggccagaagaccctcatccatataccaccagataaccagaaaaacaaaaacactgcacagctgcgggatcaccacactggactcaaataccatagcccaatattggtatttccgagcatggatgtttttccagagctcttccaggaaccgccggtccacaaagttatcaggaaagggctgttgctcatacaagaccctctgccactttacctccttggtgtttgttacaggttgggtacacataatcctttcattcaaactcaggctagtttaatcatccctctcacagaggtccatgtggttcttgttgatgacattttgaaatgagacctccctggaaattccatgccttggttcactgcaacctctgcctcccaggttcacgccattctcctgcctcagcctcccaagtagctgggactacaggcgcctgccaccatgcctggctaatttttttgtatttttagtagagacggggtttcaccgtgttagccaggatggtctcgatctcctgacctcgtgatccacccgccttggcctcccaaagtgctgggattgtaggcgtgagccactgcgcccagaccagaactattttcaatttaaacttcctgaagtcttggtactcatggatttaa

SEQ ID NO: 410862 - DNA, 464 bp, Homo sapiens
cagtggatacaaaggcatcattggcaccatagttaaaaaagatgaggtggcctaccagcatgaagactgacatggcatagatggtgtcagtgctgacagactctgtcagggtcttagcactggtgaaaagccataagtgaaagtaatgaagactagggcactcttcaggtcagcccaccgggtccacccactcttctgcccttcacctccatcagtgagatcaaacaaaacatacccaatcagtgaagaagccaggccagtcccaaaaagccattggggggccagaagaccctcatccatataccaccagataaccagaaaaacaaaaacactgcacagctgcgggatcaccacactggactcaaatactatttcttattgaggtttaacctctatttccctagccctgtccttccactaagcttggtagatgtaataataaagtgaaaatattaacatttgaa

SEQ ID NO: 410863 - DNA, 1372 bp, Homo sapiens
gtcttaattgctgttctagttcagtcaagtattaaaaattcacactttgaaacagaaagtccttgccctctgtatctttccagaccctccttgtctgaaagtcttctctcatcctctgccctatgttgcaggaaagtgaccctgggaatttcccagtctaccttgtcagctgacttctgcatgggttcagccagtgggaggggaagcactggcaagattttggtggccaggaaaaagggaagccccagtgttggccaggcgtggtggctcatgcatgtaatcccagcactttgggagtccaaggcaggtggatcacctgaggtcaggagttcgagaccagcctggctaacatggtgaaaccccatctctactaaaaatacaaaaattagccaggcgtggtggcaggtacctgtaatcccagctactggggaagctgaggcaggagactcgctggaacccaggaggcggaggttgcagtgagctgagatctcaccactgcactccagcctgggtgatggagcaagactccatctccaaaagaaaaaaaaaagagaggccccagttcaggctagctctgtctgtcttgtggggcatctctgatggtgacggcagctcttgtctggctccagttcccaccagacaagcctgctgtgattccagtatctgctggtgtccctagcctctgggctccatgataccgctgtttccttttgttcctccagcctaggggagtggtgatctttagtttgccttgcctttttgtctcatggttggcttctcagcccttccatcacttttattactaactcctgttaaattctctcttgtttaaatacttagaatggtttctgtttttctagtaagaccttggatgatatactctgtaaaaaataaatgaataagagaagaaaaataattagacacaacaaagaaagagaggaaagaaagggagaagaaaaggggcaaaatgataaatataaataagttaaatataaggttgggtgcggtggctcacacctgtaatcccagcactttggatcacgaggtcaggagtttgagaccagcctggccaagatagtgaaaccccatttctactaaaaatacaaaaaaaaaaaaaaaattagctgggcatgttggcgcacatctgtagtcccagctactcaagaggctgaggcaggagaattgcttgaactctggaggcgaaggttgcagtgagccaagaccacaccattggactccactctgggcaacagaggtagactccatctcaaaaacaaaaaaaaagataagtatagaaagaggaacacagagccaggcacagtggctcacacctgtaatcccagcactttgggaggccgaggtgggcaaatca

SEQ ID NO: 410864 - DNA, 542 bp, Homo sapiens
actgggctctgtaaacctgagcctcattcttagaacctcttgagccccttgatgttgcccagtcaagtccatagtgactgtaggggctgaacttcaagggccacttttgcttatagccatcacctgagagcacctccagaatcaaaatggccttgggaagtacttgccccagagagagttttaaaaattattctgtcaatctgactcaattccttgtagatagttcatttccaggcatgtattttcttggagtttgttaaaaacaatggaaaaatcttatcttaaaagtacctcttgggccgggtgcggtggctcacgtctataatcccagcactttggaaggctgaggtgggcaaatcacctgaggtcaggagtgtaagaccagtctgaccaacgtggtgaaaccctgtctctacaaaaatacaaaaattaaccaggcatgatggcaggtgcctgtaatcccagctacttgggaggctgagatgggagaattgtttgaacctgctgcattccagcctgggcaacagagtgggactcaaaaa

SEQ ID NO: 410865 - DNA, 260 bp, Homo sapiens
gcatttcgtggtagtacattatcaaatataaactgggatctacatctattttatgtattcatgacacctttttgttaattttttgatacttctaggctacagggtttgtctgtgagttttttcagattgttgcaaatcttcaaatctttttcaattattgaaaaagaatccacgtataagtggacctacgcagttcaaacccatgtagtccaagggtcaactgtgtattttttttttttttttgagatacagtctcactc

SEQ ID NO: 410866 - DNA, 432 bp, Homo sapiens
tgaaactagttcagtagcccagagtggatctgaaagcaaagtggaacctaaaaaatgtgaactgtcaaagaactctgatatcgaacagtcttcagatagcaaagtcaaaaatctctctgcttcctttccaatggaagaatcttcaatcaactacacatttaaaacaccagaaaagggtaggtactttgttgttaaagttaagcacaatttttctttcttttaatgtttagcttgatgcagactctttgtgggatactaatgttgggatataaacgatgctttgtgaacacccccaaaatatttgagcaattttttttctcccttaataagttcacggtgaggtttcaaagagcaagagaacttagttaaagacatttcagtaactggaagatacttctatcatgctagggcagagcaaagaacttggtacag

SEQ ID NO: 410867 - DNA, 529 bp, Homo sapiens
acaggtagtcctctgggtttatagacagagacctggaccagtggtttaatgcccagctcccacttcttccttgtgtttctgtaggctcatttacctccatatgcctaaggttctttctttgtttcctttggtttctcttctataaagtgagtgtagtgaacatcattccattgggatttttgtaggagcagcaaatggtagaatgcagttaacttaatatacatcttataggacgatggagacaatcttgtagacttaagtgcatcttaagagaaaaagtccttgatcttccaggaagtataaattgttatcctattttggtatttaaataatatatttataatcttttgttctggagttaatgtatgtgttttcagtagagaatattcatcgtttccccagtattttctcgctcacctgacctccaaactgtctgtgtgtcaatatatttatttttctccatagatatgtaattcctcaaagagagaatggcattcaagtgatttggcgcataggaattaaaaaaaaa

SEQ ID NO: 410868 - DNA, 421 bp, Homo sapiens
tcttgggtagtaaattgtcgttagatgaactcactaaaatttggaagatacagtcaggacaatcatctactgtgattgagaacattcatactattattgctgcagcggctgtgaaatttaattcagatcagcttaatcatttgtttgttctcattcagaagagctgggagactgagagtgatagagtaagacagaagcttttgagcctgattggacgaataggccgggaagctcgctttgagaccacttctggaaaggttttagacgtactctgggaactggctcaccttccaaccctgcccagtagccttattcagcaggccttggaggagcacctgacaatccttagtgatgcatatgcagtgaaagaagcaatcaagaggagctacatcatcaagtgcatagaagatattaagagggt

SEQ ID NO: 410869 - DNA, 317 bp, Homo sapiens
cagtcaaaccagttagtctgaaaataaatgtgaaagaggtcaaggagagaacctagagaattccagatattctaggaggttctcagagatcctttgtagtaaacctcccaaaggatttcctcagagaagcttacaccctttagtgggacagtttttgtgtctcctctgtcttcctggactcccctgaaagttattctaaaattagatccacagctttagataccctgaggcctgaattactgaacttggcggggggcctacagcaacaggacttctgcatgctcctactcgacagccctgtgcttagaaaaaaaagt

SEQ ID NO: 410870 - DNA, 396 bp, Homo sapiens
gattgaggatagtgaacatcttcattgtgtttgtaaactcaggaggaatgctcattcaatatgatgttaacagtgggatttttcataagtatctttgttcagaataagaacattcttttcattctagttttctgagagtttgtatcaagaaggttcttaagttttatcaaatgtctttttaaaatctatgtagatgatcatatggtgtttctcttttattctgttaatgtggtgaatacattgagttttggaggtaaaaccaatattatattcctaaaataaacaccatttggtcatgatcatcattcttttccacattgatgatttttgatttacttttcttgtttgtttaggattactacatctatatttatgacatatatttgcttgtatttt

SEQ ID NO: 410871 - DNA, 242 bp, Homo sapiens
aagcttttctcacctccaaatctttttctccattaaaatatattcaaatataattagtgtaacattaacatggaggaaattttgtaattgccagttgttctgtagccatggttacatcaaagatttatagcaagtaactcccggctgggcacgaacaagcagttagcaggagcagcagtaagaaaatgtttgtgtgcacgtgcaggtgtgctgacgtgaatgtttgccaaaaaaaaaaaaaa

SEQ ID NO: 410872 - DNA, 502 bp, Homo sapiens
aatgtgtaactagggttggggagagcgggctggagagagacagcacacaaagacaacagagagaagtcaaataggaaatttcaaaatgagaatcagctgatgtataaaaaagagcaaaataatttttttaccgatagaactgcaagatttagctttccaaaatgattcaattctccagaaaagaaaaattaatttaagcactcatctaagtaactagtataaagtgccaagcaaaaataaacatttattagatatagacaaatgcaaatatattcaatgctttcgtacaaatgtgaatatctgggggccttattatcatcttgttaatatatgccagtgaacaatttgtagacacaagacttgttttacaaactgggtaatatgttccatgaacgtaagccaggaatttaaaacttagtgtctatctcttcattctaagaaatgtttcagctaactcactgtgtgtgtgtgtgtgtgtgtgtgtgtgtgtgtgtgtgtgtgt

SEQ ID NO: 410873 - DNA, 1439 bp, Homo sapiens
gattacaaggcatgtgccaccatgcccggctcattttgtatttttagtagacatgaggtttcaccatgttgaccaggctggtttcgaactgctgacctcaggtgatccatccgcctcagcctcccaaagtgctgggattacaggagagagccaccgcgcccagcagacctgaacattttaacagtcactccccattcttccttcccccacctctgataaccactaatctacctaatatgcctatagatttgcctattttggacttttcaaataaatggaatcatatgtggcattttgtggctggcttccttgagtcaccatgatatttttaagggttatccatgttgtagtatgtgtcagtacttgaattccttttgttggtcttcgagtggctaaggaggggaaactgagcacaagaagagggcactttgagcacagagaaagctggacccgaaatctaccaacaagagcagaacctaaatattgatgaagaggggctgattctaggcacagcaggtggtggaagcctaatagttgtgcaggtgattttataatgttaaaagcacggagtggccacagttggatctgaccgagggaactgaatcttttcctccatgtgagagctgttgtcagcccaacaggggtatacatgtacctgggacagggcagcttcccattctgcaatagtggcatgatacccttttcctgagatgcattcagggttaaagaagatagttcacctacacgttagatttcccgtgaagataaaaagtcccaagttttgaaaagcagaaggaattctaaaaagaactgaaaaacaaaagcccatggggagagtgatgaaatgagtttctgagaaagactgtgaagaggggttcaaagcggccgctgacggactgcccgaacctagggcaatgaaagacctggggcaggaattgatgttgaccgtggcagaggcagtggacctggtgggcagcccagaggaaaaggcctttggcttgctgagagagctcttccagaactgagcaagagcatagtttgttgaagaatggagaggtccacagtccatctcctgtgccaaggattagtatttcatttcaagaagcgatttggtagtcacagagtgaatattattatttttccacaaattcattacctctttcccctcatgagtatcttagcattgaatttcctgactttatgatgaataaactttgttttagtgtttattaatgccctatttactttcccctgggtgaagttttggctagtaataagattttgtgtctctgctgtagtgaggcattgctgtagaaagccaggtctaagaaaaatgaattttgttcctttggggaagcataattaccttaaaaaagtttaaagtgtggttttcaacttagtaaaatcctattataaagaaaaacgtacatagcaaaaat

SEQ ID NO: 410874 - DNA, 388 bp, Homo sapiens
tgctgggattacaggcgtgagccaccgtgcccggcccccattggtgctattgttttatgtgatagagccagcttctcccttttctttggatttttaaacatactcttccttttacttagactattctccatcccaacacctttcctaaacttctttcacaccttagactagctgacactttactgagaaacctttcttttttataggttgctttttctatagactctcttagcatttactcattttattgtgaagtgtctgatcttatttaaatgacaagtataagaggatagaaactatttcatatttttctcacccagcaggcacaatttctgacatgtggtaagcactcagtaaatattgaactttagaggctaggacatttgag

SEQ ID NO: 410875 - DNA, 788 bp, Homo sapiens
ccttgtattttcgttgcccgggtaagtatttcactcaagagatagtttcaagaaagttggagatttcttctttcaaactagcaaagacatttttgcttttgtctcttgaaaatctccctcaaactaaaagaatgaaaatcaggaatgcagactgtatccttataaaccttggagacatctgtaaccctgacccatacaggacctaaagatagaaagcagatgaagtgatggcaaatgcatttgcagagagaagaagtgaagtcaagaataaaatgcctgcagggctcacagggagaggaccggaagcgattgatttgctcacagaatgccaggaaggctcagaaatgagagttccccagttccccagaggcataggtgaagcagaggctttaggatgggagtaggggtgggaaagtctgcaggaggtaaaggggagccccagaaggacttgagaagggaagttccctattgcagctctggcccaaggagaagagcccatctagaatagagctgaaggaggagggctccaggaggagtgtttctgggaggagcaggaatgaaactgattagaaaagaagaaaaaaagaatgggccgtactgggtttgaattctttctctgtcaccaatgaactgtgagtatgaggaaattagttaatgtctttggacttttcatttccttatttattaaataaaacattatatcatatggtattttgttattctgttgggtaaaagacagtacaaaacccagcaagtctacttccagatgtctaccccaaaaaatgaaa

SEQ ID NO: 410876 - DNA, 472 bp, Homo sapiens
tttttattattagtgttgtttggtgctaatacagctatttaaataaatccaatctcagtataaaaaaaggaaaacgtttgacagaatatttatagaatgcctttacattattgttttcaaagtagttaatatcttatttatattttaatttccaaaagaacatgttataatttgaaaagttttctgtaaagtttcttaatgttatagtttaataaataggttatctaaactatctttttcccccatgtagatagatatgtagaaaatgctaaagcatgttatactaaggattttaattttagacttattgtaaaaggagagcatcaggaaaaatagctaatgcatgtggggcgtaatacctaggtgatgggttgataggtgcagcaaaccaccatggcacacgtttacccatgtaacaaacctgcatgtcctgcacatgtatcccggaactcaaaatttaaaaaaagaaaaa

SEQ ID NO: 410877 - DNA, 593 bp, Homo sapiens
ccctagtgggaaggtctattaaattcttaattttaaatatatgactatcaaatagttcactgtcaagaaaggcacataccatataccaatcattttttaaggttaggaacaagcaacacaaaactcatattttaaaaataaaaaatatctccattttatactctactgagaggtacgttatggaaaataaaaggaagtgctaagagacaaatatatggagactgaggaaaaatgggagaaaagggacaaaaattgaaaaattgaccaaaaggtatggtgttatatagttaaaattaacttgaatactttatatttttctttttctcccactttttgagacagggtctcactttgtcgcccaggctggagtacaatggcacaaacacagctcactgcagcatcaatctcctgggctcaagcaacacagcaagaccccacctctccaaaaaaatttagaaaacagctgggtctgggtgtggtgattcacacctgtaatcccagcactttgggaggctgaggcaggaggatcatctgagcttaggagttccagaccagcctgggcaacatagtgagatcctgtctctattaaaaaa

SEQ ID NO: 410878 - DNA, 436 bp, Homo sapiens
ccctagtgggaaggtctattaaattcttaattttaaatatatgactatcaaatagttcactgtcaagaaaggcacataccatataccaatcattttttaaggttaggaacaagcaacacaaaactcatattttaaaaataaaaaatatctccattttatactctactgagaggtacgttatggaaaataaaaggaagtgctaagagacaaatatatggagactgaggaaaaatgggagaaaagggacaaaaattgaaaaattgaccaaaaggtatggtgttatatagttaaaattaacttgaatactttatatttttctttttctcccactttttgagacagggtctcactttgtcgcccaggctggagtacaatggcacaaacacagctcactgcagcatcaatctcctgggctcaagcaatcttcctgcctcag

SEQ ID NO: 410879 - DNA, 883 bp, Homo sapiens
tgaagctacagtagtcaagacagtgtgatattggcataatgacagacatgcagatcaatggaaccgaattaaaggcccagaagtaaagtctcacatagccaactgattttttgacaagagcgccaagaacctttaatgggagaaagaatagtctcttcaaaaaatgatgctgtgtcaattggacatccacatacaaaataatgaaattttatccctaccacatatcatatccaaaagttaactcaaaatgggtcaaagacccaaatgtaagagctgaaactacaaaaatcttggaagaaatataggcgtacatctctgtgaccttgggctaggtgtcttaaatatgatatcaaaagcatatcaacaaacaacaaaaaaaagataaattggacctcatcagaatgaaaagtttttgtgcttcaaagtgaaaagacaacatacagaattggagaaaatattttcaaattgtatatctgataagggacttgtgtctacaatatatgaagaattcaataaaaaagcaaatactccaattaaaaatagacaagatttgaaagaaagaaatttctccaaagaagataaacaaatagcaaataagcacatgaaaaagaggttcaacatcattagtcattagagaaatgcaagtcaaaaccacagtgaaatactatttcctacatactagagtggctaatatctaaaagacaagtgttggtaagaatgtggagcaattgtaaccttcatacattgctggtgggatctagaatgatacaatacagccaccttggaaaacagtttaaacagaattatcatttgacccagcagtcttactccttggtatatccccaagagatatgaaaatgtaagttcatataaaaatgtgtac

SEQ ID NO: 410880 - DNA, 1173 bp, Homo sapiens
gcggccgctcgggccccggctctcggttataagatggcggcgctgagcggtggcggtggtggcggcgcggagccgggccaggctctgttcaacggggacatggagcccgaggccggcgccggcgccggcgccgcggcctcttcggctgcggaccctgccattccggaggaggtgtggaatatcaaacaaatgattaagttgacacaggaacatatagaggccctattggacaaatttggtggggagcataatccaccatcaatatatctggaggcctatgaagaatacaccagcaagctagatgcactccaacaaagagaacaacagttattggaatctctggggaacggaactgatttttctgtttctagctctgcatcaatggataccgttacatcttcttcctcttctagcctttcagtgctaccttcatctctttcagtttttcaaaatcccacagatgtggcacggagcaaccccaagtcaccacaaaaacctatcgttagagtcttcctgcccaacaaacagaggacagtggtgagtcagttttaatatcaccattttgctgtttctttgtatttttcagacagatcagttgttgaaaattaatatattattacttcatactcagaggtcatgcaaatagaggcatccatgtcatacaggaatgaaaaatatgtaattatttggtggcaaagtctatattccttaactgaaataaatggtattgtctctagtgttggatttgacatttaaacctgtctgccaaacttgaaccacagtcatgtctaagcactagtttaaaataaatcaggattttaagacttgagcttgttcattatctaatgtgtgtcaggtaagactcattcttcacccttgagaaatctcctttctgagttatattatcagatgttgaacgttcagtgtgattgatatgtttcccctcatctacttcatttttggttgttgaatattagtattaaccattggaacagcgtaccctgtaagtaacatttgaagcatttaaagagaaatctgtggaattattgtgggtggtctataatccttaagtgcaacgaatattgttagtagacttaataagtaacccatctgtatacatcactactttttaaatgtctgtggttacttttgacaataaaaattccaaataca

SEQ ID NO: 410881 - DNA, 675 bp, Homo sapiens
actggtgaaaagattataatcaaaggctaaaattttatattctcttttgttaatgtcaggacaaagtccggattgaatataagtctgctttattttataggcctatgaagaatacaccagcaagctagatgcactccaacaaagagaacaacagttattggaatctctggggaacggaactgatttttctgtttctagctctgcatcaatggataccgttacatcttcttcctcttctagcctttcagtgctaccttcatctctttcagtttttcaaaatcccacagatgtggcacggagcaaccccaagtcaccacaaaaacctatcgttagagtcttcctgcccaacaaacagaggacagtggtgagtcagttttaatatcaccattttgctgtttctttgtatttttcagacagatcagttgttgaaaattaatatattattacttcatactcagaggtcatgcaaatagaggcatccatgtcatacaggaatgaaaaatatgtaattatttggtggcaaagtctatattccttaactgaaataaatggtattgtctctagtgttggatttgacatttaaacctgtctgccaaacttgaaccacagtcatgtctaagcactagtttaaaataaatcaggattttaagacttgagcttgttcattatctaatg

SEQ ID NO: 410882 - DNA, 1389 bp, Homo sapiens
aggtgaagtggatcttctcctcggtggtggacctgaagcagaccatcatccccgactataggaacatgattgggcagggggcctagggccaccctctgcggggtgtccagggccacccagatcccacacacgagccgtgggccatgctcagccaccacccaggccacaactgcccccgacctcaccgccctcaaccccatggctctctgtctttgcagtcgccctctgagccctgacacgccccccttccagaccctgtgcatagcaggtctaccccagacctccgctgcttggtgcatgcagggagctggggaccaggtgtcccctcagcaggatgtccctgccctccagaccgccagatgctcacacaaaaggaggcagtgaccagcatccgaggcccccacccaggcaggagctggccctggagccaaccccgtccacgccagcctcctgaacacaggcgtggtttccagatgcccgcagccagccagcctccattccgggcactcccgtgaactcctgacatgaggaatgaggttgttctgatttcaagcaaagaacgctgctctctggctcctgggaacagtctcggtgccagcaccaccccttggctgcctgcctacactgctggattctcgggtggaactggacccgcagggacagccagccccagagtccgcactggggagagaaggggccaggcccaggacactgccacctcccacccactccagtccaccgagatcactcagagaagagcctgggccatgtggccactgcaggagccccacagtgcaagagtgaggatagcccaaggaagggctgggcatctgcccagacaggcctcccagagaaggctggtgaccaggtcccaggcgggcaacactcagccttggtggggcctgaggacagaggaggcccaggagcatcggggagagaggtggagggacaccgggagagccaggagcgtggacacagccagaactcatcacagaggctggcgtccagccccgggtcacgtgcagcaggaacaagcagccactctgggggcaccaggtggagaggcaagatgccaaagagggtgcccgtgttcttgcgaaagcggggctgctggccacgagtgctggacagaggcccccacgctctgctgcccccatcacgccgttccgtgactgtcacgcagaatccgcagacaggaagggaggctcgagcgggactgcggccagcgcctgcctcggccgtcagggaggactcccgggctcactcgaaggaggtgccaccatttcagctttggtagcttttcttcttcttttaaattttctaaagctcattaattgtctttgatgtttcttttgtgatgacaataaaatatcctttttaagtcttgta

SEQ ID NO: 410883 - DNA, 783 bp, Homo sapiens
aggtgaagtggatcttctcctcggtggtggacctgaagcagaccatcatccccgactataggaacatgattgggcagggggcctagggccaccctctgcggggtgtccagggccacccagatcccacacacgagccgtgggccatgctcagccaccacccaggccacaactgcccccgacctcaccgccctcaaccccatggctctctgtctttgcagtcgccctctgagccctgacacgccccccttccagaccctgtgcatagcaggtctaccccagacctccgctgcttggtgcatgcagggagctggggaccaggtgtcccctcagcaggatgtccctgccctccagaccccaggagcgtggacacagccagaactcatcacagaggctggcgtccagccccgggtcacgtgcagcaggaacaagcagccactctgggggcaccaggtggagaggcaagatgccaaagagggtgcccgtgttcttgcgaaagcggggctgctggccacgagtgctggacagaggcccccacgctctgctgcccccatcacgccgttccgtgactgtcacgcagaatccgcagacaggaagggaggctcgagcgggactgcggccagcgcctgcctcggccgtcagggaggactcccgggctcactcgaaggaggtgccaccatttcagctttggtagcttttcttcttcttttaaattttctaaagctcattaattgtctttgatgtttcttttgtgatgacaataaaatatcctttttaagtcttgta

SEQ ID NO: 410884 - DNA, 883 bp, Homo sapiens
aggtgaagtggatcttctcctcggtggtggacctgaagcagaccatcatccccgactataggaacatgattgggcagggggcctagggccaccctctgcggggtgtccagggccacccagatcccacacacgagccgtgggccatgctcagccaccacccaggccacaactgcccccgacctcaccgccctcaaccccatggctctctgtctttgcagtcgccctctgagccctgacacgccccccttccagaccctgtgcatagcaggtctaccccagacctccgctgcttggtgcatgcagggagctggggaccaggtgtcccctcagcaggatgtccctgccctccagaccgccagatgctcacacaaaaggaggcagtgaccagcatccgaggcccccacccaggcaggagctggccctggagccaaccccgtccacgccagcctcctgaacacaggcgtggtttccagatggtgagtgggagcatcagccgccaaggtagggaagccacagcaccatcaggccctgttggggaggcttccgagagctgcgaaggctcactcagacggccttcctcccagcccgcagccagccagcctccattccgggcactcccgtgaactcctgacatgaggaatgaggttgttctgatttcaagcaaagaacgctgctctctggctcctgggaacagtctcggtgccagcaccaccccttggctgcctgcctacactgctggattctcgggtggaactggacccgcagggacagccagccccagagtccgcactggggagagaaggggccaggcccaggacactgccacctcccacccactccagtccaccgagatcacgagctggctcgagatcacgagctggct

SEQ ID NO: 410885 - DNA, 1497 bp, Homo sapiens
aggtgaagtggatcttctcctcggtggtggacctgaagcagaccatcatccccgactataggaacatgattgggcagggggcctagggccaccctctgcggggtgtccagggccacccagatcccacacacgagccgtgggccatgctcagccaccacccaggccacaactgcccccgacctcaccgccctcaaccccatggctctctgtctttgcagtcgccctctgagccctgacacgccccccttccagaccctgtgcatagcaggtctaccccagacctccgctgcttggtgcatgcagggagctggggaccaggtgtcccctcagcaggatgtccctgccctccagaccgccagatgctcacacaaaaggaggcagtgaccagcatccgaggcccccacccaggcaggagctggccctggagccaaccccgtccacgccagcctcctgaacacaggcgtggtttccagatggtgagtgggagcatcagccgccaaggtagggaagccacagcaccatcaggccctgttggggaggcttccgagagctgcgaaggctcactcagacggccttcctcccagcccgcagccagccagcctccattccgggcactcccgtgaactcctgacatgaggaatgaggttgttctgatttcaagcaaagaacgctgctctctggctcctgggaacagtctcggtgccagcaccaccccttggctgcctgcctacactgctggattctcgggtggaactggacccgcagggacagccagccccagagtccgcactggggagagaaggggccaggcccaggacactgccacctcccacccactccagtccaccgagatcactcagagaagagcctgggccatgtggccactgcaggagccccacagtgcaagagtgaggatagcccaaggaagggctgggcatctgcccagacaggcctcccagagaaggctggtgaccaggtcccaggcgggcaacactcagccttggtggggcctgaggacagaggaggcccaggagcatcggggagagaggtggagggacaccgggagagccaggagcgtggacacagccagaactcatcacagaggctggcgtccagccccgggtcacgtgcagcaggaacaagcagccactctgggggcaccaggtggagaggcaagatgccaaagagggtgcccgtgttcttgcgaaagcggggctgctggccacgagtgctggacagaggcccccacgctctgctgcccccatcacgccgttccgtgactgtcacgcagaatccgcagacaggaagggaggctcgagcgggactgcggccagcgcctgcctcggccgtcagggaggactcccgggctcactcgaaggaggtgccaccatttcagctttggtagcttttcttcttcttttaaattttctaaagctcattaattgtctttgatgtttcttttgtgatgacaataaaatatcctttttaagtcttgta

SEQ ID NO: 410886 - DNA, 367 bp, Homo sapiens
aagactattggaaaagcatatttgggatgtgtgaataccaagagttgctttttggacatactaagttgtagcacctatttgacatgtaaatggagatgtcaagcaaaccactgaatatacacctctggcttttaagagaagtctagctttaatctacagtgtgggctgtgtcagctcaatgtatatgaagactatatgtgttttgttgcttagctattcataccccaattccagtggaagataaaatgtttatttttcagttgttaaagcagaagtctgatatagcttggttatcttggatcattgccatctctaatcactgtggctcgggaaagggaagctctgattggccaggcctgtgtgccca

SEQ ID NO: 410887 - DNA, 305 bp, Homo sapiens
gttacattcctatggtatagttctggccacaaaaacatcaccaaagaagcacacttctaatacgaaacactgaaatacatgtgagctctacgtgcatttaagaaggtaagatcgcccgtgtgggaagtgatgagggcctctgcccggcccctccaccgtctgggatgtgaggagcgcctctgcccggccgctgtgcaaccttccaagtgtgaagtgacagccttgtgtgtgatctttctgccttccccaagtttgcattttcgacattaaagtttactttttaattaaagttttaaattggagaa

SEQ ID NO: 410888 - DNA, 585 bp, Homo sapiens
tgttgatgatgatgatacctaatgcaaatggagtacttgctgtgtgccaagcactgtgctaaggatgacttcatgtgcatcataccatttgtcttcataataaccctctgaagttggaactataactaaatctaaccccatagaagaggaaattgagacatagagaagcttaaaaacttgccaaggtcatgcatctagtaagtggtggaaccaaaatttgaactcaggtctgtttgtgccctaagcccagcttttaaccactaaactgtagtttctggcatcaagtattagggcactaataaacaacttagtacagggatagacaagcgttgggccaaatctggccatgcctattcatttgcctatttgtggctgcttttgtactactatggcagagttgaataattgaaaaagagacctcatggcctgcaaagttgaaaatatttactatctggacctttaccaaaaatgtttgccaatccctgctttagatggttctaaaggaaagatatggtagttaaatatttggaaatcatttacccccttatacatagaagaacacacatgtttagaaataaagattca

SEQ ID NO: 410889 - DNA, 380 bp, Homo sapiens
tgattttgacctctattataatagactctatgatatatcaaagtactttatagcagaggtttattatattttcaaattgctatatatattttatataaaattgtgttccataactgttatttaaatatgatgatacatgtgaaaatatcttacaacgtatttgtcattaaaagtgaagtatgatttttaaataatctgataagaaccacagaggaaactggagaggccacatctggagaactgttttcaaccaattatgatgatattaatgatggcagtgttgatgatgatgatacctaatgcaaatggagtacttgctgtgtgccaagcactgtgctaaggatgacttcatgtgcatcataccatttgtcttcataata

SEQ ID NO: 410890 - DNA, 310 bp, Homo sapiens
gaaccatgtaagaagtctgactgccctgctggagaaatcaaatggagaggtcaagagacaacatggagagagaacgcacagcccagctgagcccagctttccagttatccccaccaatgcgccacacatatgacggaagtcattttggtccctccaaaacaacctagccagccagctggataccactgagtgacctcagtagatgccacgtgggacaggagaattctctagtgagctttgcccacattccttacccacacagtcatgagtataattaaatgattattgttttaagccccaagttttgggg

SEQ ID NO: 410891 - DNA, 401 bp, Homo sapiens
ctcaggatgtgcccttgggaactaaagcaggtgatggccaaacaccccagaaacacgccttctgggcccgtgtctgtggcttcaatgccatcctcctcatgtgtgtcaacatattcttttatgcctacttcgcctgacactgccatcctggacagaaaggcaggagctctgagtcctcaggtccacccatttccctcatggggatcccgaggccccaagaggggcagattcccctcacagctgcacagcagctcggtgcccaagaactggccaagccagcaaagcgggagccctgaaaaattaggggggaaatgggagaaaataatgtgacatttcaaaaacagcaccaaagcagtcagcattggaaggaaaattagatttctgacggacatcctgatgtt

SEQ ID NO: 410892 - DNA, 787 bp, Homo sapiens
ctgatcaccttttgctgtaccttcaaatggcatttcttcaatgtgtgtacatctctgatgtctctgtgtatccaaatttcttcttgtaaggacattatcagattggattagggcccaccgcaatggcctcactaaatccaatcttttttgacatatgcatatagaagttcctagacttcagtgctgaggagacagaggctacaggcatccatatgtctgtctctggggtcttcttaggaagaggcctctgatgaagagaacaaagctcttgtttgatatcccagcttgagcaagaggaatgggacaagttcgtggcagccaccagccgccaggagatggctgaagtagacaatcaatttccaggttattgggaaattcaagaccaatcaatagaattatctggagataaactctctgggacagtgttcatcaagttgcagtgccctgtttgagtccgagttagtgttagtcggagatacagtgaagtctaaggaggatgaggaagagtgattggtgatagcagataaaagaaaaatgaatcagtgggataaatggagatgaccaagtttgggagaagacaatactatgagagaaggtgtccagagacagagtgagacacagatataggaacaggatcctgggccttcctgctccaggaaaagcatggaaaaggcaagttgtgagggcagaagacagtcccacaagaacatgaaattcagtcatgcaaagggctgggaaggcagaaacacagtggtgagagtgagccagaaaggagatgtggggagca

SEQ ID NO: 410893 - DNA, 437 bp, Homo sapiens
atttgtggtcttctctctctttttgatctgtgcaatggctggagatgtagtctacgctgacatcaaaactgttcggacttccccgttagaactcgcgtttccacttcagagatctgtttctttcaacttttctactgtccataaatcatgtcctgccaaagactggaaggtgcataagggaaaatgttactggattgctgaaactaagaaatcttggaacaaaagtcaaaatgactgtgccataaacaattcatatctcatggtgattcaagacattactgctatggtgagatttaacatttagaggtgacagcatcccccacactggcagtgaattttttgtgctacaaacttggcaaaagtctgtgaaaagaagtttcaacttcatgtgttattaactatacaaatattagttgaatgaattgttgaattacatg

SEQ ID NO: 410894 - DNA, 940 bp, Homo sapiens
atttgtggtcttctctctctttttgatctgtgcaatggctggagatgtagtctacgctgacatcaaaactgttcggacttccccgttagaactcgcgtttccacttcagagatctgtttctttcaacttttctactgtccataaatcatgtcctgccaaagactggaaggtgcataagggaaaatgttactggattgctgaaactaagaaatcttggaacaaaagtcaaaatgactgtgccataaacaattcatatctcatggtgattcaagacattactgctatgaaatccaatcttttttgacatatgcatatagaagttcctagacttcagtgctgaggagacagaggctacaggcatccatatgtctgtctctggggtcttcttaggaagaggcctctgatgaagagaacaaagctcttgtttgatatcccagcttgagcaagaggaatgggacaagttcgtggcagccaccagccgccaggagatggctgaagtagacaatcaatttccaggttattgggaaattcaagaccaatcaatagaattatctggagataaactctctgggacagtgttcatcaagttgcagtgccctgtttgagtccgagttagtgttagtcggagatacagtgaagtctaaggaggatgaggaagagtgattggtgatagcagataaaagaaaaatgaatcagtgggataaatggagatgaccaagtttgggagaagacaatactatgagagaaggtgtccagagacagagtgagacacagatataggaacaggatcctgggccttcctgctccaggaaaagcatggaaaaggcaagttgtgagggcagaagacagtcccacaagaacatgaaattcagtcatgcaaagggctgggaaggcagaaacacagtggtgagagtgagccagaaaggagatgtggggagca

SEQ ID NO: 410895 - DNA, 186 bp, Homo sapiens
ctgatcaccttttgctgtaccttcaaatggcatttcttcaatgtgtgtacatctctgatgtctctgtgtatccaaatttcttcttgtaaggacattatcagattggattagggcccaccgcaatggcctcactgtaagttaattacatctttaaaggttgtgtctccatatacagtcacattctga

SEQ ID NO: 410896 - DNA, 485 bp, Homo sapiens
tacacatgacttcaattcttttaattttttttcaaatgtaccctggaacaaagcacatacttttttcaaagaaagcttagcacataatataaccaaatttgagacccttcaattagtatacattattaggatacagttttacattgattttaattgcttatcttcctttcttccagtttctttcaacttttctactgtccataaatcatgtcctgccaaagactggaaggtgcataagggaaaatgttactggattgctgaaactaagaaatcttggaacaaaagtcaaaatgactgtgccataaacaattcatatctcatggtgattcaagacattactgctatggtgagatttaacatttagaggtgacagcatcccccacactggcagtgaattttttgtgctacaaacttggcaaaagtctgtgaaaagaagtttcaacttcatgtgttattaactatacaaatattagttgaatgaattg

SEQ ID NO: 410897 - DNA, 340 bp, Homo sapiens
tttttttgagaaagagtctcgctctgttgcccaggctggagtgcagtggcgcaatcttgggtcactgcaacctccacctcccgggttcaagcgattctcctgcctcagcttcccaagtagctgggactacaggcacgtgccaccacacccggctaattttttgtatttttagtagggatggggtttcactgtgttagccaggatggtctcaatctcctaacctcgtgatctgcccaccgcagcctcccaaagtgctggaattacaggcgtgagctaccgtgcccagcctacatcttatactttcatgtctttgatagtaacccttcaacctaaatctgtg

SEQ ID NO: 410898 - DNA, 93 bp, Homo sapiens
acgagtggtcaagcgcaaggtcaaaagcgcagggactggtttaaggtctgattgtagcatccttaaatcaccatgcccataccctcacagcca

SEQ ID NO: 410899 - DNA, 184 bp, Homo sapiens
taaattgccatcatattatgagtagatcaagtcttgaaactgattacagttgtcatattaataacactaataatacaaagcattagctgagtattctttacgtgctaaaaactgtgctagaaactttacacagattatttcattgaaacctcacagcaagtccagaaggggacgctattacaat

SEQ ID NO: 410900 - DNA, 671 bp, Homo sapiens
ttctcaagtcccactctaaacagaaaatatttagatttaggattagaaaatactgggtgaagtccaaggcatctgtaactgtaataacactctcccttgaattccaatgatcagtcaggtttgggaagttctggtttcaataacttgttcaaggtcacacagaaccctaaatagagccagaaactaactcaaatcttttgagtccaagttaaatatattttcattggactcctgctgtccatttactgacaatatatgatggggtaggatgaagaggtggggagaaaagtagcaattttagttttttcatttttattttttaccatattctatgacatggttttaagattaaatgagctaacatccatagagtgcttagaacagtatctggcacatggtaattaggtgtaacggttcaacgaataagtctccattgtccagtcatggcattcactttgcctggggttacattaggtaacattttattggatatcgactttttctatgaagaaaaaaatgtatgtaaataaaggtggaatctttagcctttatttgtcatggaagccctgaatttgtatagctgaaaatatttctatattgtttcttttcatcttttctgatatattaagaaaatgttaatgatatacttattaaataaaattgtggatgta

SEQ ID NO: 410901 - DNA, 691 bp, Homo sapiens
aagctcaaacctaccatttggtgctttctaaaattagttctattgccagaaacccaatatccactgtgcttggctccccagtcaagtgtcctgtgaactaacatcaatcctcactgccctgtgtatatgaaagagctttcagctgttttcatggtttttctaacagttccccagttgggattagagcctttgtttgaatcagcctactagaataacctgcttatcttttgccagtcctttaataggagtgggaccctccttcctgccttttcaaaagcttggttctggatccaaacaatacttatagtacttagttataggtatatattagtatacatgacttaactgtctgaatattgccactgcctctgatcttactccatcctgtagagtaacatcttgtagagagcatcttggggcagaagaggatacattttcagtatgagaaccagactccttgtcttactctcatgagtcctggtctcctcctggtactactattccactgctgaggtctcagcatgccatatagctgagtttgtcagagttaatgagggtttaatcagaatcccaaatcaagtacagtccagtccaacctatttgagaactttatctttcttgttacttcatttattatagttgacttcaaaagagcaatggaaaaggcacttcagaatatgcaaaaaatgta

SEQ ID NO: 410902 - DNA, 452 bp, Homo sapiens
cttttcctcctaacatttaaccccatttccagtatgactgccagcagctgagccaacctaaaggtccagagttggggctcaatgcttaatttgttcttagaatatcttggcctgtttttttatttttggctccgtctcaaaaaagaaaaaaaaattattaagaatttttcgccaggcatggtggctcactcctgtaatcccagcactttgggaggccgatgcaggcggatcacatgaggccaggagttcgagaccagcctggccaacatggcaaaacctttactgaaaatacaaaaattagccgggcatggtggcacacatttataatcccagctactcaggaggctgaggcaggagaatcacttgaacctgggaggtggaggttgcagtgagctgagatcacaccactgcactccagcctgggtgacagagcgagactctgtctcaaaaat

SEQ ID NO: 410903 - DNA, 458 bp, Homo sapiens
aggagagcgcctgcgcgggagggtgaccacaggcggccgggcgggatgtcctgtccgccgtcttcagcccagccgccaccacccataagctatgaggaggagtttacgaccacctggactactaccacctgcgtgacttcccggcctgaggggtccgcgcagcaaaggcctgacgctgctggagcaggcgctgcgcacctaccggctggcgcctggtaggcacgagtgcagggtcgcccagaagctcctcaatggccggcgcaagtgccagccagcgccagctgcagccctggccgcgcactcgcctcagctgagcctggggccttcaccatctctgtcatctggagaatttgttcccatcaggaatctcccacctggcagtgggaccatgctagtagcctgtccatttcctgcagataaaaaagagaggtatcggtaatacatgcatatatataaaa

SEQ ID NO: 410904 - DNA, 654 bp, Homo sapiens
aggagagcgcctgcgcgggagggtgaccacaggcggccgggcgggatgtcctgtccgccgtcttcagcccagccgccaccacccataagctatgaggaggagtttacgaccacctggactactaccacctgcgtgacttcccggcctgaggggtccgcgcagcaaaggcctgacgctgctggagcaggcgctgcgcacctaccggctggcgcctggtaggcacgagtgcagggtcgcccagaagctcctcaatggccggcgcaagtgccagccagcgccagctgcagccctggccgcgcactcgcctcagctgagcctgggtatgtgcaccccccaacacttcccccagccatgttcccgggacctcgggagcgtcccccaccgcccggtgccattcgtgctgggcagggtcggccccctttgaggctgccccgcgttagggagctgcaccgcacccccaccagcttgacctctgactgccgttgcaatagcattaaagcctttggaactttgtagggccttcaccatctctgtcatctggagaatttgttcccatcaggaatctcccacctggcagtgggaccatgctagtagcctgtccatttcctgcagataaaaaagagaggtatcggtaatacatgcatatatataaaa

SEQ ID NO: 410905 - DNA, 419 bp, Homo sapiens
gggtgtggtggtgggcgcctctaatcccagctacttgggaggctgaggcaagagagtcgcttgaacccgggaggcagaggttgcagtgagcgaaattgcgccactgcactccagcgcctgggtgacagagtgagactcagtctaaaaaaaagaaaggaaaaaagaatgagattagagagggccttcattcctcctggaagaacacctgatgtacctgaaatctttgttggtgacaggaaatatgtcgatagcatagggtttcactgttgcctcccacacagggccttcaccatctctgtcatctggagaatttgttcccatcaggaatctcccacctggcagtgggaccatgctagtagcctgtccatttcctgcagataaaaaagagaggtatcggtaatacatgcatatatataaaa

SEQ ID NO: 410906 - DNA, 545 bp, Homo sapiens
cggccgcccccgcgactgcgccacgtctgaggcggctgtggccacgtctgaggcggctgtggccgcgtcggtgtccgcgtcgaggagccggggcagggcacgatggcggactgggctcgggctcagagcccgggcgctgtggaagagattctagaccgggagaacaagcgaatggctgacagcctggcctccaaagtcaccaggctcaaatcgctcgccctggacatcgatagggatgcagaggatcagaaccggtacctggatggcatggactcggatttcacaagcatgaccagcctgcttacagggagcgtgaagcgcttttccacaatggcaaggtccggacaagacaaccggaagcttctatgtggcatggccgtgggtctaattgtggccttcttcatcctctcctacttcttgtccagggcaaggacgtgagccagtgggagctggtgtctgtgggtgccaagggcagccagcggtcttccctgcctggtgttttgggctccacaggacttacctacaaaatactcctttgcaatgat

SEQ ID NO: 410907 - DNA, 778 bp, Homo sapiens
ggctcactgcaagctccgcctcccgggttcacgccattctcctgcctcagcctcccaagtagctgggactacaggcgcccgccactacgcccggctaattttttgtagaaaatgaacaatttttatctatgtagggctcctgattgtgaagtggaataatttaataaggcttaaccctgggccaaaaatatcctctaggcagtttgtttctgtttgttctgaatccatgctcacaatatctttctgatgactcttttggctttgtgggtgcctgatgctgggaagggagagtctctggacatgggtcacaacccacagatataaacgagagacttagtgttcctggtttgtatgtcagttacacgtgactggtgtaagtctagccccaagagatactcatggtataataactaaattggatttggggcctgcaaagctgaggtctagaatgagagctgtgaaatggagagagccaaatgaggccttggttttaagctgtagcagaacttacttccattaccaggcaaaacagctaaatctgtagtaattaatatatgtgactactaaaataataaagataactgaagagaatttcacattttacaaagcactttcatgacctatttgattatcatgataataaaggtactattaccgttttaagaagaaagttgaggtttgtgacttgactaatgaggtcaaaactcaggtattcccacttctgactttgttcaattcatttttgtttctcatagtaagagtagggccactgtttatg

SEQ ID NO: 410908 - DNA, 362 bp, Homo sapiens
ggtcctgaggttctgacaatcctgaatcatgctttcggattcctcagagggcaaaatacacccacaataactttagtatttattgtattctgattcttttcaagtcagggatcttacacgatgattttttatttaccaaaatatatgtttaaatctgaacactatacagtcggatggtaccagagcaaaatgagaacatctgaggggaatcacaggttcacagaacagcagaacaaaagggacctcaaagattctcacacccaatcatctcatgtcacagagggggactgtgaagccccaaaagattaagtcactttcccaaagtcacatttagttaatgtgagagccaggcttagaattca

SEQ ID NO: 410909 - DNA, 655 bp, Homo sapiens
cccacctcaagactctggtagctgagacacaggcacacaccactacatccagccaatttttgcatttttttggagagatggggtctccctatattgcccagtctagtctcaaactcctgagctcaagcaatctgtctgcctagccctcccagaatactgggattacaggcatgagccactgcatccaaccaagaatgaattattttcctaatttaaaaaaaaaatactgagaagttttacaaaaaggagatacaccctctggtctaccacactgaatgatctgtcattctctcttggattagccttggtatgtcagggacctgcaccttttcttccaggcctttccatctatccggagtgacctaccagagacaggacagtttgaccagcaagcttctgatcactcttcaacacccagcaagaagtcttatcctccatgcagccttctaagacctctctaagcacaggtatcagatcctcctctggatcactctgtcttgttactgcatttatctcactggatttcagtgacgtgtgtagacaactaatttgtgcctgcctgatctgtgagctcttcattcaaagcagttggctcctgagtacaggataaacccctagaattgaataaatttggtcttacctcatcactggtaag

SEQ ID NO: 410910 - DNA, 504 bp, Homo sapiens
cacctgccatgccgtgaggacattcaaactgcctatggagaggtccacatagtgaaaaactaaggcccctgccaaaacccatatcagataccatcagcataatgtcatcgatgcagtggaccagtgtgacatggggaacataaagatggtcacgatttttgcagacttcatatgcaaagtattataggcctttccatctatccggagtgacctaccagagacaggacagtttgaccagcaagcttctgatcactcttcaacacccagcaagaagtcttatcctccatgcagccttctaagacctctctaagcacaggtatcagatcctcctctggatcactctgtcttgttactgcatttatctcactggatttcagtgacgtgtgtagacaactaatttgtgcctgcctgatctgtgagctcttcattcaaagcagttggctcctgagtacaggataaacccctagaattgaataaatttggtcttacctcatcactggtaag

SEQ ID NO: 410911 - DNA, 473 bp, Homo sapiens
tgcacgctgattactaaggcatctaaagtacagttatttcctactcatcagatcagataccatcagcataatgtcatcgatgcagtggaccagtgtgacatggggaacataaagatggtcacgatttttgcagacttcatatgcaaagtattataggcctttccatctatccggagtgacctaccagagacaggacagtttgaccagcaagcttctgatcactcttcaacacccagcaagaagtcttatcctccatgcagccttctaagacctctctaagcacaggtatcagatcctcctctggatcactctgtcttgttactgcatttatctcactggatttcagtgacgtgtgtagacaactaatttgtgcctgcctgatctgtgagctcttcattcaaagcagttggctcctgagtacaggataaacccctagaattgaataaatttggtcttacctcatcactggtaag

SEQ ID NO: 410912 - DNA, 487 bp, Homo sapiens
attacaggagtgagccactatgcctgcctggccaccttacttcttttcttataaacaggtctctctatcccaaagcctgatgtgatttccttactggagcaagggaaagagccctggatggtttcaagggacataccgggaggatggtgcccaggtgagtaaggactgagcagatggggaaggcactgctgtttagaacccagcccatcagggaggcagcgccgtaaaggtattggttggggaatctcttctgcaaggtcccatgtaagagttgtggcctaagacacatggagaaaagtcaagataccacccccccacccacaaacacactcttttttaaaaattttttttaatttgagagagagtcttgctcagtcacccaggctggagaacagtgatgcgattttggctcactgcaacctccgcacccaggttgaagcgattctcctgcctcagcctctaaaggaactggcattataggcacctg

SEQ ID NO: 410913 - DNA, 200 bp, Homo sapiens
gaacctcactgttaacttctctaccatagtgttaaataatacccactagacaggtctttgaggtgattcagggaactgccatatgcaaagggacccgcaaaagtgggttgctggctgggcacagtggttcaagcttgtaatcccagtgctttaggaggccaagccggaggattgcttgaagccaggagttcaaaaccagc

SEQ ID NO: 410914 - DNA, 450 bp, Homo sapiens
ctcataggacagtggcatttataagcctctgtcctatagtatttataagcttatttttgcagtgtattatttgtatacatcttttgtttcttctgtttcttaaagtcaaggaccttcttatacctctgcttatctttttcatagtgccttgtacattaatattttttcagtttaaacaatgttgaatgaacaaataaatgaatgggcatggcctctgaggtaatgtgtttcctctttcatctaaatctttgtttctcaatcctttctaactcatgccttcttttgaaaatgtaagtttccttacaccccttccacctttcagtatctcctcccaaaagaccaggcccgcagcccccatctcccttgatgggacaagctcgacttttcctacagatcctcaacagttgagattattttatcaagctccactttcatgtggtatgttataaa

SEQ ID NO: 410915 - DNA, 113 bp, Homo sapiens
cttggggcagcagacagactgcttcccacttgttggtgttgggtcattgtcatccctgatcaccaggaccctgtgtggctgtggcgtcctcctaaagcgacgagtgaatccag

SEQ ID NO: 410916 - DNA, 511 bp, Homo sapiens
gactgtgctatgatctaaagcctctcatatctgtgcagcaacctggggtgagtcactgtcactaacatggaacagatgccaggtagtccctttggacaaaaggatgaggcccatccatgtagaaagcatcttaatcagtgactgtcttatgggccctctttgtttcccatctgttttattatcagaatatataattttcccccaagttttcatcttgaatctctcaaacctacagaaaatttgaaatttgacagtaagcacctgtatatccttcctctagtttgtcttattgttgacattttatcatgtatgctttatagacaggatttttcctgaaccatttggaatatgcatatacttcatccctcagttcccagcatgtaccctaagaataaagattttcttctgcataattacaatgccataattactccaaagaaatttaacagatgatattattacatagcctgtattttataataaaatttccctcaaagtgccgttagccatt

SEQ ID NO: 410917 - DNA, 411 bp, Homo sapiens
ctgctaagactgaatcttgttcactttcctagtgccagcacctggtataggtcagtcacacagaaggtgctcagtaaataaataaatgttaactctgattaactcatactgattagaaactctgattggaaaataggtacaaatgaataactaaaaataggaaaaggaattgcttgttactttataaacacaatttgttcagggagagtatttttcaaaatgcaaggcaaaatggtgatgacaaggtcacagactctgggagacgctgaaaaaaaccaacctcccacatggcttgtgagatcagcagaggcaagagccaaatgcatgagtcatgcccagcaattctgaggcagggaccaatcagaggtatgtgctgtcctcgtcactgtccgactgaactcttcattcatt

SEQ ID NO: 410918 - DNA, 446 bp, Homo sapiens
ggtgggaatgacaactttggtcatggaggaaacttcagtggtcgtggtggctttggtggcagccatggtggtggtggatatggtggcagtggggatggctataatggatttggtaatgatggaagcaattttggaagtggtggaagctacaatgactttggcaattacaacagtcttcaaattttggacccatgaagggaggattggaggcagaacctctggcccctatggtggtggagaccaatacttagccaaaccatgaaaccaaggtggctatggctgttccagtagcagcagtagctatggcagtggcagaagcttagcaggataggagagccagagaagtgacagggaagctacaagttacaacagatttgtgaacccagcaaaacacagtggtggcatggcctagctgctacaaagaagacatgttttagacaagtact

SEQ ID NO: 410919 - DNA, 443 bp, Homo sapiens
gtgcctgcaatgtgagcactcgtgaaacaggggctctgggaggaatgtgtgagggtgggcaccgcgtcaggggcttggtgtcatgggctgaggtgggttggccaagactcatgcgctgaaatcctaactctcatgccccaggatgtggccggacttggagacagggtcactacaaaagcaactgagttgaaatgaagccgttggagtggccctaatttgatctgactggcatcctatgagaagaggaggttaaggcatagagaggcacgcaaagggacaactgactgaggacatagggagaagacgtcatccactagccaggaagggaggcctctggaggaaccagccctgtggacagctggatctcggacgtccagcccccgagaagggagaggatcatgtctgtggcttaagccacccatctgcggcatttgttatgaagc

SEQ ID NO: 410920 - DNA, 625 bp, Homo sapiens
  misc_feature (616)..(616): n is a, c, g, or t
  misc_feature (619)..(619): n is a, c, g, or t
ctttcagtttgtgaatgctctctggaaccccagaagataaaagaataagtaactatgacagtcatttgtaacaatcgtctctttcccaatacactaccagcaagccgacccacaccgcctccagtcttagtgccttcccggtcacgccctcccttctcctgaagggggcggaatctctaatccacccaagacccggttcctcgattcccatccttacgaccgaggaaaaaagagtaaattttcctattatagccttctctcgcaccttccccgcttcccaccagccgtctccactgtcctcaccgtccccatcctcatccatggcgaaatcttcgcccccagcctcgtgaagatctagcacgtccgccatctcgccttcgatcgagatctcgtctgtgccgctcagacactagagtctcaccctgatgtccaggctggagtgcaatcactcagtctcggctcactgcaacctccacctcctgggttcagatgctgttgactggggcaaagaataatgggagaaaaacagctgggtcctaaataacagagggaaaccaactttcaataaagtattcaacaactaatccacaaagcagataactgaaatgagtctcantgncgccca

SEQ ID NO: 410921 - DNA, 549 bp, Homo sapiens
  misc_feature (540)..(540): n is a, c, g, or t
  misc_feature (543)..(543): n is a, c, g, or t
ctttcagtttgtgaatgctctctggaaccccagaagataaaagaataagtaactatgacagtcatttgtaacaatcgtctctttcccaatacactaccagcaagccgacccacaccgcctccagtcttagtgccttcccggtcacgccctcccttctcctgaagggggcggaatctctaatccacccaagacccggttcctcgattcccatccttacgaccgaggaaaaaagagtaaattttcctattatagccttctctcgcaccttccccgcttcccaccagccgtctccactgtcctcaccgtccccatcctcatccatggcgaaatcttcgcccccagcctcgtgaagatctagcacgtccgccatctcgccttcgatcgagatctcgtctgtgccgctcagacactagatgctgttgactggggcaaagaataatgggagaaaaacagctgggtcctaaataacagagggaaaccaactttcaataaagtattcaacaactaatccacaaagcagataactgaaatgagtctcantgncgccca

SEQ ID NO: 410922 - DNA, 388 bp, Homo sapiens
  misc_feature (379)..(379): n is a, c, g, or t
  misc_feature (382)..(382): n is a, c, g, or t
actgtcgcagaggggaaaggtcgccagtcaagctgaccaatcaaaggctaactctaaatccctccctctgcacggtaaaaacacgcaaattggggcgggcctagtgcggaaagataccggaagtgtttctgtggccatcttgaacagatcgcaagctaaatcatccatcttaggagagtctcaccctgatgtccaggctggagtgcaatcactcagtctcggctcactgcaacctccacctcctgggttcagatgctgttgactggggcaaagaataatgggagaaaaacagctgggtcctaaataacagagggaaaccaactttcaataaagtattcaacaactaatccacaaagcagataactgaaatgagtctcantgncgccca

SEQ ID NO: 410923 - DNA, 337 bp, Homo sapiens
tgtggccatcttgaacagatcgcaagctaaatcatccatcttaggaggtacagactacagggggccgtggcttcctcttaaccgcggcagctgctgataaatactgtactattaacagtgaggcccggcgtaatttccttattagagggcttctttacgtctcttcatcccaaactgggaaatggtaattgaagaaacccttttctttcaaaaatcccaggcctgtaccttgtctttaggcagcgtggtgtatgataggagcgtttttaaaaaatagtttgatcagcagtgagggcataaagagctgcttctggaacctgcagcaccaaatttctct

SEQ ID NO: 410924 - DNA, 626 bp, Homo sapiens
agggaaaccaactttcaataaagtattcaacaactaatccacaaagcagataactgaagtaatttagtatatgtaattacatctttttttttttttttttgaggcggattcttgctctgttacccaggctggagtacaatggcacaatctcagctcattgcaacctctgcctcccaggttcaagcaattctcctgcctcggcctcccgagtagctgggattacaggcgcccaccactgcgcccagctaacttttgtatttttagtagagatggggttttgccatgttagccaggctggtttcaaactcctggcctcagatgatccgcctgcctcagcctcccaaagtgctgggattacaggcatgagccactgcacctggcctgtaattacatcttaattaaatgcaaatagaacagatacttggtctgactattaatgaatttgtggagaggaaggaagatggcggtgttaatttctaagatgtaattaaattaagtcaacttgggttctaatcttggcgtgaccaattactagctatatcatgttaagcaacattccacttctgtgtttttagtctcctcatctgtaaaataggggtaataatagtacttacacctcataagat

SEQ ID NO: 410925 - DNA, 449 bp, Homo sapiens
  misc_feature (440)..(440): n is a, c, g, or t
  misc_feature (443)..(443): n is a, c, g, or t
actgtcgcagaggggaaaggtcgccagtcaagctgaccaatcaaaggctaactctaaatccctccctctgcacggtaaaaacacgcaaattggggcgggcctagtgcggaaagataccggaagtgtttctgtggccatcttgaacagatcgcaagctaaatcatccatcttaggaggtacagactacagggggccgtggcttcctcttaaccgcggcagctgctgataaatactgtactattaacagtgaggcccggcgtaatttccttattagagggcttctttacgtctcttcatcccaaactgggaaatgatgctgttgactggggcaaagaataatgggagaaaaacagctgggtcctaaataacagagggaaaccaactttcaataaagtattcaacaactaatccacaaagcagataactgaaatgagtctcantgncgccca

SEQ ID NO: 410926 - DNA, 713 bp, Homo sapiens
catgatgggttggaggtacctgtgagtcacatccaggtggatgtgtcctgtgggcagtgggacgcgagtctgaagctcaggcaagaggctagagttacatctttggagtcatcagcctaatggaggactgtggcatccaggtgccaaaagctagggaaacggctctggagagagaggggctttcttaattgacctcttgggccactaagatgtggttacatattttctctcacatctcctagaacgtttgcaaaacaattcccagtcctatgatcatttctcccttcttctgagaactaattatatatggcacttaatatctattcacatgtagcactcatggtgaggtgttttttttgtttgtttgtttttgttttttttttggttatcatctattgctgctgcacaaattaccagatttcataattggtttaaataagcctccaatttgtttatatttattaacatgtatgattttgtgcatgtagaataagcttggcatagaaatggcctaaatgctcctgtagctcttcattcctttgtcgttctcactctccatgccagtatgtctcatttctagatcccatagaactttcaattgaaagtaataaccaaggcaactcactttccatgagtaatacaccacacttctagaaatcagcctatattactgtcacactggggattaagtaaaaaaagagaaagaaggatgg

SEQ ID NO: 410927 - DNA, 379 bp, Homo sapiens
cccccgtttaaaaagatttattggaaatatcaacaaccttggcttgaatctcatagaccagagcttaatccatggccacactttggtgcaaggaaggctaggaatagtctattatttatttctttatttatttagagatggagccacatttacttttgttcaggctggagtgcagtagaatgatcttggctcactgcaacctctgcctcctggcttcaagcgattctcctgtctcagcctggccaacatggtgaaacctcatttctactaaaatacaaaaatgagctgggcgtggtggtgggtccctctactcccagctactctggaggctgaggcagcaggatcacttgaacccaggaggtggaggttgcagagagcc

SEQ ID NO: 410928 - DNA, 731 bp, Homo sapiens
cagaccctgatttgcaacttgtaatgtaaatcaactcaactgcatcatgtacttaccagccaccttctcccaactgtggccggggccgagaagcagcatgttctgtccatctgtaaaaggccttctttctctcttaagacgtcacaactggttgttactgagaactttagaaaaacgactagatcgtttggctctttctgggccttccacctacactccatgccctctctcctcccaagaaaacacgaattaaaatacagggagtatcaaccgcatcctgccaacacctcataagactccaaggctttaccgagatcttccaccttccccgggataaatgaagacaagtgcttcctagaatctttatggtgatggaaaagatatactaaaagaagacagatcagtctctctcctgataagaagagtcaccaagaggaacatctgcaacaactagatgctgctacaaagagaccaatcaacaactgctcagcagagatacagatctgaagcacagaagtgcaatagaccttcctgatgccttcgccaggagcatggaattcttcccagagtcacagaagatggcacagcctggggacaattgggaatcacctggaggatggcagacaacacgaacctgcaagtaatcatccgaccaacttcctctactgcttgggaattgcaaggttgtataatcttgggaggtcacttcaactatacaattggactaagaa

SEQ ID NO: 410929 - DNA, 751 bp, Homo sapiens
cagaccctgatttgcaacttgtaatgtaaatcaactcaactgcatcatgtacttaccagccaccttctcccaactgtggccggggccgagaagcagcatgttctgtccatctgtaaaaggccttctttctctcttaagacgtcacaactggttgttactgagaactttagaaaaacgactagatcgtttggctctttctgggccttccacctacactccatgccctctctcctcccaagaaaacacgaattaaaatacagggagtatcaaccgcatcctgccaacacctcataagactccaaggctttaccgagatcttccaccttccccgggataaatgaagacaagtgcttcctagaatctttatggtgatggaaaagatatactaaaagaagacagatcagtctctctcctgataagaagagtcaccaagaggaacatctgcaacaactagatgctgctacaaagagaccaatcaacaactgctcagcagagatacagatctgaagcacagaagtgcaatagaccttcctgatgccttcgccaggagcatggaattcttcccagagtcacagaagatggcacagcctggggacaattgggaatcacctggaggatggcagacaacacgaacctgcaagtaatcatccgaccaacttcctctactgcttgggaattgcaggcggaggttgcagcgagctgagattgcgccactgcactccagtttggtgacagaacaagactccgtctc

SEQ ID NO: 410930 - DNA, 350 bp, Homo sapiens
gcatatcagaaacagaaatttgttgaggataattttggatattcagcagtggctgtgaaattggatttgaattaccgggatacatgcatgcttcttggttacttccaggatagctgaaagaactctgagatgttgtggtaatttggtttattaaagactggtgcaaaaaaggtggctggcttttaggatacagtggtggtaatgtagcactctttggtttttcattccaattcattgtcggtttgatatagtagcagtgtattacaagtcagttataagtcagttacaagtcagttgtctgaatgtcaggaatctcaacatgtaggtgggtgactaactgacttgtaata

SEQ ID NO: 410931 - DNA, 665 bp, Homo sapiens
gcatatcagaaacagaaatttgttgaggataattttggatattcagcagtggctgtgaaattggatttgaattaccgggatacatgcatgcttcttggttacttccaggatagctgaaagaactctgagatgttgtggtaatttggtttattaaagactggtgcaaaaaaggtggctggcttttaggatacagtggtggtaatgtagcactctttggtttttcattccaattcattgtcggtttgatatagtagcagtgtattacaagtcagttataagtcagttacaagtcagttgtctgaatgtcaggaatctgtaagaaataaagatattttattaaaatgctgttttgcctagatagaatatctaagaaaattagtagctgactgtccatcctaattactgaatcttcagagcagcctcatctttaatttgggaagaagaggagcaatagaggatacaacaataaataaggcaagtgtcaatgaaatttctaacgtgtttaacagaaattcattccacacaatgacagctagctttttgttacatttaaatgccaatcaccttctgtttttacttatttttaacagactttcttgtaagtaatccatgctaactgcattttttaaaaaagctaacatgacaataaaaatgagaatttaaaa

SEQ ID NO: 410932 - DNA, 579 bp, Homo sapiens
ctgtctgcccgtggcctgtctgcccgtggcctgtctgcgcacagctattaaaagttcaataaacgtggtggcagcagctgaactggctaccacaggacgcagctggggtctggacgtgggcctgggggctggtggaaggcacgtgtgttgaggcgtgtactcagggcctgcctacttccccaggcctacggggacagatgtagctccccaggaaataccacaggcagaccccggccggcaagctgccccaagaagcagtgcgcctcccaaaatcagaagcagctaagctgacccccacctcatgtgaaagagccaggcaccagggagagggcacccacccagtctcctaatcataacagacattcacagcaacaccacgaaaaagaaactactgctctgacctggaaaaatgaaatttaaaacagaaaacacacaggttgtaactaaaaggcagacggaccaggtgcggtggttcatgcctgtaatcccaacaccttggaaggccgaggcaggcggatgacatgaggtcaggagttcaagaccagcctggccagcatggtgaaaccccatccctactaa

SEQ ID NO: 410933 - DNA, 1183 bp, Homo sapiens
gctttctctgatttcccctttccacaggtccaagttaactgccttgtctaggtcctcccatggccctctgaaggcctcctttcatagcaccatgtctgagtatactgtaataacacgcattgctctgtaatagcctgtttacttacctattgccaagtaatctatcaagtcttataaagggcggggctgcttttgttctagtcatttgtatctcttagtacccaatatagtgtttggcatatagaaaatacccaacaaggccagtcgcagtggctcatacctgtaatccgagcactttggtaggctgaggtgggcggatcacttgaggtcaggagtttgagaccagcctggccaacatggtgaaaccctgtctctactaaaaatacaaaaattagccaggcgtggtggcgggtgcctgtagtcccagctacttgggaggctgaggcaggagaatcacttgaactggggaggtggaggttgcagtgagctgagatcactccactgcactccagcctgggtgacagagtgagactccatcttaaaaaaaaaaaagactccatcttaaaaaaaaaaaaaaagaaaaaagaaagaaaatacccaataagtagttcctgaatgaatagatgagaatgctgtttagaaggttcatgaattggaaaccgtgattgctagggaggctttgagttgatggtattgtgttgaaccatgtgttacccaggatcaatttagattttacactttgttttctctgttcctttttatagtaattttctgtatgtggtgttttccccccatgagattgtataccatttctcagcgagaactgtgtgtaatgcttggtggctccctcatggtgccttgcatggaattggacttcgtttcagtggatctgatcccagttatgttaatgctcgatggagctaagtcttatctcgaagcagtccatgtcttcatcagctggccctgcctccatgccctgcacagaccatgccactctggagaggtagtttccctgtggcttattagtcttatgttccagtgtgctggccaagtatgagagacatcagtggtatgagagagtctctctcattcaaacttcgtaggttttgtagctgggactgaccagtgctgacaggaaatagaggcatttattaaaagccagagatttttcaagttgcaggaa

SEQ ID NO: 410934 - DNA, 338 bp, Homo sapiens
cactgcaaccactgcctcccgggctcaagcaattctcctgcctcagcctcccgagtagctgggattacaggggtgtgccaccatgcccggctaatttttgtatttttagcagagatggggtttcaccatgttggccaggctggtcttgaactcctaaccttaggtaatccacctgcctcggcctcccaaagtgctgggattacaggtgtgagccaccgtgcccgacctaactaacatcttctataaccatggaagagtcactgaaactaagaaattcactctagtacaataccattaactatactacacaatgaatttggatttcaccagtgtttcca

SEQ ID NO: 410935 - DNA, 343 bp, Homo sapiens
agcccctcccgctggagtcttctccgaggcgttcggtccggccgaggagcccctccccgctgggagtcttctccgaggcgttcgggtccggccccgatgggcgtctccttgggacaggcagcctccctcaggccgggcgtccccagacgcgccgcgatcaccgtgccccgctcccaccgtgcggatcaccccgagcctgagcgccggcgccccgggaccccctggccttgaccctgctcatctcgtccctgtctcgcccactccctactcatccacagtgcctagccctggcaccgagtgcgttctgagtactcaataaatagttaactaagtgaaaaaccta

SEQ ID NO: 410936 - DNA, 599 bp, Homo sapiens
accccctccatcactgtgaccctccctggtcttagaagataggaagcaaataaaggcagacccagtaatcactttggttttattgcttatgattgtctttcttctttttgttccttgagtgatctttttcatatcttcacctccttcaggacaccaggtaggaaatggttcactgggtagcttatggagccacaggtttcgtgaggagttagaagggtttatagcattactttaaccatattttcattcattccctatcagttagttgattacctgaaaaccaacccagactggttcaagcagaagaagaaaatgtattggcctatgtggttgaacaatctaggggtagattccggcctcaggtgaggctttacccagggctcagctgagatgccccaaaaccagtttttccagtggaaaaaaaaaaagacagcttccttgatgggccacccaaaggtctggaattgagtttagttgcccctgactgggttcccttggcccctgtgctcccctgaaacagttactgtctgagaggattggacaaattgagagattcagaagactcttgggaaagtagacagggtagttagtgaagctgg

SEQ ID NO: 410937 - DNA, 774 bp, Homo sapiens
atgaccccaacaccggcaggaggcatggcgggtcctgcccatgcatcccccactccatctttcccagtagaagaaactgctgctaatgagaggaatggcactgggggagggaggccagtgggtaatggcgggttgagactgcattttgcacagtttcactgcactttttctttggagatagtgaaggtgtcaatgtcagtcaaagctgggaagtgctgtgtagtaatgtctccccacatccctgctctttccaattctctcgagcagctcatccactgcctatgtgtcacacagactttcttctgtttaaatcagtgaacagatgtacattcctgtcacccaaggtgatatgccaggggagatgagaatttttttttttttttaggtatttctttataattaaacacagtgttcccagagatgggccagggacatccttggaaattttccacttacttacaagtgaggagagcaaattccccactgtctcagccactggaagagctactccgtccacatgcccattagccgacccctgcctcccctccgctggctgctgctggaggcaggtgcagttacactgaaggacgtggtcatgtcagtgggactcaggctcctgtatgggtctctgcgtgcgcacgtcctgctttgcaaacgccacagtgatgccctgcagaaaagctgtggcagaatccccttgatagtcccagcactcttcacatcactctcccatcaccagacaaccacatcagagcctgactgacgatgagatgc

SEQ ID NO: 410938 - DNA, 511 bp, Homo sapiens
actcctcacttccaaatcctcactatgctaatcctaaactattatgtcatgatttttacctaaacaagaccctgcatggaaagatcctctttatacaatctttcatttttttgtcctggctttaaaatgcaaagcccatatccttggaattccctctgtcttgggcaaagtgtgacagttggccaccctactccaaaatctcataattttcccaccttgcccctctagagactatcaatctctgttgaggtggttctctctttccagggtgagcaataaactccttgccagagctttccattgggggaggagggtttgaactactgccagagacaaacagatgtaaactagatgcaggagtttggaaattgagcagggtttgcagtctggaaaattgctccacaagagactgtcgttgaacgagtagtcctgagtgagtggtctaagagaacgtcagagtgaaagaaaatgcagcccacctgggtcagctgaaaaggtagagaataaaagg

SEQ ID NO: 410939 - DNA, 456 bp, Homo sapiens
atatattagttagctccttagttttattttcaaatttggtgattatgctgtgattgcttatccaaaatcaaagagttagtctgattattttcatctggacttagggaagtcaagacgtcttagcttactgtctttttatttggtcacccatgggtgctaaatgcttcttagtgcaagtgattagaaagtaaatatctggaccgagtgtggtggctcatgcctgtaattccagcactttgggaggccgaggacggcagatcactacctgaggtcagaagtttgagatcagcctggccaacatggcaaaacctcgtctctactaaaaatacaaaaattagccatcgtggtggcaaggcgcctgtaagtcccagctactcaggaggctgaggcgtgagaatcgctttatcctgggaggcagaggttgcctgagggatagcacgagactgtttaaaaaaa

SEQ ID NO: 410940 - DNA, 443 bp, Homo sapiens
ttacacagaacagattctagcagtgaatctaattgccacttcattttgaattgataagcgtaaacaatgctttgagatatctgctcaagcagttcataactgatgaaaatatgtgcagtttctattagcatcaaagtcgcaggtactgcgaatagtgtgatttgttacatttataattgaaggaaatgctaaatttcagtttgaggttagtgaagacaatagtgtagtttttctcctgttctaatttatgaccttcctgaatcctgttaatttgagggttccatttagtttaagaatctcagaatataggagagagcttctgttatttttggaaatgaggtgataatggaagtacctcatctgaggcttaaaactttaaagtggatacatagttttttgtttggagggttttgttttgccacagtagttttattaaaaaaaaa

SEQ ID NO: 410941 - DNA, 344 bp, Homo sapiens
actataaatcttgcttagttttatttgattctcaaaatgtggtccatggaatagcttcattagagtcacacaggatactctgtaaagtcaactctaacaggaacccaatcatactttcccgtacactgaagtttgagaaccataaccttattcagagtatctcatctcaattccatataaatgctcttgtaatatttgaagcaattactatgttctctttcctgagtcttctctagggaaaatatacctagctaactcaatgaataatcccttttctacactaataattttatataatggctcctctcattataaatttataaaatacagatataaaaaataaa

SEQ ID NO: 410942 - DNA, 455 bp, Homo sapiens
ccaacagatattctagcatataagaaatgtgatgctctctgtacattgaagagttggtctaatatttggcctggtggatacagaaattgcctgtctgctccgctctggttgaagaaaccagtccgactgtctctgaggctatggagcagtccatcaagaatgaaagccctcggctggcacgttggctcacacctgtaataccagcgctttgggaggctgaggcaggtggatcacttgaagtcacgaattcgacaccagcatggccaacatggtgaaaccctctctctacagaaaatagaaaaattagctgggcctagtgacgtgtgcctgtaatcccagctactcaggaggctgaggcaggagaatcacttgatcctgggaggcagagcttgcagtggggagctgagatcacaccactgccttccagcctgggcgacagagtgagactctctcca

SEQ ID NO: 410943 - DNA, 360 bp, Homo sapiens
cctgctcccctctttttagatgagtaaccattcattttcaatctgtaccccttttgaaagcatcctgaacctttgggactcctttgaaaaaacacctttcatttttcctttctcccccctcagttctctcttcactgataggcaattgtgtctccgtactacgggacactcccgtcagatgcatcctccaaactgggaagagtttaaaaccttaaactggtcagcttaggattgggctcaggggaagggaacccagaagcccaacatggcagctaaagggtagttttttttttttttttttttttttttttttttgccggttgggcttttggcctccctctccttgtgcaaactgataaa

SEQ ID NO: 410944 - DNA, 404 bp, Homo sapiens
aaccacaagcacagaggccctgcggcaggaacatgcactccacagagagctttgctgtggaggtcgtttatgtatttcactgctttttttaaaaaggagttgaagacggggcatggtggctcacacctgtaatcccaacactttgggaatctgaggcgggaggatcacttgagtccaggagtttgagaccagcctgggcaacacaagaccctgtctctacaaataatttttaaaaattagccaggcatggtagcacacacgtgtggtcccagctactcaagaggtggaggcaggaagatcacttgagcctgggatgtcaaggctgcagtgagctgtgattgtgccaccacactcccacactccagcctgggtaacagtgagaccatgtctaggaaaaaaaaaaa

SEQ ID NO: 410945 - DNA, 406 bp, Homo sapiens
cctccgacatggggattgagaatgctccggctatgaaaagcatggggtctgtctcaggacacagctcccacagccctaagtgggcaaatgccccaaagtgtcaagcatgagccacctctgaaggagcatttactatctcaagacctttgggcatgttgtcccttctacctggaatacccttccttcaaaactcagagccaaaagcaaaaagcgttcgctgatcgcagagggggagagggatgtgggagggcttggggcgcagaattagttgctacctcctctgggcgttcacaggccaaatttccttggtgtggcacctggcattctgtgattgtgcctgtttccctgtggtctggtcctgtgcctattggcccaattacactgggagtcatacagatctgcaaat

SEQ ID NO: 410946 - DNA, 496 bp, Homo sapiens
tcttagaagtgagaggcccagaacactctactttatgcaggaatagcagagatgactcatggttgggaagacactagaattcagccaggagaatatcattaaaagagggagaagggaaaacagactttttgtgtggtacaaaaacaaaaccctctgtatcattatgtgaacaacggtgcaaaaaagaggagacacagtttacccatgggtagctaactatgatagtgaaagttgccttgaaccttgttttagaaaaatggcaagtgtgggtctcactcttctagttcctgacttctctctctctctctctcgtttctctttttttttttttctctctctctctctctcacacacacacccatcttgggccaggtttgtaaagcctcatgggaaatggaacacggaagagtcttctgggaggttttaaaatttaattttagtcagatttagtaagatttcttcatacaaaacaaaacaaaaattctctaaaaaaaat

SEQ ID NO: 410947 - DNA, 297 bp, Homo sapiens
ttacaggtgtgagccaccgtgcccagccttgttgtattagtttttatacattttaattttaaagattccaatctaatgttttcttgattaaaattatggaaatatccaaattagatacagttagatgatggtagatgagattattgttatcagttaccattttaaatgctaagtattatggtaatcctttttagaaagaaatctttagaattagaattctagatggttcccaaatagctactagcattaatttttcattttcatctaataaagataggtagtaacgtcaaactatag

SEQ ID NO: 410948 - DNA, 354 bp, Homo sapiens
ctcatcacatatgtgcatcagagtgcagggatgcacataggaatcacaaatcacacacttgccatcacatttttcacacagtcttccgatagcaataccagtctgcttgcagcaaaagatcaaatcgggatgacgtttagccatagttcccaacgaagccagccaccggacgcttcaggccaatttttgtttatacttcagtgtatctgttattcatgtctctataaaagaaaacttaaaagaactcttgggttctactttatttcttccccatgtattcctttcatgtgttctataacaacagttgatgtaaaacaatttgtgtcaacaagaatcttaactgattaaaaggga

SEQ ID NO: 410949 - DNA, 637 bp, Homo sapiens
aggagactggataaacaaagtataatgtataatggaatatgttgtagcagttaaaataaataaagaaaagctacatgtatcattatagtctacgtagtatcaacttggataaacctcaaaagtcattagtagtgagcaaaaaaagcaggttgcagaaggatacatacaatatgataccagttatatacaatgtttatggttcaacttttccagtctggtttattgagctacaatttgcatacagtgaaattgactagtctttgtgtacagttttgtgagtctggcagaatgcatacctttaggtagacatcatcacaatcaagatataaaagggttccatcattccccaaaattgcacactgccctattgtagtcaagtcttacccccacctcacatctcctgtaatcatggagcacatggcattttgagtctgtcttcttccacttagcataatgcctttgagattcattcatgttgttgagtatctcaacagctttttttttaactgctgaatagtagtctactgtatggatgtaccaatttatccattctgtagttgaagtgcatttgacttgtttgtactttggggcaattataaataaactgaccataaatatttgtgaaccgaaaaaaaaa

SEQ ID NO: 410950 - DNA, 472 bp, Homo sapiens
cacagcggacagtgcgggcgcctccggtgtccagaggacaaagaagccccaccggccggggtgggggcgagggcggagtaggaaggagcccggccgcggaggggaggagggcgatgaagtcaccgcggggccgcctcacccagtcccgggggtgggggatccctcccgctccgcacggccccccgccggctcggccccgcaggtcgaggccccggcccgcactacccgctcgcaggaaagcggaccccgctgcggcccgggagtcccggaggtccgagttgcccgagtccccggggcccagagagggcgggggcgcctggctcacacagcaggacccacatccccgggccccacccacttcccacggcccccagctctggactcgcggggacagcgccgcggatggcctgggctcgggccccgccccgccgtccaaagtttggggacctcgacccaacttcgccaggcgccc

SEQ ID NO: 410951 - DNA, 439 bp, Homo sapiens
attattatcctcacattactcgttaaaaagctgaaataaaggcagtaaagtaatcgcttgaagccatgtgtttactaaggcttcagtccttatgttatctcagaatttggtatggcttaggtattattttgatcaagtttctcaaattttatgctacatgtatacgaggtgttagagttccacggggaaatggaatgtactagacgaagttttctttctcagctatttctcttctttttattatgaatattctgaaattttcatcatttccattttaagacttactttcgtctttttgtcctatatgtgaaatttctgtaccattttacagtttaccaaatgccatatatatgtagcagtttcatactcattctttttttttttttgatacagaatccagcctgggtaacaagagagaaactccatctccaaaaaaaaa

SEQ ID NO: 410952 - DNA, 452 bp, Homo sapiens
cagaatcaagaaatactctatttcaccagaggaatccttgcaaatacattttactccactatgcaaaatcctgtggaaccagttttttatacatatttttagctgaaagatcaaggaaatgtgtcacagttggggacctgtatcataattatctctgtaggttctacagcatccagcatgatgtccaaagtagcgagattggaaaatgccaaagcaattggggaaaaaaatactgttttctctgaaatgaagactcctcaagatcctgttgctggaatgagtattggactcttcggtctacttctacagtcaccagtacatctggcatacactatgatgcccaacagtaggaagatgaaagaaatgtagatgttggcatttctaaaagagatgttgtatcttttttcctacttaatagactattaggctataaatctcaatcttggccagca

SEQ ID NO: 410953 - DNA, 408 bp, Homo sapiens
agtacagcatccagtagtatttcacaccggttacactagacccaattcactttagtcatcatttaatttaatttaccactttttactttgttctttattgatgctctagatctaatgactatcaatcttgtattttcttcttggtttctcctgataggaaaatgccaaagcaattggggaaaaaaatactgttttctctgaaatgaagactcctcaagatcctgttgctggaatgagtattggactcttcggtctacttctacagtcaccagtacatctggcatacactatgatgcccaacagtaggaagatgaaagaaatgtagatgttggcatttctaaaagagatgttgtatcttttttcctacttaatagactattaggctataaatctcaatcttggccagca

SEQ ID NO: 410954 - DNA, 391 bp, Homo sapiens
cctctttctgaattactaaaccactgcctgagtttacttgtactaagcccctactgtgacagacccaatacgaagtactttacataaatgttcttccttacacaaaatgcagtatccggaaaacaggacttcaagtaatggcagcatgaaaacgatagtgaatgcactctacaaaaaagaaggggtaatcgcagcaactttgggaggccgaaggcaggtggatcacaaggtcaagagatatagatcatcctggtcaacatggtgaaaccccgtgcctactaaaaatacaaaaattagctggacatggtggtgcgcatctgtagtcccagctaccggagaggctgaggcaggacaatcacttgaagccaggaggcagaggttacagtgagcc

SEQ ID NO: 410955 - DNA, 572 bp, Homo sapiens
tgaactatagaaatagctacatgtcccttttcatgttgtttctttgccaggtaaactctttacattcttcttttcctgtttaattctcaccaaccaaggttcaccgtaggcaacatctattccttaaagctctcacccaccctcccagcatgactgaggcctcttgactgtgctcacacagcaactgtatcatgttcaataaatgaccttctgtgggatggtgtaatgtgaatagacacagatgatcaacttaacagtaattcttcaccttgctgttcccctaatgccaagttaaattagaatgttacagacatacattgtattttcaaggttatattagacatattgtttcatcaggtacataaactaatcatcttcaaaagtttctctggtaaggtgtacacacgattaaaagaaatgtttggacaacattcaccattgctataatttgttcaggcaacttctaaattttcttttctaattccttgctttgtattgcaccactaatttacctaattttactccaatactttagtttattgagctcactgtctttatcacaccccatccta

SEQ ID NO: 410956 - DNA, 486 bp, Homo sapiens
acctatgtttgaaaatggaattacagactttaaaggttatttaaagatttaaacaacttaaagattatttcatgtagctatcttatttaatagatgaagtccagggagatgaaatgacttattcaaggtagccaggactagaaacatgtcgtttaccctagatccaatgcaatgaagtttagagagttctttcctctttttccagctgcacttgctgtcgttatattagttttaacaatttgatatatcatttaacctggactgttccttccagccatgtaaattagttatgtatgacatcaaatagtccatccttccttcttagtgtgtgttccaaattcagtgcaaagctggaactaggagcttcttccaatacaattgagtggcaactgaggtcttccagcatttctaagaatttcagttctaaaatgaagtcccagcattttgggatgctgaggtggacggattgctcaagcccaggagttt

SEQ ID NO: 410957 - DNA, 681 bp, Homo sapiens
gggctcaagcaatctgcttgcctcagcctcaaagtgctgggattacagatgtgagccactgcgcccagcctccaatatctttttgtatattctttcctttcaaaactttttttatgttctatcacttatacttgcatcttcagtagtatcatattgtctccattgttttgatttatgctccacctcctcttgcacagtccttaataattattgtgaaaatatatatgcttaagaaaataattgtaatggtagagaatggtgagaagtaaaataaaattacctcattcctttgcaatatattcttctcagaagtagccatgtataaactctgtgtctgcataaactctatcataagtgttgttctgtaacttttacacataaagtacaattattccatgtcagtatctgacaatttacctcatttaaaaaattgctacttagtattttactggttagtaggatattatcccttttttgttaaccccaccgaccagcccccacacacatgcacacacattcataaagtgtagaaaggtaagcactaaattatcaaatgtggtcccttctgaggactaagattggtgcaggaattttttttaatttcatgcacttttgatctttggagttgttgtaatgaataataaatattaaatgtataattggaaatttttaaaaagtaac

SEQ ID NO: 410958 - DNA, 412 bp, Homo sapiens
gcccaagacgctgggccactgggacccgagcgcgcgaccccagccggaattcggagctaaggctgccgcgctccggcaaaacgcgcttgatgaggtcgttaaagatttccccctctggaaaatcgccagggaaaagtggtgaaaaacgaagccgggagggccctagtctcgggagtctaggaggagcccaacccccggacctaatgccgcagggagaaaagacagagcagcgagcgcaaataccatcctagctccaataaaagggaacgacttttaccgcaggaagaacctaggcctggaagccacgcgagatctgggggtcgggatcacgttgcgttgcctagcgacagcagggacgctcgtgggaccccaggctaaaccccgctgtagccttaaatctcctaccatggag

SEQ ID NO: 410959 - DNA, 362 bp, Homo sapiens
tggagaagttagggctggtaccaccatggaattaggtggagaggaagagagaatgtgtactcatcaagaaaaatggatagtccagcatgcagacatggaaatgccctcttcaccgtccttcctttcctaagaaattctgggttctaggccaggtgcagtggctcacacctgcaatctcagcactctgaggccaaggcatgtgggacacttgaggtcaggagttcaagaccaggctgggcaacatggcaagaccccatctctacaaaaaaattaaaaaattagccaggcgaggtagtgcacacctgtagtcccagctgctaggaagactgaggtgggaagatgacttgagcccaggagtttga

SEQ ID NO: 410960 - DNA, 484 bp, Homo sapiens
gcacgagactccatctctatcaaaatataaaaaatagccagatgtggtggcaccatgcctgtggtttcagctacttgggagggtgaggtgggaggatcgcttgagcccagaaggcagtggcttgcagtgagcctagatcgagccactgtacttcagtctgggtgacagagtgagaccccatctcgaaagaagaaaatgtgttataagtatagagagctttgcattcaacggaaaattcactttaaacaataacccaatttacaaaaactgtgtatttagaaaaaaaatttttttaagttgaaatcaactgattggaaaaaaaatgctacatatcaaaacttacaggaaggtgaggaacctgaagctcagctatgtgctaagtggcttgcccaaagtcatataaggggtaaaggagggccagaactagagtgctgtctgtctccagagtgttcagaataaatgtatgtcaatgtccaaaaaaaaa

SEQ ID NO: 410961 - DNA, 702 bp, Homo sapiens
agtagggaaaaggaaggttttagagttcacctccactccttcccctggctaacactctttacactcttctgccttcccttgagataattaaaatagactgtacaccggccctagtcggtgcccattccccctaactcttcactcaactacgtgtgtagtccgagggagtgaggaccccgggtccaagagctcaatcccggccccgccccgtcggcccaggccccggggctgggaggagaggatgccttcggaggcgcagaatccgaaaagatgtggttggagctggaagctgttatcctcagcaaactaatgcaggaggagaaaaccaaatactgcaagttctcacttataagtgggaactgaatgatgagaacatttggacatgaagctgggcagagaaatcgagctgcaaaatgacctacagatattacagttttattcttggaaaatggaggttgtctattagtgtgatggtaacaaccaactaataaaatttggagactagactgcttgtcatgtctggggttcactggaaatcaatgattcactggaacaattctcctgtcaaaaaaaatgtgaggtttgtaacttgccctaagtataacaagggatatattttaacaaaggatgtattttttcttaagaagcaaccatttctcagcttatacataatagcaataataaagtctttgaccctattaa

SEQ ID NO: 410962 - DNA, 572 bp, Homo sapiens
gtggttggagctggaagctgttatcctcagcaaactaatgcaggagaaaaccaaatactgcaagttctcacttataagtgggaactgaatgatgagaacatttggacatgatttttctgcatccctttaagtctatgtgtgtgatttcatgtgagatggatttcttgaagacagcttgccaatgggtcttggaatttaatcgaccttactaccctgtgccatttaattggggcatttggcctgtttaccttcaagaagctgggcagagaaatcgagctgcaaaatgacctacagatattacagttttattcttggaaaatggaggttgtctattagtgtgatggtaacaaccaactaataaaatttggagactagactgcttgtcatgtctggggttcactggaaatcaatgattcactggaacaattctcctgtcaaaaaaaatgtgaggtttgtaacttgccctaagtataacaagggatatattttaacaaaggatgtattttttcttaagaagcaaccatttctcagcttatacataatagcaataataaagtctttgaccctattaa

SEQ ID NO: 410963 - DNA, 480 bp, Homo sapiens
tagcaaatcaagtttcatcttatatacttttaatttgtaatataccaaagtcatttttgcaatactatattatgtactttcaagtatataattactgcttctttaaatacaaatgatcaagatattcagattattatgagttttttttggttatcatctattgctgctgcacaaattaccagatttcataattggtttaaataagcctccaatttgtttatatttattaacatgtatgattttgtgcatgtagaataagcttggcatagaaatggcctaaatgctcctgtagctcttcattcctttgtcgttctcactctccatgccagtatgtctcatttctagatcccatagaactttcaattgaaagtaataaccaaggcaactcactttccatgagtaatacaccacacttctagaaatcagcctatattactgtcacactggggattaagtaaaaaaaagagaaagaaggatggg

SEQ ID NO: 410964 - DNA, 518 bp, Homo sapiens
gcagagatggtagcattggatacatactacttacattgcattttttctatcacctatgtgttccatgtcagtacaaataaatctgccttgggattttttttattattattgttattgggatttttgtttgtttttgttttgcctcgttgtttttaagggctggagagttttctattatttgtttaaccatagttaaccagtcccctgttaataaacatcactgctttgaactcagtggttctttacctgggcggattttgccacccgggatcatttggcaatatctgaagacagaaaagggtggctgggcacggaggttcacgccttgggaggccgaggcaggcagatcactcaaggtcaggagttcaaaaccagcctggccaacatggtgaaaccctgtctctactgaaaatacaaaaattacccaggcatggtggtgcacgcctgtagtcccagctactcgggaagctgaggcaggggaatcacttgaacctgggagatggaggttgtagtgagcc

SEQ ID NO: 410965 - DNA, 527 bp, Homo sapiens
aacacaatctagctgatgcctgcaatcccagccctttggaaagcgaggtgggtggattgcttgaagctacgagtttgacactagcctgggcaacagggtacaaccgtgtctctacaaaaaaaaaaaaaaaaattaatggggcatggtgttacacaactggagtcccaagttctctggaggatgaggggagaggataatttgaacccaggaggtctaatctacagggaactgtgagggtgccactgtattcagcctgggtgacagagcaagaccctgtctcaaaaaaatacaaaagttcagagcaaattaagcatagactgtgatcattaaatattccatacattggtaatgagtaatgttgtacactattagaccatggttatttatgaggataaaacctcaaaacctttttgaaccacaagttcttcaatgcagctagcacataatcataaaatgtaatacaattctaataattgactaaccccttgaattgataaacgatgtacagactaacatacaaaaaaaaa

SEQ ID NO: 410966 - DNA, 386 bp, Homo sapiens
gctctacaaaaaataaaataaaatgaaataaaatttaaaaattagctgggtttggtggtgtgtgcctgtagtcccagctactgggaggctgaggtgagaggatcactggagcccaggaggtgaaggctgcagtgggctaaaaacaaccagaacaaccccccaaccccctccccgcaaaacactataaagaatagcaacacaaggttcaatgtaaactttgatatggtgttttacctctgaggagaggcttattgttaatattctttagccgtgtaaggggttcacagatgttcatacttttgttctttataccttatatgtattctataaatattgtttctactcaatagttaataaaaacataatttaaaagttctgtgaatgtt

SEQ ID NO: 410967 - DNA, 484 bp, Homo sapiens
atggcacgaacaaagcaaacagctcgcaagtccaccggcggcaaagcgccgcgcaagcagctggccaccaaggcggctcgcaagagcgctccggccaccggtggcgtcaagaagccccaccgctaccgccccggcaccgtggccctgcgcgagatccgccgctaccagaagtcgaccgagctgctaatccggaagctaccttttcagcgcttggtacgggagatcgcacaggactttaagaccgatctgcgcttccagagctcggcggtgatggcgctgcaggaggcttgcgaggcctacctggtggggctatttgaggataccaacctgtgcgccattcacgccaaacgcgtcactattatgcctaaagacatccagcttgcgcgccgcatccgaggggagagggcataaatattcctatcagcccaagaagtctgtccaaccccaaaaggctcttttcagagcccctcaattgtcaccaaaa

SEQ ID NO: 410968 - DNA, 677 bp, Homo sapiens
gtctcccaaagtgctggggttacaagcatgagctactgtttccagccatgtgtttaattttaaaaattgaagaaaaaagacactatgaggaaatgacatgtaaaacacaaatcttttgaggcaaatgtgaagtggcacctattgctcagtattgcccaaaactgtgggacatgatcaacagagagaatggaaaacctagtcatgatagttaaatttgaaattaaccatcttctgaccctagttttttattgttgttgttgcttttaaatgtaaatataatctggatttccagttattactgatatcttcagcagtcacaactggtttcctatgccagtgttaatgaaatcttttcttggccagttcttttaaaaaaacgtaacaggccaggtgcagtagctcacatctgtaatcctagcactttgggaagctgaggtgggcagatcacctgaggttgggagttcgagaccagcctgaccaacatggagaatcgccgtctctactaaaaatacaaaattagccgggtgtggtggcgcatgtctgtaatcccagctactcgagaggctgaggcaggagaatcgcttgaacccgggaggcggaggttgcggtgagcctagatcacgccattgcactccagcctgaacaacaagagcgaaactccatctcaaaacaaaacc

SEQ ID NO: 410969 - DNA, 644 bp, Homo sapiens
gcatgagaatacaaagaaccaggaaaagacaaagcaattttgacaaagaagagtgggggctaccagcactgcctgatttcaaatctcatattaaattagaagcagttaccaagacggtcggtcacacagaaaagtgacacagttagagtccacaaacagacccacgtatatggacaaccgatttgcgacaaagatgcaaagacaattcagtggagaaaagacagtctttgcaacaaatgtttccggaacaactggttctccatgtgcaaaaaaaagagaacttcaatctgcagcttgtaccatataccaaaaaatcagaaaggatcatagccctaaatgtaaaacctaaaaccatctatcttcaatgaggaaacccttgtgaccctggtttaagcaaagatttcttagatatgacaacaagagtactctggaaaagatctagctgataaactggactgcatgaaaattaacaattctactcctcggaaaacactgttaagagggctgaaaagacaaggcacagacttaaagaaagtatttacaaaccgtatctctgattaaggacttgtattcagaatatattagaaaaaggttacaggctgggcatggtgcctcatgcctataatcctaatgctttgggaggc

SEQ ID NO: 410970 - DNA, 285 bp, Homo sapiens
taatttacctagacatttaatgtttatatttttacactttaaaaacatacataagttgggccgggtgtggtggctcacacctgtaatcccagcactttgggaggccgaggcaggcagatcacttgaggtcaggagtttgagaacagactggccaacatggcgaaaacccatctctactaaaaatacaaaaattacccgggaatggtggcacaggcctgtgatcctggctactcaggaggctgaggcaggagaattgcttgaacacgggaggcagaggttgcagtg

SEQ ID NO: 410971 - DNA, 434 bp, Homo sapiens
aacattatcctttctagtcccaaatttattttgctgcttcaggggtttgaaaatttaaaaatcccacagaaatatgaactaccatcagagaatactataaacacctctacgcaaataaactagaaaatctagaagaaatggataaattccttgacacatacaccctcccaggactaaaccaggaagaagttgaatctctgaatagaccaataacaggctctgaaattgaggcaataatcaatagcttaccaaccaaaaaaagtccaggaccagatggattcacagccgaattccaccagaggtacaaggaggagctggtaccattccttctgaaactattccaatcaatagaaaaagagggaatcctccctaactcattttatgaggccagcatcatcctgataccaaagctgggcagagacacaacaaaaaaa

SEQ ID NO: 410972 - DNA, 327 bp, Homo sapiens
gcttagttgacagaggctgatagaatgggtgaagatagttgggatataggctcatgcctataatcccagctgcttgggaggcttaggcaggaggatcccttgaggccaagagttcaagaccagctgagcaacatagcaagacccagccccacacccatctctaaaagaataaaaaattagctgggcgtagtggcttgtgcctgtggtcctaactacttgggagattgaagcaggaggatcgcctgagctgaggaatttgaggttgtaataagctatgatcatgccactgctctccagcctgggcaacagagtgagaccgtatttctc

SEQ ID NO: 410973 - DNA, 523 bp, Homo sapiens
gttttttttttaatacatatagtgtatatatataaatatatatatacacacacacacactgtatgtattcctatgtagattaaatattttgatttacctctttctagtaaagcaaagttcattctgaaatccaaaatattcacttactagagcagaaaaaaattagctgtgcatttatgctgatcacagtgtagataattaatctttaagaaagtaggtttttatgtttatagttgataaagtgttagtggcaagaactttttctgttattgaatattatcatcagattactcgtgctttccattttattcctttaaaaaaatccaacttttgtaagccaccactattttctgaagattttatttctctctaagctaagaaaggatgtcaagaataaaccattttctccttttaaataaaaatgcattcactatagatattcatttgaaatctcaaacatacctgaattaagtatactcagttttgtgagtgaaaattaattattatttaaaacaaaacaaaa

SEQ ID NO: 410974 - DNA, 456 bp, Homo sapiens
gcagggtgtggtggctcacacctataatcctagcatttttgggaggtggactcagatggatgacttgaagtcaggagtttgaggtcagcttggccaacatggcaaaaccttgtctgtactaaaaatacaaaaattagccaggtgtggtggcgcatgcatgtaatcccagcaactccagaggctgagatgggagagtcccttgaatccaggaggcagacactgcagtgagctgagatcatgctactgcactctgtcctgggagatggagcgagacactgtctcaaaaacattatgagatttttctcaactttttgtgttgttgttcatcacctatcatcgctaatgtaagtgcattttatatgtagcccaagacaattcttccagtgtggcccagggaagccacaagattggacacccctgcagtttaaatgaacctttaaaatgaaaaaaaaaaaa

SEQ ID NO: 410975 - DNA, 628 bp, Homo sapiens
aatatcactgtattcataacttattttattacattctctaatattagattgattagctctattatcattttttactataaaagtaatacattctcatatagtagttcagaaaatacagaaaaacccaaagtgaggaaacaacaactgtaaacattttactccagatctttttggttgggtacggtggctcatgcctgtaatctcagcactttgggaggccgaggcagaaggatcacttgagcccaggagtgtgcgaccagcctgggcaacataatgagagctcatctttactaaaaataaattagccgggtctggtagtatgcacctgtagtcccagctacaggtccatgccaccacctgagacgggagcatagcttgaacccaggaggtcgaggctgcagtgatccgtgtttgcaccaccacattccaggctgagtgacagagtgagtccctgtctcacacacacacacacaatatatatatgtatatctccatccctcaaggcatatgcatatattcatatgtgttattttacccaccataacagaataacagtttgtaatgtaatatttttactcattatcatcaaataaagttctgtcatcactttttattgaagcatgtatca

SEQ ID NO: 410976 - DNA, 656 bp, Homo sapiens
tgggtctctaaatgttgaaatatcatagttacatacaaatgaacacagatgtttttcaaaatgattatcttaatgattaaacaatttagaagcatactgttctcttgccaaatcaatacttttcatctgtatttattatacaagggagacaattacaatttaattgaagagagaaatcacatttagcaggggtttatgcaactgtgtttcactccccacgatgaattagattattaattatggcaactgatcaagtatttcttctctattgctttctgcaaaataaagtgttgggctagcatatattttaaccactactgaaatagtatgaatttgtcttgaaaattcagcaagtcccatgagaggatggtttaaaacctccattcttttgatcttattctaatatgtatttgttttgttggctattatataaattgagtaaatacattccaaaatattttcatgatttttttctttcaaatgaaggaaacagaagaggtagaaaatatggataaaaatattaaataaaaactggtcagttaatgaaatgtattcctgtccaatgaaccaaagttttacctaatttttaaccagtattttatcctgaacagaacctgacatttaagaaaactaacaaacaaacaaaaacctgactt

SEQ ID NO: 410977 - DNA, 401 bp, Homo sapiens
aagccacaccatgatcatttgttgtttctcagtgacgatttaaagctttctgatgacaaaatacagaagtcccttctagggtgctttccaatcaggagttgacgagtggcttgatgaaggcaagaaatctgggtgtgggagccaacttaggctgcttggccctaaccactctaactaccacctccttccagccctccacctcccgggccagggtcaagtccaaacctgccatgccctcaggatgaccctgagatgtgtcatcagtgcagtgcagtgacaacttgttctagtttgcctgggaccatcctctggtttaaaactgaaagtcccggtcaggtgcaggagcactttgggaggcccatgcaggaggactgcttgagcccaggagttcaagaccagcc

SEQ ID NO: 410978 - DNA, 398 bp, Homo sapiens
taactctgagaacaagaaaatattttaaaagcataaaaactctggaaatgtgtaatgggtgtgtacgtgtctctatatgcctatgcaagcacacgtgtgtgtgtatatatacatatattacatatatacacacacaactggggatgtgtctatgtctatatgtgtttttgtatgtggttaattgcatgagcttcagtgccagacaaacccatacgtaaaccatggataactcatttaacctctataaacctcagttttcttctccatacaatgggggttaataatgcctatttcacaagattgttgtatggtttcattgaaataacatatgtacaatgcctaacacagctcataggacatagaaagcagtctataaaaggaagttgctctcagtgttg

SEQ ID NO: 410979 - DNA, 286 bp, Homo sapiens
ttcgcagtatgtacagatgtataatgtgtgtacactgatactgcccttctgggaatttatagacagatttgcttacaaatatgagaaattaaataataccaagatagtcactacaacattatttgcaaatgacaatagattggaagtaagtatctattaacagggatagtagaataagttatggttcactcacacaatgcaacagcctttacaaagaataaagagctctggccgggtgcggtggcttacgcctgtaatcctagcattttgggaggctgaggagggc

SEQ ID NO: 410980 - DNA, 381 bp, Homo sapiens
gtcctcatttgactgaggaccaaattattccaaagcttaactccctatctcccacggcagtctcctagagtgcctaccttgtgccaagtaccctagaggtgccataagagcatcctagactcgaaggtatgaggtcaaataaagctgattttttcaactgcccatatttacatcaccttataaagaggtgccatgctgcctagatctcttatctctacagactcagcagcaaaaatatgcccaggctgaaggacagatatcacatgttcttactttatttgaactcatggagatagagaatagaaggatggttaccagaggctgggaagggtagtgggaaggtggggggaggtggggatggtgaatgcatacaaaaaaaaa

SEQ ID NO: 410981 - DNA, 224 bp, Homo sapiens
gtgcctggcaggtagtaagtgctcgatacattttagttacaatttctttgtttccaggtaagggaggagagaatttagagccttgagcgcatttgacctctacagcctcagtgaaaacgaagccaagtttctctgttgtgtcagggattagggcttggagaaaataggcaagatctcaagaagcccctgtcaggcatggaggaaatacactgggcagaaagctg

SEQ ID NO: 410982 - DNA, 858 bp, Homo sapiens
aagatggacctgctcttatactgttgattactttcagtattaatatactattccccaattattttttgattggtatgtattaatgggtaattgaataatgaaaataagccaggtatttttgtgccggaagtttactagattgcatgttaccaaataccctgctcttcctctaattcccttcccccatctgactctattatcaactaaatgcattccaggcaaacagatggacactcacagcccttcccagccccacctccaagtagtatgcaaatggcactgagatttagcaaaaacgcggcgtctttgaaagttaacagacactaaggtagcagtgcctgtgtgttggagctcagttaggagttgaagttttctgcacctgtgataacaagcccaccagccacatgcatttcttcttcctgccactgtgactcggtggctgtagagccacatggcatttgtcagccaatctgtttcaagtcttttctttccaccaatagctttcttacagattttcttggctaaatgaggccattacctagattgtcccttcagtaggagcctgaatccttcgcttaccaggctgagagctatttgccatgataatgctgattctctcactcctcatgcagaatgtgcacctgcagccctttgatgcgttttgatttgggggcgatttttcaggctttgattagcaggctgcttgcaatgcagaagatcacagttcctttctggggcagcagcaaccagagcctcttcctgtgtcctgtgtgtctggtatgtttacaccttgctctgagtttttctcttgttttctttttttaattaagtttacattttagtttctttgacatcttg

SEQ ID NO: 410983 - DNA, 390 bp, Homo sapiens
atgatctatctaccaacaggagatggtgatatcaatatcacttctaaatgcatgcttctagttcaaaaagatctcaagacttgaaggaaatgaaaggtggggtacccagatataagcagtcctttcctgcaccaacatcctgtgattctatgagaagtacaactatggagagatggagcagcacactggtttagagtgccagctccagaatcagatgtgggtgcaaattcaccactttctagctgtatgactttggatttgtaaatgaatctttcagagcctcagtctctccatctgtcaaatgaagataataggggtgattgtgaggactaaatgacagggtgccttaaacatattaactattcaataaaagttaattcctctatatta

SEQ ID NO: 410984 - DNA, 314 bp, Homo sapiens
ggaagacttgatttatcccaaatcaccaactctacctaatgtccaaggctgccccttcttcctgcctgaaagccgaccagcccagagggaagggttttcactgcaggagatcaatttccccacccctcattgtctcttgacctacggtgagagtaagatctcagctgagcctgggcacctgttgctgagagacgaagattcacacaccaaaatgatttccaactgactaatgtatgtcagcaaaaacctcaagaacatatgtagatgtggattcttggagtattttataaagtagaaagagtataattttaaat

SEQ ID NO: 410985 - DNA, 179 bp, Homo sapiens
ttcccacttgtcgaaagaactcttattcatccgccagcaccccaatcaatgccccttcccagggcattcatcatcagctggtagacactggtgggtgctgtggattgtttacagccagtgtcctttctgattggtcagtgactgtgacaaacaggttattaaagatttaaactctcgcc

SEQ ID NO: 410986 - DNA, 446 bp, Homo sapiens
gcttaaaataaatctccatggtttacaatgcaaatggctgttgcaaggtgaagaaacaaagagaatatcattctgaaggcaacaaagagcattgcaatacctgataaaattctgacttctgcttcatttcctgttcttgagctggctggatttcgagctgagcatcggtaaattccaatgtcccccggttggagtcggctgatctgcaatgctccagagggcaagaccaccactcgggagtcacctgggattggagtcaggtcttgttggttcttctgccagtggattgttggcatgggctccccaatgacttcacacttgagtagcactgtgtctcccatgaaggctgtgacagattctgtctgtgaaaggaacctcagtggtcctaggagaaaaacaaagaaggaagaataagtcttccaaataaagcacaataatcgccaata

SEQ ID NO: 410987 - DNA, 511 bp, Homo sapiens
agtgcctacttaggagactgcttgcatactgaatgaaacgaaggaagaatgaatgaataatttgggaccccacctcccaacacacttccacatatcgaaatgcacacggaatgaggtacatcttctaaggagagtggcattgaagagtaatcaaaacaacaggatattcacaggaggactggaataaaacgaaatttccagtgaaaaagattactcaaaatatttattcaatacactctgaaattagaaactaagcaaatgtcttttggagatcccagttccctcacattccccacagatgaagatgagccaaacagaagtccaaaacttaaacattacaaaacaaataataaaataagacactgtgactgaaaatcagcacaaacaataaacggcagaaatatatcccccaaaacttcagaggcagagctcatttgattaaaaatttaaaattattacatttaaaatgtttaaggacatgatagatggaattaaaaacattatcaacaaa

SEQ ID NO: 410988 - DNA, 336 bp, Homo sapiens
agtgatgactcgatagcccagggaaggaagaactcactgtacaaaacaagactgagcatggaaaacaagaggactgcacagtcaaccaccaaagtgatttgaaatcaggtgcgttttgtttctttgactatataaatgaaaacattttcaccaagataaaaactgaaactaaagatgaatgttgcaggacaatggaaagagactcttcctgtcagtcctcaggcccctgctatgtgtatgtgctcaatgaatgtctttaggacaggggcgggaaaaacagagggtagaagatagaacatttgaaaaataataaagaagtacacagaataaaccaaa

SEQ ID NO: 410989 - DNA, 285 bp, Homo sapiens
actcctgtaatagcatctagcagacaaagagctgggagaatgacaggggcatgaacgagaagagccagcacttgcacagactgaatgagctcctgggagctggagtgagtgttctgtgcactttgagaaacagcacagatcattcagcttagtggtcatgatccagtcaacaaagaaactctctttattctcctcccccctacccccgagacctcacagatcccacatggattttgaaagcttttatctgccaaatacccgaatctgttatgttataatgtaatg

SEQ ID NO: 410990 - DNA, 493 bp, Homo sapiens
tggctttagattggagagtgacctaatttaaaaccggttctgagaaaaaacttcatgtgaccttgaacaatttattttaccatttttttgtttcttcacatagaagataaaatagaagataaaattattgaattggatctgtcactgcccagcaataatgcacattagacatggattttgtagaaacactatagtagatgatgcctaaaccatctttcaattctaagaggttgtcacatgcatctggaagagcctgagaatgcttttgagttatacgttgagcttgacaccaaatactgaccaacttggtaacatcccctctttccttacctccattccttttcaatacatatgtttctatgatatattgtatgtttttatgatataattgctaggcctcaaaattttgaatcctactctaagacatgtgaggtgtgactgatgcttagaaaattatgctgataaattataaaaacatcataaaaccaggatt

SEQ ID NO: 410991 - DNA, 427 bp, Homo sapiens
ctctggtcctcttgttacttaggtgtggaaagttagggttttcctttcgatttagttctaggaagtcagcgtgaaatggccttaggttccctgcctgcagactctattctcctacctcagttgggctaggtgaaagggaagagttgatcagaatgggaggatcattatgtaaagtatggagcttagttaataatagtgtaccaatgtcatgccctcagatttaaaaaaaattttttaattttttattcttttgccacctccttgtcgctggcagtgccccccagttatgcacaagcacaagctctgggtctgcagtctgaacccccggccaggccacgggtgtcttatcaacaatagaggaaacgaacagaactttgtagtatttttgcaacttttctgtaaaccaaaataaaaagtttactttaaa

SEQ ID NO: 410992 - DNA, 393 bp, Homo sapiens
ccttattttgtctctgttcatgtttatagaatatgaaatactcagtaaggcagacttagtacatatatgaagtctgtgtaatctcagggcttcaggaagactctacctgttctcccatacaacaaattctgccactcagctgctgcaggactgccttccacatatacatggcttttaatcttggtgccatcatgtaagaagtgcctttcacctctcaccatgattctgaggcctccccagagatgtggaactaagatgcagcaacaaggtatcatcttggaagcagagacagggccttcaccagacaccaaacccaaagatcccttcatcttggactttcagcctccagaactgtgagaaataaattcctattcttttaaaattacccagtct

SEQ ID NO: 410993 - DNA, 431 bp, Homo sapiens
tcttcaaataactgcaaccccagctgaaagcttgactgttgttgagagaccctaagccagaaccacagagctgagccacttctggatcactagacttctgaaacagactttgcttctccatgaccacgtatttcaacactcaatatgtcctagctccctctctgctactgtgtccacaaccaagcttaaatcataaactaaataagctgaggatgttctgaatctgatatgagaagaaaatactattggtcctgtggtcatcagaaattataacagaattggagaagattgctgccatttggtgcccagattgcttcaaaaaattgtaggagactgccatccagattattcctcagaagctataaaaccttttgtaatattggaagttgacaagccaagcgcattaaatgaaaactgtcaaaaatcctgct

SEQ ID NO: 410994 - DNA, 446 bp, Homo sapiens
ggccaaggcaggaggactgcttgaggccaggagtttgggaccagcctggacaacatagtaagacccgtctctacaaaaataaaaaaattccacacacaaaaactacagcaacaatagagaaatatgatgagccccagctcaacagggcaagtcagcaatggaagagaccaaagccttggggagcctggatggagacagcaagagaaggctccgggtccctgatggacaacggctgcacctgagccaggtgtgctcagacaggccttcagagaaaagacaggttccctaagaaggaaggaattctgcctccacactgcctttgaattgggactcacgccgcaccgccagcagcatctcttgctagaatttccagactgccctgcaaatttcagacttgccagtctcgattcttaaaataaatctctccctctctcaaaaaaaaaaaa

SEQ ID NO: 410995 - DNA, 588 bp, Homo sapiens
tacaaatagctccctaccattttatcacgtgtagatttgtgtaaccatcactgcagccaagatagagaactatcatcatgatctccctcatgctacctttttgtagccatacctactcccaaccaactctaaccctaggaaccactaatctgttcctcatcgctatattttgtcattatgagaatgttatataaatggaattacataatacacaacctttgagattagcttttttcattcatcacaatgctcttgagagccatccaagttgagagatagatatatatatatatatgatcagtagttaattccttttttattgccaaatagtattccatggtattgatgtgccacgtggtttaactggtattgatgtgccatgtggtttaaccatgtacctattgaaggatattttagttgtttccagtttggtactattacaaataaaactgttgttccttaatttcttaaaaaaaaaaaaaaaaaacacaaacttggcacattgcaagaaaacggacagcaagattaacagtgaactcaatttttatttccaatttcttcaaaattttatacgctaactatgtgtgt

SEQ ID NO: 410996 - DNA, 387 bp, Homo sapiens
acagtagtcatttaaagaggagagagaaagggaggaaaggcagccatcaggtggcgcactgagtccacaccccaaaaggcaaagggctcaccaggaccttaaggacctctgctgctgctgctgctgcttcaggtacctttatcacaacaaatatcctgaccctggggcatagacgggacaatatccatgattccccagtggcataacaaaggggttagtttaaacctgacataggctagagatccttaaaccctatgaaggaactattgccatggaggaggcccctaactctgatgacactgaactgagcctctctggaggaaaaaaaattgtaactgtcccattagagaaagtaccccttttccttgaagtatatccactgaccaa

SEQ ID NO: 410997 - DNA, 853 bp, Homo sapiens
ttctaagccgcccaaagcggggttgcgccggggcctccggggccgaggtgggcctgctcattggaagatcgcatcgcagccatgagcagtaaggatttcttcgcgtgtggacactctggccattgggctcggggatgccctagaggaggagctggagggcgaagaggtggaggccatggcagaggttctcaatgtggttccaccaccctatcttacacctgttactgctgtggtgagtccggtcgtaatgctaagaactgtgtccttctcggaaacatctgctacaactgtgggagaagcggccacatcgccaaagactgtaaggatcctaaacgagagagacgccaacactgttatacctgcggcagactaggacatctggctcgtgactgtgatcgtcagaaagagcagaaatgctactcttgcggcaaacttgggcacattcagaaagactgcgcccaggtcaagtgttaccgatgcggcgagattggccacgtggccatcaattgcagcaaggcgaggccaggtcaactgctaccgctgcggcaaatcccgacatctagccaaggaatgtcccagtgaggttaccacttaaattttcccccccaccccccacccttttgctgattgataattgtattattttctccgaaaacttcactcaccgaaaggtcgatagattgaggctactctcaggcaagtgagctttaattaccatgttaaaggaggaaagagctagaaaaaaaaacctcaaaaaagttaatcattggtagatgccccacaattaacgtgttgcttctcgcccacgggcaaatctagttattaaatagtcattctgagcaccaatcaaaaa

SEQ ID NO: 410998 - DNA, 578 bp, Homo sapiens
ttttcccacttctgctctatttctctccggagcactgttcagcacgtattgaagcattctacatgcttatttttacttatgtgtcttgttctgtcagaatagaagctcatgaaggcagtggtgtctactttgtttcttctgcatccccagtttccgagcatgggcacgaagatgcagcttaataaaggagtgctgatgtgtgagcagatgtatgaactgaaggtgggggcagtgaccactgtggggatgcaagagcaagtgggggagggaggccttactttattgcaaacgagcaagctttctgcaacgcgtcagaaggattagaaaggataagactgcactccgggttttgcagtttctcttttcttttcaattcacgtagaatacaatcactccactaccaaatatttgtcattcatgcatttcctaaactgtaaccacctgcaaggaaaaaaactcaagagcctttgagaaagttgtaatgtcttgcatatcctcatttttatatgttctctatttctgtttagaaggcattgagttactgagtattaaaaataaaagaaactgctgaaaagaaa

SEQ ID NO: 410999 - DNA, 349 bp, Homo sapiens
gtctttccatgttgtccaggctggttgtgaaatcctgggctcaagtgatccacccaccttagtctcccaaagtgctaggattacaggcatgagcctgctcctggccaccctctggtattttccactgttcctggcacatacctcccttagctcttgttacagtcttttgttataatgttggtttaggcctcaggaaacaatctctctggccttctcttgttctttcacctgccccaaggcaggactttaatcttgcccacctttctgattgtgggtcttaagaccctccccagagagggtcctgccctgtgccctatggaaggaagcttccataaaaatttccattaaa

SEQ ID NO: 411000 - DNA, 307 bp, Homo sapiens
atccactattaaaatagttgcataaactctgagttgataagactgaggaaaaccagaaagctggctaggaacagctggacccaaaatggtgttgaatttcagctaggtttcatcttggagaaaatagcgaaaatatcactactactaccatgcagctctgctactaccatacagcagagcagctgatcaaaggcagcaactgcctaactatggacagttcacatgtgaaaaacagaaatccctgtttgtttaattcatgcttactttttctgttatatgaagtaaaaaacattccttactgcaagaa

SEQ ID NO: 411001 - DNA, 300 bp, Homo sapiens
taataaatcctcaagtctagctggtttctaggtttcttttttcctgagccaaatgtatttccttattatttaagatagtctgaatttttgttgctttgttattgttgttctcacttaaacaaaccacctctgatatgttttgttccttctcttgccatgagacacactggctccttttcacattttgctatgattgtaagcttcctgaggctgccaaccagaagctaagcagatgctgttactttgcttgtgaagtctgcagaatgatgagacaaataaacctcttttctttctgaatta

SEQ ID NO: 411002 - DNA, 331 bp, Homo sapiens
cttttctgcaaagttcctaacgtgcctgtaactaccgggatagtattttattttttagagggttggtggcattagtttcgatgtaaggatatcggctggatgtaatgatatctgctagaggggacagttttgaatgtacaattgaagtgtatacggttttttccctcagtcctccctctctccctctcccccagccccccgccaccccgcctctctctctccctctctttctccccctcccctttatatattcatgcatcagagcactcctgcactggaaacagtttgtgctctaccggagattttcatggtaaatttctgaaaacttatt

SEQ ID NO: 411003 - DNA, 222 bp, Homo sapiens
agacaatgacaacaaacatcagcaggctggatcaattgtgtgtggtgcacatgaattttgactgtgacctggcacatgaggtccattgtggaattttccacttgtggcattatgtcggcatttaaaacatttcaaacgttgtagtatttcagatttcagatttttggattagaaatgctcaacctgtattaataactgggtatacaataatctacttagtac

SEQ ID NO: 411004 - DNA, 396 bp, Homo sapiens
gccatcatctacaacctctggttcggctatgacgtgaagcgggccgtggaggagccccggctgcacaaccagcttctgcccaacgtcacgacagtggagagaaacattgaccaggcagtgactgcagccctggagacccggcaccatcacacccagatcgcatccactttcatcgctgtggtgcaagccatcgtccacacggctggtggctgggcagctgcctcggactccaggaaaggcggggagcctgctggctactgagtgctccaggcggacaaggctgacaagcaatctagggacaagatactcactaggaccaggaaggggactctgggggaccggcttcccctgtgagcagcagagcagcacaataaatgaggcactggagaggcggga

SEQ ID NO: 411005 - DNA, 455 bp, Homo sapiens
acaacttaataaactttggctttaatggatgactggatgcagaataaaatacataaaaataaacctcagctgctcagcaacgactgaaaaaccaccaccgggcaatccctccccatggccaccgagcaaagttccaccgcctcccctacgccgaccgccgggctcccggggtcggacagccccgggccacttccgggccttcccggaagtccctgtcacttaacaaccgaagtaacccgcaatgcggaagggcgaggggattgcgagtcaccgagtttcccgcgcggcttgaggtactggggaaccggaatcccccaccggcccaatcatgttgctgctggggtctctccggtgcccagcagtggttgtcagtaagcgggcggcactcccttccgatacgtcttttcttttttcatttttgagacggagtctcgctgtgtcacccaagctggagt

SEQ ID NO: 411006 - DNA, 970 bp, Homo sapiens
acaacttaataaactttggctttaatggatgactggatgcagaataaaatacataaaaataaacctcagctgctcagcaacgactgaaaaaccaccaccgggcaatccctccccatggccaccgagcaaagttccaccgcctcccctacgccgaccgccgggctcccggggtcggacagccccgggccacttccgggccttcccggaagtccctgtcacttaacaaccgaagtaacccgcaatgcggaagggcgaggggattgcgagtcaccgagtttcccgcgcggcttgagtcacggcctagaaagagagatgttggggttcccaggaccaggacagaggtggtagtgaactctcatgggcatccagagaaggtcaggccccttgctgacaggcctatctgtggggctactgctgctcttcagctgggtgacccttgtccagccaacctctctctcagctctggtccaccaccctcacttgtgccagaccacccgggatgtccatggccgtcactaccctggtttcttttgccctcgtctgtctgattctccagaggaagcctactgctgccacctgcaggctgcagggggctcctgctgcacccgggctgaatttgaggccctgtaccaagtcaatctgtccgctcttccgcccccgcccatcctcaggggcccaggcccgctcctagtgctgggcctctacaacctactggttgtgaccctgatgaccgtagacctcgtgcacttctgctgcggtcggggccggagtctgggctggagccaccgcaggcctccctctgggtcctccgccgcgagctccctgcaggtctctgcggggacagcttaggtgcgcccggagcttgcctgcacctgcgatccagagccaagcgccccgcccctgcccgggcgcgctccctccttagccctgcccctctctgaccccacctccgacgcaagagtggggcggg

SEQ ID NO: 411007 - DNA, 389 bp, Homo sapiens
actgataacactttgtaagttgcaattgctggatatcatgtatctatgtgatcaggaccatctgtaatgatgaatggctcatgttcacacagcttcaaatgcctgatttctgaaatgatcaactatttattaggtgtaaggtaagggcaatgatgcatatgatcttctcctgtgcttagagatgttaaaattcacttacggaactacgaacattatgacatgcaataaaacttctaaactatgtagtaacatccaaggcaagattttgtggattatgtgttagtaatgatatttaaagagaatattaacattttgttaagcaaatatattaatatattaattatgtgataattttcattttaaatacaataaattaattttatcgtaag

SEQ ID NO: 411008 - DNA, 386 bp, Homo sapiens
agggccctgcccagcacagcacactggagtggccctgcggcagcatctgggctgctgtacccatggtgcctcccagcccgaggggctcccggcagctctggagactcctgctgtcacgtcacctggcccctcaccatcaccatcctcatctctcttgggaattaagacattgaaggaactgctgctgccagcaagagaggctgttgcaagaaagaaaggctgctgcaagaaacgcaagaaaggctgctgccagcattgcatttctgtcaagaagctgccccgcaaaatttatggatgtatcgctgtatgcacctaatagcaagctctactggatgaatggcttataaagatctcccctgaataaaattgtggtttttaactttaaa

SEQ ID NO: 411009 - DNA, 2564 bp, Homo sapiens
ccaacctgagcaaacacagcagcccgagtgttcccaaggccaaaatgctgagaacgtccactcctaatctgtgtggtggtctgcattgccgggccccctggctctcttctggcattctctgcctctgcctcatattcttgttaggccaggtgggcttgctgcagggacacccccagtgcctggattacgggccccctttccagccccctctgcaccttgagttttgctctgactatgagtccttcggctgctgtgatcagcacaaggaccgccgcatcgctgcccggtactgggacatcatggaatattttgatctgaagagacatgagctgtgtggagattacattaaagacatcctttgccaggagtgctcgccctacgcagcccacctctacgacgccgaaaacacccagacgcctctccggaatctcccgggcctctgctctgattactgctctgccttccattctaactgtcactcagccatttccctgctgaccaatgaccgcggcctccaggagtctcatggaagggacggtacccgcttctgccacctcctggaccttcctgacaaggactattgcttccctaatgtcctgaggaacgactatctcaaccgccacctgggcatggtggcccaagatcctcagggctgcctgcagctctgcctgagcgaggtggccaacgggctgaggaaccccgtctccatggtccatgctggggacggcacccatcgcttctttgttgccgagcaggtaggagtggtgtgggtctacctccctgatgggagtcgcctggagcaacccttcctggacctcaagaacatcgtgttgaccaccccatggatcggggatgagagaggcttcttggggttggcttttcaccccaaattccgccacaatcgcaagttctatatttattattcgtgcctggacaagaagaaggtagaaaagatccgaattagtgagatgaaggtttctcgggctgatcctaacaaagctgacctgaaatcagagagggtcatcttggagattgaagaaccagcctcaaaccataatggcggacaacttctttttggcctggatggctatatgtacatattcactggggacgggggacaggctggagatccctttggcctgtttggaaatgctcagaacaaaagttccctgctgggaaaagttttaaggatcgatgtgaacagggcaggctcacatggcaagcggtaccgagtcccctcggacaatccatttgtttctgagccaggggcccaccccgccatctatgcctatgggatcaggaacatgtggcgttgtgctgtggaccgaggggaccccatcacgcgccagggccgaggccggatattctgtggggacgtgggccagaacaggtttgaagaggttgacctcattttgaaaggtggaaactatggctggagagcaaaggaagggtttgcatgttatgacaaaaaactttgtcacaatgcctctttggatgatgttctgccaatctatgcttatggccatgcagtggggaagtcagtcactggaggttatgtctatcgtggttgtgaatccccaaatctcaatggcctgtatatctttggagacttcatgagtggtcgacttatggctttgcaggaagatagaaaaaacaagaaatggaagaagcaggatctttgcctgggcagcaccacgtcctgtgccttcccagggctgatcagcacccatagcaagttcatcatctcctttgctgaagatgaagcaggggagctgtatttcctggcgacctcttacccaagtgcctatgcaccacgtggatctatttacaagtttgttgacccctcaaggcgagcacccccaggcaagtgcaaatacaagccagtgcccgtgagaaccaagagtaagcggatcccgttcagaccactcgccaagacagtcttggacttgctaaaggaacaatcagagaaagctgctagaaaatcttccagtgcaaccttagcttctggcccagcccagggtttgtctgagaaaggctcctccaagaagctggcttctcctacaagcagcaagaatacattgcgagggcctggtacaaagaagaaagccagagtggggccccacgtccgccagggcaagaggaggaagagcctgaaaagccacagtggcaggatgaggccatcagcagagcagaagcgagctggcagaagtctcccttgacctattggtcaaggtggccgacagggtgacgtgagagaggagagccacctcatcaaatgaaagtcactgctgaataaagaccttagaagtctgggaagccagggtagaggtggggcagggcggttttcctctccctgggaaatcttgctgtctactgaataaataaatgcaccttctctgtatgcagtgcttctgtgggagaccatatcccagattgctggtgcacctgggttatggtaagcactagtccatgagcctgcttggaatcacactggatgtctccgttttgtcttgtaaatgcctacaacctgaggtaataaatcaacatttgctcaaactggcaca

SEQ ID NO: 411010 - DNA, 307 bp, Homo sapiens
gctagtaagtctatgtccctaagattttttacctactgactctgatttctgtcctttaaatatgtaacatgttaaaatgaggagatcggacaagtatcaaataccagtctcctgatcctatgtgatttgaacatgtctcttctctagcaaagccttttaaggatttgaacacagcaatcaagaacctatcttggctgggagcggtggctcacgcctgtaatcccagcaatttttaagacagcccagattgtatttgtttcaagcagcagcagcagacataaaattaaatcaagcctttataaatacg

SEQ ID NO: 411011 - DNA, 497 bp, Homo sapiens
gatatttcaaataatctttcttttgccgtaaattacaagattttccagtttgaccactggcgcttaacctaactacatactgaaggcacttcaagctggtgtgggtggacgttctttcctgttgaaaagagaacaaaaccctcaacaaggagcagctggagacaaacttggagcgaggaaaagcagaaagtgttgcgaagcataatcatttaaatcacagattaagtcaacataatagcagagaaaatgcaggaaattcaaaatgtttgactatagtggcaacctcacagagtcttttctttgggatcaacagagaaaatgagctaaatgaatacaattttatatctcctgacatagaagtaaaggattcatgagcaaatgttttattttatactataatttttaaaatatttcctttaaatacaaagccttaaccaacaaaatgtaaccattagcttcatgaaaaacaataaaaataagagttattaactattacg

SEQ ID NO: 411012 - DNA, 460 bp, Homo sapiens
tgcttccacattttaggtatcggtcatagcaacaaccccacttctcagtagcaactttctctctcagtccgtcttctgtagctgtaacagaatactgcagaccggagcagatagcccagactaccccactgcaggagtctcctgctgaccttgaaagagcaaactgacaatgtagcagggactagcaggtggcttttaagggagtggaagatagcccccggctgacaaccaacaagaaagtatgtctttgtgcctacaactgcatggaactgaattcagtcaacaccctgaacatacttgaaagaggatcccaaactccgcgtgagaaccacaacatggatgacatcttgatttcaactttgcaagaccatgaaagagaacccaggtgctttgtgctcagacttctatcctggagaactgtgatgtaataaatggatgtttttagttgctaagtgtgtaa

SEQ ID NO: 411013 - DNA, 405 bp, Homo sapiens
tgagtatgtgcagatcctaagtcccaaagataactccgcagtcctcatccacagaaacttattggaaaaatgggtctttgcagatgtgattaagttaaggatcttgagatggggagatcatcctggattagctgggtgggccctaaacaccatcaaaagcatccttataagtaagaggcaaagataggctagacacacagagagaagacgacgatatgaaaatggaggcagagatcagagtgatgcagccacagccaaggaatgctggcagataccagaacctggaagagtcaaggaatggcccctcccttagaacctccagaggcattgtggccctgacaacacatgcagttcagacatctggcctccaaaactgggggagaataaattgctgttgtttgaagc

SEQ ID NO: 411014 - DNA, 511 bp, Homo sapiens
ggtattcattgggcgaagcacctcatccagagttaatggcattgccactctgcgaatgagtctcagaaaatgaagaggtagctaaaggaattagcttattaatgtgctatcatcacatctggactggatccagttcttggtgtttgtctggaaaattcactgctgctacagtattgtaatacctggcaattctcatgttaatggaagggttagtagtttgtgttttttaatctacctagtctgtgatgaaactcaaatatttatttgacaataaagtgatgttttttacccaggacaggtgaattcatgaagcaaactatatttgttttccattctgctttcactagcttgtctttaataagttcattgcctcaaagattattaatagcatttggatgatttttccattttgccccagctttaatagctgcctctatgagctcttattatcatttcagagttatttctttaggattctttatagtgaacaagtggtttcaggtaaaaaaaa

SEQ ID NO: 411015 - DNA, 401 bp, Homo sapiens
tggttccactgagaaagtgtgcctatagggaagcagaattacctggagattcatccaagttactgcatttgtcaataattcatttcttgttattgcttggcctctgcaggaatgagcaaagacagccaacctgtgaggctggaagcaagatggagtcagccatgctagacttttctcactgtcatcatctttgcaaaggcagtttcatttctggtagccctgtctttcagctgggtccccaagtgagacacctaagcagagctccacctgctgccttgaagacccacagcctaaagcaaagcttctcctgcggaccctagactcacatctcaaagaaagaagacaaacccagtgtgacccacagcctgggaacttgggagtaaatggctattcttttaagc

SEQ ID NO: 411016 - DNA, 982 bp, Homo sapiens
accacatatgaggaaatcagacatctctaggttgaatcatgcccaaaaggacaatttcttgtcagataagctgctgtgtactaagtctgataactaacaaaattgctatatggtaattttaactggaaattgtccacttttatcctccggttttctctcttattccattggtaaccaccctgggagttctaataccatgtccatgtacaagtgcttaaatcaaccctcaggttgtgacagtcaagctacagtggctgtgaaataatctgcacagcagagtatgctatgtcattggctcaatcagcataatgcagcataatagaatagaagcacacaattatataatgccataatttgatttctctctaatttctggacacatcacaaaataatcaaggcagtgaaatgaagtgtaaagaataatggctgagtttggagtcacatcactgccacttgctagcctgtgtgaccttaaacaaataaaaaactctttcttgacctttagtgtttttctctgtaaaatgggttatcttttctcatttgattatcagataggaatatgtacaacagaggagatgagttgatagtatactttctatgtgccgcctgcaaatgcattatgcacaaattttaattattgccatcatttaaaaaaattcagaagatgttataccttaaaaattagtatttctgcagtctctttaaagtaggatgattgggcaacattagtttcctaatcccacatggcaacaaatgattgtgaagtagccccttcccatttagactgtggtctttgccgggagttcatgtcatttctcatctaacctgatttgcacatgtatgttgaccatctggcccctgtaagcatttgagtttgtcacctctgttgtttataaaagcacttttagatttagctgcaatgtgcttaacaaagtcactcaatttggagcttgaagacgagctttcaaatactggttctcaa

SEQ ID NO: 411017 - DNA, 343 bp, Homo sapiens
ccccatgctctttcattgacggtttggacgctgaggctgtcttgtgcatccaggtggcatttgtcctcttagtacagcttgatgggctttcctttgaggacctcaatgtcacttccttatcacctccaaggctttttctatccagagttcacatgagcacgtactgttaaaaatctactcctcttctttgatggtgcccacatacccaagcagaaggatcatgtatctatcagccaagagggcagaccaccacaagggagttggagagaagaggaaacattcttgaaatgttgcagaaacattatctacaaccaattttttaaaataaacaattgatttcatt

SEQ ID NO: 411018 - DNA, 375 bp, Homo sapiens
aactgaaatggacttaaagaaggcatctgcctgagaccccatttcaatgaaggaagaaaagaaggaagtcatgttttgataaagctatcagaatttaaatatatgtactaggattccatatctgttttggtttaaagaaagaatttttagttggataaatctgacaagatttgaagataaaaacaaaacaaaaatctggatctcgtctttctcttataaagtgcggtttcttcacatcactcaggaatgtttattccaacttaaggcagaacagaaaattgattaatgctgactgctttcctatgactctgtactgtatttacctgaaatataaaccacaatttcaataaatgggtttgtctgataatagcaaaa

SEQ ID NO: 411019 - DNA, 523 bp, Homo sapiens
gtggagagaaagttgcttacttttcctgagcctcaactttctgaaaacatagaaacacaattagatgatgagttatgaggtgaaggaggggatgactcagcagcaatgtgccagctccatagtgacttctccaccaagctggagaaggatttgcagcaatggttccagaaccaactgtgtgtatctacaggatgaagaaactaaggcaacaagcaggatacatccagctgtgctacctgggaggagtcctctcttctataatcaaactcaacagaaacaggcccttgcttctgggacatcaaacatgaagaggctcctgttctgcagaaaataaataaggcgaaatcaaagatttgtagaaattttgattaagacactttctcagtctttccacatagcagacactgaactactgacatgtgctgtagctagaattgagcctgtggacttttatctttgcctttgaattctgttatattgacattaatttggacactcaataaaaaattaacaaaataggaaa

SEQ ID NO: 411020 - DNA, 232 bp, Homo sapiens
ttatatatacattatatgttgtatattatgatacctagactatgtaaagggtgtgtgtgtgagtgtatgactcctacaaagtgagtagttctctggatagtcgaactacagattatttttatgttctctttgattatctgtgtctcctgaagtttctacaatgggcatatactactattttttttcttttttctttttcttttttttttcttttttagagtcagtgtctcac

SEQ ID NO: 411021 - DNA, 359 bp, Homo sapiens
gaaccccagtaatctatcctggacttcaccctaaaagtcaggggtagaaagagccatgccctcttctcttcaaaggaacctttccctgggatcctaaagatcattcctttttgctttatttctctcttgtctgtgtactattttctttggataactccttttcccttctgccattaaacatgctcagacctccttcttataaaaaatgattcttcgtcaataccaaacttttactctaattgaaagttggttagatcaccatgaagaacgttgtataaaaagcttatttaaaaaatcgtaccctttgcacctctgtaattcactttatggaatataccatgaataaataatccacaaaa

SEQ ID NO: 411022 - DNA, 420 bp, Homo sapiens
cctcactgccccgacagcgtccacagcgtcctcaccgtccccacagcgccctcaccgcgtccacagcgtcctcaccgccccgacagctccctcgccgcgtccacagcgtcctcaccgcgtccacagcgtcctcaccgccctgacagctccctcgccgcgtccacagcgtcctcacggccccgacagcgtcctcacggtccccacagcgtcctcaccgtccccacagcgtcctcaccgcgtccacagcgtcctcaccgccccgacagcgtcctcacggtccccacagcgtcctcaccgcccccacagcgtcctcaccgcgtccacagcgccctcaccgcccccacagcgtcctcagtgtccacagcgttctcaccgcccccacagtgtactcattgtccccaatgtcctcattgttacctc

SEQ ID NO: 411023 - DNA, 552 bp, Homo sapiens
gtataattcacagtagtgacagcagcagtgccgaccatccttcccactgagcccttgcacgtgggaagctcttctcggaactctgcatcaattcattaatttcattttcacaagaaatctgtgtagtgcttacatctactctgaatgctcccgatttataaaaaccgagtcacaaagacattaaatttgtccacagccacacagcttgtaagtgcaaagccaggatttaattccagagtttttaggtcaaaaacctatacatcctctccttcctcccatgtcatcgtgtgctgtgcattagattctcacgtgcttggtcacatgccacccagcgtttttattctaagcctttattttaaatttatgccattcttagatgcctacattaaaacacccgggactcagttgttacaaggtctggtttatctgtttcaaatgtactctcctgccttcctctattccctgtaaatgtgaatgtgtgtttatccattaatttagtaaacatctgttgagacccttgcacatgtcagatactgtgaagtacctaataaa

SEQ ID NO: 411024 - DNA, 511 bp, Homo sapiens
ctggcctgtatcattcgaatcctctgctcactttgccttaaaaactggttttggtaggaagaccctgggtaaaggtgggtgctgacttttctagagagggctgaggagacaagcctgaggactcaaacctgccagaggaaaaaggctctaggtattattaacagcagttgtactatgaattacataattgctattcttcgagcctgcagccaagtgccaagattcctcacacgaaccacgtgaagagggcaacaatatccccaccttacagctggaagaaaaaacagctcagaaagtgacctgctttaaaaaaagaaagacggcgatttgctgaaggtcacagagtgcatcctggactaggatgagacgggagaggcactcgcgtaaggggcaaaatctaagaggcgccaaaaaaactcaggaaccaaaaccaatgatattttaatacattttaaaaaccaaaatgtaaaaattcatgatggataaaatatcaacattttaaataacatct

SEQ ID NO: 411025 - DNA, 857 bp, Homo sapiens
gttgctcagctctgggatttctccagtctcactgggggctgggtactgtatgtgaagactgtcccatgggtgggggatgcgtacagaggccaccacggggcagtagcagccagaagagaatgaatggtgtaaagggttgaataggggccccctcaagagagatatgtccaagttctaaacccctgtacctgtgaatgtgaccttttttggaaataggatctttttccaaataaagatcttgagatgagatcatcctagatttattgtaagccttaaatccagagacaggtatccttctaggaggacggagagggagcttcaagacacagagacacagaggagaaggccatatgaagatggaggcagagactggaggcgccattgccaagcaacactgcggatcacctgcagctgccagaggcttggaaagtgcttgccacaggccctccctcagagcctccagcaggaacccaccctgctgacaccttggcttcaggcttccagcctccacagctgtggtgaaatgaatcactgttgttttgagccacccagtttgtggcaatttgtatggcagtcctaggaaagctaacaggcagtccagcccctgcccctcaacattttgcacactttgagccctgatccagggatcttccctttccccggcgacacggctcagcactgcttccccggtggggctgcatcttctcaggacccacggctgcacggtctcgagccacagtgcctggtttctctcttgcaccaccgttggtatcttctccctgtcctatctctcacaatctgtggaagtgctttgtatgcagtgagcgcttaataaaagtcacttttctctcctcaga

SEQ ID NO: 411026 - DNA, 421 bp, Homo sapiens
agtcattgtccccagactatgagtttctgcctccttctctttcagcattctcctcccctcctctggctgtcctttgtcagactctacaatcatggctagaagaaaaaagttgacttaaccgttctttgttgaaattcgggactatgttagagataccaggtctcaatcaaatacagccttcaataaaagactcttacgtaaccagatcctatgagcagagagccatcgtgcctccaacttagtttcttcagattggctggttttggtgctcaacttttgactttacccaccttcctgacaaagtgttgaggaccactaggtaagcatgctatcttcaacgttaaaaaaaaaaatcatgattgaaggcagctgcacttcatatatcaaggagcattgaatataactaactctaaaacttcat

SEQ ID NO: 411027 - DNA, 450 bp, Homo sapiens
caccaacatctgcatctggggaggacttcaggctacttcattcacagcacaaaatgaaggggagcagtgtgtgctgagatcacgtggtggtgagagaggaaacaagagagagagaatggactcaatgggctcctgaacaaaattcttacaatggcagggatggagaccacacatctactcaacacaaagactttgcctcaggaggctgacctggataagaccatgctgtgtacccaaatggccagcagaagcccacactgagccccatacatagcaccatgctccaggcatattagcctcaatctgaggacagactgagtatattggaccccttgcagcatggagaggtcagtgatgtttttcttcctggaatacttagtgtgagtacccactttccttcccaaaaataccatctgtgggacttaataaattgcccatttaaaactaaaa

SEQ ID NO: 411028 - DNA, 370 bp, Homo sapiens
ttcacgcttggtgaaataatgtgacgctctggcgctggctaatacgtttcatgactcacacattctgcatttgccgctgccttattccttgctgacttattgcaaagggtcccaattttgacatgacacaatgccaggatccctcggtaaatacaggtttccgcacgctcttgtcaatggcacccactcttaggccctagcaactggttttggaaatttccccgatgtcagcaccacttgaatgtagactttgctacctgtattcatacagtttggctccttattttaatatgtttgaaaagaattaaagggggtattctagaacatgtccttcactagttgtgtaataaaactagaatgacaatgcaga

SEQ ID NO: 411029 - DNA, 341 bp, Homo sapiens
acatgtcaatgaatactgtagaaatttagtgacagaatcattagtggctactgtgaacaactatatgccaagaaactggaaattctagaagtagacaactttctggatacatataacctatcaagattaaaccaggaagaaatctaaaaccagaacagaccaataacaagtaatgagatcaaagcaataataaaaagtctccaagtatagaaaagcctgggacctcatgactttgctgctgaattttaccaaaaatttcatgaagaacaaatagcagttctactcaaactaattaaaaaaaatagaggcggaaggaagccttccaaattcattctttaaaa

SEQ ID NO: 411030 - DNA, 525 bp, Homo sapiens
gcctcactttttcttgccgtaaatcctgatatcagtgtttggctttgctgtgccaggtagctgggcccaagttctgtttggcaatattctcatctggttccttcctctcgtgctcaacacctcgcagtggcttccattccacgtggagtaaaagccaaagctcccctatgcacctctctgacctacccccaatcatgccctctcctcagcccctcctctccagccaccctaccctcctgctggttcctgaacacctttggcaggctcccacctcagggttcaggacctactcttatttccctgagctttcctccgcacacacccacccctacatttctctatttacccgagtccccatcaccatctaggagactgtatgttttacttgcagattacatttagtgcttaatccatggctctccctgctagtgatgtcgctgtggtcttttatttgctgatgtatctccagtgtttagatcagtgcctggtacaaagtagatgctcaataaatatttgctgagtgaa

SEQ ID NO: 411031 - DNA, 386 bp, Homo sapiens
gaacccggaatgatttcaaatgtgacttgagggtgtcttcattccacagtattgctggtcaactagagggccctgggatacctgttgtctggtgtccacacaggaggggacttcagacttctttccaactagagacagagccctccatcccaactgcattcccagaggaaggaaagtggccagtctgattacttaaaatttaacttctgaggacttttactgcctggttgtaacagcatgtgaaaatggcaggcattttcccatcacttaacccctctgcggcagggctcaaacttccctataaatactggtccatgcaattgcctggtaaaaggacatatcactattactgttaataaagccaacacaccttcccagcaaccaag

SEQ ID NO: 411032 - DNA, 481 bp, Homo sapiens
ccaagatcccacctctgcattccatcctgggtgacagaattaacctccatctcaaaaaaataaaaagctaatctatacttttcttttggtgcattattagaacatagaaggcaataaggcaaaactattgtgggtatattagtgcgtatctgtagcacctagcacagtgcctagcccataacttgtgttgaaaattaagagaaccttcttcatgacagatcatttggagaacatgttatgggtgtgggagaaaaagattcctaactctccaccccagaaataattttgctgatacaaaaatcagccagacatggtggcacaggcctataatctcagctacttaggaggatgagtttgaggataaggatacattgtgaaaaaggtgggaaaatcacttgaacacaggaggcagagattgcagtgagccaagagtgccccactgcactccagcctaggcaacagagaaagactctgtctgaaa

SEQ ID NO: 411033 - DNA, 346 bp, Homo sapiens
ccaacttactgaatgagttaaaaccctgaaaattaagtcaatgacaaagcatctctcaaatccattgtgatttaaatcatgccaagggccaaagccaagtaactttcaattattaagtaaagtgatgtaaaattttttaactttaaattctacacctcactctctcaatatcctaagggagaagaattagggtgcaattggaagccctctgaggtttatttttcatcatcaatatggataattctaatttctccttgccacttagtgtaggtgctctttaaaactgagacatctgggatcaaagcaatgccaagacaacggcatagcatgttcagatgattaaaaa

SEQ ID NO: 411034 - DNA, 437 bp, Homo sapiens
ttaactggggatggtgtcttatgcttataatcccagttactcagaaggctgaggtgagaggatcacttgagcctgggaggtcgaagctgttgtgagctaggattgcaccactgtactccaacctggatgacagagcaagaccctgtctccctcccccgataaaaaagaaattctagaatggatatcacatgtagtagaagagcataagagtggatgactggatcctgagaaaccccttacaaaggcatcaaggtggtccatgccagaagtgatggtaacttggtgtggcagtggtgatatagagaggtgattacagttgagagctcttttagggctataattaactgaatttgaaaacctaatatggagagtaatggagaaggaggtgttatgtctggttttcagttttctggcttaaggaaataggtgaatggaaa

SEQ ID NO: 411035 - DNA, 427 bp, Homo sapiens
aatgtcaatcccatgagaatgctaagtggaggctattctagaaaaatcatttcacgccactctcttcgtcagctaaggaaaaggtaaaagcaaaatgtaattctgtttaccgagtgcttccgacattttcagtgtagcactgtaacagatgatgggcaacatgtccccagatggcatcttcacaaagtatatgacacttcccaaagtatatgacacaaagtatatgacattatttcacaaagtatatgaaataatgaggtggggaggggaagcctcaagccaaataccccccaccacagcagcactggaaagctcagacattctttctccttttactttacttcatctgttttaaaaaagaatcttttcctactctaagtcatatattcagaaaactttgaaaatctaaaaataattcaaagccaaa

SEQ ID NO: 411036 - DNA, 516 bp, Homo sapiens
tgtcactaccacagcactacagcatcactgccacaaccaagaaaaccaccaccatcagaaagctcctgcctgctgccagctccagaaccatgcagcacctgcatcaacaccagtaaaacagatgacttatggcctgcctctcaagtcttaaaaatccattatgggtcactggagactctgctaacaacactatacaggagaaccaaacaacagttaaaactgcagaaatgtagcctcatttctagcctccaaattccatgtgactacatctaatttgctagatatagtttgtttaagctacatttttttttccaaatcatgactgcctgagaacctgagagatgtagtgttttgttttcctgcctctacagtacagaaaagatcactaggaggagagagaatgactgtggcatgccaccttactagagcctctccatgtcctacctgagaacttcttgttaattgagaaaactcttctttattgtttaagccaataaatcaatctgacactccagg

SEQ ID NO: 411037 - DNA, 488 bp, Homo sapiens
cttagcttgctgctaaatcattcaagtaggggctcctctttgttaaatataattttgcgggggggggcagtatacagctatttagaaactgttggtcaaagaacaggagactcaaagaggagtaaaactttaagctgttatttgggtgaaggaaataaggtatacggtggtccatttttaagacaaagtgccttgaatcggcttcggtcagcaaactacggaagaaacgggttgtactaggcccctcaggctagccgatgccttatcggcttccccgcctgcccccttcccccttccttggttgccctcacccgaaccaaaaaagtttaaaatgaaagtttactggcctgcaaaatagctcgctttgtctcttcctaccagctggcctagctacttaggtcataagtcaaatacttgaagagcccctaagcagactaagattgcaatgcactgtgggctgtaacaaaatgcagcaagacaaccctaaa

SEQ ID NO: 411038 - DNA, 384 bp, Homo sapiens
tctttcagaatgctaccatttccatgaaaaatggccgatgttagcaagctggaggataagataccatggggaggagaagcaaggtgcccctgttgacagccccagaagcagaagctcatccccagaagcacagctgcctattcaacaaacagctgaagatacatgtctggaggagctcagctgagacaaaaagaacagcctcactgagcccagcctaaatagctgaccatctcaattatgggcaaataagttttgaatgatttgttatgctgcaatagctaattaatacatgcacccagtgcagacaggatgccaggattcattgacaagttgattactagttctcttctaacagtgggcaccctataggtactgatttttccc

SEQ ID NO: 411039 - DNA, 211 bp, Homo sapiens
gcagaggtgctgatgcgattggtcactcaccagacagcatcaactaaccccaccccctgggaggaatggggtggctccaggctccttggtctcttagaagtggctcggcaccagcagggtctgtgaagtggattcctttccccagaatctaaaccctgaaagcccttctgaaactgccatgcacatggggcgtcatcacccacagacctca

SEQ ID NO: 411040 - DNA, 388 bp, Homo sapiens
gtccacggcttcattcttgaagtcagcaagaccaagaactcaccggaaggaaccaattccagacacaaggtcagacgggtccacagaaaagaaggattcaaaggactcagagcttggagtggagactgaagcaacagacaggagagaaagaagaaagatttggggcaattcgcattgggagcagagactagggagggactatgtgcaaaagaatgcctggacatcaggaacctcagaccatttgcccatttttcgacaaaaattatccaggtctcgtaagatggagaaatcaaaagtgccattttctggccatttggaaccattgttgagtttgtattggggccaagcagtattgcagaagaaaataaagcatttaggttttaagtca

SEQ ID NO: 411041 - DNA, 524 bp, Homo sapiens
caccattgtgagaatctgctgagctttccaactagtttatctgttgtttgcagtcaaagatgccctgaagagaagggggtgtgggtgggaagaattctgatttgaggtcctctgatctgggtatgatctccttctcgtctcaggaatcaggggactccatctctaaacacaggctcaagccatgtcccccagctccctctttcaaccaggtgccaccccctgcttctcttccatagacagcctcgagctgccggcagtcccttaggatctgtggccttaggcctagcttaattttttcctctccaaagagccatctgtagggccagagactggcaaagcctaacttattactggacgccacttcctttgcctgactttcagtgattcctaccttactctggggttttatgtttctcgtctcaacactgtcatttctcattcctccacaagttgaattgctcactccagccaactgaagcatgctcttcttgacacagatagctctaggcatatggttggtgaaa

SEQ ID NO: 411042 - DNA, 422 bp, Homo sapiens
ctccagcttttcctggggtcacagacctcgcgaccaccaggtgcccaaggaaatcagtcgttgaggcgaacggcttcacttcttgtcccatttgtgtgtgtggctggaattctctagcctgaatgattcatttagactccatagaccaccacctgtattcacagagtctcagaccgacttttaagatgcatttcatttttgtctcaaggttacatatctaaccagtgtgttataaagggtattggccacaggtagagaatgtatcatattccatatttctaaaatggcttatggcaattgctttaagagaattatccatgatttcatcctaaagcaaacaagtttccatttgtgtcaccttgtatttcttgtctatgtacatactcagtgtttgcattttacaataaaaccaaagatagaat

SEQ ID NO: 411043 - DNA, 509 bp, Homo sapiens
cgaaaggaagagtcaatcaatgcagcgaacttgttgttttattttaagaaattgtcacggccatcccaaccctcagtgcccaaccaccctgatcaggcagccatcatcaaggcaaggccctccaccagcaaaaagatcatgaattgctgaaagctcaaatgatggttagcttttttagcaataaagcatttttaatgaaggaatgtacatgttttagatataatgctattacacatttaacatactacatatagtgtgagcataacttttacacgtactggaaaatcaaaaaatatgtgtggctcatctgttataatgtttgttttattgtggtgatctggagccaaggctgaaatatctctgaggtatgcctgtaatgtataagtgctagtagaaatgagttgtgcagaattgctatttttttcaatttttatatttgggttaatggtaatatactaagcgtccagtctataaacttcagcattcgttgcgaaatccagaggagactt

SEQ ID NO: 411044 - DNA, 291 bp, Homo sapiens
ggaagacaccaggctttgttgtcctctttgtgggtgtaacagcatctcctctgaagctccaggtctctccagacagccctctcttccacattccagctcctgctatctcccctgctgtgacttctgcttgtaacagctagccctagactcggccaacaccatttccttcctctcctatggctcacggaagattcctgctgttgtccatccatctctgtgttgcctcccaagcctgtgtgccttacaatctttccggccctttgttaaattctattaaatgacctcacaaaa

SEQ ID NO: 411045 - DNA, 349 bp, Homo sapiens
atacatattcaaattctcttcccatttttaattgggggatttgtattgaatttagattgtttaaatgattctggataacatccttgatcagatatactatgtgcaaatatttccttccattctgtaggttgtttcttccctttctttatagtttcctttgaagcaaaaaagtttttaactctaatatggtggaatttatctttcttttttctttttttttgctcatgcttttgatgtcataactaagaatctattgcttaatccaagatcatgaagaatttcccctatgctttcttctaagagttttgtagtattaaatcttacatttaggtctttgatccacttgaat

SEQ ID NO: 411046 - DNA, 288 bp, Homo sapiens
tctgtggaaagcccagcactactctccagggtctcaggtgaagacatggccctgctattgggagtcaagggggcacgtggccttgccctttaggtttagggacacagtcctgacctggggagccctggttcattcatttactcattcgacaagtacttattgatcatctactaagtgtcaagggtgtcgcaggctccccggatacatggtacctctctgccttggtggagaccccagcctagcacgggaaatgggcactaataaaatcattccaattgggtgtaaaac

SEQ ID NO: 411047 - DNA, 396 bp, Homo sapiens
catgttcaggaggtactcaaaggtaacactggcagctgagagcaggccagtcaatgtctggccaccaccctaatcccacctggacagtcacaccccacctccctatgtgtgttcgcacagtgggggtgatgtcatgtgggtctggcctgtcctgagcagacccaggtgttgggttgtcagaaacccagtgacccatcacattcactcctcagatcatggctcaaaagtctacagagcagagacaagagattgacaaagaggtgttgatgagggcaataaaagcaaaggtggctttatcacggtgagctacttctcacaggagtcgggatccacatctgcagactacacaaaaacaaacaacacagattaaaagcacaatcaccattgaaatcaaaa

SEQ ID NO: 411048 - DNA, 245 bp, Homo sapiens
tccttcatttctctagctctttatttccaagaaggccagcccttctcttcagccacatggtatttggacagcctaggctcaatccctgcagggaaagctcaatcagccagctgagccagtcactgaacaaccaagtctggtaagaacaggggtgaagtatttaagaagcctatcgtggctggagggctaaagccttgttctcaaatcagctttataggtaataaaactgacattaaagcaaaaac

SEQ ID NO: 411049 - DNA, 365 bp, Homo sapiens
aggttaagagatatggagatttccacaaggatttggagaggagccccagtagttactaaaattctgcattagatctgtcaggaaagatagatggacttcaaggcaattgcccaacaaactgcccaagaagttttaggttataatcgagatacatcaggctggaaagtggttaaaacttcagtgcagtggtgtgcacctatagtcccagctactcaggaggctaacacaggaggactgcttgagcacaggagtttgaggctgtcatgcaccatgattgtgcctgtgaatagccagtacactacagactgggcaacatagtgagaccctgtctctgaaaaatatatatatatttttttttcttttac

SEQ ID NO: 411050 - DNA, 838 bp, Homo sapiens
tgaactgcaaaacaagaagggaacaataaatttctgtggctgataccacatctaaaagattagaacacttaacaaggaatttttaaagaatgtaagaacattgaaatcagcacttttaacaaacgtttaacgcagggctattttctagataaactcaaaaatttgtcaaatgggacacgatgcacgattctgtattcctactctgtggagtttttatctacctattgggacttcttgccctttttaaccccctctcccctcccacacgcatattatacttactgatatttgccttcgtttactgaacagatttttttttggctcctattgtgtgccaggtactgttctagacgcctattttacttaagtgaacaaaataaaaagctttgccctcatggagcttacattctattagaggatgcagaaaataaaatatataatggtgttagaaagtgatggtgccatcaacaaaaaaaaagagaaatataaaggagtacgggaaagttccagagtggaggtgggaactggtattttaaagatgacggtggtcagtttgagcctcatttagtaggtgttatttgagcaaagacttgaaggaattaagaaaatttgctaagtaaatatcaggaagagcattcaggcagataggaaagccaatacaaatgcttttaggcctgtcatgtttgaggaatagcaaggaagccagtgtatctggagagggatgagcaagagttttgggggtggagggacaagaagataaagtcaaagagatcatggtagccggatcattgtaaaggctgatagaagccatgggagattttgaatagaggagaggtat

SEQ ID NO: 411051 - DNA, 454 bp, Homo sapiens
aacttttaactttgaaaaccgcaagtaatatttttcttcctgaaacctctgcagtggtagcaatgcactgaagtttgattaaaagtttactggtcattcctgccatgagaagatgatagagaatatcaccacagtgtgacttgcttccaaggcagcatggtttcatgcagaggatctaaactggggaccatgtgctgggctgcaaaagggctgtgcagtgcctaaaatgttatgcaaaattttataaagcctcgtctttcccttgaactccataattatgtatgcaacttcatcttcagcatcttcagttggatgtctaattccaaactgcacatgtacaggagacgttttgaccgttttcccacaaacttgacctatccacaggctttttcatctctgttttggcatttacataggtaagaataaataaatatatctctgtgcaatcatcaag

SEQ ID NO: 411052 - DNA, 352 bp, Homo sapiens
gcctctttccagtaacatctgatttctccattctcaaactacacttctcagggaaccagatatttactctcgtctgggaagatgcctcttatgttttccttttacttcctggttatcatgtggttgcattttccaagttcttatcattgaatttatgagagcctatccaaatttattttcttttattttctaataattgaaatgtgagatgaaaataacatttcacttatgaaaaacgcttctcttgatgaatccttccatgtgttagttatctattgctctgtaacaaaggtgttagttatctattgctgtgtaacaaattaaaacttaatggcttgaaacaaatatttgt

SEQ ID NO: 411053 - DNA, 593 bp, Homo sapiens
cggcctcagccctggagctgaaagtgtggctggagctagaggtggcagagagggggtgaccagcacagctccagccagcagctcccacactgctcccagtcctgggcacagtggaagctatggaggcagagaccagggtgtgcaacctgggctcctctgcctcactggagagggacttctctcattcagcagagcagcagccctgctgctgaaggccctgctgctactgctgctgggggtgtttgcctgcctgcaggaggtgctggagagcaagaaaaggagcctgtgagcaggggttccagcaggtcctccggctcccagaggtgacctcctcctccaggaatggaggtttgccctcagctgggcatctgggccatttgcctctaatgtgctgcccaggatggcctcttcttgacaggtggacaggggttgagggggccagggggcatctccaaaggaagctcttaaactcagcagcagcactccagaatctccatgcctgcacctgcccaaggatttattcatagcttaactaagaatttcaaatttctaccataacactgaaataaagtttgactttttgaaacttcaat

SEQ ID NO: 411054 - DNA, 671 bp, Homo sapiens
atctgggatggagaaaccccctttgaggccaaaagcactggcttaattctgttaattctgatctatgccaccccagtgctgaacgtctcctctcagagtgctcagcaaatacacagcccttcccatgcctcaatcaaggagggaggcccctctctgctcactgggaagcctctgggtgcttttctgctctggctcggaagagtccaaataagccttcccagctcactgggcagacctcagagtttctgctaacttagcagggttttgaggtctgtcccagaggatgtggctggcagggtgtgaagacactgggcaaaatccttccttgtgaatacagctctcagaggcagccagcctcagtggtggattcagatcccaggctctgcagggagatgtgattcagatcagctggtggatcagctccacgctctacctgtgatgtgatccccgccaagttactcaacttccccgagcttcagttgcctaatctgtaaataagactaataaagcctagattggcgagataacgtgtggaagactctcaacacagtgtctggaacatgctgcttttaagggaaatgtgattttgattatggttgaggccatttctcaacatgtagacataaaatgcggaaacatctaagatttcaataaagcaatgttttgttagt

SEQ ID NO: 411055 - DNA, 341 bp, Homo sapiens
cgtgggggctgaggagggtctgagctacattttaacttcaagatgagccagaggaaagcagcctgccagtcaagcccccaaggcaggtatgcacttctcccaaactctccgcatggctcagcggggactggggtccatggccgggacagactctggaggggccaccagggggccaggaaaggagggcagagcctcactcaagcctggttctcccgcctcatccaccccaaagacccttgaccccaaaacgaacatcctggaaaacaaatcaggacactacacccaattccactataaacaaccacaaaataaacccaggcccttatgctgacggtgctaaa

SEQ ID NO: 411056 - DNA, 373 bp, Homo sapiens
cattgctccttggttttgctgccctagatggagatttttaaagtgcactgtactaaaaccacctacctagaatcttccccatcttcattcttaaaacacttttctctccacttggcttctgggataaaagttttctgatttatcttttatcttattggctactgctactcagccaactttgctgtttcttcgtctttgtcttgatctccagatgttggtaaatcctgtggattggtcttcaattttcttatgtccacaattcatattcacatgtctaagtaaggtcaaccattcctgtgactttaagacaatgcatatgtaaagcccatttttttaatccccagattttaccttttctatcaaattcagacat

SEQ ID NO: 411057 - DNA, 607 bp, Homo sapiens
gctttcatgagaacagtttgctgcttacttacacagccaccagtgatttactgagttgatcacgaccctcactctttcggcctccaacaaaagacgatcaaagaatggttgtttgcagaggttatggacaagacttgatgtccaggccgagtgtccgtatgcacaggagcctcttggtggtgcagagtgaagccagaggaggaggagtgggttgtgtccatgggctgattctccctgcaccaacaggacagaatcctaaggaatccgagcatttgaaattcaaatctggtcttacaggttgttatgtatttgtctaggtaggaggctagaatgtattgaaatggggttagcctgacatatttatatatttcatatttaggcttccatttgttcctttgtcttgggtcccaaaaatatattagaggtgggcctgtctgttctcttggacacgaggacctcaacgagtttccactgttctctgaatgtttccttcctggttttctgtgtatacaataattcctagttttctgttatttacaattttacttccactttttaaagacaaaaatgtatgtttttttagtcaatattgatatagtggaccaaa

SEQ ID NO: 411058 - DNA, 518 bp, Homo sapiens
aaatgtatgttcttcctgtagattacagtcatttttaagtatatttagctatgattatttacagctcatgtatcatatgtatgattaattttaaataattaactagaaggcattcttagctaaaatatagatttttttatatattaatttgccatatagtttattcagctctaatttcttatgtcttaagatatattttttaaacagctatttagctctaaaagtacttcagataagtgtgcttattggaattttttatagaaaaataatttttttcagtgtgcaatataatataaataatgatcaacctgatacagattttataccttgaatattatatataggaaagtattaaatatagaaatgagcagttttccctatagctatttatgggctattattgaataaaaacaaaagtactttaaataataacaaaagataagtaagctcagatgtaaacttttctactcaagatttggcttctttaaatgcaattctgtataatgagcaaaaaaaaa

SEQ ID NO: 411059 - DNA, 449 bp, Homo sapiens
atctgtgccaagaggagtcatgagaagaggtttctgcaccagcctaggaaagttgagatgagtgcccttaggtgatcccgtgcaagggaggcaccgccttgggttgtcagtcattggaagccgccctagccacagaaatattttgtcagatttccaacagggctatggcaactgagggcatagtctgtaggcaatggacatggtattcgactcagtattcttgtttcgtttatgatacaagggcacgttttccagtaagttctattctgagagagtgagcgagaaaggacggatctcccggttgactggcttcggagcagatgggacacagcagcttctgaaagcctcctggttctcctgcaaataaatttctcagatgcatatatttagggaaacaattcatcaatgaagatgacaaaaccatctggctctagagacttaaaaaaaat

SEQ ID NO: 411060 - DNA, 1072 bp, Homo sapiens
tctcaagttctcttaaaacagaaaaaaaatgttattggctgaatgtggaagtgcattagacttctattatctttcagaaaggaagagtagcatatttatgtttcataaaattctgacaattgttttatagcaattgatataatttgatacaagtagtgtatttccagttttttgttaccaatcatgtcctttttgcttttagcaatgaaattatttcccatataacattttcccctcctccttctgaaagtaaatgtatttatgaaactgtggcttggcaacaagaaaagtaaaatgatgtgttttcttacttcaagggagccaatggggtatagtgtactagaaagagctctggactgagagcaaggaaatatgagtgccagttccagctctgctgtaatgtaaatgtgttttaaatggatggatcagtgaatagacaaacaaattctttggacctcagtttcccaattatcaagtttagaacctggagtagattatgtctatgtctcctactaccttaaaatctcattccatgtaagcaatgtttcccttcttactataatcctttgtagtgaaatggtcatttcaaggattgttataatggaacacatttggtatgtgttaatgtagcgacacttcacctattttttattgctaatcgatctcctacttagaaacatcccttacttaattacacaggaagtctgtgattggagggtggggtaggggtttgggtttttaataccttttctcatgctctaccatgggaaattagtttccctggattattttggcccaaatctgaaatagaaaatttgcatacattttcatacctatcccaaattcatttcttactttaatgagccatgtagtcatgcattagtttatctacagaaaaccttgctttaatgttttaaaaccaaaacactcaaactcatgcttgatgagcatttcccatgcctggtttaccctgtgtgaaacttccattcctgtaagtaacctgcccgggaaaagttttgaaggacaaagatcaaccagaatgagaaaaagctaagttgaggaaaaaaaaaaa

SEQ ID NO: 411061 - DNA, 580 bp, Homo sapiens
tgtccccccaaataccaccacttgagttcatcagatttcagtttgaatcagtaacctatcaaaatgttttatgctgctggactcaaagtgacccagaagattctcaatttatttccatccaggtacagaggtatctgcatggtaaataccacctccgcacctggcacagcctggcattcttgtaggagcctgggcaaagagccctggaactcaatggagcaaagagagtgaactcctctcccagaggtcatggagaagaaggcaaagcaggcctgtcacattgtccccagcctgccaggtgccactgcagcctcggaaagtttgtctaggccaaggcgctctcctttgctgcttctgcctgcctcttagtgtgggacctcccagggagatgagaaaggagaggaaggactcgtatctgttcagttctcttctcccctgtgcacattcactttacatcccctccctccatgacatcttctcacacaggctctctgctttgtttactttttttttctggcaatcagccttgaagagagattttacaatatttggaaatattttataatatatgaaaaaaaat

SEQ ID NO: 411062 - DNA, 282 bp, Homo sapiens
cactgtttaaagaaaaaaaatgaaaacgcttttaagctatctgaaattccaactctaggcaaaattaaaatttaaaattctaactaaagtaacataaagaatatggcactccttagggactgagaaatttaaaaataaatgaaaattcacttcagttaagaagtgatttataaggggtccagtgagatacatttcaaaggaaagagtagtgtcgctgcggctgctttatcagacagaagggaaaatatccatccctacagaaaagaacttcagaaaaaaaaa

SEQ ID NO: 411063 - DNA, 481 bp, Homo sapiens
tgtagaaagactttaattttttaattcaagaggtagtttccaaaaaatcttggaacacttgattatttttaacagttaattcctaagaattagaggtcttactctctatttttgttaatatgtgggcatccacaatgtaatactttataatctaactacacggtctcgaattattgagaacatccaaagaagtcaaataagcagttgtttgtcttaaaattctggtgaactttttttattgggccttagactcaaactggcacctcaactttaatgactgtctaaagtcctattatctgccatttgtattataatttctccttgccttaatggtgtattttaatttttaactccaccaggtgtggtggcgcatgcctataatcctagcactttgggaggctgagccaggaggatcacttgagtccaggagtttaagaccagcctgggcaatacagcaagaacccctatcacaatttaaaaa

SEQ ID NO: 411064 - DNA, 408 bp, Homo sapiens
tgggaaatttttcaaaccttcagatactattgattctgaaaactaaaatagtactttgctaatgttggaagtattgttgttagagaacaacccaggaataaatgaattttaagactttagaaattctcaacaggcaaatggacgcttcctgccccagtgattctgataatagctcctcagttttgagaattgctgttcctaataaaaatgtgtcaaatagcttagcatgttgggaaaagaaaatggttgaggtccccggtctagactggagcatttggtgcttaataatttttttgtggttggacaacttgggaaatttgaaggatttggatcctcaatccagaaaagtgtttatacgcctatgcactttaaacaaatgcgaataaagtctagaaggctgaataactg

SEQ ID NO: 411065 - DNA, 455 bp, Homo sapiens
tataataatgcagaggtgaatgaaatatagaacaagggagctgtaaaagacaagattgagagactcaacacctctgtatgttaatagatgccgtaaacaaaagacaaggagcaggctggaagaaatacatataaaataaagaatttggggccaggcagggtggcttatgcctgtgatcccagcactttggatggctggggcaggaggatcatttgagcttagattagaagttcaagaccagcctgggcaacataatgatgcctcatctctacaaaaaaaataaaagaagtagctaggtgtggtggctcatgcctatagtcccaactactttagatgctgaggtgagaggatcacttgaggaagagaggttgaagctgcagtgcgctgtgattatgctaccacaggtaggtctcactcagcctgagcgacagagtaagaccctgtctcaaaggaaa

SEQ ID NO: 411066 - DNA, 577 bp, Homo sapiens
caaagtactcacaatgtatacatagagccaacaaaggactcagaattcctactaatcaatacaaaaagagcacaaaaaaataagcaaaggacttgtacaggcacttcaaaaatgaggctatccaatggccagtaactacaagaaaggtgctcaatctcttaagtcatcaggaaaatagaaattaaaagctcaatgacatcttgttatacacatctacaaaatggctaaaattaaaaagtgacaatttcaagtgctgacaaaaatgtacagcaatgggaattatccttagctggtgggagtgtaatttggtacaatcactttggacatgggcagaatctactaatgctgaacacacataaaccctattaatcagcaattctacttctggcttatatccaacagaaatgtacagaaatatagagcaagcaagtttaagaatgttctgggctgggcgtggtggctcaagcttgtaatcccaacactttgggaggtcgaggcaggtggatcacctgaggtcaggagttcgagaccagcctggccaacatggtgaaaccccatttctactaaaaatacaaaa

SEQ ID NO: 411067 - DNA, 401 bp, Homo sapiens
ttaaagccagtattatacatataatatgaaatatgtgtatatatacatatttcatatgtatatatataaatgttgagctatgctcagagagctaaacaccttaattgatctagctgtatatagcttctatctggaattcctagcagagtaaattgtgtacatgtacaagagcaaagtacatatgcaggtacatcacttcctataggactctgagtaaagcattagaatatggacatagacacccacgttgaatgttcaaagagcaaaaatgctttccctaggtgatattgcccaccctcgtccatgtttctacctccagaatggacctgccatctgtctatctggttgcacagaccaaaacctaggggtcatctcgatacttccttttcctcactgtcctc

SEQ ID NO: 411068 - DNA, 377 bp, Homo sapiens
gcattgcgccctgtcctgtcatgtgtcctcaccggggtatcggccgtcactcagctctcctgtgcccctgcgtctcaacctaggcgggctgggcggggcaggcctcctttgttctccacaatctactgtctccgagtgtacacgttgcgctgtttgtgtttgatccccctgacttgtagccagcttgtgtaagatcccttgcagaacgagaaagttaaaaacaagcccacccagtactcacaccatcaaatctgttatagagtgtacgactgtattaacacggaggcctgcctggctacttttttaacatattgttaagtaatattaaaatcatgtctttctttttgaaagatggaatacattagtacagcaggaga

SEQ ID NO: 411069 - DNA, 249 bp, Homo sapiens
ttatagtttcttggctggaaggcacaggatttggataaattgagtttatcctgtagacctcatctacacagtaaacactctcttagcccagaatcagtgttttctttaagtttagagagatgcttgtgtacagttctgtggcagtctccatctcatcctgaaaacactttatctattttaatatcccaagactgtctgctttcctgagtttgtaacacatgaagaagtcagatactcattaaaaaaaaa

SEQ ID NO: 411070 - DNA, 332 bp, Homo sapiens
agcactacattaaatatttgctgtattatttattgattactctccatggaccacgcactttatacacattacctcatttaagcgttccaaaaacctgtgagataggtattattagttccattttacctttgaggaaattcaagcccagaaagcttgaggaattttttttaatccctaaacgagtaggtgacaaagtagggatttaaactcaggcccaattctaacaactctgtgagacactcaaggaaggtcacaggcacccctgtgataagacctaggcctctttcatataccaacataagatatacttcgattttaaccagttgcacgca

SEQ ID NO: 411071 - DNA, 5373 bp, Homo sapiens
ccccgcgccagggcaagtccaccctcctggagatcttacagacggggagggccccccaggtggtgcatggagaggccaccatcaggaccaccaagtgggagctccagaggccggctggctcaagagccaaggttgagtccgtggagttcaacgtctgggacatcgggggaccggccagcatggccactgtcaaccagtgcttcttcacggacaaggccctgtacgtggtggtctggaacctggcgctgggggaggaggccgtggccaacctccagttctggctgctcaacatcgaggccaaggccccaaacgccgtggtgctggtggtcgggacgcacctggatttaattgaagccaagttccgtgtggaaaggattgcaacgctgcgtgcctatgtgctggcactctgccgctccccctccggctccagggccacaggcttcccagacatcaccttcaaacacttacatgagatttcctgcaagagcctggaaggtcaggaagggctgcgacagctgattttccacgtcacgtgcagcatgaaggacgtgggcagcaccatcggctgccagcgactggcagggcggctgatccccaggagctacctgagcctgcaggaggccgtgctggcagagcagcagcgccgcagccgggacgacgacgtgcagtacctgacggacaggcagctggagcagctggtggagcagacgcccgacaacgacatcaaggactacgaggacctgcagtcagccatcagcttcctcatagaaaccggcaccctgctccatttcccggacaccagccacggcctgaggaacctctacttcctcgaccctatttggctctccgaatgtctgcagaggatctttaatattaagggctctcggtcagtggccaagaatggggtgatcagagcagaagacctcaggatgctgctggtggggactggcttcacgcagcagacggaagagcagtacttccagttcctggccaagtttgagatcgccctgcccgtcgccaatgacagctacctcctgccccatctccttccatctaaacctggcctggacacccacggtatgcggcaccccacagccaacaccattcagagggtatttaagatgagcttcgttcccgttggcttctggcaaaggtttatagcacggatgctgatcagcctggcggagatggacctgcagctttttgaaaacaagaagaatactaaaagcaggaacaggaaagtcaccatttacagttttacaggaaaccagagaaatcgctgtagcacattcagagtgaaaagaaatcagaccatctattggcaggaagggctcctggtcacttttgatgggggctacctcagtgtggaatcttccgacgtgaactggaaaaagaagaaaagcggaggaatgaaaattgtttgccaatcagaagtgagggacttctcagccatggctttcatcacggaccacgtcaattccttgattgatcagtggtttcccgccctgacggccacagagagcgacgggacgccactcatggagcagtacgtgccctgcccggtctgcgagacagcctgggcccagcacacggaccccagtgagaaatcagaggatgtgcagtacttcgacatggaagactgtgtcctgacggccatcgagcgggacttcatctcctgccccagacacccggacctccccgtgccgctgcaggagctggtccctgaactgttcatgaccgacttcccggccaggctcttcctggagaacagcaagctggagcacagcgaggacgagggcagcgtcctgggccagggcggcagtggcaccgtcatctaccgggcccggtaccagggccagcctgtggccgtcaagcgcttccacatcaaaaaattcaagaactttgctaacgtaccggcagacaccatgctgaggcacctgcgggccaccgatgccatgaagaacttctccgagttccggcaggaggccagcatgctgcacgcgctgcagcacccctgcatcgtggcgctcatcggcatcagcatccacccgctctgcttcgccctggagctcgcgccgctcagcagcctcaacaccgtgctgtccgagaacgccagagattcttcctttatacccctgggacacatgctcacccaaaaaatagcctaccagatcgcctcgggcctggcctacctgcacaagaaaaacatcatcttctgtgacctgaagtcggacaacattctggtgtggtcccttgacgtcaaggagcacatcaacatcaagctatctgactacgggatttcgaggcagtcattccatgagggcgccctaggcgtggagggcactcctggctaccaggccccagagatcaggcctcgcattgtatatgatgagaaggtagatatgttctcctatggaatggtgctctacgagttgctgtcaggacagcgccctgcactgggccaccaccagctccagattgccaagaagctgtccaagggcatccgcccggttctggggcagccggaggaagtgcagttccggcgactgcaggcgctcatgatggagtgctgggacactaagccagagaagcgaccgctggccctgtcggtggtgagccagatgaaggacccgacttttgccaccttcatgtatgaactgtgctgtgggaagcagacagccttcttctcatcccagggccaggagtacaccgtggtgttttgggatggaaaagaggagtccaggaactacacggtggtgaacacagagaagggcctcatggaggtgcagaggatgtgctgccctgggatgaaggtgagctgccagctccaggtccagagatccctgtggacagccaccgaggaccagaaaatctacatctacaccctcaagggcatgtgccccttaaacacaccccaacaggccttggatactccagctgtcgtcacctgcttcttggccgtgcctgttattaaaaagaattcctacctggtcttagcgggcctcgccgatgggcttgtggctgtgtttcccgtggtgcggggcaccccaaaggacagctgctcctacctgtgctcacacacagccaacaggtccaagttcagcatcgcggatgaagacgcacggcagaacccctacccagtgaaggccatggaggtggtcaacagcggctctgaggtctggtacagcaatgggccgggcctccttgtcatcgactgtgcctccctggagatctgcaggcggctggagccctacatggccccctccatggttacgtcagtcgtgtgcagctctgagggcagaggggaggaggtcgtctggtgcctggatgacaaggccaactccttggtgatgtaccactccaccacctaccagctgtgtgcccggtacttctgcggggtccccagccccctcagggacatgtttcccgtgcggcccttggacacggaacccccggcagccagccacacggccaacccaaaggtgcctgagggggactccatcgcggacgtgagcatcatgtacagtgaggagctgggcacgcagatcctgatccaccaggaatcactcactgactactgctccatgtcctcctactcctcatccccaccccgccaggctgccaggtccccctcaagcctccccagctccccagcaagttcttccagtgtgcctttctccaccgactgcgaggactcagacatgctacatacgcccggtgctgcctccgacaggtctgagcatgacctgacccccatggacggggagaccttcagccagcacctgcaggccgtgaagatcctcgccgtcagagacctcatttgggtccccaggcgcggtggagatgttatcgtcattggcctggagaaggattctgaagcccagcggggccgagtcattgccgtcttaaaagcccgagagctgactccgcatggggtgctggtggatgctgccgtggtggcaaaggacactgttgtgtgcacctttgaaaatgaaaacacagagtggtgcctggccgtctggaggggctggggcgccagggagttcgacattttctaccagtcctacgaggagctgggccggctggaggcttgcactcgcaagagaaggtaattcctgtggaatgactgtcacacatcagagctggctggcccggggctgcagcctgacccctctgccatcggcctctagttctccaaggacctagaagacagatggagttctcccctgaactccttgctgctaagaagtgctgagaagttactcgcctggcggtggctccagggttctctggttctctggagcagagttctctgaataccccatcccccaactgctgattttacagccccagggaagacagtggtatcaggctgggagcggcctcctctggcctcccccatcagtttgcaggagcaggggtgcaggatcctgttctgagctgggtcaaacaaagcagggccgggccttcctgccatccccaggtctcagatggaattacactagaggccctccgctgggaagcacttgaggtagggcaggaggggggctgtgacccctgccctttccccgccagagacctcaggctctcagcacattccacaggctcctgagtccccgaggcctgggccagcttgggcaagccaagatcagatgtctctgtgttcgggaaggtctccgtgtgggaaagcccttgggggatcccgggtgaggagtgttgccccatccagagaatgaatgagttcctttaagtgccaccgccagcaagcccagaggcacacagtccgagtgcacccgcttagcctttacattcctctccaccgacaaaaggaaggggaaactcaatcagcaggacttcagaaagggccttgtgtttatagctttgtcaagtaaatttggacgcagctggagcacaggccctgtttgtttgcacataataatcttgtttatcactttaaaaaattcagtaatatctcagcagtcaggcttctggttgtgaaatcacattgtatgggatttataccaaattatgtatttgctaaacattcactgcacacgtgtacagcggagtacgaaaaggaacgttgtccacaggggatttatggatacaacagcaaacattttataaactatgcacatgcattacacacatgcacacacatatgcacacacatgtgcaaacatagccacttttttgtcaagagttaccctttggggctccttaaaccagaatgggagtttgaaagagagatcatactccagctgaagtttgttgacccttttctaaaattaaaaagatcaaatttagtatttgctggatatgcagggagatgagactcttttaatctcaaaataaacagattctttcaagaac

SEQ ID NO: 411072 - DNA, 5521 bp, Homo sapiens
ccccgcgccagggcaagtccaccctcctggagatcttacagacggggagggccccccaggtggtgcatggagaggccaccatcaggaccaccaagtgggagctccagaggccggctggctcaagagccaaggttgagtccgtggagttcaacgtctgggacatcgggggaccggccagcatggccactgtcaaccagtgcttcttcacggacaaggccctgtacgtggtggtctggaacctggcgctgggggaggaggccgtggccaacctccagttctggctgctcaacatcgaggccaaggccccaaacgccgtggtgctggtggtcgggacgcacctggatttaattgaagccaagttccgtgtggaaaggattgcaacgctgcgtgcctatgtgctggcactctgccgctccccctccggctccagggccacaggcttcccagacatcaccttcaaacacttacatgagatttcctgcaagagcctggaaggtcaggaagggctgcgacagctgattttccacgtcacgtgcagcatgaaggacgtgggcagcaccatcggctgccagcgactggcagggcggctgatccccaggagctacctgagcctgcaggaggccgtgctggcagagcagcagcgccgcagccgggacgacgacgtgcagtacctgacggacaggcagctggagcagctggtggagcagacgcccgacaacgacatcaaggactacgaggacctgcagtcagccatcagcttcctcatagaaaccggcaccctgctccatttcccggacaccagccacggcctgaggaacctctacttcctcgaccctatttggctctccgaatgtctgcagaggatctttaatattaagggctctcggtcagtggccaagaatggggtgatcagagcagaagacctcaggatgctgctggtggggactggcttcacgcagcagacggaagagcagtacttccagttcctggccaagtttgagatcgccctgcccgtcgccaatgacagctacctcctgccccatctccttccatctaaacctggcctggacacccacggtatgcggcaccccacagccaacaccattcagagggtatttaagatgagcttcgttcccgttggcttctggcaaaggtttatagcacggatgctgatcagcctggcggagatggacctgcagctttttgaaaacaagaagaatactaaaagcaggaacaggaaagtcaccatttacagttttacaggaaaccagagaaatcgctgtagcacattcagagtgaaaagaaatcagaccatctattggcaggaagggctcctggtcacttttgatgggggctacctcagtgtggaatcttccgacgtgaactggaaaaagaagaaaagcggaggaatgaaaattgtttgccaatcagaagtgagggacttctcagccatggctttcatcacggaccacgtcaattccttgattgatcagtggtttcccgccctgacggccacagagagcgacgggacgccactcatggagcagtacgtgccctgcccggtctgcgagacagcctgggcccagcacacggaccccagtgagaaatcagaggatgtgcagtacttcgacatggaagactgtgtcctgacggccatcgagcgggacttcatctcctgccccagacacccggacctccccgtgccgctgcaggagctggtccctgaactgttcatgaccgacttcccggccaggctcttcctggagaacagcaagctggagcacagcgaggacgagggcagcgtcctgggccagggcggcagtggcaccgtcatctaccgggcccggtaccagggccagcctgtggccgtcaagcgcttccacatcaaaaaattcaagaactttgctaacgtaccggcagacaccatgctgaggcacctgcgggccaccgatgccatgaagaacttctccgagttccggcaggaggccagcatgctgcacgcgctgcagcacccctgcatcgtggcgctcatcggcatcagcatccacccgctctgcttcgccctggagctcgcgccgctcagcagcctcaacaccgtgctgtccgagaacgccagagattcttcctttatacccctgggacacatgctcacccaaaaaatagcctaccagatcgcctcgggcctggcctacctgcacaagaaaaacatcatcttctgtgacctgaagtcggacaacattctggtgtggtcccttgacgtcaaggagcacatcaacatcaagctatctgactacgggatttcgaggcagtcattccatgagggcgccctaggcgtggagggcactcctggctaccaggccccagagatcaggcctcgcattgtatatgatgagaaggtagatatgttctcctatggaatggtgctctacgagttgctgtcaggacagcgccctgcactgggccaccaccagctccagattgccaagaagctgtccaagggcatccgcccggttctggggcagccggaggaagtgcagttccggcgactgcaggcgctcatgatggagtgctgggacactaagccagagaagcgaccgctggccctgtcggtggtgagccagatgaaggacccgacttttgccaccttcatgtatgaactgtgctgtgggaagcagacagccttcttctcatcccagggccaggagtacaccgtggtgttttgggatggaaaagaggagtccaggaactacacggtggtgaacacagagaagggcctcatggaggtgcagaggatgtgctgccctgggatgaaggtgagctgccagctccaggtccagagatccctgtggacagccaccgaggaccagaaaatctacatctacaccctcaagggcatgtgccccttaaacacaccccaacaggccttggatactccagctgtcgtcacctgcttcttggccgtgcctgttattaaaaagaattcctacctggtcttagcgggcctcgccgatgggcttgtggctgtgtttcccgtggtgcggggcaccccaaaggacagctgctcctacctgtgctcacacacagccaacaggtccaagttcagcatcgcggatgaagacgcacggcagaacccctacccagtgaaggccatggaggtggtcaacagcggctctgaggtctggtacagcaatgggccgggcctccttgtcatcgactgtgcctccctggagatctgcaggcggctggagccctacatggccccctccatggttacgtcagtcgtgtgcagctctgagggcagaggggaggaggtcgtctggtgcctggatgacaaggccaactccttggtgatgtaccactccaccacctaccagctgtgtgcccggtacttctgcggggtccccagccccctcagggacatgtttcccgtgcggcccttggacacggaacccccggcagccagccacacggccaacccaaaggtgcctgagggggactccatcgcggacgtgagcatcatgtacagtgaggagctgggcacgcagatcctgatccaccaggaatcactcactgactactgctccatgtcctcctactcctcatccccaccccgccaggctgccaggtccccctcaagcctccccagctccccagcaagttcttccagtgtgcctttctccaccgactgcgaggactcagacatgctacatacgcccggtgctgcctccgacaggtctgagcatgacctgacccccatggacggggagaccttcagccagcacctgcaggccgtgaagatcctcgccgtcagagacctcatttgggtccccaggcgcggtggagatgttatcgtcattggcctggagaaggattctgaagcccagcggggccgagtcattgccgtcttaaaagcccgagagctgactccgcatgggattatgccagtctcctctgtgaaggtatgctgggcagggtggcctgtccgggacatggtctacatggctgcagtgatgtgaggctggcgccagctgcagctccccacagtgtttacaccccgcactttgactaccgagccccacacgggtgctggtggatgctgccgtggtggcaaaggacactgttgtgtgcacctttgaaaatgaaaacacagagtggtgcctggccgtctggaggggctggggcgccagggagttcgacattttctaccagtcctacgaggagctgggccggctggaggcttgcactcgcaagagaaggtaattcctgtggaatgactgtcacacatcagagctggctggcccggggctgcagcctgacccctctgccatcggcctctagttctccaaggacctagaagacagatggagttctcccctgaactccttgctgctaagaagtgctgagaagttactcgcctggcggtggctccagggttctctggttctctggagcagagttctctgaataccccatcccccaactgctgattttacagccccagggaagacagtggtatcaggctgggagcggcctcctctggcctcccccatcagtttgcaggagcaggggtgcaggatcctgttctgagctgggtcaaacaaagcagggccgggccttcctgccatccccaggtctcagatggaattacactagaggccctccgctgggaagcacttgaggtagggcaggaggggggctgtgacccctgccctttccccgccagagacctcaggctctcagcacattccacaggctcctgagtccccgaggcctgggccagcttgggcaagccaagatcagatgtctctgtgttcgggaaggtctccgtgtgggaaagcccttgggggatcccgggtgaggagtgttgccccatccagagaatgaatgagttcctttaagtgccaccgccagcaagcccagaggcacacagtccgagtgcacccgcttagcctttacattcctctccaccgacaaaaggaaggggaaactcaatcagcaggacttcagaaagggccttgtgtttatagctttgtcaagtaaatttggacgcagctggagcacaggccctgtttgtttgcacataataatcttgtttatcactttaaaaaattcagtaatatctcagcagtcaggcttctggttgtgaaatcacattgtatgggatttataccaaattatgtatttgctaaacattcactgcacacgtgtacagcggagtacgaaaaggaacgttgtccacaggggatttatggatacaacagcaaacattttataaactatgcacatgcattacacacatgcacacacatatgcacacacatgtgcaaacatagccacttttttgtcaagagttaccctttggggctccttaaaccagaatgggagtttgaaagagagatcatactccagctgaagtttgttgacccttttctaaaattaaaaagatcaaatttagtatttgctggatatgcagggagatgagactcttttaatctcaaaataaacagattctttcaagaac

SEQ ID NO: 411073 - DNA, 1993 bp, Homo sapiens
acccctaacaggctttggagccagtaccaggtgcacacacaaataccacagagaacttctgagaggctgtgcccccagatcccaatgttggttttctctggggaatagattacgggctattttctgtttcctctttagactagtctgtctttttcaacgtttctacaaagagcagaaatccataaacaacccaccagaacgtgtcaatccatgtaactttccaagacccataggggatccccaagtccaagtgcatcctcatgggaatggcttgggaaatgccagacactttccagcctgggtctcacagtggacctgtctgcctctgcaggaccagaaaatctacatctacaccctcaagggcatgtgccccttaaacacaccccaacaggccttggatactccagctgtcgtcacctgcttcttggccgtgcctgttattaaaaagaattcctacctggtcttagcgggcctcgccgatgggcttgtggctgtgtttcccgtggtgcggggcaccccaaaggacagctgctcctacctgtgctcacacacagccaacaggtccaagttcagcatcgcggatgaagacgcacggcagaacccctacccagtgaaggccatggaggtggtcaacagcggctctgaggtctggtacagcaatgggccgggcctccttgtcatcgactgtgcctccctggagatctgcaggcggctggagccctacatggccccctccatggttacgtcagtcgtgtgcagctctgagggcagaggggaggaggtcgtctggtgcctggatgacaaggccaactccttggtgatgtaccactccaccacctaccagctgtgtgcccggtacttctgcggggtccccagccccctcagggacatgtttcccgtgcggcccttggacacggaacccccggcagccagccacacggccaacccaaaggtgcctgagggggactccatcgcggacgtgagcatcatgtacagtgaggagctgggcacgcagatcctgatccaccaggaatcactcactgactactgctccatgtcctcctactcctcatccccaccccgccaggctgccaggtccccctcaagcctccccagctccccagcaagttcttccagtgtgcctttctccaccgactgcgaggactcagacatgctacatacgcccggtgctgcctccgacaggtctgagcatgacctgacccccatggacggggagaccttcagccagcacctgcaggccgtgaagatcctcgccgtcagagacctcatttgggtccccaggcgcggtggagatgttatcgtcattggcctggagaaggattctgaagcccagcggggccgagtcattgccgtcttaaaagcccgagagctgactccgcatggggtgctggtggatgctgccgtggtggcaaaggacactgttgtgtgcacctttgaaaatgaaaacacagagtggtgcctggccgtctggaggggctggggcgccagggagttcgacattttctaccagtcctacgaggagctgggccggctggaggcttgcactcgcaagagaagcttgcagcacagtgcgtcaggcctctgagcccaagccaagccatcgcatcccctgtgacttgcacgtatatgcctagatggcctgaagtaactgaagaatcacaaaagaagtgaatatgccctgccccgccttaactgatgacattccaccacaaaagaagtgaaaaaggccggtccttgacttaactgatgacattatcttatgaaattccttctcctggctcatcctggctcaaaaagctcccccactgagcacgttgccacccccactcctgcccgccagagaacaaaccccctttttcctttacctacccaaatcttataaaacggcctcacgcctatctcccttcactgactcccttttcggactcagcccacctgcgcccaggtgaaataaacagccttgttgctcaca

SEQ ID NO: 411074 - DNA, 671 bp, Homo sapiens
ttttttttttttaagaaacaggttcttgctatgttgcccaggctggagtacagtggctaatcacaggtgtgatcatagtgcatagcagcctcagactcctgggttcaagcaatcctcccacctcagcctcccgagtagctgagagtagaggcgtgtactgctgtgcctggctctagactttttcctgaactcctctcctgtactttatttgggttagaagcagcatggggagacttctgcagcatggctctttctgggggctcaaaagcagaagttcctggtgagctcacgtggtcatggaggacttcctggaggaggtgatatttttgctggccttgtggggaaggaagaaaacatgtcagaggagagctgaatgagaaagtacaggagcagaagcaagggccaggtccagcacgtaaaggggaagacagaggtaggcagggaaagtttggatcatattcttcaggcactggggagccactgaaggttgttcggctgggttagggctgagttggggtagagtctcctggggtgtgtgtgtgtgtgtgtgtgtgcaggagagggaacaaggagtgaagtaggaaattcctgggggtgagtaagctctcttcatatagaggtccttgggcccaggctgagaccctcggctggcccagggaaggaattgcccg

SEQ ID NO: 411075 - DNA, 497 bp, Homo sapiens
ctagtggtgtgtaaggtgcttgtgttgtgaagagtaattttacttgtgtttaaatttgaaaggtgatgcatataaccctgctttccccccatttctctttcaatgcaagttaacttacacctccctttaaagaacagcatgccaagaactggctgataaaatgaaatatgttcctaccctggtggctgaggacagccaactccttccagtctagatgatgctgggagaagtacttgatgctgctacctctgtgagctacttggtataccagtcagttgtaccatggtccccagagggacctgcagaaagctggaagtggccaggctgacttggtgggtcaattgaaagtgtgtaaagtctgaatgctcttggtatatggttttgccatttttgtatggtgtaaatctataactattgttttaacatttattttggaacagtcccttttgtcaggaaatgagctaaaaaagtaaagtttaataaaaaaataagtagca

SEQ ID NO: 411076 - DNA, 335 bp, Homo sapiens
taaaatagtcagattctagaggaagtagccagtacaagccggatagagcaaatatgattaactatttttgccaatctttggtgacagtggtgcataggggcattagagaagcagcaggtataatctttgaatggatctgggcctttagtgttaaggagtccagactagaaaagctaggtgaactgtgaaaaaaggataagtagggtctaagagaagatccaccaggtaaacctagaataccagaggaattacctaggatgataggaatgtaacatttcagagctgtgcttaggaaagaagtatatttttcactgaacaagcaatgtttacaattg

SEQ ID NO: 411077 - DNA, 378 bp, Homo sapiens
taatacctacctcacagggttctgtgaggctccagtgagctaaaagcaacataatgatgacgatgaccaatgatgatgatggtggtggtggtgatggtgatggtgatggtgatggtgatgatctgtctccacagcagtcaatctctttgaacgaattacaattgtggttgttgccaggaagttaggaaccacctgctgtctgtaagctcaagcccaggtccaactttgtgtggggcttagagctgatgaacaggtagcagagcacacaggcggtaacaatgaaggcgagaagaaccactgctgctacggacaggcctatgagagcgccaatgctgagccaccacatgtagctgtgctcgtaggggaagaagctgtgcg

SEQ ID NO: 411078 - DNA, 464 bp, Homo sapiens
tttggtatggagacatttattgaatgtttatgggactggtccacataggtcagggttgggtacagaggcttcctcagggctgcctggaatgtcactggtggtcactgtggccatgaagcaatgatggaggaggcgtttggagttcacagcctgcccctcattgctctccagctgcgggttcaagcaggagtaactctgctggagagggctcacttttggcacttctgccgccatgcctgtgttcacaccttggcagtcaggagaaacctcctcagggcctgctgtctgtaagctcaagcccaggtccaactttgtgtggggcttagagctgatgaacaggtagcagagcacacaggcggtaacaatgaaggcgagaagaaccactgctgctacggacaggcctatgagagcgccaatgctgagccaccacatgtagctgtgctcgtaggggaagaagctgtgcg

SEQ ID NO: 411079 - DNA, 420 bp, Homo sapiens
acttatattccgagcaccgatcatgaccctactaatcaaagcaggatgcagcaaagacaccagccgaaaccagcggatagcaacaaaagtgaccctcttgccctcactgctaataagcataaagacagtcccaccagtgccatgacagtttacaaatgccatggcaacaacccagaagtttccttatatggttccaggaactcccccaccccttttctagaaaattctgaataacctactccttaaatagcatataacgaagactgtgtataaatatagctagccagcaatccataaggactgctgctgctgctgctgctgctgctctgggcagctctgcctatgaaagaaccctgctctggggagcagccactttgccatacactgttgctctaataaacttgccttctttcattgcca

SEQ ID NO: 411080 - DNA, 572 bp, Homo sapiens
cagtttagggcgttgaaacttgagctcgttctcatacatagaaaaatgacttttccagctatatccctaagtgtatcattgctatagtttcttacctatctcctagaataacttctgttccattattaataataatattgttactttaagtcacaggaatctgtgttgaaatgactgtccctttatctagttcccatcagaaagtatttactgagttctctttggtggcatattactctactagattaacagaataaaataatgaagaataatcaacatattttctcctctctaggcattaacggtttaatagctaagatagttatgtaaattcattaaagtaattttcaggatcatatgtgtactgagcttttacaagatctcttatatactttagtttcttatgctatcctgggaaagtttgtatttaaagatttttacctttttgtcccacaaattcacaaatagcgtacattagttatgtgcagtttttttgtgtataaataagacctcattgaagctgggaaaaatattaatatccgctccccctaccacccttataaaaaaaaaaa

SEQ ID NO: 411081 - DNA, 452 bp, Homo sapiens
gttctggctctgttacccaggctggagtgcagtggtgtgattgtggcacactgcagccttgaccaacctcctgggcacaagtaatcctgcagtctcctgagtagctgggactacagcacacacacccagctaattaatttttttttctttttttagcggggggcggtggggtcggggaggtgccgggtgcagtggctcacacctgtaatcccagcactttgggaggctgaggcgggcggatcacctgaggtggggagttggaaaccagcctgaccaacatggagaaactccgtctctactaaaaaatacaaaattacccgggcatggtggtgcatgcctgtaatcccagctactcgggaggctgaggcaggagaatcgcttgaacctgggaggcggaggttgcagtgagccgaggtcacgccactgcactccagcctgggcgacaagagcaa

SEQ ID NO: 411082 - DNA, 412 bp, Homo sapiens
gatgttttattggttttattttgatctccctggaattaaagttagaaatggaagatgctccatgctaacatggcatgtttgccctggcataattaatagttgtttttatttttgtttaatacctagttaactcttgattctttgggatcaaattattgaattctgggttgtccaaggcttttttttttctgcccccagcctgcctcttgtcagattgagtaaaggaagataatgacaggatatgcaaatcagccagtttggctatggttaacactgctgggtcaaactataaaaaataaagattgagaattatctgagtattttgtttatacagactttcagttacctatattaatgtgggcattagtcaagagttaactatgtttgaatttactcatttcttaaaaaaaag

SEQ ID NO: 411083 - DNA, 435 bp, Homo sapiens
tctcggcctctcctcttaactcttttgctaaaatgctttaccaaattatttggcactaagaaaatgatttcctgactgttgctagaggccctgctagcagcttggaacacataatcattctcatctagcagaatataattattggtataattctgagctactgtaatttcattctactaaaaaatcgcagcatgaatttgtaatatcaggaagactttggggctagagaaaataaaatgtttggaaaaatgctgccatatgtacaggattcaagtggcatctgcgtgtgctcattacaccacatcattctgtatctgtccaatttgttcctcaggtaactcaaatgactcatggggttggaactatgatgttctgaaggccttcagtttttgcttccagcttatgcccaataaagcatttttttattattctgcg

SEQ ID NO: 411084 - DNA, 333 bp, Homo sapiens
atggaattggtctgactccatattactccttacttagatgtaaaacaaatacacatgatttttcatcctagaagaaagtctaaacgaactcttgacaaaaacagccaagttcagagaaagctgactctgttggtgtaagaagcgttttttcaggctgggctgctggctcatgcctgtaatctcagcactttgggaggccgaggcaggtggatcacttgaggtcaggagttcgagaccagcctggccaacatggggaaacctcgtctctactaaaaatagaaaaattagctgggcgtggtggcgcatgcctgtaatcccagctacttgggagac

SEQ ID NO: 411085 - DNA, 482 bp, Homo sapiens
tttttataccttgttttatgggcagcataagttttgtgcatcacaagtatcaactatcacataaaaccagttgaatgttattcacagatttggaatctatttgtgtgaggataattgtacaagaatgtgaagatgaataatgtagcatacagttgcataattttagatttctgttttactctctttggcctgtttgcaaaaataatccctcctttaaaaatgaattaacaacacataaattacaagcagtgaaaatccatagattaaaaaaagacttaaaatacacagttgcaatgtctggcccttaagattatgatatgaacaagaaaactataaaacatgattttatatgtcgggtgcagtggctcacgcctgtaaccccagtactttgggaggccaaggcaggcagattgcttgagcccaggcattcaagaccagcctgggcaacatggcaaaagtccatctatctctacaaaaaaaaa

SEQ ID NO: 411086 - DNA, 349 bp, Homo sapiens
attttaacttatggccaaacgtggctggtgcctactctattggacagtatagctctagggaaaccttcattaatccagacctcaattcccacaggtaaagttatgagattagaaatcacttttaagaatcacatccacgaagaaacaaggcatcttgaaaaagagcaggcagaaacagcatagtcggatcagcaaggacttcagaaattggaattgacagatgtagaatgtaaaacaaaagcagaaatagaaaatatgactaagagcaagacaccatacaaatgaccaagcaggctgggcatggtggctgacatctgtaatcccggcactgtgggaggctgaggcagat
